United States Patent Application Publication US 2015/0376612 A1 - sequence listing, part 20

SEQ ID NO: 50739 - DNA, 1060 bp, Homo sapiens
cagtagtaatatcccactttcatttctgattttagtaacttgagtctattctatgtttttctttttttttttttttttttttgagacggtatcaccctgttgcccaggctggagtgcagtggcacagtcacagctcactgcagcctaaactcctgggcttcagcgatctttctgagtagctgggactacaggtgcatgccaccacacccagctaattttttaaaaatttttgcagagattgggtctccctatgttgcccaggctagtcttgaactcctggcctgaagcaatctttccatcttggtcttccgaatttctgggattacaggcgagagccatcatacctggtctattagtgatttctaattttactccatgtggccagagaagatagtatatgatttcagtcttgttaaatctattgagagttgtgtggcctaacgtgatttatcctggagaatgtttcatgtggagttgagaagaatgtgtattctactgttttgtgtggaatgttctgtatatgtctaccgagccaagtaggtttgtagtgttgttcagtttttctatttccttattgatcttctgtctagtattatccattattgaaagtggggtattgaagtcttcaaccattattgtagaactgtctatttctgccttcaattctaccagtttttacttcatatatagtgggactgttaggtatgtctgtttatgattattaataccttacccctatatcaatatatattattgttgtctcttgtaataatacacttttttacttaaaagtctattttatctgacattagtggagcaaccctagccctcttttggtttggtttgcttgcaatgtctttttccatcctttctctttcaacttgtttgtgtctagaacctaaagtgagtttcttgtcgacaatttatagttagatcttggttttaaatccattctgccaatctctgacttttgaaattggagagtttaatttttttacatctaaaataattactgatgaggaaggacttctgtcattttgctatttgttttctatgtatc

SEQ ID NO: 50740 - DNA, 1034 bp, Homo sapiens
cttgagtgtttcgtaggcatcatatagttgggaagtgcttttttaattcattgagccattctatatattttttgtcaaataaattaatcaattttcattcaaggtaatttcctttgctactttcttaatctcttgttttcctcttttgtgattaggtgtgtttctctagtgttatgctttgattccttactacttatcttttgtgtatctactagaggattttgctttgtggtcactataaggtttatataaaataacttcgcaaggtttttggttggctgggtattttttttctttcttcacgactttgaatatattattccattagctcctggactgtaaagtctatgctgagaaatctgctgctagccttattaaaatcccatatatattacatgcttttttttttaaatttttgctttcagaatcctctctttgttcttgctttttgactgtttgattataatgcgtctttaagtaatcttgtttgtattaaacctgattgaagacttttgagcttcctatacctggatattaatatctttcctcagatttggaaagtttattgctcttactttttaaaataagttttctgatctttgtcactctcttttccttcttaactcctataattcaaatatttgctcttttgatacttttccataattatgatgataatcttccttcttttatctttttttattgactatatttttaaataacctgtctttgagttcacagatttgtttgcatgatcaagactgttaatgttttctattttattttacaatttttattttatattttttagctcgagaattttcctttgatttttccatcccttggtatccatggggaattggttctaggacccttagagataccaaattctgtggatgttcaaatctcttacatgaaagggcatagtgtttgcatataatctatgcacatcctcccatatactttaaatcatctctagattacatataatggctaataaaatgtaaatgatatgtaaaaagttattatactgt

SEQ ID NO: 50741 - DNA, 1034 bp, Homo sapiens; identical to SEQ ID NO: 50740

SEQ ID NO: 50742 - DNA, 1025 bp, Homo sapiens
ttgttttggatactgtagtcttgtcatatgctttgaagtcagatagtgtgacacctccagctttgttctttttgcttaagattttcttggctatacgggctcttttttggttctatgtgagttttaagatagtttttttctaattctgtgaagaatgtcaatggtagtttaataggcataacattgaatctataaatcactttggacagcatggccattttcatgatgtcgattcttcccattcatgagcagggaatatttttccatttttgtatcctctctgatttccttgagcagtgatttgtagttatccttgaagaggtccttctcttcccttgttagttgtattcctaggtattttattctctttgtagcaattgtgaatgagagttcatttgtgatttggctctctgcttgcctgttgttggtatataagaatgtgagcaatttttgcacattgatttttgtattctgagacattgacgaagttgcttatcagtttaagaagctttgggcctgagacaatggggttctctggatacaggatcatgtcatctgcaaacaaagacaatttgacttcttttctttctatttgaatacactttatttctttctcttgcctagttgccctggccagaacttcgaatactatgttgattaggagtggtgagagagggcatccttgtcttgtgctggttttcaagggaaatgcttccagcttttgcccattcagtatgatcttgtctgtgggtttctcataaatgtctcttattattttgaggtatgagccatcaatacctaactgagagtttttaacataaagggatgtcaaattttatcaaaggccttttatgtatctattgtgattatcacttggtttttgtcttcagttctgtttatgtaatgagtcacatttattgatttgcttatgttgaaccagccttgcatcttggggatgaagctgacttgatcgtggtagataagctttttaatgagctgctagattcagtatgccagtattttat

SEQ ID NO: 50743 - DNA, 1047 bp, Homo sapiens
aaatggtaggggctaaagttagagcagcagcctttcttgccttggcaaataatctacaagtgatttgcaatttgttggaaagtaactggtccatgcgggccatttcctcttttaaggaggtactttagccaagtatgggcagacatcctagtagcctttttttttttttaggacaattatgtaattgatttatttctaccctactatgatccaaaaaggatttatgaaaaaaaaaaaaacatagtacagtatctttaaatgagaaaatttgtttctgggtgaaattagtaacctaaatgaagctattgccccaaaatgtcatgtacaagtgggccatggagaaactggcaggccacaaagagaaggtaatgtggttagttataggaactagtgtccatcaaatataaagctagttgcagcagagaagaatgtttcctggcaccgaggcctgaaagaaacttctttgcattcacaaagcagtcatgtcttttcagtggataaaacaaaggaatgtgtcttttaaatggtcttgagtattacccgatggccaacaccttagttcattctagtaaggttatttctacaatgacaccggaacatgcggtccaggcatgcaggtctctgatgatttgtttcagtccaggaaaatatttttaaatatttgggacagggtttgtaaactgggatttattatagccttgttttttgtaagtatgtttgtaaagattaggaaactcatgcgactgttgtttggttcccataatacaagtaatatgaacaagacctctttagtgtaaaagctttgcctgccctttgtttcatttttatggatggtgatctctaaggctgcctcttagatagaatgaagcttattatactgtaacttcaatattctatctcaatacttatcagaaatgtggtttaaatgcttaagtttttgtttgtttctgttttttttgaaacagggtctcactgttgcccatgctggggtgcagtggtgcgatcttggctcacggcagcctccacctcacaggctcaagagattct

SEQ ID NO: 50744 - DNA, 1839 bp, Homo sapiens
tctccctattaaaagaaaaacaaaaagcccacctttcatatcttcatgaggaatgagccagccattgtcactgacaactttcacagtgattttatatatctctgtttactcagtacccaaatattattcttttgtatgtgaaggttatgctacagatttgagtttttcttgcactgaccatgaatttgtattttacccctctgtgtaatctcttaggaacaaagggatgacaaaactggtcagggttagatatttggctcgtggtcttatagcaaaacttctagattcagatgttcttttaaaagtatgtctagctggatgtccatcctgttgaattcctcattgacaactttgtacgatactttcttcttgggtagactcttaattttgtgagactctggttgatagtttcttttcttttgagacaaagaagtctcgctgttttgcccaggctggagtgtaatggtgcgatcttggatcactgcaacctctgccttccaggtgattctcctggtgattcttcaagagattctcctgcctcatcctcctgagtagctgggattacaggcacgcaccaccatacctggctaatttttgtatttttagtagagacaaggtttcaccatgttggccaggctggtcttgaactcctgacctcaggtgatccacctgccttggcctcccaaagtgctgggattacaggtctgagccactgtgctgggccatctggctgatagtttctttttttttttgtttgtttgttttgagatggagtctcactctgtcgcccaggctggagtgcaatggtgcaatcttggttcactgcaatctctacctctcgggttcaagcgattctcctgcctcaccctccctagtagttgggactacaagcacgtgccaccacgcctggctaatttttgtatttttagtagagacggggtttcacaatgttggccaggctggtcttgaactcctgacctcaggtgatccacctgcctcggcctcccaaagtgctggcattacagacgtgagccactgtacctggccgatagtttattttaaaacaaaaaaaaattttaaatggaaacggggtttcgccatgttgcccaggctggtctgaaactcctggactcaagccatctgcttgacttggtctcccaatgtgctgggattgtaggcatgagctgccatgcctggctgatagtttctttttctggctgttgactgctactttctatttggatacattccagggttggtcaggtctgtttttcttccttttctttaagaatgttatcatatctgattggaaccgtctatttacaggctactttgaaatctgctgccctcccccactcaccttttattttctattctatagaaaggacagctcttacatatgtcatatttccatgattgaaagatgtcgttacttgtaagatttcattattgtttttagaacagtttttttaaggagggttggtagagaaatgacagtgatttgtaagtatcatcctgattttcacaaacattaaaataatcacattagaattaagatacaaggccaggcatggtggctcatgcctgtaatcctaacactgtaggaggctgaggcaagaggattgcttgaggccaggaatttgagatcagcctgggcaacatagtgagaccccatttctaataaataaataaataaataaataaataaataaataaataaaacttagctaggcatggtagtatgcacctgtagtaccagctccttgagagtctgaggcaggaggatttcctgagcacaggagttcgaggctgcagtaagtcatgattatgccactgcac

SEQ ID NO: 50745 - DNA, 2048 bp, Homo sapiens
acaaggaactaggaagtatgtaaaagtagaaaggcaccttagctcttctaccatactggaaactgttatggacaaaaatgtatgacatgaagttaatagggagcacttgtcctaaaaaaaaggtaaatataaaataatgtaaagtgagttgcagagttgagggatggttgagtgctgttgactttggccatctttgaaggctaagtaggattttaagaagttaagataaaaatgaacaaccattctagtaatgagaactgctggaaaggacagatgttagggagcagtgatagccacagcatagaatgcattgggttactatagcaggatataattgtgaaaagatggtggagagtttggaatgcctaaactaaggggtatgcatttaattcattaggcaatgagaaactctgtttttatgcaaaagagtatttgatcagaactattctaaagaaggaattgaattgggtacattctgaactaagaatttctgattgtcagttgagctatgtgactttttatgtcaagaatgaagtatttgaacattaatgccagaagtaagttctagaaaaatttctcaattcctcacagtacagaaagtaagcacagttcaaaacttcattattaataagggttgtgtgtgtgtgtgtgtgtgtgtgtatttttttttttgcttttattgggaaaaattactacttagagaagtcttctttgagtattgcagcaatatttcctttgtcttaatcattttcataaataatgttaagatatgaataaacctcacgattagaaaaatcttgatgtcatttaaggcattctagccagcaagagtatcttttagacaagtatttttatgactatcgttctcttgctctttattaataagcattttgtctatttcagtttatcaacttttaaacattgaaattttaaagaatctacttctgcattgctatggcagtatttctgagccaactgaattgaaaatgtttggtggtgttaaaaaataagtgtttaattctcaaactgatggttttcatttttcatgtattcctttgaataccaaaggatttcttcatgtaaaaatatttgacttttgactcactattctatttgttcctaaggtgtatctagcattgtgtagttatgtaatgagttatattcagtattctgctgcataatacttttaatgtcttaaattaaacataggcttgtagcacagatataaatgccgtaaggttaggtatctgattatttcctgactacttcctaaatattttatgttacagcatatttccatatttacaactcacctaagaagggttatctctcaattatttagttagaatatccttgatgattggctgttttattgcgtatagcccttttggcagagaaagaataggcagaggagaatattggttcattattttttagtcttttgaattgtttagtcatcctcagctgactagatggctttctgaggtatttagaaccaggaagacaaatttcacagttaattgtgattattttgatagaaattggagtgctttcagaagtagagaacatgcagcctttacatttgtaaaaataatttgagataatctttgcatggttcacactgaggcagaaaagaattattagcaaaatcatagctaggttttatttttatacttttgcccattgccattattgactgcctatcggtggatggtaagactatttaaaatttccatgattgtgtagaggtgtttttttctttttctttttttttttaaacagtagagaaactccagtcactattgttcatatatggactcttgtaatggtggttataggtctttacaatagagctataaggaatactctagcttgtgaatttactaatgagtctcagttgaggcacaaatgaactgatggagtttaaatggtgatttttataaggccaagaattgaagcctttgtataatttgtgccatgcccttttattttacctcttgtaatccagatagctgaccagtttttactttgggtataattcccaattg

SEQ ID NO: 50746 - DNA, 1017 bp, Homo sapiens
ctccatatttaattttaattctaaagtcatctaatttcatggaatctttgaatttgcagtacgttgaacttttaaaaaactgtaagttattaattgttcatcaagagcactgtggtggaatatcgtagttgatttctttttctttctttttttttaatgctttctttgtgtgtgggaggtgtgagattcaccatgataggcactttgcagaaaaaaaaagtgattactcttatatattttgttttcttgttaatacaatgccactgaatttttcagctaggatgtgtatattcatattagagttaaaaataaagtaaaatgtgaatcctcccaattaaagaagaactatgaaaaatataaggcaatgttgttcttccacagtgacctccagtattttaaattttttgtggagaaaaaaatgttttgctttcttaaacctcttaactatagcttaagtagagagatatgaacaatgtggcattgacatttatttttaaattctgagcagagaaagatttttatttcttacattgagtacatttaatttagtttttaacattccaattccattacatgtttttttttattgttgatattcatattgataatgacatcatgaaatttatcctcacaagaagtagctggtttatttccaggttacagccatacttcccaaagttcctctgggttctgagaactatgccagctcacctgtcatctccattcattttctacaggacagtctcatcgaactcaaggaatcttcagcaaaggtttgagtcttttaaaatcatcatgcctaagtaaaccaaatgttctttacttattttatttagtagatgtcctcaccctagtacattcagtaagctgagatcagtgggataaagtactctgcttacattgaataaccttcaaaaatattaaatgttaaaactgaaacaacagatgacagtggtcccttttaatgagattgttataaaatgtgtgtaatgtggcaacatttctatcatctctcct

SEQ ID NO: 50747 - DNA, 1032 bp, Homo sapiens
ccaccatgcgcagctaagttttttgtatttttagtagagacggggtttcaccatgttgaccaggctggtctcgaactcctgacctcaagtgatccaccctcctcagcctcccagagtgctgggattacaggcgtgagccactgcacccgaccattacttcttcctttttccttgtcttaaagttgtcctttagttttcaaaggactcccccttagttctagtatttttgaagttagtaagaaaccctttatgatatattttatcatatatcaaaggatatattttatgattatttgtgttaaaatcccatgtttttattcttaagcaacaaagctgttaaagaaaatgacaaagaaaaagggaaagagaaagaaaaagagaaaaaagaaaagactccagctactactccagaggccagggtacttggtaaagatggtaaagaaaaaccaaaggaagagcggccaaataaagatgaaaaagcaagagagaccaaggaaagaacgccgaagtctgacaaagagaaagaaaaattcaagaaggaagaaaaagctaaagatgagaaatttaagaccactgtccccaacgcagaatcaaaatcaactcaagaaagggaaagagagaaggagccatccagagaaagagatatagcaaaggaaatgaaatcaaaggaaaatgttaaaggaggagaaaaaacaccagtttctgggtccttgaaatcacctgttcccagatcagatattccagagcctgaaaggggcaagtttacctttctttatacgttcttacgttttgttattttaatgtatagttggttattgtctccttgttttggtaagttatataggggttttgctaggggaacttgtcatacaagttggtgtttttttttaagtgtttggaaaactagaaatgtaccttattctgactatttctttttgtcttaacagaacaaaaacgccgcaaaattgatactcacccttctccatcacattcctccacagtaaaggttagtatagcctgaggaaggcagcg

SEQ ID NO: 50748 - DNA, 1228 bp, Homo sapiens
agtatctttgtataagttgaactttttgtgactacctatccaaatacgcatgatgtttttacacggaaacattgatctagtctacttaagtttcaatttctgctattttgtggatcataatttttctttaaaagtgacaaacattgtttccttaggaatgtggaaactatccaggattccttaccatattacgggcaactggatttgatggtggaaataaggctgatcaattagactatgaaaattttcgacatgttgtacataaatggcattacaaactaaccaaggtaaaaaaaaaattggatttttcaaaggcaaatttttctctgtatacttgtgcttttataataatggatctgaaaatgtttgttgtaggcatcggtacattgccttgaaacaggcgaatatactcacatcaggaatatcttgattgtgctaacaaaaatacttccttggtacccaaaagttttgaatctgggtcaagctttggaaagaagagtacacaaaatctgccaagaagaaaaagagaagaggccagatctatatgcattggctatggggtaacaaaattatattttaatgtgatttacaagactagatgacagaaggattctgaagactttaaaatgttttacagtgttgaagtttatcttctgccttcaggagattatgggagattatgcgatcatgtttccacaggctggtgagagttaccacttctgattatcaacttccggtctatactggatgatagtttttttaaagtcatgtataatatttcttgattgggaggaaatataattttatcatcatagttaacagatcttcaagagtaaaaaaaaaaagccatcttagtttaaggattagtttatagtgaaattgtaatttttaagaaagctgggcgttctataaaaaccttcaagaacttattaaaaattggtattttttaattctctagaaccacatagtagaatgaataacttgctaattttattcttaaaaacctcatgtttatgttttttgatttgtgtttgtatatttaaacactttgtgcgactttcagctactctgggcagttgaaaagtagaaagtcatacatgatacctgaaaatgagtttcatcacaaagacccccctccgaggaatgcagttgccagtgtgcaaaatgggcctggtggtgggccttcttcatcatcaataggaagtgcatctaaatcggatgaaagcag

SEQ ID NO: 50749 - DNA, 1044 bp, Homo sapiens
aggctgaggcaggagaattgcttgaacccaggaggcggaggttgcagtgagccaagatctcgccatcgtactccattctgggcaagacagtgagatgctgtctcaaaaaataaataataaataaataaataaaataatcaccaaataattactatatcttctatgatccttgatatcctcactcccttaagtcttagttgctctgttgaatctgtgccatactgaataatgaataatcctttatgaggggactgcaaggtggaaaatggaaaatatgcagaaatttaaattcagttgacatttgtctttaagccagtgactgtagtcagtaatagtcactgaaataaatttgtgtaagggaaggaatgtggaatgtaggagttttttatattaagcattttaactcaacttttttctgtgtctttttcaaattagcatgggttatgtactgtacactggtaaatttgtgtcttcccttgtgcagggtggttattttggtcagatcagaaacactaaaaaatcctctcagagattaaaggatgctctattggaccatgatcttgcccttcctctctgtctgcttatggctcagcagagaaatggggtaatctttcaggaaggtggagagaaacatttgaaacttgtgggaaagctctatgaccaggcaagttaaagtggcttttatgtttatgtacatgtttttaatcctgttaaaggaggataatgtgttataatttgaaaaatgtcatttttgcacatcatttgaatatgagacatcctaatgtgaaagacattctggaaatagggcctatttctatgtaaattgtgatatataagagatagctccaagagatgttatatgtaaggctgtcaattaattaaatattacatcattaaattcctgcaacttcaagttgtttgcatttatatctttcccgatctctggaaatctcagtcataacagaatagatgcttgcttgcccacttgtgcatgctcactctcttttccctttttttttttttttttttttttttgagacaaag

SEQ ID NO: 50750 - DNA, 1038 bp, Homo sapiens
atgtttaataagtcatacaagtaagttcttttgaaatcaggtccttttgcactgttctagcctcatcttttccctgcttcccgatattctagattccattaatactgaacttcttgtactttccatgaacttttgcccattattcacttgacttggaatacccttcatggcccactccatgttctgtttattcattagatttcagcttagaggtcacttcctctggaaagctttttctgttaatgctcccacccacaagtctgaattgggcgctcctcttttatattcccatggagccttttgctcatcatagttatttgtttacttttctgtatcttccactagactcagctccttgagggcaggacttgtgttttgtccaatatcatttaggtgcttagcaaatagttgtggaataggctgcagagcacttgactttacttgaatctcctactcttgtattggctggggtctcctccctattcatggtatgataaggaccattggttaaagttggtctcttgtctgcttctaggtctggtaatactttattttcttgcacctccacaactagtagcatgttccaagataaaaagagatttttttttttcttgactcacattcaggggctggcattttgtcatttattcaagtttactgagtgatctgcaagattttgttataacttagtttcacaaactctggaatcaggctgcaaagatttgacttactgctctactttgtactacgtgaccatgagcaagttacatgacatatctgttctgaatttgcctcatcaataggttataccaacctaggataatagttgcaaggattaaatgagataatcattataaagtgcttggtacagtgcttgacatatgtatgctcaataaatattggttattgttattattatgaagctccattcaacagcatcagcaatacaattattgctacctcattttgttttagaggtttagttgaaatgatacttgtgcattttgttttatgagttgtttttactctttttttatt

SEQ ID NO: 50751 - DNA, 1021 bp, Homo sapiens
atgtactgagcctacttatgtcccctaaatgtaccactctctccttagcttctcttcccctgtatatactttttgttccctctgtttgtacaggttttcccttaccttcctttccccctttccatctggtgacctcattcttggagagtgagctccagtgttacttctagtgaaggcttccctagcataaactgccagacacaatcaatctttatttccatcactattctttagcatataatgttatcatacctctaggtaccttgctatgattgttttttgaatagtttatgtgtttacatgatttaagtttcagtaaatataaaaggtataaatacagcaaaaagtctcactccatcctccatctactcagttcttcccctcaaggaaaagtaaccactgtttagtctcttatttatccttccatatattcttatgtatatgcaagccaatacaatatatattatccccctcttatattattattatattaatattgtttttctttgtaaaaatgggacctcactatgttgcccaggctggtcttgaactcctggcctcaagtgatcctcccaccttgacctcccagcgctggagttacagacgtgagctaccacaccccagccaccttttatattatcaatagcatataagtactgttctgttgattgctcttttttagaatattgaaatttaataaatgaatttaaatctgtctccttcactggaccaggcttgagagcaggaactgttactctgttattcatccttgtatttcttatttttttttttttttttgggagatggagttttgcaccgttgcccgggctggagtgctgcagtggcacgatcttggctcactgcaacctccgcctcctgtgttcaagcgattatcctgcctcagcctcccaagtagttgggattacaggcgcctgccaccaagtccagctaattctttgtatttttagtagagacggggtttcaccatgttggccaggctggtctcgaactcctgaccttg

SEQ ID NO: 50752 - DNA, 1042 bp, Homo sapiens
ttacaaccatgtgcaagttaaagttttttcaaattagaaattaattgtgacatcataatcttaacctttttgtattttattaatttctttttttaaattgtagtttcagtctgatggaagcaaacaagaagataaagaaaaaacggtaagagactagaaaaatccaataatgtgtctaatgtttgtcttgctacagtatattacaaattttactgtgaacaagctttaatcatctgtatgagtaattgttttataatgtagatgctgattatagtttttggcggcatatgcaaagttatcttttaagattaacattttttcccctgatgttgaaaaaggaagagagataaaagttcctcattcctttgctacccctttcctttcctcaccccattttatgtcttcgatggagaaacataaataagctttgtgaaaagggtgggtgaggaatgggatattgtgtgttatgttattaagaaatggtaattttcccaaggctgttataaatttattgttggttatattaatatagacctcttactgaaataacttttccttctttcttttaggaagttatccttagctgtttgcttagcattactgaccaggtactacttccatctctttctttgatggactgcaatgcttgtatgtctgaggaactatggggaatgtttaaaacatttccatatcagcataggtaaatacatattattttcatgtttttaactattagtaattctagtatattaacctctaagtgtttaacttttcctaattcttcatctcatcgttttttaagatatcgtctgtatggccagtggaagaatgaaacttataacagtcacccacttttagtaaaagttaaagctcaaacaatagacagagccaaatatatcatgaagtaagttttaatttatttttcatattaatctaaattatatctgaatctaatatactttctttcaggtagcttgtctgagcctcagttttgggaaagcctatgtgttgtgaatggtatagctgatttatatactacaga

SEQ ID NO: 50753 - DNA, 1047 bp, Homo sapiens
gaccttcatattcacttactaacttacccagagcaacttctgatcctgcacactccattcttggtgggtgtcctacacaggtgtaccattttaaatattttataccgtaatttttttgttccttttctgtgtttagataggtttagatacacaaacacttatcattgtgttacagttgcctatagtattcaatatagtaacttgctgtacaggtttgtagcctaggagccatagagtattccatatagcctacatgtgtagtaggttatgtaccatataggcttgtgtaagtatgctctaaagaggcattgaatgtatctccgttgttaagtgatacatgatatagttgagtgaatggctaagacaaatggaacatgattgtccagcagcattaagggcccatttgaggacagatacatgaaattggcattatggaaggattgtcattagtggtaataataagatttaggatatggagtaagtggttaagatagggtatagaagatctttggaagagaaagggttcaggagaaccaagaggctacatggtagaaggctcacctacatgtatatgaaaatctccaaaagttaagaattgtagtcagagagagtgacagaggctaatattgttgcaaaatgaagggcagtagactcaaggatccataaatggcatcaataggacatcactgaaagtggcatagtagggaactccagagctctgtctcgccacaaaaacaacataacgaagtggaaaaaactatcagtcaactttgctgctgtcttattcttccccagtcctttccctggttggtgtaagttttttttactatattctagagctctacaaagttaattgagagtgctgtggcattttaaattgcctgtctactagcccccacacccagatcagtggtggccatggtgatagaagcccacactcctggtgcaggttgctaatgctagagggagcaaagaattgtgtttttgggttttaatctggctacctgctccctgaaggacccacataggggcctacttttgtatctt

SEQ ID NO: 50754 - DNA, 1095 bp, Homo sapiens
tagccgggtgtggtggcgcatgcctgtaatcccagctactcgggaggctgaggcaggagaattgcttgaacccaggaggtgtggaggtagcggtgagccgagatcatgccattgcactccagcctgggcaacaagagcgaaactctgtctcaaaaaaaaaaaaaaagtcttgtcattgtgagaatctgcagttttaagggccactgagggtaggggaagaaatgtcagatatttttgaaaagttttggccttgaaggtaaagtaaggaaagctatgaaaatcaggaactgcttaggtgatgtaaccttgagagttggctcccaagcatatatggtcaatctgtgtattggtccctggcctaattcccccatacccctttcccatcactacctgaaaatgttcacaatccttttccccaactcatatgttgaccagctgggtcttatttggattaataggcttctttttttttccccttaatgctagtattattctatgatatcaacgacagtgagaggttgagcatcccaaatccacaaagctccgaaatccaaaactttttgagcactgaatgatgttcaaaggagatgattggagcattttggattttgggttttcagatttgggatgctcaaccagtatgcaaatattccaaaatctgaaaaaaaattccaaaatctaaaacacttctggtcccaggcattttagatgagggatactcaacttgtacagtagaggatttggggacagcatgagagacagcacaaaggacaggaagggagtacaagaaagtgtgaaggtaccagaagacaaacttgtctggagttgtcttgttacaggaaaggaagaggaggtgataggtctcatccatattgccctttgatttctggattcaaaacacagtaatagtagtaatggtagtaccatggttcaaccctattatacataccccaaattcattcatttaagaaatatagattgagaatctatatttgtgcaaggtagtgtactaggtactgaggctatatctgtaaacagaaattcttacttttttgatgtttagattctgagtaaattatatgttagaaaacaatt

SEQ ID NO: 50755 - DNA, 1010 bp, Homo sapiens
ttcaatccatctttcatattattgttattgttgctttcttaaagagacctaactgaggcacttcactggtcaaaaacctttacttctaggatgaaattcaaacttctaaatgtggcagaaatagcacttcacaatttggcactgttctttccggccttatctttatagttatttttttcttaaatctaatattctagtcatattaagtgactagccatttcttgaacttagatatagatattgctatgaacctttgttcctgtagttccttataactaagaaaccattcttacccaaccctctcacttctcctttcttcatcttgtgaactcctatttattctttaagagcaaatgctgcttgttctgtaaaggcttagctgactctttacccatgcagaattagtcacttcttaatctgtattctcataaaacttgacacataacttctaacacccatcagattatcttagaataaactgtatctatctcctttgccagactgtaaaccatatagggcaggtgaataaactgtatctatctcctttgccagattgtaaaccatatagggaaggttctatgttttactaattcctatggattaatttattgcctagcctatagtaaatgctcactaattgtaaacgagtgatctatgttttaggaagacaattctcttgatagcatggaggattttaatgtaataaggcctccatttaccttttggtatagctctgctaatttgtttacttgcctgggatagtcagctagtcagaaagcattcattgaatgtttatgattatgctgtttgctaggcactgaggttactctggtgtagaggagtgtctgtttctatactcttggagtgtgaggtcaggataataagataattccttttagtattcttaaatgatatagtacctactgcctttgctcatcttgtattttctatgatctgggatgctccagcagacagaagagaaagcagacgacagtttaaaagcatatagc

SEQ ID NO: 50756 - DNA, 1056 bp, Homo sapiens
tgggcagtatacattttaggtgcacatactttcagggtacttggtctgaccaggataaatccttacttatcatcctttagttaaaaggcagttatttggctggatgcggtggctgaagcttgtaatcccagcactctgggtggccgaggtgggcagatcacctgaggtctggaatttgagaccagcctggccaacatggtaaaaccctgtctctactaaaaacacaaaaattagttgggcatggtggcacatgcctgtaatcccagctactctgaaggcttgggcaggagaatcacttgaacctaggaggtggaggttgcagtgagctgagatcgtgccactgcactccagcctgggtgacagagtgagacactgtctcaaaaaaaaaaaaaaaaaaaaaaaaaggcagttatttgctcctaaaagattctggcacatcaaaatttttatattctgctggataacttggggctgtttactgcatgcgcaagcaaggaagcagaaccattatgcatctgcatggtgattgtgatctgacactaaatttgaacaacttattaaatacgaatgaatagtgaacagtagactattgagctgccaagtcatagacaccatacaagtggccatagcttgaagatggcaaaaaaacatcttttagaaattagaggaaaggatatcacaggtggactcctttgtttgctgaactaaacggtaagaactctactcttttggatgcccttcaaaaaaaatcagagcatcatgctgtacactttaaatatatataataaaaacaagtggttgctaagtgttctttcctttcctttcttctaaatcagtggtcagcaagtgtttctataaagggtgagatagtaaatatttttcggctttgtggaccatatggtttctgttgtaactacttaattctgccattgtagtgtaaaaacagcgtaaaaacagctatagatagtacataaataaatgtgactgtgtgccaataaaatgttatttacaaaaacagaccgctaaatggatttaacccacaagccatagtttgct

SEQ ID NO: 50757 - DNA, 1050 bp, Homo sapiens
gttaaattgaacttctaagcctttttataaattgtaggttgttatgtagagaatgttatttttgtattcttatttaggaagctttagtttgaatatatttaacattgtggatgcaatgctaaggaataaatgacctttaatattttttaatacagtatttagtttcagacacagttctaaaggaacgcctggatccagaaacactggaatcattagggcttatcaaacaatcacagcaattcaatcaaaagtcagttaaaatcaagacaaaactcttgtaagtacacgtatcttatgttgcagatcaagtatctgagtatgttttttcgttcatattttgaatcctagtagcttctaaggggactttgaagattgttttttttgtttgtggttagcatgtcttgtgttttttgccttctaaaagtagcctaatattgagtcatcagtgatctttacctgtgcaaaaccattgttacttttgcccatattcaaagttaaaataatactcatgctttcatcattagcaataaaataatttatgactgtggctatactcagggtatattcttagagatggaaatggtgatatgttattgttccctgatattaacaatatccttttcttgtgttactggttttccctatgtaattaatattggggttctcatatgaatcactgttattttctactctaaaaggtacacaaagaggtaaactttcaacaactattcttaggattgttgtaggttggagataagaaaattcagtgagaatacagtactctgtgcaagcttgttaattaaaattaattttatccccttaatgatatttatctgatttcagttataagcagcaaaaattcaatttgttaagagaagagaatgaaggttatgccaagctgattgctgaattggggcaagatttatctggaagtattactagtgatttaatcttagaaaatatcaaatctttaataggtaagacatttatctgtatagtatgtgttgttaagataacaagttattttagctattggagaatatccataaa

SEQ ID NO: 50758 - DNA, 1028 bp, Homo sapiens
ccatccagtgcccctgttcttagggaccttgagaggtagatcttagggactttagggccctggagcatagatacatgttgggtaaaagaatgggcccagtttagccccaatcccttaaaatcagtatctttaaagttctagactgaggagggaccagaaaaccagatagcagggcaacaattgggagtccctgaaaaggattggtgagatacacatgggttaaaagtcttaatgagaaattgagattgtattgtaatttacattgcataaattataccctaaaatttccttaatacacatgagctaactgtgtgcttagctacagtggccaggatatgtagaaatggcaactgtccaagaagggaaagtcaagggccaggaaaatgtggatatgtttgatgaaaaatccctttctcttttgattcttagtgttggcagtagaacatgtagatgacaatttttattacttcactaaaaccagtgcttctctttatagcatattctaaattatgagttgactgtaaaattaggttaatagtatataatcagttaaagcagtaatcctgagatcagccttgtttgtaatcctgccaatgctggttgaaatttttggtgcttggcatttggcactaattgttttttttcttccacacttcagatcagaaaattttttgacaaattttctgaataatttactgaaactctcagtttttaaatatttcagtaggaagataaaaattttgaataatttctatttactgactagaattataattcaagataagatgttaattttttttttttttgagacagagtcttactctgtcacccaggctggagtgcagtggcgtgatctcggctcactgcaacttctgcctcccaggttcaagtgattctcctgcctcagcctccctagtagctgtacttacagatgtgtgccactgagcccagctgatttttgtatttttagtagagacggggtttcatcatgttgcccaggatggtcttgaacccctgacctcaggtga

SEQ ID NO: 50759 - DNA, 1035 bp, Homo sapiens
tctctaattttagatctagatgaaaataactgagcacagttttcccttcagtcagtcctgtgctttcttttcttttcttctcttttttgagacatggtcttactctttcgaccaggctggactgcagtggtgtgatcttggctcactgcagcctcaacctcgtgggctcaagtgatcctcctatctcaccgccatgccctgctaaaatatatatatacatataaaatatatgtatatacacatatatattatatatacagatatatataatatatatgtgtataatatatatgtatatatgttatatatgtatgtatgtaatatatattatatatatgtatatatgtattttatatatatctgtatatatatattggtagagatggggtttcaccatgttgtccaggcttgtctggaactcctgggctcaaacgatctgcccacctgagacttctaaagtgctgggattataggcatgagccactgcactaggcccagtcttgtgctttctgtaactttgaatctaatagaagacattgccaaacattattatattcattttatttatttagttagtttttagaggcagagtctcgctatgttgcccaggctggtcttgaatgcctggcttcaagtgatgctcccaccttggccttccaaaatgctgggattataggtgtgagccaccgcacccggccaatattcactttaaaataagacatcctctgcaggtttgtgaacctggaatgaattgttttagctcattaatcttaattcttagaattagataaattacttaaatatcttactgagaatttagaatttgttcttgacaaatataaatcctggtgcttgatccttcaggaagtttcagatttcctaagttcccggtaatgttgggagtaggtcaaaatgtatgtggactgggagtgataaatgaaaagagaagaccattgatgagatgaccacatgtcccagttttgttttgttttcactggctaattattaatagtaccctcttttattctcataact

SEQ ID NO: 50760 - DNA, 1035 bp, Homo sapiens
gtggcatgttatggatatgtccattaaatccatttggtctgtagtattattcaagtcttctgtttccttactgatcttttgtctgggtattctatggaaagtagtgtatgaaattccctactattactgtgttggtgtctatttgtttcttcagctctgtgtcacatatattcatatgctgttgtcctctgatgtggtatgtgtatatatttataattgttatattttcaaagtatattttgtctaatataagcatagccacccctgttctctcttggctaacatttgaatggagtatctttatccatcctttcactttcagcctatctgtgtccttaaatttaaaacacgtttcttgtagacagcatacagctttttaaaaaaatagctcatcttaaaaaagatcaatttagatactttgtcttttgaacatggagttagatgttacatttaaggtaattactgacaggaaaggacttactattgccattttgttaattgtttttctgtgttgtagctcttctgttcctcttttcctctcttgcactcttcctttatattttattacatttttccttgcaatttgtttgtttaagagattgggtcactctctgttagattttcccacagtttggattttggtgattgtatccctatggtatctcttaatatattcctctgttgtctttttctgtaaattggtagttggatctagatggcttgatcagattttgattcacactttttttccccctaaagacaacttcataggtaggtgatgctttcttttcttttttcctttttttttttttcctgtctcccaggctggagtacagtggagcgagcagtcatggttcactgcagccccaatttcctgggctcagatgatttgattttttcaccccagcctcccgagtagctgggagtgcaagcatgagccaccatgccaggctaatttttgtattttttgttgagacagggtttcaccacgtttcccaggctggtcttgacctctgggctcaagctatctgcctg

SEQ ID NO: 50761 - DNA, 1033 bp, Homo sapiens
ctggagtgcaggcgatcacggctcactgcaggcttgaccccaccaggctcaagggattttcctgcctcagcctcctgaattgctagggctacaggtgcatgccaccatgcctggctaattaaaaacatttttttgtgcgggtgtatgagtagggatggggttttgctatattgcccaggctggtcataaactcctggcttcaagtgatcctcccccctcagcctcccaaagtgctgggattacaggcatgagccactacgcccagccaaaggaatacctcttttatactagggaaatgtaagtatctattatgcaaacaaattgccttattgtaataacctttcaatggttccatatgcaacttgagcaaatctttgagattctaactaatagttcatgatgacattgtcatctgtgtcctaatgaacatgtttgtagcctggtgactgacaatatagaattatatttcaattatttcttaaagttatgtaatgatgactgtaccattagtctaggtaggagtttgcaacactgatgcaacctcttccccgcaaccattggaaggctttttgcaaaagacatgcattaagattgttaaatagaaatgaaactattgaaaatgtgaggaagcaagtgcattgttataaggagaagttttttttttttttttttgagacagggtctcactctgttgcccaggctggagtgcagtggcacgatcttggctcactgcagccttgacctcctgggctcaagtgaataaggaggaattttaaacaattattttatttctctttctttctcatcctttccttttcctttcctctttttcttttttctctttttctatatgaaggaatatttgaaattgcattttagtagcccgagtacaaagggaaagatgagttactttattctgttaaattcttctttcaaagacatggtgcttcctgctattattattattattttttttgagacagagtctcactctgtcgcccaggctggagtgcagtggtgcgatctcgaccca

SEQ ID NO: 50762 - DNA, 1038 bp, Homo sapiens
ttcgtcattaaatgttccctaaaccccattttatcctgggactgcaactaattctggcagctctccaagcttctccagtacctaggataacgcgtttcctttagtcgtgaaactttcccccgtaacaccgaaaacagtaatttgccatacccctagtcttctcgcccccacgttagagcgctccctcctccccttcccctggaaggagtcgtttaagcagcaaagcaaacctcagatataagaacaaatattaataacatctcatttccttctctgggtcgcttttagatgctaaagctcaaccctggatgaaattaaccctcgttagccatttttgtcgtccttgcccacccctctccatttctagtagccagtttaccgtggctcatgctaaagattcaaatctttgtaacttcgttacttggaacgaaacacgaggaacgcgttgccggatcccgcgcttgtaatagtgccagcctatgtggcttcctcccccgcaccccccgcactgctgtatgaagtcttaacagtgtgagctctagaattccctaaataagcggctgtcttagccacttaagtagctgagtgaccttgggtaagttccttaaccacttggactgtttccccttgagtaaattgggaataataagtactctactcaaaggattgttgtgaagactaaataatgcctgtaaagcacttggcttatagtaagtgctcaagtgatagctattaaaagtaatattattccaacctttagatatttaaacttctcaggacagctcatgcacttaaagtctgtaccactcaggttagcaattaattggtctctgacttattcatgtgtgtttattcttgcactgtaatgaattgggaggcctttgaaatatagggactatgtctcatatttcttttggtttaacacatgccccgcccccccagcctatgcttagaatgcttattggtttattaattgtcagagaaggctatttgataaatcttcgtttttaactataatgaacattttacaaatcctcg

SEQ ID NO: 50763 - DNA, 1027 bp, Homo sapiens
atatattacctagcctcaggtatttctttatagcaatgcaagaacagatttaacacagaaaatggtacctcccccacccttgctcctgctctcaccacataataccctggcttcccctttgccttctaccatgattgtaaactttctgaggccctcactagaagtagatgctgatgccgtgcttcctgtagagcctgcaaaaccatgagctaattaaattgcttgtctttataaattacggagtctcaagtgttcctttatagcaatgcaaaagtggactaacacacctagcctgtaacgtttctgcaaacaagtttgctgctaggtgtattggaacttccttatttgttctttgcttcttttcttttactgctttcaggattctctctgtttttgatttttgacaatttgattatatgtcatgaggtagtgttatttggattgaatctgattggaaacctttgactttcctgtacctggatgtacatctttctcaaggtttggacgtttttctgctatcatttctctaagctttctactcttctatctttcttctctccatcttaaaatccaatgaatcaaatatttgcttttacaatgctgttccataaatcccattgacattcttcattccttttaattctttttttctctcctttgactagatactcttaaataatctaagttcacatattatttcttcagcatgatcaattctgttgttgatgttctctattgcgtttttttcattgtatttttcagccccaggatttatctttgattctttaaaaattatttctatctctttgttaaatttcttattctggttactttacagtttttctcatttattttaattatttatctgtatttttttaatgtggctgagcttccttaaaatagttcttttgaattctttgccaggtagtttgtatatctctgtttttttatggccagtcactggcactttattttgtctccctaataatgtcttgtttctctgattgttcttgatctctgtggccat

SEQ ID NO: 50764 - DNA, 1054 bp, Homo sapiens
aggtctaaagaataaccataaaaataaaaacgtgattctgctgagacagcattagaaaaaaataataaatgaaaactaaccctaatcaaaacaaataacatatatccaagcatctcaaacctttaaaatgttgtaaaggtagaactcatgtctatttacctagccctatgattgtcatatgttctaaaccaaaaattaggacacatagtccaacaaagaattcattttcagatttgtattctgatttatagaataagatacatggaagcataacaattaagttgcatttagctatacattttctgagtcatctttattgagaagaatatgggacactataaagttgaactatcctaaagattagggacatgtgatactctacacttttcttttgaataaaagcatatcagtaatctttgaatatccttgaaaagtaccaagatagaaggttattaacattcattgcaatgttaataactttattccagaattttcttttgtttctgttgtataacttcacttgtagaacacccattaatgcaataccaagcttatagaaacacatgctttatgtaatttttagtgtcggtaaaagtgatattcagagggagaaaagataattagccccagggtttgatagacatcatttagtagtcatcctgttaatctaaaatcctacacataaccaattaaccattgtaatgagaactttaatttttaaacttcctatccaatttctttcaatcattgctgccaagcatttgaaagccagtaatgcagaaggtgctttataggcctgtgttagaaatggtcacatccccagggagctaaaatcacaacagatcacacaagtagagtgatctgctttttattgtgggcattagataacttcagctttgaaaaaagttgtgttaaggatgaaacccagcaacttttagtgataaaaaaacattttgcaaccattgttcatagaatacacacccaaggccatttttttccttgatcttttgaaagaaattgtactatctgaaatgaattcagataaaggagattg

SEQ ID NO: 50765 - DNA, 1028 bp, Homo sapiens
tgacaagaaaggccttttctctttggtaatccttattttattccatgcatatgtcccgaatgcttgatggcagattactagcctcagtaggcttcctattagattgttagcttttgctaaacccattttccaggggaagagggttttcctaaaagcttaaggagttctttttaaatattgtttttgtataacttactccgcatcagttactatactagtgctttactttatatcacttaatcttcacagtaaccctatgagattagtttggttactaacatcctgttgttactttaaaggaattcagaagagcaaaggattatgctcaaggtcatgcagaaaagttgattcctgacactagtatgactggacatatgtagaagaagatgtaagaaatacttggacttaattattgaaataatgatttaaaacagatgtatctatggcccagagaaaatttaattaatggtaacaggatgtgttgtatgcagtgaggtgaggctaggactttgagcagtgttttgcccagtagccagggatgggttgcacctctcatctgctccctctggttgggagctttttcaattttctctcagctgatgttttcaagtttctgcctgcctcagtattttatgtaatcctgacagtgcaaaaactcagtgtgcatgtggtaagcccattctcatgcccactgacctcagctgctcctactttctccaggtgtactcaatctgcagacctcatgattcctgtctagttgatggcataaactggaaagcactacctagccatattaatgtgctgcttgaaagtcagaggaagaagggagagctgagtaccccactagcactcaccttccctaattccatcttaccttgtgacccttatctcctgcctccctagcccatatgttagctctattctcttgggagctgaaacctgtcactcaactcctaggttttgtgaaatcttttcttcaaactgtctggaaccataattccttatactacatctttaattgtgggtat

SEQ ID NO: 50766 - DNA, 1032 bp, Homo sapiens
ggttcaagtgattctcctgcctcagcctcccgagtagctgggactacaggtgcacaccaccatacttggctaactttttgtattttagtagaaatggggtttcaccatgttggccaggctggtctcgaacacctgacctcaagtgatctgcccaccttggcctcccaaaatgctgggatgacaggcatgagccaccacaccaagcctgtagtggtattctttgaatcctttctatatacatttgtgtatctactgtaaatttttgctttgtggctacccaggggcttagaaaaactatcttgtagttataataggctatttcaagctgatcagaacttaactctatctcgtacaacaactctacacctttaccccccatcattttatgtttttggtgtcaaaatttacatccttttgtaacttgtatccattgatgatttattttagctatagttgtttttaatagttttgctttttaaacctcgtattagagatcaaattgctttatgtaccaccattacaattctagaatattctgaatatggctctgtactacttatattattgaattttgggctttcatatgttttatgttgttaattagtggattttatttcagcttaacaaaattcctttagcaattcctataaagcagcactagtggtgatgaagtcccttagcttttgtttgtctgggaaaacttttatttctccctcatttctgaaggacagctttgccaggtacagtattcttggttggcagatttttttgtccttcagcactttgactatatcatgtcactccttcctgctttgtaagacttctgctgagaagtccgctgatagctgtattagaactcttttgtatgtgatttttaaaaatttattgctgctgtcggaattttttctttgtttttgatttttgatagtttgatagtttgtgtgtcatggtgacctttttgaggggggttgtatctgattggaaacctctatattctctatacctaaatgttagcatcttttcccatttaag

SEQ ID NO: 50767 - DNA, 1057 bp, Homo sapiens
aaaattttcatttgaaaatacttttctttcagaacttgaaggaatggctcaattgtcatctagcatccaatgttgcaaatgagaaatatgatgccaatctgattattgtacctttatagatcaccattgttttttctttttggaagcttttaacactgctttattttttggtgtcctggaattcatagtgatgtggcttgttgggtgtttttgatttgtggcattgagcactgagggggatccctttgatgtagaaactctattcttcatgcaattctataaaattatcttgtataatttgttccaataatttctccctctctgctttctctgtctcttttctgaaactgctgttaattagatttggaatttttggattgaccctccatgtcttttatctttttgctcagatttcccatctctttgtcttttccttctattttctgggaaatgtccccacccttatgctcaaacttgttactaaattttattttgaaaatcacattttaaatttacacaacctctttcttgttctctgattggtcctttatcatagcatttcgtccatgttttggggatgcaatatgttgaatctctctgataacactacttaaaattgttttgttttactgctgtttaagttctctttattccctgaactattgcagttgctcttggggtcatttttctgtttattattgatctctttttcattacaaattttttttcaaatgcctggtgatccctatgtgtcttcatatataacaataatgcaataaaatataaacaactgcttgagagctctgtgcttgggtaaagcttgtcaactagtgggtcactttaggctgatctggtagggatccctcaaggaacataaggcagaggcgtttgctctaggactatttaattcctccagagagtaatcctcctttctcttgcctggaatagaagcctggtaattatattcttttgtgtggggaattggagggtgaggagagacaactgttccatatacagacttttaattaatctcagtgttgtcagttccacgcttcac

SEQ ID NO: 50768 - DNA, 1064 bp, Homo sapiens
aaagagcataggttttgggaatcaaccaggttgtaggcctggtttctccacttaactagctaggtgagcttgacacattatctaactttcctgagcatgcatttgcctaactctgacgtgaggatgacatactcagggctgacactgagttgataccagcgtgggtggaacagttgtttatagctgagctctatcagagtccactctgattggtgggtgcctatgttgtactggttgttaagtatgttgattatcactattaataggacttaatgggtagggttattggaagcataaaatgaaatgatatatgtggaattcctggcatacaaatgcgactgacttaatattagttttatttattttcctgtatgactttaaaaaattgtttttcaacctaaaggtgagagaaaaatttctggcacttgttatcactgtgatgttaagaggttaaggaactgtttatatcttatatttattcaggatctattaaacaaatatgaagttactactttatgctaggcattgaggatgctgggcgtaaaagggtgaagatggcactgtccctaccttgtatgcattcacagtctaggaggagcagtaaacttctgatttcaatccaaacaaccctgagagtcaacatgaacctgtaaggtcaacatttgtgcagatttagtagagttctcctctaggcaggtacagcttgcttagcagctgagctcagggtggattttaactcccccttactccctcatctgtgtgccctgtgcagtgcacaacctacacaattacacaaggccctgagaacgttataactgatgtataccccaggtgctataggcctgtagtggtaggaggtactgagttttgaaggataaatggcatttggccaaatagagatgaaggagaaagccttagcatgtgtgcaaagacagagaggtatgaaagaactgggagagattagaggaatagtgggttttccaaccagacaatatatttggactcttggtattgaagaaagtgatgacaatgtaagttatatttatagactctttaagtataca

SEQ ID NO: 50769 - DNA, 1024 bp, Homo sapiens
tgagtagctaggactacaggtgcgtgccactgcacgcagctggcttttttagtttttgtgaagacggggtctcactgtgttgcccaggctggtcttgaacacctgggctcaagcaatcctcctgcctcggcctcccaaagtatcaggatcacaggcatgagccactgtgcccggccacaattattaatagttgtatttaaagagaccagcatagcacgtgacccagagtaggcgttcagtgaataaatgggcatagaactgttgtatttaagtttgcttctatcccatagactcctacagttggaccagatttggatagaatgcgagcaaattatgccagtgggttggagttcattttacttttcctttaatctacctttttctaaggttagactttatttggctatcatccctgcagcttttatttattcataagcttgaatagccagttataaatgtcatatgttttattatgcagcaatagtgttcgatttggtaccttgaactgttgtaacaatctgacatgaaatacaattaatgcactaacaggagttcatttaaggtatttattcttatgcgttatcttgtgaggaagtgataacaacattttctttttttctttttttgagacggagtcttgctctgttgccaggctggagtgcagtggcataatctcggttcactgcaacctctgcctcctgggatcaagtgattctcctgcctcagcctccccagtaggtgggactacaggcatgtgtcaccacgcccagctgatttttgtattattagtagagatgaggtttcaccatgttggcccggatgatctcgatttcttgacctcatgatctgcccgcctcagcctcctaaagtgctgggattacaggtgtgagccactgtgcccagtgatacagtattttctaaatagcaatgcttaagcagcagcagttacgtaaaagcatcataacatttaatacttgtttgtgaaatgtaggatatgtttatttgaatattaactctcatataa

SEQ ID NO: 50770 - DNA, 1034 bp, Homo sapiens
tctttccattccattgaactatgccataccattttaaatattgtagttttacatttttccttggctattttgacctgtttattcttcttgaacttagtaggcccaccgattaagattttatttggaaaagcagtgtctctgcttttaatgagctgagtgaggcaaatcacttaacctctccatgcctttgtttcttcatctgtaaagtggggaaaagagtatctccttttgcccaagttccagggaaattgtgaggatcaaatgagatggttatgaaaacattttgaaaaagtaaaaaaaaaaaaaaaccctatattttttacaactgaaatagacaatgatcctggaggtctttgaattaggtattatagggatggtggggttgatttttgttctggaggcttttggctttggactctctctttctcccacagagcgcttcgaccatcactgcccctgggtggggaattgtgttggaaagaggaactaccgctacttctacctcttcatcctttctctctccctcctcacaatctatgtcttcgccttcaacatcgtctatgtggccctcagtgagtatacagggcagtgtccgttgttggagtggggctgggtgggggaagagttaagggcagcttagagggttgttgggtttcctggtggtaccattgtgaaaggtactttaggacaggttagaaatgagcacagttatctgctcttgagcagggttgcaaacctcagtgcacatcaatgagtattaatcagtgtgttggccttctctttggccaactgctgggcactggggccataattactggtctgtatccagagtactggggcatttctgaggtaatcccaaaggctggggatgtattttgtctcggagcatcctctcttcttctgccttgtaaaacttgccttgtgctaaggggtagaaaagggtaagggttttgcctgagaaatgtctttttgtagctcatggtctagtttgggagatagaaagcacacccacatatgtacatgtgcacaaacat

SEQ ID NO: 50771 - DNA, 1031 bp, Homo sapiens
ttggaaggcaatctaataagattaatcgaaagccttaaaacatctataccttttggtgccagtggttcactttctagggagtctgtcccatgaaatcagagatgtgggaaaatatttcggggtggaaatgtttaactcaggattattatgacaattaaaagttgaaaagaacctaattgtctaccaatagatgagtagccaaataaattatagagccgggtgtggtggctcactcctgtaatcccagcactttgggaggccgaggtgggcagatcacttgaggccagaagtttgagaccggcctgagcaacatggtgaaacctcgtctctactaaaacatacaaaaattagctggacgtggtgacatgtgcctgtaatcccagctgagaccctggctgaggcatgagaataaaaaacccatgaggtggaggctgcattgaaccgagattgtgccactgcactccagcctgggcgacagagtaagactctgtctctaaataaataaataaataaataataggacattcgtacattagactgatggaaagagttcataccagaaagctaaatgacaaaatgggagataggctacatttacagtgtgaagtcagttacctatttttaaaaaatctaatgatgtataaagaaatatgcaaggaaatacaggaaatatgccacaatttttatagtttattatctataggttgtgggattatgagtgattttgtttccttcattttttcatatgccatcctccactactgtgatttcttcatttttccttttatttttttcaagttttctacaatgagcatgtattacttgtattatcagaaaaaatgtgatttaaaatactgtaaaaaatatatatctgtataaccattcttctctatacctttcttccctttcctgaaaagatgtagcttcctcagcaggagatagaccatttttacagccttattttttcaccagtacacagctcacttttctttcaaattgatatattttattcttttttttttttttttttt

SEQ ID NO: 50772 - DNA, 1081 bp, Homo sapiens
aagtgattctcctgtctcagcttcccgagtaagctgggattacaggtgcatgccaccacgtccggcttatgtatttatttatttatttatttatttatttttgagacggagtcttgcactgtcacccaggctggagtgcagtggcacgatctccgctcactgcaagctccacctcccgggttcacaccattctcctgcctcagcctcccaagtagctgggactacaggcacccaccaccacgcctggctaattttttgtatttttagtagagacggggtttcactgtgttagccagggtggtcttgatctcctgaccttgtgatccacccacctcagcctcccaaagtgctgggattacaggcgtgagccactgcacccggccttatttttgtgtttttagtagagatggggttttgccatgttggccaggatggtcttgaactcctgacctcagatgatccacctgccttgacctcccaaagtgctgggattacaggtgtgagcgactgtgcctggctgatctaatctttatctaagacaaattagtgatgtttgaggatactcctgactttggaggtctatattgggaattaccaccaaactttcacgtagcttattcttgtcagagacagacttccagcttatagcaattatgggattagtctagggtgatatttttgaagtattttttaaattgacaaatattttatatatatatataaagatatatatacaaagatatatatgtatacaatatgatgttttgatacatctatacatttggaatagttaaatcaagctaattaacatatgtattaccttacatacttatttttttaatggtgagaacgcttaaaatctactctcctagcaattttctggtatacaatatagtgttattaaccatagtccgcatgttgggcaatagatctcatgaacttattcttccttactgaaattttatgtcctttgacaaacatcttcccaatcctcccttcccaatacccccggtgggggtattttttatcataacttttgaagacaaacactatgggttgtagttcacaatagtcttagtgg

SEQ ID NO: 50773 - DNA, 1078 bp, Homo sapiens
gagggaggttttataaggacagaaactctactattatttttagagtccttttaatgatgttgaaagaacactgtggcatagtggaacatgcccttgactggaagttagcagtatcagcattgctgctgtgtggtcctggataagttatttcctctctctggtcctcagtttactcatttacaaaacaaagtattaataattggcacgatcacctataaaatcctctctagttccaaggttctgtgatgatcagatcatcagcattagattggaagcatagaggcttatttaagaagaaatactagcccctttccttttttgagaaccttttatcataccttcttttagagaacaaacacgaattggaaataaacttttcccacttccccgtccccaccccttcagtcagttttcaactttctgtctctgggaaaggagggttgaactgtattttcttattattgcctcatttttttttctttttctgctttttcttagggctagcaattggacttttgatgatgtttgacccagcggcaggaatagcaggcaacgtgatttcaaagctgggctcagcctctgtttcttctctcgtgtaatcgcaaaacccattttggagcaggaattccaatcatgtctgtgatggtggtgagaaagaaggtgacacggaaatgggagaaactcccaggcaggaacaccttttgctgtgatggccgcgtcatgatggcccggcaaaagggcattttctacctgacccttttcctcatcctggggacatgtacactcttcttcgcctttgagtgagtttcggttgagtagagttacctgattatggttactttgggtccaggggaagaacctgctttctggggagtttggggctggtccttggatgactttaacgtcctcttgagcgatgtctgtagagatgccagctgaattcattgcttcgtggtcatcacagagtatgtacttcctaaaaagaccaatacctttgataccaattttgtagtactgatttggggctgtccttgatagacttgggaaataagaaagtttgtcttaattactcacctct

SEQ ID NO: 50774 - DNA, 1026 bp, Homo sapiens
aggagaatcacttgaacctcagaggcagaagttgcagtaagccaagattgcactactgcactccagcctgagtgacagagcaagactccgtctcaaaaaaaaaaataaattaaaaattagctgggtgtggtggcacacacctgtagtcccagctacttgggaggctgagtcaggaggatcgcttgagcccagggcttcaaggctgcagtgagcagtaatcgtgtcactgcactccatcccgggcagcagagtgagaccctgtctctagaaaaagaaaaaaacaacaaacagcaaataaatcgacaaacaccttcagctccattcctctcgtgccctccttcctaaccagctgagggacacttcctgccttaaccaactctgttctctgtttcttctcagtgcatcttcagtgcccagcaacatccacctaggagtggcccccgtggggtcgggctcggccctgaccctgcagacgatcccactgaccacggtgctgaccaatgggcctcctgccagtactactgctcccactcagctcgttctccagagtgttccagcggcctctactttcaaggacaccttcactttgcaggcctctttccccctgaacgccagtttccaagacagccaggtggcagccccaggggctccactgattctcagtggcctcccccaacttctggctggggccaaccgtccgaccaacccggcgccacccacggtcacaggggctggaccagcagggcccagctctcagccccctgggactgtcattgctgccttcatcaggacttctggcactacagcagcccctagggtcaaggaggggccactgaggtcctcctcctatgttcagggtatggtgacgggggcccccatggaggggctgctggttcctgaagagaccctgagggagctcctgagagatcaggctcatcttcagccacttccaacccaggtggtttccaggggttcccacaatccgagccttctgggcaaccagactttgtctcctcccagccgccc

SEQ ID NO: 50775 - DNA, 1035 bp, Homo sapiens
gtcgcaggcagggtctggtgggggtggggtggtggtgggaggagtgaacctggggcaagggctgcagtttcccaggcgcctcctcccagtactcagcctctcactcgtccaaagggaaattcagacctgagaggttgagttgagcgacttctcccgactttttgttggggtgggtggaaaggtgtgggggtgagggtgagggtgggggtggggcaaaggcacggccagccctgtgggctaacggaaaggaagtaggagaggcctgggtgtctcctgtgggggagagcggtcatcagggaggtcaccgtggtccccctccctttcctcccctttgcccctctctgaagttcctcatttctttccgggccaggataaggtttgcccaccccggcactgccaagggagtgtcaaggaggtggagtgcagtgtgtggcttctgctatggtgcatggacacacccacacgcacatccacacactcagaaccgagcccaggggaccaaagacgtggcgcctggaagtggagaagctccagtgatggggtggaggagcagagctggctggcgaggagggaggtgggagggctggggctgtgggaggcaggcctgggtgtgaccacccacaacacgcagatgaggcgcccgggcactgacagccctgaggagtggcgacagggggaacaaatgcaggcccggacgccatgtgacaccgtgagcgctgagggcacgtggggcgagaggaggtgtgtttgggctgcggcagacacagaagatttcctggaaaaggggcctgagccagccccagaggatggggaaggttccgcctgcccctcctccagtcggggctctcctcaccagttcccagggtgacagttcactcttgaaactgaaagcaaagctaaaccaagaacacaaacccacacacagcacagaggccacgctctctggtgggtggcggcggtagtggtgagaggggggtgctgacgaaaacagggtatgtggcccacctgtcccccagtctccaggctctctggagg

SEQ ID NO: 50776 - DNA, 1064 bp, Homo sapiens
tggctcactgcaacctccatctcccgggttcaagcaattctcctgcttcagcctcctgagtagctgggactacaggagggcgccaccacacctggctaatttttgtattttttattatagacaaggcttcaccatattggccaggctggtcttgaactcctgacctcatcatccgcctgcctcggcctcccaaagtgctaggattacagacgtgagccaccacgcctggccctaatttttgtatttttagtagagatggggtttcaccatgttggccaggctggtcttgaactcctgacctcaggtgatctgcttgcctcggcctcccaaagtgctgggattacaggcatgagtcaccacgtccagacaatttttttgtattttttagtagagacagagtttcaccatgttggccaggctgatctcgaactcctgacctcaagtgacctgcccgccttggcctcccagagtgctgggataacaagcatgagccaccacgcccagccgtggcttcattgttattggccagccctgaatctttgactgctgtgtgttcttgccagaggaaagggttgcttttttgaggatgccaggagacaatgagcaaggaaggaggcaaggaagaagagtcacttgggagtcacagtgcaactagctgtgtcaccttgagcaagtcacttcctctcctatggtagcagaagttggatgataagagggatggatgcaatgatctttcaggtctcttataactttgatatcctgggactctgactcaaggagaggtgttttttttttttttttttttttttttttgagctgaggtctcactcttgttgccctggctgaagtgcagtggtgcgatctcagctcactggggcccccacctcccaggctcaagcgatcctcccacctcagcctcctgagtagctgggactacaggcgtgtgccaccacgtctggctaatttttgtatttttttttttagtagagacagggttttgccatgttgcccaggctggtctcgaactcctgagctcaagcaatccacctgcctcggcctcccaa

SEQ ID NO: 50777 - DNA, 1031 bp, Homo sapiens
ctcactgcaacctctgcctcccaagttctagagattctcctgcctcagcctcccgagtagctgggattacaggcatataccaccatgcccagctaattttgtatttttagtagagacggggtttctccatgttggtcaggctggtcttgaactcctgacctcaggtgatctgcctgcctcagcctcccaaagtgttgggattacaggtgtgagccgccgcacccggctgcttttttttttttttttttttaatagagatggatttcatcatgttgtctaggcttgtctcaaacccctggcctcaagccaccttcccacctcggcctcccaaagtgctaggattacaggcgcaagccaccatgcccggccccttgcagtactttctaattagaacctcagaggttcagaactggctgagcctttagcaaaagattaccaaactcgcctacttcactttacagatagggaaattgggatccagagaggggcagggacttggccacattaatggaagacctgaaattaaagtccttagttggaagtgttttccactgcttaccccaaggaaagcagcttgcataaggttggacctgccatgcatactcagtgaccctgtacttacccttgcctaggattatagggaggctgggaggaggaaacagccttggagccatcaaccagaggaccttagcttgtgcatggccttcagtgggccgctgcccttctctgggcctcagttaaaaaaaaaagacaactgctttattagatatagttattagatatagttcaaataccatataattcatcctcttaaagcatacacttcagtagtttttaatctattctcagagttgtacatccatcaccagaatccattttagaacattttcatcacccccaggcagggcatggtggctgacgcctatcacctcagcactttgggaagctgaggtgggcggatcacttgaggctaggaatttgagaccagcctggccaacatagtgaaaccccatctctaataaaaatacaaa

SEQ ID NO: 50778 - DNA, 1032 bp, Homo sapiens
tcatattttcttttataggttttataatattagtctttacattttagtctatggtctgctttgagttaatttttctgtatgttgagtggtatggatccaaattcttttccttccttccttccttccttccttcctccctcccttccttccttcctccctccctccttctctctctttctttctttctttctttctttctttctttctttctctctctctctctctctctctctctctctctcatctttatcttgctttcttgctttcttctttctttctttttcttggtcttgctctgttgcccaggctggagtgcagtggtatgattatggttcattgcagccttgacctcctgagctcaagtaatcctaccaccttagccttccaagtagctgggaccacaagagtgtgccaccatgcccagctaattttaaattttttttttgtagaggtatgttctcactatgttgcccaggctgatcttgaactcctggcctcaagctatcctcccagcttggcctccctaagtactaggattacaggcgtgagccactgcacccagccttttttttctttttctttatgcatatgaatatctaattattctagcactatttttgaaaaagctatcatcagtctactaccattgtctatatgtgggcccatttctgcactctattcaattccattgattggtctacttatttctctttacattaacaccaactgttttgattactgtagctttataatcattcttgaaatcaggtagtattagcctttcaactttgcttttgtttgaagttgtttttggctagtttaagtcctttgcgatttcatgtgatttttagggctgacttgtccataacattttcttttaatatttgcatttatcccacttgcgttaatttttgttgtaacaaatatgtttggtgttttattttattttgagatggagtcccactccgtcgcccaggctggagtgccagtcgtgcgatctcagttcactgcaacctctgcttcctgggttca

SEQ ID NO: 50779 - DNA, 1051 bp, Homo sapiens
gctgggaaaggccctgggcagccttctgtcctcagggtagggcctgaccccaacccgggcttggcatctctcctggatttctaagctgcaaagaggtttctggcttctcttccaatttattctttttgtggttctcagactgaaaactacttctgcaggggagaaaggaaactcctgcaaggcacccagaatcccataggcgctttcctaggggtcaggggcttttctcatcaacaccaacctgcctgcaaatctctggccgctgagcctcgtgtgtcctgtaatagcagccacactgctaatgccctgtagctcgggccccagtgctggttgccaagaaactgctggtcggggtgcttatgagggttctgacctcataggggctgctgagtttcaattcaacagacatttattaatacctactgtgtgcccaaccgatgctaggcgccgtgggggagatgagagaaggaggcgctggggaagagatgactaagacactgaaacaatcagaggcgaggacaagcagccgggccagtggctggtcaggtgctaattgtgcttgttggagcagaggccagcacggctgggactggaggtcagcagcagctggaggagggagggaaggctttgtgagggatgcgggcctaggctagaccttgaaggggggagagggggaagcaagggggagatttggctcagcagaaaaggaagaaaagacgcctttctctctattccctggccacgaactgaccttcgaagcctggatgattgtttggcaaatgtgtgtcacataaaagaccaggtcagctagtgtgggtggctcagtgcaaacccctgtctccactccgggagatataaactggctggccagcctgccacccaagctgaggggatttcgtttgaaacccctcccttaccagacacacacacacacacacacacacacacacacacacacacacacacaggcccctggggagtgggagagatggcaggggagacgtagggcacttaaatgacaggaaaactgacatgccacttgtgctcatgg

SEQ ID NO: 50780 - DNA, 1031 bp, Homo sapiens
ggttataaagtgctttctcaaccattaattcagattcagtgcatccagtacaggagcagcgtagggggagctctctggagttcagtgaagattatcagggaggacttcctatcccagccagctggtgtgaggaagaggctaccttgcatctggttgtttttggggctggattcagagcctgggatctcttgttgggggcaggggtgggggggaccatgaagcaggctccatgctaccaccctcacccagcctcttgctgtgagccgaaggagtggcttgtttgcaactatgtctggcattcctccctgtgctgcactgtttgctcggtggttgctcaggaactggcgcccacccctggacaacctaggggcccaaaattcactctccctcacctagtgctaagtggtgacacagtggcttctgtcttctctggcatatattgggatctaaaatagagggtgctgtggtctgtctctaggggcctgagtgatagcatgtccaaaatgcccctcatcttgcaaaaatcaggccctgtgccgcacagacccagctagacacaggctgaggagtttgctttcctggggaaacctctgctcttctgctcttaagcttggccttcttcctttccacatcccctacccccgcaatgtaattttacatccagtttttgtttttgcgtttagagtgttgttttttttttggtttttgttttttaattcagggtctcactttgtcacccaggctggagtgcagtggcacagtcacagctcactgtaatcttgaactccttacctccagttctttttttttttttgagatggagtttcactcttgttgcccaggctggagtgcaatggcacgatcttggctcgccgcaacctccgcctcccaggttcaagtgattctcctgcctcagcctcccgagtagctgggattacaggcatgtaccaccacgcccggctaattttgtatttttggtagagacggggtttctccgtgttggtcaggctggcctcgaactcctgacctca

SEQ ID NO: 50781 - DNA, 1030 bp, Homo sapiens
gacctattggatgggacaagcatgttaataggctggacgggggtggtggggagccctcatgcctcatgggaagctatggaagatcacatctaatggcttcatttgtttttgcaatacaatagaacataagatggttatctgagagcgaacaccgtgagggttgagtagcgggattggattgaagagggagcttaccaaggacaaatcaaaggaggctaaagaagctgcttatccatcagatctcagttcatgtcattgcctctagaaagctttacccaacccaacctgactagattgcacatgtcatatgttcccagcgctacctgcactgttcttaccacttacatcacatttgtcactcttgattattgttagtgcttgttaaattgtcttggccactaaactctgaaagcagcaaggatcactgtctcaacttgatacatagtaggtgcttaattgaatggtctcagctagtaaagagtggtgcaaagactggggccctattctctctgactccaaagctcaagctcttaaccataagaaggagtagggtgcaagggaattaaaggtactggcaaaagaacagtttgggtgttctaccattggcccaaattagttagaatggagcagctagtcaaataaacagagaaaattgaaagcaagcataggagacagactgagcgaaagctgaagggatggaaaattgtgaccaacaagtagaataattgaggtaggaggagaggtttaggagataacaagatgaggaaaagtatgagccaggttccaaggtcttcagtgaatcaggaggagtagccaggaggtggctcaaaacagtgattcgtaggaatataggactcctctgatgtccctcagaagagaatgaaagtacaagaatctggaagcagcagaccagtaacctcaagaagcttgcagaatgccaacacctcctcctggccttgtgatgtggagtgtgggggaacgaacagcctctatgtgtaagctctccttaagagagagccaagtttccgtg

SEQ ID NO: 50782 - DNA, 1029 bp, Homo sapiens
acattacctttcatgcaagattgaactgtgtcctggttagagtgttgcgttttattttgtgcaagattggaaccatctagattactccttaaatggttgttataatgtcccaggtagcccatggttaactttgtatatctacctattcagtcatctctctgtgtttacttaatttatgggaaagacatgaaggaagaggtatttgatgaactgttcgtgtttttcatgatcttttctggaagctgaaaattttctcactggacagcattaaattttactcttaaaaacttcagcaacttaagagcgttcattcagctgtctgtagtatttatatatgcagttttgatgatatttttcttgatcatttaacggtgaatatctgtgggcaataagtcttgtacagtgcattgacatttaatcataaatatgtattaactattttatttttgtatgtgtgtgtcttaataaattatgtttcttaggcaacttgttccagcgatggcatgttcctctagaactccagatgacaagacaaatggctagctctggtgcatcagggggcaaaatcgataattctgtgttagtccttattgtgggcttatcaacagtaggagctggtgcctatgtaagtagaaaagcagcgtgtataaagaagctgccaaacagctcccattaatagactcgatagtattctgctttaaaacttttgcaactaattcccctttctccttttggaaaaattttcaaaaagccttctcttaagtgcctgctgcctaatatcttatgggagccaattctggaatgactgaaatttaatctcatgttgattgatttctgctcttttcacttgtctttttcttctttacttgaaagccactatgttttcctagattcgagtaacccacaaaattgtacctgttttcttggatgtcacacactaacctgtgaataaagtcaaaatccattgcagctccttagcacaatatttgattttgacctatttgtcagacattttatttcctcagcttg

SEQ ID NO: 50783 - DNA, 1051 bp, Homo sapiens
gataggtgtatttgagttatgtcctgggacatactgctcttggaacttaaaacctctgcttagcttttaaactaatgccttatcaatggatgtcatctttgagggttttgtgtattgaaatgatggtgctctgtgcttgttgcacagaaattgagataacctgaattttttttttttttttttttgagacggagtctcgctttgtcgcccaggctggagtgcagtggcgcgatctcggctcactgcaatctccgcctcccggattcacgccattcttctgcctcagcctccagagtagctgggactacaggcacccgccaccacgcccggctaatttttttttttttttttttgtatttttagtagagacaaggtttcaccatgttaaccaggatggtctcgatctcctgacctcgtgatccgcccacctcggcctcccaaagcgctgggattacaggcgtgagccaccgcgcccggcgataacctgaattttttcatccacactggcctttcaaactttgagtagttgttttgcttaagtctcacaacttttaccagcattctaaagtctgaccaaaagttctcatcaattaaatatgcatttgcaaagttaagttgatttattagacattggaaagtggttggtgttgttagaactactgaaaaatacagactcaaatggttttttccactgcatgtctttgtttgaaggcagtctactgtagaatatattcggacttcctgacatatccatccatctctttgcatacacttgttctttgtcctttggccgtgcaccaaagtatgacatcatctgcctttaaaaatgggtgagggtagtgttaaattttcaaaaagaagttctgatactctcattttaggaattaactctgttttgtggcttgattcctaactgcttttaatctgatttctttttcatgtagtagcatctaccgtgtgtttttgcacaggtgggaaagagcaaggttcgtttatacaccatttctccctccaccttacctttaaacttttttttttttttttttttgag

SEQ ID NO: 50784 - DNA, 1031 bp, Homo sapiens
ctcacccttaaaaactttggcaaaatctttctagggtttccaccaacagtgttcactcagatgttaataagtgttcccctcttaacttgttcctggtaaaagaaatttagtgaatggctggatttacaaaattcatagaggtgttttttgtttatttttaacaacaagacttttcagagcttttaatatgctaatactgtaaatctctaagcaagggacatagtgtgtaatagtcctcaaacatttttaacctttgagccctttatttgcacaatacctattaacatttcttgaggtatagagtttgggaaacactattcttggtggtctgtatttcattttttggccttcaattttgaaaagaagaatggaacataaagcagtatctctgactgtctaattatgggttttttaacataattctttcccctgtgctttactaagctccagagtgatatagatgtagatttgaagggagtgataacatgcttagaaaggtaagaaagacataatgaacccactttgtgagctgtgtcttataagtggtttatctgatctgtagtcattcttcatatcctaagttgtatgccttaacttgctgtatgtattggaaagagttacccaacaggtctgagttgctcaaatattgcacaatttcagaagtgcctgcttgtataactggcccttggctaaatcttggaaattgagcttctaaaatgttctctatgttattaactgataagagtggtttacatgcctggaaccttgagccatgttgtaccagttagtcaagaaaattcgcacaaaaaaatacggttatggtgaccacctgcttttcttgcagtgggaggagtcgtctgaaaatttggtggcttacctccataaaaaacctaagctcttagactcaagagagctttcccatcaagcaacactttatacgtgttgctgcagttcattgctgagggattttatacatgttgctgcagttcattgctgagggattaagtgtgtcctatgtgactccattggaa

SEQ ID NO: 50785 - DNA, 1031 bp, Homo sapiens
tatatatgagtctcccttgtttctttaaatctggcattgcctggctttacctagtttcttaccccatagataatcatgtgttaagtacctactacatatccaatacactactgtgtgtaggaggaaatacaaagaaagaaaatatgtttttcactctcaaggagcttactttggagttgaacatgtataattaaggcacactaagaaataggcagtttgagatcatatatattaaatcttgaattgcatagcatagactgtcagtgcagtaagaggttaaagaaaaacaaatctaatggtttgctgaggaagttataattgaactaagagttggaaaggggcaaagaatcaatttggggggatatctgtttgaagttagatacttattaatatggcattttcctgaatctctgttaccacttctattaggtagatattgtgctcatgttagaggtgagaaaatagattcaagtaatttctccagagtcacataattaaaaatggtgcagtgaggatttgaactattcaatttgatgtcaagtgcatgctctttccactatactcgaatgatgtggacagtataaggtaaggagaaagggtattccaggtggaagaagcagtacgaatgaggacttcaaaggacacaatgagtgcggtattttcaagtattcagaatatacaaatactgaaatatgaattaatacttttaattgtctgacttacaacattctatgtaatgttttttgaggtatttggaaaaaagggtcagttcataatattggttacatttgggagaatttgaagattttttgttttgggggtttctttgtttggtaggcagactactgaacatcaaacaatgttatgccaagccatgatatctggcatatctgtatagaagaggaaatcaaaatgttttaaaagaatggaaccaatttgttaagaggttttgtttgtgtactgtcctcaaatcattgttttcaagttttacatgttaaggccatgctaaaggatggccttaattttgagtc

SEQ ID NO: 50786 - DNA, 1023 bp, Homo sapiens
tctcattaaatttgttttttaaaagttattctcattaaaagtatttttattaacttgtaatgggcttataaatattttaaataaaaacatttgaaatctgtctcagtttcaatttctaatatgggaaatatcaacacatattgtccatataaacataaagctcattggggttctcattaagttttaagtgaaaagaaatcctgggataaaagagtttgagaactactgatgtgatgcagtttatttatgatatgattttaattgagctcttcatgtgaactagatttgttttctttaagtgcttgtattcatcaacttaacggtatgacttcaggtaaggaaggagaagttgagaaaaatagtgcaaagtactgttgaggaatatttcacttgctttatttaatgttcacagtagtgctgcaaggaaggtattactgttttcgttttacagatagaaaaactaaggcttacagaggttgattatacttacagatttggcagccaggaagtggtagaccagaaattcccactcaggttgtcagcccctatgtccagtgttcccatcaatgcacttacttacattttccctggtggataagttttactcgtataaaaagcaaattgattaataatacatacttcttgaggttactttaggaattagtgattatagaatatcttatgaaacttacataaaatatttactatacagattggcttcaaaaggccagtaattgtacattagtcttttccccatattatatcttttacatatgaattataataaaagcgtatgcctataaagtctataccctgagtataaagtaaaacttctttgtagaagtatattttattatagtgccccatcccaaagctgacataaaatgttttaaaatataggcaaactttgcaaagtattatgctagtgagttttaaatcttagtgtaaaccagctattttctacaaatagatgaagtatgaaaattaacagagacaaaagttgaaaatgaataaggataaaat

SEQ ID NO: 50787 - DNA, 1033 bp, Homo sapiens
atgttctctctgtcccacagatctgcaccagcgatgtggagtgtctcatgggtagactccagcataccttcaagcaggaaatgactggagttggagccagcctggaaaagagatggaaattctgtggcttcgagggcttgaagctgacctaaatctctttgcctaacaacttgggatcctgaagataaatatgtgttggacaagcatagaaagtgatttatatttttaatggttttcaagtggaagttcctttgaatttgtcagttcattcctggaaaatcttttgagttaaaataaggatcctaggacagcacctcgaactacaggccctaaagagaaattgcctcaaaccacaagtgctgtaacttcctcccctttctgtcaattggttgtctttaaatattgcaaaagtcctgatgctaaacagtatttggagtgttttcagtgtctgtactactgttgtagaccttggtatttttttaaacactgttaactgaaatgttttgatgatttgtatgtgatttgtgtttctaaacttctctttacattaatgttgttactggtgaaaggcatgagagcagcactaagtcctctgtgtaactgccattgtctttccaatccccagtagaccagtaaataaataacacatcagtgtcttctagaaggtgcctgaccaggttcaccttttaaacgacaaagcatggtttgtggctttttgcaaaattactatgaaccaaaagttgacaaatgttccaaagttattttctctaacatatcacattaaagatctgtttcagaattgtaaaaagtacatctagatgtgtttacagaaagcaagtatccagtatgactggcatgtgttcatgctattcagaatcacttgtaaatagtctgcttttaaaggagggcatgttcagttttctgtgaattaaaatatgctcatgtgtgggcacacacgcacaaacacacacacgcacgcacacagtggcagaagggatttatattaatattctttcccctctggccttcttac

SEQ ID NO: 50788 - DNA, 1036 bp, Homo sapiens
gagtgtggaccttaaacttttttaaaaaaacaatggtccttttaacagtgggatgaaatcctggctccacttccttgcagtgtgatcttagccaatttacctgagcctcactttcctcatctgtagaatggagataatacttacctaacagtgcctagcatcttgttagtataccataaatgttgggtctagttgcccagattgcttgtataaagtcaagatgaaggcagaaaaaaaaaaaaaaaaactggtgaaggtaaatgtttaaatgtttctgtgttttggagccctataaataaactttggaatatctgtgatgcttttgtaatttatgctattttctctcccattcagtaatccaaattgaatggtattgtttttatggtcctgtgttaagttacctgttgtgtagttaattgaaaccaactctattgccaaataaagtgaactgacctagaagcatgttgtgtccacaggaaagctgtgcttctaggctgtgtgcctcaaaccaggatagcgaataccctcttgagaagaccatgaacagcagtcctatcaaatctgaacgtgaagcactgctagtgggtaaggaagctaatgcacacatgccacgtacaatgcctgggtacaatggaggagaggagggctttacctaagattaataagcacatgccaagcatttatgaagcatggcagcgcaagaactcagagttctgaagatgataggttaagaacaagtacaaatttccaaatttaacagcagctgccagcctccctcacactccttgtagccactgccatgtcaagcagtcaagcatgtcagtacaagcactaagctaagaggggtcagctggagaaacacactgtagattttttttaaatatctgtgcaaggatagataagccctctcatgtccactcagggggctagcgcagaccgtatttggcagagagcttttccagagagcctctggagcaactataggcctctcaagtttttccaggttactggctaagctatttttacaacacttctg

SEQ ID NO: 50789 - DNA, 1031 bp, Homo sapiens
agtgctatagaatctaattaccaaaaattcggcagcacttaataataacagagcattccacgagactattttaataagaacataaaggtctcaaaaaaccctgcgtaggtgtacttaaaagacaatatactgttcaggaagcatccatctaaacatcaccaaaatcagctctctgttaacagccacctcctagaaacattcttagggctgccaaaagaaaggggatttccatcagtgatatgaaaacaactaaattttgccctttaaatttgaatctgtccccctgaaagtgcccaagtgctagcaatctcctgaatggggtggctgttatctcattttgtaaaagaaagcagttaaaagaaacaaaaaaaaaatcccttacaaaagggggctagaaaatgtggagatcttcattttttttctgatggaattggagcacctttgggagctggcactgtgcacagtgcacccaccccatagcattgtagcatctttaatgaggtttatgtagagctttcatctcatcctctcatttgatcctctccacagttctgggagaataggcaaggtaatcattggtagccccatttttctgatggctcagatgatcaaataagatgaatggatgtgcaagtgtattataaactgtaaagagccctagaaaggcttgcttatgaaatgtattcattcttcctttttctaaaaagaatgtatgacagttttggcattactgggtaatattattctttgtaacagctttaattagctataataatttaattttagtgaggtataataattgacatacaatgatcttaacatatttcaaaaatacaattatataatattctatatatgtattcaggtatgaaaccatcaccaacaatgaaaataatgaatatgtctgttatccccaaaagcttcctttacaccccttttgcaatcctgtccttctacccctcaccactctcccttcaggcaaccatttatctgttctctatcagattagtgtcattttctagaactttaca

SEQ ID NO: 50790 - DNA, 1051 bp, Homo sapiens
tactgatcccaggacgttggccattcctgggaaatctttgagctccttgatgaaaaggcatcatatgaggctgaaaaatgtaatataatttcatttataactgaccctcagaactcctttgggagcagcacctattttgcttcctggatttgaaaacttcctactgagttgtattgattattattttattttacagaaaggaaatatgggggagagcccctcatttaaatgattttgtgtaacaatcaaaatggatcatatagggctaaaaaagagctcaatgaatatagatgttttaatcccaatgttactttccgtatggtattaattacaaacataaattagaccagaagtttttgttttcctatcaatttcatttaagaaaaatattagatttaattatcctagctaaaatcttagtctttcttgttaaatgtatttcatcttattagcctgttaatttcttctgttaagctgactgactaatattaatgcaaagttttatcaactgaaaacggaaagtaaacttgtattgtacccctaatttccccttgtatgtgctagttaagtaatttgaacccagaagctaaattacctttactagagaccacaaagcagattagttagtatgaattatgggcttgctttctgcctcagatatttgctcatatctatttttcttgctctaaaaagattgtggtaataattgtgatcttaccaggttacaccgttctagtggctggagcatcaactcggatattgggataccatttgcagttgagcaggttcacatcacttctcaatccatttcctcttcggaaaaatgacaatgataatatctgtccttatctcttttgcttggaggttgtaagaataaatgaaacatggatggaaacagtttgagcataaatacataaatccgaggaattatgactcttcaggaattatttatgtataccagtatttgtgtatttagaaagcccctcccttacccataaacacatgcacacttcaccatcatcatcaaacttaaagagacatgcacacataa

SEQ ID NO: 50791 - DNA, 1026 bp, Homo sapiens
aacccagaaacacacagcataattattttaaagaacagcttgcagaaattctgcaggaagcaacaatgtatatatgagatcagagttttatgaagacacggtacctggtcccagaagctttctttttcaaatcatctttgacaatcgagattaaaaaaaaaaaagacaaatagatttctttaaattggatcctgctttgttatattcccagctatcctcctttctcaacatggttgaaaaatgtttatcaggggaaaaaaaagaggaacaaagtaagcaggaagtaaaggttaaagagcagttaagaaaaacaagaatttgtaaatgcccaagaccagaaaccggagcccagtgccctggggatttcagtcaaattgctgtcaacaggatctgaaagagatggagttccattgtaaggagagtgccattcattagggctaatcccaactaaaggggatgtgcctgagtacctgagaggaggcagagtcagttgaaagagaatataaaggttatgtctaggagtagtatagaaacttcaaaagcaacaagaagacatgggctgaaaggttgggctctatagtggaagttagagaatggaggaacaagaagggattgttttatcacttaaactagtactaagtaatgtggttattacaaaattgcctgtaacttagcaacccccatttaaaatgtaagctccatgagatgagggcttattgtctgtttgtttactgatactaatatatatatctccagcaccaagagcaatttctggccatagtaggtgctcagtgaacatttgttgaattagtgaatgatagaagtttactatgaggtttcctcctataaaataaagttaatttgtttccctgaactgcctctaattgctgctttggagtgatgaggagtaaaaggtaaagaaggaccttaaacccaagatgtaaatcaaagtaacagtggaaacctggctcagggcaagaatggtttgagggctgcctttagaaagtgttccattcatcttagttg

SEQ ID NO: 50792 - DNA, 1050 bp, Homo sapiens
tatctgctttcaaagtgtctgatttgaaggtatcagataacttgcctaatacagagttaatataaagcagagagatgcatacctttgaagctcatgctttggataggagtcttcaaatatttgaagagctgatatgaacaagaggattgaagattgatatgtgtcactccagagggtatccttagtagtgatagtagcagttgtaaatgtagcagtaatattagcagtaagatcaagagctgatatttactgagcacttattttgtaccagggactgtgctaagtacttgatttgtgttaacttgtttaattgcaatcctatgaggtaggtactattgttatctccatttttacatataaagaaactgaaacacagagattaagtgatctacccaagatcatataaatgagggaacctggatatgaacccaggtagccataggaattcagattttcgcctagcatataggggaaaacctttctattcaaactgtctggcggtggaatgggtgttcttatgaagcaaggacttttccagtcctgaacatgtttaagtatgtctagatgccactgttaggcatgctgtgaatgagattcttttactgggatcaaggttaaaagtaagataacctcaaaggaccatttcaactctaaaattatacaaatctgatttgacatgtctactggttagtgagcagctatgacctttctagtccatttgtggacttagttgggtactcagagctcatagtagaaaggcttcacttctgttactgtagatgagctgttggcacaggagaagtataagttaatgcactgggccaccaaatggagagaagccattccaagggtctgttgcaagaaccaatttagaaaccactggacaaggtcaaaagaaatccattaatgaaaattgattagtctgtaaggttctggtttctcattgtaataatttgtaatccaaatgaatttagtacccactttcaaattccaacactttcaattttatcttaataattcctagtatcaacctgccatatgcttcttccc

SEQ ID NO: 50793 - DNA, 1022 bp, Homo sapiens
ccacaatgcctcaggcagtactaaattagcactataggtgtattaaggccagcctggctggggtgagcacggcattacggctggctttagacccttggttgaggagccagctttgtaatacccaacttagtaattatgggggctttatgtttgcatgtgtgaaccttagttaagctttgtcatagatttttcaaaacagctggggcttttggtctatgaagacattaatttgtgtctccaggggctatgcataaatcaaattggaaaagaggggaggaggagcgaatttctttttttgtgtgaatcccagctccctgttaactgtttaattgaggagaaggaaagagtcctgtgacaattactgaattagtgatgcactattatcttcttcttgatgtattctagcttgatgtatttatgttaaaaagacagtaaatgctgtctcccatagaaggccctgctttgttgcccttcaacagaaatgtagactcagatttcacagttcctgttgtttcaaagggaggcttaatgttggttggtgatggttgttaatttaaactttagtcctcttttcttaaccatctgctgtgtagtggctctcagtcacagttgagggacagcaacaaggatcccacctggggaaagcaaagtaataacataggcctttggaaattctgctgtttattcctctctagccctgtaaaggattattgggaaatcatgtcatcatggaagcaatggccatgttggagtgaactaagggtgggaagcgagcctggtcctaaattcttatgacctttggaaatatcagtataaatgatgctgtggtaatccaaggtttccccctcctccactgtgttatcttttagccactgctgaatctaactgaagaatgccagaatgtagaaaaatggggcttctttgtggttttcttattttcatatttgctacctttttagtccattagagaagtagatgatagcaaatacaatacactctgcaaaataatacagtaactccca

SEQ ID NO: 50794 - DNA, 1080 bp, Homo sapiens
gttcctgattcaggatgatgacatgatgaaagtgatggaaattaacctagaagtagtgtgaatgagaggttggaaatagaaagactagaaatcaatcaggacaatgttatctgtatatgaagtggtgaggaactagttgctggaatggaatgcaagtaatggatatgagagatattttaatggtataatgaataggacttgattgattaggaaaagaggattgatattgagactagatgactgagagaatggtgatgccattgttagaaaatgaaagaacagggaaacccattttaagtagttgatgatgactaggttattaacttgtttgttgaaagtgtgagattgcataatagaaatatgtatgcatagggaatcactatataggggtttgaatgagaaatataaaatcgagaggccacatatagaaaggtgatcattggatttcaggaaatgaatgagttttttgaggaaatgaattatataaagcaggagcccaggagccaaatcttaggatctacggctattaggatatgataggaggagcccctgaagaaggctgaaaaaacaattggagactattagaacagaatcctatcagattgcagaagccaatggaagacatagtttcaagaagaagatataaatcagccatgtcaaattccacagagaatagaagatttaatgtataacgtaagctctgtgaaagctctcttaaatgatctctgtatattttactcaatgatgtttcctaagtgtgtagaattgtacttggcacatggtagtgaatcaataaatgagtataattagctagtgatgctgaaagttttgtgcaaaacttttaaatataagcatattgaagaaaaataactaatgagcaacatcttcagatacaaacctctgtaaacatattgattctctctatttgcttatcaggcagtattattggaagccagcacagtgttgttgaaatgcacagtgaagatggaggtagatcgtttagccttgctgattcacatatgaggcagccagagggaggcagatgatatgtctgtttgcataattctacagaccaagacc

SEQ ID NO: 50795 - DNA, 1060 bp, Homo sapiens
ctggatattagccctttgtcagatggatagattgcaaaaattttctcccattctgtaggttgcttgttcactctgatgatagtttcttttgttgtgcaaaagctctttagttttattagatcccatttgtcaattttggcttttgttgccattgcttttggtgttttattcatgaagtctttgcccatgcctatgtcctgaatggtattgcctaggttttcttttagggtttttatggttttaggtcttacatttaagtctttaatccatcctgagttaatttttgtgtaaggtgtaaggaaggggtccagtttcagttttctgcatatggctagccagttttcccaacaccgtttattaaatagggaatcctttccccatttcttgtttttgtcaggtttgtcaaagatcagatggttgtagatgtgtggtattatttttgcagcctctgttctgttccattggtctatatctctgttttggtaccagtaccatgctgttttggttactgtagccttgtagtatagtttgacatcaggtagcgtgatgcttctagctttgttctttttgcttaggattgtctttcttgcttccttctttttctttccttccttcattgcttccattagcatgatgatctgccatgcagaggtaggttaggaatgaaggtaagtaatactttgtaagtattaaacataggctgatgctgaaatcaagtagagaagagatatgccaccatgcggaaacatgcaatattagacatagggagacatagtttgaaaaagacttctcgaagattctgatatgatcttcagtgagtgctataccagcctagctgaaaatcactgagataaataaaaatgactactgtttcatccatgagaattttttaagcaaccttaaataagttcctatagcttaatacgtgcttttgccttacaaaataaaacagaacaaaactaatgctgaagaaaatagaaacttacttagaacaacttgtcagatggtttctagtattagcaatttgctatgtccaaaaactgaggagcccaatgaggta

SEQ ID NO: 50796 - DNA, 1021 bp, Homo sapiens
atggtaagtaactatgcctgctggacctgccctctgttgcctagatcccagttctttgtatacttttcaattgctaaaatttttagcacatcctgaaattcccttctttctctttccattcttcactttctttggctctgttttctgtttttaatggacagcaggcatcctccccagcttttttgtaccattcaaactcactcccagaattcattgttgtatccaacctcactgaactgcctagaggagttcaaaacgggtgtttcaaagtgcctctcagggccaccctggagcactctgcatataggttcttttgttttgaggactaaagagacagtatcgcagctacagttttgagaaatgtgtaaagagaaaacccatttggatctaaaggaaaattttaacttcttgcctctcccttcccccagactacatctacaattttcagtgacatttttactttgtttaggaaaccagtcatttctgctttcagtaaaaaaagttcactctgatcaggatccttcctaatttaaaccagagtagagaagaagggaaatatgttttaaaggtatgctataggactatgctaagatatttacataaattattttatttaatccttgttagtactctcaataaatgataaagaagttgttcttcttagccgagactatatataccactaacttgtctagagctctgtctccagaaacactgctcttagaaagcctgcattcctgttgctttttacttatacacataattgtgaatggttacctattctcttactctgtttctctgtgggtatgggtgttgaagagataagatgggagggagggagggatggagggagggagagaaagggagaagggaagagagaagagagattatcagtactaggatgttccctcataaaaatcccagatctgcgtaaaatgggagaatgtaaagaaaacacttcctgtgctagctgtgtattgaacaggaattgggatgtgttttaagagggcttctgactaag

SEQ ID NO: 50797 - DNA, 1053 bp, Homo sapiens
gaattaagaactattcctttaattcttaagatattgttatagtaatggattcaaattgcctgagttcgaatcccagtaccagtcaagtactgtaagcaagtcacttagcatcagtaagccttagtttccttgcctataaagtgaggataaaagtgtctgctataggaggattacttgagccgaggagttcaaggttacagtgaactatgattgtgtcactgcactccagcctgcgtgacagagcaagatcctttctcaaaaaaaaaaaaaaaaaaaaaaaaaaaaccatatagtgttgtattgtgaagattggttaagaaaattatgtaaaatttgccatgtctgacatgtaataggggctcagcctatactagatcactgtcatttctttccttttccttttattggaccaaacaactcatctgtaactttcacttgaggaaaacaaactattcctgaaacatttttttgaggagagacattctgaaaaagtatattaggttatttctgaggctgaacaaggacagttaccaactcttaaatgaagtgtatttcttttaaaaaaaaaactttttaaaattttatttatttatttatttaagaggtgggatctcactctcttgcccaggctggtcttgaactcctgaggttaagtgatcctcccacctgggcctcccaaagtactaggattattggtgtgagccaccatgcccggccaagtatatttcaaaataagctagaaacatgaatccttaaaagagttggggtggtccatctctctgcctcctgcagattaaggctaaattgtgactttatctgtttcatcactagactaaattccacagttggcatagactattaaaactgggatattgggatattggcaatcccagcctggccatttcatggcaagcaagctgaggctaagagagtagaagtgacttgaccaagatcaaacagtgaagaaaatcaggagacgtcagttcttctgactccttatccagtgttcattctgtggttcccttgtcagctttcagacaggtgaaaccaaac

SEQ ID NO: 50798 - DNA, 1033 bp, Homo sapiens
tgtaccacactgtagggtgtcggtctgtggatgtctctgtgttccccactagactgtgaactccttgagggcagggaccaggtttcattcatctccatacccatagcatccagaagagcacttgacacatggtagtcacctaataaatggttattgggtgaaaagaattgataaacagatttgcatgaatataactggggaccttggtagcacagagtgccaaatgctatgaaaagactagctgtttgctacatttgctacttttgctgaagaaaggagtaaattaaagtgcccataatttcatgaaagacctactttttccctcttttcttcactctcccctggttatcttacctttttctttcctatcatttacctatccaggcacctattccttagccctgcccattactttgctgctcttgacagagttcatcttcctcctgccctgatactttgccaggaaacatccttccttctacccacccaagtccagtacactccgtccttgacatcactctcaagttcatctcctactcatagactctgctgctgggactataatttgatacagctcttctggagagcaattcgtcaatatgtatcagaaaccttaatagaatacagcttttaacctaccacttcaacttctagagctctatgctgaggaaacaatcatgatgtttccaaaaatttaatactcaggacatctatcccagagttgtttatactaatagcaaaaacaacaaaaaaaaaaaaaagaaaaaaaagaacatcttaaatgtacaatactagggatttgaatgaaatcaattgtggtacatttatagaatggattactaagtagccttgtaagttgattttaccaaacaatatttaatgatgtggaaaattgtttttgatatattaagagaaaattcacatcatagaactctcagtacagagtgacagatcccagtttaaaaacatatacataatacacacacacacacgcacacacacacgcacacgcacacacacatctgtgtaggca

SEQ ID NO: 50799 - DNA, 1027 bp, Homo sapiens
taaccgacatgaaaataaatctagagccttcgtctgtccccacaagcacaaacccataaccccaagagagattctctagacagtgcacccaaactacaatacccagaatacccttccccgtctgaacgctggggacaatcggaaggggaggggaagaattgtgcgtatagagaaataagtgtcccgcaactccatctcccataattctcggtcctcacttgtgtctgtctgccaatgtcaacacgagttacccccaggaagaacagcctccagcgacctcaaactacatttcccatgaagccatgggctcgggcctccggcttccccggtgaccagtagccaataggagacgccgcagtgggcaccctgtgtgtgagagtccagccttgggccagagtgccgggtctaggcctggaagcgcgaggcgggcatttcggaagagagtggcgcggcgtggggcgccgcgagggcactacgagcccaggaactgccgcgccggcccgattttccgcggctgtataaggactagcgcttcggtagccggggagctggaggtcagagaggcagaaagccccggtggccgtggctggggactgtgggactgagggggcctagggaggagggtgcttccggggccgcggtcctcagcgcctaactccacccagctccacctctgcaggggagggggtatcgggactgggagtcgggggtgggcttttgagctctaggcgccagttctcttgagcccgggagcgcgctgtctttgctcttttttttttttttttttggtccaactcgcccgcccctttttttttttcccacgacgccgcccccctccccctggctctgtgcctcctcagaggtccgaagttggggtttgcgtccagggttttgcctaggcggtgactggactctaattcttaccgcaggaattgggtgatctctttcctcttttccctcaatttgtatttcaggtttgggcacataaccctccctgcgctacactccccattttctttggggcatg

SEQ ID NO: 50800 - DNA, 1034 bp, Homo sapiens
tcacttgaacccaggaggcagaggttgtggtgagctgagatcacaccactgcactccagcctgggtgattgatagagtgagactccatctgaaaaaaaaaaaaaaaagtatgtggttcaatagttgttggtatattcagtggtgtgccaccatcacaatcaattttagaacatcttcatcacctgaaaaagaaattccatgccacccattcctgtaccactcttcaagaccctggtaaccactaatctgccttctgtttctgtagatttgtctatttctggacattttatctaagttgaatcataccataaaaatggaggagcagcaaaggcaacatttattaagcacctagatatcagttaagcactttatgtattttgtcttatttaatcatcaaaataatcgtgtaaattaggtaacattatttccattttagacaagcaaattgatggcaaagaggttgagcagtttgcccaatcatactattaggatgtgcctggatgctttgacaagatctttgaccatgttctttctgccttaaggtagttaggaaatttggaaaacatccctcccatgctcttccctcagtggtctttagttccttgaacagagaccgaaagtaaatatgacatttctgatgcagtgagggctgaaagagcagagaaaggtggagtggtttgtatagcatagaccacagaaatttgctctcccagcttctctattaggtgttgagaataatcagtgatctgtgtacagtatgactcacagagccataggaaattagagctcatagctggaaagagcctcagagaccacctagtctagttgctccattttattgatgaagaaactaggacccaaaaagagcaagcaatttgctcaagatcatatagctcaaacacagtgacagagaatgaccttttatctgttattggaagaataaatataccaaaggtgaaagtccgctccagaataacttcagaaaataagaaagaagagagatagtgttacaaagtcactgaattaggtcagga

SEQ ID NO: 50801 - DNA, 1055 bp, Homo sapiens
atccccatcatctcagcaccaagtctcgttaagctgataagcaacttcaggaaagtctcaggatacaaaatccgtgtgcaaaaatcacaagcattcctatacaccaataacagacaaacagagagccaaatcatgtgtgaactcccattcacaattgcttcaaagagaataaaatacctaggaacccaaattacaagggatgtgaaggacctcttcaaggagaactacaaaccactgctcagtgaaataaaagaggacacatactgcccaaggtaatttatagattcaatgccatccccatcaagctaccaatgactttcttcacagaattggaaaaaactactttaaagttcatatggaaccaaaaaagagcctgcattgccaagtcaatcctaagccagaagaacaaagctggaggcatcatgctgcctgacttcaaactatactataaggctacagtaaccaaaacagcatggtactggtaccaagacagatatatagaccattggaacagaacagagccctcagaaataataccacacatctacagccatctgatctttgacaaacctgacaaaaacaagcaatggggaaaggattccctatttaataaatggtgctgggaaaactggctagccatatgtagaaagctgaaactggatcccttccttacaccttatacaaaaattaattcaagatcgattaaagacttaaatgttagacctaaaaccataaaaaccgcagaagaaaacctaggtaataccattcaggacataggcatgggcaaggacttcatgtctaaaacaccaaaacaatggcaacaaaagccaaaattgaccaatgggatctaatcaaactaaagagcttctgcacagcaaaggaaactaccagcagagtgaaatcatgctgctataaagacacatgcacacgtatgttcattgcggcactattcacaatagcaaagacttggaaccaacccaaatgtccaacaatgatagactggattaagaaaatgtggcacatatacaccatggaatactatgcagccataaaaa

SEQ ID NO: 50802 - DNA, 1045 bp, Homo sapiens
aaccaacagggtaccttctgacacatgtcttagctaaaatattgtctatgtttgggatgtctctcactcctagattgtgcatgccttcatttttccatagttccagaatttaccacggtgcctgacatagagtgggtgcaaggtagctctttgacctgagctgatattatgtagatgtagtagtgaggtctgggaggaccctcttctaatatcccctgctgaagttacatttctagcttctcctacattttctattctgttgtcgttgagccccagttaggagtatgaaaactgaacatgaagtttctaaaagtgtgggtggtaaggagagggtctgagtacgtagcctcactgaaaaggctctcttatcccatcctcacccatctctttcccctagccctgcttcattttttataacacattctaatacctgaagttatattaataatttgattacttgcttattatttgtctttcactcaaatgtgaatttaataacagggcccttgtctgctgtttactggtgtattcctagaacatagaacagtacctgggggatcacaagaacccaataggtagtaaatgaatatataaagtcctaagcattcagagctgttattcagaatctacctactcctcttgccacctgcactgccattctttattccaaggcatcatcatcattcacctggatttttccagtaacttcgtcattggttttcctgtttctagtcttcttcccatccagttcagatgattcagttgaactgtaagtgaaatcaggtcactcttccattaaaaaatttattctatttttattgaggtatgactgatatacaaaaaggtacacatattttatgtatacatcttgagtttgaagataagtatatactcatgaaacggccaccataaataatgccgtaaatataacaaacatccctaaaagtttcctccttctctcttttatctttgtaataagaacacttaacataagacctactctcttaataaaattttaagtatacagtatcatattgttaactat

SEQ ID NO: 50803 - DNA, 1512 bp, Homo sapiens
acaaattaattataaaatggttttcatctataaaatgctcatgtgataaacaatttaagatttcctatttactaggtcttcacaaaaaagtaaggttactaaaaataaaaattgaatttaatatataattctacatgtaaaacatgccaaaaaaagatatattctgatgaaaataagaaaaattataagacataaaaatgtgttcttaataaaagtaaataatttttgtctaattcaagggttactttgaaacagggtaaaatgagctgatagtaagtaaaagaaatgtaaagaaagctatagctataaaagcagtattttttggtaatagagtttaaaaggaaaataattttgtgtgaaaaagaatcttgtatgataaatttttgtcctagaataaaacagaaagttcaagcatgtcataaatagtatgtgaaagtcataatagggtttgtaaaaaacagaatttataaaagaaattttgtgtgtgattaagttggctatactggaaaggaaattatttaatcatcttctagaaattgtgctttgatactaaaaatacactaatataaaactaaagttttggtagactagattttcttaaaatattgatttattcaatgaaattgcaagaaatttttaaattttaattatgtaattcttttttaaacttgaaatttctgagattatcttagaagttcaaattctgctgtactctgctgtttttagcctttctgtctttgagaagtcctgggatgcaggtttgactttcaggttattcaaataagcttcccataaggaaaaataattgctaccataggtcttttttgttgttgttgttttacttttttggtgattagcgtaaggaacagtgattttacattttatcaaaataattcctgtgttgttttaattaggttttaaaaaatacttaaaaaacaaactttgaaagggttaatgtttttatatttgtgtaacttcctatattgttgttgaagtcttttgattgtgactcttgttaaatgattaactattattttataatgttgtatggttctgttttaataaaatattttgagacttttaacatttttgacaaatatcctcaaaatcaaatcccaaattaagtctctgacttgacttattgctggaggcttattaaaactataaaaattaatcactataaggatatagaatctttccacagctgccaacaagtcataaactccagtatcaccaccaccagcctgatgattagacatcagttgagagactccctctagccccacttaaaaaaggtctttatgaaatgttattaactaacccttgtgctgttaagttgcagggctttgactcctgggtacatgtatctcatctgaaagggaatcctgacgcctactgaatcttaatagtcaatattgatatctggcatcaaattcaagttgaccaaagttccatcttcagacctgggagaagatgacagtcaaaatgaactgctttcatgtgacactggac

SEQ ID NO: 50804 - DNA, 1023 bp, Homo sapiens
cttgtgtgaatcaacgagagactgaacttctcagctccactccattgaaacgcagactacagtttggttcctcccttaaagaaaattaaaaaaagggaaacaaataatcaaagaatgaggagatacaaagataacaacccccttttgggcacgttgtttggttttatgatgcctctacttgcaagcatttgtgtaaatggaaaagtttgaaggcatgccaggttttctaatactccagctggttacatattatggtctattcttgggcacattttaaacttgtggctaaattacatcaagaaaaattcagaggtcaaaagtcaacctgcgaatatagagtctttaaagttttatgtgtatttctctattttcttttctgcctgctttaaatctgttgttacttttctactggagttgagataaaaaccactgtctgcatccaaccatttctttttctttctttttttttttcaaactggtgagtttgtatttatctcatggttagagttctgaaataaaagctataagatctttgtttgtatgtgtgtgtatgtgtttagatgtgtttgtatgtacgtacatccattttttttaatgtgttgtgaccacaaagtaccaaattggctttacaataaaggagtactcataaattaagtaaataagcccagtgcttttctagttcatgtgacttaagtaaatctttaacaaataagctgactttaaaattattggtaaaataaaattagaaatgtcttcagaattgtcagcacacattttgtctagatttactggtcaggtggttttgtgtttatctcttatagatattttataaggtgttaaagtttggcacaaaggatatagaagtataaactcagccccaaatctatgatctttgtgtaatttttgataaataaggcatttaatattgttggtctaatgaaaacagataaatcctgagttatcagcaaaaaaaaaaaaacatttatttaactgtaaatttcatacttagttaaacacctgata

SEQ ID NO: 50805 - DNA, 1030 bp, Homo sapiens
acctgactagctacttagtgtaacaaagctagaaaagttgctggtctcagacctagaattccttaggctaaagaattgtttattcattccttgctaactatctttaatagaggctgtgtgcctaggcagtggatagaagcctggtaaggaaatcacacctagctgaatcccagtggtagtgacaggaggttgattggtttcttctgcaagggaggatagtgtggaggggcaatgagcctatcattcccatttaggttggatacatgtcattcatctgcaccaggtaatccctttagtcctcacaaaatcttaattgcattctatgtcctcataagcagccattccctgtgtctgatttagtgagaaaagtaaattattgaaccttgaggattaaacccttccacacggtaaatgacaaagtaaagtatattttactctacttctaaaatgtgataaccttaaaccaaatatataatcatgtatgtgttctagagagccaatatgcacattgtgatgtatctgtaaaaattcaaacaaaaaatagtgtctacttttctaaagcaatgttttcgagggcatagtttaagatttacctttgtttataatgaaggcttaaaatgttgacatataatattgatgacattcaaattaattcatgctcctcaaacctttgttaacatacatacttggtctgattcaatccacaatgtacaatgtaatccagtttttttgttttgttttgttttgtttttgagacaaagtttccctctgtcgcccaggctggagtgcagtggcatgatcttggctcactgcaccctctgcctcccaggttcaagtgattgtcctgccccagcctcctgagtagctgggattacaggtgcccgctaagttttgtatttttagtagagatgaagtttcactgtgttggccgggttgatcacgaactcctgacctcaggtgatccgcccaccttggcctcccaaagtgctgggattacaggtgtgagccaccgtgcccagcctataatcca

SEQ ID NO: 50806 - DNA, 1041 bp, Homo sapiens
gctgaggcaggtggatcacgaggtcaggggttcgagaccagcctgaccaacatggtgaaaccccatctctattaaaaatacaaaaattagctgggtgtggtggcgggcgcctgtaatcccagctactcaggaggctgaggcaggagaattgcttgaacctggaaagtggaggttgcagtgagccgagatagcaccattacactccagcctgggcgacagagcaagactccgtctcaaaaaaaaaaaaaaaaagtacaacagagttttcttacagcactaatttgctctttaacaaaaattggcaaagaattataaaagatttataagaatcttaccttatggtcagacattaaaattggatagatttgtccataaggtttcattaagatttgggtttgacatcaatagtgcactaatacaatggtgaaatttggctttctctcttgaacaagattttcatgtgatattaagaaatgatgaaagatttttgtttgccttttgaataaactgtaggaagaagaagggaaagaaaaaaagacagattgtttggagagctaagtctccctcttaatgagtaaaggttttttccgttttaaaacattttgagttattgttttggctaattaaatgactcatggtgacctgggatttgattttataatatcaagtgttttaaaccattgatatttgacaaagcttccaaaattaaattataaattatatttttttctgacataattactagtttagatattaagtcctctgaagtccaaacatgatatatttggcctatttggtataacaatcatacagtaaacactgtcaactatgaaatggtgtttggctttctttgggttgtgtttgtataaatatattagcggttgaagttatctgtgctaccagcgttgaatccaaacaggtctggagcaacctcgattcctgccttctgagaagaaagaatccgactgaggggcataaggcagaagaagagaccaaggaaagttttagagcaggagtgatgtttattcaaaagctttagag

SEQ ID NO: 50807 - DNA, 1049 bp, Homo sapiens
cctttggaagtatcccgtttccttgcttttgatgtttccggtgtccttccgttgagatctgcacatcctgtgtaaattgcttctttcaagtttgtgaattcgctttgtaggggaggacttcctcctcttccccttgcgtgggagctgcaggctccaatagcttgcaactttagccatgagatagcaatacaagcttgccagttttactttgccccaacagataatccaatgaaggctgtgaaccaaaatttcgggtaagcagtctccatggcagtttgatttttaaagtctaaacctccccagactccaataaggatcactggggccaaactaacaaaggaaggcatcacacgttaacgaggccccctacttagaacagcagcacaaaagcccggttacatgcaacaccatccggctttcccattagacaataaacttcagattctaaacaattttggggccaaggaacattacaactctgagagaaaattccaaggagggcttaatactagaccttagaacctctgcagaaagcatcctctttggagaatttgaggcacggaggatcttccagagcatcctcctgtggggtccaaacttagagttccagacgtctctggcgttacttaggtgggcaccggtgccgctttacatgcgttccctctagagccttctatgaactttataagaatagccatgaactgtataactggaggccgggtgagcctttttgttccttagccagtagagtacaataaggaaagaatttagcataactcagttctaaaaagtgccaatattttaaaacctattattatttccaagaataattaattattatatttgaaaagtacttaatttgtaagtgaagataacttgttttaatagttacactacaggataatttgaacattggcttataagttcatattatatgtgcatcgtcaacagatgataatatatggcccagacattttaaattacttcgtctcactatgtttgacctaccatatactttttgaattataatttcttaaagttcttctaga

SEQ ID NO: 50808 - DNA, 2050 bp, Homo sapiens
tgcagaaaaggtcaaagggagtagcctctggtccttttgttacttaggcgttgaaagtgagggttttcctttcaatttagttctaggaagtcagcgtaaaacagccttaggtcccctgcctccaggccctattctcctgcctcatctccccgctgagagacttgatccccataaatctttatgtgaggcagagggactgaagagctttcttctgtaactgcttcatgccgacctggggcatagtccctacctattggaaatcacggaactctcgccatgctctatctcgtggaggcagggtagcttcttgatggccaggggtggtgtcttcacctggaactggctggaaccgtggttgcatgatcatctgaagcttgatgattatctaggcgagaggaaatgaatttggctaaaagatttaatgggaacttcagggggttgatacctatgctgtcagaaatgttttttatagagatatgcaggagaaaaaaaacaaaacctggtctcttgtagaatctatgcgtttccctaaagttttagcacgagcgactccattttggtttggtttggtttggtttgtaggggcctagtgcatgagctcagtccaaaacaatggcctcccataattttctttaaaaaattcccctttattcaggttttcacttgagtgagagtgggaccaaaacttagggccttagtgccactcttggttactattattttgggttttcattctcagcacgtcaggtataggttacggtgtcctcatggttgcagattcttttggctcttgttattccagttgaaaagaaactatatttcattttagagatggctgcatgcaagcatttaaaacctttgagagaacgcagcacaccagggagactattattagaggatataccaagaatttggagtatgccccttacccaagatctccataaaccaaacctcctaaaaccaaacagatcaaagaatgagctagataaagagtttactcacttaatgaagcaatttcttcatcaattcccgatcactgaattttttttttttttttttttttttgagatggagtctcgctctgtcacccaggctggagtgcagcggcgcgatctcggctcactgaaagctacgcctcccgggttcacgccattttcctgcctcagcctcccaagtagctgggcctacaggcgcccgccaccacacccagctaattttttgtatttttagtagaaacagggtttcaccgtgttagccaggatggtctcaatctcctgatgtcatgatctgcctgcctcgtcctcccaaagtgctgggattacaggcgtgagccacctatgcctggccactactgaatttttataatcctcatttgatgtatttccccataggccacaagtgccagcagctgcacagatactttttctgtttagccatttctatcccaactttcacaagagaatttagaatcactgtgcaactgcagcctttacagtagaatttgctatagaacctatcatgagggatatatttccaatcattgcttcttttactccaaatcatggaaaaaggacttaacaaatgatgccctttgagaagagtgaaggccctctggcagtgttctcttcaaccaatgaaatgggccaagaggaatgaaccaatgttctgcttttgactgattatgaggcaatgcatgtaccattaaagtttcttacatacattggcctttatcctttatctaccaaagtataagcttatccatgtaaccttacacttgcaggctggctggaagctccttcacaaataaaagtacaccctattagtgcacataacagacacttttccacttctattgttcacagagacataagcaagaaaaaaactttcaaagagaagagtttcatgtcactagaagtcttaatctgtgaccttgggaaagatattcacatcaaggatgccatcttcttcttgggagaaatttccctggttagctttacctcaagggttacaatgggtgcacagttccaaaagtgtggaggaacccttctta

SEQ ID NO: 50809 - DNA, 1083 bp, Homo sapiens
gatacggggtctcactacattgccaggaatggtcttgaactcctgggctcaagctatcctcctgccttggcctcccatagtgttgggattacagtagtgagccactgggcccggccaatgctatatatatttaatcatggtaggtgttataatgagtatacgtttgaagatggtatttttggccaacaaattcaaaactttaatttgtcattatataaacagagacagtaataaagcattctagctgcatgtgagttgtgtgaatgcatccatcttacagttttcttaggttacacctccaggtgactgaatgtgagagatgcctatttcaactatcatttattgaattttgctatctttcttttgaggtttcaaagataaaattttaaggaaagaattaagaataaaaatttgagaagaattaaacatcctaattttctaggtataagtatgtataatacatatgtttctattgtatataaacgtgtttctattttatgtgtgtataaatatacatatattttagatataaaagtgaaaatggagaacttatgttttgatgaatagtccaatcaagaagtttttgcaaatattttattgtctaaaattcagatattgcaactttcttatgagaataaaaaaacctcaggaatcagatgtgaaacttttaattcttcaactttatttatatatctaaattcaagtaaaatgtaaatttattgtggtgtttgactgtatatatagaactttttatctgagtgttgaaaaaatgagaggaaatatggaaacaatgatcattgtttaatacagttttatgacattgcttttctcttgatcagcacatggttatttttaacttctttgcaaattccatgtctttgttactaatgagaaaatataggactgattcccaactgaaaaacaataagacacatacacaagaaagtcatagggcacagtcctaagtgacagccatttaatgacactggaaaatatttctaattcagtgttaaataatgaaactatgagacaaaatcctgtgatcaatctgattagtatttacagtcattcctgtgtttgtgt

SEQ ID NO: 50810 - DNA, 1048 bp, Homo sapiens
atatggttactgttttactttgcaagttctatgtcttgtcactaatgagaaaatataggacttattcctaatgaaaaagagtaagacacatgtacaacaaagttataggacagtcttaagtcatagccatttaatgacactggaaaaaatttctgttccaatgttaaataatgaaaccatgagacaaaattctgtgatccatctgattagaatttatagtcattcctgtatttgtgtccattcaagtagggctgtgtgtgttttctcaggctggagagctgtccgaacccttatgttagagccccactaaatatcagcctccctctcaacatataaggcctaatgactaggtcagatcgtgcagtaaaactcctagggaacctgggtagggagtcaggacaagaaccacatagcctggtgcctagatttgctcttctgaaagaccttaggggtaaaacttttttttttcttctctccttaggcatggaaacctaaggtctgtacccaaaactacaggactatttgacatcataataaaacactgcagatatgatgctgagtaagagtagaaatgggaagacttggttgtgcagtaactgagttcttgaaaagaggagatgcttgatgagggtgagtggattacatcactgtttaatatccaatggaaaccaaaagcaaatggctaagagtggaatatgtttacacgaattgagcaaaatattgggtagccatagtttctggtgtctttgtttcttcatggccttctttttgaaacgtgtagtcatgtatgtgtacacattcatacaaaaagctgatagtgtctactttactaaagtaatattcttgaggtcaaattttaagatttatctttatttgccaggtgcagtggctcatgcctgcaatcccagtgctttgggaggccaaggtgggccgatcacgaggtcaggagattgagaccagcctggccaacatagtgaaaccccgtctctactgaaaatacaaaaattagcagggtgtggtggcacacacctgtaatcccagctactcg

SEQ ID NO: 50811 - DNA, 1044 bp, Homo sapiens
tcttaatacgcatgcccaagaagctgcttctccctggggcctgcattcagttcacacttttaatattatcaggtgtgggccatcaggagattgcctctcccttgctaccaaattatcatttttagggagacaatgtgatcattgctgaaccatcatgtgacatttctattgggtgggggagagtcctttcctgccctgcttattgcctatgtaactaactgtaacaactttactttttcatgtatgactattgtgtcaggcacattttgaagaagcatgagtgtttcagtaaattcaaaaacagatggcaaaagtgacatcaatgacaatggtgcagtagacactttctgtagtccatctctccagaaaagcaactcaaaacagttaataatgtataattagaagatcattttctcagcacgatatatggggcattaattaaaaacctacagctaataatatagtcaagagggaacgactgaaagctttgcttctaaaatcaggaacaggagaagaacacctacttttgccacttgtattgaacattatacttaaaattttagcccagggcgtcaggcaatgaagatatataaaatacatcccaattgaaaagaaaaaatggaaattatttctcttcacaaatacgatgatcttgtaaaaaatgcttaaaaatccagaaaacaacaatattagagctagtgaacagtatctagcaagcacagcaggatagaacattaactcggaaaaatcagttgtagttttatttgtgtacactagcaatgaataatctgaaaattaaattaagaaagcaattccctttacaatagcatcaaaatgaatcatatttttaggacaatagttaatagatgaaagtcttatacattgaaaatcacaaaatattggagaagaagttaaagataaccttgattttaaaaaaggacatcctgtggtagtgggttggaagacaaaatatttttaacataccaatactacccactgagatctataaatttaatgcaatcattattatcccaatgagcattg

SEQ ID NO: 50812 - DNA, 1050 bp, Homo sapiens
tggcgttttttcagacaagaagggcgggagaagaaggctccacgacacctgttagcacatctagagcactactgccaccgttaggacatagttaagcaacgccctacgccctatgcctaagccatgtcaatgtccttcccctgaagacagtccttccacctgttggagaaggtctggcctgtggggagggggaagaggcttgagctccatgctgctcatccttgccctatcctcaaagaccacactttgggaggctgaggcgggcggatcgtctgaggtcgggagtttaggaccagcctggccagcatggtaaaaccccatctctactaaaaatacaaaaattagtcggatgtggtggcaggcgcctgtaatcccagctactcaggaagctgagaatcgcttgaacccgggagggggaggttgcagtgagccgagatctcgccattgcactccagcctaggcaacacagtgagactccgtcaaaaaaaaaaaaagacctggacattggtagtgtcttggtatagaacctggagagtgaaggaaagtaaatactgtgaatgtcgcttggtaaaatcctgttccttgtacacggtactgatgctaccagagacccaaagacctgtagcaagatgcaagcacatgaaagcctgccaactcttgctccaaggggcaggaacaggagacagatgcccacaagagcctgcatgtgtgtttgagtgggttcctgttgtccagcaaacaactggggaaatagaggccctgccccggaaattcctgtgccaggactgcctggcagctgctgcttcactccaagcccctcactctccaggttctacaccaagataccgccaatgtccaggcctctcttaagaccttagaggagaaggcaacaagacctagcctggagcccaatcctcttccacctcagcatagattagaccttcccccacagcgaggcttccagggaagaatactgtaatggcggattctgtcttcaaactatttcctcacggtggcagtagtgcttcatattttcttggaagctctgtc

SEQ ID NO: 50813 - DNA, 1074 bp, Homo sapiens
atagaacttttatctatgtattgaaagtgggagcaaatacgaaaaagggtatcagtgttttttatttttattttttgagacggattctcgctcttgttgcccagcctggagtgcaatggtgcgatctttgctcactgcaacctccacctcccggttcaagcgattctcctgtctcagcctcccgagtagctgagattataggcatgtgacaccacgcccagctaatttttatatttttagtaaaggcgaggtttcgccatgttggtcaggctggtctcgatctcctgacctcaagtgatccgcctgccttggcctcccaaagtgctgggattattggcgtgaaccaccgcgcccagccttcagtgtttaatacacagttgtatggcattgcttttctcttgatcaccacattttttttagcttctttgcgaatcccacctctttgttactaatgtgaaaatacaggactgattcctaactgataaacagtaacacacatacacagcaaactcataggacatagttgtaagccattgcagtttaatgacccaggaaaatgtttgtgttacactgttatataatgaaactgtaagacaaaatcctgggatccatctgattagcatttatagtcattcctgtatttatgtacattcaagtagggttgtgtgtgtctgtcaagcttgagagctatctggactcttatgttagagccccactaaatagcgacctccctctcaacatacaaggcctactgactaggtctgaacatggagtaaacctcccagggaacctgggtagggagtcaggagaagaaacacgtggcctggtgcccagatttgctgtcctccaagacctcagatgtcaacatgttttttttcctttctctttagacatggatccctgaggtcggtccccaatacgacaagacaatttgatatcataatagaacactgcagaaacaatgctgagtgaagaagagtagaaatgggaagacttggttgagcggaaactgagttcttgaaaagaggagatgcttgatgagggtgagtggattacacctcagtttaatatcca

SEQ ID NO: 50814 - DNA, 1005 bp, Homo sapiens
tgggaggctgaggcaggagaatcccttgaatccaggaggcagagattgcagtgagccgagatcatgccattgcactccagcctgagccacagagcgagactccatctcaaaaaaaaaaaaagaaagaaagagagagaaagaaagaaagagagagagagagagagagagaaaggtcatacttagatacaatagattaaaagtcaaaaactgtaaagagaggcaaagaaggtcactgtataacaatgaaaatgccaatacagcaagaggatataacaattgtatatatgtatgtacccaacactggaacacagaaatatataaggcaaacatttgaagatctaaacagagtgatagaatggcgtacaacaacactgggagacttcagtactccactttcagtaatggacagcttaattagacaaagaaacattgaaattaaactgttctctagaccaaatgaacttaactgacctttacaaaatatttcatccaattgctatagaatatacattcttgtcatcagcatatggaacattctccagtatagagcatatgttaggccacagaacaaggctaaacaaatttaagaaaagacccgaaaatatgaaattactagaataagagcctggggaaatgctttaagacattgttctggggaaagattttttgtataagatctgaaaagcactggcaatcaaagcgaaaatagacaaatgagagtaaatcaagctagaaagcttctgcacagcaaagaaaacaacaaagtgaggagacaacctacagaaagagagaatatcttagcaaactattgatctaacaatggaataacaaatcacaatgtaaaacaaactcagctcaataaccaaaaaccaaattatctgatttacaaatgggcaaatgatctgaataggcatttctgaaacaaagacacaaatggccaacagatatatgaaaatacgttaaacatcactaaccgtcagggaaacgcaaatcaaaaccatgtga

SEQ ID NO: 50815 - DNA, 1030 bp, Homo sapiens
acttgtttcttggtggtggcattaactgtgacctacctgcttttctttaaacagggctactgtatctgaaaatattgtaaataagcagatctaatttcgagaaatgccaaaaacaggaaggcactcttaaaaacaacctggcatcccacaaaatatttaagaataatctttaagaatatttaacaagtttgcaaatgtttaagctacaataaatgtagagaacatatttgaacactggacatacaaatatatgggaactttaaatagagaagttcttatatgaccaatagaagacgtgaatgtgtgataaaaccattttaaaagtcatttcctattgggattgagagaccacttatttatgatatttatacacctatctgtgtacacatgtttactaaccatagtagtgattagtcatggtagtgattagtcatggtaatcatttcagttaccatgatctgtgcctatatccgtatgtatgtgtgtatgtacttatttatacaaaacaagatgttaaggagaatttgtacatgcatttaatgcaagcaaatactttcccttcaaaactttgtcagaatacacatctggtctgatccaaaccacaatgtacagattaatccaattttaatatagatttattttttgtgtgaacaaaatatagtaggcgtatgtatctatacattgaaaagtatggaagaaaataacccaaaatgttatcagttgtcttaacagattttatgatggtgttattcttcttgatgtacacaagattatttttgaactatatggcaaacatcattcttttttaattttttttttttagagactaaggtgtcagtatgttcttcaagctgctctgctcctgggcccaagctattctcctgcctcagccttccaagaagctgaaactacaagaacacaagactgtacctggcttgcaaacaccattgctaataagaagatattgtaagactgatacctaagagataagaggtaacacacacacacacacatgcaggcacacacacac

SEQ ID NO: 50816 - DNA, 1069 bp, Homo sapiens
tcgccattgcactccagcccaggtgacagaacaacattctgcctcaaaaaaaaagaaaaaaaagaaatctagccaaatgaatattccagaaaagagaactgaagtggatgaagaaggagaaacaggaataaagaccttacactcttcataaatggaagacataagcactctaaatagtcataattgagggactatactgcaaaggacataacatgagtacagaataaaaatattaaagaattttaacaaatcttttaagtggggaaaatataaaaggacgaattggaatacatattttaatggacacaacatcttgggttagttttgaggaagaatattaggtaccttgagctaagaaatagtgtgctttgggggactttatagtactttgtttcgggcaacattagaaaaatatgtggctattggtagacatggagaaatgaaggtaactattaatggaaattaacaattggtaaaaagatataatcaacaactcaaacatcagaaatgaagtggaaaaaaaagtaataaacataatgtaggaaggcaggaataaagttaagtgttttcttcattacagtaaacgtgagtggacacaattatctcctcaaaagacagaagtcattatattgggctaaaatacaaaacgcaaaacaataacaaaaacaaccctatacagtgcttttaaaaattaagtcacttaaagccaagaattataggaagttttgaaaattaaggttggggcaaataaatatcataccaaaggaaagtagcagtaccaatattaatatcagagaaatgcgcttttgaagtgaaaagcactaaaacataaaaagacggacattttgcaatgataaatagagtagtactgaaccaataaatcaattgtcatagaactgatacctttatgatactgcattttcctatgtttgatcatggtgtctgcatttatttcaatcttctttactattacttagtaatttttttttttttgagacagggtttcgctcttgttgcccaggctagagtgcaatgccatgatctcggctcaccgcaacctccacctccc

SEQ ID NO: 50817 - DNA, 1049 bp, Homo sapiens
agctattgtccttgatggtggtattccagtagctgacaggagtaaagaacactttatactctaccacttgtggaatttcagctacttgttacttaataactccaacaaaataaattgtagcccacttaagaggcataagcagccttaggcccctaacagcctctgaacaagccaacctttgaatcagcaaatacagtagctagatgagaaaaatgacaacttgaattaaaaaacaaatatgaaattattaagattcagatgcctcccaaaagcctttatttaggaaaatgctaaaccattaggaaaagttttgaaagggagatcaactgacattgaatgacaggctagaaggatcaactgcataacatatctcaaaacaaaggaaaaaataaagcaatgggaaaaataaggaaaagttaataaccttaaagatctaaggttttaacatattactaaaagatgttacaatagggaaaaaacagaataaacaaggcaaaatttaaggcaacaagtagaagaaaacttcccacaattgaagaaggcccagattgtagagtctcactgtggtatagaacggaataaagatatgcactaagcatatgttggtaaaatactagaattattaaaaagtcaccttataatcttcccaggtaaaaattaaaacttacaaaagaaatattggaatgagactccattctgacttctctgcaacactggcaaacaagtatcaatggaataacatctatagactattaggagagagagaatacaacataaccgttgtgtgtctccagccaagaaattattcatcagtcaggctgaacagaagttccttgtgcatatggaaaccttcagataatatatcatccacatatcctgtataaggataatacttgaataaatatctagccatggccgggcgcggtggctcacgcctgtaatcccagcactttgggaggctgaggcaggtgggccacctgaggtcaggagttcgagagcagcctggccaacatggtgaaaccccgtctctactaaaactacaaaaatta

SEQ ID NO: 50818 - DNA, 1442 bp, Homo sapiens
cattgggaggatgggaagaaaggatggatgttaagtgaagtagtaatattgatattagtgaagtgtagtgagggcaaagaaagtgaaatattcttctagaaggaagagtatatattatgaatgtatgggttagtttataaattggtaatatgggcattctatttagggatacataagctagtaaaaacttattcgctaagagtgttaaaagtgtttcaatcagccgggcgcggtggctcacgcctgtaatcccagcactttaggaggccgaggcaggcagatcacgaggtcagaagatcgaaaccatcctgtctaacacggtgaaaccccgtctgtactaaaaatacaaaaaattagccaggtgtggtggtgggtgcctgtagtcccagctactcaggaggctgaggcagaagaatggcgtgaatccgggaggcggagcttgcagtgagccgagatagcaccactgcactccagcctgggtgatagagtgagactccgtcttaaaaaaaaaaaaaagtgtttcaatatcggaggaatgtcagagatggcataatgttgtttgtaaagtattgtacaaataactgatgttgaaaaatgtgttcatgtataattttgacttaaaatctttaaaaactgtatctatctatctctctatccatccatccatccttgtggtatataggcagaatactaagatgattccatctccctgtataattccttaagtatgagtgggacctgtgaatatgatagattatcacttctctgattcctttatattatatggcaaaaatgatagggtctcaaaagggagattaccctgggggggcctgatctaatcaggacaggaaaagagggcctggtggtctgagatcttctcttttgctagcctcaaagaagtaagcaattatgagttctatagctgcaacaaaatgaattctgccaacaaccacatgagcttcccagaggatcttgagcctcagatgagtccccagccctaaccgacaccttgatcgcagccttgagctgagtacctacctgaactatgcccagactcctgactcacagaaactgagataaaaaaaatgtatgtcgttttaagctattaagtttgaagtaatttgttacatagcaagagataataaatacaatgcttacacacagggaagaaaaaaaaaaaagaaaacctagtaaggactgaaagtttgtgttacctcgaaattcatatgtgaaagtcttaacccacagtgcgatggtatttggaaatgagacttttgggaagtagttaggtttagatgaggtcataagggtggagcctgcattatgattagtgcccctataaggagatgaagggacagaggtttctcactttgccttgtgagcaacaggaagatgtccatctgcacacctggaagaggaccctagccaggaactgaattggc

SEQ ID NO: 50819 - DNA, 1052 bp, Homo sapiens
catacactaagaggccaaaaaatgttacacctatagccaaggcctgtcccctaatagagttttgccgtcatctcaggtctcttggtggggttggtggggaagaaggaaggagtgctcatctctttatttgttctcccagaggatgctgaactccttgaagtctagtgattctcctcatacataacaattgttcttctctgttacttcttcataaaaagctccagatgaggatacctggtaagcctgacaacccatacttcttgttcccaagttggtggagaatgtctagaattacttgggattcattgcataatggagaaacattctggcgccctcttctactttcctcactcagttagcatttgacctcatagagtagttgaagatgattttttgtatgtgtgtttgcgcgtaagcgtcctgtgactaaaaaatttaaaactttctgtttctgtcgtatttaaaccaacggcaaaattggtaaaggaattaaacaggcaatttacaaaagaagaactccagctgtttattaaataaatgaaaagatactcaattttactagtgtttacgacgttccaattacctacacacattgtgtttatgtatatactgtgttagtttataaatatatgcaccaatatttgcacatattcctatatctatgcacacatacctgttatatatatatatttatatgtactatgtatatatgcatgcacattaagttatatacaattttacaaatatagagatatatataaagacatgtatgtgtaaatgtgtgtgtgtgcacaattaaaataattctattcacttaaatattatattcaattacatattaattatttcagttaaatattataactgatattatagtaaataaatataactgaattatattaagttaaatattaaataattctattcagttaaatgattctattcaattaaatatcctatttagtattcttttatccccaaggcttagaacagtgcccggaacttggcagcaactagataaatattggttaaaggaatgtatgatttcctct

SEQ ID NO: 50820 - DNA, 1024 bp, Homo sapiens
catacacctagcaactattactgatacagtggaatgtgactttgaactaattggactgaagggaagtactttttgttttatggctgagagaaacatttttctctctctgtcactgaaaatgaacaggaaggatatttcctcagtggctttaggaagtcatcttcaatgaaggaagccagtctgggacctgtgtacacacacagagaaggactgagctgagagaagtggagaaaaatagaactgggaacttgattgtaccatgctcagaatccaaactatttgggggcttctagacatgtgaaattaaaattattatttaactcagtttatgttggcttttctgtttcttgcaagccaagatatactaatacaaccgtctactcccttaaggtgaagcttctgacacttacggagaatttcagggctcattttatttggttggtgcaagtggactagaaattgagataaacggataaacaaaggtttacagaggcagagaatcaattataaacacggactttggttataactctagataattttcattggcccaatgttagggaaggaaactagcattagttgaatgcctattatgtgccaggcactttccaatatttgaagacacttaatcctcacagtaaccctgtgaaggaggtgtaagtttgtctgtagaaagtgaggcttactgaggttaaatgcatagcccaaggtcacacagctcataagtggtagagttaaaatccaatcttaatcaagttagctacacatccagtgctgtttctgttacatccttgacagacaattctttccagataattagagtctctacaccagagaaagctatccaaagctttagaccaatcctcttctataatggtggtattatgtagtggttaaaagcatggactcacaccaacattggcttaaattttggtaccaattattcaggtccatttcttataaagttcttctttgcactgaggcaagctggcaccattcaatatctttttgaccttcaatgagt

SEQ ID NO: 50821 - DNA, 1032 bp, Homo sapiens
attatcatcatgctgggctgctgctgcttcctgtagccaagaatttaaattgttggaatgagcttagtggaaagtcatgggaagaggctccaaggtagtgagaagagcaccattaaattagctaactacagagtgtgacctaggaaaagaggctgttgtgaccatatcatgtggtcatgattcaaatgaaatgggaagtactgggtgattagatattacaggtagggtgaagaaccagttcagtaacttcaaggagtgatggagacagcatggaagaatgacatgattagagatgagactgctgagtccaaagtggcaattgctattctgtggctgatatggatttaaaggagccagctcttctacctcctgccattatgttcttcaatattcctgttgatgtcctcattttaccaaactcactggagtcttgacttcatagttacgttcttctcctggttgctcaagtacaatttacattaactttaattctctgtttttaaacattctcccatgtagttctgagttccactggcacaaaatttaggtaacaatttgggtgtgcgtgtgtgcatgtgtgcacatgtgtgcttgtttagtgtgtctcagcttatttctctttggttgcacatatgcctattgataggaaaattatattcaagaagactcggttcaaatatatgtggcattgcatgcttaagagtttctaataatgctgattttcatatttcaaatgtaagaaaactgacttttgaggttcatttgtctgagagttcctaaggatttagtaaagctgcttttggatataggcctgagaactatggctttatgctgggttttgaatgtgtgagtgtggatgtgtgtgtgtgtctgcctgtgctcgctcaagagctcacatgtgcttgcttcccccacctcctgtgctttgctgtaattgaaacatcacagagcagcccccagcaggacgccagcaggtaccctgagggctactagctgtgtgattttcttagagttgtgaaaaagaaacttgag

SEQ ID NO: 50822 - DNA, 1024 bp, Homo sapiens
tctaagaattgcttctgataattcctcacatttatgtcttaacatctttcaatttgggtcacaggcctcgtgcctaacacctgtttatctgcgtggctcccaggattgtttcctcaccttttaccctcccattggcagtaactttagtgtaagtttggaagcataaccagattccttatacgctgccatcatcctgatttctttactgatctgaggagcgtatgatcaagtgctttgaagggacttcttttgctgtatggcagcagtataatggaaacccgggtcagcattgtcaccctgttctggtttcattcactatatcatagctcttctgtgctggtataaattattggcagttcactgtttgggtatatttttgttgagaaggattgatgttttgttaataatctcatagtactataaaagaagtaaatcactgtcctgtgggagttcagggaaaggagagaccacaaccaactggaacagagtttcttaacattctgggatctttgctgtttggggctgtcctgtgcattgtcagatgtttaacagcatccctagcttttacccactagatgacagtagcatcttcctcatcccccattatgacaagaatatctccagaaattgccaaatgccccctggggacaaaaattgcccttggttaagcgccaccgagttagagatattgggagcaatagcatttgaatcaggctttgaagatggataggacttgaggggactggtggtaggggtggggggtgtcagtgttgaccttcaaacagaaagaatgccaagaaggagcataatcatatcctaaaatattctgttgattccctaatagtaagggggaagtgcagtaaaggtgtctcttaaatgtgacagtttgatatatccttttggcaaatagaatattttaaagatgatttttcaaggattcctttatgtcagtccagtattgatgaaagtgataaagaaagaaaatgggggaaaaggtgttattcactgtggtttgaaggtctcc

SEQ ID NO: 50823 - DNA, 1035 bp, Homo sapiens
ttgcttttttgtagctctaagtaactaatcaatttaatttcaaaggaaagttaaagaaagtttaagcttttactgcatggattctgcccgcctagctaggttctgaactgacactgaagtatgacaagatacagattatagtccaaaactatcctttacagttcacaatttaagaacaaatttaactttatatacaaataataattgttatctaattatatttagttgttgctttggcaacaaaattacaacatggctacctttagacatttgtgtatgtgaacattttacttgtaaactataggtgatttgtgacagtatgagcctgtagaaaatacagctcaaaactatgaaaacagacatggttgagttcttttttaatcccaaaggcccatatataaaagctgaatttgtgtccttgtgtgactttttgtgaaaaagtttataacacatggattctagaatcaggctttatagtttatagaatttgttgtgtggatagggttattccacagtatttagacttcaaaacgcaatcattgcatttttaatacattacctaactttttttataacttaattcaaaattaccccattcaagtggcatagctgtagctgcaaaaattctgttttctggaattacatgagcaaatatagctatatgaggattaatgtatgactaaagcctcttttgaaattaattcatatttttaaaactatacataaagatactgtggaatgaccccttaacagtgtttaagaaacatatgctgcagttaattgactgtctcagttagggtgcggatgtgtgagacacaccttttttgcacttatgtacatagtccatgaaagcaatccttggagctttttttaaatgtaagaagtctgtgataatagtggaaaagttagtaagagagagttatttctaaggctttgaaaaggagggtgtttttgctctaagacttaactaaagcataatgttgctttgctgttacggaggctttctagtttgctacaggtcaccaaaagagaagg

SEQ ID NO: 50824 - DNA, 1112 bp, Homo sapiens
ggcagcctcagtcatgtgttgactattgttctcttcttggagggagaagaaagaacttatgaaagaaaatagcaagagaagcacttaggtttctaaggtagacttagtgttatgccctataaaattattctcacaaacttcaacaaacgtgtatggcagggcggctattcatcaggcacacacacatccctggagattgaaagtggaggaagatgtagttctgccgttatacaggctcaaagtctaatagaggagacaagcatgcaaacaatttatcgatgtacacagcgataagagctacgataaaactgagtacaaggtgcagttggaagcacaaaggagggagagataaatggggacaggaatggggagacggttccaggaaaatctttacagaggaaaagtgatttgaactgagaatccatattgggtagtgaaagtctggaaacttggcttgtgtgcttactgagctgcttatgaattaggacaagtcaccccacccctttggccttcacattctctgtaagataaaggtgcacaagatgttccctacaatccgattcagccctaaactgtttccatcctgggaatcaagttatcttagtgggctatttcagaacaaaagtgtgattgttgagcccagtactccctttgtcattgggagatcaaaatgtaaaagttctctggagacagataggcaagaaaattcttctgctctcaccccagcttctcgcctattcaaacttgttatctggtttgcgccaaagtcattgccctgtgtatgtgtgtatgggatgtgtcaagaaaacagagttgggacagcatgaagaaggtgggtacagtgctggctgcaatggtggggggtacttggctggccctctccatgggggtcaacgttcagcctcattaattttgccttcattatatttaagaaatggtttattaaagacttttccctctaaatttcttgcctgcatctcacatttaacttaaaagttgtatgcagaattttaaggctgctctttgtgcatctatatcaatatttatagatgatacaatatttggaggagaaaatgatgcagattatccatttttgtaaagacagaattcta

SEQ ID NO: 50825 - DNA, 1066 bp, Homo sapiens
actcttgttctaaatacacaatgacattttgaaagtccaaaaagtttgaacatagaaagacaaagaaatataataatagagagggtccatgaattgacactttttaaaaaacccacaataactgtaatttagtccaagcaatatgcttttaaaagaaataggaaaaataataggaaagtaatttcaatatcgaagtttaagaaaggatctctaggcttatgtactatatcttggagtttgtacagtcagcccagtctcttagactttctccatgttcatctccattcctggataatgattgctggttttctgtacaggcgatcctgaggtcttggtgcaatcctcaataaccaagatatgattcaggtttggacaattgactctgctttcaaaaacagggaaggtgtctggaacatttgagaaaagtgtttcaacaacaacaacaacaaaaccttaaaatgatttttaaatatttagcagcattcagctggtgtcaacatttggcaatgatttccataattgtgactagcatattttaataggcaactgacagataaaacagaaccaagactgtctccccctttttcccaattcttgaggcctcactttagtggcatgtgacatttacttcatctttgaaatgataaaacatttaaatatgtttcacttatttctccccaaattttcctattgtcccactaaagaaatacctttaaaaagtgacattgcttccaagtcagagatttaaaaaaaaaaaaacagaaggaaagaaggaaggaggaaaggagggagagagggagtgggtgaagaaagaaagaagttaagagacacccattgagaaaggcttttcattctgaaatacttcagctccaataataatgtatttgtaacaaaaacataaggaaagtgtaatgaatagagtaacatactcatgaaaagagggtaatatagaagagtgggattcctccacccccaagagagaattgtttgtgccatttttatcgcatatttttcattataaactcctctgctttcgttgaagcaaaaatgaatagctgtgattaat

SEQ ID NO: 50826 - DNA, 1025 bp, Homo sapiens
taagttttactatagtctctaaggatgctgttacatcagctctgttttctatcccttgggcaactgttaacttttttccgtctaggtcccttgcactctcccacactttatttaaagcttcaccttggctgaagtcaaacctaaaacaccaaataaatactataattggctcatttttaacattttctttgaattcctaacagcccatttaccatatctgtcattaactgggatcttggctttattgagtgcctacctcacaccaagcatttgcacatctgtcatatgacttattcctgctaggaaactgagatactgagtttaaatatctggacagaggttcaaattcaggtctttgtgattctaaaccttattctgtagtgtatacaacaacacactttcttcacttctctgggtctggtcttagtttcctcacctgcaaaagggaaaaaaatatataaaaagtagactgagagcctattaagtgttaggcaccaggctaggttctgctctgaaggggttcacagaaatagacaactttaatttaatgggttcatggtggtgatgtctgtttgaacagtgttttgagtacccattgatcccttttacttggtgtaaatcaaaagctggctctcgcagaataagtaggatttctcccattctaaggaagcacattccataatcctataagacctttaaatatatttttaaaaatcaaatttatgttgtactcttctttctatacacaggtttattaagtatgtggcatggaaattatagtttgttagactattaaagttcatgagaacaggaaccatgtccactgccttgtactaatacttaatacatatttggaaaacaaatgaaagaaaaaatagttttaaatatggagactcttacacaactgacaatttgaagttttaatgagtaactactatatagtgcacactacctttattatttatacaaatttcaactcaactagtatttattgagaatctagtatgccaagtactgtactagga

SEQ ID NO: 50827 - DNA, 1022 bp, Homo sapiens
tgatcatctcagatccaggagaggagctctggctcatattattcctcatgttggataatcattaaaacagaagaaaataaaaccctcttgaaatggcaggttttttaagtgaaaataagtaaggtttccttggacccctataaggagactcttgtgaagcatgcatccagacttctgagactttatactttttgctttctagagcaggaaagacttaagaaataggaagtcagaaagtacagtaaaaatctatgggttctgtgctgttaagggtccctttctgattggcttggtgtgaataatggtatagaatttaaccatgtaagatgttagaggcctgagacttcccttgacatttccttatgctggcaggcccaggcagtttgactttggctcttgtggcacttgggtggcaggagaaacagtgtttacaaccaccttcacctccaggaatgtattatacttttaaatcaatcttagtatctgtaggcaggagtttatatataggaataaaatttgaacccccattttcacacccaataaaaacgtcctgtaataggtgtttattcagagtcaactgacatttattgaacaattactgtgtgccagatgctctgctaggtactttcattttgttatgacagtttttttaagttatgaaatacagttggttctagctgggcaaatactctctttggcatctaatagatatcaggctaaaaattgcatcctcaagtccctgctcactttttgtataaaacacaccccccaacacacaatcatttcttctctgtcttgcttcatcatttgggaaccatctaatggcccatggcctgcctcttccatccatgaagatatttatttcattataaatcaagccaacactaatctgttacccatcttgatgtaacaaaaggctgctttcactgtttgatggatggtgctacagtaggataggagaaacaggaagaggcttgagaggtggatgaagagtgaggggtcaggagtgtgaaatgatgtgg

SEQ ID NO: 50828 - DNA, 1030 bp, Homo sapiens
ctcatgtgtttcatctgtagtaatatagccacaaactggacaagaagctgggtatttgggtttaaaatagattttcttgactctgagcttgtatcagtatttctagcttttgttttgtctgacagtattgcagtcttgaaaatcctgagagctaaaaaactgaaaggaatttttccacaccttgaagtcacagtgttttagagtaaaactattttgtgtacaattgtgtttttaaaatagttagtagatcactatggtatttcaattttctttagttttaattgaaaatgtttgcttttaaaactgataggtattgttggaaagcaggatgaagcctgagccagtggaaaagcttgttacagaaaaaacattttgtgttattgctgtggtgtgcatgatttgcaaagattaagtgcattttctctgtctatactgattattgtatatagaggatgttataaatatacatatacatttttgccattatgtaaatcccatgatttcaactgtaaacatctgtccattggtgtagctttacaaaccattcactgattttgtgtaatttaacaatagatatgaaataaagtttaaattacaggctctgagtaatctcataatttcaagatttgcagctgctagacattgtgatctcacaaaccagaacagaatttttttcaacaagacatttccttttatcctcttggcagccaggtatgaaaattagatggcccattctaatccctcacactaaaatggccttaatttggggtgattccttctgggagtccatgttttttgtacaagcgtgtccaacccacaatggtgctcttcattctcccttctatccacagggtagagtttaaatgtaagcattaatgtattggtttttaaagtcccaaacacaaaatgtgcacattttttcaaacaaactcttatagttagcactatgggggagtggggtatgatttgtccttgcgcttttccaaagagactttaaatgtcagtcccaaggggttagaggaagaaagct

SEQ ID NO: 50829 - DNA, 1066 bp, Homo sapiens
tctcccaaagcgccactgaaaagatggcatagcttaaaagatgaaagtgtccaaacacatcctgcttccttcattggggaagttttaaaaaaaagtttagatgttgcctttacagttgcctttcaattcagtgttatactgtgtgtaggtaaaacaaatctcaatatggaattaaattgtctttttggggttggactaaatatgaaatccgaaagccaaaccagactcaccagaaattgctgtttagatattttaagaagttcttaaattagttatggagacaaagtgaaaacataaaatgtgaccatttaacttatggctaagaaatggactttaaattattcatgatacactgttaaaacccaatcttggaatcaaatattttttccaggggtgagaataagtataaacataaagcaactaaaatgaaacataaaaccttttattttcttctgattttaacaaggaatctatttaaatagaataacaactgatggtgaatcttaccgagctgtagaaaataaaaaattcctctccaaacatgggtagttttatgtcaaaatattggcttttcaagaacaggactcatatcttgatatttaagagatgtttaaaattttaaactttttctaccttctactgtttaaaggttttacacagggtgtatctcacattaaacaaaacacctttttttcaaaatgaaataccaatgtaaagatctaatttccaggcgctttcagggcactgtaatttcaacaatactggaatcattttggcgctgcttctcattcattttaaggcttctctgaattgtgctcattccaaattaacccatgtatagaatctttcttcatcatctaaatggtgtgttgctgaagttattgtggtatataatcctggattaaagtcaggactttctttctatagaattattttatcaatatttgtgtagtgaggtcctaatcaagaaacttgaacaggataatgtgtctaaaaatattgctgaagttattcttgatcagatagaatttaacctaaaatgtgaactcttacttactttttgtac

SEQ ID NO: 50830 - DNA, 1043 bp, Homo sapiens
caaaagcttgtgacaaatgaaagcattaatattactgcttattttttcttttactttcttttttcttttttgcaattgcacctttgtagaaaaagacgaatgacaaaagcataaactgatgtcagaatgtattcctaaagatggcttttagtggagtgtgctcaaggatgaattcatttatagcctaactaccttttccttcagtagtcccccatccagaatagtgtgagatctttgatcacaacaaaaaattccagtttatcccagaaagtgcatttattaataaggcaggaaagtagcctaagctatttgaaaaggactttcaataaccggggataaataacataggctggacatgctttgatatttaacctagtgctagtcagctgtggcaaagggctgtttaaagatatctttaaataaattaggcagccttttgtgtatttgaaagaacatcagctttggagttaaatagacctgtatttgagtcctgactctatcattcattaactttgtacctacctcattgggctgttggtgaggattaaatgtcataaactaagtaaggctctcatagtgcctggctcgtgacaagccctcaataaatgtcaactagtgattatgcttgtttcagctgccaacgtattgcagtgggggacagtgtgacctggccagtatgattctgatgagctctgtttggctcagtttttctggttgtctgcttttgccagttactgaaatgtggaagcaaaagccccagcaccataataacaatataacataataacataacataaacagtgcccatagattagatgctacaagaaatgagtaacagatccaggaagaaagagtccagccatggaaatgtttcttagcaagttcacctgcatctctgtgatggttaggatatacagtacacttcgtgacataataaatccacccccccaacccaacatatatgactttccatgctggtcatgcttctatagcttagtcaagaagagtgttctgttaatcaagccttgaaaagcaggaaccat

SEQ ID NO: 50831 - DNA, 1021 bp, Homo sapiens
ttctggttgctctatttcattgcctggatgtgaagctgggtagccagccctctgtttcagggaggaacagatggaatgggatatgtctgagcagcagagccagactaccctggaaatgactttcagggaggtgcaagcagtttcttctatgccaacagtgagccaaattgacaagacagaaaaaaaaaaaacttcagtgcagaactgtgtcactgagatcaggaagcataggttttgcagaggttgacccatgaccaatcaggccagaccactgcatttagcctcacatatggttccctttggtaatgtgaacctgttattctggccaacacagcagaacacagtcaatccatttgctgacccattggattatccccagaaagcaagtaactgtcaaagctgggcatgtgtagtagccaccaagagcctttataatgttcatttggtattggaacattttcatactttacatgagaccaattattttgctgaacacaaggacactgagactcaagaaaggtaagtcactttccatgaggcacacacctagctactagcagagggcagcctagacacctggtcttctcatacttgtcccatgatctttccactgcaatgtatgctacagttcttctcccagagagcaagatacttcagctaattgcaccaagggaggccaggagccagatctcaggatgtccagccaggtgctcttccctctttttgtgtgggctctgccagctactgtgaaaatggagactttttggaaaaattagaatcatcctacttttaaaaaaatgtagcagtagcggtgatgaaaggaaaaagcatgtacttctcaactgcttcattttttcttctaaaataatggtatctctggttctatttggacagctacctttcctcaacagtattgttgagccatctcaagcctctaatctactccatcaatgaagcaatagagaactcatatatcactatagctattctctctcgaatcagccaaccaaagctaaggaga

SEQ ID NO: 50832 - DNA, 1058 bp, Homo sapiens
cttctttttcaatttggatgccatcatttgtttctttcttttcttttcttttcttttcttttcttttctttttgaaatggagtcttgctttgtcaccaggctggagtgcagtggcacgatctcagccgcagccacgcgtgatcccaggttcacgccattctcctgcctcagcctcccaagtagctggggctacaggcgcccgccaccacacctggctaattttttttttgtatttttagtagagatggggtttcactgtgttaaccaggatggtctcaatctcctgaccttgtgatccgcctgcctcggcctcccaaagtgctgggattacaggcatgagccactgtgcttggccaaaactacaagtttcattctcttgtctgattatgctagctaggactttcagtactatattggttaacagtggtgacagcaggcatccttgtcatgttccagatcttaggggaaagactttcaatttttcctcatttagtatgatactagctgtggctctgtcatacatagcttttattatgttgagctatgttccttgtatacccagttttttgagggtttttatcatggagagattgaattttatgagatgtgttttcagcgttaattgaaatgatcatatagtttttgtccttcattctgctgatacgatgtatcacattggttgatttgtgtatgttgaaccattctagcatccacaggatatttctcacttggtcatgatgaatgatctttttaatatattgttgaattcagtttgctagtgttttgttgaggatttctgcatcaatattcattagcgatattggcctgtagttttctttttttgatgtgtctttggttttggtatcagggtaatactggcctggtagaatgagtttggaagtattccctcttcctctatttcccagaatagtttgagtaggattggtattagctcttctttaaatgtttggtagaattcagcagtgaggccatgaggtccagggcttttctttactaggagtcttttattacagctttgatctcatgacttgctattg

SEQ ID NO: 50833 - DNA, 1053 bp, Homo sapiens
tgagccattagctatgacaggcagctccaagccctcagtcacttcgccatggccctagcatcgtcaagtgagcaagattagacatgtcacagttgcaagatgatgcctaaaactgatggcttggtgaaaagaacctttaaaaatgacaaggccatcttaaaagctcctgaacagggtgggacatggaggggtttgagagcagagcccagctcggtgcagagagaacatctcgagtctgcactgtctgctgtttctccgtaccacggtgtgctagcaggaaagccttcaaaggattaaaacccaagtatttatgagctaaacataatgtttccctctctctgggaatgcccagtgagaataccacttacatctgcacagaatgattgcatttcgcaaagtactttcacatgcgttagctcattaaattcttaaaacttttactcgtgggaaatagatagacactacatttttaccatgttacaaatgagtaactaggtatgccctttaatctctgatccctgaccccacaagccactcttcaaggcttgaacccatggcttctagtccggtctttccatcatcctgaggtgctcagttattcgagcctgtagctaatgactgcaggacacataatcatagcaactcacatttattgaactcttactatgtcccagacacttcacataattttaatttaatcttcacaacaacctagtgaggatcatatcattattgtcatcggcattttacagaggaggaaaatgacattcagagaggttaagaaacttacccagggtcacatgatagtaagtgacagagttaagactgaagctgagtcaattgaaaagtagaaaaattcttaaccatgatgctctgttgctggcaactccctgtcccttaccctttccaaaaacattaagaataggaaaaaaaagaagagtgagttttccctcttgggctatgctagcaacagaggcccaaggggaaatgctgttttaagccaacctcttggaaagggtcattagcagctgacatgatgccaatatggaccaa

SEQ ID NO: 50834 - DNA, 1056 bp, Homo sapiens
tctaaagctccacatacacataagtgattataagaaatttaacaaagggtagtcacataattgacattgtcctttggaggagagaaaattggtgctatccccttggtggacaggttccctcatccttaaagcacatttccagagcagaaggaagccttcatctaagtccaagcgctacatttctgatatgagagctagtttgagatttaaatgaaccctgtctctcaagacacagctttgcatctattttgcattcaaatttatttatctagagacaaaattgtgcattctttaattctactcacagcgtatgcacgcagaccaaatgaggtgctgatccagcaaaacggcaagtagccttttgcttccctgaaattgctaattttacaaatggcagagtggtgaaacgtggcacggaatatctattttactagaatccggcaaaacgggcacatatggtcttgtcaagaatgaatcaaacacagtttcgggattataattaagtagttgaaattccaaaaggaagaagttaatatgaacaaagtgagatttcgattgcttttggttagcattctctcaggctccttcctttacacattatcaggaacatagctactttgatttcttgtcctgaaaaatgtttaattgtaaaatatcaaacgttttcaccccaactctaattgtacttgatttgacatctgtacaccatgctcagggtaccaaatattattaaatgtaataagtccaggcatagaagtcaagccaaatgttcctacgtaagtatttaggttgacaccttctgtcaacaaagctaaacctctgaccaattctgtagcaggccaataaagatacaggaggaagatgggaaccattagaagaaaacactctctcctcatctctctctctttcagtactgtttctacctgaaatcagggacatattccattctggtccacaagcccagcatctagcacaggggctggcatgtaaaaagagttgatttgggctgggcgcagtggctcatgctgtaatcccagtactttgggaggctgagat

SEQ ID NO: 50835 - DNA, 1033 bp, Homo sapiens
ggccgaggcgggtggatcacaaggtcaggagttcgagaccatcctgggcaagatggtgaaatcccgtctctactaaaaatacaaaaaaattatccgggcgtggtggtgggtgcctgtaatcccagctacacaggaggctgaggcagagaattgcttgaacctgggaggcaaaggttgcagtgacctgagattgtgccactgcactccagcctgggcgacagagcgagactccatctcaaataaataaataaataaattaaattaaataaatgttcttgaacatggggaaacatattttcattgcagtttatttatccaactgagtatttattcacttatttatttgctttctctagtggcagtgtaggggacaacttaaatggaggggagatcagaggcaaaaaagtcaattgtgaggcttttacggtaggtaaaaggcagcgaggacatgaactaggggcgtggtaatggagaggaggggacacatataagagagggattgacaagacaggacatgtgaccaatttgatgtggtcagagcaagagtcaaagagagtcaccaatgaaggcatgattttttcagcctgtatgttgtgatgggttgaactgatggactgagataagaagcctgggcatcggtttagaaaaggaaggaaagtcaattcaattttattataatctaactttctctgagtcctccacgtgttcagtaagcagatggacatatgggtctgaagcttgagggaaaacaaggatggaaccctggggaatatctatatgtgtgatctgggcggaataaatgtaacaaacaacctgaaccatgaggaaacagttggagaggtagcaagaggaccaagagtaagtgagagagagcatctaaatcatgggagaagggaatttcaataaggaaacggaggtcaacattgctaagcgctaaagaatggccaagttagatagactgaaaaatgtcccttggatttagtaattaagtaatttagtaattaaagaggttattgagtaataagaagcaaac

SEQ ID NO: 50836 - DNA, 1134 bp, Homo sapiens
tgggagtctctcccacaaaattgggctcttcacctaggttttgtagagcctttcagtatccataaagcccttcaaactagatgcaaaaatatgtgtgtatattcaagggagataggccagagttttcatcaacttcttgaagaagtccatcacacacaagagggttagtaacttccacataatcctaaagtgcatgtagcacttgccaggcatgaatatgattcatgaatatgtgcatgaacttaagcaaactcatttcattctcaccatagctatcagaggtaggtatgattatcatgcccattttacagaaggggaaactgagactaagagaggttataaagctaataagtgacagcactgggatttgaggccaagcagtctagctcctgcttttaatcacttttgactgcaatttcctttttatttacttgcatatctccagcacagtgcccgacacataatgggatgtttattgatatttgttcaattgaattgatttgcacactgccggctctgtgtagatttcatcttaggaatcattctcaaaggtgtgactccgtaagtcttggctggacgaatgaaaagaatcaacatggtcaaaagataatttattagagtttctaaagacaaatggcttggcaaagcataggcattttactttcaatcagtgttccctggagggctgttacactgatttccaagcccattcttctcccaactggctcactagattgttccaattggttatgtggtgcccctgagtatgggctaggtaactctgcaggccccatgaatctatgtgatgtttcatttcctgattactatgcataatctcccctgccttttatttccaagtgaccaaccagaagccacccaaaccctctgcatattgacatgattcaaatgtaggtctctacaaggtatgccaagcttattgaggggaaggtggggggagatgcgaatcctgttcaaccacctcaatgcaagttgactgtagttgagtctctaggatggggcattcttaaaaatcagaacaaaaattggctgtgattgtgaagagtgtatggtgaattggcaagatggtgagtaacaaggtggagcagcctgagtttttaatcaccttgattacat

SEQ ID NO: 50837 - DNA, 2108 bp, Homo sapiens
ggatcactcagatgcctcttcttgcctctaaagaatgggaacgggggccaagtgcggtggctcacgcttgtaatcccagcactttgggaggccgaggtgggcggatcacaaggtcaggagatcaagaccatcctggctaacacggtgaaaccccgtctctactaaaaatacaaaaaattagctgggcgtggtggtgggtgcctgtagtcccagctacttgtgaggctgaggaaggagaatggcgtgaacccgggaggtggaacttgcagtgagccgagatcccgccactgcactccagcctgggcgacagagagagactctgtcttgaaaaaaaaaaaaaaaaaaagaatgggaatgggaagcaggaactatgatttcattacagtgaggaaaaactgcttttgatgatctctcagtaactataagtaagaaatattctcttatttaaaaggaatgttatctatctttgttaatgagggttttatggtggggggaggtgatgagaattatcagtcaaatcactttgagaaggaggagatctgaatttcataaataaaccctaatttgttaatgggaactgatgccaaaaacaaggagtttttcctccttgcggtgacactgaatgtcctgggctgtggagggtagaaacaggacattctcagtgttccagctcacaggggtggagttagagtaaatatcctgcccagtttgccatcacactaacactgcataccctatcatcagcctaatgacctttcaattctgattgaatggaagagcactccggcccttgatccaactcgtggttgattacagtgctcatgccccattaccccaaatattcctataaattaccagagcgagcattcacgcttatacaccatcatagatttagctcatgccggtggttctcgatagcagccatctgaagctccttttgcccacagctccctggatagctccaccattccctgcatgctagtcttgtggtttggtcttcagcctgctgtctgtactttctcacacgttgcatgggctttctccgatgcctacaagcaaaatctcttttccattcttcctttctctggctcctgggttcagaaatctctagggatcattatcagtcctctggctgccccctctcctacctacctccatctaccctagctctaggacagacctatggcgatgcccaactttctgcattttgaaataggggtgattgctttgacttgggccctatctattagggtctttcatctgtctattttggacaaagacaatagcagtgaagcagggggcctttgcattgagaggctcagactctcaaactctctcttaaaaaaaaaactgtctggcattaaggggcatagtctgcttgccttcaatagacctcaggctggggaggctcgaggtgcctactagggcagccagtttgcatagtgccttctaaaagcaggaagagccacccttgctgccttacagcctttgtccttgggccttagaatgaaacgcttcagagctcacaattaacatttggccaagcctcttcctcacccccacccccgtgaagtgggaagaaatacggtggcgtgacattcactttgacaaagctctttttcttttctctacttctcaaaaaagcctaaagaaataaaaacagttgctaagctactgggtgggctctatcggtgtgttttgttgcagtcttggcgttaaggactcatgctatcatatatgcagcagcttagactaaagggaggaagcaaagtgcttgagagggctctcttgcaagttcacttttttgtcaggtcaagtgcttggctctgggatggcaggggacatggagcatgacaactgcaattctctctccagatgggaaagtagaagggaggatttcttccaatcctcaaattcttccaaaagagaatgctgttttggaaccttgtctttctttaccatttatttcagaaaggttggatctctaggaagcatgggtcatactcttagttctctgggtattgtcttttgtacacatcacatgcagttggtgctactgatggggcctggacactagctagttctggtgagctcctagctcagtgtgc

SEQ ID NO: 50838 - DNA, 1030 bp, Homo sapiens
tcaacataggacagagaatttccaggccaaggattctctgcagtttgtgtcctctgaacagatacaaatgggccttttagcatgatgcccctgaaagttgactgaagtcactgactcaggtctttacaacccagtgttccactagttggtttcctcctttctctctcctcgtataccccagtatcatactagaatactgggatctcagagaccttttagttcaaggccctgttcttatagaacagaaaacagaggcttagagaggaaaggactttgcccagagtcacacagttttagaagtgtcagagcttgggcccacatcaggactctctccacccaatgagctatgctagtgtttgccaaaggccttctccatagaaagcaacaaattcagattaggaagtgtatttcaatcactaagtagttgttttagctttctagggttaacagttgacaaactttatcatagatgaaggtatccctgaattaagagatggatttcagtaatgattgctataaaatgagtttttggtaagtggcctctatagccttgtggatttcaataaaatcagatgtccttcaaatggaaaaaatgttgaccctgctgaatataataaaatggcactttttaatgcagtaaatcttttaaactcgcatttaagagaaaagcaatgacttttaaagttaaagtttaatggtatcccttacttggaatacgattccagttggagaataaatcatagaataaaaatacttagagtaacaacaacaacaaaatgcttagagtaaccatagaatagaggccaggccttctggcaggtattcaggctgccttccttatctgacaaactattcacaacatagagcagtcagtccctctaagtctggcctcaaaggtcccaacactttgaattcctttaccctttttcttctgactttggccatcatttcactttatggcctttgttcaaagatacactgtctgcttttctacttttgcttggaagcaaaatcattttagaaagctaag

SEQ ID NO: 50839 - DNA, 1050 bp, Homo sapiens
ttctctgatgagtaatgattttgagcattttattatatgcttgttggtcatttgtatgtcttcttgaaaaatgactattcatgtcttttgcccgctttttaattggggtgtttttttaaaaaaaaatagtgacggcaggtggtatgttcctcacacttgacttgtcatttacaactgaatttttcagctcacgatattgaaatccagaaccactttttctatagtcaagtgtgattcagcaaaaaataaaaccttcttgcattcatttggaagtaatatatgtccttttggaatttctgtgtaagtccttttttagtgagaaaaaaatcaagtccaagttaaaatgataaaatactaaattcggtgttgccaagtagagtttaatttcaattcagatactataatttataattctgggtcttaggagccaaagcctccttagaccatccctttaatccaggcctatcatttggagatctcatagctcccttcactgtaatcaccgtctggtgctagatagtggaactgagatacttctttgctaatgacctacttgctttcagatacagggcaaccagcggatggttcctgggatctcatctgatgagtgacatctttccggacagaactgatgactctctggcagtaaaagggtggagagggcagggcagatatgtttcacgagcaagaagggaaatagtgtgttgtaaagctttgctgtaggcctgccaggatctggtgaagtgggtgggcggggagagcttgtgttcacagaagagtcagatggttaaagaatttatgataattaaaatgacgtttctatgtaagtctgaaggaatacagccataaaaacataattgctgtaaaacatgctgcatcagactaaataaccacttgatgatggcaactatgcctgtgccataaagaaacctgtgcttttgtgaggagaaaaaaatatgtatttattatggctatttgcgtctcatgttaattgttcacaacaaagccattgattaagcaatgactccttacaagatggggctggatcaa

SEQ ID NO: 50840 - DNA, 1035 bp, Homo sapiens
tgctgtgtgaaaaatgaatgtgctgaaattaggctgtgtataattgcaacgaaaccaaaattgagcagatacagttcccacagagaggtggaaaaccttgtcagggagcattcgccagcctgagctgttgtttgtggctgtgtgtggaatggactcaaagcccactgtggctgctggaaagtggtagggtgatttgatctattcagtcagaactagctgatgtagtgaccgaattatctcaagtgcttcccctcctgttatgtaggcaaaacctctaaattcaatgggttggattttttctaacctttaatcatttgcgtttgatatcatgtcttcattgccagtttcctccttaacccaacgtctttcatcttcaatcttcttaaactttaaaagatacaacccttcatctttcctttgatcttcacctgatgggcatgttagctgtgtccatcagtttcactaacctatttctatgaaaacagagaaaatgtttaacctagtatgacgggcctatagattataaaaataattgactaattttgttgtaaaaaaatactactctttgtaaaaacaaatcagcaaagctggagttttgtctttataaaacatgatgcttggttgcttgcttttttcaccttttaactggctatttgggtatcaagttcaactgaagtgtacttttgagaactgtcacagtagggcctccccattttatatggtagctcaccaaactgactgctgctgccagcacccttttggtttgctcttaattctattgggagccctattgctggcaagaaggctcctcatttaattcccataataagcttcattttcagcaatgcctccctaccctgagcttcataaagagtatcatgcctgtcgattttctttacagaaaggtgagcggtacttctgttgcccagtttgatacccagtagggagattcacaagatgccaagggtcttctacagaggaggtactagaagagtatttgtggagtatatgaaggaccaaggatgcagcaactaa

SEQ ID NO: 50841 - DNA, 1406 bp, Homo sapiens
tctagctgttaattttagttagttgagtccagagtaaaggtttgtaaagggcataagaaagcaacattacttttttctcacaatgagcacttaaaagatcttttaaaagtgtttctgtaatgtaaaagaaatagtcttactgcagtttttaaaagcagaaggttccttgtgtctattaaaattattttaatttattgtcatattactgtaaattggaaaggaccacaaatatattatgcttaacttccagattcaagtgtcttgcaataagttaaacacatgtaatggtttatgctctttaaaatgtttttgcacttattttattctgcccagcagggcagagattattgtctgagtttcataggtgaaggcgttgaagtacagatgcttatccaagaccctgctgtttgttagaagcagataccaggacaagaaacacagcttttcttatttcacagcacttggccatagcaactactttttgctgttttattcacattgacatgaataggttagtacctgaattctttaagacagatgaaaagtaattaagtctgagtctcctcaaacaagatatccctctgaaaagatggatgttgtaggatcatgaagatggcagtctttaaaaatctcagcaaggaacagcattgtgactagcgatagagtaaaagctgtgagaattgcacagattccaaaacgctgttaagatgatctgctggtcctttttccaaatggggaatatggtgatatggttttggggtatttgtgctttatttatttatttattttgagacagggtctcactgtcacctgagctggagtgcagtggtgtgatcaccactgcactgaaggctcactgcagccttcacctccacaggctcagataatcctcccacctcagcctcccgagtagtttcgactacctgtgcataccaccagatccagctaatttttgtattttttgtagaatcagggttttgtcatgttgcccaggctggtctcaatctcctgggctcaagtgatcctcccacagtgctgggattataggcatgagccatcgtgcctggcctatttgtgcttttgatgtacattagtccctaactggctcttgagcttctgcttcatgcctcccacagtgccaactctaggattgtaagctccccaccctgattcacttacaatcataatgtagggcttgatgtaaaacatgagaagacttgatgtttctgggtaacaatgggtgcagctcttgattattcatagtctgattatccttactggggagtatcctgtctcattttacttcttgttgtctgaatgcctaccttttacctttgtaaactccagatttaaagtttgtgtagggtggggtgcggtggctgacgcctgtaatctcagcactttgg

SEQ ID NO: 50842 - DNA, 2555 bp, Homo sapiens
agaggaacatcacacatgagggcctgttgtggggtggggggaggggggagggatagcattaggagatatacctaatgtaaatgatgagttaatgggtgcagcacaccaacatggcacatgtatacatatgtaacaaagctgcacgttgtgcacatgtaccctggaacttaaagtatagtaataaaaaaaaaaagaaaaaaaaagttgttggttaaatagtctctgctaaatttgcgacacatcttcccagataagattcttctctccgaacctttttttttttcctttttttttttacacagagtctcactctgccatccaggctggagtgtagtggctcgctgcaacttctgcctcccaggttcaagtgattctcctgcctcagcctcccaagtagctgggactacaggtgcatgccaccacgcccagctaatttttgtatttttaggagagacagtgtttcaccatgttgaccaggctggtctcgaactcctgacctcagttgatccacccaccttgacctcccaaagtgctaggattacgggcatgagccaccgcacctggcctctctgaacttttttaccagtatttattttaattttggttgggggcagtagagagatgcagaaaaggaaaggaaggcatgaaactgcttgagaaatacatcagtgaataaaagttttttaacatttgtggtgtaatgacaaatcctggagaagttttagttcacacctggagtattccagcagaagttggatgccagccgctaggcattcattctgcagaggggcttctctgttaggtacaaggttgggttcaagtaccttctgaagtctagctcagtgtattttttggagtgtagtatactaacaggcaagaacaagaagtggaggagatgtgccaggggaggaatagtgatgacgttgtaggtgctcagctcccagatgatgggaaaagtgtttcatggcctcacacatcttttgggttttttgttgactgtctcccccattactcaatgagctgctacagcatagggaatgaatcttcaacttgtatttccagtacccagaacagaggcttgtactaagaaggcattcaattggtatgtaatggattagaataagttgaattgaagattgaactgaagtcaaaatctgatttctaaggttccttctggcctgaaaattcagactcctctgatttcaaccataacagcctggctaagcctccttgagagaaaccctgtgcttccttagtttaaccacctctttgtggttgaatagtataggttttcaatcaagtcctaggagggtgtcagtttcttgttgtacttaccaggatgtgataggatttcaaacaaggcccaaaagaatgtattttcaggagttgagatgtagccacactttctacatttacaatggcctgaaatgggttacagtttagaacaagctttcttctttatgatgcacaggatttctatgatgggtggctgttaggcaatgagtgtgatgggggagcattttcaatcttagctcaccttagcacaccttagcacaggactctagttacagggtcataattccccatgaggttagcccctgtagtatcagctactttgtatgtgatttaagccagtactgattattctcctgcttagggagaagcggtagaaggcccttggaactgtgagttttgcattccaacttgctaattcaacatagatcctaattccttaaatgcttgtaattagaaattctcgtgaactgtattggtttttgtcaagcaatctgtttggggaacttgaccaactggggcactgctggctagggtgaaatttatttaatttgtttttatgacattcttcatcttggaaatggggttttcaaatattgctttcccaggcatcattacttatttgctggtttttatttcaggattgggactagctcagggtgccagggaagcgttttgtggtgctctatattagagtcgtaatatccaagaaaattgtctgattgtatgtggtatcttggatgtggtaccttatgacaaatgttccacattttgacaatatgataggtttatgattatttatattccaaatgatcttactttttaaaagtaatattttgtgcagtctttgcaattctgttttcctttctattgttatttagaagctattcattggcgtttggcatcattcaccatctttgagcattaaaaagaaaaagaaaaaagcaagtacactctgtgtagcatagaatctctgttcactttagaattcacattgaacatgagctgatccaattgctacagccttggcagtgatagaggcaggagacagccaaatccctaggcagatagggaaaggtccccggagaatctccgacctgccccacaagtgttgacaccagatgttttgtgcagataagggaacctgcacagggggcttgcctgggcatgcccacagcatactggaggcccactgggggaatgggatggagccactaggagttcacaccttatgcaggggtggagcctggcctcatcagttc

SEQ ID NO: 50843 - DNA, 1032 bp, Homo sapiens
ttttgtctacatcattatcttccccttccctcccctcagtctctctctttgggctttcaacattttggccattatgttcctaggtgtagaatttttgtattaatcctacttgggattctttgatctttttggttgtaggctatttattttttaatcaaatttgggaaatttttagctattatttcttcaaattcttttactccctttttgtcttctctcctagaattttcattaatcacatgatacttgatgtttcacaggtctctgaggctgtttatttttattcagtcctttttcttttcttcttcaaataagataatttctatagatttatcttccagttcacaaattctttcttctgccatcttgaatctgctgatggggctctgtgggaaaattttaatttctctttctccaattttccagttcagaatttccatttagtcttttgtaaaataatttttctgtccttactgaggattttaaaaatttgttatttttgttgtcatacttcaactctttaaacgtgggttcctttagttctgtggtgaacatatttataagaggtcttttgaagttctcatccagcaagtccaatatatggggacatccagaaactttattgattgctttgtttttcctgagcacatctcacttttctgtttctctctaattttttgttcaaaactcacattttacataatatattgtagcaactatggattctggtgtttttcctctgatggttggtgttgttgctgtttttctttgtttgtttgtttgtttggtagtttctttgtttattaacttgcctgatctaaatatgtgaattatgtctcccacatcgtgtgtagcccccgatgtctgtgctcagtttttaaattcttgttttttatttttaagcatggctttctattggttcttttctctgtctgtgtagtttagtgtacagaggctgtgaccaaacatcttgtgccattaaggctactatcttctgttggtgggtctgtgtttggtagagttgctcattca

SEQ ID NO: 50844 - DNA, 1023 bp, Homo sapiens
cccagcataatctctctgctcttgaagtaccaagtgttggtggaaaaagttgcaaaatgatgctcattgggtacacagatcagtagtactttctgatcttagctgggccctccctactgcttgaatgctctcttggatgctcttgtattcctctcttgccatcttctcagagaggcaggatggcacagcagttaatagcccaagcacaggcaactgatgagacttagacgctgaaatcctgggtctgctacttgctgcctgtatgattgggaaaattgatctaatcttaggctttagttttcttcacctgtaaattgggattgctcctcaccttaggggattgcttgtgaataccaaatgagatcatatatggaaagcacttataacacagtgaatggcacacgaagtacaaacacacacacacacacatgcacacaagcacatacacatcagctctattgaggtatgaattatataccataaaatctaccaattgtggcaggacacgttggctcacacctgtaatcccagcgctttgggaggccaaggagggcagatcacttgagcccaagagttcacgaccagcccaagcaacatggtgaaaccctgtctctacaaaaaatagaaaaattagcaggacatggtggtgcgtgcctgtaatccagctactcgggaggctgaggcatgagaattgcttgagcccaggaggcggaggttgcagtgagctgtgatcatgctgttgcactccagcctgggcaactgtaatgaaactctgatatggtttggctgtgtccccacccaaatttcatcttgaattgtaactctcataattcccacgtgtcgtgggagggacctggtgggagataattgaatcatgggggcgggtatttcttgtgctgttcttgtgacagtgaataagtctcatgagatctgatggttttataaatgggagttcccctgcacaagctctttattgcctgccaccatgtaagatgtccctttgttcttcctttgtcttccacc

SEQ ID NO: 50845 - DNA, 1068 bp, Homo sapiens
gatttgttaatctgattcctttttttttgaaacagtgtcttcctttgtcacccaggctggaatgcagtggcatgatctcggctcactgtagcctcaacctcccagactcaagtgatcctcccacctgagcctcctgagtagctgggactgcaggcctacaccaccacacctggctaattaaaaacattttttcatagacacagtgtcccactatgttgcctaggctgttaagctgattcttaaacttgtgaggtaacggaaatagctaaattaagacaaaatattcttttaattttttttaatatagagatggggtctccctgtgttgcccaggctggtctcaaattccttggctcaagtgatcctcccacctcagctgacaaggtattcttaaacaacaaaatgggcatacttgcccctccaaatgtcaggctataataaataagactttgtgttagcgttgtagtagttgtccagaccagtggaacagaatttgagaaacagatccaggaatacatggaatttgacatttcttagaggagaaattgcagatcagtggtgaaagaattgacttttcaaagtgtggtagaacaatttgacagccatgtgtggaaaaatttttcccagattactaccttatcatatgcacaaaaaataaattccagatttatgaaaaatctaggtgtgaaaagtaaagctaaaatgctctttaaagatagataatataggagagtgtctccatgacctcaggatagaaaataacttcttcaacaagccattgaagcaataactgtaaaggaaaagttcatatattcagtttcattgaagtgaagtcattttgttcttcaaaagatgtcataaggatcataacaagaccaaccacaagttggaagaagatatttgcaaaagcattacaacagtgtttgttggttatctggaatacatagagaagaactatagctgggaaaaataaataaataaataaatatgggaaagaccattaagtactatacaaaaagagaagagtaaatgggcaataaacaaaaactgcatttggccttattagta

SEQ ID NO: 50846 - DNA, 1049 bp, Homo sapiens
aaaactgatacccagggaggataagcaattggctcaagatcatgcagacagttaacagaactgagaagaccatccgtgggtcctgatttactcattcaatgttgttacacattaaagcaaaacataaatctaaagatacgtcttgaggaaagagttattcactagaagcttgcaagaacatcattttattgctgaaagcagctcaccttcaccagggacgttgagtcattgatatcccagaaaccccgtgtcattgggtgatttcaactacaagttggtgccatagcctgagccctgagccctgagccctgaggatggccttatactgagcattgggtgttttatcataacagagacagttaaggtttaacaatgggctaatggccgatggcagtgcttcctgcactgctagtgagagtgccaaaccaaggaggagctgaggaacagtccagtggctaatgtggggattagctgctgctttgggtaatctgtgtccagttcaggctggttacaggagagcctcaaggactcatttcacttggctgcttcttgacctgcaattttgcatgctgcatgctgcaattttccctttgaaaatacatctttccttttaaaaatgtggtgacatgtgacttctctgaagtttaaatgtttgatcatttttaagctggcacaaaaatggttataaatcttaatacttaaaaatgtaaaaggaaagcataaaccctaccaacttgtttggtcccttttgtgtgtttgagagagcaagcccagctcagcaggccctttggatgtccgctgaggttcagaaagcaatgatctagtcgcatcaagatattgaatcttctgaattctggccttgtgccccccaggtcagggctgttgtgttggttagatggctgcccaaaaaatggtcctgccatgcccctgagtttccctcttgtgaatgaatagaaagtttccatctacagagttggcaagctctgtgctgttaatttcacttagttaaaaggaaaaaaataactaaacacacaattattagtaaacca

SEQ ID NO: 50847 - DNA, 1023 bp, Homo sapiens
tttatattgggtgggagcagaggcaggggcaaaacaatgtgaggactgaagagccaagagcttagagtactggtggaccagtagtagggaccaacccatgcagatggagctgcctacagttattgtctcctccatccatctagccagttgctggttagctagctgcgcaggcatccaacatgccaaaagtattggctcttggaccagacaagctttttcatgtcatttacgctaaaaccccaataacttgatgtctattctttcagagtctctggcagataagatgcctcactgttttttttcttttaaatcaaaatgttagctagtctgggtcccatcagtccaaaatcccttgctcatgttgcttttacgtttgaattactgagaattttagtgtacatcgatcaacaatttgttctatatcctgtacctaaaagatgttttgccatttcctttttcttccagatttttttttctgtgttttaagttggggtttggtagatggttactgtgtgcacattctcacggaggtgtaagcatcgatgatactgtacctgtcctgggaatgggatgcagtgccttgggtggtttcaggagattgacacacttccaggaccaggcattttcatttccaccttaaagaaggagcctgctgtgctttctgagacctactgtatctgggatggccagacttcaggagacaagaagaggaaggcatcctatccttttggtgggtggatggacgggccgaatctatctcagaaatttttaatttttacttccatgtcactttccagtcttcagccagccccccaccgtctacctcccactgctggagtgtggcttcattcaggggagaatgctgagctctgttgacatttggtagaatttgttttcttccctctttaatttagcaactaatcacgggggttgttctttgttcatctttccagggttttccgtacgctgactaatgcttacagctggctctctctggagagaagtgctgggaagatcaatcaa

SEQ ID NO: 50848 - DNA, 1069 bp, Homo sapiens
gagtgccctactgcaatcttggctcactgcaacctatgcctcccaggctcaagcgattctcatgtctcagcgtcccaactagctgggattaaaggtgtgtgctaccacgcccggctaatttttgtatttttagtagagacagggttttgccatgttgggtagactggtctcaaattcctggcctcaagtgatccacccgccaaggcctcccaaagtgttgggattacaggcgtgagccacagaaaaattttaaacctacctataaagccggaagctctccccttcaagttgttccgcctttctgaaccgaaccaatatatttcttaaatgtatttcattgaaatcccatgcctccctaaaatgtatacaaccaagctgcaccgcgaccaccttgggcacatggtctcaagacctcctgagggttgtgtcatgggccgtggtcactcctatttggctcaaaataaatcacttcaaatatcttacagagtttaactcttttcattgacactctgccaaaaggagccctgaaatgttggtcagatttggataaggaccatggccatgtggcttaaatggcatttgctcgcttgttggtaatgagttgcatttgaagaggtggaataaatggagacaaccggcatcattgggcacctgtggacaaagaaaagcctttttggttgagccaaggtgatactatccacatctgcctaggaagttgtttttttgtttggagtagctgggactacaggtgcccgccaccacacctggctaatttgtttggttttgtatttttagtagagacggggtttcaccatgttagccaggatggtctcgatctcctgacctcgtgatccgcctgcctcggcctcccaaaatgctgggattacaggcgtgagccaccatgcccggccctgcttaggaagttttttgaaagagtgtttatttgtgaaaatgaaggtgcttctttatgtctatagctttctggctttactcctttcagagatttgacttgtaaggcaatagatagaaatgatagctcatcagcatctaatgagccaaattacttact

SEQ ID NO: 50849 - DNA, 1033 bp, Homo sapiens
tttttaaaaattacattgttgaacaaaatggtctgaatatttctgcttttaggtaaggatctatgctttgcagctgcctccttcagtttgtttttatgacttaagcaaataaaaaaaaaagagatcattttagcattagtatagcattctacaatcttctggaagcttttatatttatcgccatatgggtgtacattaaatctgcatctccctctcgtttatatgtttatgaagttataaagatatacacatgcgcacacaaaataattaagcaagtgatgtgtgtttgacaacgattggtgacttaatgccaattagagggtgttaaaaaagaacacttgctttcttaatccaattgttcccatgctttttggtttatgcacttaaggagagaacccatttaaagtgccagaatttgcatacatgcagctttgactgagccttctatttaatccagtggtcttaaaaaattattagtgagggttttagagacctacatgtcatgagatccattaggacgagactgaaagtacactttttggctgcctcctttatgggaaggggtgtgcttttgatatggggagagctaaaggtatgtggatcagctggactgtttaatgcagccagattagctcagctcatctcagttagagcatcttgtgttgcagccaccttgcctaatgccattatgggaaagtggctcataattttccagagttcagctgaatgctaagtgaaaggctacatacagtgttcgtatgtatgaaagttagcagttgcattgacgaactcttctgttttaaaaattctggttggactggaatgggcaggattgtgatattcccctttcaatgtcatgtttgttttgctttaaatcatggtgatgtaaccattattcattgtaggaagattatggcttcagtgtccaaggactgggtgcggggtttcaggttgtgacctttggctgagaatgccttctctagagaatgtcacagaggtcagatttctatgctgactgcaaacaaacctgcga

SEQ ID NO: 50850 - DNA, 1239 bp, Homo sapiens
acagaaaacaaattatcaattacttaaaattatatgaagtgccatgggggaaaagtacaggatgctatgagaacacatactaggagactaactggagttatcataagtgcaacaaattggaaacaatctgaacatccacatggagaagaatggttcaagaaatctcagtacatccacttgaaagattattacaaaaccacttaaatgtcctttgatagagcatggaaaattgctagtgatttaatgctaagagaaaaagagatagaaaattatggacccagtacgactacaattatattaaagaaaaaaagatagcgagcgagcgagcgagagaaatcatctcctacccctcccaaatctaagcataaaagacagagactggaagaaaaaaataatagaatataaatagatctattagtgatttattttcttattctgcttttctgaaggttttgagttttctttgagtctacattacttatataataacaataagcattaacaatttttaaaataatgttttactaagctgtgattaattgcacacaggtctacttttttggttcctggctggttatttcattagcctcttgatatcctgggagcctttaatgaggagagtagcctcagccctaataaaccctcaccctgaaaggcagaggtgatgagtcagacattggctgctgattttcgataactgacttttatcatattcccacacaatgcatggaactctttttataccagtatggtatagagctacttgagtgaattgctattgtttctttctcatttataaattataaattttaatttataaattatatggaacaggaagttaatagtggtacacagttggaaatataaagcttattctgctcagccagagccatccgagatagtctggactttggatctccatgagcttctttcttagtgagttgacaccagggctgatggtctggctggaagagttaaaatcttggggttggtaaagggctatagttctaaacatccataactgggagcttagatcagttagtgtatgtgttgctctcgtccagcagaaaaggagagttcactttgctaagcagcgccccctagagaagtttcactgcataagagtattacccccagttaaccataaataaagttgattagaaatgtcattgtccaactattccaatatctgagggaccactctatgcacatatagtgaggtgcataatcttattgttg

SEQ ID NO: 50851 - DNA, 1043 bp, Homo sapiens
gagtgtgtgtatgtgactgttgtatgtgtctgtgcgaggcaaaaatttagaggtaaaggcagctgcaccgatggtgaaatgtgggggtgagaagctggtgtctggaaatgggagagtctgcttttgggagttcctgtgtcaaacagcctctccatgccagctggtggtctctgtgctcctctcaactgaggggaacaacagttccacctttctggcctgggagttcagacagctgggccttagttctaggccagccactaaccagccatgtgaccctcgaccagatcctgtgtagagagtgcactccagtttatgataagcgttcatatcccttatctctggtattcctctgtaaacctgcaccatcttcagcaagaggccagagtggacaaaaggatccccatttatcagatgagaatgaagcccaaaaaggctaaagggcttccccggggtcactgagtttttttagcggcacagcaggaatctgactgcacttctgtctgactccacaacccttgctctgttgactgcaccttgatgaacaagggttttttgcaaaaccacagtgaggtcttgagttagtcattcccacaaagtgaatgaacacaataaatgttggctgttgttgttatcacctacatcattatcatcgtcagtcattttacaacatgtgagtttggatgagtttttgggccaggattaccacacccattgggagaagaacggatttctacatccctaaggctttctattcactggggataggttttgtggctagattgcagaggggtctttcattgccatgttgggaatccctgcaaagctgagcaggatgggagcgggctgaggcctggttggatgagcttcagtaggagccttcagctgcgacaggaaccacctactgactcacagccattcatccacattagggaggtatcagaggctattgtggctgcaagccaagactctgaatcctgcttccagtgctacatttgggatgcttctctgcctccgcggatggttaagtgcttgggtgatatata

SEQ ID NO: 50852 - DNA, 1040 bp, Homo sapiens
ccctgtcacttaagggctgccttcctatggctgtcagaggggtgtgcttggggaatgtggactcattttaataatagcctaagggaaacataattaagaaggtaagtctcctgccaagaaaaagaaaatacacatatataaaatgcataccagagaccaaatagaatttcttagatttaccactgcctgtgtgtgcttttctgcatcaccacagataacctaaagctgactgtaacccgctgttcatggtgactcactgcacagagcattttggtgccaggtcagccaaaaagaaataatcacagccagtgggtggttttctgaacacacacattaggatctctctgtcctctttcagtgcatttgtctttaaaggtctttactgcccccaccctcacctttcttttaaaatgtgcataacaaatggtttttactctgctgtttcagttcggaacactttgcaacaggatctggcagcggtaatgaacatttagacattatttaaaaagaaactagttatttgctgtttatttacttataacttcctgactgagaagcgaggcaggggctgggcctggtggctgacacatgtgataccaacattttgggaggccgaggcaggcagatcacttgatgtcaggagttcaagaccagcctggccaacatggtgaaaccccgtctctaccaaaaatacaaaaattagccaggtgtggtggtgggcaactataatcccagctacttgggaggctgaggcaggagaatcacttgaacctgggagttggaggttgctgtgagctgagatcgcaccactgcactccaccctgggcaacagagcaagactccatcttaaaaaaaaaaaaaaaaaaaaaaaaggtgaggcaggaagaacctgtgtgcccggcactaaggctgggccacatcaattctgttacagaattctgcagagtagaagtcagtccatttcatagatgagtcaaaggatgcaaagaagtcgggtaacttggccaagggtgacacccacataagaaatgcaagaacca

SEQ ID NO: 50853 - DNA, 1059 bp, Homo sapiens
agcctgggctcagggaatagctgtcaacactcgggcaaagtttttgtctgtgcatgtgtatctccatttgttttgggatcccagtttttgttttaagagagtataaggtgtctcatttgagtctttttcttacctagccccctcttatcagtaaaacaaaggacttgccatggttcacagcaatgtgctacgatccaagatatcagccaaggagcccacttaggggagaactaggtgtccagatttttgtatgtgttgtttttcttgggggatggggtggggtgggagtaggtagagctgagaatactacatcttagtggtgacctttagccacgtgggtgaagtggcaaaggccatggccatatctgttgtcccaggccaaagactaacaactgccttgggaatcccttccttgtgtccttaccaaatgatagctcataaaactctgataatgtaacaaatcactttcaaaggagttcccagaagtcttcagaaagactaaaattctgtctcttcctgctttagacagccattaagatcccaactaattttaccgaacctaaaacccacaaagaggttgtttgtgttattgttcaatcttcagttgtaagagtaattctctatttttatattgaaacataattacttgatagctcagggtctacatttcattcaactttttacaccaaattctgcagagtggtcaaaatggaatattgggggctgttgtaaacagaggcttaattttattagaagtagccagttatttattaaagcatgatgttaataaaataggcatattctggctggtgtgtataagtggttttttttttaaaacaaatcagaagacataaaattgaaaaggcactccatttatatataagggaaaatagattgtaaatagctaaggggccttgtgagaacttggaaaatgtgctgatacttagtaactacctcagttgtgaggaatttcctttttagcttagactgctattacttttacttggtagaaatgaatctggtctccaaaatatggctcagagagttatccccatagac

SEQ ID NO: 50854 - DNA, 1024 bp, Homo sapiens
gtcaatgtaatgcagaagaagatgtgcttctgttccagtctggcaaagacaaacactgatggttgaggctattagcaggacgtgcatggtgggcacatgaagatagtctcctccactgcatctcatggctcaccctgcatagttatttgtaaaaggattttgagataattgagcaatttatgtgtgtgtgagagagagactccaggagggaagggggtgggggaggaatgggtgtttacagggtgggagttggtgcaccttgtttgttttgggtcatctccctcctctcccctgtcccaacatgtatcttttatctaatctatgtcttcaggaggcagtccaggcttactaattgtgatcaatcacaactcattcttaagttcatggccaagccttcagtgtcaatgtgatagaagcaatttctgtctctattttagccccgccactactgtctttttttcttttcacacattaggtaaaccccacagcccagtgtacccatgccctgttgaagatgatctactgctcccactgccggggtctcgtgactgtgaagccatgttacaactactgctcaaacatcatgagaggctgtttggccaaccaaggggatctcgattttgaatggaacaatttcataggtgagcaagtggttaacatatttgtgttgctggagatagcttagcttccagtcacaaggaatgttgtaattggcagctatgaaatttgtttgtttaagtgtttgctatttagtgtttgtcagaatcctgactacgctcaactactttgagaatagtaaaaacattactgcaagtgaatgttccctcaaactaatggtggcatttctgaaggtaatagatacagtggctgccaggttttaataatgagaaaatgcctttttcttggagacagagtctctttctgtcacctaggctggagtatagcagcacaatcatagctctgtgtaacctgaaactcctgggttcaagcgatcctctcaccctcagccccccaaaagccctgg

SEQ ID NO: 50855 - DNA, 1049 bp, Homo sapiens
aaagcaaaacaggaggagatagtgataaatcaaatttcaggttgtcagtaaaatgcttgatgcttttcctttttttccttacatttttatatgcttatgtttgctgttcttcattaattacttgatcttaggtgaaagagtcgatgggtgtaactctttaaattttcttagaagtttgaaaggtatgatttgtagcatttacaaggaggcttcttttttcagcacttctgttgatctagtaacttaatgtttgcatgccacaccaggggtatgaaatacagcatttatagtaagagaaaaatcaatccttatatgtaaaaggcagcttcctaataatgtaaataccaggtggtaatttatagcaccaaaaaaaatggatcaaatgaaaagggccccaatctcttaaggttatgggttaattctagaatgcattaatcaatagccagttgattgtttataaaggagtaactaatgtggcatttagtagcagaactggaggttctttggcctatttcaagaattttgaatgtttatttgatgcaagacaagtagctggggatagaagttccagaagtacatggtgttcttctcttttttaaaagacaggatatttacatagaaaacatttatatggaaaagttttgtcttttcactctagtttttcccatgttaaattagtactacttgcatttagaatgattagattttagaactggaaagtacttacacttccctagctcaatccttataccaagtggacttctggcaaagaaggtagtatgcaaatgaaatacatgggtggggggtgtcgacctgctgatttattcttattttttatatgtgtgtggtgtgtgtatggtattctcttgtttaatgtaatgtaagctctcttctcaagggtgaggtttccccattccctatttttcacccagcagtcactcccaccctcatagatgtctgggacgtttcacaacctttaaaggtagaaccattaagcatttcccttaggataaacagttcccaattttataaggccttgcgtcttctta

SEQ ID NO: 50856 - DNA, 1085 bp, Homo sapiens
aatcacttccctgtgataagaggagtcatgtggctactcacttgctcaccttgacagtggcctgcctgatgtttgctcattttcctccattaatttgacatgtcactaattactttagtgtcaaagttggagatagtttacctctcctttcctattctagagactccagaaagggaccttggacaaccttgaagtgaattgcctttctgatctctgactttctacaaccccgtttttggcagatcatcaactaccctttgcccctgagccctggtgatgggaaaccccaagaactggaagttcccttgaggttgggattttgtaacctcagcgctgagcctgatgcctgcctgcctgccacatagacactcagtgtcactgaatgaatgaacttaagcaatactgttaagatggaattaccatacctttttgacacatctgtcactatgaactaattgagcttatttatgctctgtgtgtgtgtgtgtgtgtgtgtcttcaataacccaactgtagaatcattttaaaaatagcaagtaaagctgatctcagaataaattctaggtgcatcccatcttgtgtacgtagcagaaatggatgcatttctccctaccttctgtttcttgtgttgtatgttcgattcctatccaggagaaaacaagatgaggctttatgttttagggaagaaaatggaaggtttagagaacatgtttttatttattgttttctaaaaatgctatagaaaacagtactccaagtagctgttttgattctctttaattcctttcttcttcatctgaggatgaacatctggtagggagtgcttttacttgcaatccagtacactcctattgtcagtccaaaaatatgtggaagtaaagagattccatctcagacccctccaattgccataacagtgggcctgatatagaagttgagaaggtgtcaataaagtgttaatggagatactcaaggaattcagagcatttcaaggcacagcatatgttcacatccctctggtatcagcaaaaactcaaaagtgaaacctgtagggtcatttggctttcatgctgtccaacaatagg

SEQ ID NO: 50857 - DNA, 1059 bp, Homo sapiens
accacctcttcccccacagtgcgcgcacacacacacacacacacacacacacacacacacacacaccacaacaatgtccattctgtggctcctcctaccatggaggctacttgctgcttctgaatatgcctcatagacattctctgagcttggtgattttggtcaggctgtaccctctgcctggaataaccattcattcagcccctgccataattctgtccatccttcatggtgtagattatgtcccaattattcttaattttattattttttatttttatttcaatagtttttgggtacagatgttatttagttacatggatgagttctttagtggtgaattttcagattttagtgcacctatcgtccaagcagtatacactgtacccaatatgtagtcttttatccctcacctcactcccactctgtcccctgagtccccagtgtctattatgtcattcttatgcctttgtgtcctcatagcttagttcccacttataagtgaaaacatacgatatttggttttccattcctgagttacttcccttagaataatggcctccggctccatccaagttgctgcaaaagacattatttcattcatttttatggctgagtagtgttacatggtgtatgtataccacattttctttatccacttgttggttgatgggcacttaggctggatccatatttttgcaattgcaaattgagctgctataaccatgcgtgttcatgtgtctttttcatagaatgacttcttttcctttgggtagatacccagtagtgggatatcccaattgttttaagaagtcttcccagatctttctatttggaatttttatctctttctcttctatccccgaggtgttttgcttgtgcctttaactgagccctttctactttctgccacgtagctagttgaattgtctcttgatcaatttcccttgccagtgagggggctcatgaaggcagacagtaagtctttctctaaccctcaactgtgatgcttgagacatcataggctagttttgtttgttgaattaaattggattacat

SEQ ID NO: 50858 - DNA, 1052 bp, Homo sapiens
tgctttcgtatggttactaattcactcttacttggcagaccaaagaatttaaatcatcccactattggcttactgccacttgaaatactacctgaaacttaggttaaaattgaatgtcagttttctgttgaacaactttagccatttcttggaatatgtttagagaatttttcatcattattactgtcctccaattataggtaaggtgtccacataaccacagacctgggtcacacccaatactgggaagccccagagcctatgcctgtgacagaactccatgacacgggaaaatcgaaaacaaaaacataggttttagaatcagacagaccagcattcaagcctcagctctaccatttactaacattgtgaccttgcttttaagttccccaacttttgtgagcttcagtttccttatatctaaaaatggggctaataatacccattctgtgtaatcccagtgctttgggagaccaaggtgggcagatcacttgagtccaggagttcaagaccagtctgggcaacatgctgagatcccgtgtctagctacattagctaggcatggtgttgtgtgcctgtagtcccagctgctcaggaggcttaagtgggaggattacctgagcctggggagatcaaggctgcattgagccgtgaccacaccatggcactccagcctgggcaacagagcaagaccctgtctcaataaataaataaataaataagtaatacctgctctgtatacctcagagggttgttggtaggactgagtgaagagaatggagaatggatgtagaagttatctgtgaagcactaggttggaatagggtattgtgtaagaaacgtgaagtgttggtattgttgagaagcttttgatacaggctctctttctctgttctggagtgaaagatcaaatctgaatttttttgtcacttgagagttcccagaaccaacagtgaataggggcctgagaatgacagttagattttaaccaatagagtagccgcatttcttgacatgttcattatagagtataggagtgaattgtatcagat

SEQ ID NO: 50859 - DNA, 1032 bp, Homo sapiens
aatctcctttggcaacaccctcacagacacacccaggaacaatactttgcacccttcaatctaatcaagttgacattcagtattaaccattacaaaccccattctgctccctccagtggctgccaggatgctagatttcaccatgaatgtgggctgttagttttcaaaagtacttcagaactggagaggaggaatgagaatagggaagttaaaatgccacaacgctcactgttcctactgacattcagccattttcttgaataaatgcttctcggattgctgcaaatacttttattaaattccagagctccaaagaagttggttctgaatgtttttgccaattttctcattgcttttatggaggagcacttaaaacactgtccagcacatagtaggtgatgaattaatatgttattcattaatgccattttatttatttataaataatttaatttataatgtacttataaattattattttcagattattttggatgttagtgtagagcagagattatggtatcaggaccctttacattcttaaaagctatacaggaccccaaagagatgtcgatggagttatatctattgttatttgctgtattagacattaaaactaggaatattaaaagtatttacttactaattcatttaaagttaataataaaggaatcagacactcatatgtgttttttcaagatatgctttccaaaataaaatactttagtggaaagaataccattgttttacatttttgcaaatctctttaattttttccttaatggtagacagctggattctcgtatcttcttctgcactcaatctggtttgactgaggaaaatttggtctcacaaatatatacagttggaagaagaactgtgtcctaatacccttttttgacaattagggatattttctctgatactgtacaagaagttggcaagtgatactttcttaaaggttagttacaatatggaagctgcaaacgtatcaattgacttttcattttctgttatgttaaaatctatctt

SEQ ID NO: 50860 - DNA, 1030 bp, Homo sapiens
tctcctgcctcggcctcccaagtagttgggattacaggcatctgccaccatgcctggctaatttttgtatttttgtagagacagagtttcaccacgttggccaggctggtcttgacctcctgacctcaggtaatccacccgcctcagcctcccaaagtgctgggattacaggcgtgagccaccgcgcccggcctcaaagatagtatgatcttaactcttgtaatattatctcagcgtttacaaatatacatttccaaatatctcatataattttcaaaatagagaaaaaaagtaagttaaaattctttttttctgattttaaattcaatatatgctttaaaagaaaatttgaaaatgcagaatattaaaaaaaaacataaaagtcactcataattctccccaaagataacagtggttcaatggttaatatgttggtgtatttctctccagtctttttttctgtgtgtgtttgtgtatgtattatagtctgcattatgtaatatgtactgctttgaaactcgcttttcccactatttactgtcaacactatttattgtgaacattctagttcagtaaattttttataaaacctatttttttatggctgtatagccttcgttacatgaatatagagtaatttgttttgagttaatcatcttagattgtttctgacttttgcaattagagctcatgctataattaacattctggtgcataaatatttgggtgcatttctgattcttttattagaataaattcttagaatttcagcactactaggccacagaaacatgtataaagttgtaaaaattctttgatgcatttccaaattgcactttgagaagtgtttctgtttagtcccaatagcagggtgtgagaagagaatggttggcattatccttgttttatagatgcaagggtttaggtgtagagagattcaagacttgtctaaggtcacatgatgatattacttatcctttggttttctgagccagttctatattctttccactttaccactgttgtagta

SEQ ID NO: 50861 - DNA, 1053 bp, Homo sapiens
ttttaggtcaggggtatgttaaggaatctcacgaataaaagactacaactttttttttttttttgagatggagtctcactctgtcgcccaggctggagtgcagtggtgcgatctcggctcactgcaagctccgcctcccgggttcaagcgattctccttcctcggcctcccgagtagctgggactacaggcgcccgccaccacgcccagctaatttttttgtatttttagtagagatggggtttcaccgtttgttagccaggatggtctcgtgttagccaggatggtctcgatctcctgacctggtgatctgcccgcctcggcctcccaaagtgctgggattacaggcgtgagccaccgtgcccggccaacttttaaaaataaaaaagtaatcataccagattctagagagccaggcaccttttgcagacggaaatgaaaacgtgccttgcaggtagcaggcacttaatacagttttgaatggctagctcctagaggtgagtagggaagaatgagagcttgactgtaaatggatacaactgagtggctgtatgtatactggaagaatctggaaatcaggtgttaccttattacatcaaatctgttttaatggatatttatatattgctcagatatatcaaagttctagctgtcagacctctgttgactgtgaaaatgcatctattacaagtaatttgcactaacctgtgactctggacatttaatcgagttcaatttacctcttttatcaaaattacaagttgcctttttaatatctatattttaatttaatacacagtttacctcctacatgtagaaggcatgttcacaggcacatttgatgcaaacttaatttcttatgttttgaagtcaattttgggctgcatattaatgcagcctatcctcccttctttccctaataatggcagagatatcttgattcttgtcacttgcattttttttcttctttaccacttagaaaaagaacactgcagactttaggaaatagaatggttttgagttttgtccgtgatgttgtgggtatcagcattct

SEQ ID NO: 50862 - DNA, 1034 bp, Homo sapiens
agtgccaaagggaatattttaattcctgtgtttcatgtactggagcggaaccccttagggtttccagggacaacaggccagaattgcactctctgctgcctcccaatgtgcagaaagagccagtcctttccgtagttcactagggaagtgagtgtaattggtggttccagaggagtgaccctgagcagtctgcctaggaaattgtgttctccctttcagcgttccagaggtcaaggaacaccaagctccaggcccagtctggttaagctacctcaaacaaaagacctgaatcctgctgtcatattgcaggcttgaatttgccgatttgccggggcggtggcaggggggcggaggggggacggtatttttggttagatgcctcaaacactttaatttttctgttactgtcagccagctatttagtgagcacttactgtgtgtcaggcactgctgggtagtttcagacatgcacatggtagtctattcagctaaattcctcaaacattgacgtcagtctgtctatggacatgatctccgtgttatttttatttctcaattaagggctcatggaagaaatgctttgctttagattgtgtttcaattatatttcacaaataatccacatttggagtgtggtttagttcattgttttgtttttgtccctatccatataaatcactctatagaaaaacatcagattctgttttcacagaagtcagggaaataagttgtttacacatcaccatttgactcccttcacccctgtcctcattacaaacatctcagccacccaatgaagtttatttaaactcccaagccatccatgcaaataagacccctacagctacggagtttggaggaagaaaggactaggattgtctgccacttccttattctctctactgggttcagaacatttcttttcatgagttaatttactacccagaggcttggctttagttgtgtgtcctttttcagttttgtaaattagggaggtggttccatagaatcacagcatatcagagttgtcaggg

SEQ ID NO: 50863 - DNA, 1094 bp, Homo sapiens
aacaaaaagaaagaaacaatacagaactatatggaaaaccagtggaacagaatcaagaacccaaaaatgaacccaaacatatgtggtcaactaattttccacaagggcaccaaaaaggacacaatggagaaagaatagtcttttcaataaatggtgctgagagaacaggatttccacatgcaaaagaattaaattggacccttatcttatactgtacataaaaatcaacttaaaatggatgaagacctaaaagtaagacctgaaaccataaaccttttagaagaaaacataggggaaaagctccttggcattgaccttggcaatgattttatggatatcacaccaaaagctcaggctacaaaagcaaaaataagtaaatgggactacatcaaactaaaaagcttctgcacagcaaaggaaacaatcagcaaaatgaaaaggcaacctacagattgggaaaatggttgcaaatatttacaaaccttatatctgataaggggttaatatccaagatttataaagaactcatacaactcaataggaagaaaacatataacttgatttaaaaatgggcaaaggacttgaatagatatttctccaaagatgacataaaaatagccaacaggtacctgaaaaaatgctaaacatcactaatcatcaggaattgcaaatgaaagccaccatgaggtaccacctcacacctgttaagatagctgttatcaaaaagacaagagataacaagtgttgacaagggtgtagggaaaagggaacccttgcacactgctgatggaaatgtagattggtgcaaccattatggaaaacagtatggaggttcctaaggaaattaaaattaggactaccatgtgacccatatgacccagcaatcccagcaatttttagcacgtatatacccctcaaaatgaaatcagtctgtctaagagatatctgcactcccaatgttcattgctgcattattcacaatagccaagatatggaaacaacctggttgtccaaatggatgaattgataaagaaactgtttcatgaatagaaacatgaatagaaaatgtttcatgcaacattattcagccttta

SEQ ID NO: 50864 - DNA, 1091 bp, Homo sapiens
agcagtgagttaggacatctaatgcttttaaagatagatgtatatgtcgcaacgatagtgtaagaatcagctgaagctaccggtgaggttttggttattttctttcagtcatctgagtccatttccaataaaggttgtttttttgtttcgttttttgtttttttttaatggggacaatgaatgagacttgtaatatgcagcaggaagaagtttcaccaagactttgaaactggcaagaatgatccagatgtccaattgcctctacttaaccttattcgtctaccttcagaagtaattagattctcttccacactaattcgtatcccccatcgctctgcttttcacccactacgttgttccaagattcatcctcaggggaaaaaattgagagccacactttcggctccacctgcagctcctggaaatcaaatggtgaagttataagaagtaccttaacttggagtgaagtggcctagtcataagttttgccctattccttgccagggggtggggcggggcttccttcagtcatccagtctttattcacccgcaggtacccccagatcgatcccccttcattgactccgaggggatacagcagcaattcatgttttgaagtgttctaaatggttcaaaacgtgaggcgctgctataccccctcgtggggaaggtagaaggtggggtctgccggacgcgtgttcctgccaccaggtgcccgctccccgcgaggccggctcaggagcaggtaggtgggcgggggctcgcgtctctgtttccggcgggtcctcgcccttgtccacgcagcagggctgtagtccggggagggcagtattcctggctaggctggggcgcataggcggtgcgagtcgaggagagacgcggtgcccgcgctcagccgtgccctagcagcgggaacagttctgcagtgagcgatcggtgctctggggtattgtttccgctgccagggtaagtctgggactgccgttcgggcctacccagcaggtaagtcttaggccatcgcctgcggtgtcggccccgggagcagcgagacccaagattgcatcaaacgtttgccccgtctctgcatatgt

SEQ ID NO: 50865 - DNA, 1027 bp, Homo sapiens
ttcagccacacgcctaccagttcacctaccgtgttactgaatgtggcatcagggccaaagctgtctctcaggacatggttatctacagcactgagatacactactcttctaagggcacgccatctaagtttgtgatcccagtgtcatgtgctgccccccaaaagtccccatggctcaccaagccctgctccatgagagtagccagcaagagcagggccacagcccagaaggatgagaaatgctacgaggtgttcagcttgtcacagtccagtcaaaggcccaactgcgattgtccaccttgtgtcttcagtgaagaagagcatacccaggtcccttgtcaccaagcaggggctcaggaggctcaacctctgcagccatctcactttcttgatatttctgaggattggtctcttcacacagatgatatgattgggtccatgtgatcctcaggtttggggtctcctgaagatgctatttctagaattagtatatagtgtacaaatgtctgacaaataagtgctcttgtgaccctcatgtgagcacttttgagaaagagaaacctatagcaacttcatgaattaagcctttttctatatttttatattcatgtgtaaacaaaaaataaaataaaattctgatcgcataaaaatatgttgggcatttttatttaatagacacatacctcatttttagtatgggccagacattgttctaagtggtttgcaaacattggtgcctggtcccttctctctaggatgacttccctctctgtcaagttcctctaagaaagccttctgcaattgaccctctgtctatatccccatttcccttacactctgcaccactaacttagtactcagccacatcgtttcttagttcaatctacaactgtgtcactttttatccacaaaaagcataggttgcactggtgatttataaaccatcaatggttctaagaagcactcacgtcactacccaccagctagacagcaaattcctgatgccgagagccagagcttatgcttta

SEQ ID NO: 50866 - DNA, 1032 bp, Homo sapiens
aatgcttagaaagtaattcccaaagttagttagcgccgtcttattccaagtctctcttggtacatcaaagccactcaactactagactatcctgcctcaaaccctccaggacctcattgcttccaaacttctttccctagactttcttctcacctttttttctgtccttataagtctgtccaaatacattgcactcatttctgtcctatgagtgagctaagtcattgtcttctccataaccttgccttttctcctcacccaaatcacttcttatctccaatatccaattagacagatctggaagttccaaggatgtgtccatatagggaaatcagaacaagaatactactaacaccaagttttcagtcacccttctaggttcacagaatcttaagaagtcagcaaaaccataagcccttgtacttaaaaataatcaatactacttaaaacttggtatttattttattttatcttattttatttacaaacactatggtgactttaaaacttagtttaaaaaaatactccccgaggtctgtaatctcccacatacaaaatctctaaaggagaggcttaaaagagaagtactcctccctgaaaatcagactattttataaataatgataaggtggcccttttgaaagtattgcttatttagaggctggggatttaaacttagatcactagtgagggtgtgttccaattaccatatccctagataaacatgaccttctttaatcagctctttgctccctagtttcttagcagaactgccaatgagccagggcagctgccattttgtgccagagtttctttttccattttccaaggaagcaaagaataaggaatgcctcacttccctccccattccctgtttggagtcatgccctctgagaacttattctatttcagcttctacctctatgcagtcagaaaaatgattccgaacaacccatagaatgagcacctgcttcagttattgtcccaatgtgaaaatgctaatccctgggtttaggcgaggtttgctttcca

SEQ ID NO: 50867 - DNA, 1916 bp, Homo sapiens
cacacaaaccactgtgtacaaaagcgtccatggagctgtcagtgtctcgagtggtattatgaggcctcaggtgccttggggtacattgtcatgctataagggatgtatatcataaggtatggtggaagaggggccttatgtgaatgattgccacatactgtttctgttgctgctttttttccgattcctttttgtcattggatttgtttgttttgtcatgtggtgaatggtgttttagttattgtgttgctgccagaatcagaatccagttcttgttcttactgccttatagttattgtgttgccaccagaatcagaatccagttcttgttcatactgccttgtagtgagggcagtttaatatctacaaagaagcttttagaagctgaaaaagtcaatgtgattgtgcattctgcttttaagaagctgtttcagctatgaactgtgtatgtgctataagtgtgaggtaccataagttatttaatttttaaaagaggaaactcctgagtgagctgtttaagaaatctgagtgtgatctattgttacgttatttataactaggtaaaatgtctgtcgtgatagatttcttttaacgttcagatactgtggttgggttgtctatatttaatatgcagatttgcctgctggaatcataatccatttttaagtgaatgtaagaaatgaaaactactgcatttgtgtcttttgaaggcaaggatccttggattttaaaggaagagtatgtgctttgaaggcactcagagactagtaatagcatatggtttgaagggaaacccattctctttcaattacaagagagcatcacttagcgtgcagtacttctgttacagcatccgatgtgtcctttattttaaattgtaaccataacagccattaatggctttatttcttgtattgctctcatctgggaaaagtctctacttcttcaaacgtaacataaatctattatgaagcttgtcccctagtatgccattataaagaaaaaattcttcgatggtatgcagtgtatctattctgtttgtaaaagatcatgtcaaaatgttctgcctctataatgataatagatggttttgtctttcaggatatttatccacctactgtcttctttgccttaaagggacacttggccatcatttttaggctcgaacttaacactgttaagaaataactgaaatatgatggtatttacattaatttttgaaattcaatggtgggatagaattaggtcaggaaatggaagttgttccaatggtgtgagaactaggagacaagatgattcactttattatttaaaccaagcttcatttttagtttttgttgtttaaatggactggaaagttaagtttttgcagggattgttttgaaataaagagatatgctaactcacagatgaactttgttaagacccctttatttttatataaagtctaatatttgaaaagcgattgttataaagtaaaattctctcttcctattctaatatatatcatatatttcaggcttctatttgaaaacaggtataagagatgatatgatacaaccctatagataatgttttttgcttgattgacttatataatcactgtttcatgattactgcttttggaataataggaagttttgtgaaatgctggccttgtgtatatcttagaatgcaaatttaataaagtgtgtatacatgcataaaatttactagtgttttaaaagtctgtcctttgttcttaataataattattttctgcccctatatcccagtagtttattctctgtgtctaattgcaggtcaagtttgaataaaaggatatcagaaacacaaaagaacgaatagctatgttgaagttggggctgtttgccaaaacgaagtgaaacctctccacataatcaaattttcaagag

SEQ ID NO: 50868 - DNA, 1025 bp, Homo sapiens
gacaacgggtattgagaccacaagtgtagattattcattgtagaagcttaactggagaataactgaagggatcaaagaaagggactcttctagaaatagacctttgggttttgaaagcaagaagaaaggaaatagtgtaaggaattataaatggcatagaattggagggggaaatcatttaaaaaatgtgtttgaattgaaggccctttgggaatggggaagtgataactctaggggagttgaaagactttgttttagagtagaggaactatgaggcagtgtacttgatcgaacacctctgatagtccgagtatggttacctcaataagtaaccattcctcttgctccaagcctgatgggaaggtaaacataagaatagaaatttcttgagctgaagtgaagtgaaggaactccctcccgaaaaccatggcatgtcacgaggaacgtttattgtaggttaggcggtctggtgcctctaggggggacaatcaaatgatacaggacctcgaagagtcttactttggatttctgtggctttataatgtagtatattatgtagttcattgctgtggctttatgcttttttattatttacaagtgatttactgatttgtgagctcttgaaactgtgtcattgcatgttatgtttaccctgatagttgcatttgcttataattctttttgctttgtcttcagttcagatattttggatggcagtagtagcagcagtggcttatcctcagacccgctggctaaaggcagcgctaccgcagagtctccagtagcatgctccaattcatgctcttcgttcatcttgatggatgatctctcacccaagtgacttaaccatttctgattcaacgttttaactgctgtttcctacataaaatgtttagtggggaacgcagagaactttgatccataatgaggattaaagttttacagatttcacacattctgatgctattattactctttggcatctctcttctccaaagttcaattttgtgagcctagtgacctta

SEQ ID NO: 50869 - DNA, 1033 bp, Homo sapiens
cgaaaattcccaagtctttgccaaccaaatctggaggacattatcaaccacaaggcaggaattatgtcattctgtatttagtccttatggacatcaaaatttgagcataactcagaagtctacctttgattctttctgcacactgggagctcttaatctgctcttcattcttttgggggtgagactgtgtgtgtctgcagcatactatataaaataaaggagttttcagggctgctggccatacggtgatgattaaatgatagtctttcttttttatgaacggaaaacttacaaatttccttaccccgtgcttcagtgttaatgtgatagttttaacacattttttgttaaatttgtcttagtggttctaacactatttttaatgttatatgtgtcatgtcaaaatttcatcatgaatatgtgacaagtacaaaacataagttttaatcattaattaacaggaatgtgtatgtctgtacacatctctaaagtacatgtgtatacacacacacacacacacacactttagagatgtttatgtgagcaacttagacatctgtgctgatagtttaaaactcctgtctaccttcaccataaaaatgagcaagttaaaacagaaaaaacaacaaaaacactcctgtcctcagcatgactgcagactgatatttaaatatgtgatcttaaaaacttagaggttattcagaaggataatactgggacccttaagataagatagtagagaccagagaacatgccatatatatcagtttaacccagagcaaggggtgtggggatgccctatagtcataccttataccaaaatttgtgctaggcttgatagggctgtgactaatttctagtgcatttacctgcccgtcattaatctgataggacccggcttattgactagacaaggcacaaagtggctcagccagatggggtgatagcatgaatcacactggacatcctacctttgttattactttatcattggactgttttaatgagttgctcatacttcatccttagtttt

SEQ ID NO: 50870 - DNA, 1017 bp, Homo sapiens
atgtggaagcatatttcttccatgttaaagcacatgggaaaatagttttaagaagtggtttgaagaagtattctgagctttggttaaacaaaggtcatcatatgttagcaccacgcctgtatttgtaaaattgttttatagtagcatcatctctttctgttttaggtgaaatggagacagaaagtcagcccaagagactcttccaaggcactaccaatatgttatctccagatgccgcgcaactgtctgatctcagttcatggtaaaaaaatgaaataaaatgaaaagtatattagagtataatccattttaaaagagccacattgaaagtatattgggataatttaaaatatttttttttgaattttgttaatatttattttttatatcattattttggggatgtgacaatattataaaacagatacctgacaaaactcaaaacaccattgcaaagagattagaaagagttgatacaggtgcttcgttaatagcaaatgaatctgaatagcagttgacttagatttttatcaagtcatagtaaatggcattctctaggaatccagaaatgtggtcctaaaacatggtgacttggtaactaacagatttttaaaaattattacagtgaatgaagaagcttctcttcttttaagttttaaaattttttcatcacctcaagtctgaagaagcttcacttgaggtgtttagctcaataaaattatgctttctgccccccagctccttaccatcaaaattgtccaaagattctaatttaaaatattttcaacttcttatccatgcccccatgaaggggaaatctctatggaggataatgtgaaaaaacagattatttcaaagtcaacagtatttcatttggaaatatatatgtctttctgacaccttcgctttcgttcccagctcctgttaggtcagcctgtcattagttgccaatggtgtggcagtgccaactgctggctggtgtgagaaagagtctctgggtggctgtgggtaatgtgt

SEQ ID NO: 50871 - DNA, 1086 bp, Homo sapiens
ggtgaaagaagatagatccctaaatggcagaactagatttccatagtctgtgcacagaggttcatcggtttatttataggagagcctctgacctctgaatcatctaaaatgtatgcacaattataataagcttccaatccaatagtgtgtgagaagcagcaaattagaagagatgcattttggttaaaagtatactaatagctgctagcaagggaggagagggaaaaactgaaaaacagatgtttttaaaaaattagtttgtggctaattagtataagggctaagagcctgttagtacaccccaagcgtgtcactggtgtagaatcatataataatttacgttcttaaggatacctgggtcattaacttattcataaattctagtaatacctacacttgcatagtattttacgtattacaaagtactttcacacatttaattgtcataacagcccctatgaaatagggagggcaaagatatttttcccaattaaaagaagcagcagctaaaactcaagacgttagaagtcacttgctcagaatcgcacaattagtaagtggtagaactgggattagaatagagatctcccagtgcaattctgtttggtataatttgtttaagaaagggaaaaatagaacacattgtagaaagatttccaactgaaatggctgaaaatacttacagggggaaatgttagctatctggaggtttcattcatttcacctccttctctgaggacactggaaaatattacttatttttgctggatatatgaaaaaatgtttatacatgttatacagccatgctcctgataacagtagcatagcaaagaagggaaagtgaatttgcctctctacacttcacttacctcttttgtaagatgagaagattcttatcaaccatggtctaggttcatctctcactgaaatacctagttttctgaaagggccatggtgactcactgctctttgttgatccttatcatcttttcattcctacccctctcctttctagctttttggtcttccaaaactcagtttaatccttatatctcctttgggcaggcttccacaactatcataata

SEQ ID NO: 50872 - DNA, 1045 bp, Homo sapiens
tctatctgtaaaaaaaggggaaagataggactcgtggaccaagtgggtggtggagaatggtactctgccagtctacctgcaccatgaaggggaggacatttacttgtcaggagtccaggaaggcataggctaacaatgaaagtaatacatacattgatgcaccttcaaatcttcacccagtcaggcactgttggccagttctttgctttgcggacattgctgggaccacatatcatgtctcattcccagtttccagtatctgagtctgaaagtcccatggccctttctcactatcatctttgagcctcagtttcctcatatgcacaatgggattcataccatggtttcagggatattgtagaatcaagtgtgatcatccttgataagggcctagcacacaagagatggttaaggaattagtatcttacttcctaaatccatatattggagaacatgagggtgcttggtttcactcccttcctatcactgcttccccactcctgtccaatctgtttgactttgccataatgtcatttaaatgtttgtttgccttcccagggccagcaagcttcctcagggattactgaggcatctccttggaaaccatacctcattaatcctgctgtgaagtaagaggcagccaggaccccaagcttttcctttttctgagccacattctgttctggccagctcggacaccttacatggaggctgacagggctcaacacccagcacccatcaggactcactaccgtctgtaaactgagcagcctggagggagcctgttgactagcagtgccagagaggtctcttctctttctttgcctatgtaaagtaatttcttttaggtgtggtgattaatttattgaaattcaggtgaagacatttgacaatttgacagagagaagaaaagtgctagatggaaatatgcactcttctcaaatgttctcaaagagacttttaacctttagtcccagtagatacttctcgtttggtttctctacctttctcttgacacaattttcattcagaaggtggcatcaca

SEQ ID NO: 50873 - DNA, 1064 bp, Homo sapiens
ttatggaatgaagaacttgtattacatacccgttgcccatagtatcctaaaggtatacttgccaattaagagcaaatctcccagatttacattgtattaccaactgtccgatttttgccattgttttctccaaaaaaaaaaaaaaaaaaaaactatgttcaatgtcagatgataataacgttacttagcataaggaattctttatgaaactgttctaaatgatgttaacttcattttaatttaagaaattttctaagttatgttactgattactgacagtaacacaccaaaagtacagttctattatgtgcatttcatggtcttcagtgccagtattcagtaacatactgaatactcagctgaaatccatttggaaatttattatgcataatattgcacggtatgagtgtcactaatcagtaacaaagtgaggaaaaccaaagatttgttacccatagttttgcataaatcaattgccttgtcactgaagaataacaacataaaaggactcctctgaaactccccttctagcaaaaaaaaaaggggggtattgtgtcttggcataatattttataatttccctgtgatgtttacttaaagcaagaagacctatggtatcctttggcaggggcaatcaggcctctgaaaagcagtgttaattgtccttatgcagtctcagtcttacaccgaggctcagtgtaagttacctttcactctttcagcctacctggcacaggatacatgattgagtactcagtccccatcaggtattttcagaaggacttctacataagggaatgaggatgagtagcccagccacctatcgtatgaatttccaagtacatacttacagtggtgctgggttgtccacccataggcaagtctccttgtagatttatacagccactatctccttcaggacctgtggtgggaatgtccaggactggtcagcctgtgagcctgtaacatggatacagtggagccagaacaaactgtccagaacagccagacaagtaagagcaaccttatcttgtatgaagtgataggtattgggtggagggcac

SEQ ID NO: 50874 - DNA, 1098 bp, Homo sapiens
agtggatggaaattaaacaacatgctcttaaataactaatgggtcaatgaggaaattaaaagcgaagtgttaacatttcttgagatgaaggaaactgaaggcacaacatacaaaaacccatgaaatacagcaaaagcaattctaaaagtgaagtttacatcaataaagcctacctcaaaagaaaagatacatcttaaataaacaacctcacactccaccttgaataactagaaaaaaaaagaaaaaaatgcaatccaaagtaggaggacagaaatcataaacgtaagagcagaaatcaatcaaatagacatgagaagaacaatacaaatatcaatgaaacaatcagttgttttcttgaagaggtaaaccaaatcaacaaaattttagctagactaaaagaaaaaagggagaatattcaagtaaataaaatcaaagatgaaaaaggagatagtacaactgacatcaccaaaataaaacggatcataaggactattgtaacaatcatctgcctacaaataggacaagctagaagaaatggatacattcctggacacatacagcctaccgagatgtaatagtgaagaaatggaaaatctgttcagacaattaacaagtaaggaaggtgattcagtaataaaaaaaaatcccccatcaatgaaaagtctaagagagaatggcttcccttcctaatactaccaaaatttctatataaagaagaagaattaatagctatacttttaaaactctttcaaaaaaacagacaagaaaggaacacatccaaatgcattctatcacatcatattaccctgctagaaaacccagacaaagaaacacaaagaagagaaaactgaaaaaaaagaagtgccaaaattcctgatgaacatagttgcgaaaatctttaagaaagtattagtaaaccaaattcaacagcacattaaaaacatcattcaccgtgatctagagggattcatccctgggatgtaaggaagtttcaacatacacaaatcaataaatgtgacatatcgcatgaacagaatgaagcacaaaagccataggatcattccaatttaagcagtaaaagcatttaaccaaattcca

SEQ ID NO: 50875 - DNA, 1050 bp, Homo sapiens
ttcattcagctactctatgtcttttgattgaagagtttagccaatttacattcattgttattattgataaataggaacttacttctgcaattttgttatttgttttctggttgttttgtggtcttctcttccttctttctttccttcctgtcttcctcttagtgaaggtgattttctctggtgtatgttttaatttcttgcattttatttttgtgtatgtgttatatgttttttgatttgaggttaccatgaggctcaaaaatactatcttataacccattattttgaactgatgagaacttaatactgattgcataaacaagcaagcatgcaaaaagaaaactaataataattcaacactttaacttcatccctctgctttttaagtttttattgtttcttgttatgtcttattctactgtccctgtcttgaaaagttgttgcagttattattttctttcattcatcatttagtctttctacttatgtcaactgtagtttacataacacaattacggtgctatagtagtctatgtttttctgtgagcttactaataccagtgagttttgtacctgctgatgttttcttcttgctcattaccatcattttctttcagattgaagaactctgtttagtatttcctgtagtagaggcctggtgtttatgaagtctctcagcttttgtttgtctgggaaggtctttatttcttcttcatgcttaaaggacagttttgcctatgtgcttttattctagggtaaaactttatttcctttaccactttaaatatgtcatgccactgtctcctggcctataaggtttccatcgaaaagtctgcttccagatgtattggcactccattgtacgttatttgtttcttttctcttgctgtgtataggatcccttctttatatttgacctctgagagcttgattattaaatgctttgaggtagtcttctttaggttaaacctgcttggtgttctatagccttcttgtacttggatgttgacattcttctctacctttgagaaattctctgatattacccct

SEQ ID NO: 50876 - DNA, 1029 bp, Homo sapiens
attctgcccaaggagacccagaactgggtgcagaagcatcatccacagaatgtcaaacaggctctggtcctggtggaattcttgcagagggagcctgatggaacaaagaatgaggtaagaagaaagattgcctacatgtacaatgaagtaggataaaagtggatatatcagaatggaggagttatcagagaattagacagattaagtcgctcttctgttgctcctttaggacagctagcaaggatctgaaatgacatacatgcatcaatagtccacaggtttcaagatttctggcagagcctttccttgtcttagagaaaataaatgcattttgtcttctctagggccagggtgaattgatggtggtgggcctagtctggcatgggcaaggacaagagttgagttcttagaaaaagagaaataaagggcaagaaagagttgggaaaggggagaagatccacaagatgggcagcacttacagagaccaaaggagagagaggttagcaaacagaagtatgaatcaagcggctctggggagactgcaaagaaagagaacaaaatggaaagaaaaaaaggaaacaaggatatggaaagacgacaattgccaacagagaagtggagggaatcaggatgctaaggggtagtatcttctatagcagaaacacacatctctgggctgggaggaaagagcctccattgccctcacttagtggcttgtcattggcccttctggtgagtgggaaaccaaggtttgtccttggaagatggcagcacactttcttttttcaggagcctaccttgaaaaatccagggcaggccatatttttggtgtcttattactaccaaatcatgtgaagagagattagagcccaactcttctccccatttattcttccatccatctccattccctgtgaaattctttcctggaggattggaaactggctaacaggaaagtttatttcactcaattccttttcttttacagaaaaccaaaagataaaaattcactaaaacaaggatccaagt

SEQ ID NO: 50877 - DNA, 1034 bp, Homo sapiens
ctataagttgtagtgaatcagggatggggatttggggcagtaatgtctaccaccacactcagcgaaacttcctgatttttgatggcttatgaacataacaccaaagaaagggtcatttcaacattaaagacaatggcttctgctgacaaaaaaatgtaagaagtgttcctgtacctcctgagcctgaatggtcagcaaggagccaaccatttttttgaatacctgtggcatccttgaaagaattttgttactgtttctgctggatcacctcagggaaaatcagttttgaggacatgttaagtcaggagaaaggttaccattactaagacccttcccatctataaagaaccttaatcatcaccatctctctttcttttttgtttttaaccacctgacatttgtatatatgtaaaggaagaccatctgtaaatttttccagttaaagtaaacaaaaaatttaatacgcaagtacaaacctgtgcagtgccctttataagtctttcgaagaagtactacaccctgccacatcaaatgttgatgatctgcttgcttagcgggagggcatttgcttactttttctctaattactttacttctactctgatcttgctgtctcagttctcctaccagcattgatacagtataaaagggaatattaagagttccatttagtaaaaggcttcaatctaaatgagatgaagggatatagaaactgtttttcctctgactaaagaaaaatgattgggatgatctgttaaagtttcgagaaactcaaataggccctatttgccaatataggacaggaaacccacagattaagtattggataatctcaaagctccttttggccaattggtgccagttttctcacccaccaatctttcctcaactgttaaaaaaaaaaacaggaaatacattgattgacatttgtcttctcttagctgtgctttgtttcaaagttgaaaaacaaagaaaaggagagaaacttacctcctgagtaatctaatcatgaatgttctaattcttggcagttg

SEQ ID NO: 50878 - DNA, 1069 bp, Homo sapiens
ccaagggtaggatgaaaagtcttgagggtatttagccaccaaataaccaaccatacttcttaaaggacttcccccaggggtgatataaatctctgtcacctccagttggccttgggtcaagtccagcatgctctaagggtgagacaaaaggcctccaaggcagagagtcatggcaattgccataagcaaccttgtagatgcaaaggtgagacatagctccgcagggccagagtctaaatatgtaagtcagtgtcagaatctttttggcactgtctattccttaaataagtcaatactcaccatttgtgaaaatcttcattgaactggagctacatttcctctctataggtagcatgttttaaatgttttatcaattatcaattttaattggaaactggttgtaggaactctgtcccagagagttgtgagatgcatggttagccgtcgaaggaacatttgcattgtagacatcaaaatcttccccctggggaaaagaaagcaggatttttgtagtgtgtcctgcttgcagatgtgccatgctgggtgttgggcacaggtctctccctgggatttcatggagatctttggctgcatttgtcagaaactctattcttaccattcaggctacaggggcccaagttgcagtgtctcacctcttgttgagaggttcctcagcacgtggaatacaaacctcctcctctccaggtctcccatagcagctggaactttattcatgttcctatcattatattctctatggaataggatgagttgctggttagcttgcttccacccacctatgcccatccaggcccacgctcagcacactgtccccatagtgggtgcccctatccccagggattcttggaaatgctgttctgggtggtgactccatttcagcactgacatagtcactggcagccagagatggccttctcaagcttatgttgggagtctagtaatgaatcctttttgttacagttcagatgggacttgcaatgcccagctccactggtgttgctgtttgtttttcttctatctccagtcttacaaatcagtgattattgat

SEQ ID NO: 50879 - DNA, 1029 bp, Homo sapiens
agcctcacagggcatcaaaggcctagccacgattttccctgctctcatcagatatgctccctaccaagtgggaaaagctcacccagctacatcccctatcagccagatcagctgcatatcccctggtattcaaccaaaaagactgattctctaccagctggtacagccactgtttgatcctgaactgcagcaaaatagtaaccaacagaggagtatccaggcagctttcccaccaagagtgcacccaagaggcccctctacctggatgtcctctaaaccctccccttccaacctacagtcagttgcatcctctgaggagaggcttgtggttctattttggcaatgctgaatcagagcagggaaagcaaagttgacagggacagggaggagagttaaatggacatagaggagttaaattttctatctaatacagatccagaagagacctggctaagggtagagagaataacagccccttagatgtaggtgggggaggggacacaggaaggggacttgggaaatgctggacaggttgtgagagcacagggaattgggaaggagaggtggaggggacagaaggactgcttgcaggcttattttgcagcttacgttaaaggacaagagaaatgcttggaatttgttatggttttaatggttccttttatgttaatttcatcttattcctaacttaagcttgcccatatccaccatggctctgacctctttgctctccctgtcccctcttcagctttagctctcacttctcagtcaccaattgtgcacatagttcccatttcaggtttcttggagtatctgacttgctcaggatatttcttagggacagaggtttttcaatgggaaccatctcatatgtcttgttggactattgggtggcttcacttcaggaaaattaattatctttgattggctgtggcctgaaggtttgtttgacatgacacaaaaaagccatcagggcattccactttcctggggacactgaatagagcagttgcccctggaaggctctgt

SEQ ID NO: 50880 - DNA, 1370 bp, Homo sapiens
cttagcccactgctgccaccagtggggtccaaagactggcatacttggtgtaccagtcccccgcaaaactgtttcacagcctccaccaataacttcaccataagccagcaaggaaaccttagataccactgacactgtttatagccaaagaaatcatacagagactacactacttcatgcacccagaataacagccaaagtgccctactcaaccaatactatagatagatcttcaggaaaaagccctcctctaacaaagcaaattcaaaaaattgaaagaagtgactgatacaccagataggcaagtatcaatgtaaggacgcaggaaacacgaaaaagcaaggaaacatgacacctccaaaaggaacaaaataattatccaaaaccagatttcaatcaaaaagaaattcattaaatcctggaaaaataattcaaattatcaattctaaagaagttcagtgagatagaagaaaattctaaaaaatgataaaaagaaatcaggaaaacaatttaggacatgaatgagaaagaaatatctatcattaaaaaaaattctggaactgaagactacattgaactgcaaaatgcacttgaaaaactccaacaatagactagatcaagcagaagaaagaatctaagatcttgaagaaaggtttttagaaataacctggacaaaaataaaaaagaatgaacaaagcctttgtgatatatgggacaccataaagtaaccaaatatacaaattattggtgtcccaaaaggcaaagagagaacaaaagattttgaaaacctatttaatgaaataatagatgaaaaatttccaggtctaccaagaggtttggacattcacatacaggaagcccagggatcctcaaacatacaatgcaaaaagatcttccccatggtacattatatttacaatgtctaaagtcaatgacaaataattctaaaaaagcatctagttacctataaaggaacccttatgagactaacagcagatttccccacagatatattataggccagagagaatgaaatcatatattcaacgtgctaaaaggaaaaaaaatctgctagccaaggataccatttttggcaaaattatatttcataaatggaggagaaataaagtctttcccagatgagcaaaagctgggggaattcatcatcactagactgcccctacaagaaatgctcaagggagtcataaacctagaagcaaaaggacaacatttaccaccatgaaaacaaaatgttaagtattaagctgaatggtaatgcaaacatacagatgagaaagaaaaagtgctcaactgataccactacaggtaatttccaaaccacagtgacaaacgataagggaaaaaaagga

SEQ ID NO: 50881 - DNA, 1065 bp, Homo sapiens
tctcctgcctcagcttttcaagtagctgggattacaggtgcatgccaccatgcccagctaatttttgtacttttagtagagacagggtttcaccatgttagccaggctggtctcaaactcctgacctcgtggcctgcctgccttggcctcccaaagtgctgggattacaggcatgagccacctcacccagccaagatcctcttttaaggttctgaaattatatcatttttgttatatatgtcaaaaatctgacaaatgtctgtttggaaattgcaaagataatttttaaaactaagaaacagtaggtagaatattaaaatatttagagaatgccaaaaagattctcacactggcttatctattttgactctcatccttcaaaactaaacactatggtataatgaaaaacaccactgactaagagacaaaagttctacttcaggtttgaccaagaattaactgtgtgcccattacttccatttcaggtcctcatgacttctgaactgatcttttgcagaaccatattggccccccaactttgccttatccttagacatttcagtaaatttccctaatcacctccacaatcattcaaaatgtatttgtggcctcatgtaatggccaaaaaagaccactcctcataggaagatgttagattacccactacatttcttacctttattacaaaggagagagtttctaccctggcctggaagcctctatgcccctgctgccaatattttgtcctcaatgcaccagatgacatacttcagagctctgctgtggtacacttgataaagcacattgcagaaccacacacttctttgataatgcttatatttgttgcatgtaatacaaagtgggaacttctacaacaaaataattaattagaagaacataagtactttacagaatccaagaaaccaaagcagcaagcatgcttcgcaaggacagaaacaagggtagctcaagagaactcaatagtaggtattctaaataatgttctctatacagaaatggcagtaatgaaacttagaggaaaaacactgagttttggggtctagt

SEQ ID NO: 50882 - DNA, 1045 bp, Homo sapiens
ttctgtgtaggcatgtgcttgtaagtcacgtgattttttttggcaaaggccagctccaccctggcattgctcgtgtcagcatccacaaccactttgtcagatccacatcatttctgtgcctccccagttgtctaccgagtaaaaaactcagcacattgttgggggacatgttggactttaagtattcatctgccttcctcctgatatttggtgcaggtgtgctgggactgacttcagagagtcctttgtccgtgactggtagactccacgttgcctcagaaagacagcacaaccaagaaagcctggtaaaaatgatgaaatcaagataaccaagtggacccaggggtcttttcctcactgtccactatcacatccctatcacatcacccccacacacgcacacccatacccacacagacacatactaacacactctgctaccagcagcagtcataagagattgctttgggccatgatctgatttaaaatgccaacgatactatttctttcattctgtcatacacacgggtctgtatctagaatctgctctgttttattgaggcaattttcatccctgttttaatttctaaatctattatgtaggttttcatgtcttgtaggccaagctccctatcaaggttattcccatatgtgttcttgtccttttaattgaataatcagctcattttgtttcatgtcaaattcatatggaggttcatgactgtgcttgcactgagttcacagattaaaatggtggcagaaatgatatagtaattaatttttcaatctagaaataatggtataatagtgtcaaacaggaaacatataaaaatgtttcatgaataattctcagtatttaaaaaaatcatattcaggtatatctgatggccagtgtgaactggatatattattcctattatttcataatttattcttagaggagcatacaatatcttcttttatgtgtttagcttgtgtctaccttacatttttgtcaaactgggtgatttccttggttgacagaggcaatttttctgaattccta

SEQ ID NO: 50883 - DNA, 1029 bp, Homo sapiens
tttatccatgtgtaactatgcatcctaatttctgtctcttcagttgtgtggccatggggtataggaggttggctgttatcggcctctgctcctgtgggttttactccttcttggcctacctgctgctctttcagtctccattccccaccttttctcctcctcgcagccactgtttgatgctggactgcaggaaaatagtcaccgatgcaggagtgtccaggcagtgttcccaccaacagtgcacccaggaggcccttctaccttgtagtctctaacccctccccatttcatcctacagccagctgcatcctctgaagagaggctggtggctattttttggcaatattgaatcagagcagggacagagaaggcgacagggacagagaggagggtgaaaaggacatggaagggttaaattttctacctaacacaaatctggaagaaacctggctaaggggagagacagtaacagcgccttagatgtaggtggaggtggagagacaggaagaggccttggggagtgctggacaggttgtgaggacccagagaatttgggaggagaggaagagggcacagaaggactgcttgcaggcttattttgcagctcacaggaaaggacaagagaaatgcttggaatttgcaatggctttaatggttgaccttatgttaatttcatcttactcctaacttaagcttgcccatatccaccatggctctgacctctttgcaatccctgtcccctcttcagcttgagctctcacttctcagtgaccaattgcctacataattctcatttcacttgtctcagagcgaatacctgtatttcccagtcctttagcttttttttcctggaagccatgtcacagtcttgttatcctctggtttagttccacttcagtcaaatgaattctcttcaattggctgtggcctaaacagatttatttcagatggcacaaataagtgcacctggggattctacttctttggggacaatgagaagaacaactgcttttagaaggatctgaaagt

SEQ ID NO: 50884 - DNA, 1045 bp, Homo sapiens
cgacccggtcagtgattcttaaacctggctgtgtggggagaatttgtagggagagcttgttaaaaagtcgtatttcggggctccacccgctaccctgacgcattgaatctcacaggaacccggggattcgcattttaataaaccatcctggagattttgactccggtcgtccgcctgcagttcacagtggctttggatttgctttttagtatccccatcttcaagacctaagcttcgatctagcgaacccgcccattaccctctgccttcaacagccacggaggtctctggggttaaggtttgcctgcgggccccgcctcttgtctttcaattggtccctcgctggtcccgtcctggagccaaattttcttttctgattggtcagctgcgaattgtggctagacctgatccaatggccgcttgatacaatggtgtcgttcgggaaacgcagccctaacgttggtcctaagctgacaaattggtctgtggacgccaaacttccgtgctaggactttctgcgtgtggaccgggggcctagtcctgcgtgggtccaacacagacaggagaaagctgcctgcttttgtgcctcccggaggtcctggtagaagcgaaacggggacaggagctgcagcgtcccaagcccagtgaggcgaagctactggagacagctctgccgggtccaaagttgggctcaccggctggaacttgaaaccggagcacgccggactcctgctgaagccatcatctctctctcctggccccgggcgccttggccggcgggcacaactggtttcggggccaaggtggtctggaagcctgactgtggcgtctggcctgggctcccgcgagcggaaaaggttcccctcctgtgagagggaaactatggaagttcctacgcccggagccagaactcctgctgctcccgcccgacccaaggtctagcttggcggcctcccacctgtgcttctgagggttctgcttccaagaggctgctggtgcccgggacaccagcagtttcgccatgggtgtttcgccatgggagttt

SEQ ID NO: 50885 - DNA, 2054 bp, Homo sapiens
tattgcctagggtagttcaaaaatatgatgtgagctagttaagcctttgcttgactgatttcagtgatattcagaagtgtgtaccaatcaaggctctttaaaatacggaacgactcacttaataaccagggaaccagccaaatactgtgcagccgcagaatatgcatatcaatgagttggaggtgattattctctgtaactccctaatgattgttttctaagcattgtggcttctcagtggcttgacagcatcttcctggttgtatgtggcctgtttacatgatgtattgaataatgttgtttgttgtgagcatcaatgcctgtaacaccaaactaaacacgtgtttttgggatatgtttccaatctttaaatgaccttgccctgtccaataaataaatgattgtctcaccctgtttttggtagtgttttttgggctttttttttttggacttttaatctcatttcttctgcttttctgtccccagaaaaatgtaagagctaattttatgactgtatttttctactgtgatgctgttttactgaattcaatggataatttaattgtacatgtaaaatcttactgcagttttatgtttttaatagtcaaaatagaatgtataatcttgatgatgtttataaatcatcaaatgccctttggggtgtaaaaatgggttcttgagcagcagtgtctaatgattccatcacaaatttgttataaagccaaactcccattgaaagtgtcactttatacttaataggaaatcgttatgattaaagcatcaaggaagcaaatataaagtttaatgaaaatccaaggggaagttctaaattgcaaaacttggcacttatctacagtattttgaaaaataacaccaccggtattcaaacctacctaggaatatctcaaaataacctgttaattaagtgttcttagaaaggggagtgggggcaagaaagatgatgtatgcacatggcgaaaagatcagatggtacagaaaggtataaaaacttggtcccttccctcctaccctaatactcctctccaaaagtaaccagtttcaagtgtcttgtactcacaggaaaacaattttttattttttatcagcaaatttgtactttaaaaatttcacattaatagaatcagactatatatactcttctgtaccttgctttttttgctacctgtgttttatgagatctttctgtatcagtatatataaaaatacctcattatttttagcggctgtgtggtattctaatgtttgaatgtgttacaaatgttcaaacactgataggctctttaggttgtttccaatattaaatcacattgtggtgaatatacttgtacatataatgagtttttattctacagtgtacctagcaatacaattgctggatcagagggtattttttattttcagttcagtagttactgccaaattgtcctctagaaatctttgcccagtatgcttccacatataatgtatgagaatgattatttaccaaacccatgccaatactgggtactaaacttttgaagtctgatcatgtgaaagtgaataaatggtatcttgcgttttaatgaagttctaatgcattttaatgaaggtctggtacattttaatgaaggagatggaacacattttcatgtttattgattactgatatttcctgtgaaatgtgtagtcatgttctgttttctattaggtggtatgtgttttattgatttgtatgagctttttgtaagctaagaaaattggtccattgtcatgtttaataatattttcctaagttttatttatgtagttaaacttagtctttacagcttctgagattttgccttgcttagaaaggccacctttgcatttaagaataaatttaatgtatttttccagtattttaaaggtttttttttcaacttttaaatctttgattcatttggaatttgtctaggtagtaagagtgaggagaggattcaacatttttctctccaatagcaatctattctaaccccatttattaactttttcaacactgattggaaaaaccatca

SEQ ID NO: 50886 - DNA, 1042 bp, Homo sapiens
gtaaagctacttgtgttctcttcatttgtctgtaaaaatttccctaattgattatatagtgtaagaatagttgaagactagttgaagaccttttgtgatttcattatcatgcctatgcagaagaaaaatcattgaggaaaattgtcattagccagtttaactgattcaaactctgtttatttcatactaaactagtgaataagtgaaataaaggaaactcgtcattaatctaaagacagagttcaaaggaattgggccaaatatattctcagtatttggaactaatgtttttaaggtttttaggaaaatcaggtcatttaagaaattgttttgtagtttctggtttatagcagtcttcaagttttccatcttcactgtatgttgctgaaagtgaggatgaggatacagagttgatatttttagaaacagtaattttacttttaaggaaattggctagctctttgagctagagagctgtaggaagctcaacatttctttgtagagaacgttgctttttttggattgtacaggtataaaaacattgcttttgttgaattgtataggtgtaaaaagggaataactgtatgcaggtttgaaaaggaaatgtgctttaggcatgagtcataagatgccattgtacttgtaggcattttattttcctttagaaatggacatcagctcttctcttctgactggtaacacatagccccaaagcatgagattatttttcattgggtttttattgttgtttagttttggtttgttacgccagcccagtctgtctgcggaacactgactctgctctctaatgagaacaaagttagaaatctgccgataacctaaaataatttagaaatgaattaaaaatgtgaaatcgggttaaagtgatgatgataaaatagcatgcaagaaacaagctccttccatcagacttggctactgttttcttctggtacgatttggtttggaagagcctcttgtttccttctctttggggtatgtcttcgtttcttaatatgtttgtaacattattgagatataa

SEQ ID NO: 50887 - DNA, 1065 bp, Homo sapiens
aatcttaaagtaatgctttttctttttctttttcttttttttttttttgagacggagtcttgccctgtcgcccaggctgcagtgcagtggcacaatctcggctcactgcaacctccgcctcctcatctcaagcaattctcctgtctcagcctccccagtagctgggattacaggcatgtgccaccacacctggctaatttttttgtattttagtagagatagggttttaccatgttcaccaggctagtctcgaaatcctggcctcaagagatccacccgtcttggcctcccaaagtgttgggattacaggtgtgagccactgcacccagccaagtaatgctttttctgtgtaccagtgacaattttgacagctaaaaactcacagttgatcttgtagagaacagaatagattatgcaagggccgcaggatcgctcacaagagctgtcagattgtttctaatataaaaataccaaaggttgcaaaatccagcaaattgtattttactgtgatatatgtatatttttaactctacccatctgtgccagtgagtacacaggcactaataacctgaaatgctgggagtcctgtaaagccccatcttggaacagtcagcacctttcatgctcttgtcagtgtttccttttgaaggacatattggtgtttatctacagaaacatatattatttttattgtgtacataaaggagtatatggctgttgtcccgtggggtatgtttaattcctctaaatgtttaaagtacttttctgcctgtactctccagttctgtcgttgagtatacactcaggcttgagatacaaccaaaatttgcttgcctttctctagccactggctgccagtgagttcgtgtgatgggcacacagaaatgcacacagatgtacatacacgtatgtatgcacacacagtatatgattccataaaattcaaatgcagattaattctcctaatgagttttcagtgttgaatcgtaaatagtctgaagcaggccagtgttccttttggctgccagtcttggattagtaaaaggaggtaattctttcagattc

SEQ ID NO: 50888 - DNA, 1063 bp, Homo sapiens
tagtagcagtaattgccatttgagaaaacactatttgtccatatttttcctgccagtggatgttgaacaggaaagtcaggtcctctactaggtgctggggatgaaggggtgaaaagacatggcctcagcttgaaggagccatagccagtgggaagacaaacatatgagcaaaccataatactgccacaagatgattgggttgaaagaagtttggtgaaaatacaatgagaacatagcagtaagagcccctcagtctgccttagggcattgaggaaagccgaagatagaaggtaatattagaggtaagatgaggcagggcagtggctcacgcctgtaatcccagcactttgggaggccgaggtgggcggatcacgaggtcaggaaatcgagaccatcctggctaacacggtgaaaccccgtctctactaaaaatacaaaaaattagccaggcgtggtggcgggcgcctgtagtcccagctacttgggaagctgaggcaggagaatggcgtgaaccctggaggtggagcttgcagtgagtggagatcgtgccactgcactccagcctgggcaacagagcgagattcccgtctcaaaaaaaagaaaaattagaggtaagacgaaatgcacaaacagaattgtctaggtgagtgatcaggggaggggtgaaaatctggagcagtcttatctctggtcattattctttcctagcaaaggaaaaaggacagattccttaaacgtagcctcttggtgcctcaagggcagggtgagtgtgtgtgctgagcagtggcctgggacatggcttgggaaactctgtgactgctgggcctgcctcccaggagtactgctgcttgactcttcctgccttcaggcaggcagtacccactccccatcccatcaggatcatagccttcactttttcttgaattctttattgaaactccatatttaattgtgtaattttttttcctagccattctaaatggcacaggctcacctaccaaatttaaaatgccgttcaacaatgccaagaaaatgacacacaagctggtatttctagaagatg

SEQ ID NO: 50889 - DNA, 1067 bp, Homo sapiens
ctgacttgacactttatcaggggatgagaaccagattataaagttcagatggaacccagagcaaaaatctctgtctctgagaaagaagacatgagcagattctctggctgcattttattttttattttatttatttatttattaattttgagatggagtttcactcttctcagccaggctggagtgcaatggcacaatcttggctcactgcaacctctgcctcccaggttcaagccattctcctgcctcagcctcccaagtagctgggattacaggcatctgacaccacgctcagctcagttttgtatttttggtagagatggggttttaccatgttggccaggctggtcttgaactcctgacctcaggtgatccgcccgcctcagcttcccaaagtgctaggattacaggtgtaagccactgcgcccaacctctggctgcatttttatgttacagtctctattacccagtaccactgcaggtcattgtcagccaccctcagaaaaccatagaatgttttcctagtgaaataagcagaaaacagcaaattgtagattagtagtccttaatttgaaatccaaattgctttaacagattccacatcctacattggtttcccccatcttgcattctgtggtaccatatacaactccatcaactggaccttacacccctgtaacagataagataaaccatacatacttctacaagtttaaaatcattaactgaagaatgtctcatctatctaaagtcaagtcactgggtaaataaatgcccaaactgagctcagactatactcagtttgaattattaccatagcccaatttatatttccagtttttagtgtattattcaccagcattggtcatatgttttatatatgattgtttatgcttgcatttctcaggagggtgccttcaagaatcctctcagtgcttttgagaaatgtcaggctgttggctcctgttactgtgttaatggatagctccacagtcacatactttgaattaggatggtgtgatgttcataacaatgaccctgtggtcctgaatcctcaggataacatt

SEQ ID NO: 50890 - DNA, 1103 bp, Homo sapiens
gcatagcatttacattgtattaggtatgataagtaatctagatatgatttaaagtgtatgggaagatgtgcattggttatatgcaaatactatgccattttatgttaaggacttgagcatctgtggattttggtatccatgggggtccttgaaccaataccccatggataccgagggagggaagactgcatagtttacaatggagtatacttgaagtttgctaagagtgtagatttccaccacacacatacaaaaggtaactatgtgaggagatggatatgttaattagcttgattatggtaaccacttcacaatgtatacatatatcaagacatcacattgtacagctttgtcaattatccctcaacaaagctagaaaaagaaaaacttagtgacgggccctagtctcttgtgttttgttcacccaagctgggaagtgagtagaaaaggaggagggaagtatagaaaaggtgtaatgacattgcatttagctaagcatgtgtggtggtggttgttcttccatcaaagtcaagaagatggaaaccatttagagcagtaccattcccaatcagctagaaagtccactgtttttcaggatctgtatttttataaagtggcttttattgttaagtattttaacagtacctcagtgcaagccatttgtctctgaattttatctttattttctaggagccttgttgatactgtttacgccttgaaggacgaggtcagagaactgaagcaggtaataaaatataaaatcattttctcgggtaatagaaccattctctttttcttgcctcacgctgctcatgctttcagggaaggcctaggagcaaggtagcgaggggggatttttgttttccttgtgtcatcaaggtaggttttgttgattttatcatgtaagccttgaatttaaatttccgaggcttgcttgtatttctatgtagtagttcacaatagagtcccaaagttagttacaactttcctgttctctgacatccataaacagactttaagaaaagactagtcattcatgagtgtgtaagtgtaaagagaaccattcatcatggtttgtgggcttttctgccgatgtggcctag

SEQ ID NO: 50891 - DNA, 1036 bp, Homo sapiens
agacagtaaatattttagactttgcagtccatatggtctctgttgctactactcaactctgatgttataacatgaaagcagccaaagacagtatgtaaacaaatgagcatggccatgttccaataaagtcatatttatcaaaacaggcagtgggctggatttggcacgttgtccataatttgctgatccctggtttagagtacagatgctcctcaactttgttagtcaaaaatgcattaaatacacctagcctagtgaacattatcgcttagcctagcctatcttaaacatgctcagaacacttatattagcttacagttgtgcaaactcatctggcaacattgtacactgtagaggattggttgtttaccctcgtgattgcctggctgagtgggagctgcagcttgctgcccctgcccaacatcacaagagagtatcatattacatatcacttccccaggaaaagatcaaaatttaatattcaaagtgtagtttctactgaatgtgtatcacttttgcaccattataaagtcaaaaaattctaagtggagccatcataagtcagggactgtctgcatatactgcatcttgaaggatagtgccccatcctcacggggattgtttcaaagctggtgcttcatctgtgcctttaaagtgcctttttttttttgagacagagttttgctcttgtagcccaggctggagtttaatggcacaatcttggctcactgcaacctctgcctctcgggttcaagagattctcctgcctcaacttcctgagtagctgggattacagacgcccgccaccatgcccggctaatttttatatttttagtggagacagggtttcaccatgttggccaggctggtctcgaactcctgacctcacgtgatccgccggcctcagcctcccaaagtgctgggattgattacaggtgtgagccactgcaaccagccctaaagtgcccttctatcactctattacaccagcagcctctgaatggtgcacaatgttgtagggccaatgaatttcatt

SEQ ID NO: 50892 - DNA, 1044 bp, Homo sapiens
tgagaaagaataaagtaggagaaattactctacttgatgttaaaggctaatacataaatcctataatctggacaatgtggtattggttgaggggtagccagccataaagattaacaggacagaatagacaacccagaaatagacccacacaaatatgcctaagacatttgttgttttttgtttttgaggcagagtttcgctcttgttgcctaggatggagcgcaatggcatgatcttggctcactgcaacctccgcctcccgggttcaagtgattcttctgcctcagcctcccgagtagctgggactacaggcatgcaccaccacacctggcttgttttttagtagagatggggttttgccatgtgggccaggctggtcttggactcctgacctcaagggatccgcctgcctcagcctcccaaagtgctgggattacagacatgagccaccacgcctagctgcctaaaagatttttgacaatggcataaaagtaactcaagggaggaagaatagcatttttaacaaacagtgctagaacaattggacatctaggttaaaaataaaaaaagctaatcttaacctaaacctcatgacttatacaaaattaattccaaatggatctcatatttaaatattaagtgtaaaattataaaacttttgggaaaaaaagtatgacaaaatctgttggacctaaagacaggtgaagagtttttggatttgacaccaaagtgcaatccacaaaggaaacaaaatggataaattgaacttcatcaaaataaaaaaattttgatctgcaaaagaccttgttaagagaataaaaagactaggccaagactgagaaaatatttgcaaaccacatatctgacaaaagccctggatctataatatataaagagctctcaaaattcaacagttaaaaaaacaagcatttcaattagaaattgagctaaagagggccgggtgtggtggctcacacctgtaatcccagtactttgggaggccgaggtgggtgaatcacctgaggtcaggagttcgagaccagt

SEQ ID NO: 50893 - DNA, 1085 bp, Homo sapiens
agaaactgagaaacagaagggacagaaaaaaaataaatggcaaacataagccctaacacatcaataattattatgaattttaatgatctgaatacactaattgtaatacaaattggaagagtagatacagaatgtaatccaactatgtgctatgtacagtaagctgacttcaaaacatggttgacataggtaagttgaaagtaaaaggatagaaaaagatgtgtcatagaagtattaatatactaatgaaataatcaggagtgtattaatatcagatgcagtagacttcaaagcaaagaaaattactagggataaagaggggcattatttattgatgaaaggatcaatctaaagaagacataatgatccttacttttgtatgcaccaaacaacaaagcttaagctacataaataaaaactgatagaattaagaagaaatttaaaaatccataattgtagatgggatttcagtatccacacccagtattgacagactactgtaaatataatcagcaaagatatagaagaactgaagaatgtcatcaactaagaggatccaattgacatttatagaacactttacccaacaacagaatacacgttactttcaagtgtccataaactattcaccaagatagaaccatatcctgggtcataaaactcaattaaagaaaaattcaactcagagcatattcattttctgttgctgctataacaaattaccacatatttagtggtttagataattacaaatatcttacatttctgtaagtcaggtgtctgacatgggtctcaggttaaaatcaaggcaccagaagagctgcattcctttctttttttttttgagatggagttttgctcttcttgcccagactggactgcaatggtgcgatctcggctcaccacaacctctgcctcccgggttcaagcgattctcctgcctcagcctccggagtagctgggattatgggcatgccccaccatgcccagctaattttgtatttttagtagagatggggtttctccatgttggtcaggctggtctcgaactcctaacctcaggtgatccacctgcctcagtctcc

SEQ ID NO: 50894 - DNA, 1110 bp, Homo sapiens
tgttctaagtacttttcattaacatatttgctcctcacaggaactcatcaggtaaatactattattttcctcattgaatgcgtgaggaaattgttacatagataaataatgcaaggtcacatacctatatactgatagacttagatttcaagtcgtgttgttccagaaatcatgtttctaactagtatgctacactgcctgtcatgtatgttaatacatgtaatactttatgaatcatttaaggtgacttttagtcatccacacagaaatgtcacatgtagaattaggtgtaagtaatgaggttgctggagttgtatgggttggaggtaaatttgggagtcataagcatgtggatggcactataaggtatgaatatcgaagtggatgagatcactcaggaagagtgtaactagagaagtccaaggactgaatgctggcatgctctaacgttttagaggcccacgaggtgagaatgtagcatgaaatctaaaaaggaatgggctcagaggtaggaggaaaatcaggatagtgtggtttctaggaagccaagagaaagttgcaagaatgactgttgaatgctgctcagaggtgaagaaaaaggagtgagcattcgacacaacatgctacatgcgttgggcatactaacacacagttaacaaaagccatttcagggggatggaaggcgcacaaccctatttgaagtgggttgaggagagaatggcacagaaggaaagacaagaactagagtgagctatttcgagaaatgttgctgtggtgaaggacagaagagtaggaggatgtggggtcaagggaggtatttttttaaaatgggagatactagaatgtcttatttatttatttattttgagatggagtttcgctcttgttgcccaggctggagtgcaatggcgtgatctcggctcactgcaatctctgcctcccgggttcaagtgattctcctacctcagcctcccgtagctgggattacaggtgcacgccaccacgcccagctaattttgtatttttagtatagccagtgtttctccgtgttgatcaggctggtctcgaactcgtgacctcatgtgatctgcccacctcggcctcccaaag

SEQ ID NO: 50895 - DNA, 1049 bp, Homo sapiens
caatgagagagaagtaaatgctcgaaggtaaattgatgtaccatgagaaggtagaatggatatgggacagtaaaatcaacagtaatggccatgcccagtggctcatgcctgtaatcccagcactttgggaggccaagtcaggtggatcacctgagatcaggagtttgagaccagcctggccaacgtggtgaaaccctgtctctatcaaaaatacaaaaattagccaggcatggtggtgggtgcctgtaatcccagctactcaggaggctgaggcaggagaattgcttcagcccgggaggcggatgttgcagtgaaccaagattgcacccttgtactccggcttgggcgacagagccagactctgtctcgaaaaaaaaaaaatagtaactatgctctacactacgcagtccacttactatcccagttccttattctcctttgctgcaaaatgtcttgaaagagttatttatgcctgctgtctgcagttcctcttcccacattctgtttaattcatttcagtcaaggtttcactctcagtattttactgaaactgctcttgtcaaggtcaccagtgacctgcacattgttagattcactccaggttttcctcttacctccatatttgactccattgattactccttccctgataataatttctttatgttaattttaggatactacacttcctttttgttttaccccactgatcactacctccattctcttgctgatcttcttccgtgcctttttttttttctttttcttctttttgagaagggggtctcactgtcaccctggcaggagtgcagtggtgtgatctctgctcattgcaacctccgcctcctgggctcaagtgattctcatgactcagccccctgagtggctgggattataggtgtgtgccaccacggccgactaatttttgtatttttagtacagatgcagtttcaccatgttggccaggctggttttgaattcctgatctcaaatgatgtgctcatctgggcctcccaatgtgctggggttacaggcgtgagccaccacac

SEQ ID NO: 50896 - DNA, 1026 bp, Homo sapiens
gagagtcatttgaaaagttggaaagtgaacaaactggagaagtatttggtatttttgagtcccatttgagatttgtatcataaatttatagagaaaccagttaagcatgcttatgtatttttctctagcagtacttacagcttgaatgcaggtgttgatcccacaaagcaagtatacaataagggagaagtaaatgctcgaaggtaaattgatgtaccatgagaaggtagaatggatatgggacagtaaaatcaacaataactatgcactacactatgctgtccacatactaccccagttccttattctcctttgtggccaaatgtcttaaaagagtcacttatgcctgctatctgtaattcctcttcccacattctgtttaattcatttcagttaagttttcactctcatcattccactgaaactgctcttgtcaaggtcaccggtgacctgcacattgttagattcaatccaaattttcctcttccatattcgattccattagtcactttttccctgatagaatatctttatttgaattttatgatactacactttcttttcttttcttttgagatggagtcttaactatttcccaggctggagtgcagtggcatgatctcggctcactgcaacctccgcctaccgggttcaagtgattctcctgcctgagcctcccaagtagctgggactacaggcgcccgccactacccctagctaatgttttgtaattttggtagagaagcggttttgtcacgttggccaggctggtctcgacctcccaacctcaggtgatccagtaacctcggcctcccagcgtgctgggattataggcgagagacaccgtgcccagcccactttctttttcctttaccccactgatcactcctagtctcttactgatcctcttgcctaacctccatttttttttttttctttgagacagagtctcactctgtcacccaggcaggagtgcagtggtgtgatctctgctcacagcaacctttgcctcccgggctcaagtga

SEQ ID NO: 50897 - DNA, 1469 bp, Homo sapiens
gaccttgagtgatctgcctgtctcggcctcccagtgttgggattacaagcgtgagccactgcgcctgcttgctttttaaagcagttacttttattttcagctaaagcaacaaaaaagtatatatttaaatgatagtttggggggaagtactttacagtaaaacaaatactatgtaacaggatcccatgtttttcattttacagagttgttgaagcagaaggcggctgattgtcaataagtcactacagttgcataagcagtgctgtcagaattggtttggtgcaggcaatagattttgccttcaggggttcctgtggatctgaggaaggcatcagtgttgattaacactcataactagggagtgactggtagttacttaaagcaagtaattgaccaaatggaaaaggggaagtaattaaggaaattggtaagtggaggtagtcaggaagttcttgtggttcttcacatagattttacagctttggctttcattttgtttagctaaagtcatggggacaactcttcaatttagaacttaagttgaattataaaaatgatggatataagtggtagctgtatctagtgaagtgtctgtcagtaagtgaaacattttttggtggtggcttatccacaaacagtttagttgtagaataaaacttatgagtgacatctggaaagtaaccatgctaagatggcaagcacactggaaacaattaggccacttggctttcttttgctgtattgttttataagcctactttacctcccagtcttggaaacaagttttagttttttattggtttggagactagagccaatagtataatgttctcaaaggaaacagacttgagttgttggattagaggaactaacccaacttatatgattttttttttgtttttgtcgtgtagttatggcactgtcttatttggaacatttgcaactagggataatacaacatttttaactctcatttgacaacctactactaatcacagaccacaagggtaatgaccaaatttatgtggtttttgcactccatagttgtcttagcccaatctttctatactcttacgattacttgggttaacgcttctgtgaggaccttctggctcttgagataccctaaatatttaagatatttagatatcttgaagatagtataggatatagagattgtaccaaataggaatataaggagtatgttaaaatgaccagatacctgtttgatagtttactgacctagcagatgtgtggaaaaggaatcagatcttgattcttctgggtttatactggttgtaaaacagaatgatacagaaaatgttttccttgtttaactggtagttgaacatagaacttgggtattatagatcacttttcactttttggaatgttttgtattgaaacttaataaaactttaacatggcatctttttttgtggcaaggggctcttctttacttagaaatt

SEQ ID NO: 50898 - DNA, 1332 bp, Homo sapiens
accaatggcgatctggggcttgggagggggtatttttttcaaagtccatttttgatgaagacctttaaacatgcttcgtatgtttttaacatttttttcaaattagtcttttagtcaatataggaaatggcttaagtttggggtccccctttttacccctgtaagccattgcaaacttgacatttagttggatgcctgacttgtttttagttctatgaaactacactgtatggagaaaatctattgcaagtggtctttaaaaagcaaaacctgaggcagcatgacccaggtccagccatgaagttgaaaaagatgctcttgaatatagtaaacttgaagacctccaactaaaaatccttatactgcacttattccttcaaataagttttgttcgttcaacttatggatttaacgtggcagtgcaccattggaacagaatgacaatccataagccatgcaacttaacaatttaagccattccagtccatcccgagccagtgaatcttccaccacttaagacaaatagtagaacatgaaatatattaagctgcaagtctgaacttgccttttctttctggaaaagagggcagtaataggcaagttttaaaagaatttccttaagagagataactagttttcatttatttaacttttgcaggttggtgattttgctcattatggtcgtggagtgctgattgattcacagtagataaagctggcagtaagaaatgctaaggtaagtgttgaaagcaatggcctttgaaggtttaaatgttgtgtaactaccatttagtttagctgtgacattggcaagttattgtggtcctcacttcatctgtaaaagaaaacgctgcttggaattgatgaagttaagtgctttaatgtgtagtgcctgacacattcattgtgaatttagagtgaggttacatttccgtgagtctggctcattcatgagattattcttagctatttttgaacccataaagcttgcttatagctcttcatatgcaagcattctcaacaaggaagtacacacgtaagaagtttgctcagctgggcaccatggctcgtgcctttaatcccaggactttgggaggccaaggcgggcagaccatgaggtcaggagttcgagaccagtctggcaaacatggtgaaacctcatctgtactagaaaaaaaaaaaaaaaaaaaaacaccgggcgtggtggtgtgcgcctgtaatcccagctactggggaggctgaggcagaattgcttgaacccaggaggcagaggttgcagtgagccgagatcacgccattgcactccagcctgggcaacagcaagaccctgtc

SEQ ID NO: 50899 - DNA, 1470 bp, Homo sapiens
tttttctctggctatgtttaaaaaaatgatatttttccttaagctcctgtatcacgtggaagagatagttatggaggtccacctcgaagggaaccgctgccctctcgtagagatgtttatttgtccccaagagatgatgggtattctactaaagacaggtaatagaaaagtgcagctttttaaattaataattaaggttgaaggaaagcttatcaaaagcataaaccaaaacttttgctttgtagctattcaagcagagattacccaagttctcgtgatactagagattatgcaccaccaccacgagattatacttaccgtgattatggtcattccagttcacgtgatgactatccatcaagaggatataggtaagtgactttgcttctgtggcttacatgtaagaaaagttgcaatgaaagttgattctctgggacttaaaggtttctctttaatttagcgatagagatggatatggtcgtgatcgtgactattcagatcatccaagtggaggttcctacagagattcatatgagagttatggtaagatactggttaagggtctttagtatcaccagcttgagtttttaggttcgtgagccagtttattaggctgtgtggtgcttgcttttaaagggatgtttgcttgcttttaaaggggtaactttatcagctgggcttttcctagttttgtgaggggctttttttgtttttctaagtttcttttgaggctgtttgcttgctttggaggggattttgcttgcttaaattggcagccttatgtgttttcccccaacagtgaaaatacaatttaaaaattttattaacaagatcaaatatttaccattgcaatatgaaggcaagttctacagttcaaaattgcaacttatcactggaaagtggctgagtgtctactataaaataacaagctctctggaatatcctcttgaaatacacaccgtcttcagtcttttcaaacaaacattaaaatgaatccaattccatatctcagcagatgagcaaatccctgttatggccagcaatggcagagtttaaaacctcccacccagttgagaaagtaaacttttaatacaagaattctgtaaattcagatttaaaatgttgtatatatacaatttatagtgttgccatattacctgaccattgaccctgcaggtaactcacgtagtgctccacctacacgagggcccccgccatcttatggtggaagcagtcgctatgatgattacagcagctcacgtgacggatatggtggaagtcgagacagttactcaagcagccgaagtgatctctactcaagtggtcgtgatcgggttggcagacaagaaagagggcttcccccttctatggaaagggggtaccctcctccacgtgattcctacagcagttcaagccgcggagcaccaagaggtggtggccgtggaggaagccgatctgatagagggggag

SEQ ID NO: 50900 - DNA, 1077 bp, Homo sapiens
ctttcaaaggcaagaggactggaactaaaagttgctttttcaaatgttaagcagctgttgcttaagaacagctaagggtgatcaagggtagtggtaaaagttaagttggcccttttaaccagttttatgtaaattgcagtgttactaaactacttagttcaaattgcttcctactgtggctgaggcttagctcgttatcgttttctttagttattaaggaacaatggttttagtggaaaatatgagaaatgtgcgaaagtaaaagtgtccaataaacttgaggaactttttgcagtgaggtaatactattccttttcaacagactcaccggcccaaaaaaaaaaaaacatggttgaagcagatcgcccaggaaagctcttcattggtgggcttaatacggaaacaaatgagaaagctcttgaagcagtatttggcaaatatggacgaatagtggaaggtgagttgtctggcagtacaggctgggctattataattaaaatataagctatgatgaatttgattgcattgatcgtctgacatgataatgtatttttgtcctctaagaagttctgagctttctgtttacacatttactttggttatttcatttgacctagggtaacactttatttttctgaaaactactttttagtactcttgatgaaagaccgtgaaaccaacaaatcaagaggatttgcttttgtcacctttgaaagcccagcagacgctaaggatgcagccagagacatgaatggaaaggtgagattgtctacacgatggatgataacctgttactagtgcataaaataacatgtagttgtccaagtctggtctaggacagcttttgagttttcgttgtttttcagtatatacctgtctgggatccactcatcctgtttgtgatcctgttccaaagagtattctgtaattgcagaaccaaatctagtagtgagttatatcttatgctcgtaacattctctcagttcagaataattatggcattacatggtacttttttttttttttttttgatagtctccctccgttgcctagcctggagtgcaatggtgcagtgcc

SEQ ID NO: 50901 - DNA, 1041 bp, Homo sapiens
ctttgttttccgtttctgcaaaattggtatagtaggagtatctaccctcatcacattttgacaattagaagagttaatggaaaagtaaaagtaaagttttgcaccgtgcccggcccactaggacgctcaataaacttcagttctttattaaaggaagcctgtgcaccattttagcgtaaagcaaaaaaagcgcgtttgtaaagaacgggtgggggtagagaaaacggttagaaaggtctgtcgacccaacaccgagggcccgggaaaaagggaggagagaagggtgaatgacagaggagccagccaatggggagactgggaactacttcccccctccctttgcgtttcaaattctaagctccgtttccatccgggtccttcagcctcgttcccgggcagtataaagtttgctgtctcctttgttcgccctcgttgcgcagtagtgctagcggcttcgcggttcggtcctcgcacccggcagccgccactggtgctgagctgctaggaagcccctatcgccgagctcgttggagcttgaacccattgtcacccctccggtacgtgtctcctttcctcagtccgtttttcgtgacactctccccgtgttaggactggggattatatctccctggagatgggggtggcgggcgccattttaagaacccaaaggttccgacctatttaaataaagctgagggggtcgagggaaaacaaatgagggggcccgtttggttgtatgcttctcgagaaagtttggctgccatctgcgggagttggtagcggaggtcggggctttgtaggctggagcggggcgaggagcgaccgcaccacggcgatacctgcattggtatggcgctggcgctaatgatgggcatgtggacttccatgcgggctgcgggcttcgtattcattggcggccccggagaagaagccctctgaatgttcccagccaatgttggtggtaaaagttagtcccctgaccagtgtcggtggttctgggttgaatccaagtgtcgccattttgtcttttacacgcggttt

SEQ ID NO: 50902 - DNA, 1050 bp, Homo sapiens
agaagacatgcaaatggtcaataagcacatgaaaagatgctcaatatcattagtcatcagggaaatgcaaattaaaactataaaataggcggtgcaccctgggatagggagcgatctccaagcgaggcggcaagatggactcaggattcttccaccgatcaagtgcagaacagtataatcggttcagcaacaaacagaagaaactactgaagcagctgaaatttgcagaatgcctagaaaaaaaggtggacacgagcaaagtaaatttggaagttataaagccttggataacaaaaagagtaacaaaaatccttgggtttgaagatgatgttgtgattgagtttatattcaaccagctgtaagtgaagaatccagactccaaaatgatgcaaatcaacctgaatggattttcgaatggaaaaaatgctcgagaatttacgggagaactatggcccctgctgctaagtgcacaagaaaacatctcgggaatctcttctgctttcctagaactgaagaaagaagaaataaaacaaagacagattgaataagaaaaattggcgtctatgaaaaagcaagatgaagacaaagataaaaggcataagttagaaaaagaaagcagcagagaaaaaagggagaggtctcgtagcccaagaagacacaaatcttcttcccctaaaagacaatcttcccctgttagaagagagaaagcacagtcattctcgatctccccaacaaagaaccaagggccagagtccttttcctgctccagaaaagaaggaaaaaactccagagctcccagaaccttcagtgaaagtaaaagaaccttcagtacaacaggccacttctactagtgacattctgaaagtttccaaacctgaacctgtaccagagcctaaagaaccttctccggaaaaaaattccaaaaaagaaaagcagaagaagacccgaccacgatctcagtcacactccaaatcaaaatctcagatgcggtccccactgtccttctcacactccacctagacagcgccatagatcccaatcaagatcgta

SEQ ID NO: 50903 - DNA, 1035 bp, Homo sapiens
gctccaaatactaatctcaggatggatgtaacataataataacactttaatattaattaaaattattttattgcataatattattttaccatcattattcagtatcattactgattggctaaaatctgcttagagtagcagcttcgaaaaggcatttcacctctcaagtaactgtcacccacattcatcaaccctggtagcccctccttagcacatcttaaccctctctcactttttactttgtctacctgttatcaatagtctcaccaaattatatacacaatctaaacttctcttgtttttctttaaccaattagcaagattctgaataaatgtatttttgacctttttatatttactccttctaccatcgtcaagatagcttcctacattatatatttctatcccttcatccatccaaacatttattcactcaacaataatccacagattgtctgatacttgccaaaaacttcctctgccttatctgagcttatcgttaaatgggagaaacagatattgaacagacattgaattaaaagccagtggatactcagggtttccttctttctatgatacggccactcccaaatgaagactaccaggcacagattactgttgcagagcaacagtttgacaatattttagataagggtattaacaaaacaacaagaaaaacctaggaactactatgtagacaagaagaaggtacactagaatgaaatgcatttttaggtggtcactatcaaaatttaagctcttggaattcatttcctggcaatgggaggagcagcctcactcctcaaaagctatggaagagcagaggagtggaaaagcacttgcagagaaatctcctggggatttcttagccagatatttagaaatagggtttaaattcttcaagttggaggattctaacctatgctctaaggatgactgatgaagtacagaaagaaaagcaaagtttaccaaaaaaaatgaggtcacagaatttcattacctgccatcaccccgctatttatgtatgtatgtatg

SEQ ID NO: 50904 - DNA, 1031 bp, Homo sapiens
aatcacttaaataatttcactgaaacaaaggaatgattggtcttttaaagactcgtacatgtattgaatataacatttccgacctgactaataatttgaagtaactttgagcttttcgagggccctagccaaaacaaaatgttagatggcctttaacatttatgtcttcaagggactgtgctagccaaagtttcctcccaatctggaggcagctttgtgccatagcaattttcaggcttcattgcatcaatcaaacaaattgttcttgtagtgcttacttactggggaattcaccagctggaagattgtaccattgagccaaaacaggccactggaacagccatactctttacttcatttatggagccatttaagaagatgctgtagtggcagctgcctgtttgtcagaacagccttggaggtgtgctgaatgaaacctaatttagactagtagatgatcagatgacaaagaataccagagatacaggtgaatcacaaaagaagatgctgtgagactttctgtaaggaattccccaccatgactttagaaaaactaaagtttcagctgcagttatgttgagtgaagtgtaaagccttgaaaacatagactaaaatggtccccctcctctctctcttatcatataaacacaccccaaccctataatttttctgatacaaattgtatttggattttgcatagatggccagtttacttttaaataagaattatatgcctgtttatttgaatgtctgttcctaagattatccacaaccacaactccatttattatatgtttacataatgttgggtgagggagagtagtcaatgatgattcatttgggactagatacagaattaaaatataaaacaaatattatcattctcaaggttttaatagatggctgaacacaaggtatgagtttagaaattgtcatcctggattatggtgtggattttatgtgcaccttttcatgatgggcatcagctgctttgtatattttgttcccaaatcttgttagtcaactttcaa

SEQ ID NO: 50905 - DNA, 1034 bp, Homo sapiens
catcttagattttacttccaaacacaagtaaatcagcttaattttcaaggccaaaaaacatttcctacatcacagattatttcacgtttattattctttgcaattaatgtaagtttcactaaaatatgaagaaaacctagcttggcattatttgtatgtgaaattgcataagtctggttgcttgtacctattttctctttatggactctaagaaaataacaaaaatgggtaaagtattcagggtgatggtctagtgttttaggtgtaagaatgactgagaatggtactttctgggaaatcagggagactattggttgtagctaaatagaatgtgactggctctgtattctgtttttgaggccaagttgacaaaaaaaatccaaattagaggtcatggagcacatatttaacagagtgtttcatgattttaactctgaagctaaattcatatttgtgggaaaaagccagactcttgaagctaaacaataaaataattggcaagaaagactaagaggaattttagcaagtaaagccagatgtaaggggatttacacacacacacacacatacacacatgcacacacacatataagaaagacaaatggaaaaatgtaatgttatattcattgctctgttgctataacggcactagttattttggaattcctaaaataattctaagttttaaatacataacctacactgaacatttggaaattgctctagcaacatatttggtaatgctaagtacctttatgaaagagagcaaatatgactttttagctttattttatgtgattacccagtgattctcatgtcttggtgaagacgttgtttttagtctctatctcctcgtttgtataatgttaatccacaacatgatagaaaaaaaaaaaaaaacagctcaacaaaacatttttccccatcaaccttgtgcattgaaatagtttgcctacaaaatcctatgctcattaattagtaactgatttgttttctctctacttcccccttagtcatagagcagcctagcaaaa

SEQ ID NO: 50906 - DNA, 1061 bp, Homo sapiens
tgtttctttttttctgaaaacttatttattttaccttgatctttgaagaatatttttgctggatatgtaattcaagtttggcagattttatttttctttcagcactttaaagatgagatattccattgtcttctttccctcattgttttggtcagcagttatatatctctcttattgtagtcccactgtaggtagtgtttctgttttctctgccagcttccaagattttctcattatctttggtttttagcagtttgactatgatatgcttagatgttttttgtttgtttgtttgtttgtttgtttgttttattaggcttatttgatattctctgagattcttagatacataacatgttgtctttcattgattttgaacaattcttggccattatcccctcatatacttctgcttgattctctcttctcctgagactccaaattactcatgtgccagatggtttcctattgtcccacagatatcacacactgttccaattttttttgactgttttctttctttctgttgcatttggatactttgttttcaaatgtatccaagtcacaaattcctttctctactatattcagtcaactgattagctcttaaaaagaattcatctctgacattctacattttatttctagcttttcaattttttctctatttgtactttccatcgccatatgtaaataatacatttattcaagcatgtcatttgcttttctcactagaccttttaaaatatgtatcatagttattttatggtccctgtttgataatcccataatctgggccatctctgagactcagatctatcacttgagtatgtttcatatattcttcctttttttgtaagtcttttcttgttgtttatctaatttctacttgaaggcaagtcactatgtgtaaaagaacagaaactgaagtaaattatgtcaatgtccaaaaatgagaataccttttcttctattaggccattagtattttgtttgggatcaatctactcttatattgatctagatctgagctttagtgacattcagttcaccacagactt

SEQ ID NO: 50907 - DNA, 1048 bp, Homo sapiens
atgctaaaactctaaaaaaactgggtatttatggaacatatctcaaaataataagggctatttatgacaaacccctagccaatatcatactaaatggacaaaggctggaagcattcctttgaaaactggaacaacaaaaggatgccctctcccaccactcctattcaacatagtattggaagttctgttcagggcaatcaggcaagaaaaagaaataaagtgtactcaaattggaacacaggaagtcaaattgtctctatttgcagacgacgtgattgtatctttagaaaacctcatcatctcagcccaagaactccttaagctgataaacaacttcagcaaagtctcaggttacaaaatcaatgtgcaaaaatcacaagcattcctatacaccaataatagacaagtagagagccaaatcatgaatgaactcccattcacaattgttacaaagagaataaaatacctaggaataaaacttacaaggtacatgaaggacctcttcaaagagaataacaaaccactgctcaaggaaataagagaggacagaaacaaatggaaaaaaaaatccatgctcatggataggaagagtcaatatcgtgaaaatggccacactggccaaagtaatttatagattcagtgctattccattaagctaccattgactttcttcacagaagtagaaaaaaaaaactacctttagtttcatatggaaccaaaaaagaacccgtatagtcaagacaatcctaagcagaaagaacaaagctggagccatgatgctacatgacttcaaactatactacaaggctacagtaaccaaatcagcatggtactgataccaaaatagatatatagtccaatggaacagaacagaggcttgagaaataacagcacacatctacaatcatctggtcttcagtaaactttacccaaaaaaaagcaatagggaaaggattccctatttaataaatggcgttgggaaaactggctagccgtatccagaaaacagaaagtggattcctttcttacaccttatacaaaaattggc

SEQ ID NO: 50908 - DNA, 1035 bp, Homo sapiens
tatttctcctatctaatccaaactctgtactctttaaccaaccccatcacccctccccagcccctggcaaccagcattctactctctgcttctatgagtttgacatttttagatttcatatataagtgatatcaagcagtattcatctttctgtgtctagcttatttaacttaacatgatgccctccaggttcacccatgttgctgcaaatgacaggaattcattttattttaacactgattattgtttcattgtgtatatagaccacattttatgtatccattcacccactgatggacacttaggttgattccatatcttgagtattgtaaataacgctgcaatgaacatgagagtgcaagtatctctttggcatactggttttatttttttaacgtgtatccagaaatggaattactggatcatatgatagttctatttttaattttttgagcaacctccatactgttttccatgatagctgtactaatttacattcccactgaatgagaacacaatgatattccctacatcctccccaacacttgttatcttgtgataatagtcattctaagaggtatcaagtagtatctcattatgattttaatttgcatttccctgataattaggatgtcgagcattttttcttatacctgttggccatttgtatgccttcttttgggaaatgtctacttaagtgctttgctcattttttcttttggttatttgttttcttgctattgagttgtttgagttccttatatattttgtatactaatcccttaaatgtatggtttgaaatttttttttccattccataggttatctcttcactctgttcattgtttcttttgctgtgcagaagctatttagtttgatgcaatcccaacaccctttaaattatagatgatttatagtatgttttactgtctagtagggctagtacctgctcatagtttatcattttttgtgtgtttcactggctattgttaatttttccatgtgaggttcagtgacaacttgtctaattctaaa

SEQ ID NO: 50909 - DNA, 1032 bp, Homo sapiens
attttatcagcacttgcccttgtcttgcctcacagccaatatccacactcactccagcacatgaaaatcacttgtccacttccacccatgtgctagcaaatttttacttatgagccctagctattttaagatatatattctcagaagcatgtccagctttggaagcagcaagtgtacaatggccccaagactatatctacaaaagggaaagggaagagagcgtacttccactgggccacatcttcagtgacaacactgtgcatagccccttagaagcatgatcacgaaaaccctgtcagatagggttgctactaccatttcacagatcagcaaactaagatgcagaaagagtaagtcacttcaccagtaaatgagaggacttgatttgaacctaatttttctggcttctaaaagccatgccttctcccctccatggcttctccatatgctcagtttcccccctcttgctccataagtgcatttgttatctaaaacaaactgtagtgctaaaaagtgatcttaagtgtaaaggaataaaattctgtctacagtccttcctcagctttgtgacagcaagagtttgtcataagcagaagggactcgactcaggaggtacttgctcattctgtaggcctaagattaggtagagtgcagcactcaaaaggaagagatgaaatgacccttacctttaaggaactgatgacttggtcccggcatacaaagaaataatggagtgattaatgaatacttaaattcgatttgaatgcaatagatctgttcctagataaaagatattaaaagctcacttgtctactctgctttctttaggctagggaatgtgcctttccacctatgtgttagtcagttctcacactgctataaagaaatacttgagactgggtaatttataaagaaaataggtttaagtggctcacagttctgcaggctgtacaagaagcatgatgctggcatctgcttagcttctggggaggcctcaggagacatttaatcatggcagaaggcaatgctgga

SEQ ID NO: 50910 - DNA, 1070 bp, Homo sapiens
gcatgagggactttgtgggagtgattgattgcaatggaggttccacagatctacacatgtgttaaaactcatagaactatacaccaagaaaagtcaagtttactgtatgtcaattttaaaagtccaaatataaaagaaataaagcacacatcatctcgtgtgctctatttttcacctctcaggctgtacaaaatgtgagcattcaaagcctttaatgatttggcagagttggaagaagggtaataagtggggagattacttgaacttggcacctgattcttttcaagtcatgagaagctaatttatcctcccttgtaccatctctgttgttaagctactgagtgcccttatttgagaaatgccctgtgggcaaaataggatggtgcatgatcacagtccgctctccaggaaactagtgtgaagctgtgtgaaagagcattttttttttcattttttccccaaactgtggcccgcaatcctcaaacgctcagcgtcccagctttctcacagtatttgacatgactgtagttcttgtttgtacttgcagcacagagcaagcagaccttgacttccagaggccctgacccattgaaggggccgcccaacaaagtttcctgcaaagagtaaagactctgaaacttcgattctgatgctataggacaggaggaccactcatctttaccaaatcagggaggtgtccatctcccctttcactcttttcctcctcctgaaatctttggggtgccctcctgagggcagggggagaagagggagaaaattttatcacaaattctattctcactagattatgtttagtaatatgcatagtattttttttttttccaaactcctctccttactggatgtgggacctttggccagacatttaaaacttttagattcttttcacatcctggatatatggctaatgactactgccttgcttaactcccagaaggactgagtcaaatgtcaaaatgctgggtacatttgtatgaggatgaggatcaattgaataggatttatgatggactggcttgggcccctacgatttattcccattagagcat

SEQ ID NO: 50911 - DNA, 1028 bp, Homo sapiens
aaaaaagagcctgcattgccaagacaatcctaagccaaaagaacaaagctggaggcatcacgctacctggcttctgatgtctgaacttttaactcccatctgctttcttcatcttgatttgcacatatgtctgatttggagatgaaaagtaaatatattcctgtgtctcttcattcttcatccatcttttcacaaaatgcacccagcagctgtgccaagcttctctgaataccatgaaatcatttatatgttttgatactgtgtcatggatatattaattgtttcttctcactacaacatggtctaattagcttggacaatacttccagtctcctgtttgaagagactgtgtgtggcttttgatgatttctctaattctgatttgataggttagatgtgggctgatctttctctcgctcttttttccttttcctttcttctcttctttccccgtaggcatatactaatgtcctaacgtgtactgaatcttgattacagtgtaattgatttagagcatatggggacttttgaaatcccttttaggagggatcattgactcttgataatctgacgaaagctatgaacacttcttccagaaatgtgtacttttacatatataatttatcatccagttacaggagtctcaagggtttagccaagtcttggatgcatgtccatagtatgtgaagaccacagaatttcagtgcttggacaaccctacagatcatcgaattcactggtttttgaaaactattttaaccagagaatccctggttgaaaagggtgggtaaaaagaagggagagactgagtcatgcacacccctacgtcgctcagagtggttcctgaggaggttctgaggaacacagtttgaaagctcatgatctaggtctaattcctgtatttctttatatgagaaaattgatccaaaaagagcagagttgactaactcaaggccatgcatccagtcagtgcacagctgagactggaacccatgcccttgatccctaggacagagtctcagccaacc

SEQ ID NO: 50912 - DNA, 1090 bp, Homo sapiens
taatcacttttgtggtgtttgcccaatagcaatgttctatctatatcattcattctacatttattaatttgaattctactgtaaaaagatctgcccttcttctccatttatttatttattcaattatttatttttattagtatatactccaaggtatttattttattatatggattgggctctattattatcatcatttaattatccctatatctcatgctatataaaataatgaactccaaaaggaacagctaaataagtgtaaaaatgaaaccacagaaatgctagaagaaaatatgggtgatttcctcttaaggtttgttgtttaaggctttccaactacaacttttcaatttacatgaaattccatatgcaaaaataactaaatacataaaatattgataaattagactacatgaaactaaaacaattgcactataaaacacgataaacaaaattgaaagacaactgataaacaggaagaaaatgtttgcaccatatcacaaaagactaatatcccccaaatataaagaactcctaaatcgacagctaaatgactaaaaacctgatagaaaagggaaaaaaagacatgaacaggaaattcacccacacacttacacacaaacacacacacacacatgtatatatatgtgtatatgtaaagatgtcccataaatataggaaaaatgcctaagctcacttataattagagaaatgcacattaaaacaatagcaagatgctgttttcttcctatgaaactggtgaaaatttaaaaatatgacaacatattcttttggcaaggctgtggggaattactcctccttattgctgatgggaatgcaaaccagtgcaaaaggggactttttcaactatctagcacagatgttatacagatgaaacagaaatgtatttattttctggtgatatttgggagaaggctgcgttacgatgatgtttctggaggtcactggtaatgtaagttatattacataagattatacaactgacatttatagctacttgaaatactttcccaaactttcccttattgattgtctttaaggaaatatagtcatgttcagggagtgt

SEQ ID NO: 50913 - DNA, 1093 bp, Homo sapiens
ccagtattgtcaaataccatgatgaaatattctgacaggtctgcagttttacacatgtgattgaatgttcagactactttctctccatgacaggctaccaaataccatacataatttgagtatttttgacagaagaatgcacatcattttctttctagggaataacatgcttttgaggtttattacccgaatttgaacacattcttatagtggattttccatattgttcttccaccaacaatcattaagggttgtgatgttgtgttcaaatgccatcttatacattaaattaaattcaagttggtgtggttaatgttattggaaaatacctattaggcttgcttgaaaaatgttaggaactgtgattgcatttagaacacagaatcagacttatggaagcaactgagttctattaaagtacctgagtttatgtagaagagcaaagctaaaatgtgactaagtgcaatgcttaaaacacactaataccagttaaatggataagtacctgtagtaattaataaaaaaggaaattcatctagaatataattttaggtgtcaataggaggagtccatcctgcagaagagattcagatagaaattctacttctaacctagataaccatgtattagtatcagtgcttttgtatgcacgttataatctcagctaatcctctcaagagtgctatctcattcatttaaatgggttataatagaaaatggatctgctcattctattctacataataggaaattaaaaaaacaacatcctttgttgtttaagcatacatattatattgctctactgaaggttgtctaagcttctattttcttagacaatctttttttttcttcaatttctattttaagttcaggggtacatgtgtagaatgtgcaggtttattacatagatcaatgtgtgccatggtggtttactgtacagatcatcccatcacccagatagtaagcccagcatccattaggtattcttcctgatgctccccacccccacccccacctccgacaggccccagtatgtgttgttcccccgatgtgtccatgtgttcttatcattcaactcccacttacaagtgag

SEQ ID NO: 50914 - DNA, 1046 bp, Homo sapiens
gaatttaactgggtggcttggtgcaaaatatatattattaaacaattgcttttaattatactgacactaaccagttagaaacaggacaaaatcccattcacaaacaaggtagtaatttaaaaaattacccaggaatagaattaattaggacaatacaattatgacaatacaatctatgtgagattaatcacaacattgtattcaatagaaaaaaaaaaaaaaacaagagctgtagaaggtgagagacataccatgccccctgcatggcaagaattatgttatcttaagcacttaataatattttttaaaacttaagatcatgattctaaagtttctatggaagaacacaggtgctgcaattgttaagggaatcttaggaaaaaagaaaagtgaaggaaaagtgccccgttaggtatgaaatttaatgtaaatgagagtaatattggtccaaatgtggacaagcaaatcagtggaacagaatggagaatacagatccaggtatttgtgggaatctgctgcatgataaaagtattattgaaatcagtagcaaaactgtgactttttcaatatatggtgttagaagaaaataaaaatagaactgcttcttcacaacatgtacaaaggtaaattctagatatattaaaagtaatgtaaaaaagaactactgaagtattagaaaacggtataaaaatatgtatatgtctgtggggtgatgttccttaaacaagacatagatccatgttctttaaagaaaaaaaatctctacagatttaattatataaaattaatctattggaagaaaatatttgcatacatctgatagaagaaagtcttgatgttactaatataaaaatactcctacaaattcataagagaaaagaactacctaatagataaatgaacaaaggatttggataggcaatttaaaggagaaattacaaatttgttgaaacattcatttggaatattattaggttggtgcaaaaataatcgtgcttttgccatttgacagagggagtaaattaacatatatgataaacccactg

SEQ ID NO: 50915 - DNA, 1100 bp, Homo sapiens
actaactttttgaaatatcttcatattagtgtaatgagtgtgtgtgtgtgtgtgtggtgtgaaaacaaaattttcacattaaagcatgtcacattctatttttattatttttaacttatgatttttataaataaccattattaccagtgctaggttccaggatactaaaacaaggcaaagttggaaagaatgtttccatacaaaaaccaatatataacataaagatatgaacagatgaatgaactataaagcaacttctgctaaactggtaattgttagaactaaagcttcagagacttgtaatttataccaactcctggatatgggatattccattgttggattgatggcctaaaataagagaaacatcatttttttcagaagaagttttagaacatggctgaaatccgtcataatgcttaaccttgaactctcagatatcagtgctaattcatattttgtagggcaaatataggacaagagaaactgcacaggcagactgctagtgggtggaaaaatgccctttgactgggaatcaggagacttggctttttgttctagatcagtcactgctttatagggtgacctgagcaagtcactttaatgttgtggatcttactttcctcatttgaaaactacttgtttagtcaaaactattaattataaactatgttctgtagtaataggcttccacagaggtgccacagagatcactgcaggagggactctgcgaccttaatccccaactatgacccaagtagttcttttgtccactggtctatatataggggctattcttggggtttcatttgaataaaaggttctaaggtctgagtaaaatggggcactcccaggctaaatgatcctgacttaggatacacaacctgatcaaggttcttcaggttttaaggttctgtgatatctggataaccaaagtaggtgtttgtgacattctgtaacttatctgtctgtgatatgttagccagttctagggctggaatgatgatggtaatagacatgcccagtgatgaatgacctaccatgctacctaggacatcttacaccttgattattgaatttaaaagagcttctgaatcatc

SEQ ID NO: 50916 - DNA, 1056 bp, Homo sapiens
ttagatccttcctgctttctctcgtgggcatttagtgctacaaatttccttctaaacactgttttaaatgtgtcccagagattctagtatgttgtgtctttgttctcattggtttcaaagaacatctttatttctgtcttcatttcattatttacccagtagtcattcaggagctggttgttcagtttccatgtagttgtgtggttttgggtgagtttcttaatcctgagttttaatttgattgcactgttgtctgagagactgtttgttatgacttccattcttttgcacttcctgaggagtgttttacttccaattatgtgggcaattttagaataagtgcgatgtggtgctgagaagaatgtatattctgttgagttagggtgcagagttctgtagatgtctgttaggtctgcttggttcagagctgaattcaagtcctggatatccttgttaattttctgtctcgttgatctgtctaatattgagtcgggtgttaaagtcccccattattaatgtgtgggagtctcagtctctttgtaggtctctaagaacttgctttatgaatctgggtactcccgttttgggtgcatatgtatttaggatagttagctcttctggttgtattgatccctttaccattatgtaatgcccttctttgtgtcttttgatctttgttggtttaaagtctgttttatgagagatgattgcaacccccctttcttttttctttttcttttttttttttttgctttccgtttgcttggtaaatattcctccatccctttattttgagcctatgtgtgtctttgcacatgagatgggtctcctgagtatagcacatcaatgggtcttgactctttatccaattttccagtgtgtgtcttttaattggggcatttagcccatttacatttaaggttaatattgttatgtgtgaatttgatcctgtcattatgatgttagttggttattttgcccattagttgatgtagtttcttcatagtgtcaatgatctttacagtttggtatgtttttgtagtggctggaactgat

SEQ ID NO: 50917 - DNA, 1095 bp, Homo sapiens
tttgttttgagtttttttttttttttttcttgcaagtaatgctgagtgaatccaactgtagctgactttgttgaatctgcctgggaaaactcttgttcccttgcatcagaagccccaccataaaattggccttggttcaaaattgattatttgcacagattgggatatgttaacaaatagaattccttctcctttctttcctgctcaagttattacttaccaagtcatcaaccgttctctgataggcaagaaacaaactgaactccttaatcttgtttgttctaaagcttaggaagtgattttgaatcactatatagggtttcactgctaagatgtgcaatgggtaaacccccagaggctgggatacagattcaaatcagatcattcgctccaaatgtatcagaactcctaacaatgtcatagctgcccagcatgttttcgaaaacctgccattttgcaggaataacatacttcacgtcagactccaaatggccgcatggatgtgttgcaaagctgaaaattaatgacatgaaacttaacaaggtgttccagaaggtccttgctgcctccctcatgtcaatgctcctctgattccaaataggagagttcactggcaactgtactgttcaactgtggagaaaaatttgaaagccacatgatcataggctttctcagaaattaatctatacaaagatcaagtaaggtataattttcttggctgttgatggaaatatgtttttgtccagcaaataaacaatctagctgggttttggaatcagggcagtgtaaggggcacagacacagaaactgctgtgttaatgatagtgcttttgagacccagataaaacctaggtcttcagctttcccaggaataaagtggtagggccgagaaggtgtggagcattactgagtcaatccaaaacccatcacctgcttctcacaactgaaataactatatcaaacaaggatgactttgctcaatataaccatcaaaacacatggcgtatgtacagtttatcgaaagattttgggttcacaaagcaaattctggaaaatggcatgaaggcagagaatctgatcaaagagtaaatattt

SEQ ID NO: 50918 - DNA, 1045 bp, Homo sapiens
ttttagtggtcaaaagtgacctcatctctgctgattgatctctgaagctgctggaatgaggcaagaatgtgtgatgtgtgcaattcctttggctgcttcttgtccctacagcatcttactctgctccctgagcgagggcttttgggttttgaaaggatctggaactttttttcagaaacaagtctctgctttgtcaggtagttccaaccccatctgtaggatcttcctgaaggctgagcacaccaacatccagctgttggaaacaacagcttcctcaattaaagaagaggcagacaactatctgaaaggaagctgggaacaaaggttatcctcaggagattgctcaggaggccagccagagggcatgaatgtttggtgacagcatatatttgggggcaatttgtactttgctgtttcaagacagagctctgctggctaggagagcacattttttcttcccttactccactaattggcagcgccatttagggctgtcacagcaacagtcttacagatcttgtggtccagacccgtcactgtgtagataaaaagctaaagaccagaaaggaggagtgtctcatccagagtcacatagcagagtgggagtcaagcctgcatcaagactcaggacttttgatggaacgtcccaggctgggaaactttatttggccctcagtttagactaccctttttatcagttatcttttctatggaatatgttctttattttcagttagtccttaagtgccttgaagactgaaaacatattttgtaattgatttttggctctctaccatgatttgtacatataggggtttgttggtcaggtcagccctctcctcttctgactcttattaaacatgactcctattatctctgtatggccttgcccttgccactatgcagccctcaactgtatgcaactcctctcacctggatatggctcctaagtgtgctgaacctcagcttttccacagccagtagctccattagctctagttccttgaagtccattccaaactctgtttctaattcatgtaggttt

SEQ ID NO: 50919 - DNA, 1594 bp, Homo sapiens
tcatgataaataaccagttgcttttgtttcagggaaagccatcttaaaggagcaagtcacaatatgcttctactctcacaaccataattttaggcattaacttactctataagcattattaccaggggccaggtgcctcttataatagtggctagcatgttgccactcttcatcacacgttatcatacttgtcaatttacttgttcacacccctcctccctactttattgtgtactccttaaggacaggactgtgtcttaatcacttttatatccccagggtctcatacatattaaaagtatgaaacaatgaaaaaaaaatagcatagctttggcacaaaggataattacaagcttctgaagccttccggagatatccggaggctcgctttcctcatctgttcagtgggggtaatagtggccttacagagatgctgatcagacactcttgctttcttccccctagtttcttagaatcttcttggtctcctctctggccctcatggcactggttgcataggcaaatctagactcttacacacttggctatgaagagtttaaaacccctttgtaaagaatgtcaaaactacatttgaactttatgtagtattttcattggtacatttggaatcctaactagatcttagaagtcactgtctttgctcacatattctctgagcttaagcacaagaaaatgattcattaaaatatttaaatcagctactagaaacaataatgaggataaacatctcggaggcccaaatccattattctgtgctcccattccatctgtgaaggctggtactctatccagcactaaaaatttataaatgcagggtcagtaagaccatagtcagcaggaaattgcaaaactctgggctcctgcaagcaaagcccaacttttcttcagaaattcatgacattggaatggaacaaaactatgcagaaggtatagtgacaagagtaacactgaactttaaacgccaactctgtggctgcccagctggatggccttgggtaagtcacccaacttttctgtggctctgttgagtcatttgacaaatgagcataatcaatcttgactgcctctgtggagttgccaggaggcttaagggcgcctctgtgtgtggaatgtgctctgtcagctggaagatgcctgtcatgtacatgggagggactcattttaggatggctactcagagatttttgcattagaagcacaggtttgctttagcctcagtttgcaaatgtacaggattagcattcccatgcagtgtcactctatctctggaatgctgctattgccaacagaagtcaaccaaatgcctctccacaatctgtatcaagcataccatatgtttttacacaatggaagtgatcttaaagaattgaataatattttcttgagggaagtttactttttgcaggaaacctgtgatgaattatttggtaagagaaaaaagccctattgtaatctcttctaatctatcaattctaaaagtttaggttcttttatgtaattttttctagacatgccagccaggaatgcattctaaagtattgtagtgttaacataatgtattctaaaaagatga

SEQ ID NO: 50920 - DNA, 1068 bp, Homo sapiens
atataatggactttagagactcagaacggggagggtgggggggcagggataaataactatacattagttacagtgtacactactcaggtgacaggtgcactaatatctcagaattcaccactatagaattcatccacgtaaccaaaagccacgtgtacaccaaaagctatttaaataaaaaaatatattgaaaaaacaacactcatacttcagatagaaagcccaacatgtaagcatataattacaatacaatgagtgatgttagtgcagagggcaagggtagccctgaagagtagccctggggatctgggagaggtttttggaagagttaacacttgttaaatcttgaaaggtaattagaagttaactatctgaagtgggaagaaaagagattatatacctttaaagtataacatgctcttctaaataattttagatttaactcaccgctttcttttttttagcattatttaattttattttgaaattttgacatgatgaaggacgtgataggactgatgaagacgtacagagacagaacccccatagggtggcagttgagtggatcactgtgcagatatgaaagtggaagtaaaaacaattctttgagcccccaaatattaggaattggcagtgatgcttttagcacctccatatactatcagtcattttaaacatctaagactcccattgcagaaacatggcacatagagtcaggaaactaaggttgtatagatatttgcaatctgtaactgtcctagtgtcaagcacaagaaattcagtaggtgcctcacataaccaagcactgatcattgataccaagaccagatatgtgatctaaattagcaaagacacactccatgctgctttgaaaagaattaccatagatattatgcttttacatgatcatctctttcagcaacaccaaattgctctatcacccttcaattcagatctccgcagtaaaatgtttttaaagcaatttgcagcatttcactttctgtggaccacaccctgcctggacagtcacttttacaatcatcactttcttatggagctaaacaggtg

SEQ ID NO: 50921 - DNA, 1771 bp, Homo sapiens
atagaagcagggagcagcctgttgcagtagatacattaggagactggaagaaagctgatggtgttctggaaatgaatatgggcctggagatggagaggtgtgggaatatcagatagttagttagaacacagagctgacccacaggactttgccgatgggtagcatgtcaggaatgagggtgagggaggagtcaaggatgacttctgggtgtctggctggagcactggggtgatgtcatttattgggaccactaggcacatactagtttggtggtgaggtgagtgaatgactccactttgaactgggtttgatttggaaattcctatgaaatgtgaaaggggagaaacagagtagatcattggatatatgagtctggatttcagatgtttgacccaggctggagatgtagatttaaaggttaatgaggaggaagatatgaatgggaaatgaagtcctggattatggatgatcttgttgaagagtagagtgagaggagaaaaagatatgaactaagttgagtaacacctcttttaaaggttgagaggagtagaatcagtaagagacatagaaacagaatatttaaagacatagaaggaaaatcaagagggcatgcttcagacaagccatgtatagggtgtttcaaatagtaattgtcaatagcaatcaccatactctcttgcctctgtgcctttgtacgcatttttctcagtacctagacttcccttctacccttctctgtgtttttctcttacggtatgctttatttttcctttcatgcctagcaactagtatattgcttagcatgtagttctaagtaggtatttgttgagtaaatgaatggatgaatctataatggacccataaagatgacaggtcttactacatttaggttacctttttctttaaggtatatttgaatcattttaagataagtagaacaaataaattttccccgctttcaatccatcaccattgtgcaatcctgaaagcttgaacattcttggtacctttaactggatgccttcctttgtgtagtctcctttttaagcctgtaaggaatttaacactttgtttaatagacttctttaaaaatatgctcatgttttgttggactttgagtgatctgttaattcccaggtaagcatttctgtgtgcacatgaagatgcataactcatacctatttttgtggactcttgggcatttcatacagttctctgcagatagtaaggcactcaatacgtctttgcctaactagcttagcagtgtagtgatgggtttatattaattaataacaggtcgggcatggtggctcgtgcctctattcccagcactttgggagactgaggcaggcagatcgtttgaggtcaggagttcgagaccagcctgaccaacatggtgaaaccacgtctttagtaaaaatacaaaaaaattagccagtcatggtggtgcccacctgcaatctcagttactttgggaggctgaggcaggagaatagcttggatccgggagaaggaggttgcagtgagccgacattgcaccactgcactccagcctaggcaacagagtgagactcttatctcaaaaaaaaaaaaaaaaaaaagataaataacaagtgtgagctggtatagacaaactggtttagaatcaaaagacctgggtcagagtccacgctgtgtctcgtacagattgtgtgatattggcaagtcattggacatccttgaacctcagtttcctcaaatcagaagtgagaatcattttaaaaaggttgcc

SEQ ID NO: 50922 - DNA, 1033 bp, Homo sapiens
actactgcttgatatgggaaaataacttctaatttaactagctgctagacagtcattcagatcttgctaacagtttttctttatatttgacataattaataatgggctgaataatgttattagaattaaatgataacatataaactgaagatcaaatataaaccacattgacaaggcagccagtggcagccacctctgccatttaacttttagaatgggcgatcaatggagagaaagtttccaatcacagtcatctattcaccgtagttttctagtactgatctggcacacattttgtatgtctactatgaagtcaaggtcagtgttactagtatgatacccaagaaaacacaacaggagaaattaaataacaagctgtaagattttgttgggtaaggttgagctctcgagagccaaaaaccattgtaatatgtaagttttttttttttcttccctcccaaagaaccaacttcaaccctttggagactgtattgaccctttgagaatgcgtggcttatctgattgtgtcctcttaggagtcttaacttcctaacatacggggcccaggagagctaagtattaaaaggatatggacagagtatgagaaaagattcagtcatgagacattgctgtgggtgtagcaccctttgtgggccgctgaaacaagtggcctaggctactagcatgaggttactacagtaatggagtcaaagcagaattaggggctgctccttggagttcttgtatctcttaggttcactgcatctcagtgcttatcatacaatgagtagttggtattttataagttgtctggtctatcagctctgtgcaggcattggctgtttctatcttgttcctattgccagttatctagcacagtgcctggcacatagaaagggctcagtaaatatttgttgataggatagagagaaggcactgcaggtggactcagcctacttcacaggctagatgagggctagatacaataacaggaaaaagaagattcactatttgaaaagaatcccaagccacc

SEQ ID NO: 50923 - DNA, 1082 bp, Homo sapiens
ccaatcacttagtagcccctcaaagtagttagaaaataaacagatttttccagtgttgattttactgggatctgcagtaaggtggtttaaaccatagttatataaaaataaaggtcattctgaatatcagccttttataattttatgtgaagaggaagaaatatagcttattttaaacttttgacggtttttatttgaaagagattgcatttatgcatatatgcagtgctttttcttaaacttggccaatttggaaagggggaaggagccaccccaaaacggtggttcagcttgtagagccatgactctgtgaagatgaatgttgtctcttaacttggacagggaaatggtctaactctaaaccatgtaactgaccttagtaaagtccttgactaactgaactagaaggaaggtttagccttctaattagttcacttgaaacataaatgtgaaatgtcttcattcaatgttaaacacatacttttttggatataaatgaccatatttatttgactgctagtttttttgttttttttttgtctttctggcatgcctgtactattattaatgtttatattgtaccttgatttggaaaagtattggagttaatctgtattatatttatatagtccatatggcacatttgattcttccacatatattttgtgttaatgtttaggtatgatttttttctaaattctagaaaagaacataatttcagttatcagaagccattccatcattatagaccctttttcattatttcatttgctctcatatatcagtattatttttgagcattttgttacatgtcattcacaacttacctaagtgtgctgtgttctggtagcccgtatttgaggtaagctgctgaaaacaaaagtctctatattctttgcctattccaaagagctaaaaaagtctaacccaggaaagcttttgatattttgtgtttgttttcttgttcttatggttgttgttgctgtattatgattgctgttttacataaaatctatgggaactgtgaatacagacaagagagccacagtagagaggcttgtttaatgcagtaccattggaga

SEQ ID NO: 50924 - DNA, 1020 bp, Homo sapiens
ataagaaaaaacagaagaatcaatcgactcatagatacatgatctaccaaaaggaaaattaacttccatattgtaggggggaaatatgcttctttcagtaaaaaggaagaatattttcacaataatcttccaaagctgaatatatcttcagacttcctctgtcaaaattaacacatcaagaaaaacagcaatctaatcattcatcaaacatttcctgagtatctgctgtgtgccagacactattactagctgctggagatagaaggtaaataaaatgttcctgttttcaaggacctcccagcctagaggagaagggatcacagcaagctaaacctctgctatggtaaataatcccagaggtagaaagtattaggagaaccctggaacaatccaaaagcaaaaagcaagcctgaatctattcagctgacaaatgaagaaaggattaaaatctggttatagtgtcactctttttttcccctgcatgtgaataaaacttggcactttgttaagacagttgctttactctcataacaaaatttactacttatttctgaaaatgcttaacagatggtttcacattattaaaataagccttttaaatctgtatattttacatttttcagaatccgaatcttgaactgcctatgttattgtcctacaagcatactgacagtggttacagctaaaaaagaaagcatgaagaaacaactacaaaaagttatcatctcaggatacttgatacgcaacacactaaaccactctcatgtctagagttcacaataaatgttcattaaaataccaaatgattctcttaagcatttaccattattgtaagtagcctttatggccaaagctgtaagttaagaattatatgaaagttgaaagcaagaatacttagaattctggctttagttagagtaatataactcaaatgggtgctcttttaacccatgaactttgtgaatggatttaaatacaatagtatgaagtagaagttatgcaatgagaatgaatagattt

SEQ ID NO: 50925 - DNA, 1054 bp, Homo sapiens
gttaaacatttttcagagccaaatgttgatacagcatatttaatttgtaaggggcaagttgtcatggcaaggccaccatgtgaaaatgtttgttaatattgatcaggaaatataactttgatttataaagatcatttggaaaactaaaagtaaatattccaaaattgcatctgtataatatcaagccaatttagcattgcatgttctcttgggaattatgtgaaaataactaaatgtgtttgtaccttcatgtgctgtgtctgtgtgtttgcaggtactgtatacacttatgtccttgtaaatgtctgatctccaaatatatatcaatgaaccagtctaatcataacttttttaatgtcaagttttattcaagctaaatgtttcaactttcagaggtaaaatatttcatagccattcagggggatgcttgcctaatgatataaaatgctttataattaatgtttccaaaaatgattaaattcactttataatgtttcatttacccccaaaaatatttgggaggaattgatacgccgtgggagggccccttgaactcagaatgactcctttatgtatagtctgtatttccttcagtgggggcctttaacaactcagacctctggaggtcttttatccatccataggaatttagagtaattaatgaacaaggcttccaagcttgtcagcttggaaacaactctacacagcttaaagcagggccatctttcatgcacacataaaaattaatgatcatcatgaatacaattgtgggttagttcactttgaagctaataattgcgagtccaccttataggcccatttttttcaacagctgtcaactctgccaccctctagcaaagaatacaagttaaattaatggattgactccattggttcttctgtcttcctggagttcatcgcagtctacatctgcactgttattttagaagcagactcattttgccacagttagcatctttttacccatttttgaacaacttacctgagtatgttttcccttagtaatgaatctgcttcacaagtaaccttcaag

SEQ ID NO: 50926 - DNA, 1063 bp, Homo sapiens
ttgcattctatcaatatgtctatcaactttcttcattccaccaactttcttcatttaaggtaaaaacaagaaaaaatgtagttgtcaaaacatgaataaattatttacctttgaaagtttaattgtttattagaatcttctggaaacaaatgttactttagctggtttctttttctaagcccattttaggtcactaagtagacaatatgggtaatctttattagcagagttgttcaagtcatccacattgttgaccactcatcttctgttttgcttgggcaatgccaaaactgagtctgtaaattaccttataatttcaggcacagaatcagaaggaaaaaaataaccttaggtttgccagttaaactttatccattttcacttttctgggtgttttaaggggaaaaaaaataataccttacccaggtaaaatttagcctatctttctaaagaggactctgtaggaaaaacagggaaaccaatcaaattaggttgtaagaaaggaagttaagcattggtcagaggcaaatgggactgaaatgtggtatcaccaaatgttttcccattgttatttttgattaagtttttatcctgcaactgcttaagagcagtcagtcccttcatagtgtatctgtacagttgcataggggagataattacttcaagatagattggtgattggcaatggaccctggacataactctttgaccaatggattttgaacaaatgtaggatagtgaattaatgattagagataagtcttattttaacgagaagcatattttaaagctattttatttaaaatagtcaattttcccattaacaaaataatttcaaattgatatgtagagaaatagtagttggcacgtaataatagactattcctatctctgactctgcttttacttcagaaaataatgtcttcaaaactaacatatcatttcggcttcgaattctcaagttttctttttaaatgtcttacatttgagagattatttactttttttttttttttggtttctgcatttctcttttttctactgcaattttccaccttttgtg

SEQ ID NO: 50927 - DNA, 1023 bp, Homo sapiens
actcccgtctgttgtgtttgagctttcacgacacctttgaaagttttgtagtttgtctacccttcctagctaccccttccctctcctacttcttttcagcttatctgcccccaccagctaggtctccttttgccatcatcttcctggctgccattgcctgaggacttggggcttgggcctcctagatattaccattacttcattccttgcccattccccagtactgagatatctgcagccctacacctactagctacttagcctgatcacacctccagcctgtacgccagtttagaggccttagggcagagctcagctttctcacccttgttctttgaaaaacctgggttctgtttagttcccctcttctctggatccctggcccaagctagatcctttcataggtatcattgtgtactagttatcagatactatagcgtattgcctggtgcaattcgtaaccgtcgtgaaatcttttgtgttgtatcttttcagcttgccttggatacccgattctggacgtggataaatcactttgtgatttggggttctttagccttctatgtatttttctcattcttctggggaggaattatttggtaagcaattgtacatgtgtgagcaatatgtaaatagcaaagtagatacatgtgtatgtacactatatatgtaagcattcattatactttaaaaattttaattatataagatgacacgtctttaatattaatggcctgaaggttatttgttagctggtagtgctactaatttcaggtaagattttaaatacacatatatagactgcacaagtcactcagaagacctccctttggtagcttctgtctgtttgaaggtgttgtaaacatctctctagtgaaactatagttttcagcacaacctctcgtgattttcagaggaaatactcatcctgtgaagtttctacctgatatattgaccaacagatacattattgtccatttggacccttattttctcttgatagtatataaccatgattcatgt

SEQ ID NO: 50928 - DNA, 1927 bp, Homo sapiens
ggcccactttagttatctaggatgatctctcttacttgaaatcaactgcttgtggactttcatcacatccacaaaatacctttacagcatcacttagacaattgtttgattaaataactgggaaatgtggcctcaccaagttgaccttttagaacttgtagtcatctattatgtgcaacttgggtctcaaagatacgattgcaaatcactgttgtgccattattagaggcagttgcttctttagagtgaacaggttgaggaaccagattgatgactccccttatctgagaccaccccctttgttgtttaaaaaaaaaatctggatcctaaacagaaatctgtaataaatccaaacatagcattgtttctctttttcagagcatggacagaacatcaggaatatggattaatcatagatggctccacattgtcactcatactaaattctagtcaagactctagttcaaacaattacaaaagcattttcctacaaatatgtatgaagtgtactgcagtgctctgctgtcggatggcaccattacagaaagcccaggtaactgtgaatattagttaacgttccattctggatacttctatacatatatgtgcaaatgtttatttttttaaaaaattatttcttcttcaaagggccattattactatctaatttcttcctccaaggcttctttctttttgtaatcagactcagaagtctttccccattttgaattaaacttatgctgcaccttgttgtcccctcaatctggctgtcccagttcctcaccttccagacttttttctctgatgagtgctttgtgcctgctgccactgctcctagatcccttatgacattagctctgtgtgttctttctgctcttcttactcccttggcttgcctgcaggtagacctggcccatcccttgtgtagtcttccattctctttctcatttctcctttgctcttgacaccatcagttatatcctccttaaaattatgctttcatggtctctgtgacggtccatggtcctgacattttatttgtcaatgtagtgactttttattttgtgccatcctctattttctccctaattatctgttttttctagggcaaagttttctctccacttttagctttatggtctctctctggataagcaagtctatttctctgactcccattgataaatgtgtgcccctgactttttcttgacattaagtcttctatttctacctgtgtgctagacagctatatatggattccctaccgtcacaaaaattctggtgtccaacacagatcttaaaattttcttcctcagaccagtttggtttttcttttatattgttcttgttaccagtgccacttttctcttgctccctatgtctcaaaactacctttgatccttctcctctccctctatatatagtcgccatgtcctgttggtcctaccttttgtcatagctctcattttgatgccatctttcaaaaccttttactgcccaactagtccaagcctttatgactttacacacagactatttgatttagtctcctcactggtctccttgctttcacccacccatttttaatctctccacactcccaaattaatcttgttaaaacacaactcttcctatcatacattctttttcggacactttcagtagtttcttagtcccttaggatgaagggcagttgagtgaatgtggcgcctggggctccccactgttgtcccttaacatgtctctacaaattttgtactttgtgtccactatcactcctttctctggtgtacattctgcactcctgttggttgttcttccatggtcttccatatgtcatgctcagggcaactttcaaaacttttgtcacatcatttcctcatctggcactctctctgaattcccctggcctaacacaaattttact

SEQ ID NO: 50929 - DNA, 1072 bp, Homo sapiens
cagttttcactcaggtcttttgaatatttactaagctatccatatatttatgcacatattatcaaatagtcttgacatgtttagggaagggtactacagccattgtttgagctggtgcctagacaaaggggtaagattttcagagataggtgagctgaaaggaaatttaaggtagagtgaacaacatgagagcttaatctaacctggttcaacagaccagagtatgtttttgcatgctttattttattttatttttatttttatttatttatttatttttgagacagagtcttgctctgtcgcccaggctggagtgcagtggcacaatctcggctcactgcaacctctgccttctgggttcaagtgattctcacacctcagccaccggggtagctagctggaattacaggcatatgccaccacacccagctaatttgcatatttttagtagaggcggggtttcgccatgttggccaggctggtcttgaactgctggcctcaaataagcttctgtcttgacctccgaaagtgttgggattacaggcatgagccgccgtgcctggcctgcatactttaaaataatatgcttttaacttacaggctgacctttttcagacttgattgcaggacactgccattgatctgcttgaaataataagttttaaattcttaatatttttagaattttctaaatattatatatgaaaattatgagaattaaaaagttacaaacatatgtttagtcacgttaaaaggtattgaaactctaatgaaattcctttagtctaatttcattgttattctgtggccaaaagaaacccagaggaaagtatcgtttttctcttgtcgtctttaagaattataattaaattcacattcaggatgattggcgttcctctttttttggagggtgggtcggggttatacattcaggtagtacatgtgcaggttcgttatgtggttatattgtgtaatgctggggtttgggcttccattgatcccatcacctaagatattaacataatactcaatgggtggtttttcaaccctcactcccctcccgtcttccccc

SEQ ID NO: 50930 - DNA, 1043 bp, Homo sapiens
tttgtatttctagtagagacggggtttcaccatgttggccaggctggtcttgaactcctgagctcaagcaatcctcctgcctcagcctcccaaagtgctgggactacaggcataagccaccgtgcctggccaatagtcacatttttttctattcatcttttacatttgagtagatctaccttagacatgtgatagcattttggtgtctttaaaaatactcatttattcctcatttctttggtaatattgtctctgtaattccctgacatttgacaagaagtcttagaaggggtgatttcctatggatatgaaaatagctttgcgttacagcaaactaaaaattagtcacactgaagaaactaacaatatatgtttgtgtccttgttttaggtggattatgtatttacagataagactggaacactcactgaaaacagcatggaattcattgaatgctgcatagatggccacaaatataaaggtgtaactcaagaggttgatggattatctcaaactgatggaactttaacatattttgacaaagtagataaggtgcatttgcattattgttttatataagaaaccaatctgtgtatgcatgttaacattccatagtagaaaataatttttaggtggacacatgacatagacttttgtgtttttgttttttttttttgagatggagtctcactctgttgcccaggctggagtacggtggcatgatctcagctcactgcaacctccgcttcccaggttcaagcgattctcctgcctcagcctcccgagtagctgggattacaggcgcctgccaccatgcctggctaatttttttgtatttttagtagaaacggagtttcaccatgttggtcaggctggtctcaaactcctgacctcaggtaatccaccaccctccgtcccccaaagtgctgggattacaggcatgagccactgtgcccagtgactttagaataactattgttggattcacctttcttgttttactgacacttctgaaatttgtaaatgagtagaatttacaagta

SEQ ID NO: 50931 - DNA, 1071 bp, Homo sapiens
gcatagtggtgggcgcctgtaattccagctactcgggaggctgaggcaatagaattgcttgagcccgggagatggaggttgcagtgagccaagatcacgccactgcactccagcctaggtgacagggtgagtctccatctcaaaaaaaaaaaaaaaaaaaaaaaaaaaaaaagatagggtgtagtttggaaaatgtttgctttataagtaagttataaagcaacattttatgtacatataacaaattataactcatttataattgcaagtgacttaaagtaaatttggccaaatgggggtaacttatttccctcatacactttctggcacagtcggttttcttggccatggtccagagctccacagggcatgaagatgtatcctctctatgctgcctttaaggagggttactcatgtggctcacctctgggtatgtccttggagggctcctctgtttgtttattccatctggagttgaggactacgactcagtatgtaaaaaagaacctttacctgttggatgactaattctgtatttcaaaagcatggtaatgacctgcttttaaccttttcaaaaacaaagttataatttagggaatgtcaagatataaatcaagaaatctacataaagatttcctgatagtgaaaaagttgtttggagtaagaaaactttcagatagtttcttttttcagttaagttgttctgatcaaatcagctaaaagtacagaggttttcaaaatcaggagatagttttaaatatagttcagacattgccgtaatatttcccccaagatgacgacaacagctttcccttctgcctaagtggtgcgctctttgagtctgctttaacccttgtttgatgatttataagtgggttcattggcgcctgccttgagttctggatgaatcaagtgcataatatacactagtagaatattctaattatctgactaatgcaagacacgtcatctccctgccccttgtacaaaatgtatccatattgaacattttcaagatcattaattaagctatttgtgtaatggaactattaatgatttttttcttgctgt

SEQ ID NO: 50932 - DNA, 1046 bp, Homo sapiens
atggtaaaaatacaccattttaaagtgtataatttagtgtcatttagtactttataatgttgtgcaaccgttaactctatctagttccagaacattttcatcacccgaaaaggaaaccctatacccataagcagtcactccacatttctccctcctcccaggccctggcaatactaaccttctttctgtccctatggatgtatgtattctgaatgtttcatatttcttatgtgtcctttttgtctagcttctttcactcagaatgtttttgaggttcatctgcattatagtatatagcagcatttcattccttttgatagctgaataacatttcattttatttattcaccagctgatggacatttgggttgtttctaccttttgggtattatgaattgctatgaacattgaattacagtttttgtttgaacatctgtttttaattctttgaggtatatacctaggaggaaaattgctgggtcatattgtaattacgtgtttaactttttaatgaaccactaaactattttccatagtgcctgtaccattttacattcccatcagcaacataagagacttccaaggtagtagtatttttttttttgacaatctcaggcaattgtttattccagttaatcattgtttattatttacccagtaagaccctgtcaaataacatttttgacttgtccatgtcaaacactaattttttggttctcattagattttttaaattaaaaaattatatttttagagcagttttaggttcacaggaaaattgagtagaaaatatagagagtacccataaacccactgtccccaaacacattttctctggctgtcaacatcccacaccagaatggtacatttgttacaatcagtgaacctattttggcacactatcacccaaagtccatagattatattaggggtcactcttggtgtacattctgtgggttttgttaaatataggatacatatccacatagcctacatttgtatatatgtacatatgtatccatagtagtgtcataccaggatagttt

SEQ ID NO: 50933 - DNA, 1040 bp, Homo sapiens
gtgtgttggcgtatgcctgtaattccagctactcgggacgctgaggcaggagaatcgcttgaacctgggaggcggaggttgcagtgagctgagatcacaccactgcactctagcttgggtgacagagtgagactctgtctcaaaaaaaacaaacaaacaaacaaacaaacaaaaaaaacccaaaaaacaaaaaccacacacaacaaaaattagccaggtgtggtggtgtgtgcctgtagtcccagctactcaggaggctgaggcgggcggattgcttgagcctgggaggcagaggctgcagtgagctgggaacgcgctaccgcactccagcctgggtgacagtgtgagactctgtttcaataaataaataaatactatttactgacgtctccaagcaagaactaacttgtaacaaaaactgaattctcatcattgtgtctaaaaaactgctatacacattttcttcttgtgattaacttttttttttgccatagaggtcatgcttgagataacattgtttttgatttgtagcaactgaccaagctggagaatctactttttagataaacaagttaatttgaataacttgatgtatatggctgtaactcaatttcacttttagttagaaaactctaaaaagtagacttttcttggtctgcattaaaatcttacatttgtattatactaaaaaagatgtgctagaaactaagtttaccttttagttaaaccagtagagtaaatggctagggcacaagttttaataaagatttcttgtatatcttctgtgtgctaaactattgttctaggcacctgtgataaggggacttaggacatgctccatgatctcttaagagctcatgacttgatgaaggagagaagagggcagtcatttcctatgaagggaataatcagaattcctccaggaagcagttcatttaataaaacagtggtcaactaacagttgggacttaaaaacgacaacagcaaaagtattcccttttgatgtgtttatatcacctttcacagatgactctgtaatg

SEQ ID NO: 50934 - DNA, 1126 bp, Homo sapiens
gaataaagacagtagttgataaagatgaatacagtaaaaattaaagtgttgttgcctttaagagtattttatgtataaacttgattgatgtaaacttaattgttcaatgtttaaaagctctaattaatgtagtttatacttagtatgaagcacatcaaggtctccatttcctctactcactggaataattgaactatatattcagacttctctcactgcttcactccctacatatattcccctttacttttctctcaaaaatccctgacttctcctgataaaaataaattgctttaaacatttattgttaataaatgcattaatgaaaaagcagaaacatttgtggtggtttctctagttttttaaagcaaatctctgtaggggttcctaatttagttctgttccacgttgccctctggtcactaaatcaaacacagagccactgctgcttagggagctggcattctagtaaggcaagctagtgctagggcactagctggaagcctgttttgagctgactggaggctatgaaccccctaaagaaagagacagggtcccttgggcctgaggcttatcggtgatgggaggaaatgttgggtccagcccctggggaggtgaggtgcactagagaaactgagaggcaaacaagtgtgtccaccaggacctaatgttgctcacaaccccttaaccacttaatcatctgtcattcttttaagtaaatacctgcttatgctcattttatcgttttgaacattccatcttcagggtgctaacttgacaaatttttggtaaatctgtgcaatattagataaccacaggaacctttttattcaactcccacactttatgaatgggaaaacagactcagagagggggaactgagatagagttggctttctggtaagataagcttcctaatttagcatggggattatgcttatcactgtgtctagctcattccatgttctttaaatatttgtttcaataaaatgggataggcctttggattaggggatctcacaaatacacaggcccctacacacacacagattattgatttgatttggaaagaatgataggagaaggtgaatgtctgaggccaaccatttgcaattctaaatctgtg

SEQ ID NO: 50935 - DNA, 1184 bp, Homo sapiens
ccaccgcgcccagccaagcactttcttttcatttgtgccatatatattgttgaaaattggcatttatatacccttctggctttaaacaattggttccattttccatgtaactagacacaaatgcattatgcaaaattgtgtttgtaaggagagatcatccttcattccgtttcataaaggttttctcttttttactgtttacgtgagggttgaatatgtctgccttctggtaacacattaaggttgcaatatttgtctagttgtaggaatacttagctcttttttgtttgaatttgacataacacatgggtaaatctaatcctgatggaaagttccatttaatttttttataacaacttttaattgacacataatgtatttatggggtatagagtgatatttcaatacatgtatacaatgtgtaatgatcaaatcagggtgattagcatatccatcaccttaaacatttatcatttctttgtgttgagaatattcaacattttctcttggctatttgaaaatatggaataaattattaattgtagtcaccctacagtgctatagaacactgtaacttattcctcctgtctagcagtaattttgaatccaagagccatccctcctgcctatccttcccagcctgtagttgccgctattctgctctctacttctatgagatcagcttatttagaaagctccctttttaaacacataaaaatatttttgtagtgtaaaaccaatatatgtacactgtaaaaaaaagtttgtcttaatcagcttaacatatgtttgaatttaaaaaaaatgtaattatcttaaagtttcagtttctaaaatcaaagtaaagtactaataccagtgcttcctcatgtatactcggttgagtttcttttgggggtgatgaaagtgttttagagttagattgtggtgatggttgcacaatgctgtgaatatgttaaaaaccatggtattattaaatgagtgaattttcatttagtatgtgatttattaataaagctgttttatgaaaagggtactcatatcactatgaatcagctctatcacttagtagctggctgtgtaataaccttggattaagttgctttcatttttttgtgccttggcttcctcatctgtacaatggggataataatatcttttttgttggttggttgtgaggacta

SEQ ID NO: 50936 - DNA, 1030 bp, Homo sapiens
gtgtcatcaattgtttaaatttgaatcaagcatcagtaatggcataccatttgggctgctttgtggccctgatgaatgctattttattttatttattttttattttattttaattttgaggcagagtctccctctgtcatccaggctggagtgcagtggcccagtctcggctcactgcaacctcctccccctgggttcaagtgattctccttccttagcctcccaagtagctgggactacaggtgcgtgccaccacacccagctgatttttgtatttttagtagagattgggtttcgccatgttggccaggctggtctcgaactcctgacctcaagtgatctgcccacctgggcttcccaaagttctgggattacaggtgtgagccaccacacctggcctgtgaatgctattttaatatagttctcaggaatgattaaaaacaaatgtgtttttctaagtggtagaattaatagataaaatcactttgaaattaaagtcctcaggtaacatagaattcttttccctgaacaagtcattatgtagcacatggtataattttggcagacccaactttattaccaacaaaactgtaaagcgagtcctatgtcctgtttgtcttttcttctcgggggtttctgttcttactagaacaaatcaaagtacagtgtgtgttgctggtcttcaagaattattagtttttgttgtaactgtttaatgcagaaacagatgctagagcagttattccccaaggcaccatgtgcctaaggcatttttaaagcactagtatgttttcagtgtgatactgctactctggaagaactgtatacatagtggttcacttttccagtgtggttagaactgacatttctaagatataaagaaatttaaggccaatttggatttgtactctggctctgcttcctgcttaggtggaagactttgagtgatttagttatgctctctgcctctattttctcctcttcaaagtggggatgatgaaacctactttataactttgctgtgaggatt

SEQ ID NO: 50937 - DNA, 1048 bp, Homo sapiens
tattgagtgctttttatattccagtccctatgatgtgcactgtacaggtattatctcacagaactggtagaaaaacctgattgtgccaggcgcggtggctcacgcctgtaatcctagcactttgggagtccgaggtgggtggattacctgaggtcaggagttcgagaccagtctggccaacatggtgaaaccctgtctctgctaaaaatacaaaaaaaaaaaaaaaaaaaaaattagccaggcatggtggcacacgtctgtaatcccaggtactcgggaggctgaggcaggagaattgcttgagcctgggagacggaggttgcagtgagccgagatcgtgccattgcactccagcctgggtgacagagcgagactctgtttaaaaaaaaaaaaaaaacctggttgttttctatattctgtaaataaggaaactgaggtgcagggagataataaatgagttgcccaaattacatagctgcttaggagtagagctggaagtttatccaaacaacctacttgaacctgtactcagtttttgttcttaattggtctcgggtgcatggagttgttggctgcactttaactgctacactgcactgtctttggagccaatcaacttttttttttaatgtttcagaaacaagccaatttacttaaaattttttttttttaaattgtagtaacatacatgtaacgaaatttaccatcttaaccttttttttttttttttttttttgagttggagtctcgctctgttacccagcctggagtgcagtggtgagatcttggctcgctgcagcctctgcctcccaggttcaagcaattctctgcctcagcctcttaagtagctgctattacaggcacccaccaccactcctggctaatttttgtatttttagtagagacctgtttttgccatgttggccaggctggtctccaactcctggcctcaaatgatccgcctgcctcagcctcccaaagtgctgggattacaggcgtgaacccccatgcctggcccatcttaaccatgtttaagtgtactgttctg

SEQ ID NO: 50938 - DNA, 1052 bp, Homo sapiens
cttcaagatactgattttatttcctttctctccggccctcacaggttttctcaggcctacatttatagtctcctgttttgttttgttttgtttttgacatgaggtcttgctctgttaccaggctgaagtacagtggtactatcgtggctcactgtagcctcaaactccccaggctgagcctcctcccagctcagcctcctgagtagctgggactacaagtgtacgctaccatgcctggttactttttgtatttttttgtaggacagagtcttgatatgttgcccaggcttagtctcctttctatgattccccctcccctccccctagtctctgtccgtaccacgctatttataggctgctagatacctcaggtacctcttggtgtttgccagatgcctctaggtattggctcctgttgttccctttctgaagctgccgctcttccattcactggtgaaatcctagacccaactcaaatgtcatttcttctgtggtatgctgccctggatcttccttctctgacgtacctggggtagaacgaattcttcccgtccctgtgttctgtgtccattatagcattttacacttgcttctattgttagcatttttcagtctttggtacctaacagattttttgtaggtgctcaataaatgttctttgaatgaatgaatctatgtaatccatagttaaaggtctttcagggtgtcagattttcttcagaatcaacaaaaatatcttgttttgattttcacacaaagttaaaaacatattaattttattttctgtccgtaactattattgccaatatttggctttactaactttgtgtgataaatatttgctattttggccacattattggtaaaatagacctttgtgggcttttctggctacctgcacaccatttttattatttcaagggtaacaataattattgagtacaacagtgtgccagacattgtgctaagctttgtctgtgcattatttgctgactcatcaccctaatcctttattattttcattttacgtgtcagaaagtaaaacttagaga

SEQ ID NO: 50939 - DNA, 1054 bp, Homo sapiens
cagccttgacttccccgttcaagagatcctcccacctcagcctcctgagtagctgggactacagtcacgtgccaccacgcctggctaaatgtccctggcttctaacatgcacttaaagcacttctcagaaagactgtcccagtagaaaaggtgcacagaaagtaaacaattcactttttcttttttcttttttttttttttgagacagagtcttactctgttgcccaggctggaatgcagtggcgccatctcagctcactgcaacctcctcctcccaggttcaagtaattctcatgcctcagcttcctgagtagctgggattataggtgtgtgccaccatacccagctaatttttgtaatttgagtagagacagggttttgtcatgttttgaactcctggcctcaagctgtccgcccgcctcggcttcccaaagtgctgggattacaggtgtgagcctctgcgctcggcccaattcacttttcactgaagttgacctttagtatattgttagtagttttggattctagtttgagttatcactagaaaaaatagtgaacaatattttattattttttattgatacataatagatgtacatattttgggatacctgtatatgccccatacccagtttcccttattattttgagacagggtctcactctctctcaggctggagtgcagtggcccaatctcggcttactgctaccttggcctcccgtttcaagtagttctcccacctcagcctcccgagtagctgggaccacaggcatgcaccaccatgcccagctaatttttgtattttaggagagacgtgatgtcaccattttgcccaggctggtcttgaactcctgagctcaagccatctgcccacctcggccttccaaagtgctgggatttcaggcgtgagccaccacacctggttcagtttcccttattattaacatcttacattagaatggtacatttgccataattaataagccaatattaatatattattattattgggaggctgactgggccttgaggtcaggagttcgagaatagcct

SEQ ID NO: 50940 - DNA, 1050 bp, Homo sapiens
cccaaacccaggggtttgcaccattgttcaattctttcatcactgttagaaaaactgcatgtaattcagcccactgagtggatctgtttttaccttctttgatctaagtagcagccttccaaacaggatggtgtccattcactttggaactgtctggcttcttttaagggcactaactcctccaggcttcactgccatgatctaatcacctctcaaaggccctaccttctaataccatattgaaggttaggatttcaatattaagaacttggggttggagggggaacccaaacattcataacacttggtaagtaaaatataaagtccagtttacacctccttacctatttacaaaattaagtgcattgtttcttaccaacactgggtaatgaacttctttttgccccctccccattttatcagttgatgtcttcagatgttacccggaatgtaaacaagctctgcttgaccaactgaactgtaaacaagtctactcaaacctgaactttaaaaaataagggttctccaacttctgcctcctgaattcctgacttttatatactgccatataagtccaggattctatagtaactgttggagggttttaatttttttcaaaaatgtttattgtaaaaggacaaaacttttttttccctctaaagcttagatggtagtttctgattttgtatctaaagctttgtgaagcattagcaattttttttttttttttttttttttgagacggagtctcgctctgttgccaggctggagtgcagtggcaagatcatggctcactgtaacctccacctcccgggatcaggtgattctcctgcctcagcctcccaagtagctgggactacaggcgcatgccaccacaccccgctaatttttgtattttttgtagagacggggtttcatcatgttggccaggatggtctcgatctctcgacttcgtgatccacctgccttggcctcccaaagtgctgggattacaggcatgagccaccgcgcccggccagcattagcaatttttgaatgtgcatatccttg

SEQ ID NO: 50941 - DNA, 1066 bp, Homo sapiens
ttcagcccttggcaaccacccatctactttcttatctctggattgccagtggaatcatacaatatgtgttcctttgtgactgaattctttggtgtagcatagtaatattttcaagatttgttcatgttgtagcatgtatcagtatcagtacttaattcttttttttttttttttgaggtggagtctgtcacccaggctggagtgcagtggtatgatctcggctcactgcaacctgtgcctcctgggttcaagcgattctcatgcctcagcctccaaagtagcttggactacaggcacgcaccaccacactcgactaatttttgtatttttagtagagacggggttttgctatgttggctaggctggtcttgaactgacctcaggtcatccgcccggctcggcctcccaaagtgctgggattataggcgtgagccaccgcgcccggactcattccttttgaaggcagagaatactccgttttatggagagagcacattttatttatctgttcatcagctgatggacatttgggttgttcgcactttttgactcttgtgaaaaatgtttcttcgaacatttttgtcctttcttttttatttttttattgagacagagtctcactctgttgcccaggctggagtgcagtggcgccatcatggcacattgcagcctccgcctcccaggttcaagcaattctcctgcctcagcctcctgagtagctgggacaacaggcgtgcaccaccacacccggctatttttgtatttttagtagatatggggtttcaccatattggccaggcttgtctcgaactcttggccttaggtcatccgcccaccttggcctcccaaagtgccggaattacaggtgtgagccactgtgcctggcacatttttttgctttttaaaatgaatatgtttttacttgagtatatattagtggaattgctgggtcatatggtaattgtatgtttaaacttttcaggaactaccaaactgctttcttcagttcttcctcacttaaataagtagtttgtgtgtgtgtgtgtgtgtgtgtgtgtgtgtgtgt

SEQ ID NO: 50942 - DNA, 1097 bp, Homo sapiens
actctaatttttataccttattatcaaaattgcactgcccacaggccaaatatggtcctccaggtgttttgtcaataaagtttattgtaacacagccatgcccattcatttacacagtgtctatggctgcttttatgctacagcaacagagttgagtggttacagcagagactatctgtcccacaaagcctaaaatatttgctatctggccttttacagaaaacttttactgacccctgccttaggctctgattacctgacaattgaaaaaaatctggaaagattaaaatattaaatcgtgtttataaacaaaatatagtaaggtcttctctatgttggtttgtctgtcaaccaaagccttcaacttttaagcaataatttgttttcatttttgcttcaaatctttataaaatttagccagattgtcctctctccattctaagatgtattacacattaagcagaagatactgagcataatttaataatgtgacataacagaatgagcatgggctgtggagtcaagagatctgacagaatgcgtgctaatcccattaacaaataacccaatgggcattcagatgaagacataggagcttcaagaactgtcaaatatttcctttttgtatttctctgttttgaacaaatactgtgtctccaagaacttgtcagctctgggtcgtctctgttaatggaaaaattgaggtcacatcctccatttggtggcaatttgctcacctaacctgctgacctttttcatgttctccatgttcactggcactgttttaatctagatcaaacttcctgtctcctaataaaagccaatcaacatcaaaaccagactgttgcccctgccctgagcaataggatgccagaaaccgaagttgctgaggacattacaaagaactaaatagtgattatacactgacagcagaatttttaccgatttacttaactatctgtagtaatgactctctttacatcaatgaaacatctagagtgtggctgtgtactgtaggaactggaagggttgagagatagaggtttgcctcattgagcttttgcaaacaatgataaatgagatctttcacatcagcc

SEQ ID NO: 50943 - DNA, 1048 bp, Homo sapiens
atccacagagctgaaaacaggtattcaatcaaaggttgtacattactgttcatagcagcactattcacagtaaccagaaagtggaagcaattcagatgtctattgacagaagaacagacaaaatgtggtccgtccatgcaatggaatattattcagtcttaaaaaggaaggaaactgacacatgctacatcatggatgagccttgaggacattatgctaagtgaaaaaagtcagtcacaaaaggacaaatactgtataatcccactcctatgaggtatctagagtagtccagttcatagacatagaaagtagaatggtggtttccagttgctgggtgaggatggagaaaggggagttgttacttaatggggacagagtttcagttgtgtaaattaagaggagttctggagatagatggtggtaatgatggcacaacagtataagtgtacttaattccactgaactgtatactaaaaagtggttacgatggtaaatgtcatggtgtgtgtatttgatcgtaataaaatgcaaagataactctaatgcagacatccagaagggagtaatgtgtggggtgatcctgtgggagtcagaatatcctgttcctcaacagactcttttacctagtggttgtagccttaattgatgatccttgtctgagtcagttattaaatcggtggttccaaaattcaggttgttttaaaaagcgccaacagcctcgtggggccctaattttgcatcctgctatttgattggatgagtaattaatgcagggtgaggtgccgaggtggtgtttctaaacgtctgttgctaaagataaatgttgtaaattaaaaaaagaaaacatatggagcccagacaggttcctttactgctcctgcctggccatggcaggcttttataatgtaacccattctgctctgtcgcttcctgtttcaggcaggcaatccatggaccttgtggaacttgtgtctctttttcccacgctggctggacttgcaggactgcaggttccacctcgctgccccgttccttcatttcacgttga

SEQ ID NO: 50944 - DNA, 1098 bp, Homo sapiens
atgcgcacttttggtagggactcagccttctttgtggggggcacattttccattttgacagctcatcaatctagtgaaccactagatctgtaaaatctaccaggtgattctactctgccctccccagcagtgaagggcaagtttactttgacttccatgtgccagtccttcaaagctttgaaaacagcactgatgcccccgaccctgtccatccaccaatatcttctcttctctaggctgaaatccccagcccttcaaccattcgtcacaaggtagtgtttagacgcgtggttgtcctggtctctgtcttccaaaaagtttcagtttgagaaagcacttccagaataccagttggaccagatacccctcctggatgtgtgggcaacctgtatgggttcttgtgagttctatcctgacttgatctgcccagtgcatttcagggacaggttgtacactgtctctgaaatgacgtatgacgtttgctctttttggagtgcctcttctatgaactatgctaaaccagattgccccctttctggacttaagcatttaatccatccttaacatctaaatcttgtactgtatattgattcctgtttaaatttgtcttggttctggaccatcattcgggcctttctggatctttctgagcttgctttatactacccaattttattttttgcactttgatttttgtgcactgcatgtcctgtcttctttcatgtcattgatagaaaggttaaacagtttcaaggcatgattttagccctttgtttgctgggaaagatcttctgattggttgagaatcttttctgaaacttttgttgggaagtgttcagcaatttagaaattgatgtaactgcacggcctttcagtttatttccaaattttatctctagctgtgtcttttccctgaacttcagacttttgtttccaatagtctttcccacttagccagcctaacatatccaaagctggacttcacatctttcatcttcagcttttccttcaacactcttcttgtcctcaagaaatgagaatagtcactcatgccaaaaaatcatggaataatctcaacccctgttcttctcttactcc

SEQ ID NO: 50945 - DNA, 1030 bp, Homo sapiens
caagccatacagttgttggaaaagatgaaaacgtcagccagtcctttcttcctggccgttgggtatcataagccacacatccccttcagataccccaaggtgaagagctggttgagggctgatccagcacagctgtgacagctgtgttgtttgttgagggagggatttgcacagggaaggtggctacatcctgccatcgccaggcaccatggttgcctgatgggcactagtgtcctcagtggagtaaagatgggatttagaggtcaaggccaagaacatgtaagaatcttgtaagaaatgcttggctttccgcttcactccactggagggtttgatttcctttccttgaacttattgagcagatgttgggttggatggtgagatcaccacagagtagtgaatcagagctggctgccaaagcctgtaataagggatggcccttccaaaacagccccagggaatgtgaaactctcttcaaaaactgcctgttccccctgagcctgtcaggttagatcatctaaacacaaagcactgcattgcttcttggaacctcaaatcctgtacttgcttgtatgtcatttagagcatgtagtcttttctgttttagaatccttttccatttttccctatcatgttttatgagggcctgagcatcccatccttttgactttgcagagaatgcccctcacatgtaatgagagtagagaccagcagtatgctctttgatgttgcaggtatcttgctttgattggcccaggggatcttgctttcctagtaggagctgtcagcccccttgatagaagaaggctgtgaggttcacctctcctgcctctttgcagaaaacagttaacaaagctggcctggctgtgattctttgaaaggcctgcttataagtctagcccttggctggcatctgggaactttgatttctgaagtgttctcactattcccagaattggcttactatgcttaaaccgtttagacaaacattatggttgatgataaacccttgggtttgtttttttttttc

SEQ ID NO: 50946 - DNA, 1033 bp, Homo sapiens
ccccaagtttcctgcctcctagtgtatgtgaccccttgtgtatgggtagaatgtactacaatcagcctccttatccatgtgttccacatctgtggattcaaccacctgttgaatttgaaaaagatgggtggttgtctctgcagtgaacatgtacagacttttttcccttgtcattatttcataaataatgcagtataataactatttacatggcacttacattgtattagggattataagtaatctagaggtaatgtaaagtatacgggaggatgtgtatgtatgttatatgtaaacactgcaccatcttatataaaggacttgagcacctgtggattgtgctatccacaatcccgagctttaagtgagaatgtagtccttcactgcagccttttgagaccctgaacctaagacccagcttagctgtgcctggatttctgacccacagaaagtaggaggtgacaaatgagtagtgtttacagccactaagcttgtggtcatttgttacatagcattgattggcccttatccctcattcactgaagactcaggtaccaggctcacaggtgaccttggtaccctgtgtcctgtcatcattctgggggactgcagtgtattcatcagcagcctgtgccactcacagacccttgacttcttcctcatctctaacctctagcaatctcttcccccccacctcagcctcccagcttcaaggccacatccttgacctttaaatcaccaggatctgttttacctcagaaatcttaaatttcagggtctcattctgggactaaaaccagtactctcacacccttgctgcctctctatatcctcacccatctcctagatctttgtttgtccccagtccaccagtcttcttaaccactgtcagccacctgaactgctctcttactggctctctccacttgctcccactcttgtccttctgctgctatgagccccagcaaaacctcgagcttacaccagagcaaacaaacaacaaaaacaaacacacacaattgtgccaagtggc

SEQ ID NO: 50947 - DNA, 1133 bp, Homo sapiens
atctatactctccagagttcagattgagagcagagttctagcacgttgcctcacgcaccttgagatagtctcttctgggaacagtgccctccgtgcccagcgcatttgggtaacattcacagcccacgttagactcctccttggaacaccatttcacgtgcctacagagcccagggccctccctatgactctgcaggggagagagccctcactggcattgggctgaggacagcctgggacactccctttcctcatccaggtagttctcatcatggttctcatcccgagcccttgaaaccccacgaaggtactagcccctgggatacagtagtaaatggacagggcagagcctgcccttgaggggtgcccatccaaggatccctggatctggaatgagagacaaatcttgaattctcccctgaatcctcatcctaccattgtgtgggactatataccaatttgccagtgtgcattgtcccctcctcctggagttaggctcaaaggcgggggtagggtagaagtccaagagcaaggggactccctttgctgtatggtaccctagaaggtccagagtcctagaactcctctcacaccaaatccacatatcttagctgcagaagtgtctggagcagtcccctgagcttcctgtgacactaaagtggcatgggaaagcagttgaattttcccgtgcctccaaggaggtaagagagggagggagagagaaagagggaaagagaaagagggagagagggagagggagagggggagagagagagcgagagggagagcacgtctccaaaaaatgtcacatagaaaatggcatggactgtgcagctaggaaccaggttagaatgacgacaccacattggaagacagcatgaaggtatgccatctctgagcgctggatgggattgtacattgggagtggatgctggcatggacaggttgccattgacaacaagcagattctcttctctcttgctctctctctccgaatttaagagtctcacagaatttaggtgataggctggggcaaaggagacaatcctaaattgcttgataacaataattggtaattagtaagacaatcccgaagtaactgggaaaatgtggaattgactagattaaatttt

SEQ ID NO: 50948 - DNA, 1341 bp, Homo sapiens
ccagagaaggttcgtggctggagcagacgcattcgtagagtgaagtcatgggagaagaggctgggaaactagattggttccaactcctaaaggaccactgaaggagtgtgggctgcacgctgggtgcagcaggtgagtttcctcacttgggtttcactgtcagcatttttaaaaggcaaactggttctcttcctgagaagaattcattgattcactcgtggccagtaagtcatctgacaaacccttgtgtacttctgatgggataggagtgtttgtagacaacaggcacacaaatataacatgcagcccagtgcagctcaggagcagccttccatggataagcggttggtacctacagtgtgctcctgtccttgctaatctgaacacataggtagtaaccttaagcatgtctcaatcttctgacttgtgatgaggtttccaattcttgttcctgactttagaatgaagtttggagagttgtcattaggtctctaggttctgaggattactgtggggtaggcagagggagagaagagtgttggggccagatgttcctgtgcttctaccagaaagttgatttgcccagtgtaccaccctcacttggcaggcctgagcagagtggcctgccactgacaacccagagaaagaaggtacagtgcaggcttgccctggtgggctcttggatgccctaagctgcagcatccagggccaggtgggatttggtaggataggccccccgtctactgtgtctgatcatactgcctttgaaagagaagggtgggtggtgaagacaagacgatgagacagggtggcctctgcatgttgtagcacccaactggaacatttgcagatgatacttggaaaaagctttaggaaagaggcccacttcatttatgaaatgacaccagctaatgtttgaccttagtcatatgttccttggttcctcattttgccatctgctggctgactcatacagcttcacttttaattaaaggtgggctgtgatgagagtcatgatcagtgagtggcttccatggcagaaagttctgtgtagttcttgggggatgtgagtgtaagtttgaggtgctaagacgaatatgtccatacattgtaaactatttcctctgtcctttccctcctctaaccattcctgccttcttcatctttctaactttcccaaggcattttacatcagatttcagatatagaacaatggatgttaaaacaaacccaaattcctaatgcttggtaccatgaaaacatggcaacactgtttgcattttctttacaaatggcctgtatgggtcagcccaggcattgacataggagcccattgtttgc

SEQ ID NO: 50949 - DNA, 1122 bp, Homo sapiens
ctggaaactatagtgacagagaatgattcacaagtgtcaacactcagatgtacagggctgccagctgacccactctacctatttccatctggcactgaactggttgatcatgaacttcttttcataattgctttttagttatgcaggttaagacatgccgaaacagatgtaccggacccacaaacaagtccttccttgaatgcctgaggcttcctaacagtgaaagagccctgttcttagagtaggcaaactgattctgaggcattgtaggtggtagggatctggtagtaggtagcattaggtgggctcccggcactcaccatggagccttgaaattttctgctactttgggggagttgctggttcagagaaggcccttccaccctggtagccatgtggcactggaaggctgtgaaaactctgctgggccttcttagtcatctgttgtgagctcctgatgggagtgtggtgtatccctcaggtgtgctagactggaacaaaggctgagaagtgttgctctgggggttccaacttgtgggcatggggtactgatgagatcagtagtgtttggagacttctgtatgctccatcttcagaagacattctggagtccatataagttatcttgtctcttgtttgaagcaggaaaaaggaatgcgattgctggtaatatagttcactaaagtcagctacctggcctctaacagttatttgcaaagtatattataacattgattcctcaaacatctagattcctatctcgtgccaagtgatgtactaggtgctctaagtacaaaaataaaggaatatagtcctcctctcaatgcgtaagcctagtggaagaagcagaaatgaaagggaaataagaattcaatagagtatgaggcattacagtgaaagaaaccaaatgtcttagaagtacaaatggcagagctactaattctgtctcgagcaggcagggaagagtctatagtggaaatgacttttgagctagattttgaattgagctagtcttttgagccagacttttgagctagaattgtagggttgtcatcagaccagagagtaggaagggtaccttgtgaggaagagagagagagatcagattgttactgtgtctat

SEQ ID NO: 50950 - DNA, 1045 bp, Homo sapiens
ggatagcgctgtgatgaacatttgtgtgcatgtgtctttatggtagaacaatttgtattcctttgggtacatacccagtaatgggattgctgagtgaattagtagctctggtttaagttcttggagaaatttccaaactactttccacaatggctgaagtaatttacattcccacaagcagtgtataaatgttccctttcatcacaaccttagcagcatctgttattttttgactttttaatagtagccattctgactgttgtataatctcattgtggttttgatttgcatttctgtaatattagcaaggttggacactttttcatatgcttgttggccacttgtatgtcttcttttgagaaatgcctactcttgtcctttgcccaatttcaatggggttgtttgttttttgcttgttaatttgttaatcttccttagagattgtggatattagacttttgttggatgcatagttcgcaaatattttctcccattctgtagcttgtctgtttactctgtttatagtttcttttgatatgcaaattaggtctcatttgtcaatttttgtttttgttgcaattgcttttggaatctgcatcatgaaatctctgccaaggcctagttccagaatggtatttcttaggtttccttctaggatttttatagttttaggtttttgaattaaatcttcaatctagttttagttgacaaattaaagattaatccatcttgagttgaaactggaaggggtccaatttaaatcttctgcctatggctagccacttattccagcaccatttattaaatagggagtcatttcctcattgcttgtttttatcaattttgttgaatgtcagatggttgtatgtgtgtggctttatttctgggttctctaacctgtttcattggtctatgtgtctgtttttctaccaatatcatgctgttttggttagtgtagctttataatacagtttagagttgactagtgtgatgcctgtggctgtgctctttttccttaggattgctgtggctatttacattcttt

SEQ ID NO: 50951 - DNA, 1094 bp, Homo sapiens
gaggaggcggaggactgtactctgaggccaaaagccagagtcggccctgaacgcccacgactctcagggtccagaggccgtgagaccggccgcggctgaaaggtaccagggcccctgatgccggagcccgtgtgctcggccctcttgcagacggtacttgcgggctggggtttctttcccctgggtttcgggcagagaacccgtgcggggcgcgcccgaagcgccctttggtgtcccttgctctccccatggtctcggcccccctccttctaagcgcgtgtacccgcgacctgcgtctgcaagtgctgctccacacacagcggccccatctcggcccggtcttccctgcctcccgcttggcccctgtgctgtaagctcgcctggaccccaggccgggcggtgcatagctctgtggcctgtggccccgtgctcagcatgacctaaccagaattaagcagtggacaatgggatttaggccccccaaaccctcgtccgatgacaatgggaggggaagtgtgatttttctcccctcggatggagcgtgctcagctgtaggaatgtgactcaacttgctgaaatgattttctgctctgcggactggtgcaccctgtgacccagacagatgtggagggtcccaccgctctgattagcagaaccaaaccgtgagtgaggtgcacatgtgttactcttaggaccggccctcccagctcttggtttccaatgcctgctgagtagaagaccttcctagggccattaaccagctttgctgacttgcatttaatgacctttcctctttatcttccttgttgtgcaggtaaagaaaccaagtggaagagtgtttcctcctctggccgtaaagcaggtactctctgcagcaccaggtaggaggggactcaacccccttcttgccttttcagttacatcagttcctactagggattccacacacacacagttgttgtgattttgtggtgatgacgagaaaagggttggctaagaaactgggcggcagaaaagaggcaaacattcactgtagccatttatcccgatggaagtggccaggccctgtgggggacattcagcctccgtcagaa

SEQ ID NO: 50952 - DNA, 1049 bp, Homo sapiens
aactcagagcatcccgcttgccaggagaggagtgaagattttggataagcatccaggttctcaaggtggcctcttgggaaaagataaaagcccagatttagattaaaccagatctgtaggacaaagttagaactgactgacagaaaaatctttcctgtatgactgactaaactagttggtaactaaaatgtcattgaacgaatatttattattaaaaaaaatcctacacccaaagatgtcctcaaaatggaggccacagtggcaggggaggtcctggtggctggctagagggcttctcctgtgtggacctttgctggagagcttatttggctggaagcaccatgtcagatacattttggcctgattttctgatgatttccccttctaggtggctggggtggcaaggaggtttggttcgtagcaacaaagtagttgtgagctctttgaacgaaaaggctaatgccctgggagccaaaaggtctcactggtgaggtttgccaaagctgtatgagttcactggggctgccagaacagagagtcacaaactgagtggctcaaaacaacagaagttgattctctcccagttccaggggactccggatgttccttggcttgtggccatatcattccaatctcggtttatatcctaaatccagaatgacctcatcttaacatccttaacttaattacacctgcaaagaccctgttcctgaataaggccatgttcacaggttccagggatgaggacacacgcagatcttttttggcatggggcggggcattcttcactatagcatcgtcagcctaatggtgagatgcgacagtccacagttttcacatccatgcccattacaaaactgggtgagatggccaggccaaaggatggctttgagactttaaaaagcatgctgggtaaaagaaactatttaaactacaggtctgtagttcctcgtaagagcagtgtcccgggcatcgtgcgcttgccagctacctgccattgcctctcttccgggctctgcacatgggtgaaaagccagccctgtaactcg

SEQ ID NO: 50953 - DNA, 1033 bp, Homo sapiens
ccctcattgtttggatgagagggacttgtccaaggtcgcgctgcaagccagcagcacaactggcctgaagtgcagggatcctggctttaccttgggggccttttcttctacaacatgttgccatgagaagtgtctgcatagagaaggtactgatgacccaaaagacgagtttagggtcaattggtgtgctttggccaaagaaaccctggaaaatcctctattcatgaacaggtcaacctgccccaaagagttgttggaatacctcaaaatcaaaagtacaagctttgatatatagtgcctgctggtctgcttggcagctctcctactgaatggaagattagattaaaaaatctagaaagctgaaaaagggacttctctttaagaggtaagcacagtgcaataacagaaaagttgtaacttcagggccccaagaaaggtggtattctgtatactcatgtcaaagtgacagaactgtattatttgctctgtaaagatttactattgctctgtaaagatttgctatctggaaggttatcagtgttacacaaaccattggccataggaaggaacaagctttagttctctggaaagttgcctgtgtataccatctcattcctagatgttcttatccggtgtcatttttttttttgaggtgcagttttgctcttgttgcccaggctggagtgcaatggcatggtctcagctcatagcaacctctgcctccagggttcaagcgattctcctgcctcagcctcccaagtagctgggattacaggctcccaccaccacgcccggctaatttttgtgtttttagtagagacgggttttcaccatgttggccaggctggtcttgaactcctgacatcaggtgatctgcccacctcggcctcccaaagtgctgggattacaggcttgagccttcacgcccggccttctactgccatttttccgaagtcaggtctacatgatttgttgttttatttttagtgtcaattaatagatattcctgagtctctgcagaccagccatttgc

SEQ ID NO: 50954 - DNA, 1032 bp, Homo sapiens
gtgtacaaaaatttctgctgcctgtagtgtcttctcagggaaggcgtaaaacccctcttttcaaggctgtacctggttatgttagaatcacccagaataatctcccttttgagtaattcagagtcccgtcaaagacatcttaagtgcatctgcaaaatccatttacctctgctatgtcataatctgatcacagcagttatatccagcctattcatgggtccctcccatgctcatgagtgaggattatgcagggtgtataccttgggggtgggaattttgccagccatcttagaattctgtctaccatgtttatctaggacatgcttaagtaagactggcattctctttcaactgccattgtatagtggtgaagaatctgatgactcctagtaccatttggtgccactgcctcggttcatgctaagggccagcaggtttactcattgttggttttgcaccacagtgcaagtgccaaccccataaaagcatgattatgaaaatagtttttcataatctatggagcccaggggtccttgaaacactctttgagaacaaccatttgtggagatgaccttacacagccatgtggcatcagtatgttttcattcaggtcagtgatgttttcgatatcagtgtacagcaatcatgtattgtggtgctacagcaggcaggaaggttgctttagatgtcttttgttgtatgaagctacaccttttcagttttacttctgtagaaagtaatataaattaatgcagccttttgagagggcagtttagtaaaatatttgaatgagcagttctacttcaaagcattttccctgtaggtatacgtatgcatgtgtgcagtggtacattttaaatgatgtttgtgatttcttgtgttttgtaccagccaaaaattaaacacccttaaatcccactagtgaaatatacagattctaaaccattcatactctgaagccattgcaaaaaataaggtagagctctggaactgacatgaaaaaggcaagtcacagaacaggatgtatgtagt

SEQ ID NO: 50955 - DNA, 1029 bp, Homo sapiens
cccatccctttcctaacccctggcaaccactgatctgttttccatttgtaaaatgttgtcatttcatggcattcagttttggggggaggcaaaaaaaaaagttgtatttcaaaaatgttatgtaaatgtaattataaagtagataaccctttggaattggcctttttcatgtataattcagttggcatccattcatattgttgggtgtattaattgctcattcattcttattgccaaggagtattccatgggatggatgtaccacagtttgtttacttgatgtattgaccccagtttttggctattatgaacaaggctgctgtaaactgtcatgtatagtatttttgtgtgaacataaatttttctttctttatgaataaatgcccaagagtgcagtgactggatcacatggtagttacatgtttagttttgtaagaaatgatcagttttccatgaagactgtaatattttgcaatccctaattcattgtgtcagtgccattttctctgtatcttcaccagtatttggtgctatcactatttccattttagccattttataagtgtgtggtaatatcttattgtggtttagtttgcatttctctggctaatgatattgaacaccttttcatgtatttgtttgccatctgtatatccttttcagtggaatgtctgttcatgtttttggtccattttctaattagattttttgtttttcttactattgagtttgagagttccttaaatattgtagacatttgtccttagtcagatatatggtttgcaaatattttcttccattctgtagcttgtctttttatcctcttaacagagtcctttgcagaagttttagattttgatgatgttcagtttgtcaatttttccttttattgatcatacttttttttgtgtgtgtccaagacagggtctcactctgttgcccaggctgcagtgcagtggcatgatcgtggttcactgcagccttgacctcccgggctcaagtgatcctcccacctcagcttcccaagta

SEQ ID NO: 50956 - DNA, 1042 bp, Homo sapiens
gtttgggcattctcaggtctttcctggatattcatgctgtcctctgcatgcaggtgtcctcttagatccccaggaaaataaatacacttaatttattagcaatgatggttttaatgaaatcatttaacatctccaaaacaaacaggaccaaaacaaacttgataaatataaatagactttcaataaatttgtcaacttcttgatgggaacttttaaaatctcagcatatcatacctccaatcgacagggactttttaatatataaaatccctttttgagtcttgtgctgacccatctgatcttcctcatcagcacccatcagccagtgtctctgggaacccctagaaccacctgtatgtgatgtatgtgtttgaatgacagcccacaagaccacatcatgctgccacccttttttctatcttagcttatgtttctcgtaactgaggtttcaaagagataggcctctccacctcaccttggtccagatacttatcttgcagagaatgttcttctctgcacgttgtgcattcctctgcttgttttaaaaacccctgaaccacctaggccagagattgtatcgtaaatgacctttatttatttattcaccaatgttttttgagtgccggcttgctgctaggtgctaggcctaacaatgtggaagaggtcactgcccttatgaattgttttctctggaaggagacatacagtacctaaaatattttcagatattgctgagtactctcaaccaaattcaagggggtgatgggatagcaagcgcccaagattaggggcagctactttaaaattaagtggtgaaggcatctctgaggagaggtaatgtgcaaggaagtgaggaaggagacttcgaggccaagagatcagctgtaagagttctgaggcagagaagagccaggcttactctgtggcccggaaggcagcctgtgtggctggagtttggagaatgttggagaaaagacagagaagttgtcaggggacagatcacacaggatcttactagtatattcacaaggttgcacaacca

SEQ ID NO: 50957 - DNA, 1034 bp, Homo sapiens
attaaatgacccaaagtggaggcagacagagtaggcaggtaaaacagacaggataatttcagattaaattatttcaagagtggcttgctattgggaaaagcacttggtgggccgcttgttttacgagtagagcgaaagttgaagtatgcattctctgggcccaggctctgggctcaggactaggacaagaaagaggactggtctcctcactgccccatgggctcctgttatgtgggggttgcaagagccaagctgatgatattacacctggtgttttgatggtgtggaggggacacatcagagaagggctcccaaaggaggtacatcttgcctatctgactgtaacttcatagctcattagccattctctgctacttggatttttctcctccttttttgtcatatcatactggaacatctctcaggcatatccttctcaggtatgtctctgggattggaccttcatggtaatagcagtgattgccaaatgggggactgaacacagatttgttattactcttgaatggtttgaacatggtgcactggattgtttcagctaaatggggcttgcattgctgcttgtgctgtagaaaaggcttatcacttctgaagttcgtcttcccaagggagtttcgttgtgcttttttatcattaaagagattatagtcgcagacctgtgccaaccagctgagtgaccttgagaagaccccttcttgctaggtctattttggcagagctgtaaactaggagaactgactggccttgactgctggaagctcctaggggaaggggaggactgtgcacgcttatcgaacactatgctttacctgtgccagctcactgagtcctcacaagagcccgatgcagcagggactgttttatcatcttcattttacaggcaaggaaactgaggtgcccagcagtgaagtgggtgggtggggggtttgaggcaggactgtcacccagatgatctgattttagcatgtgtgctctttgctgccccaccaccacacagcatggatgtcagagcaggt

SEQ ID NO: 50958 - DNA, 1030 bp, Homo sapiens
tgcctcatgaatatgtactacagttaattattttgagacaaggtctcagtctgttgcccaagctggagcgcagtaggggagatctcagctcactacaacctttgcttcccaagctcaagtgatcctcctgcctcagcctcccaagtagctgaaactacaggcgtgtccccccacacctggctaatttttgtatttttggtacagacagggttttgccacgtagcccaagctagtcttgaactcctggactcgagtgatctgcctgccccatcctcccaaagtgctggaattacaggtgtgagccaccacctccagccatgtacaactattatttgtcaattaaaaaataaaagtaaaaaaggaatgtcttcagtaaacatacagtaattaggaaagtttttgcacatttggaaaaactagaaaacaaaaaaaacaggctgatgagtaggatgaaataggtcccaggagctacctgttttttttttcttttgatttttaaattttagaacattttggatttatagaaaaattgtgaaaatagcagagtcttctcatgtgctacacacccagtttcccctgttcaaaaacctgtataaaaattgatgtatcattgtacatattgtaggggtacctgtgatactctgatacatgtatatcatgtgtaatgatcaaatcaaggtaattagaatagccaccacctcatacatttatcatttctttgtgttgagcacattataattcttctcatctagctattttgaaatatacaataaattcttgttaactagagtcactctactgtgttatataatagtagaacttaatctttctaactatatttttgcactcattttaaagtttaatttttttttttaatagagacagggtcttgttattttgcttaggctgttcttgaactcctgtcctcaagcaatccttctgccttggcctcccaaagtattgagattacaggcatgagccactgcacccagcgtttttgtacccattatctgacctctttatccctctc

SEQ ID NO: 50959 - DNA, 1050 bp, Homo sapiens
ctcccagtctctatcgatgctgtctatttctctgcaccctgtacagctttgacttccacctgcattaatttaattctgcctggattactacactggcctccttgacaacatgttgtcctcacagaaggaccagagtgacctagctgaagggtcacctaggttgggtcacttcttagtctcgaatctgccgttaactctcatggatcaatttgaaattccttagaatgaacctcaaggccattcatgaactggaccctgccacccaatcctgtgcacctcatcctctgtgagctagccatcctgaacttttgtcctttccacaatacaccaggtgtttcacctttctatactgccccttaaccccttcaacctcattcttattgagaatatttacttgagtttcaagatttaatgggaatatcacctgctttatgaagtcttttctgagtatgtccccaagtgacctttatctactttgtttccccgctgttctgtggacataggtttttcagagctcctccaaaaatcacagtagtatactcactgtcttataaaattaaatgtgattgcttgagggtagggttcatgccttgctcatctctgtatttctggcctagggcctgatactgaggaatgctcagtaaacgcactcattgaatggacttcaacaatgaggtaagagaggcaaggtcccacagctggtgaggccagagacaggactccaaggcattgtgcaggctgacttcatgctattggagacctcaggtgggcttccaagtctcataagaccctctttctcacattcctttccagtttcctatcctgagaatgagatgatctacaagtgggaaaatttcaagcttgaaatcaatgagaagaactcctggaagctcttccagtttgattttacaggagtgagcaacaaaactgaaataatcacaaccccagttggtaagcgtgccagggcttggcggaagtccaggaaggtggtagggatgattggagatggccatccatacaaatgctttgcagtcatcccgtgcaaacatt

SEQ ID NO: 50960 - DNA, 1028 bp, Homo sapiens
gagacttggctaggagggtcgtgccctggatttgtggctttttggggtggaagatgactgcttcgttttgttgttgttgttttgagatggttcctgctgtgtgtgaagtgtcacaaatttgcaagcttcctgatctgtggagctttctcgaagattccatggcactgggcttgtgtcttgtttgtctgttctggggagggagggtggcttctctccctaccccagattgcgttagctcatcagagaaggggatgtgtagctgcttgctggctcactggtgccctggagtggggctagcctcagcaggagcttgataaatgtctttctatgcgtgctagcaatttccagtcatccacatccctcaaaatgggatgtggactagttgagaaagctgacgtggtgactggctagggcaaaagatggctctggggtgggggaaataagaaggggtggtcagagaggaaaacagcagggaaaagggactggggaaatggaaactgcccttcaagcatagcaacctgtggtgtcaggaaagagctgaggaggtgacaatggggtgtactgggccacactgaaccagaagacctctccctggtccaggcttagcctcaaattagttgtgtgacttggggcacagtccttcctctatctgggcctcagtttgtccatctgtagaatgaaaaaaaagatctgatttagaaaaaaatccaacatcttttcttatgcgcccctcccccccccacttctcacaccaccaacagtcgactgtttgggagggggtagtgcagagattcaacttcatgctggaccattatgtctagagacatgtgaatgtctgaaaaactgccctggaaaatgccactattccaatgtgtgagtgtttttcaagtttttattctgtctagccccgaaagtgagcttaatggctggctggggaaaggtatgcattgtcagcagctctttaaccccaaggacctcaagatgaggttttgttttgtttgtttattgttgtgttttttttttttaac

SEQ ID NO: 50961 - DNA, 1053 bp, Homo sapiens
tatttgcatttcatgttggctaaatgatgttgaacattttttcgtgtgcttgttggtcatttctgtatctttttttggagaaatgtttattcattccttagcccactgaaaaaaatttggtaagaagctggtaacctttatgtgattctttttttaaaaaacagctttatcgagatataatttacatactggaaattacttgtagcccatcttttaattaggtaattaactttttgttactgagttgtaagagttctttatatattgagggtactagacccactgcagatagatgatgaacaaatattttctctcacttgtggatgtcttttcactcccttgattgcatcatttgatgcatagaagtttttgtttttgatggaatccaatttatctatcttttattttgttccttgtgcttttggtgttgtatctaagaaatcatttcctaattcatgttcatgaagaccaacctctatttttcatctaataattttatagtgttagctcttagaggtagatgtttgaacgagtttgagttaaattttgcatatgataagtgaaacagatccagctccttttgcatatggatatccagttgccccaacatttttcttcattatttttttcttttttctctacagaaagtaatcccaattgattctttttttccgctgctcaaatatactgttgaatcttcatagtaaaattttcattccagttatactttttaacttcagaatttttatttggttctttttttattacttatttattttggttgttgttcatttttgagacagggtctcactctgtcacccaggcttgagttcagtggcacgatcatggctcactgcagcctccatctgctaggctcaagtgatcctcccacctcagcctcccaagtagctgggactacgggcacataccaccatgcccacctgatttcttattttttaattttgtagatacagtgtctcactatgttacccaggctggtcttgaactcctggttgcaagcgatcttcccaccttggcctccccaagtgctgg

SEQ ID NO: 50962 - DNA, 1057 bp, Homo sapiens
caccactctggcttcctccccgtgcctgtgaagagctcggggcctgcttcctaatttgtaaacacggggcgtgtgtctcagtggctgtgagctagcgagggggtggcgagcgagccggctgcgcaggtcctgaggccccaggcctcattgttggccaacaggcagctgggggcgggctgcggccgctgattaaaggccgcctagagcagcctgtgtggcgacaggtgcccagaagcccaggaagccggtcagtgcccgccccaggtaagctggtgtggtggggttggcaaggacagtctccccgggagcctgggggcaagcaggcagaggccagctcgggaccagcacctgtgtgccagggacaagggtggggaggtcgagcccagcgggagctgggtgcactgcatgggctctttcgggtggctgcttgcctgcttcccggcagctggttccagggctggagacccagtgtgctatgccccaggttcccagccaaggcattccggtgaaggggctggaccccgccaaggtgcggtccctgagctgcctctgcctctcccaatccctgctggggactgtggctggaggcaggcagtagagcgctctgaggcctgccttttctgttcagtaggtgacaggagtggggctgacgctcccagagccaaaggtcacaggtgctgtggtcgggggtggcaggaagtgagccccagaagggtcagagctttggctagggggaggatggtacacagcagggcccgggcgaacccctctctccagtcctcagggtttgtgcctctcgctcggacagtttgaggacttgctatccccgtgggaacatcaccatgtccgaggcaccccgggccgagacctttgtcttcctggacctggaagccactgggctccccagtgtggagcccgagattgccgagctgtccctctttgctgtccaccgctcctccctggagaacccggagcacgacgagtctggtgccctagtattgccccgggtcctggacaagctcacgctgtgcatgtgcccggagcgccccttcactgc

SEQ ID NO: 50963 - DNA, 1078 bp, Homo sapiens
gctggcatgcagtcacctgtgtggattaacattttgcaagggtgtatgggttggagtggagcaggagagcctgaagtggggagaccaagttggaggttgtcagtgagacttgctgggaacctgaacgggggcagtggtacagtggtagtagaagtggggtggaggggacagagctgagaggcccaggtggagttgaatcagcaggcttttccagtctctgggagtctgagatgatcttggttctgctgtggacttgcggaatcgaggacgcagccccctgctggaaagggagctctggctgcccatggagtaacactatcgtgctaggtgtgagggctggttgcagagtgggacttctggccaggcctgggggcagcaaggaaaggaggggacagggagagcagggttgagcaggggaggcctggcagatgagcaggatagggtgcttccgggcagtcgagcttgggttgctggcttcagaggcattgaggccagggcaaagggaatgtgctggcaggatggattccagcctccagcagagcgatagaagatcggggagcagaaggaagagggaagcaagatcaagaaggaggatgtgagcaggttagtggccaaggaggggagcacattctggagaaggcctggtgcttggcactagttttcagcgggactgggctcagaacacataggaggttagcctgagagctcccgagtagcctttgtaattgggaaagggggcctggcctgaaaggaaacatcacacctagaagcaagtctgtacccttggccccccatagtctgctgctgctgcctgggatagcagtgggagagtcccagcttcccagccaaagccttctgagcttttgtcctgcctctgccactactgtctcagtcctgtcacttgacccagaagcctggggctgctctgccctttcttcttgtcccatgtgactgcccaaccatcgtggccatttctcagtgtgtggcccagcagggtgaggcgctttcacggtgtcaagtagccaacctccagaagtcttcagcctgcagagctggactccacccatgaaacagcctg

SEQ ID NO: 50964 - DNA, 1048 bp, Homo sapiens
ccgcagcctggctgaagcgacagtgactcctccaccggcccagaatccccacccactcttccccaggggcgagtcgggggaaggggaggaggcggaggaggggcgaggggcggagtccgggcgcgggagccccaccctgttctcgcccctcggcggggcccgcccacacccccacctcccgttctcgcccctcggcggggcccctcccgcaccacagagacgtgggacggccgcgcggactagagaagcggccctcgccggcccgacaaagccccgccccgccccgcccgcgtgctcgctccaccccgccctgctcgcccggagcccgaggcgcctcttcctctcccgctcggagcgccggccctccgctccggggcggggtgggaagcggaggtgggcggagcctccggggcctcgcgagggctggtgggcggtgcccggcgggcgcttccggtttccggccgcggtatgaggggcggggccggggctgctgtgggagagttctgttgctgcggcggggcctgcacgttgactgtgggaaactcggtgagcgggctccgcgcgccgggctgggctccgggaccgcggaggctccccggcccatcgacgagggagagaggcgagcggcgcggggaggcccgggggccggggaatctcggggcccgcagcctacctgcgtgtgagaggcaggggcgaggggaaaccgggcggcgcctctagaagctggtctcgggggcggggcggggggcggtgaagccccacctggaggagcggccgggatgggcctccgggacggtgtgccaggccggggccaagtcggaggcccctcgctctgggtgggcgctggggcccgcgagggctactgtaaggacccctggcttctgaggatactgcgtctagaactttctccgtatggggccttgaggtgcttggtcgagacctgcctttgcgcttggtcccgaatcctgccctctaggagtcgctcttgcgggcctccagcccaccggaggcgaagcggccccgggcggaaggccgctggatcctcgag

SEQ ID NO: 50965 - DNA, 1090 bp, Homo sapiens
atgctggcggcacccggtccacctgcccacccagggcacggactcaccacgaactgtggcaggccggagccattggcaggctgcggggcgtgcgcaggcggctcgcagtacaggtgggtgcgcgtgagcgtcttcaccaggcactcgccgcggccgatgtgcacgcgcacctcctccttgctgatgcccaggttgaggccctcgccctgggacacacatgggagcctaagctgctggcccccacagaggcggcctgagcaccgtggcggggcagggttgaaggtggccctcacctccacatccaggacatggcctggcttgaggcggtaggggcgggcaggcccctcgcggctgaggggtgccaggcgggggttgggctggtacaggaagccctggcccccactggcactggcgaagtccacttgcacgttgtctagggtgaagaagacccgctgcgggtgggctctgtctggtacagcagggctccggcacaggaggaggctggacgagttgacggagcagacggtggagcactgtggggcattcagggccgaccacaggtggagtgagctgggctctgctgtgcgctgctaggggcatggcggcctaccctcctcctccccactgggcatgggcatggtcggggacagccttgtcgcctgctggtgaggggctcacctgcagcagccccccaccgagctggatacaagcctgggggtccgcagcaggggctccacagctcctccttggctgtgggtcctggggctgggccctggaagcctgcacctctgcgtcagcctccagccacacagacagtaggggccgctgcaccacgtctaggccggtgcccctgacacggatcagtcgcccacccctgtaccaggatggcagtcgggtgtgggcgggcggtgggcaacatagcccagcccgcatcccaccttccctcctgcgtggtgcacaggctggcctgcgggctgaccctcacccccggaagctggcactgggctccgccgctacaagctgggggttggcggtgtagcggaaggggctggcgagcagtgtgcgctgggcatggccaaagaccacaagg

SEQ ID NO: 50966 - DNA, 1251 bp, Homo sapiens
catggctctttggccaatggctatgatgcttctgccattggctggaacactttgctgctgcctggtggtcaagtggcagggcatccccaagtgacagggaagaccttggctctgccaccgtctcaggtgtgttctaggtggggcttcttccaggacagcaggtcacttggcacctggcacatttggctcaggcagctttggctctgaagctgtccggcatttccagtcagggcgttggggacattcggcatccagcagtcctttccgaaggccttcctagagttgggtttctgttatcaaccttccagaaatggctggatgtccctacacatttgttttcgatttctaatgccgaagggccattccccagggggccagcagtgcttgtctcagggaggccggaggctgggtgctaccttcttatctccctattctgctttttctgtagcgaccacatgctgcttttgtaataagaaaaagtgatcggcgaagtgataacgtgactgttgtcatggatctgtggtttgttgtaatgatttccctgctgtaccagggttagtttgccagtttttgcatgttacaaacatcgctgagcgggaataactggccaaaaaaataatcagaagcaaaaaagaggagggagggcagggacacgccttttaagaaattttctgaagagcggaaggaggcaggaggctggagcgccttctactttccaggtgctccagcgggccggccctggggactgaggctttggagctaattatctattgtgcccctggcagtgggccatgctgcacagacaggggacctgcctgggcacagtggggacggtccgtttttccttccaacttggctttctgggttagacatcaaaccaaccgctggcatttggtctctgccaggttctaggcgcccacgaggtcccctcgaggaacatcttttcagtaagtacctgcccgtgcccacgcatgtgtctttctccatgtggccgcaattgtgcgcgtgtgtgcacggcctgtgtcctgtcctctgagacgtggtctccaggggctacccacccctcttctgggagttgtactagccagcatccccctgggaaaaggtcccactttcctggtcacggccttgctcttggaaccttggctgattgtgtcttcttcctttctcatcctttctaggaacaaacaattgtgagtattcttctctgcctgttaggtttggggggctcttagttgctttggggttaac

SEQ ID NO: 50967 - DNA, 2025 bp, Homo sapiens
cgggccgggagagtgggccacggcggctgtcacctccttagtgtccttgaaggagcccttctgaggcagtcactcacgtatcccggcccgcctttctcaaaccgcttcgggaatccggttccgggactcaaatttctccacggtttcctctctcgtggaccgctttgccacctatcccggtggcaaagaaccggactttgccagtcatcccccatagtcccccagtcttagagccccagatgccttcccctcgaggcgcctggaatgggaaggagctagggtttctgaggctgcgggggttttgcttctgctcttctccgtgtgcggtcttgcgtattcaggtccgagtcttctttccttacacttatttaagaagaggttaatttaggtcctaggtgggctggaaaccatctgaagcagctgccagccagcacctggccctgatgggtaagaggtttgacctctaggccatgctcccacactgagccactgcgtggccttaggccatttcctcctctctctgggttctagtttcccctttggaacccagaggggaggagacttcatgttctcaaaggatcctgtcaactctgaccttccagaactccgtgactttgcggccactccccagggacatctctacttgccatgttttctccttctgacctctgggggagactgcttgtgcctaatgaaattctcttgacgatgctgacttctcccaccttgctgctgaaaggacggcagtatatagtggctttccagaggctctgatggctccagcaactgggctcctgtaggctcttggtgaagacatgtgtgcctcctccctgacctcccctgtgtgtgtgcctgtgtgtgcgttggggtgggagtaggggacagtgaacggtgggtagctgggcagtgccttgccctgagactgaccgtcctgggtgtgagaacccttacagaggaaccccaggtcttgaatcccactgatttggacgccataggaaaacatgcagccaccattgacacatggtccaacagaaatatgccaaagacagaagcctcagcaggcataagatgtggggtgtggatgttctttctttccatggaaccatgaaagggtgatgggagagcgggaggcgtgtacatattgcatcctgcctcacacttggctcctttgattggtggcttcacagggaagtcagggcacaaggcagagcctttgcgacctcctgaaggaaggtgcctgcatctgtacagtaaggtcagggaagtccatctggagcgctctctgggtcttttgccaaagcccaaaggaacacctggcacagggaccgggtggcagagaggttcagctcagccctggtggtgatgttgccatctgtgagggaggtccatgctctcaggagattggcttgctgccacagctgaagcccaggaggaactactgctgggagctgcaggggtccacccgtgacctcccagggacaccagccttgaactctgacctgaggggccagtggggtgaaggggcaggcgtgctgtgtggcactagctactgtgagcagctcacacacctcctgtcccctaatctttccaacagtcacggaaagtaggtacctccgttctgtgaatttcagatgaggccatgaagccatctcaagaagagtggatggtggatttggaccgaggcctccctagtctccagatcttttttcattttctgatgtgcttgttcactcaggaaatgttccttatgtgccagctctgggccaggtactgtgctgggtcctagggtgacagtattggaccacactgacttggcccctcctctcgggctcaggggttgaggagggagcaatgcagtgataacctagggaagggggtaagtagggccttagggtcccagctcagtagccttagggcatcagggaaagctccctggaggaaggtccatcgaagccgctttctgcgtgcttacaagagcccccaaataagatgatttcagatgttgataagcgctagagagaagac

SEQ ID NO: 50968 - DNA, 1070 bp, Homo sapiens
gaagtgcccccggtctttgcatggctgcatgttgcccaggaaggggctctgcaggaggcaactgggccacccacccttgagagcacaagcagagcaggcctccgtgccaggcacgctgggatcggcctgcctgggagctggggctgaggtgtgagaggatggccagctggtctgacccccaccttctcctgggcagccccccaatcagccatgagtattatgacccggcggagtttatggagggcggcccgcaggaggcagaccgcttggatgagctggagtatgaggtgagccgggtggccaggccagggcccgcagccagctgcgggagccgccccgacgcctgtgtgccttcctgcccaggcccaaccccgtggccctcctggcacgcatctggctgagtcagggagggtgcgggtgaggttacgtgttccgtccatgtcggtgagtccacgtcccatgcacgtctgtcttctgtgtcctgtgcctgtgtgtgcctcgtgcatttcctgggagggagaccactgagtacgtgcgccacgtgggatggtaagagagaccctcaaagcggggcctggaaactgagctcagggggctccagaggaagctgaggggctgcgggctgaggggttgcgggctgaggggctgggctgtgctgcctgctccctcactcacgcatttctggggctttctacctctgcttcctcccggacccctcgtggcaggaggtggagctgtataaaagcagccaccgggacaagctgggcctgatggtttgctaccgcacggacgacgaggaggacctgggcatttatgtcggagaggtatgcagacgggtatgccccagccccgaggcccatccacatggcctgcctgtggctcagaggctgcccttaaggtcccagctaccagaaacagggcatcacagctagggtgctgcgtggtgaggcgatgatggtcgacggcttcagccactgtccagtgaggtagtcatctgcagaaagaggcctgtgcctgggtgggacagcagatgggcctgagaactagcaacagggttgctgtctagcctt

SEQ ID NO: 50969 - DNA, 1057 bp, Homo sapiens
gcgcctctcggctgcccccggccctcactacctgcccgcctctacccgcaggctgcttccacgtgccgcggtgcctagccatgtgcgaggagatgctgggcgccctgctgagccgccccgcccccgccccctcccccgcccccacccccgcctgccgaggcgcggaataaaggctgagtccgctccacctgcggctgtgcgcgcgtctgtgggctcgcgggaggggggctgtcgcgccgagggaggggccggctccagctccggggcagcgcccgccccgcccccaggcccgccccgcgctgaccggctccgcgcattggcccgccccgtgcgctggcctgtcccgcgcattggccaagcggccgggaggacgggcccggcggccgtgcacttccggccggtggccggcccggcgcgcaccgccccttccgccgtcgcccagcgagcccagctccggtcccagccccggccgtcccggcgtcgcttcggagcgcggcggcagctgactgcgccttcacgatccgctgggacccgcgagccccgccgccgttatgaacatccgcaatgcgagggtgagcgcccggggcgggaggctgtccgcgccgcgtgggcgccgggccgggtggctgccgcgcatgctcccgagggccccggccgagcccggcccggtggccctgagtgtgcctgcggccgctggacctatggggctggcccagcccgccgaagaggccggggcgcggggccggggctgcgattccctcctgtttgcgtgatgtcgggcctccgttgggtgggctccggggacctccggggcgcccactcctgttcctgtgctccgggcgttgtgcaaagtcagatcgtcacagtgcctgcccagccccgagggagcggggccgagcagaccgacggggagcaggcttctcacccgtggtcaccgccgccttagactgagcgcgttccactgccctccttccctgcagccagaggacctaatgaacatgcagcactgcaacctcctctgcctgcccgagaactaccagatgaaatactacttcta

SEQ ID NO: 50970 - DNA, 1053 bp, Homo sapiens
gccgcccaccctggggagagacttttgcggggagggaaggcggagctgaggacagccagctccgccctcccaaggctgtgcgttcctgagggccaggtcgggggcaggcatggaggggaggaaaggcgtccctcttggccctccccagagtggctttcctggcaccctggcctgggtgtctggttctgttttcttttcttccccttgtgtttccagtcacctaacttcccttcctcaggctcccccggcccaccctgctcagtgaccccacaggaagcttacacattttctcagaggcctttgtgctcccacctcttctaccctccccctcttctttcccattttaaaaaagaaaagaaggaaaaagaaaaaaggggcaaggagccccgcggcggcctgggcagcgcctgtgcagacctccctgcaggccgcactgccaactgctgcatttgttgtgttttttaggttgcaattggtgaagttcacactttcattgtaattttagcgtgtggggttttgtcccttttttgttgttgttagctgtgtacagaatgtgtaatcttttttcttttctcttttttttgttttgttttgttttgtttttgtttttttacttttttcttcttggctaattcttggcagggatctttctggaggaaaagctggggccagccagggcaggagaggtgtgaaatctgccacgaggggcctgctgtttgccacccagcccaacttcctgttgctggcccctgccctctgcccttttgcctgtcctcaggccgctggaacaaaggaaggacagctcattcctcatgggcgatcactccgcatctatagggtcgagcctaggggagcttgagggagggctggggcctccttgtcctggatttccagctctccccatgccccctccctgagcaccaccggcaccgcctcccaaacagggctgctggtttccgcagccactgctccacctcccccaaatcgtcatggaaagggtggagaatggaggggaaccaggcgtccttggaggcagcttgggagggtgactgt

SEQ ID NO: 50971 - DNA, 1031 bp, Homo sapiens
ctattgctagcctggtcgaaaccgcctgggtaacacaggaatctagctaccatgacaacagtcagagggcctgccgtaggctatagggaagccagggatggaattctctcactgagacagatcctaccttcctgagctagcttgaatccagggaacgacctgtgtgcagtctaccttgtgtaaccctttcccctccgtctctctgcagacaccctgacgtggaataagcccagtctcagcggggtggcgcctcttcctcgcagtctccactcggcaaccaccatcggaaataagtaagtggctgctcacctgcgtctctcttctctagactggcgtggcccctcccccgaagggctctcactcagttttgtcctgtcagaccctaaggcctgaggatgcctctttctggctgggctggcatttggcagccctgtttttccattacgaccctgggggaccaaggaaagacagattcaggggggagagggccacacacaagctgagtctgagaccctccccgggcctgtgaggctccgccctatcaggtacagagtgttctaggtcctctgtgcaagcacctgggtgtctttgtggatgtccaggtcctaaagggaacctagaaactgtggacatgaaggtgagctttagatgagctgaacggcacttttatgtggtagaggtgacacagttctcctgagggctgagccaccaggcaggagagggccacgtcaggaggcttcacgcatccttggggactctcctggggagagccagaggactgagctctagaactggggtagcagaggtggcctctagcttggcaccaactctacaatcctttcccactcttccctcctcactcccagaatgtacgtgtttggtggctgggtgcctctcgtcatggatgacgtcaaagtggccacacacgagaaggagtggaagtgtaccaacacgctggcttgtctcaacctgggtatggcctcctcgggctccgagtggcctgtgggaggctgcaggaggctggcccttct

SEQ ID NO: 50972 - DNA, 1035 bp, Homo sapiens
ataaaatgcagccgggcacggtggctcattcctgtaatcccaggactttgggaggctgaggtgagaagatcacttgaggtgaggagtttgagaccagcctggccaacatggtaaaaccctgtctctagtgaaaatacaaaaattagtggggtatgatggtgcacgcctataatcccagctactcaggaggctgaggcaggggaatcacttgaatccgggagatggaggttgcagtgagctgagatcacgccattgcactccagcctgggcagcagagtgagactctgtcaaaaaagaaagaaagagagaaaggaaggaaggaaggaaagaaaggaagaaagaaagaatgtctctttgaggcagcatattgattgattggttttattttccctctacgccagcccggcaatctttgtgtgtttatccattttcattttaatggatttgccaatatggctgtatgtgagatcttttattgtgataaaatatatacaacataatattcatctgtttaactatttataagtgtacaactcgggggcatgggctttgtttcttcaccctcaacatcctcctcctcctcctccacaccattagaccctgacccccgccaccctcctgctctggctgtgtgtgaggaccagcttaccatttgttctctgttgtcccatctgtcgttggttactttctttctctttttttgccttttctcagtgtcacttttcattattactccagcagttaccctagggattgagtctgcggtgcagtggctcaagcaacgccagagcctcccagcagcgagactgtgtttccgccgggcctcgggtgctcttgttttcgtatattttaaatcccaaaggacactattagtgttggtctaaacagcccattttttacctttctagtgcgttccatgccttcctgcagatctgtttttccacgttagatctcgctctctctctctctctcaaattactttatttcttggcagaaaatagggtcaagaaaataacaagtggataacatcatctc

SEQ ID NO: 50973 - DNA, 1068 bp, Homo sapiens
gtgagtcatgattgtatgactgcactccagcctgggtgacagagcaagaccctgtttcaaaaagaaaaaccctgggaaaagtgaagtatggctgtaagtctcatggttcagtcctagcaagaagcgagaattctgagatcctccagaaagtcgagcagcacccacctccaacctcgggccagtgtcttcaggctttactggggacctgcgagctggcctaatgtggtggcctgcaagccaggccatccctgggcgccacagacgagctccgagccaggtcaggcttcggaggccacaagctcagcctcaggcccaggcactgattgtggcagaggggccactacccaaggtctagctaggcccaagacctagttacccagacagtgagaagcccctggaaggcagaaaagttgggagcatggcagacagggaagggaaacattttcagggaaaagacatgtatcacatgtcttcagaagcaagtcaggtttcatgtaaccgagtgtcctcttgcgtgtccaaaagtagcccagggctgtagcacaggcttcacagtgattttgtgttcagccgtgagtcacactacatgcccccgtgaagctgggcattggtgacgtccaggttgtccttgagtaataaaaacgtatgttgcaatctcgggctctacttgtggactttgttgcaccgaaagccttgagctttcctgatgccttacacttcagggttcttgagcgtccagggtcttgttactactctgggctggccacacccagcacttcccgtgtcaggtttttcctgatgtagtccatgttttttatgctattctaaatggtatctttgattttctagttcatcatgatattatacagaaatgcaattgatgctgggcacggtggctcacgcctgtgattccagcgctttgggaagctaaggcgggcagatcacttgaggccaggagtttgagaccagcctgggcaacatggcgaaaccccgtctctacaaaaagtacaaaaattagccaggcatggtggtgcatgcctgtagtttgagctactcaggaggctgacc

SEQ ID NO: 50974 - DNA, 1731 bp, Homo sapiens
actgatgagcagaggcccccaggcagctggagcgctcagggcagtgccagcgctttctgtgggcaaggcaccgggctggcagcctcgagtccagccttatctaagccgggcaggtgtaggagctaggaccgggctgacgccactgtcttctctccccaagttccaacgtccttctggatgagaggctgacacccaagctgggagactttggcctggcccggttcagccgctttgccgggtccagccccagccagagcagcatggtggcccggacacagacagtgcggggcaccctggcctacctgcccgaggagtacatcaagacgggaaggctggctgtggacacggacaccttcagctttggggtggtgagccactgacccctctgctggctcagaggaggagaagccacaggcaggcagaggtgggggctgcagagtgcactgcgggccaggggccatctgccaagaccccaggaggctgcagctccagggtccccctccctccgaggccctcctcctcaccctgcacctaactgtgtgtttgtaatttgtcttcaagtgggctctccgagttgcccgagcttcagtcccataacatctggctctgcctttgtccacacccttgtcaggcccaatccatgtccacaccagaggcctcttccctgccaaggccactgccatgctctccctcttccctctctccaggtagtgctagagaccttggctggtcagagggctgtgaagacgcacggtgccaggaccaagtatctggtgagccccttgaggcagggccaggagggacacacagctgctggcagccagcaggcacagccccagtggcggggataactggggcgcagtgcccatggatgcctctgctgccacagtggcctcatttttgaaagtaggcagggctccaaacaacttcgtttaccttgccgaggacaaacctgtctgtcctgcagacactatgggccttgtacagaccccacctgggctgggggcagggggaagggcggtcccagggcactgagacccaagctgcagtggaactcagaggactctggccggagaaaggcggtggtagagaagaagcaggccccgaggaacctcctgggccccagcaggctgcagctgagctctccgcaccgtgcagggcagcctgagctgcctcacggtcttactccactcagtctgcctcaccgtggactgtggtggggccaggagactagagacctgggttttagccccagcctgacagtggccttccagcaaattcctgctcccctgtgggcctgttttcccatatgcaaaacagacttcacagaatgtgctcagccagtaattgcttcactgcttctcctcttgtttggggcggttcctgtgtgctgtggggtctccgtcaggattcagccccgctgagaacccaggagccgggcttgagccctccttcctttcccttccccgtccgtccatccatgcatcctgctgaagaagcgcaccaggctccttgggggtccttggacttccccacttgctccccaccctgcagccaaagtgctcttttcaaaggcccctttgccttttctctgctcttggggtgaaggcccagtcccttatgtggttgaccccccaacgccccaggtccctgggactcggggcgctccctgctgcctgcttcacagccttagtatgtgccgttcgctctgcgagaaaagccaccgcccac

SEQ ID NO: 50975 - DNA, 1064 bp, Homo sapiens
cccttgttccagttgttagttactacctcctctcctgacaatactgtatgtcgtcgagctccccccaggtctacccctcccggccctgcctgctggtgggcttgtcatagccagtgggattgccggtcttgacagctcagtgagctggagatacttggtcacagccaggcgctagcacagctcccttctgttgatgctgtattcccatatcaaaagacacaggggacacccagaaacgccacatcccccaatccatcagtgccaaactagccaacggccccagcttctcagctcgctggatggcggaagctgctactcgtgagcgccagtgcgggtgcagacaatcttctgttgggtggcatcattccaggcccgaagcatgaacagtgcacctgggacagggagcagccccaaattgtcacctgcttctctgcccagcttttcattgctgtgacagtgatggcgaaagagggtaataaccagacacaaactgccaagttgggtggagaaaggagtttctttagctgacagaatctctgaattttaaatcacttagtaagcggctcaagcccaggagggagcagagggatacgagcggagtcccctgcgcgggaccatctggaattggtttagcccaagtggagcctgacagccagaactctgtgtcccccgtctaaccacagctccttttccagagcattccagtcaggctctctgggctgactgggccaggggaggttacaggtaccagttctttaagaagatctttgggcatatacatttttagcctgtgtcattgccccaaatggattcctgtttcaagttcacacctgcagattctaggacctgtgtcctagacttcagggagtcagctgtttctagagttcctaccatggagtgggtctggaggacctgcccggtgggggggcagagccctgctccctccgggtcttcctactcttctctctgctctgacgggatttgttgattctctccattttggtgtctttctcttttagatattgtatcaatctttagaaaaggcatagtctacttgttataaa

SEQ ID NO: 50976 - DNA, 1010 bp, Homo sapiens
gagcccctcccggcgagagcagaaaccacctaagaagcccaaatctcccaaagctccaggaactggcagaggccggggacgccccaaagggagcggcaccacgagacccaaggcggccacgtcagagggtgtgcaggtgaaaagggtcctggagaaaagtcctgggaagctccttgtcaagatgccttttcaaacttcgccagggggcaaggctgaggggggtggggccaccacatccacccaggtcatggtgatcaaacgccccggcaggaagcgaaaagctgaggccgaccctcaggccattcccaagaaacggggccgaaagccggggagtgtggtggcagccgctgccgccgaggccaaaaagaaagccgtgaaggagtcttctatccgatctgtgcaggagaccgtactccccatcaagaagcgcaagacccgggagacggtcagcatcgaggtcaaggaagtggtgaagcccctgctggtgtccaccctcggtgagaagagcgggaaaggactgaagacctgtaagagccctgggcggaaaagcaaggagagcagccccaaggggcgcagcagcagcgcctcctcaccccccaagaaggagcaccaccaccatcaccaccactcagagtccccaaaggcccccgtgccactgctcccacccctgcccccacctccacctgagcccgagagctccgaggaccccaccagcccccctgagccccaggacttgagcagcagcgtctgcaaagaggagaagatgcccagaggaggctcactggagagcgacggctgccccaaggagccagctaagactcagcccgcggttgccaccgccgccacggccgcagaaaagtacaaacaccgaggggagggagagcgcaaagacattgtttcatcctccatgccaaggccaaacagagaggagcctgtggacagccggacgcccgtgaccgagagagttagctgactttacacggagcggattgcaaagcaaaccaacaaga

SEQ ID NO: 50977 - DNA, 1050 bp, Homo sapiens
ttctggctgtcctcagatgcctattctaggtaaatgtcagattccaaagaaaatccagttgagatcttttttctttttttgagacgagagtcttgctgtgttgcccaggctggagtgcagtggcacaatctcggctcactgtaacctccgcctcctgggttcaagcgattctcctgcctcagcctcccaagtagctgggactacaggcgcgcaccaccacaccaggctaaaatttttttgtatttttagtagagacagggtttcactgtgttggccaggctggtctcgaactcctgacctcgtgttctgcccgcctcagcctcccagagtgctgggattacaggcttgagccatcgcgcccggcctccagttgggatcttgactggaatgactggtgttcaatcattatagtttccacctaatttgtatttgtacacaggacagttactaatttgttggtacttgtttgatccccagtccctagagttgtttatggggtggagcttcagtccctgctgcttcccctgtggcagcagctggagtcagggtggggacccagggtgctgctggcagattcttgagacaggtagaatctcctctatattggtgtctctctctgtcccagcagtgcccaggaaaacctggccagcctgtcactgacctctccacctagggcactggtggttcaggtccttctatttgccaccggcaaaccgtacttctgccagtctggctcttaggcccagtttctctgatcttgcagattttcttgggctctgctacggaatcctcatacctccggcaggtccctcctttgcccatgtgtttaactgtggtggaatcgtgtgagagctgcttctctcgcatggatcccagccacaccacattctacagcggttcctctgaaggcattgatagagatatttcctcctgttttgcatttcgttggtcatttcagtagaatcagggtgaaataaacatgggggctcagatgtcagcattacgaaccaagtacgtcaggcaggctgatgtggactgacctacactagt

SEQ ID NO: 50978 - DNA, 1048 bp, Homo sapiens
tgaactgtgcccatcaccagacgaacttgttttagaatttaccatcgtaactgagctcccttcagcgcatacctccttggctcctgctcagtctctgtttctccttttagccaaactctctaagagttctctccactcatgggccctcttccttgcctgctgctccttgctcagcttgctccatgaacacttgcttttccacattccatgaaataatcttaacagtcatcagtggctgtcactccttctcagccctttccttgtgtctcttctggtacctcatactctccaggtggccatctcacctcacatcttgaaccctctgggtttgggagaattctcacctcacgagttgatgggaggcctggcgacctctgattgtagtcactgcaaatgccagatgcttatttgcctagcttccctttcggtcagggcagcagttggcaaacggtatctcaagggccaagtccggcccactgcctgttttcgtaaatgaagctttaccaggacccagttccaccccgtcctttgtgcattgtccaagactgctctcctgtacaacagcaggtgggctggttgtgacagatactgtctggcccacaaggtggaaaatactatctggccccttacagaaagaaattacctgagttctacacgagggtgtaggtatgtaccctggcctctgccagtcagactcacatgctaggaggagcagggccaggcaggagagccgtgtctcctggcattggggctgcaggaaagacgagctcctaggccacagtgccagtggccagtgctgctgccttgcagggtcgcacaggcagtgctggctgtttggactggcttggcagaaggatttgaagtattgttcctagccaactggactcaaacctgttcctccaaccctctagggattctcttatcacccagtagccttttccccctagttttaaaaattgcagtaaaatacacaaaagataaaatgtactgccttaaccatttttaagtgtacaattctgtggtattgagcacatttatattgtgcaac

SEQ ID NO: 50979 - DNA, 1035 bp, Homo sapiens
gacagtgagggattagtcatggtggtggcagttgagtcacaaaaccagcagtggtggctaatgtccagtgatgacatgcaacagtgcccagggtgggtgtcccaaccagcaggtccctgcagtataaccttggctgtgtttgcagtggtgcagcctctattcctgctgcttttctgagcctagttctctagttctctctccatttccagatctgctgcccaagaactcctttgtgattgaatttaaccagagttgatttctgttgcttgaaactcaggaccttgatgcagtgtgcagggtctgggcaaggtaaaaacacactttcatgatttcgcctcaagtatagtagatgagcttaggctttttgagccaggtagccttgggattaattctcagctcttgcacctagcaggtgacctcagcaatcaagtcacttgccctccttgagcctcagtgttgccctcagttaaacattgctctcgtgtgttgctgagcattcagtgagattgtatataaagtgatcattgtgaaggtattgggacataatttgggaaagcgtcctggtctaagcttttgattggctctccatcatttgggtaatgggatagtgatttaggagtatcatagcagctcaaggggcccttctggaaagggtatgaggaaggtcagggacaagtctgaaatgaatcatcctaggcttaatgcctgtgactgggcagtgggtacaattatctcaggctagtcagtagtcatttattgtgagaatacatgggcagattttttaatttccttctcagtctagacttgaatgcaaacagttcttattgctaacttaccactagtcaccactaatgaacaaagactatgaacaggaaattcataaaagaagagatacagatggccaatgaagataggaaaagagttctgcctgctggtaatcaaagagatgcaaacgagaacaaaaatgatgccttttcacctaccaaatttgtcaagattaaaaagaaagcaaagagccagcgtcagctgatgttc

SEQ ID NO: 50980 - DNA, 1052 bp, Homo sapiens
ttgcccaggctggagtgcagtggtgcgatctcagctcactgcaacctctgcctcccgagttcaagcgattcccatgcctcagccttccaagtagctgggattacaggtgtgcgccaccatgcctggctaatttttgtatttttagtagaggcagggttttgccatgttggccaggctggtctcaaactcctgacctcaagtgatctgcctgcctcggcctcccaaagtgctgggattacaggtatgagccaccgtgccaggccaaaaaaagatttattaggatacatgaagcaatagctattaaaagaaaaaataaattggacttcattaaaatttaaaacttttggtcctcaaaagataccattaagaaaatgaaaagacagagctgggcgtggtgaggcttgcctgtagtcactactgggtacttgagaggctgaggcaggaggatcacttgagcccaggagttctaggccaacataggcaatatagtgagacagtgtctcttaaaaaaaaaaagaaaaagaaaaaacaaaagaaaataggctgagagctgtggctcatgcttgtaatcccagcactttgggagtacaaggcagatggattgcttgagctcaggagttcaagaccagcctgggcaacagtgaaatcccatctctacaaaagatacaaaaaattagccaaccatggtggcgtgcacccgtagtccatagtcccagctactcgggaagcagaggcaggaggattgcttgatcccaaggaggtcaaggctgcagtgagctgaggtcgcgccaccgcaccccagcctgggtgactgagtgagaccctgtctcaaagaaaatgaaaagacaagtccaccaagaaaacagttgagaccagtcatagaaaaaatagaaagtcatatctgacaaaggatttgtattcagaagaattcctataactcggtaataaaaagacaacctgatttttaaagggtgaaaatattttaatggatacttttttttttttttttgagacagagtctcactgtgtcacctaggctggagtgcagtggt

SEQ ID NO: 50981 - DNA, 1057 bp, Homo sapiens
agcagtacttttttaagctgtactaattgagcatttattatgtgtcagttactgtgctagctgctggaaactatcctaccctcagcagtcttctggtctaatgggaggtacagacaggcaaatgggctatgactttacaagaggctaacttctgtgatggagagaagttccagccactaagggagcacataaaaatcagaggagatcctaccaagaattgggaggtaggtcagggaggagacttctttgaaaaatggcatctaagacctgaacagcaaggaaacattagctaggtcaaggacaaagcatcagtggggagagatgcatgagtcttttggaaggaccagcatgtgtagaggctctgacaggagagaatctctcaggcccattcagagagtccactgtgtgaagacgaggcatgaacaaccagccaggacatgtggagaggagcatttttctttttttcttttttctttcttttttttttttttttttttttgagacgtctttctctgtcacccaggctggagtgcaatggcatgatctcggctcactgcaacccccacttccagggttcaagcaattcttctgccttagcctcccaagcagctaggattacaggcacccgccaccatgcccggttaatttttgtatttttagtagagacggagtttcaccatgttggcctcaaactcctgaccttaggtgatccacccgtctcggcctcccagagtgctgggattacaggtgagagcccccacgcccggccaggctcggctttctttccaggccccgtcacactcttagatgttccctgggccccagaaggcagcgtgaggtgctctgcccatctatgctgtccttttccaccccaccctatccactgggcccctggggctcccactccactccaggtctcttcatggacccttctttcccttcacttctgtcccaggagacctgggagactcatgggaacaggcatcatcttctccagcacagttcattgtctaatgcacgaaagtgctgggctgtgagaaggtcaggagcttacatg

SEQ ID NO: 50982 - DNA, 1047 bp, Homo sapiens
tggggccctggccagggtggaagattagatgttggacttgtctctaatgcgactactcctaaatgactccacgcgggagagccgattaggagttatgggggctgctgtcatcttgactcaggggctttgtcactaacagccgatggctgctacagctataggacaaggaaccatttggccatttgcctttgacactttaaaaagatcgtggtaaaatatacataatacaaagtgtaccatcgctaccgtgtgtaagtgtatagtccagtcaccaccatccgtctccaaactcttttcattgcatgaaacggaagctctgtcctcatgaaacacccatgccctttccccacccctcagcctcctgcacccacccttctattcctatgcatttgggagctctgagtgcaatcctacgggtgcatggccttctgtgcctggcccggatcacttatccgttgcctttgtgtatttggaatggatatccaaccattggattttcatttttgtgtggttaaacatcatttgttccctttttgacttctgaccttcctacctcgtttgaagaggtccgtaaacgcacaccgtactccgccctctgccccagctgccgggctctccacacttgccaaggccccctactcggtacagtcttgatattctcagctcagcctcataatctcaccctggctgctgtaggcctcctaagtccctgcccgtccagccgctctaagtcacagagtgtgaatgtggcacgtccaccctctgtgtccttgagcgtggtggtcactgtgtcctcatcaggaagatggggataacatttacttgctgtaaggcttaaataagatcatccttttaaagagtcttagctcagtctttggtacagaaaactcagccaattattcattcagtgggtacttattaggtacttttgtacctgttctaggtcccgggatgcagctgcagatggagatcccgtgctccgcagctgcagctgcctttctagttgggggagatgagtaggatggagaacagaaaaaggaagacagg

SEQ ID NO: 50983 - DNA, 1029 bp, Homo sapiens
aggacaccagcgggaggaagggggctgggacctgggactgaggacccctcttgcctcaggcaacaacatgctgctggtgggggttcatggcccaaggaccccctgcgaggagatcctggtgaagcacgtgggcagccggctctacagcgtgtcctacctgctcaaggacaagggggagtacacactggtggtcaaatggggggacgagcacatcccaggcagcccctaccgcgttgtggtgccctgagtctggggcccgtgccagccggcagcccccaagcctgccccgctacccaagcagccccgccctcttcccctcaaccccggcccaggccgccctggccgcccgcctgtcactgcagccgcccctgccctgtgccgtgctgcgctcacctgcctccccagccagccgctgacctctcggctttcacttgggcagagggagccatttggtggcgctgcttgtcttctttggttctgggaggggtgagggatgggggtcctgtacacaaccacccactagttctcttctccagccaagaggaataaagttttgcttccattctcctttgcgtggctgtagctttgttggggttgggggaccagtcaaggccaacctgacaggggtgccaatgagcagatcaaagcatgggctgagcacaggtcacctccctccagggctcctgcttcaccccaccctgactccagaaggcaccatctatctttgcttcctctgcctccctgagttcaagccaacgtaaggagaggaacatgtagcaacctggaatggagcccaggcagcaaggaggcaaagagctgggcaggagagcccattactgggtagggtggtgtcaggaaggctccctggtggaggtggccagataatcaacagcaggcccggccgggtgtggtggctcacgcctgtaatcccagcacttcgggaggccgaggcaggcagatcacaaggtcaggagatcaagaccatcctggctaacacggtgaaaccccgtctctactaaaaatacaaaa

SEQ ID NO: 50984 - DNA, 1028 bp, Homo sapiens
tggctcacggcaccctccgcctcctggcttcaagcaatactcctgcctcagcctcccaagtagctgggattacaggtgcccgccaccatgcccagctaattttggtaattttagtagagacgagatttcaccatgttggccaggctgttctcaaactcctgacctcaggtgatccacccaccttggcctcccaaagggctgagattacaggcgtgagtgaccgcgccctgccctcctttttgtccttatgactgatggatggcccatctggcaggcagcctgggcccgcccgtgtccctgtttggtgagggcaggaagccagggcaaggggaggcaggtggaaagtcaagcaggaggtctgggatcggggcatagtgtggccttggctcctgaccccttcttccctcaggtgaaggcgtttgggccggggctgcagggaggcagtgcgggctcccccgcccgcttcaccatcgacaccaagggcgccggcacaggtggcctgggcctgacggtggagggcccctgtgaggcgcagctcgagtgcttggacaatggggatggcacatgttccgtgtcctacgtgcccaccgagcccggggactacaacatcaacatcctcttcgctgacacccacatccctggctccccattcaaggcccacgtggttccctgctttgacgcatccaaagtcaagtgctcaggccccgggctggagcgggccaccgctggggaggtgggccaattccaagtggactgctcgagcgcgggcagcgcggagctgaccattgagatctgctcggaggcggggcttccggccgaggtgtacatccaggaccacggtgatggcacgcacaccattacctacattcccctctgccccggggcctacaccgtcaccatcaagtacggcggccagcccgtgcccaacttccccagcaagctgcaggtggaacctgcggtggacacttccggtgtccagtgctatgggcctggtattgagggccagggtgagttgccctgccgtgggg

SEQ ID NO: 50985 - DNA, 1020 bp, Homo sapiens
gccccggggcccctactctttgagcttctactgtctgggcacatgctgtttttcctcccctgctggggcccttcctcctctcctctcctcgcccctctccatctctctcctcacgctttcaccttcggaagagctcgctccagctgtctagaaacctgctgctctctgctctgcccacagggtcaacggtacttggatctgtcttcttcttggaagggggaggctggggggctctgggctggtgtggagcaggtgggaggaggcctgccatgtcctggcccaggccacagttcctggggtcacagtcccttccagttctgtcttgcatgtccccctccagccaagctctgagggacccaccaatcctgacagcccggccctgtgggaggcaagggaggggtcgcccagccgagctgctggtgctcagctggcccctctgcctgcagcctgtaacccgagtgcctgccgggcggttggccggggcctccagcccaagggtgtgcgggtgaaggagacagctgacttcaaggtgtacacaaagggcgctggcagtggggagctgaaggtcaccgtgaagggccccagtaagttggcctggagccaggccaggatgggtggcggcagcccccgggttcactgctgggcaggcctgaggccctccttgtcttggcagagggagaggagcgcgtgaagcagaaggacctgggggatggcgtgtatggcttcgagtattaccccatggtccctggaacctatatcgtcaccatcacgtggggtggtcagaacatcgggcgcaggtgaggcccccaggcatccctctcccagctctgcacactctgcctcttctcttccttctgcctccccacctgatgatgaggggccacatgggctcttcctgcctggccgccacagtggggcccacgctggctcatgtggtgatcctcggtgttccctgtgtggctctcgcatttgcagtcccttcgaagtgaaggtgggcaccgagtgtggcaatcagaaggt

SEQ ID NO: 50986 - DNA, 1394 bp, Homo sapiens
accttcctcttcctcagccccagccccactccaggtcatgggccctggattctgggccagctggagtcagcctcctcctcctggttccccataggcccctgaggtgtgtggcggacccctgctctggcagctgtggacactgtccagctgttctccagagctgcccatctgcaggctgggtctgccctctgcccttcctctgggcccagggcttctggcagtaatcataccctgctggcatcgtgtgtgtgtgtctgtgtgtatctgccctcaccccaaagtctccttcacctctgaacaccccctgggaccctgggcagagagggcctcatccacatcctaccactggccaagagggggtgtctacctcctccttggcccctgctaccccgtgctgccagaccctgaccccaaagcctgggatcggcccctcccgcacagccgtgtgcccagcgtggccactcttctactcacagacagcaaggccatcgtggacgggaacctgaagctgatcctgggcctcatctggaccctgatcctgcactactccatctccatgcccatgtgggacgaggaggaggatgaggaggccaagaagcagacccccaagcagaggctcctgggctggatccagaacaagctgccgcagctgcccatcaccaacttcagccgggactggcagagcggccgggccctgggcgccctggtggacagctgtgccccgggtgagggggcgcagaggcaggagagactgggctggggtcacccatgggtggcccttgagggggttctgcggcccccagactcacagcctcccttgcgccacaggcctgtgtcctgactgggactcttgggacgccagcaagcccgttaccaatgcgcgagaggccatgcagcaggcggatgactggctgggcatcccccaggtacacccgcccggcctggctacagctgtaggggaccggatcggcagttgggagagactcggaggcccgatggctcctgttttctgcctgtgacaggtgatcacccccgaggagattgtggaccccaacgtggacgagcactctgtcatgacctacctgtcccagttccccaaggccaagctgaagccaggggctcccttgcggcccaaactgaacccgaagaaagcccgtgcctacgggccaggtgagggagccccaccaggggtgcacccgtgtgccaacgtcttccccataagacagtgtcccatctaaacgtggcggtccccaggggtcttgggttacatggcggctaggtgatcaagccacccaagagtcagacaagagtgggtttttgggactagtgaaaacgacaagagaatgctaataggttcctccagtcacagaagcctgctgcgtggggtcctcggg

SEQ ID NO: 50987 - DNA, 1031 bp, Homo sapiens
cttctctggaggccaccaaggtggccacctgggcctgtggttgaggctctgggttgggagttgacttgggttttctatctcctccctggcaggctacctttggctgtccccagtctgtctcctggcatcaggcgcagcctcccccaacacccagttgcttcatctaggaaagccaatacctgatcactagaattatatgcccaactggagtcagtagggccagagtaaggggtagggagcttccactgaacatggggagtgatgccccggttgctccctgcaggctctgagatggagaggggactctccaccttgttgactggtaataggtcacctgagtacttttttgtttgtttgtttgagacagtgtctcactttgtctcccaggctggagtgcagtggtgcaatctcggttcactgcaacctctacctcctgggttcaagcgattctagtgccccagcctcccgagtagctgagactacaggtgcgcaccaccaaacccggcttcttcttcttcttcttcttcttcttcttcttcttcttcttattattattattattgtatttttagtagagatggggtttcaccatgttgcccaggctggtctcaaactcctgggctcaagcaatctacccgcctcagcctcccaaagtgctacaggcatgagccactatgcccggccaggtcatctaagtagtttttctaattccatttccccctgttcctagagtagggagtttttcatctgaacatgacttacacttgagcaggaagcatgccaaggtcggcctggcttagcccccggcccctgagcctgactgcctgtgtctacacttcgcggtgtaaggagggccaggctgccctgccgcaggccccgggaggctccacactaacagaaaccactctgtatccacaggtccagagagctcggtgactgcaggtaaggcccctgtcacctccctgctcctcccctttgtgacatccctgcctgcccccggtcccgtagggcttcggttttccatttattcc

SEQ ID NO: 50988 - DNA, 1037 bp, Homo sapiens
gtttaaaagtagatggactggtttagtggcaaattacgcaacatcaaagagagaatgcgggaaccaaaaactggctcagaagaatgtattcagaatacaacccagaaagacaagttcagggaagacactaaagacagaggaagaagccgcaaggagaatgagaaggtgttccatacatttaactgatttcacagaaacagaagacagcaagtatggcagaagcaaaacttgaagatataatgatggctggctgggcatgatggtcgctggccaggcgtggtggctcacacctgtgatcccagcactttgggaggccgaggtggccggatcacctgaggtcaggagttccagaccagcctagacaacatggtgaaaccccgtctgtaataaaaatacaaatattagccaggcatggtggcgcttgcctgtaatcccagctgcgtgggaggctgaagcagaatcacttgaacccgggaggcagaggttgtagtgagcctagattgtgccactgcactccagcctgggcaaaagagcgagactccgacttaaaaaaaaaaaaatctttcaagtatgatggtgaagtgcaaacaaaagcaaagaatttgccaccaacattttctcaccaaaaagtgtgtgcctcaagcagaagaaacccagtactagatggaacaatctgagatgcaagaaggaataacgagctaaagaggtcaatgtgcagctcacctaagtagacattgggtgtttgtaaatacagttttatgggaacccagccacacccatttgcttacatgctgtttgtagtggcagagttgagtggagtcttcccttggtatccacggggattggttccaggacccccaggggtatcaaaatccacagatgctcaagtccctgatataaaatggcacagcatataacctacgcacatcctcctgtatacttcttttttttttttttttttgagacagagtcttgtctgtcacccaggcttgagtgcagtggcacaatctcggctcactgcaaccttcgtctcccag

SEQ ID NO: 50989 - DNA, 1026 bp, Homo sapiens
cagctacttgggaggctgaggcaggaaaatcgcttgaacccaggaggtggaggttgcagtgagctgagatggcaccattgcactccatcctgggtgacggagtgagtgagactccatctcaaaaaaataaaaataaaaagagccatacctgcatcagccacaaaccttaacagccaggactctgaccgttaaacccttagtccaagaagcagactggaggagaaggtaactgaggttgctttctccatccccaccccatgctgtcacaaggcactgcaacagagcaacccaggccacaatgatagcttatgactcctggccttcagctcttattagacacctcattgagagcatccaagcttgctgtgtgagttggagcaagtgtcttccttttcctgaacctcagcatttcgtgtagcaaatgacagcttttgaaacgagggcccagggtccttaggcttttccaagctgattttgtcatttcactgcctccgcctgtggccagcttcgggttgggcaactttgttttgttgaaatcagtagggttcccctttgctctcctctgttctgagagtgacaacctgaggctttcaaagcagaaataggaagtgccagctccagcactgtgggtaggggacaaggggtcctctctctgaagagcctcgtggtttgttttttcctcttcctgctgggggggagatgggaggtggcgtgctcaggcagcacctggaacagctccggctcccgggcttcttccacgcctgatgcctcactcggtgcgggaggtaggcagggtggcacttgagggcacgtgatcctagaatctgctgttccaggaaagcagcccattctccgttcattgagcagacagcgattgggtacttctgggccacagcagccagtccctgccctcctcatgggacctatgtgctattgcggccagggaaccacggcaagtaagcagaccagcaagagttcaggctgacgtgtgtttcagaagatacacatgggccctgtgtccccagt

SEQ ID NO: 50990 - DNA, 1080 bp, Homo sapiens
ggcgatgccttccatcagtcggatacacacatattcatcatcatgggtgcatcggtgagtatctcccaggccccaatcttaaaagccaggaagtgcctgctccatgcctcagcttttccaactaattgttgcagggccccacaggctctgctaagttgagctcctcctcccgctcctgctagtgcgccaggatcatcccggctctacctggtgtgcatatgcacttgcaagacttttttttttttttttttttggagacggagttttgctctggtcgcccaggatggggtgcagtggcgccatcttggctcactgcaacctcggcctcctgggttcaagcgattctcctgcctcagccccccaagtagctgagattacaggcatgcaccaccacacccggctaatttttgtattgttagtagagacggagtttcaccatgttgaccaggctggtctcaaactcctgacctcaagtgatccgcccgcctcggcctcccaaagtgctgggatgacaggcatgagccaccacgcccggctgcaggacgtttctgaaccctgtgcctagccgctgaatgtagcccttaatcctggagttgcaggctctttagggactgtctagatggacttcttggggaaaacagggaatgctattcattctgtagttttttcagacctgttcatgccttaacaaatgagttccaaaggcaggatctgaggcctgatctctgcctcttcactaacacttcaagttccgtcgatacaaacacttagcttttctttgaacactgtctctttgcctcaatttcgaaagcctaccaaggagctctgcctcaccccacctggccccaattgtccagcttgtagaaccgccattctgcactcataggaaagacaaaagaatagtatagcatgaggatttccatgggaggggagggaggggtggtcctaggacagccatcgcccgagactagagcaccctcccctgtgtcccatggggcagtgagactgtgcaggggctggtggaacaagggcttcatctcaaattacacgtggtctcagttttcacttttaaccctggat

SEQ ID NO: 50991 - DNA, 1035 bp, Homo sapiens
gggatttgggttcttgtacacagatacaacacggccgccaaggaagagtgaggaagatgggaaggagtaccactttatctcaacggaggagatgacgaggaacatctctgccaatgagttcttggagtttggcagctaccaaggcaacatgtttggcaccaaatttgaaacagtgcaccagatccataagcagaacaagattgccatccttgacattgagccccaggtgggtaggcatggaagggcagggacagatgggctcagccacacaagggatggcgaagacagtgctccttgggaatcttctgggggctcaggattgcttcagccttttaatggggtcagcctggaacaagaacagtagtactgggaatgatggaaagttgtattggggtaaagctcaaagctgcttattagaaggaatccattatgacagctatgtaggtttttttttttcactttccttttcttccttcccccccctccccgccgcccttcttttttttttctagaccctgaaaattgttcggacagcagaactttcgcctttcattgtgttcattgcacctactgaccagggcactcaggtgaggagaggttgtgcgcgatgggtagttcactttctccgggcctgcccatactgggacctcagtccaggtcattggccagagtgctggctggaggtcacagctccagctgggcttcttcctccagggccaagaagccaaagggtatgcacattcgttccagctcttaagccactagctaggccagtgcccatgctacctaacagggacaaaacaaaccagacccagtcatcgtcctggaggcacacagttccaggggcagagatggacagttgagcagatcctgatactggtgggatgcaggctctggcaggggaagctgtgatggacagaggtggcactgaacccgccctggggtgcagtatggctgtggggaaagacagagaggccaggaatatatcaaaaagcctaccctgctcctctgcccagccctacccatgcactttgc

SEQ ID NO: 50992 - DNA, 1072 bp, Homo sapiens
ctaacagtaggctgagcaaatatttgttctttcctatgttcactgtcacttaatctaattgtttggattagaaagccaacttcagttgcccctgctctattcacccccgccaccgcccgccccccgccaagtttgtttttcatctctttttaaattccagcttcctttgagcaactgcctctgccctttgaaccctgctgcagatgtttcctctgaaggggctttcagagcggcaggcattgccactccagcactttgtctgattaaaggccagaggctgcagaacaaaggccagacatggagtcctgggtgagtgtttattccctggctcctcctgaatcccagcagtcatccttaacagagccacttccgccctgccttgtcactggtcaggggcaggcctgccatagctctgtggcctcctatatccactacagatgatggtggctgctttgagaggatgatgtggaggttgtgaactgaactctgagaaatagaatctagtacctttgacctttattatttgttcagcattactcatgtcactgacagtatatgtctgcatatcttttctcctatgatgtgtcagtaatgaggagacatggggactagttgaaggagttctgtaagatgaggtcacagagagctgaccctccctttctgagagtctcatgaagacagggtggctcagggacaagttcacggtggagaaaattgtgctttgcttttggaaaacttactgttgcaagtgtgtactttagttaccacgttggaagtttccgtttttcttagtcatcatttgcaacttctgggtaagcgtgatagtgactcttagtcatcgtaaagaggaacgtcttgttggataagcacatctgaaagaccaacctttgggatggcaactcttgaacttttccagctggaatggttctgcctctagtaagctttgctgagtctttaatttaaaggctgacatgtaaaaagcaatcactgtaataaagctggataagaagaatatgacatagctaggcatggtggctcacacctgtaatcccagcactttgggaggccgagg

SEQ ID NO: 50993 - DNA, 1052 bp, Homo sapiens
attaagtggaatgaagcaaacagacctggaaaagttccctttctgagagtagcaacagaaagctctgcaaagactccctccaagctattggatcctcttgcttgggataaccactatggtactcagataccaaaagaagagtggaaatcccaagagaagtcaccagaaaaaacagcttttaagaaaaaggataccattttgtccctgaacgcttgtgaaagcaatcatgcaatagcagcaataaatgagggacaaaataagcccgaaatagaagtcacctgggcaaagcaaggtaggactgaaaggctgtgctctcaaaacccaccagtcttgaaacgccatcaacgggaaataactcgtactactcttcagtcagatcaagaggaaattgactatgatgataccatatcagttgaaatgaagaaggaagattttgacatttatgatgaggatgaaaatcagagcccccgcagctttcaaaagaaaacacgacactattttattgctgcagtggagaggctctgggattatgggatgagtagctccccacatgttctaagaaacaggtatgaatgcattggttattcctttgctctgctcttgtgacatttgactttaccagatgatgacaccaacaatgagagttagaggatgaaaaatcaaggtgtcttgaaactcttactctggtgagatagagagaagagaggtttacaagagggtagaggaatcagggacaagaaggagcaatggggagcaggaagaaagtcaacctcacctatcaaccttatgagctgcaggggaaatcttagtctcatcagagaactttaagcaaggcagaaggaagaagcaagttcgtgttaaagaggttaaggacttggggaggattggttttcatgatactggggatccagagggcaaagtaggatgattttatttttaggtgagtagagggaggttgagcagtcaagtagtacagagaaatgtggaatataaacataaggagagtcagtcagtcacaaatatttatggaacacctactacatgccagacac

SEQ ID NO: 50994 - DNA, 1046 bp, Homo sapiens
accattaagtacaattacttgtaaattttttcatagatgccctttgtcaaattgaggaagtttccttctattcttggtgtgagagtttttatcaagatttgatattagattttgtcaaatgctttttctgcatctattcaaatggtcatatggtttatcttgtttattctgttatggtgaattaccttgattgattttttaatgaggaactagctatgtattcccagggaaaaaatccacctggttgtgacatattacattggtaatattttcgctatggactgaattgtctccacctccccccaccccaaattcatatgttgaagtcctaactctcaagatgattatatttggagatagggcttttaggaggtaaacaaggttaaatgaggccataaggatggagtcctaatctgataggactggtggcctcataagaagagagaaggttctctctctacactcatgcactgaggaaaagccatgtgaacatacagcgagaaggcagccatctaccagctgggaagagggctccactagaaactgaccgtgctggcaccctgatattggatttccagcctccggaactgtgagaaaataagtttctgttgtttaagtcacccaatctctagtattttgttatggcagccctggccaactaaaactgttttgttaagggttttggtggtgatggtggttttttagtttttgcgtctgtgttcatgatggatatttggctgtgattttcttataatgtcattgtctggttttgatataagagtggtattagtccgttctaatgctgctatgaggacatacccgagactgggtaatttataaaggaaagagatttaatggactcacagttccacatggctggggaggcctcacaatcatggtggaaggcaaaggaggagcaaagacacatcttatatggcatggtggcagacaagagagcattgtacaggagaactgccctttataaaaccatcagccctcatgagacttattcactataatgtgaacagcatgggaaaaccccactg

SEQ ID NO: 50995 - DNA, 1047 bp, Homo sapiens
cagagaaagcaaaagtatgcaaaataaagaatggggaaataactattagaagaaatttaagacattataagagactactttgcagacctctgtgcaaacaaatttcaaaatctagatgatagagataatttcctagcaaagtaaagattacgaaaaacaactttattagagatatgaaaattgaagagctcaatcttcatagaagaaagagagaacattttttaaaaagaagaaatagagaaaattataaggaactacttaccaaaaagtatcaatccccagatagtttcacagggaaatgctaccaaactttaaaagaccatatagtctcaaagtaactttgcgaaacagtgtttcttctggaaaatataaaacaaaatataaagaaactatacataaatattgtactctaattggcaaagttgtttctcaaggggatatgtgtagacaattctgaaacagccatacatgtatactaagattgaaaaaataagtaaatgaactgtaggtgggaagtacaaataatcaagaaggctaggatgaactatgtggtactggattcgattcagagacatcggtatgtactcaagtttaacttaatattgatagaggtgaatagatacaaaaataattacatgtgcgtatatacatgagtcagtatacatatgtatagttcctagccctgtgtcctgagagggcctagaagcaatagtaccctagtagcaacaagcacacccaatgctaagaccttggattctaatatcattctccaataaaaggaactagagctacttggagaaataactgattctaggaccaaggcaggggaaatacaagatgggcctggagaatctcatagcaccagaaagtaaggaattgaggaaaaaaaaaaaaaaaagatgaagtcatggcaaaggaatagaggagtcatcctgaaagattgccaaatttggaaaaattgcctcaataaaatatagatactcctcaccttctgatggggctatgacttaataaacccatcataagttagaaatattgtaagttgaa

SEQ ID NO: 50996 - DNA, 1049 bp, Homo sapiens
tatacaagtcagctctaaggagttttcacagaagccacacccaaaaatttccatttacagctcattgtccagaggtaattcatgtggttagatctaagtagtggtatataagtgtgttatctgccatagtttgcccctctgaccacccaaataaatgtatgtatccctcttctcacatatggaacacacagttactacagtcggcttaaagtccagtacctttggatgatgtgcaatatctccattagatactaatggtcaagcagtcaaatatattaaaaattatctccacccactctttgacacacccatttttaaaagtgaagattcgataacacacaacaaccactggttcatactagttcataatagttaccatgacttgaaaaaggactgaaatattgtttctacgttttattgttacaaacactgctaaaaggaattgtctttttacaaggccctccacaacggttagtcttccatattgctggatatgggaacccttccatatgaactttgttttatctactttttaaaagccttgtaaacacccacattaatggaaatggtggagtagggaattccagaactccattctttcataaaagcaatgaataggctggcaaaactgtcagaagcaactttttcagaactctggaatctaagcaaaaattacagcagccaggagaacacttaatgaataaaaaatttaaatttcagtgagagttctgtggcatttttggttaccttgagaccatcctccaaccctcagcccatcaatagtcttaaaaatggcagcttatattgcaggtgcaggttactggtaccagaggaagcgatattgaccttattttcaatgaactgtgattgtgtagtttgatctatctggtggttccctgaaggattacctcaatggtttacctttttatcacctgcactagagcttccccagggctgaggcaccttccctggtgctggttgtggaaagaattttaaagcaaatgtattagtcacagctacacagaacaaggaataacatctgggaaaag

SEQ ID NO: 50997 - DNA, 1053 bp, Homo sapiens
acctgccttctgtgttgatctcgctgggagctgcagaccaaagctgttcttatttggccatcttgccagcccccagttatttcttttgctatacagaagctttttcatttaattaattcccatctatttagctttgtttgtattgcatttgcttttgggttcttggtcatgaagtctttgcctaaaccaatgtctagaagagattttccaatgttttcttctagaatttttatggtttcaggtcttagatttaagtctttgattcatcttgaattatttctgtataaggtgagagatgaggatccagtttcattcttctacatgtggcttgccaattatcccgacattatttgttgaatagggtgtcctttccccactttatgtttttgtttgctttgttgaagatcagttggctataagtatttggctatatttctgggttctgtattcagttccattggtctatgtgtccatttttataccagtaccatgctgttttggtgactatagccttatagtctagtttgaagtcgggtaatgagatgcctccagatttgttctttttgcttagtctttcttttgctatgtgggcttttttggtttcatatgaattttagaattgtttttctagttccgtgaagaatgacagtggtattttcatgggaattgcattgaatttgtagattgcttttggcagtatggtcattttcacaatattgattctacccatccatgagcatgggatgtatttccatttgtttgtgtcatctatgatttctttcagcagtgttttgtagttttctttgtagaggtctttcacctccatggttaggtatattcctgagttgttcattttattttattttttgcaactatggtaaaagggattgagttcttattttattctcagcttggtcactattggtatataggagagctactgttttgtgtacattaattttgtatcctgaaactttgctgaatttatttaccagttctaggagctttttggatgagtctttagagttttctaggtatacaaacatatcatca

SEQ ID NO: 50998 - DNA, 1064 bp, Homo sapiens
cctgccttgctaggttggggaagttctcctggataatatcctgaagagtgttttccaacttggttccattctccctgtcactttcaggtacaccagtcaaacgtaggtttggtcttttcacatagtcctatatttcttggaggctttgtttgtttcttttcattcttttttctctaatcttgtcttcatggtttatttcattaagttgatcttcaacctctgatatcctttcttccacttgattgatttggctattgatacttgtgtatgcttcacgaagttcttgtgctgtgtttttctgctccattaggtcacttatgttcttctctatactggtttttctagttagcaatttgcctaaccttttttcaaggttcttagcttctttgcattgggttagaacatgctcctttatcttggacgagtttgttattacccactttctgaagcctacttctgtcagtttgtcaaactcgttctccatccagtttatttcccttgctagcgaggagttgtgatactttggaggagaagaggcattctggtttttggaattttcagacgttttgcactggtttttcctcatatttgtggatttgtctacttttggtcttttatgttggtgaccttcggatggtgaccttctgtgtggacatcctttttgttgatgttgatgctattcctttctgtatcttagttttgcttctaacagtcaggaccctctgctgcaggtctgctggagttggctggaggtccactcccgacctatttgcctgggtatcaccagcagaggctgcagaacagcaaagattgccttctgttccttcctctggaagctttgtcccagaggggcacctgccagatgccagctggagctctcttgtatgaggggtctgtcgacccctgcagggaggagtctcccagtcaggaggcacgggggtcagggacccacttgaggaggcagtctgtcccttagcagagcttgagcaccatgctgggagatccactgctctctttagcaccagtaggcaggaacgtctaagtctgctgaagctgcacccaca

SEQ ID NO: 50999 - DNA, 1032 bp, Homo sapiens
agttttgctagatataatattccaggttagaagtttttttttttccttcagcactttgaatacgttatcctatttcctcctggcttgtatggtttttgctgagaagtctgccagatatgtattgaagctctcttatatgttatttgcttctttttttcttgctacctttgggatccttactttttccttgacctttgagattttgattattatataacttgaggtagtcttatttgggctgagtctacctggtgttctttgactttcttatacctggatatttatatgtttctctaggtttcaaaagttctctgttattatatctttgaataaactttacacccccatctatttctctatattctgtttaaggtcaataattcttagacttgctattttgaggctattttctagatcttgtaggcaggcttcattgtttttattctttttttgcccctgaccatgtattttcatatagcctgtctttgagctcactattttttttcttctgcttgtttgactctgctgcaaagagaccctggtgcattttttaaaatttgttagttgaatttttcagctctagaatttctgcttgatttgttaaaattatttcaatctctttgttaaatttctccagtagagttttgaattccttctctgcattatcttgaagttcgttgaactttctcaagacagctattttgaagtccttgtctgggaggtgggtgtagtattctgtttgtcaccattagatcaaaagtactaattgtattaaaccaatattcatacatttattgaatttatgattgcttcttctatcagttactgaagaaggtaataatgttcagtttttacatttctcttttattcctgtaaatttttgattcataaatgttgaggctacgtttttacttgactaaggtttataaatatcatcctgctgtgttgacccttttattcttatgcagtgacctttttttaatatttagtacattcccttaccctaatgtttattgtgttcagtgtaatata

SEQ ID NO: 51000 - DNA, 1032 bp, Homo sapiens; identical to SEQ ID NO: 50999

SEQ ID NO: 51001 - DNA, 1032 bp, Homo sapiens; identical to SEQ ID NO: 50999

SEQ ID NO: 51002 - DNA, 1069 bp, Homo sapiens
gacttcatgactaaagcaccaaaagcaatggcaacaaaagccaaaatagacaaatgggatctgattaaactaaagagcttctccacagcaaaagaaactaccatcagagtgaacaggcaacctacagaatgggagaaaatttttgcaatctatccatctgacaaagggctaatattcagaatctacaaagaacttagacaaatttacatgaaaaaaaaaacaaccccatcaaaaagtgggcaaaggatatgaacagacacttctcaaaagcagacatttatgcagccaacaaacatatgaaaaaagctcatcatcactggtcatcagaaaaatgcaaatcaaaaccataatgagatatcatctcacatcagttagattggcaatcattaaaaagtcaggaaacaacagatgctggagaggatgtggagaaataggaacgcttttacagtgttggtgggagtgtaaattagttcaaccattgtggaagacagtgtggagattcttcaaggatctagaactggaattaccatttgactcagcaatctcattactgggtatatacccagaggattataaatcattctactataaagacatatgcacacatatgtttattgcagcactgttcacaataacaaagacttggaaacaacccaaatgcccatcagtgtgaaactggataaagaaattgtggcacatatacaccatggaatactatagagccataaaaaaggatgagttcatgtcctttgcagggacatggatgacactggagaccatcattctcagcaaactaacacaagaatagaaaaccaaacatcgcatgttctcactcataagtgggagttgaacaatgaggacacatggacacagggaagggaacatcacacactggggcctgtcagggagtggggtctaggggagggatagcattaggagaaatacctaatgtagatgacaggttgatgggtgcagcaaaccaccatggctcatgtatacttatgtaacaaacctgcatgttctgcacatgtaccccagaacttaaagtataataaaaaataaaataaaa

SEQ ID NO: 51003 - DNA, 1029 bp, Homo sapiens
agacctttcatggcagtgcatctgacataatgtcttttggtacatggaaacatgaagtccatgcattggaatcaaggacataccaggaaactcaaggggtagtttcacctactcttgaccctagaccacctttgtttgacctaaactttacttcaaccttgtcctgccctgcttttcagtaccacaagccatacccattatggtagatacactgatgtaattggctatgccctgcctgatattattgtctctcaccaaaggccacagttgtcactgcctttcagactccaaattctttaaggtcttccctttcctctcacagcatattgttgacagtaaatacatataacagtgcttattctcctttcacagacaaaagatctgaaatgctctgcttagtcaattattataaactatttctgctttttgacttcactgtttatgttcgtataatgcttgtagacactttgctttaactcataccttttccttttggattgtagtttttgctccttcatactctgaaactacctctattctggcagcacattttaaacccactttggctaatgcttttcatgttctcacctggtaacttaaactctactacctagatgctattggcaatccattttggcctatgttaggatctatacataactagcccattgatggtaaagtatatgttagtgactagagcagaggttgacaactgtccacattggggctgaatatggcttgaagatgtgtttttggctcatactgttgtggcattgttgaatttagtcattgtgatgcccaccacaatgtgccactcatatctcctactaaagggagtatagctgactgagggcccagctgctgtgttctatcatccatcattgtttctttcttccaaggctacacttcccatcaactgttccaaactactgaatgaccatggcaagaatactaatgagagcccattccttggagacccagactcctttaatggccacctttggcttgagtattccccaacagccttcc

SEQ ID NO: 51004 - DNA, 1058 bp, Homo sapiens
ttgttttctggttgttttgtatattttttgttccttttgttttctcttattgtttgttattttggtgtggtgattttctgtagtggtatcatttgagtccattctcttcctcatttgtgtgtagggtttactagtgggttttatacttttgtttgttttcatggtggtaaatactgtcattttgctttcaggtttaagactcgagcatttcttgtaggactcatctagtggtgaaaattctctcagcatttgcttctctgaaaaagacttcatttatgagggaaatcataaatttcccttcatttatgagtgaaaacgttgctggggatagtatccttggctggcagtttttttttctttcaggacattgaatacatcatctcattctttcctgtcctgtaagacttctgctgagaaatctgctgttagtctgatgagagttcttttattggtggctagacatttttctcttgctatttttagaatcctgttttatctttgactttagagagactgactataatgtggtggggagaaaacctttatgcattgtatttctggggatgtttgagccccatatagacatatggatgtcgaagtctcttgctagacttgggaatttttcacctattatttcattaaataggattccatcattttgttctctcttcagccttgagaacactgataattcaaagatttgatcactttatggtatcccaaatgtcatgaaggttttgctcattctatttaattcttttttatttatttttttttctgactggattatttcaaaagacctgtcttcaagttctgaaattctttcttctgcttgacctaatctattgttgtaactttcaaatgtattttatattttattcaatgaattcttcagtttcagaatttttgttgggttcttttttaaaaaaatatctatttgaaaaatttctaattcatatcttgaattgtttttctgatttatttttgtttttcagatttctcatttatcttgctgagcttctttaaaatttgtattttcaatttgttatctgggattt

SEQ ID NO: 51005 - DNA, 1079 bp, Homo sapiens
tttgataatagccattctaataggtgtgaagtgttccataaattttggtatattagttttattttcattcagttcaaaaaaaatttccccttggtttcttctttagctcatggattatttatatgtttttcttaatttttaaatatttgtggatttcccaaatttctttctactattgattctaatttaattccattgtgattagagaacatgctttatgatttcagtcttttaaatttatggggaattattttatgaccttgcatattgtcttttctgtataaagttacatgtgtgcttaaaagaatgtgcgttttggagtgaagtgttctattgatgtcaggtagtccataagtatatagtgttgtctaagtcttttatttcttcactgattttctttttgttatatccattattaagagtgggattttgaggttttcatctattattgttgcattatttctttctttctttaattctatcagtttctttcttcttcatgtaccatggggctctatttgttagatgcatgtatcattttacttttcacatttccctgaggaattgaattactgaattataaaatttttctcttttaaaaagtctatttagtataataacagtgtagtcactctagctctctttaaggcttacctggtatatctttccccatcctttccctttagcttgtttctttgactgtaaagcgtgtctctcatagtatagttagatatatattttttcatctagtgtttaaaatccagcctgatagtttctcccttttgatttgaatgtttaattattttatacttaatgtaactgtttacatttagtctgtttcaatttctgcctgccagtttactatttttcatctacatataccctgtctttttgttcctctgttcttcctgctctagttttttgtgttaaatagctatattctaatatactgttataattaatttttgatgtctttatcatatacatgtatatttttaattattttcctactggtttctctagggtttataatgtgcatcttattttaccacagtttacagaagattaatgctgacttc

SEQ ID NO: 51006 - DNA, 1387 bp, Homo sapiens
gccacagcttcatgaattttctttatttacaatggtccttaactgggtttatttatcttgaaatggtggacaaccacagttgcagacctcaatctacatacagtacatatcaagtaactaaacatttccttgtaatgtcatgacttttctctgcttcttggaagcacttccaacatcacaagtggcactttgtatggatcccatgatgtttaaggtttatggcattgcactaaatacaatgaaaaatatgtgagaatcatgagagatcacttcttactatgatatgcaatttactgcagacatgaactgctcttgtggagatgattagcatcacacagctttttaggtggatactcataatacctaagcccacccacaatggcaacaagaggtgtctatgaaattattatagtagtataactacagtaaattttatgcagttatgatttaatactgcatctttatatttgtttacatttatcttgaccgtgaatggcatcatgtacagtctgtgtttgtaaattttgacaaattttaactttttataacatatttgtatatattttgtggtagtaaatgataaaatggactagcatctaaatatattttatgcattcgtgacatacccttttcttaaatttttatatttctaggccacatggtttgtaagtttttgtagattgttgcaaatttcaaaaaatttttcaaatatgttgaaaaaattctgtgtataagtggacccatgcagttcaaaccatgttgctcaagagtcagctgtactatagatttttcactttgttgttatcataaggcttacataaaacatcttataataggtgaatttaagctgataagaacttaacttttatcacatatagctctacacttttattcccctgaacacacacattttggttttggtgtcaaaatttacagcattttgtaatttatatcccttgataatttattttaattatagttatttttcatagttttgacttttagccattgtacttgaggtaaaattgctttacacaccatcattatactcctattctatatgtaactgtattacttataccattaagttttgcattttcatatgttttatgttattaattagtggccttctgttttagcttaaataactccctttagtaattcctgcagggcaggcctagtggtgatgaactctcttagcttttgtttgtctgagaaagcttttccttctccctcatttttttcttttttttaaaaattgcttcctcatttttgaaggacagatttgccagttaaagtaatcttggttgctgggtttccccctccccactttggcactttgaatttatcatcccattttctcctgacctgcagagtttctgctaaa

SEQ ID NO: 51007 - DNA, 1026 bp, Homo sapiens
ctttatatgtctggtagaattcagctatgaatccttctggacctgtgtttttttctggttggtaggcttttcattactgattcaattttggaactcgttattggtctgctcagggtttgtatttcttcttggttcagtcttaggaggttatatgtctccaggaatttatcagtttattctaggttttctagtttgtgtgcagaaagatgttcataatagtctctgatggggttttttttttttttttgtatttctgtggggttggtgatgatgtcccctttatcatttctgtttttggttacttgtgtcttctctttttttctttgttagtctagctagcagtccatctgtcttatttattctttcaaggaaccagcctcattgatttcattcattttttttatcattgaatgctataatctttcctcttgatgctgttttagctatgtctttgagattctgacatgttgtatctttgttgtcattagtttccaagaatttattgatgtctgacttaatttcactgtttactcaaaagtcattcaggagcaggttgtttaatttccatgtaattttatagttttgaccaatcttcttggtatagatttctatttttattgtgctgtggtctgagaatgtggctggtatgatttttgtttttgttggttttaaaaatttttaatttgctgagaattgtcttatggctgactgtgtggtcagtagagtatgtgttatctgcagatgagaagaatgtatagtctgttgtttttgggtggattgttgtgtagatgtctgttagctccacttgatcaaatgctgagttcaggtcccaaatatctttgttagttttctgcctcgaggatctgtctaatactgtcagtggggtattgaaatctcccactattattgtatagttatctaagtttcttcataggtctctgaaaactggttttatgaatccgggtgctcctgtgttgggtgcatatatatttaggatagttaagtcttcttgttgactctttacca

SEQ ID NO: 51008 - DNA, 1034 bp, Homo sapiens
tgtacccagcgctgcttttgccttgctctgtgaccccaggcaagctgcctcacctctctgggccagtttccccattgtacagtggtgctgcacaccctggccctggccccgaggtggctgggaggtggctcctcaaacagccgctgtctcatcagtgcccggtgctgggtcagggatcgactgaggctctgagctaactgggaaacacagtggccttggagggctggggagtgtcatgggggtggggacagggagtcaccggtcgcatgtgactgaactcttcaccccagtctgtggctttcccgttgcagtgagagccacgagccaaggtgggcacttgatgtcggatctcttcaacaagctggtcatgaggcgcaagggtaggaggcagggccgctgcccgccctgggccagcaccttgtaattctgtcctgcctttttcttcctgtatttaagtctccgggggctgggggaaccagggtttcccaccaaccaccctcactcagccttttccctccaggcatctctgggaaaggacctggggctggtgaggggcccggaggagcctttgcccgcgtgtcagactccatccctcctctgccgccaccgcagcagccacaggcagaggaggacgaggacgactgggaatcgtagggggctccatgacaccttcccccccagacccagacttgggccgttgctctgacatggacacagccaggacaagctgctcagacctacttccttgggagggggtgacggaaccagcactgtgtggagaccagcttcaaggagcggaaggctggcttgaggccacacagctggggcggggacttctgtctgcctgtgctccatggggggacggctccacccagcctgcgccactgtgttcttaagaggcttccagagaaaacggcacaccaatcaataaagaactgagcagaaaccaacagtgtgcttttaataaaggatctctagctgtgcaggatgcaaacgtctcggggtcagtgactgcctcctgcccctgttggtcc

SEQ ID NO: 51009 - DNA, 1067 bp, Homo sapiens
cgcaggcgcgtgccttcggagcgccgggtgggctgcgggcgcggcgggactcccggtcttccccggggcggacaccggcgtcaccgcgtcctacggagccgggcgccgagcgggaggcgcatctgggccccaccggggctgcccgcaccgagcacgcgaacgcgccctcccgccctgaggccgccggcgttgcggtcggagaaccatagagccactcggctgggcgtggcgcggcggggcggggaaaggggcggggcctgggcggcggaagtgcgcagccgcgcggcattctggggccggaagtggggtgcacgcttcgggttggtgtcatggcagctgcggggagccgcaagaggtaagccgcgggtccgagggccgatttggcctcccggtgggtgtctgtatccaagggggcttttcttgctcctctcagcggggctggggcgagctgggcgtgcgggcagctgtgactcctgcgtgacccgcaggcgcctggcggagctgacggtggacgagttcctagcttcgggctttgactccgagtccgaatccgagtccgaaaattctccacaagcggagacacgggaagcacgcgaggctgcccggagtccggataagccgggcgggagcccctcggccaggttagtggggacatgcgtgagcagaacctcttgctcgtcctgtcccaccccggttgggttgctgacctcgcctggggtctcagggccaaggcctaaggatcgccgacctctgccccccagtcctttcagcttaacttactctttcatccgatgtttactgagctcctgttccgtgccaaactctgtcctaggcagggagcgtatgttggtgagttgtgcaaaaatctcttcccgatctaggagaactctcacgttcttgggtgaaatcaccgcctgcagttcggtagaagagagataagtgctggggagggaaaggaaggacagaggggctgaagagagagttgcaggggagccgagttgctctgttagaaggagcggaggctgtgctcggtggctcacgcctgtaatgccagcactttgggaggc

SEQ ID NO: 51010 - DNA, 1265 bp, Homo sapiens
tcctgcagcgacctgctcaaggccgcccacaggtacgtgctgcagcacttcgtggacgtggccaagaccgaggagtttatgctgctgcccctgaaacaggtaacagctggcgggcccagccctcgccccccaccccaccccaccccagtctttgtctttgactcccgaccccgttttgttcctgacacagccctgcccacaatccttagtgcctgctgtgtgtccccgagacctttctggatctgggccccccaggagcctcgtctgtggctcctgactctgctcggcccctcccagtatgaacactcagcccccacctgctaaccctccctcctaggcatcttcagggctccctgggtccacaggaccctccccagatctcaggtctgaggacccccactcccaggttctggaactggtctctagcgacagcctgaacgtgccttcagaggaggaggtctaccgagccgtcctgagctgggtgaaacacgacgtggacgcccgcaggcagcatgtcccacgggtgaggcgcggccgcggggggctcccacagcatccaggagggcatgcaggtggctgagggcctggtgcaccctgaccttccccgagttcagggactccgtgggggtggtgcccccacctgtctgaagaagaatccatcacacaggtggtacgggcatctggggggttgtctcagccctgacgcccagtgtgcccgagggtcccgcctgaccttggcgttccctgcaccccagctcatgaagtgtgtgcggctgcccttgctgagccgcgacttcctgctgggccacgtggatgccgagagcctggtgaggcaccaccctgactgcaaggacctcctcatcgaggccctgaagttccacctgctgcctgagcagaggggcgtcctaggcaccagccgcacacgtccccggcgctgcgagggggccgggcctgtgctttttgctgtgggtatggccccccgcccgtttccctcttgccctgtgccttctactccccaccagcacaagcccaccccacctgtgccggtcaggtcctgacctgcccctccgcccctccattcaggggcctctccaggagcctggggtgtggcccagcagtgggatccactcacgagtcccgtctccacctgccctccccaggcggcgggagcctgtttgccatccacggagactgtgaggcctacgacacgcgcaccgaccgctggcacgtggtggcctccatgtccacgcgccgggcccgggtgg

SEQ ID NO: 51011 - DNA, 1038 bp, Homo sapiens
ccgaccctcgtcacggcagagggaggggggcgaggcaggtgcttgaggatccgaggctggtggggccggggcccgacagccacagcctcccaggctccgggccccccgtgggccccagttgctgtctggggggctgagggccgggctgaggcctgtcctgagcctggcttattggggctgggcccagccacggagaagcgcactttcttcttcctggggacttgggtgagacccagtgcgggtgccccagagcagcatccgggggcccctgctgagggctcagacacaaccgcctccatctccaccacatcaggcccagctctgcgggtgggaggccaggcgaggccagcggcgtcggctctgggaacaggtgtagacacaagcccgctggactcggtcatcctcggcacagcctccgagacaggtggagatgaagccacctctagcttagccactgggcctgctgtaggcaaggccacatccaggccatgtttggaggcaggtgtggacacagccacgtccgtgtccaattgtggcttggagatgggtgtagacagagccacactggactgaggctcagaagctggtgtagacacagccgtgtcagattgcggcttggaggcaggtatagacacagccatgtccctgtcaggttgcggctcagaggcaggtgtagacacagccatgtccgtgtcaggttgcggctcagaggcaggtgtagacacagccatgtccctgtcagattgcggctcggaggcaggtgtagacacagccatgtccctgtcaggttgcggctcggaggcaggtgtagacacagccatgtctgacttagcccttgagacatctgggagggcttcccagacagtcgtggacactgtgtgcagcttggctcggcgcggggttctgatttggtctgtgccttgctctgtcacagggacaggtgtagacaggcccaaacctggccctggtctgtcttcctgcacaggggacctggggccaggctcaggagctcctgcaggacctggccccaactcctcc

SEQ ID NO: 51012 - DNA, 1204 bp, Homo sapiens
caagcccctgtgttagcccagacctccgtctagacgggcccgcgtgtcgagcactcctcgccgtggagatcgggcgggagggcgaggctgtgcggcgagggcttctgcggatgtggagggtgtggcatttgccatcgtgaggtcttgcttgctgttcccatggctctgccgaagggccgaggagtggccctccctgaccccagcctggtgggggcagaaatcccatggcagcccccgcaggacaagtcccagttggggactgagatcgttggctggggaatgtggcagggaaaatataggaggtccctgtcgcccccacatcctgtctgctccctcatggctgcctgggaagggatgtgtcggtgggggggtctggagagtgcttcctcctcaaggcaacggtaagggtcctgacttcccgtctctccgatctgctccgttggccggcaggaaactttgctgccctgacactagcctggctcttgaggggtccttgtggggtcctggactgtccactgctcttgccttctctgtgcatgcctgggggctatgcagggggaggggcagcacccaaaataaggaacgctgcggccttttccccagcctgtggtcagtggtccccaagctgccttcagggtccagggcctcagtgcagcacagaggagggtcccctgggtcccccactgggaggacatgataaccttggtcctcttctgggcactcatggtctggggaaaagatgggggcatcgtggactcaggataggctgtcaggagctgaggaggggctggagaagggggttagggcgaggagaggttcctgtccctgcaagatcaggagagggggtcactaaccccacagccaggtgggtccagcccgagagtccgtgacttagtagctgaggacttgctctagggtcagagggcacatggcaggagagtcaccccggctgaacgaggctctgcatcttaccgaagccgctctacgggtgccaggcactggctctggagcgagtgcccaggcggagcagagcgctgggaggagggtccgtggggagcccctgccaggtgggtgtggcttagcccagctgtgggcagtcgcactcagggacgagctccaggtggggagcctgggacccacagccagtatgcagcttggggagcacccgggaggggctgtggccaccggaccccctggggtgggg

SEQ ID NO: 51013 - DNA, 1007 bp, Homo sapiens
gggctcggtgcttcccgcctgcgtgaatggacttgtcccgtctttgacttctcctgggcttgcccctgccttggcctgggggggggctttgctggctgaaaccaaagggagtgaggtggtgggaggggtaggggaatcgggttggtcagttctgtggagatgacctctttgagagggccgggctgagctggtggaaggaactcttggctttttccagaccccaccccactccctcactccccacccagagaacagccctggctccattgttcctgcagactagagagggaaggttgttttggaactgggctcgctcccgcttgtccacactggccgctctggtggggcctctgtgggtggtggtggggatggcacctgctgcagcctccaggccaaggtaggggagaaggaggttagggtgaggacaggttcctgtccctgcaagatcaggagagggaatcattagccccacagcctgcagaaggcgggatggggctgctccagggaagggggtgcccgtgcctcggggccacaggtccggccagaggtcattccagccaggcccatgcagcttccttcctgaagggctgactctgcccccatcactgcaggagggtggaaaacaactgcagaagcagacgccccacgcccagggctttgcttccacctgtgggacccaggtccacagccccaccagcggcctgggtggggcaggaacggaccccctccctgcagtcctggttctggcaccccctccccacttggactgggctccccagggcccccgaagcccagcggggctggggctgcagacggaaacaccgtggtggcctgcccacctcaggatggaaccccggggtcccaggaggtgcctgcccctcagagatgagaaaaaggaagtgcagggctgagatatcaccccatggacagtcgcccgctggaggaggaggctctgtacccctgcacctcctgcctgctgggtgagctgctgggagctgcactggggc

SEQ ID NO: 51014 - DNA, 1044 bp, Homo sapiens
actgcccctgggactcagagctgggaggtgagaaatggggaatgcatgtgaaccacctgcctctgcacacagcaagtcctgttctgggttttctcatccctgggtcacaccctgcgctggggagataaaaagtcagaccctgcccggggcacccacagtcagcaccgccggaacactgtcagcctggtgtggacagtgccaaggtccagcagggtggggtggttggggtaggagctcccctgaggagagagtgaggccagcaggggtgggtctccaagtgcttcctttgacagctgctctggatgggacgtggcttggggtgggtgagaacccttggctgagtttggattttcctgcagggtttcattggaacaccaggttccagggccgtagagatgtggaggcctcctgtctgggtgatggggcatggtgctggtccctggctgtggggtggaaaggagtcccaagagagggagctggcaagacaggaccttcccagctaaggtggggttggtgggatttggctggggcccttggaggagcctgaccaggaggtgagacagggcacctggaaggaaggaggcgttggggagagtccagatggaggccatggggttgaggggcccagacacccggctgggggactccaggaaggcagcaggtgtgggcagtgggtcctctggggtggactgaggtgaggcctgggtgtgaccacgcggtggcactggtggctgccggcagctgtcgtctgcagagtgggtgagaccgagtgtggcagatggcttggtccgcggtgctggaggggactggcggagcagaagcgccctggcgccgggtccttgctttcctggagctggggcttggggaatggggtcggtcattgcagggacagaggagagggcagggtaatgggtgcgcaggggtcccttccaaaggctgcgggtggccaggggtgtgcgggggcgctgaggtgcggtcgccgagagattctggcctccagggtggtcgggcctggcatggactctaggggatggtgcacacacc

SEQ ID NO: 51015 - DNA, 2661 bp, Homo sapiens
cccacgatgagcctggaggactggagccgggacctggcacccccagggctgtgactgggtgaactctgagggcacagctgctgtccgccgccccaggggtcccaggatggggcgagcagccctgaagaggcccaagggcaccccgtgaggagcccccacgctctgagagtggggcgcagagccggagccccgggccatgcctccgctgccgctggcgcgggacacccggcagccgcctggcgcctccctgctggtgcgaggcttcatggtgccctgcaacgcctgcctgatcctgctggccaccgccacgctcggcttcgcggtgctgctgttcctcaacaactgtaggtggccgcgggcggggcgtcgcactggccaagccccaaccccgaggcccctgcacatagaggctggaggccgcggcgggtccgcggggctcccggcagcttcccggggatgggatgggtcactctgcggacccctcggtccctggaggccgtccttgggctctcagtgggcctggccctcacccaaagctgcagaaacactttctgcgggagctggggagggaggggcagccggctacactgagagccggcagttgggggtagggcaggacctgcggtggactcttccagggaagggggtcctgcctgcacccctgtggctggggccccatctgacaggggtcaggccatgactatttggctggaggggcagagaaaagcaggggcctctgtctcagacctcagccagcccatggggtcagggctggacccttcagcagcctggatccctggggctagcggtgggggggggggggtgggcaggggtgcccctttccaggctgggcaaagggatgggacagggaggagcctgctcagaggagcctaacttggggatttgttttcttccagataaacccgggacccacttcactccagtgcctccgacgcctcctgatggtgagtagggctgagttcgggggacctggatgggctgtggcactcttgggagtcaggggccatttggaggtgtgcacccagacgtgtggagtgtgtctggagtgaggaggaggctggacaagggcacctgcgtctgtcctgggagtccgcagcggtgggccgcagtaggaactcggggtctagaggccgccgcctgacggcactggacctcggctctcacttctctgggcctcagccccctcagcctcaaaactgggaacaagtcctgggacccacaggttgtgaggtgatgtcagacctgtagggcagggccagagtccggtcagggggctccgctctattgtcctcccttctccctgttcagcaaggggtggggctggacagaggctggaagtggacaggagcttgcagggaaggctgagctgggggagggccctgacctgatcagtgacagctgtctggggaggggcctggagggcggcagtctgtccctgggactctgcaggctgtcatggggggacacaagtgatggagggggcgggctgaccttgttgacctgctttgtgaggtggggcctgtcctccccggggtgctcctggtgtttgggccactgtcatcggggtggtgtgagggtgtgaggggaagagaggaagtggtcagctttgcagaggaacacagacggggggaccggtggctccctcgccaggcctggggtcctttccagcaggtggggaaggagcacctgccccatcactgggtctcacttgcgttcagttgtgtgtgcagggctgtctgtgagggctgtgctgaggccttcctgaccagcacatggggtgggaaggacgacctggggaatcctgaagtgatctgaagacagagccctgggctggatagatcgtctcggccactttccaggtcttgggagtgggggatgatggctggaggaggtggccaggccttggcagggggccctgtgatgcccgcctgtgctgagaggtgggggcagcttgggatgctcagtggtctgaaagatagggtggggtcttccctcggagtgtggagtttaggcacctgggaaccggagctggattcaggggtgtgagatggaggccctctgcttcctcgaccgcctgccaggctggggtgacctgtagtcagctgtgctttgctcctgaagccgcacaccagcaagtgggcagtggttctcccacacttggctactcaactcctggtcccagggactctggcctggggcagcgctgggcctggggtgaggagctgggcagcgggaatggggaatggtggctgtgggaacccgtcctacccctgggctctagccctgcaacctgtctgttggcccccagcccctgatggccctccaacacccgccccccaaccccaccaggctgttcctatgagatcccaaaggctcctcagagcaccaggcttctcttggactgtggggagaggagaccggtctgcgtggccaaggtgattgaggcctctgaggggcctcatgccggtggggttgctgtcccccttcctgagactcaggagccctgtgggtcagggcagcacagcaccatgggtggtttgtgacctgaggcatttgaggggacacgggttgcaggggcctgcaacaggctgggagagcaggtaggtgagcagctggcttgtcctggaagaccctctccct

SEQ ID NO: 51016 - DNA, 11666 bp, Homo sapiens
tggatgaggagcatgcccgccatccaggaacagtgcccttggccatggtgtcagggccttgggagaggtctggctgagccaaggtgaccaaaaggggagaaaggctcaggagccctggtgcagggaggtgactgggtccttggccatggggttgggacctggggggaaccattggtccacaggtccagccgaagcccaggagaacagctggctgggcatcagcaggtgcccgttggatttggactgggagtcccagggccttggacaaggcagggccaaagggagagggagatgctgaggggagagagaaggggaaccagaagggaagtgaaagggccaggggtgcatgtggtttgagtttgatttgagccaggacgggggaaggccagtggtgatgacagccctcatgactatacttacagtggcagcagacgggccacatagcgctgtgtgctgggcaccctctaagctttgcagatactggcccatttaaccccacaatcctgggaggtaggtcctattgctcctattcaccgaaggggatactgaggcccaggcaggtgataacctgcccacattctcacagtgggtaatgcagagctgagcagcctggctgtaagacctgaggtgggagagtagcagaagaggggtgggggcacagccaaggtttggggaggaagacagggatctggtggggggagcatgggtaggttgcagggatggcaggcggatggccctcactcagccttctggggtgggggcagggacacccagacagacagcgccagagcctggggtgggctgttgctatagcaacagctggctccagctcccagtgcacccaccctccttggagatggggggggttcctcctgccccatttcacgagcctgctgggaagtgatgggtggtagccacccctctgacatgacttattaatgataattggacccaattaaacatttattaaatccagacagctgcagccgctaacggacccttccctgatcctgggtgggccatgctgggggtgggggtgctcaggatgggctgccgcaggggctctgggttttaacgtgcctgaggcagctttgttggccacgttgaggtctggtgatgggacgtgtgtcaggcgctgtggtctgcagctgtaagaactaaaatgagcaacagttcctgcacctctccaagaaggaagttcgctttgacagagagtgagggcgatggaggaggcaagagtgaggtggggggccgggggatgcccagggaggagggggcgtgtgggtgccccagggatcccagggagcgatgggaggctgcagaagggcacaggcctgccgcgggtggggggctggccagggagaataggagatagtagaggcggaggccaggaatttgcacttctccagggaagctggggaagagttggggagagggaggcaagaagattccccacccatcttaggcgcagggagcggtcagggaggcgccagaggtgggccagagctgtgacctggcctcacaccccgtcccggtggggctctcaggcccctgagggccagacgcgggacctgggtgcgacccgggcgggaggcggcagggctcagctgtgctggacgctgcagcagcgcgggaaggggctcccccggctccatggggtgaatcggtgaggggctccggtgccgatgtggaaggagctcctgagcagaactggggcctggactgcttgtgcccgagttggtttcgaggcgtctctgcttttcgctggaggcccacgaggtgggtgggaagtgggtgctcgcccgtcgcagaaacagagtcgggtgccgcctgcggcagacgcccctctccgcgcctgcaggtgcggggtgggggagaaaggtcatccctggagaggcccggggctggcgggaatcctcggcgggcggggtctgcgaggggcagggccggtcctgtgagcgcacgcacgcgtgtccgtgtccgtggtggacccccgatgcggcgcgggggcgggtgaatgcgcgggctgcgagcacggcaaggtctctcaggcttgtggacgtgggtacgggcgtctcggcaccctgagctttctcccctacccgccccagcgtgccggggaatgctgtgcggcttcggcgccgtgtgcgagcccaacgcggaggggccgggccgggcgtcctgcgtctgcaagaagagcccgtgccccagcgtggtggcgcctgtgtgtgggtcggacgcctccacctacagcaacgaatgcgagctgcagcgggcgcagtgcagccagcagcgccgcatccgcctgctcagccgcgggccgtgcggtgagcggggcggggccggtgcctggggcggggaggggcggggcctatgagatggagcgaggctgggaggggcttcggggccagtggggcgggggcaggggcggggcccggcggggaggagcggggctgggaggggcctggggggcggagcggggcgggagcgggggcggggcctgcggggcccggcggggaggagcggggctgggaggggcctggggggcggagcggggcgggagcggggcgggagcgggggcgggggcggcccgtctgaccggcaaagccccgcccgcaggctcgcgggacccctgctccaacgtgacctgcagcttcggcagcacctgtgcgcgctcggccgacgggctgacggcctcgtgcctgtgccccgcgacctgccgtggcgcccccgaggggaccgtctgcggcagcgacggcgccgactaccccggcgagtgccagctcctgcgccgcgcctgcgcccgccaggagaatgtcttcaagaagttcgacggcccttgtggtgagcgcggcggcgggcgcacggctcgagctctgtgggcgcgcggcgacagcgtcctgactcctgccctcgacccccagacccctgtcagggcgccctccctgacccgagccgcagctgccgtgtgaacccgcgcacgcggcgccctgagatgctcctacggcccgagagctgccctgcccggcaggcgccagtgtgtggggacgacggagtcacctacgaaaacgactgtgtcatgggccgatcgggggccgcccggggtctcctcctgcagaaagtgcgctccggccagtgccagggtcgaggtgagcggctcccccgggggagggctccggccagtgccagggtcgaggtgggcggctcccccgggggagggctccggccagtgccagggtcgaggtgggcggctcccccgggggagggctgcggccagtgccagggtcgaggtgggcggctcccctctgggagggccgcctgctcccctgctccctgcacatcccagggcagggatggagggtgctccagcctctccgtgactccctcacccctgcgtcctagaccagtgcccggagccctgccggttcaatgccgtgtgcctgtcccgccgtggccgtccccgctgctcctgcgaccgcgtcacctgtgacggggcctacaggcccgtgtgtgcccaggacgggcgcacgtatgacagtgattgctggcggcagcaggctgagtgccggcagcagcgtgccatccccagcaagcaccagggcccgtgtggtgagcgccccggggtggaggccaggcggggtgggctgctcctgcgtcagtccctgcctggacatcacatgccatcttcatccatcatgttcctcttggggtcctgggagtgggccggtccctctgggaaggctctggggagggtggagcctgtgtgcggagggtacctggatacctgggggctggtgaggcagaggcggggccttgtccaggctccctggtccctgacctcagccacgccctccctgggagtcctctggcctgtccgcatgtctccacgctgtaagcacaggctgttggggtgggcaggctggacacaacaccagggtcctcactcttgggacatgggcagccgtcggccgttttggaggcagtgtcaggacttgaagggccagggggaggcagtggccgtcgtgtcccgtcgtgttcgtcttggtcagttcgcccatcttctggtctttctctctgcgtctgtctcttctctttggtctcttcttccctgtcggctccgcctcttgtgtcttccagcctgacctgctggcaggatgaggtgccgtgcctgccctccaggagcccgcagcccgaggtctgcccctggtgcggcagggggggtggcttgctgctgcctggccttgtggtcctcagagcaagtggacagacacctcctcccccgtgcagccctgggtgtgactctgggggtgcaggctcctcccacccacagagagcccccccacatgcatgggtgtcctggggatgctggtggtcaggggtcagtggcctgggcaggctggggaagcctggccctcccatagcctgctgtggacaatcaggaagccccaagcttgggggcagcctcgcccgcagccaccggggactcctgggtgtgtgttccgctcgcctctgccgcgtgtctgtccctttctctgccgtgtctgctgtgcatctggcccttctcctgtgttctctcttcctccaccatcccctccctggaagagggactgctgcgtggggctgggggctttgcctgcagcggagggggggcttgtgggaccactgagcccctgtgtccttcccagaccaggccccgtccccatgcctcggggtgcagtgtgcatttggggcgacgtgtgctgtgaagaacgggcaggcagcgtgtgaatgcctgcaggcgtgctcgagcctctacgatcctgtgtgcggcagcgacggcgtcacatacggcagcgcgtgcgagctggaggccacggcctgtaccctcgggcgggagatccaggtggcgcgcaaaggaccctgtggtcagtggcgggtgaggggtctggtgggggtcggggagagagaggttcctggtcgcctggtgatggaagctcctccccagaccgctgcgggcagtgccgctttggagccctgtgcgaggccgagaccgggcgctgcgtgtgcccctctgaatgcgtggctttggcccagcccgtgtgtggctccgacgggcacacgtaccccagcgagtgcatgctgcacgtgcacgcctgcacacaccagatcagcctgcacgtggcctcagctggaccctgtggtgagtgaggccctggggccgggcgggccagggtcctgtgcctccctcagcctgggcctgccgacccctgcctggctctgtctcctgcagagacctgtggagatgccgtgtgtgcttttggggctgtgtgctccgcagggcagtgtgtgtgtccccggtgtgagcaccccccgcccggccccgtgtgtggcagcgacggtgtcacctacggcagtgcctgcgagctacgggaagccgcctgcctccagcagacacagatcgaggaggcccgggcagggccgtgcgagcagggtaggccgggggacgctggcgaaaactgctgggctctggctttggacaagaagcccctgggtgactctgctccccttccccgcagccgagtgcggttccggaggctctggctctggggaggacggtgactgtgagcaggagctgtgccggcagcgcggtggcatctgggacgaggactcggaggacgggccgtgtgtctgtgacttcagctgccagagtgtcccaggcagcccggtgagctctgtacccctggctctcggcgggcggcggggacggggctgcggccgctcacactgacaccaccctccaggtgtgcggctcagatggggtcacctacagcaccgagtgtgagctgaagaaggccaggtgtgagtcacagcgagggctctacgtagcggcccagggagcctgccgaggtgagccggctgcacgtggggtctcaggcacaggcggggcggcgtctgggtttccgtgtctggatgtgggcgtgcccgtgtgctgcgttgggcccctgtggacgtgtgtattgtgttgtaagtgagcatcgtccagtgttggtgcctgtgcacatttgtgcagctgcgtgtgtgggcgtgtgtgtccatcagtcagtgggcgtgcaccaggccaggcctcagtgctgagaggcagcgtgaaccatgcggggccccaccgtgtgggcactttctctgcatacgtccatccggtcgatgtatcacatcaattaggtaaaagtggtgcccggtgtgtgtgatgcgcgtgcacagatgtgtgtctgcagaggggcgttaactgtacggtttggaggaatgtgggtgagaacgcatgctgacgtcttcagatgtctgtttctcgatttgcaaggaagctcgcgtgtgtgtgtgcacagagctgcgtgtccgtgatctttggatgctctgtgtgttgtgtgttcctggatctgcatttacagacatgttcttgcgtaagatgtgggagcctcacctgtgtcctcagccccaggctcccgggctcctctgggagctgggatcgggacggctgagtggtgacagtgggggtaggtggaggcagactggctgggtccagggtgggtgtccagcactgcatgaaatctgagtcccgtaccctttcctgcaggccccaccttcgccccgctgccgcctgtggcccccttacactgtgcccagacgccctacggctgctgccaggacaatatcaccgcagcccggggcgtgggcctggctggctgccccagtgagtacctgagctcagccccgaccccgggcctggtgcggctgtgcggccacgtgaccttgtcctgccctggcctttcaggtgcctgccagtgcaacccccatggctcttacggcggcacctgtgacccagccacaggccagtgctcctgccgcccaggtgtggggggcctcaggtgtgaccgctgtgagcctggcttctggaactttcgaggcatcgtcaccgatggccggagtggctgtacacgtgagtgacagggcccaggactggccaccggctatgccctcctacctgttcacccccatcactgtgcttctcctcacctgcccaggccctggcctgacccacacctggctgggggctgggcagagccagggttggggaccaggctctggaggaggtggggaagcccgtccaggtgcggacatcacgttcctccccgattttccccaaagcctgcagctgtgatccccaaggcgccgtgcgggatgactgtgagcagatgacggggctgtgctcgtgtaagcccggggtggctggacccaagtgtgggcagtgtccagacggccgtgccctgggccccgcgggctgtgaagctggtgagtgagggccagcgctaccctggggcttcatggggtggggtggggtcacccgagccacagaggtttcccatgcccgtgccccagacgcttctgcgcctgcgacctgtgcggagatgcgctgtgagttcggtgcgcggtgcgtggaggagtctggctcagcccactgtgtctgcccgatgctcacctgtccagaggccaacgctaccaaggtgaggggtgtgggatgtgaaggggagtggggaggaggcctcgccttgaacatccttgttctctgccccaggtctgtgggtcagatggagtcacatacggcaacgagtgtcagctgaagaccatcgcctgccgccagggcctgcaaatctctatccagagcctgggcccgtgccagggtgaggcctgacggccactgccccagaactgaccaggaaggcctgacgctgccctaaatccagccccacccgccctgagccacctgaccctgtcccaaccggtccccccgccaacctccctctccttgcagaggctgttgctcccagcactcacccgacatctgcctccgtgactgtgaccaccccagggctcctcctgagccaggcactgccggccccccccggcgccctccccctggctcccagcagtaccgcacacagccagaccacccctccgccctcatcacgacctcggaccactgccagcgtccccaggaccaccgtgtggcccgtgctgacggtgccccccacggcaccctcccctgcacccagcctggtggcgtccgcctttggtgaatctggcagcactgatggaagcagcgatgaggaactgagcggggaccaggaggccagtgggggtggctctgggggtgagcagggatcaaggacttggggtgggtgggcaggcgccgagaggctccaccagagcctgggctcagagcgcgtctccccagggctcgagcccttggagggcagcagcgtggccacccctgggccacctgtcgagagggcttcctgctacaactccgcgttgggctgctgctctgatgggaagacgccctcgctggacgcagagggctccaactgccccggtgagtggacggctgggcgaggggagtgtgaggatagcctgggctcggccgaggtgctgccccctcgcctgggcagcaggtcagtgccgggggttatggtcttgggactcggccccctcaaacatgtgcgtgccggggaccccacgcctaacccgtctctctcgttgcaagccggtgtggcacactgctctgaggagtcctcctggtaaccgacaccagccccaccctggggtccccactaacctcatgaccatctgactaacatccaccttcccttgcacccttgtggcttgctgctggggcctgtgcctgggccagcctggatgccaggcagatgccaggcagggcctcactgtacctcccccacagccaccaaggtgttccagggcgtcctggagctggagggcgtcgagggccaggagctgttctacacgcccgagatggctgaccccaagtcagaactgttcggggagacagccaggagcattgagagcaccgtaagacgggggcgcagcccccacctacccactggccttcctccccagatacccagagcagcaccagggcagcccggcttgggcggccccccaagtccttgcctactccctgccacagctggacgacctcttccggaattcagacgtcaagaaggattttcggagtgtccgcttgcgggacctggggcccggcaaatccgtccgcgccattgtggatgtgcactttgaccccagtgagacctgcaccctggacccttcctgggaggcaatgggtgggggatgcctggggctctgccatgctcagagctccctcctccccagccacagccttcagggcacccgacgtggcccgggccctgctccggcagatccaggtgtccaggcgccggtccttgggggtgaggcggccgctgcaggagcacgtgcgatttatggactttggtgagcgccaggccacgagccacagcttacctgccccctcctctgcccatgcccctgcccctcaccccttcctggccctgctcccaggaaaccctaacagctccctgtgccggcagactggtttcctgcgtttatcacgggggccacgtcaggagccattgctgcgggagccacggccagagccaccactgcatcgcgcctgccgtcctctgctgtgacccctcgggccccgcaccccagtcacacaagccagcccgttgccaagaccacggcagcccccaccacacgtcggccccccaccactgcccccagccgtgtgcccggacgtcggcccccggccccccagcagcctccaaagccctgtgactcacagccctgcttccacggggggacctgccaggactgggcattgggcgggggcttcacctgcagctgcccggcaggcaggggaggcgccgtctgtgagaagggtaaggatgtccactgcagaggagggcggggaggcagcagggtgggggcaaggattgggggtggggctaagccaccatcaggctttgagttgggggcaggagcccggattaaggcggggtttcggccagatgcggtggctcacgcctgtaatcccagcactttgggaggccgaggcaggcggatcacctgaggtcgggagttcgagaccagcctgaccaacatggagacactctgtctctactaaaaatacaaaattagccgggcgtggtggtgggcgcctgtaatcccacctcgtgaggctgaggcaggagaatcgcttgaacctggcaggcggaggttgcggtgagccaggatcgcgccactgcactccagccggggcaaaaagagcaaaactccgtctcaaaaaaaaaaaaaaaaaaaaaagcagggggcggtttcagggataaaagtggggaatcctcggagcttttccagccggccctcccggtcgccctttgcagtgcttggcgcccctgtgccggccttcgagggccgctccttcctggccttccccactctccgcgcctaccacacgctgcgcctggcactggaattccgggcgctggagcctcaggggctgctgctgtacaatggcaacgcccggggcaaggacttcctggcattggcgctgctagatggccgcgtgcagctcaggtgggcggggaggggacggggccggggcagctcaggtgggcggggaggggacgggcgggggagggggggccggggcagctcaggtgggtggggtggggacgggggcggggcagctcaggtaggcggggtggggacggggccgggcgatggtcctgagcacctgctcctgccctcaggtttgacacaggttcggggccggcggtgctgaccagtgccgtgccggtagagccgggccagtggcaccgcctggagctgtcccggcactggcgccggggcaccctctcggtggatggtgagacccctgttctgggcgagagtcccagtggcaccgacggcctcaacctggacacagacctctttgtgggcggcgtacccgaggaccaggctgccgtgtgagtcccttggagggtggtgtggccccgaccccggccctttggggtcccggtgtacgaggtggctttgcctgtggcccctgagccctgacccggtgtccctcctggtggcagggcgctggagcggaccttcgtgggcgccggcctgagggggtgcatccgtttgctggacgtcaacaaccagcgcctggagcttggcattgggccgggggctgccacccgaggctctggcgtgggcgagtgcggggaccacccctgcctgcccaacccctgccatggcggggccccatgccagaacctggaggctggaaggttccattgccagtgcccgcccggccgcgtcggtgagggtggggccggggcgggtgggagtgggaccccggggcctgtgggcggtacccaaccgacgcctcctgggacctcggtcccggtcccgtcttcctccatccaggaccaacctgtgccgatgagaagagcccctgccagcccaacccctgccatggggcggcgccctgccgtgtgctgcccgagggtggtgctcagtgcgagtgccccctggggcgtgagggcaccttctgccagacaggtcgggggcgtggggctctcggggcagggggggggggggggttgaacgtttgggcgggtacaggttccaggtagcattgcagttaggatgcggctcagtctagtctgggttttgagttaggatccacacacggctggcatggggtgcaggaggccccgggggtcaggactgaggccttggtg

SEQ ID NO: 51017 - DNA, 1226 bp, Homo sapiens
aacccctagggtagctcctcccccactaaggaccctgccatttctgtgtgattaacgctgccccctagataggcaatgggcgggtggggcgggtgcgtgcaggtgcctgggccctgggtctgcaccgtgggtgggctctgcacagccacttacctggcgtccccgcaggttccgcacaccgtcctcaacctgaaggagccgctctacgtagggggcgctcccgacttcagcaagctggcccgtgctgctgccgtgtcctctggcttcgacggtgccatccagctggtatgtgggggcggggcgtcccagcagggcctccggggcgggcggggtggcaggcgggacaaggccctcaccctgccctgcaggtctccctcggaggccgccagctgctgaccccggagcacgtgctgcggcaggtggacgtcacgtcctttgcaggtcacccctgcacccgggcctcaggccacccctgcctcaatggggcctcctgcgtcccgagggaggctgcctatgtgtgcctgtgtcccgggggattctcaggaccgcactgcgagaagggtgagcctggcacagggcagggggcggaggccggatgggcccggagcccacgaggccccaccctcacctgcctatctcacagggctggtggagaagtcagcgggggacgtggataccttggcctttgacgggcggacctttgtcgagtacctcaacgctgtgaccgagaggtaacgtgccatcctctgctggctgtcggttccatctgtgccctcggggcgggacaccggacccccacaccaggagggcccaggaggggacggcccggtgctgccacctctgtcctcccgcctctctctcacctcccggtcctcccgcctctcactgtctgtctctttgtttccaagcgaactggccaatgagatccccgtgtgagtagagctcggcgccccccgctccctctcactcccactcctccatccttcctggtggggagcagagtccggagcccccggggaactttccatcccttgtggcggaggatgggggtccggcgctatttggctgcaagaggccgtttcctgcctcagaagtgcagtcgcccctcccagggcacaggccgagggtcgccccacagccaacccccaccactgaggctgtacacacctgtgcgcatatgcatgcatgtctgtgtccgtgtgcacttccgcgtgtgtgaacatgca

SEQ ID NO: 51018 - DNA, 1949 bp, Homo sapiens
gtgtatatgtgggggggacatgtagatatgcgtgtgtgactatgcggccgtgtgtgtgcatggctccatgtatgtgtgtgtatatgagggagacatgcaggtatgtgtccgtgtgtgtgtgtgtgcatatgggtccatgtatgtgtgtgtatatgagggagacacgcaggtgtgtgtctgagtgtgtgcgcacatgggtccatgtatgtgtgtgtataggtgagggagacatgcatgtgtgtgtccgtgtgtgtgcatgggtccatgtgtgtatagtgtgtacacatgggtccatgtatgtgtgtgtatatgagggagacacgcaggtgtgtgtccgagtgtgtgtgcatgggtccatgtgtgtatagtgtgtgcacatgggtccatgtatgtgtgtgtatatgagggagacacgcaggtgtgtgtccgagtgtgtgtccatgggtccatgtatgtgtgtgtatatgtgggggagacaggtgtgtgtccgagtgtgtgcatgggtccgtgtatatgcgtgtatatatggggggatatgtagatgtgtgtgtgtatgaacaggtgtaagtggggagcactcaggtgtgtctgtgtgtgttcgtgtacacgtgtgtatgtgtgtgaacatggaggggtgtgtgtgtccgtgtgtaggtttgcgtgcatgcacacatgcatgtgtgtactggggcatccaagcccctggtctccactccataccaccctacgcctacctccttgatctctgcgcccagccttggctgtgctcccctgctgtctgcacgtgggtgtctgcacgtgggtgtctgcatgtgggtgtctgtgccctcaagtgtctcgtgtctgcacgtgggtgtctgcaccctcacgtgtctcgtgtccgcacaagcatgtgtaggtgtccctgctgggctctttggtgggcggccagtgatcctcgaggtcacgcatgtcttctgtgggtgcctgctccttgcaccccacagtgttgagatgggtttgcattggccccgcctgtcccctgctcacccgcctccctctcttcctgcttctaagccccgaaactctggattccggggcccttcacaggtgagcacgtggcagcagtgcctgcagacccctggctggcccatctgtcctcccgcccgtctctctgatctctctctgccaggctgcccctgtctccatccctcttctccctcccactgtcggtgtctgcccaccagccacccctgggtcccgtcacagcccttgtggcctccgcagctggggcccttgtcctcccgcctcccccaccctgtcctgttgccaccttcctagaggccctgacctgccctctgccctccagcgagaaggcactgcagagcaaccactttgaactgagcctgcgcactgaggccacgcaggggctggtgctctggagtggcaaggccacggagcgggcagactatgtggcactggccattgtggacgggcacctgcaactgagctacaacctgggctcccagcccgtggtgctgcgttccaccgtgcccgtcaacaccaaccgctggttgcgggtcgtggcacataggtgagtagggaacccagcgtgccgagaatagtggcgagggctgcccagacttgcccagctgggctgtgtccagtcacttgtgaccaggggtcagggaggacacgccttgctgcctgagccgaggtcactgccagtgggaggaggaagggccaagaagatgcaggagaagcaatgatcagtttccacgtctgaaaggcatcccggccctgcccggagcctgccgggggtcgctccagtctgagcctggccgtcgcctccagcaaagcttgagctgcaggaatgtccccggccttggctcccagtgccctccttggggtcaaggccacctcatccttgcccccaggggtgatacctcgggggttctccaggctgaggc

SEQ ID NO: 51019 - DNA, 2026 bp, Homo sapiens
cctgcacacccagggagcagagggaaggttccctgcaggtgggcaatgaggcccctgtgaccggctcctccccgctgggcgccacgcagctggacactgatggagccctgtggcttggtgagtgttttggggagactagagagggatgcccaagggtctcatgatatccgagggacagactccaccccccagcgcccacccttgagtcagggtgcatgtgagccggcgggctgggctctcttctcccgctgtagcccctgcagttcccagtgctgtggggccgggaggcgggtgcccaggtgtgggccccctgctggtcacctgctcgttggggtgcccatcagcatcactgagtcacagccgggtgactcccactgtctgtgctgcagggggcctgccggagctgcccgtgggcccagcactgcccaaggcctacggcacaggctttgtgggctgcttgcgggacgtggtggtgggccggcacccgctgcacctgctggaggacgccgtcaccaagccagagctgcggccctgccccaccccatgagctggcaccagagccccgcgcccgctgtaattattttctatttttgtaaacttgttgctttttgatatgattttcttgcctgagtgttggccggagggactgctggcccggcctcccttccgtccaggcagccgtgctgcagacagacctagtgccgagggatggacaggcgaggtggcagcgtggagggctcggcgtggatggcagcctcaggacacacacccctgcctcaaggtgctgagcccccgccttgcactgcgcctgccccacggtgtccccgccgggaagcagccccggctcctgaatcaccctcgctccgtcaggcgggactcgtgtcccagagaggaaggggctgctgaggtctgatggggcccttcctccgggtgaccccacagggcctttccaagcccccatttgagctgctccttcctgtgtgtgctctgggccctgcctcggcctcctgcgccaatactgtgacttccaaacaatgttactgctgggcacagctctgcgttgctcccgtgctgcctgcgccagccccaggctgctgaggagcagaggccagaccagggccgatctgggtgtcctgaccctcagctggccctgcccagccaccctggacgtgaccgtatccctctgccacaccccaggccctgcgaggggctatcgagaggagctcactgtgggatggggttgacctctgccgcctgcctgggtatctgggcctggccatggctgtgttcttcatgtgttgattttatttgacccctggagtggtgggtctcatctttcccatctcgcctgagagcggctgagggctgcctcactgcaaatcctccccacagcgtcagtgaaagtcgtccttgtctcagaatgaccaggggccagccagtgtctgaccaaggtcaaggggcaggtgcagaggtggcagggatggctccgaagccagaaatgccttaaactgcaacgtcccgtcccttccccacccccatcccatccccacccccagccccagcccagtcctcctaggagcaggacccgatgaagcgggcggcggtggggctgggtgccgtgttactaactctagtatgtttctgtgtcaatcgctgtgaaataaagtctgaaaactttaaaagcattgcttttgtccatcctcaccagcgcgctggcccgttggcttcttgctccgctttgtggtgggagcacggacttggagctcccttgggtggccctggatggagccaggccctgcacagggatccttgtggctgatgaggccctgagtggggagcacacactgctgagcactgtgggaggcggggccgtggaggcaggaggctctctggcgtgcacgtgtgggtgcgtgtacgtgtgggggtgtgtgtgtgtgggtgcgggtacgtgtgggtgcatgtgcctgctctctggcgtgcacgtgtgggtgcgggtacgtgtgggtgcgggtacgtgtgggtgcat

SEQ ID NO: 51020 - DNA, 1048 bp, Homo sapiens
tctgtcatgggggcaggtgaccgtgcctttaggggacagaccgttctccatcaaggctggacgtgccccgtccctaaagcagccctgtctgcaagtgcccagcagaccccacggtgcccgagtgccccggggctgccagcttcaacagcagacctttaatctgactatcctagagttcagaagtccaaaaccaaggggcaaacaaggccacacgcttcccgaggctccggggaggacgctgtctgccttcccagcccctgccggctcaggcatctgtggctgcgttgcccgtctctgtcccctggtcccacggcgtctcccccacctctgcgtcttctctctctgcctctctctcaggtgggccctggccgttgtttcagggcctgcccggggaaccctgggcgatcacacctgagaccctgacgtaaccccctgcaaagccccttcttctaaataaggtcacattcgaggtcttgggactacggcctgcttgtcgccccctgaggtgcatgatactctgggacccacatctctgtcttcggggatcgcctggcccttgtccaggccccggggcccagggtgtaaatgagaggacacagccgggcaggaggaagccgtccctttcccgagctggagctctgagggcgccttaggggcagggggcatctgggttcccacctggtcagagtaaacagccccgggcgcctgtgccatatgcccactcccgagagcctccggtgagggctgaggcctgcactgtccctgctgtccaggtcccactctgacctcgcctgtctctgacccgtttcagtacggaagccgcgctacgtcaggcgggagcggcccctggacagggccacggatcccgctgccttcccgggggaggcccgtatcagcaatgtctgacctggaggccgagaccacgccacgcacttggcggcagggacccggaggccgaccccttggcgggaaccagcacaaagtgttggcatcgcccggcgcccgggacagtcctgggcacagcctcggctctgagtccctccgcctc

SEQ ID NO: 51021 - DNA, 1060 bp, Homo sapiens
gcctgcagtcctgcagagcacgagtccctccaacaggcctgttcattctggatgctgccgcctaccactctctgaagtacgcagtgtggagtactcagggtcggggtgctcagggccggggtgctcggcgtggagtgcagcgtggagtactcggggctggggtgctcggcgtggagagtgcagcgtggagtactcggggccggggtgctcggcgtggagagtgcagcgtggagtacttggggtcggagtactcagggtcagggtgcgcagtgtggagtactcagcgtggggtgctcacggccccgccatgctccctgggggtgtccttgtctgccgcccacctaccctccagagcatgttagtatctggaatgaaagttatctcaccaactcaaatagagaatcattcccaggagacccagctggtgtggattttgctttggctgacatgcccgtcctctgccccacgcaggctgttacaggcgctggaacgcggacgggagcgccagctgcgtccgctgtgggaacggaaccctcccagcctacaacggctccgagtgtagaagctgtaggtctgcccggctccccccggctcccttctcacagctccagctgtgggagacactgtgggagttgctgtctgtgtccccaccttgccccagagccactgtccactggggaacagccccgggagccccctcttcccgagtctgctgggccattcgggacagctctgtggtgagggctgctccgccccctcagcccctcgctttcatatttccgtcctgagatcccttcagggtgcacgtgggtgtccccgtgggctccgtgcacacaggcttcccacagttctgctatcccacagttgctggcccgggtgcgccattccccatgaacagaagctcagggacccccgggcggccacatcctggtaagtctcagcaggccacagccacctctgccggtgtcctgggggctgggggccgtcggagccagtgcagaccctcacccttgacgcagccacagcaggctcagggttctgcaaaacagccagaggggag

SEQ ID NO: 51022 - DNA, 1022 bp, Homo sapiens
ggcatggggtgccctcagggcagggcctgggcagagggcaggctccgagaggggtcacgttcttgccgcctacctgacagcaggccttctagaaagttctctccagaagcagccaccgccgtcctgaggcactttgtgcggagacgggaagctgtcgcctcagaggtgggtgcgtagaagggtttggccgggtgcgaggatgaccgcgtctcccttgggctctggagtctgcggtgggaagggcttggtttcagcaccctctggtcagaggccggccgagcccatgggcggtgaggttggtgcctggggtcgtggctggtctggtacaggtggggctcagcccggagaagctggagccggttcccaggccccgcgctatgactggggtgggggcaacgtctctcgtgaggttttttacttaaatgtgaaacggctcagtacggtggccgcagccgggaacaaggtccgacccaccgaggcccagccttgaacttgccgcgggggcacctgaacacggttttacagcccggatcactggctttcttgaagtttgggaactgattgatcatggtggcgggaggtaaggttcattgttcttgatgaacaaaattcttagggcgtgaagagccgatgctttaattaaccccccgggagcgtctcaggcctccccccgggagcgtctcaggccccgtttacgctgagtgtctggggaaagacgtggtttggttttgtttttctagtaacccagatgaaatgtttaaaagcatggttggcagcacattgaatttggcaaaattaaggtttgcatttgtgaaaatgcggatgcagtttgcggttcttttcagacattttggtaatttgcaaatacttatttgcgaaacgagtttgtcagaacattttttagtatctagaggaagatgagatgggccgaggaggtcgcgcacccctggatccctggaggagctggtgtgttctctgtggggcgggtggacgtggcccggacacacgggccgtgctcacag

SEQ ID NO: 51023 - DNA, 1052 bp, Homo sapiens
caggtgtgagccacgcgcccgaccaacttgtgtatttctagtagagatggggtctcaccatgttggccaggctggtctcaaactcctgagctcaagcaatcctcctgcctcagcctcccaaactgctgggactacaggtgtgagccacgtgcctggccctcacactttctgttagtcctttcaaatgggatcttccaaggaactactagacataagaaaacaaataatgacaatttttttttataaatgaggtctattttgctatctccagttctggggatgcatgctgttggttttttgaggcaaccattgagctggggagcagaggatgaaaccagagcacgttaaaatacaacataattcacagttcttaccaagattcgagattttacgtatcccatttgctatccgtctcttctgctcaagggcagagatttcctgtgagttttcctcactctcgtatctccagtgcctgacacaggacaggagctgcacgagtttgttgagtgagtttctggctgtgaacctgtgaggctgagtgcacgaacgtgtgggcaggtgtggctgtacaggtgcgggttcagatgggagtgcaggtgagggatgtggctgtggctgttcagacctggggtgtgatcagggcctacgggccgcagccaggatgcctccctgcctccctgcagaagcggatgcagcagatcatggcccactgctttctggccgccaagcccaagctggactgcaagctgggttactttgacctcattggctgtgacttcctgattgatgacaacttcaaggtgctgtcctgggcggcggggggcacagtagacagatgcaaggaggcaggggccatctgtacaccctgaccacactggcaggccccaggcagaatctgcagtcagcccccaccctgcctgcatgcagccctggggatgggtgtatccatgaggctcaccccctgtgcagctaggatggaactgcaccccctcctcagagcagccccctcaggccagagcttcagaccctcagagcttcagtggacaaacagg

SEQ ID NO: 51024 - DNA, 1021 bp, Homo sapiens
gggcctcttcccaatggctggctcaaggtgtctgtgccccccaagtcgagacctgaggatcggggggccccgcccccaggcccaccccccacatgccctgcctccgactccacacggtcacggccaagtcgccggtccctcctcctgccctgctccgcagccacgggggactgaggggccagcagaatctgctttggccacgtggccaccctgcgctccacagggacagcagctccattccctgggactcggcagccccggcactgctagaaggcaccgtcggctgtggtctctggccagcacagcaggtggggcacagccagggcgccaggaagaggagaaggcaggacagagggaactggggaccacagaggccaaaggaggccccaggtctcagagccagtgaggaaccaccccaggccaggggcagcccccaccaacatggtcctttcgctggggcctggagtgggggttcccaggtgaggggctgggaacacacctgtcattgtgatggggtccccagtcccctcccagcaggtctgttggaccctctgggggccaagggcagcagcggcctgttctgcagcccactgaggccagggaggggtgaagcaggaggggcctgggaggggtgaagcctccatggctggccaagcacccaggacttggttaatccacacctgctcttaggggtcagggccacactgcctgacggcttccaaggccgctaatggccacatcacctcagggtcctccctctgctcttgctaccctgatgcccctggggcccctgtgccctccggcctctgccctcggctctgccccacatgcctggtgctgtgtcgcgccatgatcccaggtcaggactacatcccctggtgacattggaaccgtccagctcccctccctgtggcgcgtgtggttacacccccaggctcaggggccccacgacgtcagcagaggtcacctgagcccgaggggacaatggaacctttgccgcccctgggccctgactggatgt

SEQ ID NO: 51025 - DNA, 1145 bp, Homo sapiens
ggccagcaatagctcggacgcaatctgtgaggacagggaccccccagccacgcagccccaggagacccagggccccccggccaggcccatcactgtccagcccactgaagcctggcccagaacctcacagggaccctccacccggcccgtggaggtccccgggggtaagggcgcctggcccagcccagcggggcccccaacccgaataggagaaggggagggcggcatgggggcccctcctgtggaccccacccagcagaccccttcctgcaggccgtgcggttgccgccatcctgggcctgggcctggtgctggggctgctgggccccctggccatcctgctggccctgtacctgctccggagggaccagaggctgccccccgatgcccacaagccccctggtgagtgcctcatggccctgccgcactgctcctggcgggtgaggcccacccaccaatctctccttttttcctccccagggggaggcagtttccggacccccatccaagaggagcaggccgacgcccactccaccctggccaagatctgacctgggcccaccaaggtggacgctgggccccgccaggctggagcccggagggtctgctgggcgagcagggcaggtgcaggccgcctgccccgccacgctcctgggccaactctgcaccgttctaggtgccgatggctgcctccggctctctgcttacgtatgccatgcatacctcctgccccgcgggaccacaataaaaaccttggcagacgggagtctccgaccggcactgtgggctgcacacctgtggcatggaggcttgggccgtgcccgcctctgactggagaggggtcttgggaggcttgggccgtgcccgcctctggctggacaggggtcttgggaggcttgggccgtgcccgcctctggctggagaggggtcttgggagacttgggccgtgccaacctgtggctggaaaggggtcttgggagacttgggccgtgccaacctgtggctggagaggggtcttgggagacttgggctgtgccaacctgtggctggagaggggtcttgggccagggtggaggtgagggtagcggggtcaagtgggaccctggaggttggtccctgggtgcgagttccagattgagtgggga

SEQ ID NO: 51026 - DNA, 1034 bp, Homo sapiens
ggtccaaggcccagcaggtgcaggtgggcggggcggcctgtgccacatggctggaatttaccaccttcctctgaagcgttttcactggtatcatgtgtaggcttgtttttctcccactgctgagtgagtcatcttgtttttatgtagaatcctgtgattcctggcgacagccagtgggcccggcccaggttagggatccttcagaactggggtccaggcctgtgtagcccctgtgccccgttacccctgctggccccgggcaggccttccggggcccccggcttctccctgccctgtgttttcatttgtgccgcctcccttcgggaaccttccagaacgtgcccacactcccgctgcagccaataggcaccttaaatagccacttcgtgcggctggccgcggagctcggagggggaaaggcgacgctgacctgtgccccgctcgcccgcagagctacatggaccccatgaacgagtacaacgcgctgaacgaggccaagcagatgatcgccgtcgccgacgagaaccagaaccaccacctggagcccgaggaggtgctcaagtacagcgagttcttcacgggcagcaagctggtggactacgcgcgcagcgtgcacgaggagttttgagcgcccggccgcgccccgcgccgccccccacgcaccaccggggcggcctcgcgggtgactccgggctccgtggctgtcccggaccccacctcttccctgccgcccgccaccggccgaccgaccgcggctgccccagttgatgagcggcgtgtcccctctgcagcgcgcaccccggcggggctttggctgtgacgcggtcggggcgcggggctgggctgtggccccgcggcgccgcctcctccctggtccctcgaaatcgtggcatctcacttctgagaacgaaatctcgcttcagtcactctgccgaaggcgctgacggcatcgcggccggaacctctgggcccggcccctcccagggccgccgctccgtgggaaaaaacagctcctccatttccttgaaaactga

SEQ ID NO: 51027 - DNA, 1023 bp, Homo sapiens
ggctctgagctgtgtcctggggtggtctgggccatggggaggttctggatcatgtcttgagaggtctgggctgtgtggggggtccaggccatgtcctgggggtctgggctgtgtctgtggggagtcagggccatccatgtattgggggtctggggcaggggggggtccaggctgtcttggggagtccgggctgtgtggaggggtccaagctatgcctttggggatcaggcctgtgggaggctctgggttatgtcttggcgggggtccaggctgtgtcttaggggctgggccatgttctggggacgtgtgaatcctggagggtggggccccggtctcgcgggtggctgtgtccctcgagttcaggcagcacctctcggaactttctggatttgcgtgctggcgtctgtcggcctcgatacccacaggctgcgcccctctcagcacaggaagtcctggagaacctgaaggaccgctggtaccaggcggacagcccccctgcagacctgctgctgacggaggaggagttcctgtcgttcctccaccccgagcacagccggggaatgctcaggttcatggtgaaggagatcgtccgggacctgggtgaggctgggtccagcctggccggcacgccaggacccaggaccgactggcaggggccgggcatcgtcgggaggtcggggcaggtcctgcgggagccccagcctgggtgtgggctgacccattcccgtctcgcagaccaggacggtgacaagcagctctctgtgcccgagttcatctccctgcccgtgggcaccgtggagaaccagcagggccaggacattgacgacaactgggtgaaagacagaaaaaaggagtttgaggagctcattgactccaaccacgacggcatcgtgaccgccgaggagctggaggtgagccctggcgcagccgtgtcccggagccggccctgcgaggtgctgtggcgggaggggctggtggatctgggcctgaggcaggaagctgtgctggtgtctggcctgagac

SEQ ID NO: 51028 - DNA, 1090 bp, Homo sapiens
cgtatttctgttaaaaatacaaaaattagccaggcgtggtggtgcacccctgtaatcccagctactcgggaggctgaggcagtagaatcgcttgaacccgggaggcggaggttgcagtgagcaaagattgcgccaccacactccagcctgggtgacagagtgagactccatctcaaaaaataaaataaaacgtgaagagtgtgacttttggaagctgtggttggagagtggggtctggtggtgattctgtgtgacagagggggagggtccatgtgtttccccggggaggggaccgtggcatccaccttccccagtgtctctggcgtggcccggcaccccacaagccccacgtcccggacgcttttcgcgttgcctggtggagcctgtcgctgttggtggcaggttcacgcagccatggagtcctgggccggcggcatccgtctggctgttcggggtcctgggggcccagtctgacggccacctgcccatttgctgtcttgcagggtggatgtgaacactgaccggaagatcagtgccaaggagatgcagcgctggatcatggagaagacggccgagcacttccaggaggccatggaggagagcaagacacacttccgcgccgtggaccctgacggggacggtactgtggctgggccggggtgggtggggcggtgggcggggcgggcagggccatgggccttgcctggtgcctggagggcagacaggccctgtctgagggacgggcggtggggaagtgtcagccggagaccccgaggtgtggtggggtgcacggaagctgggttcatgatgccagaatcctggtgacagaggtgtgtgtgccaagcactgggcgtggcccatggagggcgcctcttatgtcttcggggccttcatctggtggtgtctatgcctcttggtggccccgaggcacagacgttgccggctggcctcacaggtgaggaaacgggtgtggggtgctggccggggccctggggctccagacgctggcatcctgccgcttccagcctgggcagcagagcaagaccccatctcagttgagaaggaagttcagctcagtatcagaggccct

SEQ ID NO: 51029 - DNA, 1021 bp, Homo sapiens
cgtgtggcccggagaaaacaatgccacgtgtggtctggagaaggcagtgccacgtgtggtctggagaaggcgatgccacatgtctggatcctgtgaatcgaggatatgtttcatgttgcaggatagacgtgcttggggaagtctttgctgagtcttgctaatgatgtgtctgtgtctctctgcagactgtgagctgcttgtccccatcctgcggccgtcctggggacacagagccctccgtggtgcccggggattggattggagccaggacctcacttcctcctctgcccctgcccctgcccctcccagcacctggcccacaccctgcagcccgccccatggtctggccctgggtggcgatggcgtccaggtggggtcccctcattggcctggctccgtgctgcctctggctcctgggggcagtccttctgatggacgcgtctgcacggcctgccaaccactcgtccactcgagagagagtagccaacagggaggagaatgagatcctgcccccagaccacctgaacggggtgaagctggagatggacgggcacctcaatcgcggcttccaccaggaggtcttcctaggcaaggacctgggtggctttgatgaggacgcggagccgcggcggagccggaggaagctgatggtcatcttttccaagtaggtgccgccatgtgcccagactggggggctgtccgcgtgcgctcgcctgtgtgttcctatcctggctttgcgcggtggggggcgccgggccctgtgtcgggacctgccgggctgggaagacgtgccggtgatgagcgccacttccagcctgctgtgtttgcgcggaggcctgcgctggcagcccagagccgctccttgaatgccctgggtccgccgggggctcagagggccagagtgggcctgtgtggccgtccctaggacagcctggaggagcccacgcggcactgcagtggtcagcgtcctccatgctgaggggcagacgccggccacgggcagcctccgcaggctgcagcc

SEQ ID NO: 51030 - DNA, 1099 bp, Homo sapiens
ccaaggctgtggccccggcttaggggctcctctctgccctcagcaccccttctgtgggcacggcctgccccctggggcctggatctggaacggggggtctcccttctgcagcccctgccctgcttggccacagcactcaagagtgctcccttccagagagtcgggcagctgtgcatctgtacagggggaaccaaggttgtgccgggccctcctggagctgggtcagcggggacagcagtgtgggggccctgaggaggcagaggcaggagcgtggcctgcaccttcctggttggcgtgagccctgggctgcggactcccctgtttgcttccagttttcagtggctcctccccaaactgacgggccaaccctgggcaagaacgggctgggggcaggcacccaggatcaggcagcacccagccaggcctttctgaacaccgcctggggcctcaccatccgggaatgggggccctctaggttcttcagcagcagccagtcccccaccctacccagtcccggaggtaggagctgtgatgacagatggacatgccagaaatgggacccagggccgcgtagagcaagatggtgatgagagacaaagagacgtggagtggtggggcggggggccggggctgaatgagttgggggccagggcccgggtgaatgggggcggcgggggctggggcagggaccacggccggggtgaatgaggtgggggatgggggctggtcgggggtggctgggggctggcatgggggccagggtgaatggggggggctggggccagggtgaatggggggcgtggggatgtcctggtgctggcaccacctccctggcctctgcctcctggtttctgccccagtgggaggtgatcagccacttagccgcaattcccctggaatgtgccatctctagccccctctgggcacccaggagcaaaggaatggacaggtcggggtggggtgggcggcctcacaggagggtccaggctcccagcccacccagccaaggctccatcctctggcccagcccagctgcaccccttcattctctctcagcctcacctcctgggctggacccacactgcaatgtttgccatag

SEQ ID NO: 51031 - DNA, 1044 bp, Homo sapiens
gggcgcccctcggtgctgcaggctggggggccttgggtacctgcagagccttttctctgaattccttatgtccggtgggccagaagcccgtcctcctatgctggtggaaggcggaggaccggagtccctgcagaaggccccgtgcactcgggggcctccctcacatcccgtgccccctgcgctggccttcacagtaggtaatggctccggcccgggtgttcgctgtccacggaacatggcagaggggcaccccggcccggaaagacgccagagccagcaggggctgtttcgggccgcgtggctccccgggtctcggccgtctcccctcttctgcgtctgttccgtgacttcgcctgggtgggatgtaccgcaggtgcatcgcgtcgaggtggggcacggccgccggcaagaaacccaccctgtccggaggcgggcgtgagacaagcccagcccgcacgcgctcatctttcttcgttttttgatcagtttattcagaattgctctataatttaccaattgtatgtatttaacctattcttgtggaaaaaaaaggtctttcattatatctttatttctgaatttcatgctgcttgtgtctgtgtgggccgggatgtgtgtccatctctgtgctcagggctggggtggcccgtgaccagggggtcacacctgctggcctggggtggtgtggcagctgcagggcaggtgggtccccacagggaatcgcgtcgctggagccatggtgtagagccctctgcagggctctctccccatcccgtactggatgccagccctgccctgatctccgcttctgtgaccgccagcatcacttccaaagcccggtgtctcccgaggctcatgggagggggaatgctaacgaatagagtgtttactcaacacgctactgccgggtgcagtggctgccgcctataatcccagcactttgggaggctgaggggtggatctcttgaacccagcctgggcaatgtagtgagaccccatctcacaaaaaatacaaaacactacctggtgtggtgatgtgcacct

SEQ ID NO: 51032 - DNA, 1034 bp, Homo sapiens
tggttctgagcagccagctgggtggtgtctggggatagctgggaggcacagcggctgccatgtgggactgggactggagtgctccctggtcttggcctctgtggctcagccttgctctggtctgcctgagtgcaggggccaaggggcacagggccagtgaggccggccacgctcgggccctcacctgtgagatggggtcggaatttgacacagcctagggcttggttcttggtggtggaccgtggactcctgagaacgggagtgctggtcctgaaaggcgctggttggagaccagctgcttttctcgctgtttttctcttaggagattaaacaaaaacagaaagcacaagacgaactcagtagcagaccccagactctccccttgccagacgtggttccagacggggagacgcacctcgtccagaacgggattcagctgctcaacgggcatgcgccgggggccgtcccaaacctcgcagggctccagcaggccaaccggcaccacggactcctgggtggcgccctggcgaacttgtttgtgatagttgggtttgcagcctttgcttacacggtcaagtacgtgctgaggagcatcgcgcaggagtgaggcccaggcgccgagacccaaggcgccactgagggcaccgcgcaccagagcgtgacctcggcaggctggacacactgcccagcacaggcagacccaccaggctcctaggtttagcttttaaaaacctgaaaggggaagcaaaaaccaaaatgtgtgactgggctttggaggagactggagcctcagccctgtcctggccacgggccgctggggctggtgtgggtgggccttgtgtgctggatttgtagcttatcttccgtgttgtctttggacctgttttagtaaacccgtttttcattttattagatgtggtcacttagaaatgcaaacttgctgccgaccgcgggctgctcctgcgttcttggagctcctggcgcgtttctcggagctcccggctcctcagcgggtgggaacctcggggcccagg

SEQ ID NO: 51033 - DNA, 1053 bp, Homo sapiens
gggagaaagcctggtcaggtggatttgagagcttgggaggggaggacgtgtgaagagccatgaatgaggcccgaatccaggggatcaggtcagggcagggggcatttggcagaacttggaggggtgtgtggtggagagtggtgtgtttgaggtgcgttttgctggcctttgggtgcagttgggtcggggaagcaaacggtgctggagagtcgctgggtctggacctgagtcctgagaggggcggcctcagctgggcctggagctcctgctgtgctgggggtgttgcaaggaggccctgcatgcctcttccgacccctctgctcctggtgggggtgtgtgtggacactccagggagaggggtgtgcagtagctgtggttgtctcgagctcccggggcagtgggggtctgggtccagtcgggtggtgggtacaggtggggtggggaggggcattgggtctgggtggtcatgacagtgggtggtagtggagagcaaggtcagtgggggactgagcctgggagccggctggggacggagagtgcaatgaggactcgggagccgagctgagggggggggggggggtggcgtggggggatggggacgaggtctccaggagcccctgctgtggcggacgacaaggccctttctgttttgtttccatgtaggtggctattatcatggaaaactaatttttcccagagaatttcctttcaaacctcccagtatctatatgatcactcccaacgggaggtttaagtgcaacaccaggtaaggtgcctggaggggccgcggaggctttctggctgcggtggggagtgtgcactgacggggcccccgttttgcaggctgtgtctttctatcacggatttccacccggacacgtggaacccggcctggtctgtctccaccatcctgactgggctcctgagcttcatggtggagaagggccccaccctgggcagtatagagacgtcggacttcacggtaagttttagagcctctccctggtgggccgtcagccttgtgtctggggggctgttctctgttcctgagtt

SEQ ID NO: 51034 - DNA, 1024 bp, Homo sapiens
tacccctgtgtggtggcacctggggcttcggtaggctgcaggacctgtccagcacctcagcccttcatcgactaccaaggctgatccagcagcctgacccctccaggtcagcagacaccacctagagacctagtgtcatttatagagaagatgctggagctgtcagtaagtttctggggcctttggcggaggctggcgccagcctcgatctggaccaggtcagtagtcagtgtgcccgtgaatactgtcccgccggcaagcacaaggcagagcagggccaggtcagcagttgctgtccagccacagggccccggcttcaggtggctggagcagcaggctctgtttgcctgtgtgtggaggctttggatgagatttcactagaagagagtgctgctgctagaagaaggtttgcaacccctgctttggactgtcgggagggttgtgggtgggtaagaatgaaaaaggctctcctgaaggcattttggccgagttaacacagccacacctgtggactctcctttggcccaggaatcccagttctggatcatctgcaactagggcagccagagtgcgggagtacatctgtagggtgggccctccatcatcgtgtcattgcccatgaccagcgttggggatgccagcaggccgtggtgagataaggcccgggagcaggtgtccagggcgtgttaaagtacttgttacgatgcgtgtgtgtgccttcagctgatctgaagaatatataccaccgagtgagtagtggtcggccgggcgcggtggctcacgcctgtaattccagcactttgggaggctgaggtgggcggatcatctgaggtcaggagttcgagaccagcctgaccaacacggagaaaccccatctctactaaaaatacaaaattagccgggtgtggtagtgcatgcctataatcccagctactcgggaggctgaggcaggagaatcacttgaacccgggaggcggaggttgcagtgagccgaggtcgtgccgttgtattccagcctgggtga

SEQ ID NO: 51035 - DNA, 1874 bp, Homo sapiens
cttgagccgaggtggtcaaggccacagtgactccagcctgggcgacagagcaagaccctgtctcacgaaaaataagtaaataaactcttatgccctggccctgcctccctggccagtcttatccctgccctcactgtgcttgggcccttgcacactgcactttctcaggtgtggcctgttcacctgtggccccttctaccaggaagacagctgctctgcccagtgagtgccttggagtctccagagtcctcgtccctccagccgcagaggctcccccgttctgcggctcgttttgcttgtggctagtggtaaatgctgggcagcgggcttccgggtgcggtgaaggggccggcggtggtgcctgcccacttctatggtgtggattctccatcagtgcggggtccttgagctgagttggaaggtgcgagtagctgccctcaggagctggtctgaggctgtggcccgaataccccctcaagccctgtaaatgtatccctgcgtgagtttttggaggacaggaacgaggctttgggtttctcctcgtctttgtacctgagctgtacgtcgtgtcaatgaaggtggtggcgggacagacgggaagagagaagccgcagggcctctgggtgtctgggcgggtggcaagcgagggtgacctgtgagctgtgactctgggtgaccgggccctgaatgaatggcgggctgcagaggcgggagtggggctgcgccaggggagagagctgtggccggcgctgcttctcgtcgtcagtgtagacgttgcttttaacagatgagcagcaccagcagtaagagggctccgaccacggcaacccagaggctgaagcaggactaccttcgcattaagaaagacccggtgccttacatctgtgccgagcccctcccttcgaatattctcgagtggtaaggctccgcgccactgatcgccctgcgctgactgtcgctgccacgcaggcctctgccggcccctgctgggcgagcctggtgccccagtcatggcattggcaaggtgctcctgcaccctcccccggggtgagtggggtgcccaggggcctgtggacactctctggtcttttcccaatggacgcatgccggggacatcacagagccatgcttgactcaggctggggctggagagaatctccggtgtggggcccttgaggggggcggggtccaggttgactcaggttggggctggagagagtctctggtgtggggtccttaggggaggggtccaggtatgcagggttcacagctgttgctggtgtgcactctaggcacttagaggagaaactgcctttctagactctgctctttgcttctggatatgggaattagcctgttttggcttggagtatttgacaggactagggtccgacactcctgtccctggcactggcttgggccaggtgccccgaccctcaggctgacaacgagaggacctgtgcctcataagcattcacctcatggtgactctcccccttgctgaagtatagagtgtgagagtgcatactgctctgtcgaaacactgccattacaggtctgctagtaatttggtaagaaataaagtgtgagaggccgggcatggtggctcacacctgtaatcccagcactttgggaggctcaggcgggcggatcacctgaggtcaggagttcgagaccagcctggtcaacatggtgaaaccctgtctctactaaaaatacaaatattagctgggcatgatggcgcacacctgtagtcccagctactcgggaagccgaggcaggagaatcgcttgaacccgggaggcggagcttgcagtgagctgagatcacaccactgcactccaacctgggcaacaagagcgaaactctgtctc

SEQ ID NO: 51036 - DNA, 1456 bp, Homo sapiens
atgcctgattaattttgtatttttagtagagacggggttttaccatgttggtcaggctggtctcgaacccccgatctcaggtaatctgcctgcctgggcctcccaaagtgttgggattacaggtgtgagccaccacgcccagcccctttgtgaatttttgttttccttgtccttcctgctgtcatattgggatgagaagaattgggggaaatagccccctggcctcctgggggacgtgagaatgctgttctgtgtgaagctcaggaagagtggctggggaaacagcagttgaatcgtgaacatgattttaaaagcctctccaagcaggtatgggagagaagcttgtttgtgactcattggatggaatctattttatttttgcgcggctgtccatgaactttcgttaaacctgcggcctggccacttagctaagcccagacccacctgcacttgaattgtccagtgaattattttgtatatggcagagtgttagcttcagggtgagtgtcgaaaggacagcctgtgtggcggtgctgcttggggtcatcactgtggccatcaccaggtgttggcctgaggggagatccctggcccattggcttctttagccaggagctggggatgccactgtgtggaagcacttccttcccaggcaggactgtaaccccatccctggtgggggccctcctggggaggcactccttaggcagaggaacccgctggggcccagaagggccctgcgttgtgtgtggggtcacatggaggccagtgatgtgtgacagagtgggaggcatttggcagggaaatcagggaggcctctgaaggcggtggctctggctatgccgggaagggcctggggagtttccagtacaggctaggctgggaagcagctgtgagaaggagtgtgtcggtcaggactttggagtgggacctgggccgtgctgggtcttgggagttgggaacgaggagggctggctggggctgctctgtcttgggagctgggaatgaggagggctggctggggctgcctctgtcaaggggctggcaggcaagaggacgtgttgatgtttatttgcttggctgtggagtatcctgaagggtggatgggggagtgggtgatcggaacagtatgttgacttatgggtacaggagggccttgaaatgggaagagactagaagctcagaccttctggacccacggggggagttgggaggctcctgtggtgttgatgggagaagtgatgacattttgcgttagagaagataatgagagtgggaaggctgtggtgaacaaggattgcaagagtcagggaccccagaacaagaagcagggttgggggtggtgctgaggccacacatttgggagcacgcgttgggtgccctggctgagctctgcactccaggccctgggtgtgtggggtgagcagccaagccctggccattgacatcctcaggt

SEQ ID NO: 51037 - DNA, 1079 bp, Homo sapiens
agctccctggagcccaaccctccactgagcctccaggggcccgggacgctccatgcccgggccgcgccgcgcctcccctaagggccgggtggggcgtgggagcggaggacaaggcgggagccgggaggcgggagggtcggggttctttctccaccggggtcgccctcagccgggcctgccgccctgggccgtggcacatggggagggaagcgcgcggcttcggggtctggggctctcgcgcccactaacggtgcccggagccgcccgccagtgcgcaagcgccgccccgccccccgccccatcccccaccccggggtcgacggcgacagagagtcgtgggcgcggtccgccagtctgcctagagcggccagccctccccctccctcctcaccgccccggaccgcgcaccggaagcagaagctaggctggttccgccccgcgagcggccatcttggaggctgaggcggcggcggcggcgctgcggcgggttcggtgggcccaatcccggggcggtgcggctgtttcgggcgcgggccccgcttttccgcaccctgctccggcctcgactacggcgagcctgagcgcggcggcggcccacgcgcagcgacagggagaggtgagcgcgctcgcaggcctgcgccgggtcctcgggcccgctcgtcccccctgccggagccggccacagcggcggcccggggctgctggggaccctgcgcgacgcttctccgttcgcgcccgccgcccgcggggccccggcccgagcctgcctgcgcggaacccgaggtcggttacggcgggctcccggagctccgggtcagggtcatgtcggggacttgaccactcggccgggtttcccgtcagctgggacacttgcagctgccccaggacgggcagcctcgatcctggttcgtcagtggatcacgggagtctgtgtcgggggagggctgccgtcgagcccgccgtcgcctcgcccctgaactgttagactccagactgccccgtaaaccccgagagaaacgagcgtgcccgggactgtgcttagggccagcgtttctgggaaacccgggcggtgacagtgg

SEQ ID NO: 51038 - DNA, 1035 bp, Homo sapiens
agctgccctactgcccccaccctgtcccacagtgcatgggtgccagacctggatgggctgcagtagtgcagtggggtgaggggaggtgccgcagggttgaggggctccagatgggtccagggttgactctgaactcctagaggagaggcgggtgaggctggctcagcccttggtgggcactgtccctgagggactcccagcggccggctgtcctgggagaggctggtccagccttcttccccgagggcacagcagcggctgcctctgcctgcctggggttgggggggcggggggaagtgcactgaacctggtcccagtcctgcccccgtagcaggcaggcgtctgtctcccagcctgtttcctgaaagccccttcccatggtggagcccctcagggaggtgcggggggaggtgaagccccgagggggctgaggctgcaggtgaccccagccagccccgttcttgctttagggcgaccattgacgaggtggagacggacgtggtggagattgaggccaaactggacaaggtgaagggcgggcctggagcgccctgtgcccggccaagcttgggatggccacatggccagactcgccctccaggccttactaagccacttacaccccccatatgtggagcatgcgtgtggtgctccaggtcctggtccctgtgtcttagcatgtgtgttccagggtgcacatgtcacatgcacacatgtggctggccctgagtctcgtcccatctgggaggggctgggctgtggtgagtccccgacccacggtggctgcccgtcccctctgctgggctggtgacacggggacagctgctgtgtgggctgagccttggtgtggctggggctggggctgagaaaggggagggggcaacaggccgtggaggggggagccgtgtccatgagccccacatgggctgagaaagagggggcaacaggccgtggagaggggagccgtgtccatgagccccacatgggctgagaaagaggagggggcaacaggccgtggagctgggagtgggcagc

SEQ ID NO: 51039 - DNA, 1020 bp, Homo sapiens
ccctggtctctgacttgatcctgtgtccagagcagcgcgtggggaacaggcagctggagccgcgtttaaggcctggggtagggtgcttggaaacgtgaagtggtttgaatgacccaggggcttggaggggtggcggccgagaagagcggcggggaaggtcaggtagggggtaggggttgtgtgcacaccgagtctgcatgttttccatcattcgtggcgtgcaggcgtgtacacctgcgtgaactacatgttcacagacgtgtgcacaagtgtgcatcggctttgcttggtggacatttggcaaacgacaatggaggcaaagaaacctctctgcatccccaagtgcgcacctgcgtgaggccccctcctctgcacgagctcgtgcggggtgcgctcttgtgaactttgcccctctgcgtgcctccctccggacaccaggccttgcacaggacgtgtggatgagctgtgccacggggctgtgcttgcttctgcatgtagcctgccgatgagtgcacgcaagcgtgtgcacacaccacctgtctgtgtgggttcacgtactgtgttagccatgtcagcaatagacacatcaccttgtacacgcgtgttccatcactaggtacacatgttgatgcgtgtctgtgcagtgtctccttgaacacacatgtatgtgtggtaccagtgtgtgcaggcatgtttgtgcatgaacatgtttgcacatgtgtgcttgattgtgtatgtgtgggtgtgcacgcgcgcgctgggtctcttgggatctgctggcaagtcagcatgtgtgtggaggcacggggagcctctgtatccctggagccctcaccaggaggctcaggagccttggagtgggaggctcagggccagccaggagagtggccgccagccctgggcagaggaactggggccatcctctgctctcccatcttctgttgctgacctgggaaaaggggttgaataacttgagcaccctaggatcctgcattgaggacccgggctgtggggaggtgt

SEQ ID NO: 51040 - DNA, 2959 bp, Homo sapiens
ggtcggagctcgagggggaaggagagccaatgtgacaccgcgggcgggcggggtcgttcctccggtgagctttacctgccgccatagggtcctgcgggccttccgagtgcccagcgacttccacgctcgtcacgcagccacgtcccggacctacctgtaccgcctggccactggctgtcaccggcgtgatgagctgccggtgtttgaacgcaacctatgctggactctcccggcagagtgagtgtggccctgacagcggggagggggcgggcaggccggccccaccctcctgacggtcaccctggtccctgaagctgcctggatatggtcgccatgcaggaagccgcccagcacctcctcggcacacacgacttcagcgccttccagtccgctggcagcccggtgccgagccccgtgcgaacgctgcgccgggtctccgtttccccaggccaagccagccccttggtcacccccgaggagagcaggtgaggaagggcccctgggctgtggccctgccctcaagtcacgtgctgattttagctccagcacctcccccagttttaaggcaaggtgaggcgggaggcaggcagccgggagtcctcaggacctggacagctggaggggattcgcccggacgccccccagcctccagctgtgccctccccccaggctggggagcggagaacagggaaggctgcttgtctctgaaaaacccctgccatgcctgatggaagaatgttggcagctactggaaaggtctcactggtgccagtggttctggtggggtggtttctgctgcccccagcactgtcccgagggccacccaccaggtggcagcttctgaccagaacctcccctattggggtgagccctgaaggggggaagaacttctgccagccccagacttctgtggcagagcagcaggtacaggactgggggtctctggcacccgcaccagccacgttcccagaccctgcaccaggaccctaggtgagggcccagggcaagcccctctgggatggccaggctacctgcccagcctccagggtcctgctgcctccttgcccaagcattgtttctctggttttaagcccctccaatgggcctcactgggggcaggagatcagccagggcccctggtggccaagctagtgggaaccaggctcgtctttaggcccaccctgtcactctcccgtccaaggccacatagtaggctgaggatggcaaacactgccccacagacacctacaggtacgtatttttccaggaagctgcggttctggaacctggagtttgagagccagtctttcctgtatagacaggtaggctctgttctggggccgtccccagggggtggggctgagggtgggcaggcccctgtgcagtcttggctctgggtcgtgggcggctctgggtcacaggtacggaggatgacggctgtgctggtgggtcacgggcggctctgggtcacaggtacggaggatgacggctgtgctggtgggtcacgggcggctctgggtcacaggtggctctgggtcacaggtacggaggatgacggctgtgctggtggccgtggggctgggggctttggcacctgcccaggtgaagacgattctggagagccaagatcccctgggcaagcaccagacacgtgtagccccagcccacggcttattcctcaagtcagtgctgtacgggaacctcggtaagaaaaacaggcacgagaagctcctgtcatgtgcccagtgactactgtggccgaggcatggggtggggggccaggggccactgacggcagcaactgggggtgaagcagccccccgcccagggctgcagtccctcaggccagcccgtagcccgtcctgggctggcccactccctggtcatgggagtggtctcagcggtggggagggtgctgggccggtcttgccccaggctgacgcagggtctggtccgtccacaggtgctgcctcctgcaccctgcaggggccacagttcgggagccacggatgaccctggacactcaagccaaagttaggccacaccaggcccaaccctgtgctggtcaagccagggcagtcacagctgcttggggcccacagcactgctgcctggtctccacagtagcctccctgcccgggtcccagcaccctggatgcccgtctctgtcccaggcgggatggggcacagtgcaggacacagccatgtacaccaagaagagagtaccaagtagtcttttgttcagcttttactggaaactgctgtctaggaccacctgccctaaccaggaataaaggcaagacagcctggagaccagtttgtttcttcagctgcaaacagctgcctgggcaggcaggtgacacaaggcctctgtccccagggatgggacctgcagggtctgttcacccagggcacccacagtcctgaagtgcaggcccagggtctgtccagctgggagagggcagaggtggcggctgggtgagttgccggcctcagctgggggcctgggggaggcccttcttcagcagagatgtgaggaagctccccagctcctcgtcctagggcagaggcaaaagcattgtgggtggtgcaggacagggaggaatgttgatacctgtgttgaccgcggtggggtgggggtcaccccttacctggtaggtccaggagaccagcagcaccttggtgcctgggtcctcagaaggggcggcggcctggaggaggacggactccacagtcacagagccgtctgggaggtgctgcacacagtggtccttcaggacgctgtggggaggctcggtgagaccctgcctggcctccagggcccaagggagtggggggggggcggggccgggcgcccacctcttgaggtggctgtagacgcgcaatgccgtctcctgctccttgcgtgtgtcatgcaggtgcacgcggcaggtgaagcgcagctggtgctcagccagac

SEQ ID NO: 51041 - DNA, 1051 bp, Homo sapiens
gccaggcgctgcccttgccctcaggtctgtgccaccttcacctgcagctccactcagcctgtcctgactgcctgaaaagccagcggctcccctatgcgcggttccctcagcagctttgcattgtctcgcgagcatgtcgccgtcaccgacgtgttcaatttcccgtttgcttattgccttgctagactttgagactgaaagttccagggagacagttttgtgtttgctcattactgactcttcggtactcgggatgaggcctggcgcacagcaggcgaatgaaggggccagtgacccacaagcccagagcgggggtgaaggctggggcagggtgggcccaggctgacctgtgctgcgtccccctagccacttccacctggaccactgcggggcactcccctacttcagcgagatggtgggctacgacgggcccatctacatgactcaccccacccaggccatctgccccatcttgctggaggactaccgcaagatcgccgtagacaagaagggcgaggccaacttcttcacctcccagatgatcaaagactgcatgaagaaggtggtggctgtccacctccaccagacggtccaggtcaggttcccagggccacagctggcacagtcactgcccacccccacaccaaccatgccctccgcccgttctacacagtttctggaaggctggggcctcagggtgagcccaccccacctcactcttgcgtccagcaccgtggggacaccaggaggcgtcagcgcgaggatgcgggtcccagaccagactgggcgccgacccgggagagcacgtgcagggtgggggtatgcaccggcttatgaacccaccaggctctgtccgagcggcattgaaatggccagagtgggacaggctggtgccctcagagcgcttggagcggccagagactcgctggagctcccggggtgttgccgggcagggaggcaggggctggaggggagatgggccagctctggagggtgcctggttctgggtgtgggtcagggaagaagtgaaggttaaatcagcgagtgacag

SEQ ID NO: 51042 - DNA, 1589 bp, Homo sapiens
caccagagaacacccagtgccagcacttagtcacttactgccttgcctgcctggggaaagatcctggagaaggtggcctcattggtttgcagctctgctgggggtccagccacagcccaggagtgactctgaccgaggtgttggccccacagaccagccgttgtctctgttggaggctgagggccacagcacagtgcccactacttagccagcaggccgtggccaccttaagaggccaggggaagctggcgggggagggcgtgtgggctgccagcctccaccctggacatgatggtgtggggcatggtcccctgtgtcccccttcctgtgagtaggggtggccctgcttcttggcccatgtgtctgtccacacagcagacttggtccggtttcctcagtgcactggggtcctgcagagcttggggaggcagcacagggggcggggggcgcagcagtgactcatctgccctccctcgagtaggggccggccaggacgtgggccgaagctgcatcctggtctccattgcgggcaagaatgtcatgctggactgtggaatgcacatgggcttcaatgacgacgtgagtcccttgggcaggaggcccagaggctgggagagccggccatccacagctggaccctgggcctcagagccgggacagtggggtggtgggcagcagtggttgtgcttggatggctgcaccctgtggggagcagggatgggtgggcctggccgaggtgagcccctgcatggtggggtccccctgtgctggcgctgagccccagccccggggtcctgtaggctggactccgtgagaccctgggctcagcttccagctcacatctgtcagtgaggttgggggtaacctcggcccctccggatgctgtgagcagccaggggtcctggtgccacctgcgggatgggagtgcccagcctgagtctgcacatagaaccccccttcctgggggcccctccctggggcatgggtggccccagatgctgcctggagaccactgtgcaacctgaaacccccacatccttcctagcgacgcttccctgacttctcctacatcacccagaacggccgcctaacagacttcctggactgtgtgatcattaggtgggttcctgttgggggccttgagggtcccatgtctgtgcctgtggggcttgggccaccttgcttggtctcggcagcgtttggcaaggggcctgtgccatccttgatcctcagggggcttctaggccccaggatctgctccctgcctgccttactggtcacacacatggcctggtctctgtctgttcttccggccctgccctctgaaccctactttctgaacccggccctccaggcttcaccctctctgatgccttcactgtctcaggatctttaaaccccactgtcttgttggcgattccagagtcccgagtctgccctgaccccagcctttagggttcagcagctcatgacccgctggtctgggtggcctcgtctggacggccacagcactcctgctggccccctgcccttccctgccctgtcctccccagcagccaggcccgtgaagcctggagaagccccttctc

SEQ ID NO: 51043 - DNA, 1033 bp, Homo sapiens
cccctgctggtcccttccctcccccctgcctgtccctccctgctgcctgtcctccctccgcccgccccgcttcttctcctcccctggaccatcccttccccaccccgtccctccccctcccccaccctacccctcccctcccctgctcaaaagttggcttctcggagcagtctcctgtcatggttctggaagttttgaggcttcctcattctctcaccttgctcttttctgtcatagtaaccttcgtctggcgtgctttgggtgtcttgtttgtctgccgtctgtctccttgctgacagggatatctcctcctgtcttctgagccctgtcccctcgtgtatctccaggctctattcccgcacctttccactttccttcctgggatcactgtgggtcctgtcgggaggcgggactgccagtacttcaggactgggctttggaattcagaaaaccagcccgggccccatgcctcggggccgtgtgccacaagtgcctctgtggccttaggtccctgggcatgaagaggggcggccctcccttcccacaggtgccagagggcctctgtgagcctggcgtggcttggggtaggagatgcagagggaggagacagctgagaccctgctctcagagagctcacacccagcgggggcaggaacaggcctggaagagaacctgagatcccctctctgtggcaggcagcccctcggctgtggccccgtcatcctgatgtgtggtgctggctttggacacttcgagtggctggcagggggaggtgggtgggattcaaggggaaaactgttcactgccatcagactcctgcccaggcacagtctgtgcaggggccgtgaccctttcctctcgggcccccaggccacatgagggggctgagtgtgccttggctggccaaggcctctggctggagcagctgggcagggctgcttggctgtcaggagtgtgggagggctgcagatgagggtctgtgttgggggctgcatggtgtgcagtggtgtgaggctcgtgttgccacgctggc

SEQ ID NO: 51044 - DNA, 1029 bp, Homo sapiens
ccgggctcctatttctccactgggcccaagtcccgggcgtggaaaatgctgctgggcagggcagggtgccacgaggcggcgtccagatcctacccagcctgctgcctgggccctcagaggtcacagtgtgagtgtcgaccacagccctgcctgccttgctccttggcctggggacctgcccctgcccagccatcccctctgtgccgtgtgggttgccaccctgccctctgaactctgagctcgggtcacccggcctcctcctggttcgtgtcccctgaccctctgcggcctgcctgggtgccctctgccccgttcccaagcctatctgacctgggggtggactggtgaggcacctggccagcttgctctcctgggggccctgccggctccgcatcccctgctgcccctctaggtcctgaggtgcagggaggtttggtgagtggaggtctttgtctccctggctaggtggacaggacaggagggtggtgggcggcctctggggacctgtgggccctcccagcccacctacgtccgtccgtcgggtctgagagtccttgtaggtggactgtgagcctgactaggggtgcagggcaggggtcaggcaaagtcctgccctcacagagcctgaccctgggcaggcaggcacagggcctgggacctgaggctgctcctgagacgccaggagggtggagtagggccatagggcatggctggcatgatggagaggaggctgctgggggatttgggctcctggttgggaatgacaggtctgagtgcaggggtgggtgcaggtggcctgatgccctggctgttgaggggtgggcggctggtctggagctggctgggaggtggagcggtggacctgaggtctggggcaagggacagggaatagcctggggagccttggggcccggtaggtgcagctgctgctgctgaggaggctggggcctggccctgaggagtcccagtgtgggggaagccctggggggggggggctccaagccccaggaacagatgaggtgggggtgg

SEQ ID NO: 51045 - DNA, 1146 bp, Homo sapiens
gctggtacctgacgccgccccgaccccgcgttccccgcagaccccacactggcgcgcggccacaacgtcatcaatgtcatcgtccccgagagccgagcccacttcttccagcagctgggctacgtgctggccacgctgctgctcttcatcctgctactggtcactgtcctcctggccgcccgcaggcgccgcggaggtgaggctgccccggcaaagccagcggccccaggagactgaggtgggcgggagggtggtcctctgggctgggggacctgcggaaggggcggcactgcccccaatgtgagtctccttcccaggctacgaatactcggaccagaagtcgggaaagtcaaaggggtgagtgcccccctcccggccctcctggggaccagggcccccttcaccccacccagctgtaacctcctcccaccctcgccatccaggaaggatgttaacttggcggagttcgctgtggctgcaggggaccagatgctttacaggagtgaggacatccagctaggtgaggcagtgctgggacacgagggcacaggcgcggctcccagtcccgggctgggaagtgcatcctgggagcggggacctcagcctcctctcctcccacagattacaaaaacaacatcctgaaggagagggcggagctggcccacagccccctgcctgccaagtacatcgacctagacaaaggtgagcggcgggggcgacctcagcccatctcagagccctgcctgtccccattccacctcacctgggaccaacgatggcaggcaccagccaggcccggggcccctgccacctcaggctcagaaatccctggggagtcctgcgggggggtctgccctgtgtctcccactgtgatgagggtggaggacagccgccaacccgttggcgcccttggcttccagggttccggaaggagaactgcaaatagggaggccctgggctcctggctgggccagcagctgcacctctcctgtctgtgctcctcggggcatctcctgatgctccggggctcaccccccttccagcggctggtcccgctttcctggaatttggcctgggcgtatgcagaggccgcctccacacccctctcccaggggcttggtggcagcatagcccccacccctgcgg

SEQ ID NO: 51046 - DNA, 1022 bp, Homo sapiens
gattccccttcccccacatgggccctagggggcatgcccctcccccatggaatctcccccaccacgaggggcctcaggggcccacacccccccaaagatgcccccaaccccgccagagtccttggggcacacccctcccccagttactcctcctcctccaccagggtcctcagagcccgcccctcccccactgattcaccctcccccatcaggaccatcagggtccgcccctcccccagtgactccccctcccctatccaggccctcgggggtctgccccaccccacggacttcccctccaccaccagggccctctggtcctgcccgtcccttacagacatccctcccccaccagggccctgcccctcccccactgactcccccaaccagggccctagggggcccaccccttcccccaccgactcccctcccccaccagggtcctcggtacccgccgctgctggcagctccgtggtgtccgagtccgcggtgagctgggaggcgggcgcccgggcggtgctgcgctgccagagcccgcgcatggtgtggacccaggaccggctgcacgaccgccagcgcgtgctccactgggacctgcgcggccccgggggtggccccgcgcggcgcctgctggacttgtactcggcgggcgagcagcgcgtgtacgaggcgcgggaccgcggccgcctggagctctcggcctcggccttcgacgacggcaacttctcgctgctcatccgcggtgcggggaccggggaccggggccgcggggtcggggcaggggtccggggccgcggggtcgggggcaccgcaaggctcacgcgcggcttcctcctgggtgcgcagcggtggaggagacggacgcggggctgtacacctgcaacctgcaccatcactactgccacctctacgagagcctggccgtccgcctggaggtcaccgacggccgtgagtgcttcccccccgccccccagctcccgcccctcgaccctcgaccgccgccccggcccgcgcgccgctga

SEQ ID NO: 51047 - DNA, 1269 bp, Homo sapiens
gccacacacacactctttcccctctaagcttccgatgctcacagagggaacctcaggggttcaggccaggaatgaggtgcgggggatcctcgctgggacgaacctgctgctcctcaacccgacgggcctgtgtggtctcgcgagcggtgaccgtggcgtctggttttctgcaggcggccgcccgccttggcccgtctctggagtgctgggcagccgggtctgcgggcccctttacagcacatcgccggccggcccaggtagggcggcctctctccctcgcaagggggcccagctggagctggaggagatgctggtccccaggaagatgtccgtcagccccctggagagctggctcacggcccgctgcttcctgcccagactggataccgggaccgcagggactgtggctccaccgcaatcctaccagtgtccgcccagccagataggggaaggggccgagcagggggatgaaggcgtcgcggatgcgcctcaaattcagtgcaaaaacgtgctgaagatccgccggcggaagatgaaccaccacaagtaccggaagctggtgaagaagacgcggttcctgcggaggaaggtccaggagggacgcctgagacgcaagcaggtgagtggccccctgcttggccctgggagggcaaagtgctgagaacacgtttctttgccacgaattacttggcggtccctctctctgcgtcttgcagatcaagttcgagaaagacctgaggcgcatctggctgaaggcggggctaaaggaagcccccgaaggctggcagacccccaagatctacctgcggggcaaatgagtctggcgccgcccttcccgcccgttgctgctgtgatccgtagtaataaattctcagaggactcagcctttcctgcgggtctggagctccatttgccgggtgtgaggtctctcaggattgaggctgctgccagtcccaggtgttgcagaagacccgggcagcagggtggcagattggccgtccctctctctagctggctcttggccgccgtccagagggtgctgggcctgtaggagccccagcctcgctgtgagcaaatgtgtgctgtgtgcagttcaggctaggtgctgtgggatcactgtgaacagatcccacagcccctccctgagcaccacattccctggggaggccgacccggatggcagaagtacagggggacaggactggggtttagggagcacccggaatgcacggggtgattcaggtgtatttcatgagtggagggtcgggg

SEQ ID NO: 51048 - DNA, 1100 bp, Homo sapiens
ttgcatctccctggaccccagccgggtgaagacaaacacaggggcaccaaggtgagggctgctctggaggcaccagtctgctcatttacggccaaatccactaggggaagctgtgcagcaggggtgaagggcgggcccgcaaataacgttcgtaaaccttcctgcttggagtcccaagtagcccctctgaggggtaacgtagagtcatctggggacctcagttgtagaggtgggcctggagcctgaactttatgtcctcacactggcctatcctacctgtcactcactgcttagccaggctgggcccggcagatgacctggcctttccacttcctgctaagcgtccctggaagaccctcctgcaaggcaagtctccgagcaggcccagcaggctctgctccacacccctctcccaccaggcgcccctgcaagtccatgctggggtctctatattagccaacctcacggaggtcaaaggggcctgtctggagtagaaaggtgaagctacacgttggcagcgcctactctggggagcatcattaggggctcagccaaacccaatccaccagagaggctgcttttagttctcagacaaaaagtgtgagtctgatttttattttatttatttatttatttttttgagacaggatctatgtcacccagactggagtgcagtggtgcgatctcggctcaccgcaacctctgcctcctgggcgcaagcgattctcttgcctcagcctcccgagtagctgggattacaggcgcctgccaccacgctaggctaatttttgtagttttagtagagacggggtttcaccatgttggccatgctggtctcgaactcctgacctcaggtgatccaccagcctcggcctcccaaagtgctgggattacaggcctgagccaccgcgcccagcctgcgtcttatttttttttttttaaccccaggaatgaggagtcggggaggcccggtaccgcaggctcagtgcttattccgggtccttggtctctagcaaaaacgggggaaatagctctagacgcttccgccttccacgtaactccacttccgttgccagatacgtcacttccgtagtcttgag

SEQ ID NO: 51049 - DNA, 2202 bp, Homo sapiens
atttttgtagttttagtagagatggggtttcaccatgttgggcaggatggtctcaatgtattgactttgtgatccgccctcctcggcctcccgaagtgctgggctcacaggcgtgagcccccgcgtccagccccatctgcatttctgtgatgtctgtgtaagttctgggtcccagctgggagccggaagttacagtctgcttgcgtcgctgtttgacctgtagaggggccttatctcgctctacgaacttgtttcttattgggagagtgttttgtggttggcttttaacctcttgttctgattctagtggaatcccccaaagaaggtaaagggagcaagccttccccactgtctgtgaagaacaccaagaggaggctggagggcgccaagaaagccaaggcggacagccccgtgaacgggtaggaccccagggctgcccaggtggctgtcagggttggctggagggacttctgctttgtaactggctcctgtcctgttcacagcttgccaaaggggcgagagagtcggagtcggagccggagccgtgagcagagctactcgaggtccccatcccgatcagcgtctcctaagaggaggtgtgtgcctcagggcgcacccaggaggccgataccggggtggggctgtccctcggggtaatcattctcaccctgaggtggtttcttgtttctctaaacctggagcttgtgtgtcttgtctgagctcctgtgggtgtgtggggcctggccgggccagatggtcacacgtgtggtggtgctgttcttcctcccaggaaaagtgacagcggctccacatctggtgggtccaagtcgcagagccgctcccggagcaggagtgactccccaccgagacaggccccccgcagcgctccctacaaaggctctgagattcggggctcccggaagtccaaggactgcaagtacccccagaagccacacaagtctcggagccggagttcttcccgttctcgaagcaggtcacgggagcgggcggataatccgggaaaatacaagaagaaaagtcattactacagagatcagcgacgagagcgctcgaggtcgtatgaacgcacaggccgtcgctatgagcgggaccaccctgggcacagcaggcatcggaggtgaggcggggttgcagtgactggtggccgcaagcccttccctggggagtacctgatggctgccctttgacccccggtggctgccctttgacccccgggtgtgctctcagcgcaagtggtcctagaacaggattctttttggaaatgtctgtcgactggaccttggtggatttggaaatggaactgagggaccggtgacacgtgcttcagaccggtctggggtgcggcgcacacctgggcccgtgcagggctcagctcggcagcagctctgagggcagctcaatgaaaaagtgaatgcacacgcccttgttggcgtggcctggcatggcctggtgctatcggcagccgctctccactccccgactgatactcaattacgtgaagccaagaaagatgatttttagaacctttgcctatattaggttgtacttatgtacatattttgcagtgtttcacaggagaaagtggccttaactgccccttattctctctccacgttgtaaataaacatgtgtttaatacaagttaaagctatgtatgaaaactcagaacttgaatcccgtcagcttaaaacttgtgtagggaatcctgacttttaaaatgtgagggtatttggatctgtgttgaaagtcgtatatttttatctgtgcggtgctgagtgcaggccaccagctcctaaatagaggttccctatatgcgcgtatgacatggtgaataaacacaactctctccactcaggacatccggagcgttatggacgtggtaggtggtcgttctgtgtgcttgtgaaagtgtccaggcgtgtgcacagccagtgcgcccacttccgggctccttgctccctgctgtactgaagttttggattttgcatccaatcctgtgtgcctgcccttctgccgaaggcttgtgaggggcctgagtcctctgcccatcaggatgacaggctccttcctgcagggccataggagggaagttttggaaacacagaatgattccaaggtgctctcgttcctgagggggactggtttgtaacccatgacatctgtgggcgagagaggcagctg

SEQ ID NO: 51050 - DNA, 4783 bp, Homo sapiens
gtcttactctgtcatgcaggctggagtgcagtggtgcaatcttggctcactgcaacctctgcctcccaggttcaagtgattcttgtgcctcagcctcccaagtagctgggattacaggcatgcgccaccacacctgggtaatttttgtatctttagtagagatggggtttcgtcatgttggccgggctggtctcaaactcctgatctcaggtgatgcacctgcctcggcctcccaaagttctgggattacaagtgtgagccactgcacccagcctcaacagttaattttctacatttgctttagtgatagctttactttctcttatggagaaattaggggaattctggcccctttagtctgaaatgactggcgagttttgcggcatgtactgactgaggaccatggccgtgacacggtccctcactcccagcgttgtgggtgccttctgtgtcacatggaaacaaagcacttgttttcccaaaaaattgtttccatctttggttccatctcctttttattggtgggtttcctcatctgcttgttcggctttctgccatctgttcaaattatccacaaattgcccaccacagattgaagtgctttttttttttttttggagacggaatctcgctctgttgtccaggctggagtgcaatggcgcaacctcagctcatgcagcctccgcctcctggtttcaagcgattctcctgcctcagcctcctgagtacctgggattacaggcgtgcaccaccatgcctgactaattttgtatttttagtagagactgggtttctccatattggtcaggctgttctcgaactcctgacctcaggtgatctgcccgcctcagcctcccaaagtgctgggattataggcatgagccagtgtgcctggcctgaagtgttcttctctgtttgctgaaagtatgttcatattgtgttttggtgagttgttaactgggatacagagacgtgtaggacaggccaacctcactggtggaaaggcattgaagactagaatgaaaccagccccatgaagaacgaggcctgtgccgtgggttgtgtggctgggctcacgggcatgcgtcctgcctggctgccaaggcagacagcaggtgcaatcgcaaagctccctccagctgagccgtccgccagacgtgtggccaggagccactcctgggatctagcttgaggctcttgtttgctgcatggacacccacaagatctgaattctgggctcttaaggttcttggtaataactgcctgacccgtatcttccagataatcgttatgtaccttcaggtgttagagtgtgagcgtaaccaacacctggtccagacctcatggtgagttgagcttccttgttttatgagaccagcaagggcagtgcaggaatgtgttgacttgaggcacttgggcagtgggtaggcagcccagtgacttggttgtgggctggagttgtccgagtgcccagtgctcctgctgtataaattccaatcagactcccaaaatgggcactggcagtcacggtaggtggcccgtcccctccctgcaagcctggacttcctgtgtcccccaccctgaagagagcagtcagtgggcttcctctgggagctgttgacttggcgcagggggaccttttcctggggagggtggagggacaggctagtgcagacttggtctgtttctccactgacattgcatcccatgggagaggggcagagaaggttctggggccgattttagcaatgcatgtgctagaaaggaaccctaaagtgcaatgtagtatttgggggattctggggattctggtgaattttttcccatggagttaagtctgtaagggtcatatttttgctgactgaattgtctggtgctatgacatgtttaatagagaacctattttgacttttcttttctgtactctttcaatcaaagggtagcctctgagggtaagtgactaagacttctcctctgctgtccaagcgctttggtgcagggacagcggcatcttcagccaatccagtgcaggctctccaccgaaggctggctctagactggtggtacgcacatagcatagccatggccgactcctgctgtggttctctgacgattgtgcttcttgttaatcctctgtcgtgctttggtaatcgtattgattagagttggtaactgtcttgacttgaattttgtccctttaaaactgctgtacctgtatgataaagatgcagtacctttctcttaaaaaaaaatgctatggaaagctgtgagaattgaagagacaaattggctgtgtcagtgtggggttatgtcatgatttctagaagccctgaagttgctcttttgagcagctttgcatgacacgctctggtaaaaggtgtgcatctttaaattatttcatggatactttgaaaaatattgtatcacttcaaatacagcaataagtttatatgttctcaagatttcatttgtttttaagaattttaagttcgtggattaatatcactacttgaatactgacagttgttgattagacaccgaaaggttactgattgttgaatgtatctgtgttagagctgtgcactggcacgcttgcatcaggggctggggccacacggccgccacacagattcccccgtgatgcctggagctgcttccagagccgggtgtctccaagaggcacctgtaggacttcccatttagaaatctcttgagtgggtttgtatgttaccttctccaaggtttatttaggacagagatattgctggaaggtcatgggtcagattccctcacaacccacctcgtctgcgggtgcagccccactccaaggctccccgttattggggtatgtgaggagcagtaaatataaaaccagttcaactgtcctcatggaatcaccctttctgtttttgcagtattcataaagctagtgtaaggtctggttttagtctattaaatcttagagatctaaaggaaatgctcaaaatgtagccaggttttaaatgctttaacttttaaaaaatgtaaatttttgtatgtttatagcttctaaatatgaaagttaaagaatgtactgtgatgaaatgttcagtattatgttgcttctcagtatcatgttgcttctcagtattgtgttgcttctgattctatgaatgttcattttaagaccccttgttgaaatgggacagttggcagcggctctgatgagcccgagaagaggcctgcccttgggtgcggagtctccctccgcacgatgctcccacgcgtccaacttgcacccaaggggcttttccctcttccaagtggactccttcaaggaagctgcagctcggtcagcagagaaggggcctgccgccagcgccctggaggaagaggaagaggaacccaagaggatggcttgtctcccagcagccacaccggctttgtgctcagccagttcatttgagtttgcatgtttctctgcactatggattttgagcatttagatttctttaatcaaaagcgttttagtgactccagtagacattttctttctgaggcatcgtgctttgcatgagagcaggccaaggttgaggggaaaagtaaagttaaagtcggttctctttcatagcaacacgtattgtctgacattcagccagctttttttttttctaataatttctgtgcctttctgtcctgtatttactgtatttagaaaaagcagctagaatatttctccattaactcttgagattcacaggactgtctagctctgagtcctagcaatagactccttagaggagtagtacgtttatctagattttctctagataatgcaggcggaagacctgggttcccgggtggggcattgcagttcttcctgtgtttggcttccaggaattacatgaacgacagccttcgcaccgacgtcttcgtgcggttccagccagagagcatcgcctgtgcctgcatttatcttgctgcccggacgctggaggtcagtgtgttgctactatggagagattctagtctgatttttttttctccagcctccagtaaactttactgtgttattcttcaaattactctaatctgggccaaagcattttcgtgaccaacaggctgttttttaattgtcctgagtcttgctggccgtgaagttgaggaaagtgtaatgatgatagtgtttgtttttacagatccctttgcccaatcgtccccattggtttcttttgtttggagcaactgaagaagaaattcaggaaatctgcttaaagatcttgcagctttatgctcggaaaaaggttcttcggcattttttcatgtaacgtatgcgtttgtgtttggccagaaacacctggttctgaacggacaccttctggcttttgcaggttgatctcacacacctggagggtgaagtggaaaaaagaaagcacgctatcgaagaggcaaaggcccaagcccggggcctgttgcctgggggcacacaggtgctggatggtacctcggggttctctcctgcccccaagctgggtgagtctgttagagtgcaggaatccactccccacaaaggcaaagactggtgactctcccccgcctccattctggggtatgtgctccttccagacattttttttttttttttttttgagacagggtctctgtcacccaggctggagtatggtggtgtgatcgcagctcactgcagcttccaactcctggattcaagtgatcctcccacctcagctttctgcatagctaggactacaggcacatgccaccatgcttggctaattctttttgt

SEQ ID NO: 51051 - DNA, 1052 bp, Homo sapiens
ttcctatcgtgagtcacataaagtgctttagcatttgtgccacgagatcctaaaacttgctatgttcggtctatgcttgtgcaccagaagctgttgatctataaggaaaagcagggagggatcgttgggaagggatgaggaggttggcactgggctgtggggagcggtgtgcagttttgttcatcagaggatgtggacttcatagcgatgttgtgttgtggggtttgtgttaggtgctcatagttggaggtaacgacgggatctcagaagccttgctctgcttgactgtggtgcagaccctgtgctctctctctggcaggaagcccgtgcctctactactggatcaagattatgttaatttaaagaaccaaattataaaggcggaaagacgagttctcaaagagttgggtttctgcgtccatgtgaagcatcctcataaggtgggtgtgcggctcctgccctgcgagcccgcctaggccgctgctcctgcctggccgcctctctccacctcagtgcagttgaaggctctgaagaggactgagtgcatccctgacttggctttccagtttctatttataatctcaagaatagttcctgacgtattcgtcttctagtgtcagctgtttattttagtaacacatttttaagtgttttggaaatggtattatttaagtttgggctttcaaaaatagtggtgagtttataaatgttgaattttagtttatgttttcctttctctacagttaatttttttttgttttctttttttttgagatggagtttcgctctatcgccaggctggagtgcagtggcatggtggcagtggcagtggaggcacaacctccacctcccggcttcaagccattctcctgcctcagcctcctgagtagctggcactacaggcacgtgccaccacgccgagctgatttttgtatttttagtagagacggggtttcaccatgttggccagaatggtcttcatctcttgccctcgtgatcctcccaccttggcctcccaaagtgctgggattacaggcataagccactgtgcc

SEQ ID NO: 51052 - DNA, 1026 bp, Homo sapiens
ggatgcggcgcggggctgacgctgccttgggttcgcctacgtccctcgggaattttgtcccggcgtggctcccgtagccagatgcttcgccgctcccgccccgctggctcccaaagcctgttcggcagtcgcggcgccgtcgctatggcgtcactgtcctcggggccaatccaagggctgcgcgcgtgtcccttacgcgcttctatcgccgggaggaaggggtgtgtgtggcgcctgcgcagtggcggtgaccaccggctcgcggcgcgtggaggctgctcccagccgcgcgcgagtcagactcgggtgggggtcccggcggcggtagcggcggcggcggtgcgagcatgtcgtggctcttcggcattaacaagggccccaagggtgaaggcgcggggccgccgccgcctttgccgcccgcgcagcccggggccgagggcggcggggaccgcgggttgggagaccggccggcgcccaaggacaaatggagcaacttcgaccccaccggcctggagcgcgccgccaaggcggcgcgcgagctggagcactcgcgtgagtgcggcggggcggggcggcgcgggcgggcgggcgggacgggccggggaagcgggagccctggcccttgccgctcctcgccgctgtcggcagccacttcccgggcgagactgcgcccccggagcacccccggccggagccgtgtcgcgtgccgggaggatcggactctttccgtcacccgtttgcacctctgcagctgtcaggagcgggtcaggtgcggaaagcggtgcggaggtggcgctcataggttacaggggtcagggtctggggctggccgtggtcttcagttaccgccgagcgtgcgggatccttctgcgcttgccgcctccacgtggcacaggccaaggcgtggccagatgggtagatgggtttgttgggtggttgctagcagtttccacgtaacaagggaagcgtatttgagagttacttgattctaacgagactagcagatttgcacttcttgttggaaga

SEQ ID NO: 51053 - DNA, 1552 bp, Homo sapiens
tttcctcagcctccgagcagctgggactacaagagcccgccaccacatctggctaatttttgtatttttagtagagatggggtttcaccatgttgttcaggctggtctcgaactactaacctcagttgatccacccactttggcctcccaaagtgctgggattataagcgagagccgtcgcacccggtccactcagcaggattcctaaaataagcatgagctctgccctcagtgcagtccaaaagggggtgtccggcctccctcccggggggccttcgcgggcttctgctggtgcttctgtgcctgtgggtctggattcctccagggcctgatcctgggtgcagatgcggctggaagccctgagcctgctgcacacactagtctgggcatggagtctctgccgtgccggagccgtgcagacacaggagcggctgtcaggcagtgccagccctgagcaagtgccagctggtgagtgctgtgctctgcaggagtatgaggccgccgtggagcagctcaagagcgagcagatccgggcgcaggctgaggagaggaggaagaccctgagcgaggagacccggcagcaccaggccgtaagagcgcaagaggccgcgagggaggccgcccggctgcggggagcggcctggggcaggactgggagctgggtgtggtcccggggcactctggagtcagccattagagctgccctcggaacggccttgcacaaacgcctaagacctgtaaggtccctcactgctgagccggacgggaggtccccgcgcctccccacgtttgtgtgaggctgatggcgcgtcggagtccccggcgctccgcccagtcggcccagactgcagctcccggctgagatgtgtctttgccgccctcttctcccccagagggcccagtatcaagacaagctggcccggcagcgctacgaggaccaactgaagcagcaggtgagctcagcctcccctgcgaggcgcctgcgtccctgagaacgtaggtggctttgtgggaccagtcagtgggtcagaggccacggggcaagaacgctggggttgctgacggtgggtgctagagcaggggaaactactcggacagacacgcaccagcacacgtgtacaggcacacatgcagacgtgtgcacacatgtacatggagacacaggcacctacccacacggacacacactcctcgcacacacactcccagcacacacagacaggtgcacccacttctgcacacacgggcacacacacacccctgcacacacgggcccacacacagacacccccacacagaggcctgcactcacacacccgcaaacatacccccacacaacacgggcaggcacacacccacatggacactcacacctgtaaacacacccccatacagacaggtacgcacatacaccccgcacacacacacacagatacgcacacacacaccacacacaggtacgtacccccccacacacacacaggcgcacacataccccccacaggctcactggcacccgcgcactcgggcacacacacagccccacacacac

SEQ ID NO: 51054 - DNA, 1050 bp, Homo sapiens
cacacatgggcgcgcgtacacccccctatacacatgggcacagcccccccgcacacatgggcacgcacacaacccccccacatgggcgcacagaccccacacacacatacgggcacacacgccttcccgtcacagggacacacacacacacccgcacatgggcacacacccacacacgggcgtacacacccccccccacaggcacgcacaacccccccaccccccgcacgggtacacacacacacacacacacacacccaaacgggtgcacaacccacccacacatgggcacaatcacccccacacacatgggcacagtcacccgcctgcacattcgggcaccgtcaccccccgcaaacgggcaccgtcacaccccgcaaacgggcacactcacccccctgcacactcgggcacagtcatcccccgcacacatgggcacagtcacaggttttaaaggcttttctctttttctgcggcttcttctcagcaacttctcaatgaggagaatttacggaagcaggaggagtccgtgcagaagcaggaagccatgcggcgaggtaggctgtctgctctcctggctggggcggaggtggcgggggctgcttgtggacccggcgtgcactctgagcctgagttctgccgcccggcccctcatagctaccagtgcagtgggcgaggcctgctggggctccgcggggtggggctgcctctcggaagacacctctgtctgcgagtggacgccaggatctgttcagggagggcaggagctgcttcacttcatgggaagtacaggggccttttttttttttttgagacggagtctcgctctgtcacccaggcaggagtgcaatagcacgatctcagctcactgcaacctctgcctcccaggtttaagcaattctcctgcctcagcctcccgagtagctgggattataggctcccgccaccacgcccagctaatttttttgtatcttcagtagagaaagggtttcactgtgttggccaggctggtcttgaacttcttgatctcattatccgcctgccttggcc

SEQ ID NO: 51055 - DNA, 3833 bp, Homo sapiens
cgagcgtgtgtgtgcgcgttggtggctgttccgtggctgtggcaggtgacccgatggcgcttccccttcccctccggcaggtcagccggcggctcctcagtcgaccccaggacgcgctggagggtgttgtgctcagtgtaagtcggtgtgcctgggaccggggaggcgcagggaggggaccctggagctgggccgggctgtggcccttgctggcgctcgtggtggcacccaggagcttttgggtcctgagatgcgactgcttggaccgtgctggggatagataggctgcccctgaggtgggaggcttcccgaggagccgagtctgcacccaggcattcccgcagccccttcccctgaggcttccatgggtgcacagtgtctcctccaaacccccgtcttccccggcagcccagcctggaagcacgggtgcgcgacatcgccatagcaacaaggaacaccaagaagaaccgcagcctgtacaggaacatcctgatgtacgggccaccaggcaccgggaagacgctgtttgccaaggtgagagcgcctggctgaacaggtgggccaggggccgctggggtctcacctgcctgcaggtgtctggggggctcagctgcctggggaatggaccccccttaggcctttgcccaccctcgtgtaggctcagggtgctggtgtgggcagcagcgcctcccatcttccaggcgggggacgtctcctgtctggcaggctgtggcttccaggcagggacgctgggcagagcctccacactccgggtggagtgtgcaggctttgcagaggcggagggaacatctgctctgtctcccctcactcttcctgtccagaaactcgccctgcactcaggcatggactacgccatcatgacaggcggggacgtggcccccatggggcgggaaggcgtgaccgccatgcacaagctctttgactgggccaataccagccggcgcgggtgagacgtccccacagcatgcaccaggcccttggctgcggcccagcaggctgccttctgggaagggggtccaggtgtctcttggggaccctgtctttctgcagctctgtccttgtggccacgcaggaggcccagtggagggtccctcggagggaaagtcccctgagtgtggaccctggtggacacgaggcccccagcgtgtggaggctgccagtgggatacttggctcagggcagaagggaggtgggtgggtgcagggggagaggagtcttcacagctgcaggggaggctcctccacagccgccctccccccaacacgcctgcaggtgggcgtgggcactggttgccttttctagaaccatttgaaagttagctgaagacagcatggcacactcccttcaataggtcccacagtgaccccgcgcagggcacagcccgggcacccttgtggcctcggctgtcctcgttggaaccacgatgctcatggttggcaccctcccctctggcctttgacctttcactttagaagacctgtccctgtcgtggactctaagcggccaccagtgctgcactgggccgggtgggggtgaagcctgtggggcggagttcgtcgcccccgtgtgtggttggtttcccacggccttctgaggctgggccgtggtcagctgcccagaggccaggctgatcggcttctgtcgagtccaggacttagggctgctgatggggcagagcctgaccccgtggggatctgcctgcttggcctgctcctgccgcggccggacgctgctgtgggctgctcctggtgtcactctcgccctgcttggcctccctctcgttcacagcctcctgctctttgtggatgaagcggacgccttccttcggaagcgagccaccgtgagtgtcactaagcctctggccacaatggggtggtggggtgggcacagccgtctgcctgggccaggctgcagccctctgttcagtttctttttctctgtaagctttgtgtgaaaaacagctttttttttttttttttttgagaagaaatctcgctctatcacccaggctggagtgcaatggccccatctcggctcactgcaagctccacctcccaggttcacgccattctcccgcctcagcctcccaagtagctgggactacaggctcccgccaccacacctggctaattttttgtgtttttagcagagacggggtttcaccgtgttagccaggatggtctcgatctcctgacctcgtgatcctcccgccttggcctcccaaagtgctgggattacaggcgtgagccaccacgcccagccttttaattatcattctaagacagggtctctgtcgcccaggctggagtgcaggggcgatcacagctcactgttgcctcgacctctggagctcaagcaatcctcctgcctcagccgcctgagtagctgggactgcaggggcacagtggaatacctgtctaatttttttgtaattttagtagagatggagtttcctcacgttgcccagactgggctcaaacttctgagctaaagagatttgcctcccttgacgttctgaagtgctgggattacagatgtgagcccccgtgcccggtcaggctttcttttctttttcttttttttttttttaaggcagaattttactctgttgcccacgctggagtgcagcggtgcaatttcagctcactacaacctctgcctcccaggtttcagtgattctcgtgcctcagcctcccacgtagctgggactacaggtgcgccaccacgcctggctaatttttgtatttttagtagagacggggtctcaccatgttggccaggatggtctcaaactccttacctcgtgtgatctgcccgcctcagcctcccaaaatccaggttacattcgtgagccaccgcccctggccctggtcaggcttttgagagtagatccatgaaagtgtcgccatgtccctgctccctgcaggagggaggcctgtgggactttctgctgtggctgtttacaaggctttgctcctggtgcctaaggctggaaccttctctctgcaggagaagataagcgaggacctcagggccacactgaacgccttcctgtaccgcacgggccagcacagcaacaagtgagggagcccctcgggtcctgggcccccgggcagggctgtgcagccgtcgcccttggttcccaccgagggacctgaggggccctggctcacagtgctgggcagctgccgtggcctcaacatgcccacctcggatgtcccctgggaacggcccagctcgggacagcacggggtgtcactgaggaacatgcgggggcctcccgggcagagctggggtcagtcctgtcctcacggccctgtgcgccgccgccccagcttgcaggtccctctgcccctaggtttctgcggtcctgtgcctgcaagggaggtggtctcatcgtgtgaggctctgctgggtctcccttggagggtgtgtgtgccctggggtgggagatggagacaagtttgctcccacgggaagttggacaccagcaggtcctgtgtgtcggggcggaacctgggaccttggtcccccgcccggatgctggccaagggtgcaccctccaggcttggggcccacccgactttgtgtggcctctgtgggctgccgcccagaggtcccccatagggtgaccgccccatggccaggctccctagtccctcccaagtcccctaattttgagttttcttggtctcctgggcccctccagccccagtcacgtgtcacacggaggatcaagtcctgctggtcggccgtggctgactcctcaggcacgttgggctcccaggtcagctgctgccggtggatgctcc

SEQ ID NO: 51056 - DNA, 7129 bp, Homo sapiens
gctggggccctgctgagcctccagtgaacccgggcccctgaggtcctgctcctggcacgtgtgggcgacttctcgacatggactccgggtcccgaatccctgctcccagcacagcaggggtcaggcagcaggagagagtggtgttcccggcactgcctatcaggctgggcgagggtcagcgggaaagcactatatggagggagaacagaggcccaggaagccaggccgggggacagctgggtgcagtggggcaggtggccgaccagggctgtgcccgtgtcctcgtgtttcccgccactttaggttctccctgtgggggctgaggaggccccgttccccttggtgcagctcggccggcagccccagcatcctcatcctcatccccgccccgcaggttcatgctggtcctggccagcaaccaaccagagcagttcgactgggccatcaatgaccgcatcaatgagatggtccacttcgacctgccagggcaggaggaacgggagcgcctggtgagaatgtattttgacaagtatgttcttaagccggccacagaaggaaagcagtaagtgtcccgccccaccagcccccgtccaggggccctcgctcagggtccaccccgacccacagtccaccatcacttacaaacctttaacattccttttttttttttttttttgagacaaagtctcattcttgtcgcccaggctggagtgcagtgacacgatctcagctgactgcaacctctgcctcccgggttcaaacaatcctcttgcctcagcctcctgagtagctgagattacaggcgcccaccaccatgcctggctaatttttttttaatttttagtagaaatggggttttaccatgttggccaggttcgtctcaaactcctgacctcaagtgattcactctcctcagcctcccaaagtgcagggattacagatgtgagccaccgcgcccggcgtcttttccattcctcttcactacgaggagggctgtgaggaaatcttgtgctcggccacccccaggccctggctgtgaggggaggtgatacggagtgttgctctgagacccccgtgtcgggattcgaaggagtctctcctcatgagacccccgtgtcgggactggagggagaggctcctcatggtccactgctggcttctggcctggcctccctccagctgccacacccggccctggagcctcgtggtgtggggcacggctcttgctgctcacgtgccttgaggctgtcaggctccctgttgctggcggtgggtgcagcaggcacggtgggcagagccctccaggtgatgaggggccctggcaccacacaccggctgcctcgggaacactccagatgagcagaggctgctccacttcttggcgtcccccgggccccggtttctgagtccttctgtgcacctgacccaaatccctgctgtcgccagtgatgacaaaagagagcctggttgccgctgccgcctgctccatgccagcccagctttccgggcctcagtttccctatgccctccccttccctgggctcccccacccccatggctgctcgtagccctggcaccatgacttggcttctgtggcctccaggcagacgcttttgctagaagtcggggctccgccactgccagcataaaggccacctgccctgcgggtgctgagtgagcagctgtgggcagggctggtgtgaggagtggttggggccatctccaggccctgcagccactccctgctcagtccgggcctggcctgcagcagggaggatgtggagctgggctgtcagaagtagagagcccctccaaagaggatgtttggcgtgggtgtcggcctcgctgcctgtcttccggcctccacctcgtgttgtgggagctgctgccttggccggcccacttgggaactccttccccaggcgcctgaagctggcccagtttgactacgggaggaagtgctcggaggtcgctcggctgacggagggcatgtcgggccgggagatcgctcagctggccgtgtcctggcaggtgagtcaggctccggcacgtccacccagacgggaccccagctgctgtggagatgctcagttgcgccaggcctgtcccagcaccggtgtcacgcgggagcttctgttgaggggttttcagtgcacagaggtgacacagggccccctgccccagtcaggccactccacgaggcatcgcgcacctgctcgtgccctcaggagggtggagccatgtcggtggctgacagtcacccggggctctctggaggccagtctggcatcgccgtagcccgagctttgccaggtggggctggaggcttctgactctcaccttggccaataggcacctccctgtgtaaatggtcgttaggacaggccccatgtgagttgggggttcggggtggagggacattgtgttttctggaccaagtctgtgggcttggtcctgcttgacacatgggtgggagtggcctctggttgtcccacagccagttgttcttcggggacacccctcctgcagctccgtggctgctccagggctgaggagccaggactcacaggagtgtgggcgtggccatccagaaagctttggtctttgggggttgctggaaaagcaaaaccaggttggtggggcagaaggcaccctggccacgcacaggcatcaccacctctggggtccgcagagtctgtgtaacaacctggttcctcaatctagcagtgcttttgaatgaacgtgtgacagcttaatgaagcagccgagtaccttgatttgaatgttggagccggggttcacagggggctgtattagtcagtacaggctgggttatgccactgtgacaaagagccccagatctcaaaccccgtccttgtgggtcagctgaggtctctgttccaggccatccccacttggaaccaggtctgtttccacaactaagaaagcagaggccgggtatggtggtggctgacgcttgtattcccagcatttggggaggccaagttagattatttgaagccaggggtttaggaccagcctggaaagcaaggcaagaccccatctctacaaaaaatgaaaaaattagctggacctggtggcacatgcctgtaatgccagctgcttgggaggctgaggtgggaggatcacttgagtccaggaggtggaggctgcagtgagctgtgattgccactgcactccagcctggattacagagcaagaccctgtcttaaaaactaagaataatggccgggcgcggtggctcacgcctgtaatcccagcactttgggaggccgaggcgggcggatcacgaggtcaggagatcgagaccatcccggctaaaacggtgaaaccccgtctctactaaaaatacaaaaaattagccgggcgtagtggcgggcgcctgtagtcccagctacttgggaggctgaggcaggagaatggcatgaacccgggaggcggagcttgcagtgagccgagatcccgccactgcactccagcctgggcgacagagcgagactccgtctcaaaaaaaaaaaaaaaaaaaaaaaaaaactaagaataatttggaacgagtgcggtggctcactcctgtaatcccagcacgttgggaggctgaagtgagaatatcatacacctgaggtcaggagtttgagagcagcctggccaacaaggccaatctcacctccactaaaaatacaaaaattaccccggcacatttgtggtgtatgcctgtagtcccagctactcaggaggctgagccaggagaatctcttgaatccaggaggcggaggatgcggtgagctgagatggtgccactgccctccagcctgagcaatagcgtgagactccatcttaaaaaaatagtaataggccaggtgcagtggctcacacctgtaatcctagcactttgggaggccaaggcgggcagatcacgaggtcaagagatggagaccatctggccaaatggtgaaaccccatctctactaaaaatacaaaaattagctgggtgtggtggcgcatgcctgtaatcccagctacttgggagaatgaggcaggagaatcacttgaacccgggaggcggaggttgcaaagagccgagattgcaccactgcactccagcctggcaacacagtgagactccatcccaaaaaacgaaaacgaaaactaaaaataataataactggggctggacgggcgcggtggctcatgcctgtaatcccagcactttgggaggccgagatgggcggatcatgaagtcaggaaatcaagaccatcctggctaacacggtggaaccccatctctaataaaaaatacaaaaaaaaaattagccagatgtggtggcgggtgcctgtagtcccagctacttgggaggctgaggcaggagaatggcatgaacccgggaggcagagcttgcagtgagccgagatcgcaccactgcactccagcctgggcgacagagcaagactctgtctcaaaaataaaaaaataaaaaataaaataataatttgggctgggcacggtggctcacacctgtaaccacagcactttgggaggctgaggcagtggatctccttgagttcaggtgatctgccccctttgtcctcccaaagtgctgggattacaggtgtgagccaccatgcacggcatcttgaattcttttctcataaaagggttttgaatttggtcgaatgcttttcctgcatcagatgagagggtcatgtagtttccttcctccactcggctaatattgattgatttttgtatgttgaacattttttatgtggaacattgattgatttttgtacgttgaactatccttgcattccaggaataaatcctgcttggtcagggtgtataatttttttattatactcctgaattggttttgctggcattttgttgaggacttttccaacgatgcttatcagggatattggcatgtcatttttcttgtggtgtctttgtctggctttgatatgagggtaatgctggcctcttaggatgagtgaggaaatgttcttcaatttgtccaagagtttgaggagtgatactgattcttcttaatgttttgtgaattcacatgtgaagacatcaggtccaggtcttgtctttcaacttttatagtttgaagattttaggttcccagaaaagttgcaagagtagcacagagacttcctgggcctgggaccttgccacgtggtgaacatcatgtgtcactgttggacccacctgtgactgggttttgccccagaatcccacccaggacgccacgtgacatttagctgtcacttctggtgggctcctgccaggtcccgtgcttcctggaggggtggccccgtgagcatctgcatagcccctttcctctgctgggccctgggtggggtgcagccactcgggtggaccctgagggtccctgcacctgtttgccctctcttgggtgcgctcaagaccaaaaatgatgttgagcagtcctgggccccggacccacagtggtggtgcggctctggtcagtgtctcctgcgctcccaggcccctgacccacagtggcggtgcggctctggtcagtgtctcctgcactccggggcccctgacccacagtggcggtgcggctccggtcagtgtctcctgcgctcccgggcccccgacccacagtggtggtccggctccggtcagtgtctccccacacagtggctcttggtgaggggtgggcgcttgcagaggggacgggcaccacgtggtcatccccatggcaggttccgtcgtggcgacggtgttgtgggaggatggtgtgctgctgcccctgcaccccgtgagatgaatcctgcctctgggaggtacagctgggacggggcgagggacccactcagctgtccaggaagggtcccctgccctgtgcttcctccaggtgtcctggtgcgctcctgagcacggtgcccagtgggggtccccacaccctgaccctgaccctgacccacgggtgcctccccttggggactccacgcccttcgctggcattgggatggagagtgacccgttcattgcagaagggctggacctgaggctgcctgaagccacaccaagggccacagccccagcagctccagccttcacgtgccagatgccaagccctgtgctcaggaggacagggaggtgggggcagaggtggccttggtgccaccactcatgtgcctcaaggtgggcagtggctgcctctgccctggaggcctgtgagggtcagggtctgagggtctgaggtgcactatgacccgggggcactgcctggccacggctgagactcgcagagggtctgcagttcccacctgcctctcggaagctgccctgggtcggcggtcagtgaggctccgccttgggctttctattattagaaagtcattgagcaacagcagtgctgaggacgcaggcagggctgtgggcactgcaggggctgctcccggtgtccacacacgtgctgggctctgccgaggtgcgggaagcctgtgtttcacgctcaggccatcctggagcccctggtttggtccctccccacctcggggccctggcgtgcatttggggtggggggttcccatggcggcctccctcagctgcctctctccccactaggccacggcgtatgcctccgaggacggggtcctgaccgaggccatgatggacacccgcgtgcaagatgctgtccagcagcaccagcagaagatgtgctggctgaaggcggaagggcctgggcgtggggacgagccctccccatcctgagtccacagggagatccacagctcacggagcctggccgcggacccctcccacccctgccttgccggcccctgcacatttaggatatgctcctgggtggggactgggctgtgcccagggcctctgtcccccaggatgtcttgtggtgcgggtcggccgttctgccccccagggcaccccctgttgtaggcactggctagggaggggcaggcctccttcctgcccctcgagacactcttgggagatgcattttccgtctggctcacagggggagggtgaggctttgcaccccagcccctgcccaggccactgtgagggtgggtgctggctgagcccccggggcagcaggagccaggcagg

SEQ ID NO: 51057 - DNA, 1089 bp, Homo sapiens
ggctggagtgcagtggtacaatctaggctcactgcaacctctgcctcccgggttcaagtgattctcctgcctcagcctcccgagtagctgggactacaggcgtgtgccaccacacccagctgatttttgtatttttagtagagacggggtttcaccatgttggccaggctggtcttgaactcctgtcctcaagtgatccgcccgcctcagcctcccaaagtgctgggatcacaggcgagagccaccgcgccaggcccatttttcaagcggatggaccctgtgtggagctggcggtggagcagggagggctggtctttagtgacggggaagggtcgcaatgccagtcacggttcaccccaggactggctggtgggtggggagtcccagaccagcttgtgctgagttggagatttgctcaggtttcctcgaaccatcagccgccttcggtttgaggctcattcattgtgctccccaaactgcagagtccagaaaccactggggctgggctgggcctgcagccggcagagctggggactcagccacattgactgcctgttccctggttttggagcctctgacgtctgtgtcaccttgtcccaatcagatctgaattccagagaacaggagacctgccagcctgtgcacgtggtcaatgtggacatccaggacaaccacgaggaggccaccctgggggcgtttctcatctgtgagctctgccagtgtgtaagtacccggctgggcgccgcgctgggcagaggttgtgacagaggggagtgaccgaggccgtgacagaggggagtggccgaggccgtgacagagggggtggccgaggccgtgacagaggggagtggccgaggccgtgacaggggagtggccgaggccgtgacagtggggagtggccgaggccgtgacagtggggagtggccgaggccgtgacagaggggagtggccgaggccgtgacagtggggagtggccgaggccgtgacagaggggagtggccgagacctgaggccggccctgctgcttggggcaaggtctgctcagctcgcctgtgtcgggggcgcctgctggtagttcagtgagtcact

SEQ ID NO: 51058 - DNA, 1042 bp, Homo sapiens
ctgctcactgcaagctccgcctcccgggttcacgccattctcctgcctcagcctcccgagtagctgggactacaggtgcccgccaccgcgcccggctaattttttgtatttttagtagagacgggttttcaccgtgttagccaggatggtcttgatctcctgccttcatgatccgcctgccttcatgatccgcctgccttcatgatccgcctgccttggcctcccaaagtgctgggattacaggcgcgagccaccatgcccggcctagattaaaaatttgaagacatattctctactatgagccaatgaaattactcattttgtttctatcccatttgctgtcccttgcttttggaattttgtgtcttagtgtgactgtgattctttctctccttttgtctttcagcaaacggggattcagcgtccgatcctttggaacagggactcacgtgaagcttccaggaccagctcccgacaagcccaatgtttatgatttcaaaaccacatatgaccagatgtacaatgatcttcttaggaaagacaaagaactgtatcccagcgggttgccctttaaaaaccccccgtgtggtcctccctggaaggtgttacgtgtggctcgggcacaggaggcgtgtcaccctgtgcagtgcacacactggctcctctgtctttgcgagagcttggtttctattcctggtgcacgtcggatcgtccacgggttagttccagtgccacccatggcagtaggcgtggtgaggcgcacagacacggtgtggggttcaccctgacgtggttcagcagagggtcgtgacatagcgtagaccagggatgcttaggtgaggaggtggaacccacaaaatcccattgcttttcacactgcagggctgccccgttatttcctttgcaggttggtgtgcgtgcgtgtgtgcgtgcgtgcctgatacacatggagccgggctgcttcacacatctggtgaggtcgttagaaggtcagataaagaagagggcggagcttgctaaccaagctgttagaagaaataat

SEQ ID NO: 51059 - DNA, 1832 bp, Homo sapiens
tggagttcaccgccgagccggccggcatgcaggacatcgtggtggccatgacggcggtgggcggctccatctgcgtcatgctggtggtcatctgcctgctggtggcctacatcaccgagaacctcatgcgcccggccctcgcgcgccccggcctgcgcagacacccctgaagcgcgaggccgcccgcccatctttgcgccacctgcctgagggcgcctgagctcccaggtcctccgcccgctctcctctcctcattcctgctgcctccttaagatccccgcggaggaggacctgccggcgacggctccggcactttggcatcatcacacgccctttccagccgggcgtcagactcccagactctggccccggattggcccctgggcttgcgctgctgtgccagccgcatccagggctctccccgctctccgcaggcctttatagaggcggccagggcatggagccccttccagcaagagccatgggcactccggctcaccccgcacctccatcctgtgccgaattgtcccagacagaccgtcgccattgctcggtcactgtgctttgcaggcctggggcgcagctctccaagcctgtcctgccccgccccaccccactgggcttaggttagcttcgtgccttagtatctcgggcccactgcaggagccaacaccctctgctgtccagggggggtctgtggccctaagattggccggcctctccatgcatctggccagcgtccccttggagacaccttcaccctcaagcgctgcagaagcatgaggtgagggcctgcagcgctctgtaccgtttagggtgttggaccagccgggagcctggcaggcctggcccagcggccagggtgagtgttctcagaccccgggcagctggtggttctccagggccaggtaccccttttgtgtgtgcgacctctgactaggtccctgtgggaatggggcagatggcggccatcaccactgggtcccagggcagaagcttagataccggccttgagcagcccgaccttccaccgctgcctggatcccaagcctcagccgacccaggggaccttggtggcaacggtgtgactgacagcaccacccctagcctttgcatgcccaggggtcgagagccagtatccggcccagacaatgccacccgccatggaagaaaagctgaccctgcccacctgctgcagacccgggccccgggccgaggttgctttctgtgacgaccgcctggtgacgctggacaccaggagggttatggcactgccctcccctcctggagcccctggcactgaccacctggacttgacctgactcctggtcactggccaaacacccatcctcaccccagccaccccgggccctggctggtgccgtgtgacacctgtagcccacctgtgtgtctttgctccgcccacccctgcgtggcgccggtcaggcgcaaacctggcgccagtgtctaaatgtccatcattctcagaccaacagagctgtctgtgtgttatttgggaggtgggagggaaggaaaaggtggattccccttctccccacatcccctgggacccttgggtatgggctggtgtctggccccaaaccctctcctggcctgggtggcattggcccaggcagcgtgtgcggcacgctgccttgcagttcctagcaggacaggcagggtgccccctgtttgtctctgcaccttcttgtcctgggccagctgtgttggcgggggaaggggaagacggtacctgccgtgcttagaaatagcccattcccacggcgacacacttgagctgtgacagtggcaattaggctgctccggagggg

SEQ ID NO: 51060 - DNA, 1048 bp, Homo sapiens
cctcagggcttcatcccactccgtgggcctgatctccctggggcacctgggatgtccatctgcgttagctggagctactccatggcctgtggcgtgccacacacagcggcatttcggtgtcattaggcacagctggaggtgcaaggaggagggcagcctcatgtccagttccatgtaacttgcttcttctgaataaaggcaatttgctaactttctcgctaaataggatttggtttctatggcttttaaagcttctccgataaaatacttgcaataagggaactctctcctcctacactctcctgactgatggttcggaagtcctcctgccctctgagagcttgcagtttcttgtgaaaaagagaaactaagcagcaatagaacagacccggtgtctgcttgcgtggttaagacggtaaatgctaaatgtgtgacactgcctttagaaaccattttctccagcctggcttgctggctgcccgtctggtttgctgtgttgtgtctccagtggctttagcttccaacaggaaagcctggtagccgagcgaatctgtgacccaggaagtagcaattaaatgcctgggacgctgcctcgaggctggtgtgtgctctgaggtaagttccgatttgccaaagcacatctgtcgatctgtcgcccgagtcttcacaccctgactgcctccatcattttaaacatcgggagcagttgcctgcagcggggttcagatgccagccaggggcacagcctgtgaactgtgggtagatggcaaagtctagcatttctggcaaaggaaaaaacatttggtaactctctgagtaaatttctgactgagatgaagatacccattgtggggcagcatcctgaagcggaagcctgggctgtatgtttccaagaggaggagcaggagtggccacagccatgtacgccacgatgtacaccaggggctgcgtggccacagctctggtctgctggtctgctccctggagcccctccaccagtgctgggctgtggctgtggctgtctctggtttgtctttctgggaaacct

SEQ ID NO: 51061 - DNA, 1032 bp, Homo sapiens
ccctctgcccacaggtcccgagcagcccggcccaccatggacccctctgcccacaggtcccgagcagccccgcccaacatggacccagacccccaggcgggcgtgcaggtgggcatgcgggtggtgcgcggcgtggactggaagtggggccagcaggacggcggcgagggcggcgtgggcacggtggtggagcttggccgccacggcagcccctcgacacccgaccgcacagtggtcgtgcagtgggaccagggcacgcgcaccaactaccgcgccggctaccagggcgcgcacgacctgctgctgtacgacaacgcccagatcggtgcgcgccaagggcaggcgggacgggcaggacccgggggcgggaacgcccctctgaccccaccccacccccaggcgtccggcaccccaacatcatctgtgactgctgcaagaagcacgggctgcgggggatgcgctggaagtgccgtgtgtgcctggactacgacctctgcacgcagtgctacatgcacaacaagcatgagctcgcccacgccttcgaccgctacgagaccgctcactcgcgcccgtgagtcccgggccgcaccggctcctgtgcggcgggtacccaggccttgccactggggccttggccttcggggagggtgctgcctcctgaccgctcccaggaagacggagcaagtctctccagagccgtggccttaagcagtggtgccatgggcagggcacagagggtggcctctgggtggctctacaggcagcagtggccatcaggcagccagcatcccccagggcggcatgagacctccaggaggacagcccatacccggagccagcacctgggctgtcttggaggctgctgcgctctggtccgagggcatcagctcggggagaatctagcctgcttggggcaaggacagccagaggtgccaccccgtcccctgcatttgtcacctttgtctctggccctccctgcacgtggagggaggtgtggttgtcttgggagtgctgttggccaggcctgctttc

SEQ ID NO: 51062 - DNA, 1947 bp, Homo sapiens
ctgacctgctggaccggccattcccgggcaagagctggggctgcggagcccagcaggctgggtggacagggggcctgctccactgcatcgctctcccaagtggctcaagatgggaagagatggcggttttcttctgagagctttatttgtgaaccctcttgcagtgtcacactgagtccccgccagggcctcccgaggatcccactaaggggcatcttccagggagcgaaggtggtgcgaggccccgactgggagtggggctcacaggatggtgagtggaggcagaggggcggggtcagggctgggctgtggctggctcatggctcagccttagcctgctgggggggcctctttccccaggaggggaagggaaaccgggccgtgtggtggacatccgtggctgggatgtggagacaggccggagtgtggccagcgtgacgtgggctgatggtaccaccaatgtgtaccgtgtgggccacaagggcaaggtggacctcaagtgtgtgggcgaggcagcgggcggcttctactacaaggaccacctcccaaggctcggtatgaggctgtcacactgactccatcagccctcctgccttggctgaagtcccagaggggaggggccgctgcctgaggcctggtctgccaccctccgcaggcaagccggcggagctgcagcgcagggtgagtgctgacagccagcccttccagcacggggacaaggtcaagtgtctgctggacactgatgtcctgcgggagatgcaggaaggccacggcggctggaaccccaggatggcggaggtgagccgccccgccgtggagccctgtgtgccctgccctcccagccctccgccccctcagccccttcctccccaagcgtccagcccgacccagccacagctccatgacccgccacagtttatcggacagacgggcaccgtgcatcgtatcacggaccgcggggacgtgcgcgtgcagttcaaccacgagacgcgctggaccttccaccccggggcgctcaccaaggtgccgggggggctgggctgcgcctcatctgcttgcttctgtaaccccttccacgtacccccttggccttggggggtcaggcaggactagggtgccagctgcacccacgagtccccagccctgaaggaaggggagggactggtgggtggaggtgggtggggtcaaggagaagagggggttgggtgtgaaggaacccagaggagggtatgtctctgggagctggaatgggcaggttagggcctccctctgttccaggacaccaggaaggcaggacagcttcgtgggcgggagggaggcggctgggctaagatgctcctggttagtgctgtatgggggccgatgggggtggctggttaggacagggaggtggatgcttggcctagagtggtgggggaggtagtgagggctgcctgggaagcaggatggcagggagggggctggaggtggtggcggtggcagcttggatggccctgggaggggcaggcccggggcaaagcgtcagagctcagctctggatctggggtcctggataccaggcacctttgaggaggcgccgaagggagtcatgagacgggcttgtagagtgagttccctgcatatgagggctcaggtggggcagagtgggcccgtcctgcaccccatggtcctggggccccacccccacgctggctcacgggccctggccatgttgcctgctgctggtcagcgtacagcttcccagggccagccacctcggcttcacacctgcccagagctggcttctgtctgcctggacactcctcccatggctctggggctagggacacccagggctgccttggacacctggggctctcgtccagccagagcctctggcagtgcctggggtcggggtcggggccggggccgagtcaggcctgcctgtctcgtggagctcagcaggtt

SEQ ID NO: 51063 - DNA, 2002 bp, Homo sapiens
ctgcaggagattgtggtgggcagcaacatggacaagatctacatcgtgatgaactatgtggagcacgacctcaagagcctgatggagaccatgaaacagcccttcctgccaggtacagccgcgccccaggggcctgtctgcgtacaagtgggggcagggtcctggtcacccccgcggtgacagtgctgcagggagggccagctgcatccacagggaaagccctgagaagcctctgttgctgccgaggcgagtgggccaccctgagtgccctgggctgggggcagccaggtccacatgggagcttccctccctcccaggggaggtgaagaccctgatgatccagctgctgcgtggggtgaaacacctgcacgacaactggatcctgcaccgtgacctcaagacgtccaacctgctgctgagccacgccggcatcctcaaggtgagcccccctccgagtggcccatcccagggagacctgccggggcccactcacagccgcccatctgtcgttgcaggtgggtgacttcgggctggcgcgggagtacggatcccctctgaaggcctacaccccggtcgtggtgaccctgtggtaccgcgccccagagctgctgcttggtgccaaggtgagtcctgggcgtctgagtgcctcccctgtcccccacgcagcctcccacagcttcgcgggcactggccctcctgaacacctctcctgacctcttaggaatactccacggccgtggacatgtggtcagtgggttgcatcttcggggagctgctgactcagaagcctctgttccccgggaagtcagaaatcgatcagatcaacaaggtgttcaaggtgggtctggccctgctgcaggtgcgctgtggggttgtggaggagttgcaggaatggggctgcggggcgcacaggtgctgggttgagatggggaccagggccactgagagccctcctggtggcttgtcttctctgacgggacacaggtgccaacactgtgggccacttggtgtggctgttgaagcacctctgtctttcaggatctggggacccctagtgagaaaatctggcccggctacagcgagctcccagcagtcaagaagatgaccttcagcgagcacccctacaacaacctccgcaagcgcttcggggctctgctctcagaccagggcttcgacctcatgaacaagtgagcccagtgcagccgggtggcgggaggtcccgagccatagcggtgacttcccagtcccaggcctacctgctggctcaccacgttccagaactgctctggtgcctggcgtcccatgccctgagccccgtcccaacacagcccatctttgggggacccagtggagcacacgagcacctcctgggcctctggccctctccccccaggttcctgacctacttccccgggaggaggatcagcgctgaggacggcctcaagcatgagtatttccgcgagacccccctccccatcgacccctccatgttccccacgtggcccgccaagagcgagcagcagcgtgtgaagcggggcaccagcccgaggccccctgagggaggcctgggctacagccagctggtgaggggcctggcgggtggggcgtgcccacaggtggggctggcttgggcagggttctcacggtagccgactcgtcccagggtgacgacgacctgaaggagacgggcttccaccttaccaccacgaaccagggggcctctgccgcgggccccggcttcagcctcaagttctgaaggtcagagtggaccccgtcatggggagaactcagccgggaccacaggcgtggctactgcggctggagctgcgatgagactcggaactcctcgtcttactttgtgctccatgttttgtttttgtattttggtttgtaaatttgtagaattaaatcattttccttgttgtggaggaaagagctgtgttttctccgtgacttgccagggcatcttcgggtgcccacgtggggcagcacaaacctccac

SEQ ID NO: 51064 - DNA, 1038 bp, Homo sapiens
ttacaagacacacagacctgaggcgcctcacgaggtaaccagcaggtaaatggagcgcgctccacccacccgccactaggggtcccagcggtcaagggggtggaatgcgggcgtccatcgcgaaggcattctgctcgcaagccttggcacaggcgcgggcttcgctaccggaaaagtcccggtaggattccggaagccggccacgcgttccgcgcaggcgcaaactgctccaaaagtgggcgtcgctcccccggagtcccgattcctgcgtcacagcccgcgccgaagtcggaagtgcgctcaccgggctgtttcttctggcgtcctggacctgagcaagcgctgttttatgcgtcatcatcccgcgcagacacaggaagtgccgcacagagcgagcccctgtccttgtctcgagttctgggccggaggtcggctattatatcatcattacgcgccaatacaggaagtgacgatacttttggcgcgcgccggttgctgtttcttctctggctccgggaccggcggcggcggcggcggcagcggcggcggcgtaggggtgagttccgactgggcggaccaggtgtgggagcgcgaggagaactgtgcaccgaggtctttcttccgagcaggcctcggagcggggcggacccgggcccgggggcgagcgacaccctcgcttccgcggacagtctcatcccgcacggaactttgggtggtggaggcggcgggtccaaacgctgtctggagccaacgtctgccaggctgaacctcaagtgtgcgggactgaacccgaggaaatagcccagtgcccgggtcaggtggccttgttcgcgagcacatctcggagcatctccccggtctcaaggtgcagctgtccagtgtgctagtggcttcacgtagtccaagcggtctttctagcagattctgacagtaaaagcagtgtttgatgagtggcaggtcctgagttaagagcctttaaacggatgatctttaatccgcgatcgatactatcacgtaggtgttgttattctggttgta

SEQ ID NO: 51065 - DNA, 2207 bp, Homo sapiens
ccagatactcaggaggctgaggcaggagaattgtttgaaccccggagatggaggttgcagtgagccaagatcgtgccattgcactccagcctgggcaacagggcaagattccgtctcaaaaacaaacactattagaaaatgccctggaggtggcggggagttgttgatttgtgaggacagattgaaagcaactcccagggtggtaatgtggctgccggcctctttgaagattgtggtctggcataaggagaggtgcaggcgcctggttctgagcaccttggaatttccagccgcacagcatctggtgccctcccctccaccctcacaaggagctgccatcctgtttggattttctgtttgtggaccagaaacaaacgtttttccaaaggattagcaaatagggtaatttcctgtgtaacgctgctctggggcctcttcctcatcctggcagaaggagcctggagcccatgaggcagccagcactgtgcccttgctcagtcgtgctgtcccctccctctccctcagtctcctctccatgcccaagtcggtttccagccgctggtcttcatggcattcccagcacagccgggcaccaagaggcaaaacccaaggcctggcttggccgtgttaacgattgtacagacattttttaaaataactttgtgtaatacttttctggaatagtaagttcttgttgaactgtcacaggtgagcttctaggaacacaccgggtgtggttacttccactgggtgtgtccatggtcgtggtctgtgcttttgtaaacgaacagaacacttgaaccacctcccgaattgggtcatcggcttctttacgttgatacttagagatttgcagctctctttcaaggaaacttcccctactgaaaggcataaaaaggttaaaaaagaaaatccgagagtcccaattccctgtataacagcattaaaataatctgcctgcctggaaagatgagaacactgttgcacaacccaaaatgtgtctttaatttgtgaaaaattaccatggtgagtcagacagtcattttaaacagctgaacagagactatcatcagcaaatagagctcagctttgtagctgcctttaaaatccttgtcccaaatccggtgagctctgcttgctgccgccgcgctcctgggtgatcactcagacgggtcagtgggaataacaggccaacaagacagctttttacatgtgtccaaaggatggcctttcgaaggcctggaagtatttcactgttggaagaagtaaacaagaatgacattccagatggaaatagaattctctctcttgcctttgaccaacatggtactaaggggtttcttctttcccaatgtatgtacgtgccctgctgggggccttactttatagaatgagagcatccgagcttccctaatgaatctggctagttctgtgtctggctgaggatacaggagtgggacatccactctcggatccctcagagcacagaaaccttcagctttgctgtctctgaagtatttcctccagtttccctgcgggcccctatgtttgagtttgatggctgctggatcctcactcaacgaaaactcggttggaaactgttccgcctggcagtccttttttgttgttttccatctcatttcccttccatctgaaagtggcattcagctgacttgctcatttagactgttcacggagtctgaatctgccaacgtggtgttggaggctccaccttgaaaagggccacagtcagggcaactttccccatacaggaaaacttgaaaattacatcaacagtctacgtcacagccaaattatatttcctttataccaaacaaaactatggagaactaaaagtacatcacacaaaacgtttatagtgttttgcatgtgacctatttcagtatttatataactagattagtgctttctagcaaacggttctgttaattagcgagtcactgttgattctgctgtggtggtaagttgataccgtgtaactaatcccgtggatgcctcctcgttatttttgtccaaacgaagcagccgtggtagtagctgtctatgattcttgctcagcaaagtaaaataaatgttaaatatggactgctttgttttcttccttgtggaactctggtgttcatgctactttgttcaccggtgtggctggctgttgctagcaaagaggctcttcacagaagtggctg

SEQ ID NO: 51066 - DNA, 1055 bp, Homo sapiens
gccgaagggaggggacagagggccctggaaggaagggtctcctgctgccacggtgggcactcagaacttctccccacctgacccagggctgtgggcatcctcagactatcccagaggcatcgcaagcctcaagctgcagcattgcacggcactcaagggctatgaccacggaggccgttcagtcgcttctgtttagaggaaggccccctacctcttccacaccctgccctcctatcccttccacaccctgggctgcgtgagctccccgcaaccccagggcaccctgccctcctacctgtgggggtttccagccctgaggttgaggacaaacctctcgtgtttaacttgggaggagatgtgtacgttccttttcttttttggactctgagtatgaggcaggctgttctgaggtccccgtggggtgagcctgtctgtcctccctcagagcccaccgttcctatcatcatctagcacctgtccggttccccacgtgagccttgggcaggacgctgcagtgttgatggtttgggttacgtggcgtttacctgggcgccgtccttgctgaaaaaggaaacgtccacactgaatgtttctggggcgcgtggtgtgtgtcaggcgcccaccctgtcccactctccccaagggacagtagtacggcacactggggccaccagccagctcaactcatcctcctgtgtcacgcacccccgagggcgcaggaggcctgaggagtggctactggagccgtgtgttaggcagaggcttctgaccatgtctgagctctttacccccaatctcgcagctggcggattcccatgcccggtgcagcctgttgccagccagcctttgagacccagagctccagggcttgtcagaggcagcatggggcgccagtggtcctgagtctcatttccctgcctgctctttaggcctttggcacccatggtcacttcactggctttccatttggcttctcacctgggaaatacaaaaatagcccctcctgaagataaaatcattcagaaacagagcaataattctgactcattaacttc

SEQ ID NO: 51067 - DNA, 1037 bp, Homo sapiens
cctagtgaggtggggagtgagatccacgcctgccatgagctccacccctgccttgcggagccctgtcgcgagtgctctgtccttttgctctgccgcaccctttgttgttggattttcacctcaggaaagccaggtagctgctccacccccagccagggcccatcagtccgggaaactggcacaaagtctcctagctccctggctcagggcccagccagtcctagctccagggaggctgcagcccatggaggtttagctcccagcttgttgtcaccccaggctaagcagtgggactgtgctgctgaacaggaagaagggaatggtgtctttgtggagatctggcactgtcagtggcccgaggagtggatgagtcctttgttattccgaggctgtgggaactggtggaggggtcggccttctcctcactgaggcctggggtgcccttggaggcagctgtcctggtgcaccgaggggtcagggcacacatgggtggcctgggagcgtctgggtggcactgagctggcggtgtgatgggcagacggggagacctgggtgcacagacacacacagcagggggaggggaggagagagaggaaggctgcagaggccctggcattgccgccactggggagagggcagaagcgcctgttcccgggtatggggaggccaagtttcaggcacctctgagcactgctgggcaggtgagctgggggagaggccggcctgagcacccaggcgaggtcttcatgggggagggggtggcgtgcgtccctcagtgtgaacacagaatatttatgtatacatatggcacgcacgcaagtgcataaacataaacacagaaggaggtcacgaatgaggtgggaaccccagtttcccgggggagaagtgagacgaggaggggtactgggtcgggcagcacggccggcaccacacgctcccagagcgccttggtgagacaggatgggcgccccttcagatgcacagcctcccccgaagcaggaagagaaacccaggtgtgagaaacaggaaatcgggct

SEQ ID NO: 51068 - DNA, 1645 bp, Homo sapiens
gcagtgagccaagattgcgccgctggactccagcctgggcaacagagcgagactccatctcaaaaaaataaatacaggccgggcgtggcggctcacacctgtaatcccagcactttgggaggctgaggcgggcagatcacaaggtcaggagatcgagaccaccctggctaacacagtgaaactccgtctctactaaaaaatacaaaaaaaattagccgggcgtggtggtgggcgcctgtagtcccagttacttggaaggctgaggcaggagaatggcatgaacccaggaggtagagcttgtagtgagccgagagtctcgccactgccctccagcctgggcgacagagcaagactccaatctcaaataaaataaataaataaataaaattaaattaaataaataagatgtgatgtatttttacatgcccctgaaactgtcaccacagtcaagctaatgaacctgcccctcaccccctgcaggtcctctgagaggcatttcgttccatctgcacaaaacattgatttcttacatttttcatctgaatcttaagactcctaggccgggcgcggtggctcacgcctgtaatcccagcactttgggaagccgaggcaggcagatcaccaggttaggagattgagaccatcttggctaacacagtgaaaccccgtctctactaaaaatacaaaaattagctgggtgtggtggcgggtgcctgtagtcccagctactccggaggctgaggcaggagaatggtgtgaacccggaaaggtggaggttgcagtgatccgagatcgcgtgtctacactccagcctgggtgacagagcgagactccgtctaaaaaaaaaaaaaaaaaaagatgcctgaagttggagaattaatgtaattttttaaatgatgtttcagcttcgttcctatctgaatcatgcatttttctgggttgaaaaaacctcataatagcctgatgcttttccgcactttctcaagcatgacgcagtgctgttgtgttttatttcagaggagaagaagatgattctttggccatcaaaccaccccagcaaatgtctcggaaagaaaaagttcatcacagaaaagatgaaaagagaaaagaaaaatgtaggcatcatagccattcagcagaagggggtacagaagcatttactttctttgacatcatgttcaagtgtggtttctttcctgttcctactcttctgccttccccagagcaccactgaaaaaccagagaaagcaaactgtagctgaaagcataatggtgtcacagaccgttcagaagggctatagagagaatagctgaaagcatgcatgtgtcacagaccattcagaggggctatagagagcaaactctagctgaaagcatgtgtgcgtcacagaccgaaaaccagagagagcaaactagctgaaagcatgcgtgtgtcacaggccattcagaagggctatagagagagcaaactctagctgaaagcatgcgtgtgtcacagaccattcagaagggctatagagagaatactctagctgaaggccgggcgtggtggctcaagcctgtaatcccagcactttgggaggctgaggcgggtggatcacaaggtcaggagatcaagaccatcctggctaacacggtgaaaccc

SEQ ID NO: 51069 - DNA, 1073 bp, Homo sapiens
gagcaagaccctgtgggggcgcctggtgaggagggcacccgcttcctgttttgttgtccagggaattggtgggcctgtgttgtggaggtgcgtgagtgcccgtgtgtcacagtgtgcgtggccacccatgtgtgagacagtctcagtaggagctggccaggcgggccaggctgtggccatgctggcttcacgccaccccctgccctctccgtgcagtacccacagccgtgtgtgcctgcaagcttcacgccaccccctgccctctccgtgcagtacccacagccgtgcgtgcctgcaagggctggtgtcctgctttgcaggtgacccaggaagaggtcgaggcgctggtttgtggtcacacacagcggtgggtgcctgggccggtgtacgacgccgctgctggtggctctggctgggctcagctgagcctcagggctggaatgggtgtaggccaggccactgggtcagtggtgactgttggcggggagagcagggggagccgtgtgcagggcgggggctttgctggctgaccaggccggaggaccgtgagccacctgcacgcccttgggccggagccaagcagagtgacgcagcgggctaggaggcagggaacgcccttccacctgactgtggcctgagggtgccttccctggggcccagccggttccgcgggccagagcggtggctggcgcagtgctggggcgaggctggaggctgggtacttggccaggtctgaggccacgggaacagagggcttggtcccacccggctcagttaggagcagggagctgaagtgtggcctctttgctgctgaactgaggactttttttcagaagggattaggcaggaggaccatgtgaccaatgaggaaactgttttgttttgtttgatttttataagtgtaggaagctcttttgacttagttgcttttacaacaactttaccaagtctcatcacaattgtgttttgctttgagttttgagtatgaagagcttaggcttctagtgtgggcgcacagtcaggaccataccgatggggcggccgcgtgttcgccaagcgtggcctggatgctg

SEQ ID NO: 51070 - DNA, 1109 bp, Homo sapiens
tttgttaatattattttacagaaaaaattttgagatgaagtttcactctagtcacccaggctggagtgcaatggcatgatctcgacttactgcagcctccacctcctgggttcaagcgattctcctgcctcagtctaccgagtagctaggactacaggcgcccaccacagctaatttttgtatttttagtagagacgggatttcaccatattggtcaggcgaggctggtttcgaactcctggcctcaagtgatctgcccgcctctacctcccaaagtgctgggatgacaggcgtgagccacggcacccagccaaaaacctagagtagttcttaaatatctttgcaatggaaacagtctgttttcaaagtactttggtaaattggacttcagccattttttccccttgatgaaatggaacatatgtatgtgtaaattattattgtttcatacatatttatttactttatttacattatttattttattaaattaaggcatcagtgtttttctgaccgaagttctcatttcctgacaatggaaatggaacaagaaaaaatgaccatgaataaggaattgagtccagacgcggctgcttactgctgctcggcctgccacggcgatgagacctggagttacaaccaccccatccggggccgggccaagtctcgcagcctgtctgcctcgcccgccctggggagcaccaaggagttcaggtacaactgggagggatggttcctcttttttttctcgtctgatttcataatattctttcttaaaacgattatgaagaattctcctgagtagtctgcgtcgatgcatccggaaggtgaggctgggtccttgcccaggtgaagctgtgcccttgaagggggatcctggcccatggacacctgcctggcgcacgttcccaggtgccagcacaggcacagggtgccaccgtgtttctctatctgtctgtatcagcacagaaccatctaactggcgcctacgctgacccttgatgttagactgaagcgcacttggagaggaaacttttttttgagactgagtctcgctctgtcccccaagctggagtgcagtggcgcaatcttggctcactgcaacctcc

SEQ ID NO: 51071 - DNA, 2957 bp, Homo sapiens
gctgggcatgacaaccgcgtcagctgcctgggcgtgactgacgatggcatggctgtggcgacagggtcctgggatagcttcctcaagatctggaactaacgccagtaggtaatgcagcagcccaaatgcccttctctgaggagaactgtgcgtgtttctcatagaacatttgaagttgtcattaacggtttctagataaatgttgatgtagcattgatttggaattgtgttgtgggaaacgtttacagaaagctgaagtcacgtgccctcagctgcagacactcatgcagtgatgggaagagcagtgacctggctgtgcgtctgcacttagattctctgcctcttttcacatttctttaaactctgtttaaaacagcatgtggatgccatggagactggaagaccattccaacttggacgcgttaccatgagagcatatcctatccaaccgtactaacgtggacaccctacacctcccctcagaacttcaaaagggcaagatcttttttccttcacttattgctgaaaccaagagcacaattcccattgagagaaagatctctgtgctgtaaactaaaacaaattgtgcattccttccggggccatcgtctttgttttcttttttgtcttgaatgaattttaaaaggaaatatataataaaaatgttaaccagaaggtaaacttgagtgtaattgtcagacagacacacttttccaccagtgtatttgaattttagaccagtgaccctgttttgtggcattcatgcaaaacatgctgagggctttgttcatctggtcatcgtgtccaaatttcagtcatgtttgtagcaagattttggaagcattcatatttcctttttaaaatgtattcctttgtgttcaacagttaatcaaaaccagagagtctagggcagcctctctgatgttgtcaatgatgtaaattcagtccctggtttttaattttctgtctgatgtcacagatcattgttgcacacaaacgtggcatagaaaagaacatgttcagaagccatggggccaagcacatgcggggacggtctcaaatgcgtgatcagagaatccttcacctttgctgaaaagtgagctcagatccagcaccatgttcctcctgacccatcctgtctatcttctcagttgagtttttaatctcactttgggtttccttgtgaagttggagggaagtttataatagcctaacactaccccacccccaactaggaggaacctctgttttcaagagagatgcctgtcctgtgcttggatagtcagtcaattatttgtgtatgaaacaatgtacaaatcaatgttttgaaaataatgatctcagactttctaagttaaattttaaaaattttgattgtttgccatattgggtgggtttactcttagaatcgcatgctgtagaaatgctcaaaagtgcatatgggactcagtccttaggtgttctttttcttttaagaaataacctcttacagttgtaaccattgcggctctgtccacttctcgttgctgctctgtggcacatatcggaagcagtacagcgcgcggctctacacgcttgggtagcgggataagtcactgttttctttatttctttaaaaaaaaaaaagttctgttgcaaacgactgctgttggattctgagggtggggagggagagagagggagggagagggagtgaagagcctgccctcctatatggattcttcagggccctccacatctgaggtggctcattcccatcacacacagattgtcctggtgttcatttcaaggccagtgttcagcagcagcgtttggaaagcaggttctgtgggaccccccgccccgccccccgcactccttcatagcagcagtagtggcttctccatcctgttttctgcaacattctatacaaaactgtgctgtgaccttgcggtaggcctggatctggcaaagagaatacaaatgaaaccccttctttctctttccgtccaacaactctgtagagctctctgcacccttacccctttccaccttttgtatttaattttaaagtcagtgtactgcaaggaagctggatgcaagatagatactatattaaactgtactgttatttaagatgtaataaagcagtttgacatgagggactttggtgtggtgattatttacgggtccacttccagtttgcaacgcgcccgcttccctaagctgtccctgttgctgtgaggtctgacgggcctgctcatgccaggcggtgccatggccgccaccacgtcacagaatccatgagtggcgcattggctcctcggaggggttcctgggaagctccacctcacaggccagcagagcagggaggtccacctgccatcgcccagacccctccccaggcataggccttgcccacagcaccgtgggagtctccacaggcggctgccttgcctttctcctctgccatttccctcccttagaatgtctgaggatgttactccagagactagctttccttgggactgaactgagtgttcctcttggtctgaatataaagaactgcatctagtaagaaaaaaatgagcactggccatggtagtgtggaaaaccatggctgtgtgtgtcccaaatagccgctcctaggctccagaaccatccacttccctgctttccaaactggtgattttttaaaatcttaaataggcaatacaaaattagctgggcatggtggcacacgcctgtaatcacagctactctggaggctgaggcaggagaatggcatgaacccgggaaggcggagtttgcagtgagccaagatcgcaccactgcactccagcctgggtgagagagcaagactgcctctcaaaaaaaaaaaaaaagtaattttttaattcccatggctccagcagctggaactttttttttttttctcccttgatgtggagtctcgctctgtggcccaggctggagtg

SEQ ID NO: 51072 - DNA, 1188 bp, Homo sapiens
gtgtccaagatcacagtgtttgtgtgcctccccagtgcaaatcccctcccatcccagtcccctgtagttcctcccccatccccccacccttttttttttttttttgagacggagttttgctcttgttgcccaggctggggtgcaatggtgcaatcttggctcaccgcagcctccgccgcctcccggtttcaagcagttctcctgcttcagcctcttgagtagctgggattacaggcgcacgccgccacgcccagctaattttgtatttttagtatagatggggtttctctatgttggtcaggctggtctcaaactccccatctcaggtgatccacccgcgtcagcctcccaaagtgctgggattacaggcatgagccaccgcacccggcccagccctctgttcttaccagagcacagtcttgctggtctttgcctgctgtgttctctgcagccctaccattgagcaatccatattcccaatgtttctttctgagcgtttacatgatgtcttgatttgctttctctttccagttctttccaaatggcaatgcatttgccactggctcagacgacgccacctgcaggctgtttgaccttcgtgctgaccaggagctcatgacttactcccatgacaacatcatctgcgggatcacctctgtctccttctccaagagcgggcgcctcctccttgctgggtacgacgacttcaactgcaacgtctgggatgcactcaaagccgaccgggcaggtacgtggccatggggcctttctgtgtcttgtggacatttacgtggtatctttagagcaaacacagagtggttgcataagctgcagtgttttagtatcggtgggactgtggcatggcgtagcaggagtgacagtcgcaaactgatggcccagctctgaccctccaggcaagtggactccgaggagtaccagcagatcttcccacatgcgtcggggagggctctggggagagtcagtgggcaggagagggtcagctgtgcaggctccagggcccagccccgtgctttcccctctgaactctgcttcagggggaggagttccatgcagggacacctctgggtgccgttacagttaacatatcaaaggcaagcgtgttattgccaggtgtacaaaagatgagacttccttactaaaaatggtcatttgggcatttgaatttga

SEQ ID NO: 51073 - DNA, 1007 bp, Homo sapiens
tgctgtgagccatttgtttacctggcattggccttctcctgcctgccttttctgagaccctgtggaggggaggccaagggagggcacagagggagcagccacagatagagtcgcgtcccctccgccatccagggcctccacgtagcttcctgccaccccttccatgcccatccatgaccaaagagggggcacagcctcagtggtgctgcttgaaaagtgcccccagctccctgtttgctggcatttgagttgaggtagcgatcccgtcattctgaagcccaggccctgtgctcatctctgtataattttgcttgctttgctttgtttcccttccaaagttgtattacatttaaatttgtctttaaacaatttacgtttttaaagtaacagtgcagaggctcactgtggccctgggtggtttgaaggacagattgtctgtcacatgactagccacccaagaagttaaggctgatgtccccttgtcattcgctcctgctccagtgccctgtgggacatcgagaccggccagcagacgaccacgtttaccggacacactggagatgtcatgagcctttctcttgctcctgacaccagactgttcgtctctggtgcttgtgatgcttcagccaaactctgggatgtgcgagaaggcatgtgccggcagaccttcactggccacgagtctgacatcaatgccatttgcgtgagtctgggtggaggtgtggggtcgggtcctctgccgtctctgctagccgttcagattgctaaattttaaacttttctggattagatgttctcctttctgatccttatacaacctcatgtacagatggggatacagaaaactcccgatgggaaacttctctgtgttgaccacttgtctcacagatactcacagggtgttgtatgccagtccccgttcccacctctacagctgagcagtggttgggatcctggaggggaaagacagtaagataactcaggccaccagtggttacagagcctta

SEQ ID NO: 51074 - DNA, 1060 bp, Homo sapiens
ttagtgttttcaccttacaggtaaacggaagcccacttaaatgctagaattttttcatttgtggcatcaaagtactaaattaaatgtccagatagttattttatgagagtcattttagacttcagctggccatgtgggtttttctggtcttctgaggcatgatttggtggcaggagctgtgcccagcccagggcacagacccctagtcacgcagttggtggggttcaccgagacatgggcccttaaccaacttgtcagcaaagcatctgtggtattataaggtgtcctcgttgtataaatttcatagatttacaaaagatttgtcacctagattgtcaatcttgagaagactttatttattagaagatatttttaaagtgcttctgttcattaatcatttttttcagactcttttacgtatcttgcttcccttctgcagtcagtccctcaggccctagagaggaggctccctgtgcagtgtctgttgagattggctgattggatttgcattgccaggcccagccaggctttcctctgaggctgacatgaacggacagtgctctctggtgttgccttccatgggtcgaggcacaggagaatagtatgttggtgggcgtgtggccctcacagctgtccttacacctgagccaggcttctgctctgtgcagggctctgtcagcgtctcaccttttgacagcttgttaagcagaaatgtgatagaataccaggtatggccgggcgcggtggctcatgcctgtaatcccagcactttgggaggccgaggcgggcggatcacctgaggtcaggagttcgagaccagtctgaccaatatggagaaaccccgtctctactaaaaatacaaacaaaattagccgggcatggtggcgcatgcctgtaatcccagctactggagaggctgaggcaggagaatcgcttgaactcgggaggcggaggttgtggtgagccaagatcgcgccattgcactccagcctgggcaacaagagtgaaattcggtctcaaaaaaaaaaaaaaaataccaggtgtgatcactgagaactca

SEQ ID NO: 51075 - DNA, 1015 bp, Homo sapiens
ggagacaccacgtggtaagtacctgacccggggcaggcagtgccttgagaacccacagcccctggcacattcctctgtgaacatggaggaaataaggttcttgacataatattaggccatctgtaatttaagtggccttaagatttaaaacacatagtagcaatgtgtgaattcattatactttttttttttttgagatggagttttgttcttgtcacccaggctggagtacaatggctcaatcttggctctgcgacatctgcctgccgggtttaaatgattctcctgcctcatcctcctgaatagctgggattacaggtgcccgccaccacgcctgactaatttttgtatttttagtagagaccaggtttcaccacattggccaggctggtcctgaactcctgacctcaggtgacctgcccacctcggcctcccaaagtgctgggattacaggcgtgagcctccgtgcctagcctcattatacttctaataaatttacaaagtttaattttcagcagctgagaactaaaatacacatttttttctttttttttttttttttgagatagagtctctctctgtctccaggctagagtggagtggcgtgatctcggctcattgcaacctctgcctcccagattcaagcaattctcccctctcagcctcccgagtagctgggaactacaggtgtgcgccaccacacccagctaatttttgtattttcagtagagacgggatttcaccacgttggccaggatggtctcttatccgttgacctcgtgatctgcctgcgtcagcctctgaaagtgctgggattacaggtgtgagcccccatgcctggccaacatagatattttaactacaatcaggctcaaagtacctgctcttcttttttttcccctctatatatttgtacctccttaggtgatgataggtgggagtagggtgggttttgattgtccctttctgatagcatcatgtcattgtgaacaatgagcacagactaaaaataaca

SEQ ID NO: 51076 - DNA, 1125 bp, Homo sapiens
tcaggtgatctgcccgacttagcctcccaaagtgctgggattacaggcgtgagtgaccgcacccggcctaatgtggttttgatgagtgggcagcactactgttaagactccacctaatcataagttgtgacttcagtaaaactggactgtgtggattgaatttgaatcccatgtgcagcactggacttctcattaagtatgcttcacctgagtggccacatatgggaatcgctctctagataattttggctcttattttgttctgttacctcctttgcagtgaaagttggagatgagaaaatcctggtgtcagtgttgtttttgaacataaagttgtttgcatcatctgtctttctgtcattaggtccacgccatccctctgcgctcctcctgggtcatgacctgtgcatatgccccttctgggaactatgtggcctgcggtggcctggataacatttgctccatttacaatctgaaaactcgtgaggggaacgtgcgcgtgagtcgtgagctggcaggacacacaggtacctgtccttgttcataagcttcaagtgacacaagctgtttacctggggtacattatatgctttggatactcactttttatcaatcattttttaattaattaattaattattttttttgaggcggagtctcgctctgtcacccaggctggagtgcggtggcgtgatctcggctcactgcacgctccgcctcctgggtgttcacgccattcccctgcctcagcctcctgagtagctgggactacaggcgcccaccaccacgcccagctaatttcttttttgtatttttagtagagacagggtttcaccgtgttagccaggatggtctcgatctcctaacctcgtgatccacccacctcagcctcccaaagtgctgggattacaggtgtgagccaccacacccagcctttttttctttttttttttttttttttttaaagacagagtctcactatgtcacccaggctggagtgcagcagcgcattcttggctcactgcaacctctgattcctgggttcaagcgattctcctgcctcagcctcccaagtagctgggaccacaggtgtccgccaccacgcccagctaatttttgtatttt

SEQ ID NO: 51077 - DNA, 1018 bp, Homo sapiens
ttgttcatgctttgaagttggtctgacatttagagccttcctttcctttctttctttctttcttgaaacagagtctcactctgttgcccaggctggtgtccagtggcatgattgtggctcactgtaacctccgcttcctaggttcaagcgattcttctgcctcagcctcccgagtagctgggattacagagacgcactaccatgcccggctaatttttgtatttttaatagagacagggtttcgccatgctggccaggctggtcttgaactcctgacctcatgtgatctgcccacctcagcctcccaaagtgctgggattacaaacgtgagcaactgtgcccgaccagagattttttttcttataaataagtggctttgtctgaagcacatgtaacatgggagcacataagccaccagagtctgggttttagtctgttgctcttgtacactttctgtgttgtgcggtactgataggtttgcttttgtctgtccctccaggcttctcgtcagtgcctcgcaggatggtaaacttatcatctgggacagctacaccaccaacaaggtagggactggaggattcccttccttgaaaaaccaacccaggaaacagggttttaagctctggattcattttgttaaatcacgtaatacaggatagggaaggcagcagcggcaagctctgtttgttagtagtgaagttgcgcaggtgagatagaagctgagtcacgtgccacctgtcacggtctcttcctctggaccaggcacagttgtgctgttgtccgtcatctccttaccaagctggtgggagctaaggaccttctgtgtttctaggagacctcaattccagttttagcagagtctgggaagtttcatgttttatttatagagtgcagaagtatcacttttcattcagttacaagtttttagaagagatcatctgaaagacatcatactttaaagtgtaatttatgttattttcaagacttaatccaaagtgtattgttttgaataaaaagt

SEQ ID NO: 51078 - DNA, 1033 bp, Homo sapiens
ttattaagctctctgaccgggagacctctgtaaaggtgatcctcctaatctaggaggatgagctgctttagatcagctctgatactcgacagaaagtctcagaagggctgggcagaaataaagctagagtgggaacatgataccattacgtagaaataattttaaatgtttaatatgttgatgacaacctggattgagaagtttgctttaagaattgcaactgaaggctgggtgcggtggcttacgcctgtaatcccagccgaggcaggcagattgagctcaggagttcgagaccagcatggcaaaaccctgtctctactaaaaatacaaaaaagtagccaggcatggtggtgcacacctgtaattccagctaatgggaaggctgacgcacgagaattgcttgcatctgggaggcagaggttgcagcgagctccagcctgggtgacagagtgagactctctctcaaaaaaaaaaaaaaaaaaaaaattgcatctgaaaaataataggatgggagcctgcacttagtttttagttctgtgataaattttgtaataaagtgcaggtgaaaaggtttttatttgttcttaaactcattgacacctgtatcaaaacatctagtttgatattaaaagtgtcagagttatcaacaaaacttgagagagcgttactccagctttaggtcagctttaagaagccacatatgttcacagctgaaatagttaaaacctgtgttttgaggcgctgtggcttatgtctgtaatcccaacactttgggaggccaaggtgggcggatcacttgaggccaggagttggagaccagcctgggtaacatggggaaaccccatctctactaaaaatacaaaaattagccaggtgtggtggcacgtacctgtaatcccagctacttgggaggctgaggcatgagaatcacttgaacccaggagatagaggttgcagtgagctgagatcacaccactgcactccagcctgggtgacagagcgagactctgtctcaaacaaacaaacaaacaaa

SEQ ID NO: 51079 - DNA, 2443 bp, Homo sapiens
gcaggtgtgtgtacagctggtgctccaagtgatggtcgtgcagaagcaggtgtcatgcaggcccacacatagcctgacataggaaccagctattaaattgtggtgtgggacatctgtgtggtgtcataagaagagttgcgagatctcaaagaactcagagacctaggaggagatggtcctggatggacagggagaggaggaaggaagcaggaagggaacagcaagtgcttcaaggctggccatgttcgtgtgcgtgcattggagggcagggcacacaggttcctgatgaccagccagactgagacttggtaagaggtacggaaggggttcagtgcagaatgccacagtggaagccactggagaactgtgggaagggctgggaagaggtaggcacagtgggcgagccaacagccttgacaaggatgggtgatgaggagaatcgtttaatcacagatgttgatttacagaaatgtttttattttcaagatcacaaacaacatcgacccagtgggaagaatccaaatgcgcacgaggaggacactgcgggggcacctggccaagatctacgccatgcactggggcacagactccaggtaggcgtgggcatgagcaggatgctgcttgttacattcaggggctgctctgttgtcctaggggaaaagtacctgaacccatttgctgtgctgtgcagtgaagaaattaggaagttgaatcagaactctgggcacgcaaggtgcagcgttcacaggtgcatattccctgtccagttttccacttacctgggctgaaagaacactgccatttcttcactgtctgaatcacattaatacaagttctgatttttctttctcccttctcctgtctctttcagtttctagacctctgtcttcccagttctactgcatcctacttatgtgaacttggggaagttacctctctgtgcctgtttctcagggctggttggccctcgccctcttgtgatgtcagtgccctggctcaggaaatcacagaacctgccccgaggatcctgagggattaagtgtattgagccttagaacagcattgtgctgtgtgtgctttgctgcggcagacacacgggaatgcgctgtgagctgctctcaccattctctcatctggcctgtctgccctgccttcctttggtttaccatcccaagagataattcccttcatgggctcctatttgttcttttcttttctctttttttttttttttttaaagacggagtctcactgtgttgcccagcctggagtgcggtggggcaatctcggctcactgcaagctccgcctcccgggttcacgccattctcctgcctcaccctccctagtagctgggactacaggcgcctgccaccacactggctaatttttttgtatttttagtagagatggggtttcaccatgttagccaggatggtctggatctcctgacttcacgatccacccgcctcggcctcccaaagtgatgggattacaggcgtgagccactacgcccagcctctttttttctttttttttttttttttttttttgagacagggtctcactcagtcatgctggagtgcagtggtgtgatcatatctcactgcagcctcgacgtcctaggctccagtaacccttcctactcagcctcccaagtggcataggccacaggcatgtgccaccatgcctggctaatattttttggttttttacagagacagggtctccctttgttgctgacactggtctcaaactcctggcccctaagtgatccttccacctcagcctcccaaagtgctgagattataggtgtgagccaccaccacttctagcctatttcttgtactttaaattatacccctttcttctccaccaggcatctcccttccgtgaccccacactctgatttagaggctattacaaagtcttatttggtgcctgttctatctaaataatttaataaagtactgtttgatttgtgtaactgtgacatgctcgttgaagcacctgacataacaatttttaacatgcccttctttgagtagtatttctttgtattccgttgttagcgtggaattttctgctaggctttttctttgttcgtgaaattgtccgctttagagcacaaacagctagagaacaaaagattctatctttagtttgttctatatagtatcccatacaattccccatgcaaatgagagctcgcatgatggttccaatgacagcaggagtcagaaagaataaaagtgggaagggggagggtggggaagtggggagatgatattctgagggtacagagttttagttaggaataaattttagaaatgtgccacacagcacggagagtagttcataataacgtgtgtttcaaaattgttagtaaagtagacttaagtgttcccaccacagagcaaattggaagtgatgggtatgttgatt

SEQ ID NO: 51080 - DNA, 1044 bp, Homo sapiens
aagtgctaggattacagacgtgagaccgcgccctccatagaatttagaattaatgattgtttctcttgaaaacaaagtacttagttaatgcagtctgaagaaaagtttttttgggctgggtatctggtcctttttagacttttttttttttttttttttttttaatagaccttttctttgggccacagccttcctgaccctagatgggctttgtaaaaagagcaagtcgtgtgtgccagcctgtgcagcagtgagggcacaggcagcaccagggtcccgggtgtgtgggtgctgccccagcttgcagtgtggtctcctcggtgctggccacagctgtgggtccccaggaatattgtgctgcaggtcttagacagatttgggtactactggttctctgttcagcgtggcctggacagtccacagatggtagtagaccatggggtgttgagatgcaaggagactctgccgttctttcacattctgcttttgctcctgacagcttaggaaagctctctttgaaactttggtatgtgtggacctgagattgaatgtatctgaaaggttgctaatttctcactgtccttgcttcccaggacgccaggaaagcatgtgcagatgcaactctctctcaggtaagagcccactgagtcacgcagagccatctgcctgtgaggaggctagcacggcacccacacctggagcctcgggagggctctgcttgcattctctgttgcgcagtgaggatgccaagccactgcttttattaagaagtcattctgatggtaggcataggaaatagaggggcttattgagataaaaatgagatatctcaagccttgaataatcatctacctgttacagagggtaatagttgtaaaatattgttattgtcttaagatattttgaagctcctctcctcaacagaatctgcctcagaacttctatttctaatatccaatttgataatacctcaaaaagttaaacatagaattattgtatgactcagcagttctgccattaaatatatgcccaacaggattgaac

SEQ ID NO: 51081 - DNA, 1084 bp, Homo sapiens
aactgctgatgtgaagagtaagagaaaaagaggcagacttctcaggaaaaaccacgtcttcagtatgtttttaggttttgtccatttgatgtaagagctttctcttactcttgtttgctctgtcaagctttagctgttcttcagagtgtcgctgtacaggaagctgatgacattcagtacatacctaaataacagtttataagctgggtatggtggtgcgcgcctgtagtctgagctacccaggaggatcacttgagcccaggaggttgaggctgtatagtaagctgtgattgcaccactgcactgcagcctaggtgacaaagtgacaccttctcaaaatacagtaaaataaaataaaaaacaacagtttatttttctgactccagtgcaaggatgaagtcaagtatttccttttaaacggccaattacatgtttagaaagcccaccaggatttggagagagaaacaccaacataattttaggcaacttgttcctgaacttgagaaaaaataatggaattctctgagatttacagccaaagagaaaacaaagtatcctctactgtaagaattttaaatcttaacatttaaaagatcttacataggtgaatagggaagacttagatttttttaatagtttgctctgatcagacttgtttaacatgtcccctccaccaaaattaatcaaatgtgttctgaaatatttagtttgatataaaattattctctgaaatatctatttaaataaaaccaaaaggtattcaaattttgcctgacttaatacttaagcttctgctgttcattttaagtcagcatggtttttggcaagtaaaaaagaaaagcaaagtgttgttatttaataataatctaactgggtttttgggggggttcagaacactctcagctctttaccacctgcttttgagactatatttcatcttatagaaatcagatttttttttttttttttttttttttctggagacagtctcgccctgttccccaggctggagtgcagtggcgcgatctcagctcactgcaagctcctcctcctgggttcacaccattctcctgcctcggcctcc

SEQ ID NO: 51082 - DNA, 1278 bp, Homo sapiens
aatgctgaagaaaagttctctggtttgtaatgagaccatagttctcagactttccttttttttttttttgagacggagtattgctgtgaagcccgggctggagtgcactggcgccatctcggctcactgcaagctctgcctcccaggttcacgccattctcctgcctcagcctcccaagtagctgggactacaggcgcctgccaccatgcctggctaatttttttgtatttttagtagagaaggggtttgaccgtgttagccaggatggtctcgatctcctgacctcgtgatctgcccgcctcggcctcccaaagtgctgggattacaggcttgagccaccacgcccaccttaaactttcaatttacttttctcacctgcttcattaaattatccaacagttgtttattgattgtgcttgtctttctgtttcagatctcacattcttgaaggtggcattgaagagcactaagatcggaagatgagtgagcttgaccagttacggcaggaggccgagcaacttaagaaccagattcgagtatgtagttgtgtgtgcttggttttattaatcatttgagtttcaggttagatgttacttgttttaggaaaaatggtttacaggatgacttgttctatgttttatatgaaattgaatcttagttggcccaggatgtactaattatagatctagatacttagcctagtacattgtttttgggattttgctttctgtatacaatttgttatttgaatatacaccagatgtctccgtagaatttataagtgtcttttgcattctttatcataaccttgaaaatttgtgataccctgggccactgatcagactgtgatatctacctccctcccctgaatattgggactattgacagcagaaaacttgcttaaaagtaagagtattaacaacaataaaaaaagtatttcaggtatatctgatgtattttttcctaattttgaaagatcttccctagcggtgatgattggaatctacagcttctgatagactgctagatggagcagatatatctaaatccaagatagaggccgggtgtggggggctcatgcctggaatcccagcagtttgggaggccaaggcgggtggatcacctgaggtcgggagttcgagaccagccagggcaacatagtgaaacccccatctctacaaaaaatataaaaattagctgggtgtggtggtgtgtgcctgtattcccagctactcaggaggctaaagtcagagaatcccttgaacccgggaggcaga

SEQ ID NO: 51083 - DNA, 1030 bp, Homo sapiens
tttgtcattggcaaacttgcagcctgaatgttgttattggtgactgtgtaatatggggtcctgagggcaccgctgaggtgcccctcctagactctcaggggtctggatgagaggcctgggctgctgcattgccatgaagggtagaggcactacacggagcacattgcattgcaaatatgaaatattctgactttaaaaatcttgctaacacttgactcacaaagatgttgttctaaagtaggggcagatcccttcacctgcttgcttttaagttattcaaatctctctcaaaaggatttccaaaactcagattctgaataaaagccaatggcagatatgggtcatcaggaagactagacatgaggccttagcagagcctgtcttagtggattagacgggcgggctcttggagtcagcacagccagagcttagccgtgacgtcggcaccggaggagaggagcccaggccagggaaacctggtggtgggtgttctggaaggtctgggggactgagggaagcgaagagaaaagcaagagcaattaaatgtgagtaagacttttaaaatttacatttattctttaattttcaaaggaagctgcatcaatattacgtttagtagaaaaacgtgactaatagttataataaaaatgctattctatctttctttaaagtgagtatatttttcttttttcttttcttttttttttttttttgagacaaggtctcactccatgtgctcaggctagagtgtagtggaacagtcatggctcactgtagcctcaatttcccaggctcaagtggattctcccacttcagcctcccaagtagctgggactacaggcgtgtgccactgcgccagctaatttttgcatttttagtagagaccaggtttttgccatgttgttgcccagcctggtcttgaactcctgagctcaagccatctgccagcctcagcctcccaaagtgctgggactacaggcatgagccaccgcgcccagacctattttaattataataaagcagctacaat

SEQ ID NO: 51084 - DNA, 1006 bp, Homo sapiens
gttcaccctgtccttgggaccccgctcagatttctccacaccagagtggccttctctggccaccttctaagagagacctccccatctcacctgtttccccttcttacgtagttttatgtttccttagcaatggatagcagttgatgtatcaaaataaagacttgcactgttcgcttaatgccttcctcgaccaacaagcaagttctagaacagcaagtgctgtgtcttgtttcctacggactcccctgagctgtggtgcctggcacatgattggagatgggcaggtcgttgttgagtgagtgaatgaagccatacaaatacgaacccagatattgaggccactttattgttaaatgttttatcaacaattgacacttctatcctattttcatgttgttatataatatgactatatatgtactcagactcccaagtaaatatttgtgcttactttactctgacctaaactggtgcctggcaccagagtaggctcacaaaatgcttttctcacagtgaccgcctaacaaacctagacattagctgaggtttatagagcactgtgtcattctaaatagcctgaagacatagtttctattattcctgtttccagttctctttctaaatcacagatgatttagaatatgggttataaaaacatttccaactcagggtactttctatattttgtgggttttgcaggaaataagctaagttttggaagcatgtcttttttcttgcttggtggggagatattttacctttaaaaattggctctcattctttgaggcaaaaatatgttcatgtttctaggatttctctttaagagactagtggtcagagttcggcagagaccaccaaagttgtctggggtgttcgtgcccatgtgtttggccctttctaggcttacttgactccctggggaggagtacctgggaatacagtcagtaagagctttaaattaggccaggctaaaaagtttgattttttccgtaggaggagtatttga

SEQ ID NO: 51085 - DNA, 1027 bp, Homo sapiens
tggtcaggtttctgtgggagatgaggctctaaaatcagtcaaattatctcacatattactcaggttggctataaattgcataacttacatgattgggtgttgtcacatactttcttttctttgtttctctgtggccctcactgcttccatttctagccagcaccacctcacaacttgcccatctgagcctctgttactcatttgtttggttggaaaacctctacagcccatttgtagactgatggctgaagaggggcagtgaccaaggattgtgttcatctgatgaacagacgccagtgatgctgttcagcaccctgcaccacccgggatgaccccagtgtccacagtgctgagggtcagacacattcagcctgggtctagcactgtgctcttaggtagagggatgtggcctggcgtggggctgaatgaggtttggttttccctcttgtgtgtgtatggcagttatttgtgtggacttcagcaccactgcagttcaaattcagccaccttgcctcctccgtggtgttttctaagagtctccaaggtgtgatgcctacgtgtaataccttaccggggagccctcctcagcttccttacctttctgctgggtgtatttgttctgcttctgtacaaataaagtactggccaggtgtagtggattgtgcctgtagtcccaacactttgggaggtcaaggcagccgattgcttgagcccaggagctggagaccagcctaggcaacatgggggaaaccctgtctctacaaaaattacaaaaatcgggggcatcagagcacggcttgtagtcccagctactcgggatgctgaggtgggaggattgcttgagcccaggaggtcaagtctgcagtgagccgtaattgtgccgctccagcctgggcaactgaacgagaccctgtctcaaaaaaaaaaaaattaataaaaatgaagtactttacactaccgggtaatagacttaggaaactgattgtctcactcagtgtggggagaagttaatgggtggacttctcac

SEQ ID NO: 51086 - DNA, 1089 bp, Homo sapiens
aaacaaaaccccacaaacaaaaacataagattgtctttgggcctggtgcggtggctcacgcctgtaatcctagcactttgggaggccatggcgggcagatcacttgaggtcaagagatcgagaccagcctggccaatatggtgaaaccccgtctctactaaaaacaaaaattagctgagcatggtggcgggtgcctataatcccagctactcaggaggctaaggcaggagaatctcttgaacccaggaggtggaggttgcagtgagcctagattgtaccactacactccagcctgggtgatggagtgagatgttgtctcaagaaaaaaaaagaaaagattgtttttgaatctgaagacataacaaagcagcattacaagttgtgttgtacaagtgtgttagcgtaggttgtccttgataaatggaatataaatagctctgaagtttttgtatatattgacctattacaaaatcagagactttctttcggggttgggagggcagtttgagggtagttgggtcatctggaagaagaggcagaaaagaggaaccagctacgtgatgaataactgtgataagacaaataggctcctctactgccacctccttgttttttcctgcttactatttctgtggctgtgattgttgggattcacgggaggaggaagcagggacagtaggaaaagctccagttcctgatggacctgtgttgctggtgctgcactgccttttctctgacttcatcccacccacctgagagacactaaggtgggggctgaggtccaccctgtaattaagctcttgggcatgaatggttagctgaaacaagactgtcaccttctagtgaaattctgttttttggattcttatagaagtcagtagtaagtgtctgagataatgaatggtcagataacaacataaaggagcagtggactgactagagcctctggtctttgtaagtttgcttcttttttgtaagtaacttattcttttttttttttttttttttttttttgagaaggtgtcttgctctgttgcccaggctggagtgcggtggtgtgatctcagctcactgcaagctccgcctcct

SEQ ID NO: 51087 - DNA, 1045 bp, Homo sapiens
acaaaagcccctggggtccttaatagttgaggatgtagagggggtctgagccgaaatatctgagcagcgctggtttagagaatgggccaggcccagggcacctgtggggaccagagaagttctcagctggagacaggcaccctgtccctgcccccatgtgcagtactgtaggattgtgccttttcctggggaggagaactcagagatttgtcagaggtgaagacccgttggtgtagcttgagaagaggcccttgtgttagggatgtgcagaggaagagaaacacttaaaggagtgaccagactttgggagactctcagcactagtgtcgcagaacccacagaaggtattctgagagcagagggaatggtccgaagttggagatggattcgtcagtggtagagattgctgagggccagtgagttccagtggggtgaggagagtcttgtaggaaagtagtcggagagagaagtgtggggctaggggaggctctgtctgcatggattttagatgggaatactgagagggcagcgcccataaaggggaagagaggagagatcttttgtaaaatgcgtattcagggccaaagatgtgccaaggagaggcaggtgatgggcagtgaataagagatgccaacttgccttggtgagaggaatgttacctatgcgacagtggaaaaggctgtgtgctgaaaaagatggcggacgagtctgctgtagggctctaggcattgctggtgcttccatgttgaaaagggtggtccaaacatttgaggagagagtaggaggaggtgagaagacaaaccagacagacatctgggaaaagagggttccaggcaggagaagccccaagtcagggctgtgcttggacttggaattgaaataagtcctggaaaattggttaatccccgcttggcatacatattatgtaaagtgtgttgggagaggtacttgaaggttttcctgttgaaataaattccctacaaccttagccttccagtccctctgcctgacactcccatggcagttggtgcacttgcgttttgcc

SEQ ID NO: 51088 - DNA, 3153 bp, Homo sapiens
caagaaagtggataggcggttccttctttgctaacgctgggttcgaggctggggatggaggtggtgccactgacatggagacaggtctgagagcctccccagggtaggactgaatggtgggttttgtcttggtttatgctaaggcagaactttctttactttttgagatggagtttcgctcttgttgcccaggctggagtgcagtggcgcgatctcggctcattgcaacctccgcgcccccgggttcaagtgattctcttgcctcagcctcccgagtagctgggattacagctaccaccaccacacccggctaattttttgtatttttagtagagatagggtttcaccatgttggccaagctggtctccaactccagacctcaggtgattcacccgccttgatctgccaaagtgctgggattacgagcgtgagccaccgcgcccagccggtaaggcagaactttctaacgattagagctgcgcagaaatgaactgcaactgcagggtccagaggctgatgctgtcaaccctgggggaaggctggactgcaggtgttgggcggtggtcccaggttacgagcatttggtttcatcaacactgaaagtgctccccccgcccgcctttttttttttttttgagattgagagtttggaaaaccagttaagttctgaggtgcctgtgccccctcccagttaagtgcgcactgcccaggcccagtgtgaggatgacattttatcttctgcgggaacctttcaagatgagtcttatagaggaaactgttccaacatgaaatttcagctcagaattgactttctcaaaagagcacatccactggccaaaagctatttctctcgcgtaatctgaatttatgacagaaccatagttatctcatcagacaagtactgacagtgctcttcagtgatacctttaaaatattgttttttctttgatatcttcagttaattctgtttttttggtgggtgggaaagttgaagtaaattttctcagatttaattttaatcttagaagattcaagagactgcagaatagtgtgtggtttttttattgtttgtttttaagagtaaaacccactgggtgtggtggctcacgcctgtaatcccagcactttgggaggtggaggcgggcggatcacatgaggctgggagtttgagaccagtctggccaacatagcgaaacctcgtatctactaaaaatattaaaattagccggcgtggtggtgggcgcctgtaatcccagctactcgggaggtttaggcacgggaatcgcttgaacccgggaggcaggggttgcggtgagccgagattgtgccactgggcgacagagtgagactgtgtctcaaaagagtaaaaacctctgtaaatccttttgatgcccaatgactttgatttcaaagctagtatcatctaggtagatttatgttgatcacttgagaaacagaatttgaaaagttaatttatttctcaaaggagatgttgtactatcctgcaaaagtaccagagctttgttctcttccctttgctttgctaaaaatttctgggtcttttggtttattttatgtgtgtgttggtccactggaaaagttgtagctttgtagctaaaaacagctttgataaaaggatgaaaaaggtcttcagggcatctctagacttcatctaccatcagttgactttttgtagctaatactttaatgaataacattggtattattttagaagtgcagtgttggcatttattatagttttgtcgttgtttttctctgcccgaaagatttggctcatgttggtctctaaattggattacattcttactgtctgtgactttggctttagcattagtggattggtaatagatattctcaatttttaaatctggcttgaccatatggcaggccatgttattttgaaacccctatttagtgtaagtctcacaagacatggaacaaaaatttttataaaattttaaactggtttgaccgggcgtggtggctcacacctgtaatcccagcactttgggaggccgagtcaggcggatcatgaggtcaggagatcgagaccaccctggctaacacggtgaaaccccttctctactaaaattacttctctacaaaaaattagctgggcgtggtgctgggcacctgtaatcccagctactcaggaggctgaggcaggagaatggcaggaacccgggagggggagcttgcagtgagccaagatcggccactgcactccagcctgggcgacacagcgagactccgtctcaaaaaataaaaataaaaaaaattttaaactggtttacattctgatttcaggtttgcatttgttaagagtggttggagagattatgaagtaggcaattcagttaagtgtttggtttaggaacacagaatgaggagataaaataaatttaaaatggaaactatcagaaatttatgaaactgcagtgttcaacattactgaaagaaaaagcagggccaacgtatatgggagtgagtgtgtatgaagagagagaaatgcaacatcacatcagctgctctgggagagggacagagcaccacctatttcaaagctatgcattttgttctagaactttgattgaagaaatagagacaatctatagacatttgagtttgctagtggattagtggaatgctgaaagctttttttgtgagacagagtcccactcagccacccagtctggagtgcagtggcgcaatctcggctcactgcaaccaccatctcacgggttcaagtgattctccagtctcagcctcccgagtagctgggattacaggcacccgccgtcatgcccggataattttttaaaattttattttagtagagatggggtttcaccatgttggccaggctggtcttgaactcctgacctccggtgatctgcctgtctgagcctcccaaagttctaggattacaggcgtgagccaccgtgccctgccggaatgctgaaagcttttttaaaccttttagcctcttgttcttgtgtcagtgcctaccattgggtgccatggtaatcagtggaaattactcctggctttcagtggtagaaaagctttctgttttatagagcaatgttgcttgcttgcttttttttttttttaagattaagtgggccggg

SEQ ID NO: 51089 - DNA, 1050 bp, Homo sapiens
gggctgggttgggcagggcagggctgggcagggctaggctgggctgggcagggctgggcagggctgggcaggactgagcaggactgggcttggcagggatggactgggcagggcagggctggggtttaagcctggaacctctggcttggcctctgcccatctgcttcccactggagcttgcgtttagctccaggaccaggaagttcccaccccaagagccctgctgggtaggatggagtccccaggagggagctagggaggggccgccaggcgctgtctcacctggggctgctgggcaggaccggagcccccaggagggcgctagggaggggccgccgggcactgtctcatctggggcaaggtggaggcaggggacctcttgcactcatctgagaagcgactccacgcagggcctttgaggaggagcagaagctcagaaagcaggagatcatcagtcggattctgaaagaggaggctgaggaggaaaagaggaagaaacagcatccccccaccagtgccaggcaccggctgaccctgagggacaagacctggaactacatttctgacttttgcaagaagaccacagtcccaaccaacacgtacacactggtgagcaaaacgccttcctgtagacagaagccgcacacctgtggagggcaggtggggcctcagggctcaggtgtggtgagacatcctctgaggacctcagcaccatggccacctgcagggggttgctgagcccgctgagtggccgccactcagctcaaggacaaggggacaagacacactacggacccaccacatgagagaggcccatggccgcagcatccccagcaagggtccagtgtcctcctggtctcggtgtgcccaccagaccctgcgtcacccccagcagtgttgctgcccaccaggctgggaccaccttgcctggccctgtagagctgggtcagccgcctgccagggagatgtgcacagccgttcagaccacatgcctgggatcaccctgctacaaagcactcctgatagcacctagaggacagctttcctatc

SEQ ID NO: 51090 - DNA, 1020 bp, Homo sapiens
agctgggccctgtggtggtccctcccctccacgcagggtgagaccagctcttgctcagtgcaggaggtgaggggggacctcgggtccctatcagcagggaagtgccagccttcaaagggtgcctgggagtccgtgagcttccccagcccctggagttcaggtcctgtctggggctgaaaagataaaacacactgactctgtgtgactcggttttaaaaaaaaaaaaatctgccggggcttctgccgtggctgcagcaacggacccagtgcccactccggggtctaaagagtggcctttcattatggaattatttaatccccgccacttcaccgctggcaccgtcgaggtctgggggcaggtctgactggtttcctttaccttagtgaagccggcggcctgcaccgacccggctcgcgcccatcccggggtcacccacatttgggtgaacttgaacgagtgcccgaccaggtaacgttgccggacctcccacaagagggcactttcttttctcccattttgtcctcattctttccagccaggtaggtcgcgcttttttctctgtgcaaggaagttgatggtggtcatttttttttttttttttttaatacggagtctctctctgtcgcccaggctggactgcagtggcgcgatctcggctcgctgcaagctccgcctcccgggttcacgccattctcttgcctcagcctcccgagtagctgggactacaggcgcccgccaccgcgcctggctaattttttgtatttttagtagagacggggtttcaccgtgttagccaggatggtctcgatctcctgacctcgtgatccacccgcctcggcctcccaaagtgctgggatgacaggtgtcaggcactgtgcttggcaatggtggccattttttaaactatggttatggttaatggttctattttgtgtgtgggaggggggagggggtggggctgtcatattgtctttggggaaagtttcatttatctaatcaatgatttggttagttggtaa

SEQ ID NO: 51091 - DNA, 1052 bp, Homo sapiens
ggtggggctccccgtgccccgtgcctcagtttcctcctctgtaaaagggggctttgtgaggctcgacagggtttagaggagctcctggaacatagtaagtgcttagcaaggccgtcttgccgtctctcccacccagggagggtcaagtgggaagagagcggccccaccgagtgtgttccaggccccggcggcgtctgagaggaggcggccaaacctagtggggctgcgcgaccgcctgtggaacagtggggacgctgctggtgtcctccaggcctgggtgggcgggttaccacggaagcctatcaacggatgcctgtgattccctggtatttataggtatgtctattgttttattaaaaaatccagtttcattcagctttgtctcaaattatttgcaacaaactggaaaagctagttttccccctaaaataggcttctaataaaattggcaatttgcctgctgagcctgaatatcctagagttctgcaaagctggatattttgggatggattagaagagaggagttggctgaaggacagtggtcgtgctgctgagccggccgtctgtgtgaagtttacactggaccaggataaatgcgtatttcctgtgggagctcagcgtggccatggtattcggtggtcttatgattttataggcctagccaggggtctgcgagctgcttctgtccagggccaggtagttgaagcctggggttctgagcaggcgtgggcagcacccaaggaggtgcatggccgtgtcctagtgaaactttatgcacgctgaaatctgaattttatagactcttccggtgtttcaaaatattatccttttcattttattcagccaattaaaagcgtagaaatcctagcttgctgatttggagcactaggcagtgtaggttgccagccctcgttccccatagatttgggaagtcgagtgaaacgcatgtgttaggtttatatgtttcacattttacggaatgcccctcatgcagctggtcagccgcctgacgagggaagcttggccctttggagaagtggccgtgcctcgtg

SEQ ID NO: 51092 - DNA, 1138 bp, Homo sapiens
gacttcagagccactggtggttatgtaaggagttgtgtgttcctctgcccaactccgagcttggtcccacctcccagactcacctctgggctccgggctctgctgcgatgtttccgaggctcccagttaatcagatctgtcagcccagtgtccacagggtgcctgagagcccagcccatccacactgggtgccccagaccttccacggggtctggtggggacctgccagggctgtcaatggccccagtggagaggcccactgagcatcctgagaagttcccgtgcttgtgacctgctctcgtgtgtgtagcagcgggggctgcgtctcatctgccacacgtttctgatcgccgaggactcagccgggcacatggaggttgaactgttggggggcgggaggaccatccatggggtcaggcaccaacctctgctgaggatcccaaaatgtggggtagccatcctttcttgtgctggcgtggagcttttcccaggagctgggcagggagctgtcacagggccaggcccctgaatgggctgtttggggccggggctgagggggtgcccagtgccatcgaggggaagcctgtgggaaagtgtgatgacatctgaaaaaccaggagcaggtcccttgctgtgctggtcgtggtgctcgagtgtgggctcagcaggtctggtctcctggcgcccactcactccctggccatctccccacctccctcacatggcagggggaagtggaacgtgcggccactgctcccaccgtccctcacagcacaggctggacaggcaccctgaggcatccccatctcccagcccctggggttggcatgatgctgggcctccagaaatgtttgtcattttatgcaaagggcagaaaaagctttgttcaggccaggcacagtggctcacgcctgtattaccagcactttgggaggccgaggtgggggatcacctgaggtcaggagttcaagaccagcctggccaacatggagaaaccccggctctactaaaaatacaaaaattagctgggcgtggtggtgagcgcctgtaatcccagccattcagggggctgaggcaggagaatcgcttgaatccgggaggcagaggtcacagtgagtcaagattgcgccaccgcact

SEQ ID NO: 51093 - DNA, 1030 bp, Homo sapiens
agcaaccccttcctggtcggattacactcctgcttccagacgacaagtcggtaagaaaaagaagggtatttctgatattctgcagatttcagatgtgaactgcacagaagctaagtctggtgtgatgtgtcaactgtcacctgtaaggttctcccagttgctgtacgggtgttttcaggccagcagactctctttgttgttctccttggttggtgtcatattaagtacatttcatgatctgaagttatttaattccatttacgaaatacttactggaggtatcccactgagtgcaggcattgggtcaggtgctggggctacaaaagtaagcaaaagaggtggatttctgtgcttattaaaatatgtacagcttcaccttcaagctttatatatactggaattctgtggctttgaatacatttgaaagctgatgatctaggatattaaatgtatgccctgtttaaaattttgggggccagttgactttgacctacctgatttgtttatttgaagagttattaagtatgttctgcattgagtcctcaagaccatccccaggttcgatgattggctaggaggactgctgggatcaatcatggccgcactgggggccacagctggcatactgcactggggagataaaggagacttggccaaggaaaaaggcacatggggaaaattccagaagaaaccagtcacaagctcccaagagccctctcccagttcctccagcaatgaattgtgacaactcatggtttttgtcaagggctggtcatgcaggctgcacacgaaccaaaattccagactcccagtggagagcaggtgttcagcattgcgttagtcagggttctcctgagaaacagaaccagttgtgtgcacgtgtgtgtgtgtgtgtaaagagatttattataagatactggttcatgggattatggaggctgagaaatcctataatccgccatctgcaggctggaggcccaggagagccagtggcacagcttgaaggcctgagagccaggagctgatgggg

SEQ ID NO: 51094 - DNA, 1004 bp, Homo sapiens
ttgaacctttttaaaaaacaaaatggctgtagaaggaaacacaggagagtatttccgttactgcagcgaaagggcttcttcaagcttagttctgtagaagcagaaacgagagaggagggtcgtccgcaggttccaccagtgcctcgtgccggtgtggtcacaggtgccctggcaggaccgacagcccagaggcagcctgggagacctccgtagtgtcagggacggtggcagggaggccgagctgccaggtggaggtgctggttctgtttgggaagtggaagtcacagaggcctgtgtgccgcctgctcaagcctggctcacactcgtgtcaactgggcatgaaaaccaacgccagccaggttcgtcctgctgccggcccatgtggccccactcggtgatggctgtgtgctctcccccagggttcagcgtggactggtgggcgctgggagtcctcatgtttgagatgatggccgggcgctccccgttcgacatcatcaccgacaacccggacatgaacacagaggactaccttttccaaggtgcgtgccccgctgtgcgttcgtacccctcacctgcacgactgtcttccttccttttcaaaggtgcaggtggaggggtcccgcgggtgcctggagcggcagtgccatgcaaagcgtaccgggaaccattcctcctggccagaccctgtgtcacatgccactccccgggccgtggggtggggttaccacacctgtgggtcagcaggaaagagaacctgtccccattcagctccaactccctcctgccctggccagcagcacatgctggagccccagcatgtccttgaccgaggctgtaccgagctgaaagcacagcccccacccccaaaacccacagccaccatcatgggctccttcccacctggaggccccgggacctgctcctggtctggaattcagtgctgtggggatgtgggatctgggaacgcggctgtctccgcggtgccctctggtggccagcctgca

SEQ ID NO: 51095 - DNA, 1007 bp, Homo sapiens
cacgagtgcttcggcaagtgtaaggggctgctggtgcccgagctctacagcagcccgagcgccgcctgcatccagtgcctggactgccgcctcatgtacccgccgcacaagttcgtggtgcactcgcacaaggccctggagaaccggacctgccactggggcttcgactcggccaactggcgggcctacatcctgctgagccaggattacacgggcaaggaggagcaggcgcgcctcggccgctgcctggacgacgtgaaggagaaattcgactatggcaacaagtacaagcggcgggtgccccgggtgagtggccccaggcctgggagctggggaggatgcgcttggggtgggggccccttctggactacaggctctggtctccgaaggctgggacctgtgcttctgccgtgccccatgtctccagtcttcgctttgttttagggaaattcagagtgttccgactggcagggccagagagtttggtaggaaggccctcctgcccgttccccaggacgagcctggagtgcgggctgtggcggtggggtggggggccaggcctggtgtgtggggaaggcccgcaggcccacaggcattgcccagataggaaggcacaggcctcatgctcccgagaaagcggcctgccccaggtcagggaagttaggtccagctgggccacggcccggatgcctcaggcccaggtctttcttggggttggggtgaaggtggctgtcctcgccccgaaggcacccagcctcgaagacggagggctgcctgcctttgggccccaggagacagagcttgggtgaggcgaggcctggttttgttactggctcccgctccctgtttggtgccttgaagttttgggacacagacacaaaatgaagccaggtgtccaggcttcagtggcaggggcccgagacttggcggctccagcactgtgctggttggtctccctgggcctgccagggaccaaatcccagagtccgccgtgtggggtgagggcc

SEQ ID NO: 51096 - DNA, 4034 bp, Homo sapiens
ctcagtggggtcctcaggaactttccgttgcgtacctccccaagtatttgtaacttttcttttaaatatccaggcttattaaattgcacacacagaatgctgcattggctcagctattcttgggaggcctaattaattcagctattgcatcaaactttttttttctaaatctgtgaatagatgctccagcccggttttctctgggcgcccctccagcagagtgtcagatcgtggggaggaggggctgtggatggaagcgagggactgtcgcctctgctcggagggggctgcggagggtgcatgtgtgtgtgcatgtgtgtgtttgtgtgtgcgcgcttctgaccctgccaggccagggctcaggtggcagccgcctgcagacctgtgggctggggaaggatgctcgtggcagagctgcagacagacgtagcaggctggggcccttcgtgtcacacggggagttggttggggtgggcccgatggcgctccctgtgggctggggcctttctttttggggtggccgcaccctcgtcagtgcctgtggctggaggaagccacatgtcgggggggattgtgggctcgtgcaggctgcgtagtgggtcacctgtggccaaggcctgagctgctgggacacgctcacgtcactgtcttcagagctgatggcagaggatctcggttgagcagggtgtgtctgcgtttgtttttgtccgactgtgggtcatgtgtgtgcttgtggtctttctgtcttcctgggctttgctgggggcccattggagtggccagtggggcctcgttgtcacagctgacacagagcagggcccaggccacccggcttctctctccctgtggttgtgagcgccggggtccttgggccgccatagagacaggccagacaggctctggtcatctcagcggatgcctccgagccgcctttcccttttgaagtccccagcactgctctgaaatttcatttaccgattaaaaagcaattcccaggccatactgacgacgtgcacggtgtgagtgactgcgtcctctaggcctgagtggcagccacacagcctggccctggcagtggtgtcctccgcctggctccctgaatgttcaccagctcctgcgggttttcctctcctcatgctcctgggggtggggcacccatcctgcccgtgttgcctcctgctctatgttcttgacgtgggatggcggccagggactctgccctcgctcagtgcctgccctttaggctctgtgactgtgcacttgggagttctgggcttcagggtccccttaagtctcctcaggacagccgtgtgcgtgtctctgtgtgcacaggagcgacacatgagaagggagtgtggtctcagggtgggcgtggacccacagtgcccagaccctacttgtcctagaaggagtggcctgggaggccccgcctccgccctcactggccgccgttggctcctcccactcgtgtcttgacagcttattctcgggatatgttttgatttcttcacttcctttgtagcttattttaatatttttgatctgccgaagatgagggcagaacaaagaatgtactggaactctctttgcagggctgctgctcccagcaggccttcgggctctgcggagccggagggggctgaattgccttccgggtgtttgtggccaggccagggtcgggtctcctgcctgagtgggctgggtcagcgccactctcctacccatggtgggaggtgggagagggcggagatgttcccgggtcccaaaccaagtgggaggcagggctgcagctttctccttggaagcctcctgtgacagcggctgtgcctgagcctctggcctgtcggcagtgcagtggcagcatgaggggcagacagtcttcctccagatgccccctcatgtcacggggttacagaggaagcctccgcttctgtccagtggctgtcgggcccggccagcttcctgctgctgtatcttggaagaccatgtgggctgcatgggtgcttggcgagtctcctcttagggaccctggggctgctatccttgacaggggaccttgtctcacctccccactcggtcccacactggctttgtgaccttggacgagttgcttaacctctctgcctcagtgtaaactggggactactgtttattgatcttggactttatgttttgagtggtacaggtggggcacagatgggtcattgtgctgctgggagcacttagccaagactggagcctctgagccttccccactcccacccctctttcttctttccggtcggctcgcctccttcctcgggttctctgatagctgtaggactccattggactacatttttttgtcagtatagacagctgtcagagacggagacaaaatgtggcagttggagctgccgcttggcctgctgcctgggacgcggccccttgtcccgcagaacgtcagccaagcgctttccgtgcaggctgataacagggtggtgccgtgcttcccttgggccgtggcaggatcctgctccaagggggggtcctgctccgagggggccggggtttctgttccaacagggctggtggggggggtcctgttcccagaggtccgggatcctgttctgagggggccagggtcctgttctgggccgggggtcctgctccgagggggccgggcgtcctgttcctaggggcggtgggctgcctgtgtgagagctgttcttcacctgccacgtgcagtctgggcattctggtgactggagaatttgggttgtgttacagtgttgttgctctgtcctgcagatgcctgaattcccaggggtcttgcaggtccccttgcccttgcgctgtgtgggctggcgtgggtctcagtgggctgtgggttgagggtcgcttggttgggaagctctgcgcgcttcccagtggagggtccgcgacgggggttttctgatccctcatgctggcttttgacccgtgtcactgcaaggctgcccctggccccaggcagcgtttcttcaggcaggtgcccagccaggtggtcgggcttgagacctttgagtctcgaggtctgttctggggaatgactgagcttgtggaggccaggaaggggttgctgggcttggagagcctctggggaggagttgtgttttgctctttgctgttttaagctgaaatgatcacaggaagggacagcatcaagagtttctttctgggacacccctcactcagctcagcggccgtgtgtgggtttggggctgtgctctcccagacaccctcaggtccggggagcacttcgggggctatctgtccctttgtccaccagcttcctttggaaaaagtgtttgctgcaagtgtttttctccagcttttcgtggggttccctgtagtcttgggccatgctctggggtcaggctcccggcaggccctggtccccgtgcagaaggccagggtctgcgggtttgggctggtctgccccccaggtgagggttccggaaagacggccggctgctgagtcttctcaagcaggggaaacagcagctcgagagtggttcttgacctctgcccaccccagctggctgtgcacggactggggagggcatgggcagctgcccccaggtggcttctgcagggagcagagcttagtggtcattttcccggcatggtctgtcatccgtctgtctgggacccctctgggagctgggctgggtccctcgccttctggggcagcagggtcacggtgggggggctagtcctctctttcagcatcttgtttctcagccgtccctgcggctatttgtgcaatgtctgtctgtctgagtctccgggtgagggcagacaggatatggtgcgaggaagtctggggtaagtgtgagccgaaccccgccctggagtctctcggggttgtggggccacagccccagcttaggttaggccttcactgctgctggcagggcctccagagagaaggcggtggttccggggcctgggccctgactgtctggcaggaggtgtccacgccggcggcccggctctctgtggcaataatg

SEQ ID NO: 51097 - DNA, 2412 bp, Homo sapiens
cgaactcctgacctcaagttatctgcccaccttggcctcccagagtgctgggattacaggcataagccactgtgcctggcccctggagtgggttctgccacggaaggcatccccggggtctgcgggctggaggggtcgcccccactgtgccacctgttctctcgaggcctggttgccctctgcagaccaggtgccatgccaggtgaccctcaggaagctctggctcaccccgggggctggggggcatgataagcgatagctcttaggtgctgctgctttgtgaatatgagagagttccagaagggccccgcttcccagagcctgcatgttggtttcactgtgtggtacttgatatttttccaggctgccttgctggggtggcctcgatggggggcccagggagcctccagctctggggacatgctgccacatgagcctgcttatttacgaaaatgaagaaccaggacttgagtgtgaattttaaatgagattgtggggacaatagtaaaatccagactaggaccagatggactgagcacctgcgttggccatggcccggaggtggcgtggtggtgcctggcgcctgtggccctcagcatgtgtcctgccggccgcctagtaggccttcgcttgaagtgcttattcctttgagtaatgctcctgtcttttgtttggggggaaacagataaagggggctttgagaggcgtctcggcgtgatcctgggaaacggccgagattctgttcggtgcttggtgttcgtgtcttctctgattttacctttttgactcataaagatggaaggagtgctctgcctcggtgcctctgcagctgcagatgctgaatcggggcgtttaggcctgcctcttgggctggcacacctggcggccttggtcaggccttcttgggctgcctctgctggggtgcttgtctcactggccgtgggggttgttgcctgtgtggttgtgttgctggcttcaggggctagggttagggacgcctggtcacgtctgggtccccagtttgggggccagattcaataactcactgaatgactcagtggaactctgcaggcactggcagtcaaggtttattggcaggtccattctttggctagaaggagaatgctgtttcttttctcactgtttcaccatttttttttttgagatggagtcttgctctgttgcccaggctggagtgcagtggcgtgatctcggctcactgcaacctcagcctcccgggttcaagcaattcccctgcctcagcctcctgagcagctgggactacaggtgcgtgccaccacgcctggctaattttttgtattttagtagagacggggttttaccatgttggccaggatggtctccatctcctgacctcttgatctgcccacctcggcctcccaaagtgttgggattacaggcatgagccattgcgcctggccattgttccacctttggaagaaattggttcaccgtcttctgacctggggggcgcttctaccctggttccatattgagggctgggaagttgctggaatattattacccttggctggtgaggctgagtgctgatgctcctcccagctctcagccctgcctggaccaactgcggcttctgctggaacgtcggcggctgacttagaaagaaacagctcctgttctaggcttcctgcaggtcccacggtgctgcttgtttcagagaaacgcagctcaggctggcggcctcaggtgggcatgggtggcaggggatgccatcacccaaatcagggatctttctctgtcctgagggttccaccccaggacccagggcactaactgggttcttgtgtggcccttcccgaccagacctgacccctgagctgcgtgtgtgaggtgatggtgactccacgacagcttgtgtgccgttatgggggcacctgaggactggctgacctcaccgggaagtgcgtcaggagtgggtgaggggtggtgggagggcagggagcgcccagcaggtgtccagcggtgctggcgctgcctctgtctctctgtccacgccctgtgtgtatctggagtggcttaggtgctccctgcggtgctcctggctgctgtggttcctgaaggctgcggctgtgccggtggtttcctttgatgtcagtcttcttctacaggggaaaccatgttgccaggagagccaggtgtccgctaattacgttgtgttgttctgcccaggagtgaacctgtaagtgatgagaataagaagcggctgtcagcctgcagacccgccctcaccctgtcctggttggggtgctgcctgctgggaacccctggtccagctgttgagaggaggctgactgggggcacagttgttgcagagtctgatgcaggctttctctgccgggaaagtaacatggaaacattgttgcttttact

SEQ ID NO: 51098 - DNA, 1134 bp, Homo sapiens
gttgggcattttttcgtgtgcttattggccactcctatatcctctttgaggaatgtctgagtccctctttgagtcgagttgtgtgtgggggcctttgctcagttgtacgtctttatctactctggttagtgatcctgttctacttgtaaatttctgtctcctgtttgtctactgcgtgcaccgtggtcggatcctgcctctgttgctggaggctgcctctgtcctctgctgtggtggtcaggaagctggagcgtctcggcgccagattcatgtttgtaagaggagacgctctgtgagcctcggtgtgcagcgctgtctgcaagtcagactccccacccctcctttgtgcgagctgggcgggggctctgccgggactggtggtgttcatggagagggcttctgtgtgatgaagagatgacagtgacctgctggggccgaaggctgtgagtgccattgggggagggagtctcagagagtgcggcagtcgggcctgatggggctgctcttctgtgaaggggcacctaccgtgtgcctggcctgtagcagcagcaaagaggaacctgatggggggggcctcaggaacctccacctcgcccactgtggccaggctgcttctgctttctgggaggcctgtgcaagagccatgggcacaggccgggcacggtggctcacgcctgtaatcccagcactttgggaggctgaggccagcggatcacaaggtcaggagttcaagaccagcctggccaatatggtgaaatctcgtctctactaaaaatacaaaagttagccaggtgtggtggcatgcacctggtcccagctacttgggaggctgaggcaggagaatcacttgaacctgggagtcggagtttgcagtgagccgagattgtgccactgcacttcagcctgggcaacagagcaagactccatcttaaaaaaacaaaaaacaaaaaagggagccgtgggcatgtgtgtgcacaggtgtgcatgggtgtgtgcagctggagagggaagggcctgggtcaggggcgccctcagcctggagccagggaagggcagcgagaggaccccagactcccaaatgaccaagggcctgtttgcagcgtgcttctccctcctttcttctggctctgaagt

SEQ ID NO: 51099 - DNA, 1744 bp, Homo sapiens
tgccaaatgtgggtggtgtggtggacccggggcaaggggccattctctggcagcccctagaaatgcctccctggggttggggtgcagccaccaggcaagaagtatgtacccccttgccctggccacttggggtttctgggacaatctgctggcttggccttgactttttcctgaacctaggagcccagggcctgctcctggcatcaggacttgctcttcctctttcctgggccccacaggtgcccttggggagcacacagctgccccagcccgagtccagtctggctctcgggaaggggccttactgctggctgcacaccttggcctccttcccctggatgcgccattgccaacgcagctgggacagcccttggacgcagcgtgcccgccccttttaccagggcatgtgggctgggaccagtttcagccccatgttgacttgtttggctctgctggtggtgacgggggggcgcggtggcggggggccttggtcgcgtcgtgtctgctcttgtgcaccggtgcctcacggagaggctgtggtgagtgcgcggaaggaccctggtgcttttggggactttctggagcagcccacattccttccccagagccctaggggcctggccagctgcctttccaggccctgaggccaccaggttcttggggggagctcctaggttctgctttggcctggctgggtggtgcccacactgccgcgtcccctctccggggctgcccggactcagcctggctggcagccatttccgttacttggtttccaaaggccccatcttggaatcaggagcaggctgtgggactcagggtgggttctgagcttggtgacccgctctgctcttttgtccggctttgtcctaactgttgaatattaatgaggggcgccgcagggtggctctccagtggagggtcctcactttttgttttgcaaataacgctggggcccctgcgccactggggcaatgcaactgtgacggtgctggttggattcaaaaggaagcctggcagtggcggggcctggacaggcagcctttgacctgaggcggggcggcgctctgcgctggttcagaaaagccgtggggcagcctctctggcaggcactggctgtacctgttggttttcctttgcccacagtgaagtgaaagtcactgcagctgggtttgctgtttaactcactgtctttccttctcacgtcttctctgtgcaaatagtggtcagtgtactttttgattatttcagtcaagtggaagtttctaggagcgtagagaggcagcgtggcttagggtttaggagcatggctgggctaccttcctactctgagtgtgggccacgttacttttctaggcctcagtttcccattggcccctctcctgtttggaagaggcagctgggtcccacaagccatctcaggagccgcgtctgggcgctggcacggggactgtgcccacagccagccagcctggtggtcagctgatggattcccgtaggtacttagcaaaatgcctggagtgtgcgaggctgtcaggccagtggcagatgcggtcgagtgctgttgtttcttggtgctgcctggcactgccaccctgatggtcggctctgagttggaggccagctttcatggcagcgttgttggtgggcgtgcagggtgtgtctgacctgggcctgggcatcaggtcccattgtggttgggtccacagggccccttgcctcattcgtggaggtgctgggggaa

SEQ ID NO: 51100 - DNA, 1100 bp, Homo sapiens
ggttgttgttggccagtgacacaaacctgcagcttctccccttcttgcttccctccccgccccttggctccgggcacagcgtggctgaaccggcttatctggcctcgtctctggaggcctccccagctgtcatgtccgttgacatttcactgttcctggcagtggctgtgcccagacgcgccgtggcacgtgggagtgatgctggtctttgccagtgctctgcacacctgtggggaggcctctcggggtttcctgccaggtctctgtgcaccccccggtgagagatctgaggaggaggaggaggaaccgagggcaggtagggcgctcttcagatgtggagggttggaatctccagtttaataacaaactttatcctaccttaagttttcaaaagtcttgtaaagaacgggtccattcatttttagctgctccgtgaaaggtgagaaagctgagtagggggctgtgtcccaagaccagggtttgctgtggcctggctcgattgagaatcccctgggccccaggagggtgctgtggctgctgaggaggctgccccacgttctgatcctggtgcagggctgcactcagcctccccagaagcagcttggtcccgggtcccacctggcactaacctctgcagggcccctttatgtcatggtgttttggcctgtggaaggctttcgtccgtctgagctgctgactgagggtctttatttccacactcgagagaaacctggcggcccagcagtcagtgcccgcggagcaggtacagctcagggaagggagcagccccttgctcacggtcctttctggcacagtctgtggccctctggagtacccggccagcgtcctcacagctgtccccaaacgcgtggtatgggttcctccctcagggccagcaccaggctggtgctcagctcttctggaagagccgtcccatggtcccagcgcatccgtggaagagtgaaatattgaacgttacaagaaggaagtgaggccaggcgcggtatctcgtgcctgtaatcccagcacttttggagttggcgatgggcagatcacttgaggtcaggagtttgagaccagcctggatcaaaatggcaaaa

SEQ ID NO: 51101 - DNA, 1696 bp, Homo sapiens
cctgaggacatcttcccagcgcgtgtgcacttactaaatgagccacatgcccccagttctgacagctaggaacggtgcgagcagatggaggatggagctggtgctgctgcccacaggggccctgggagtgaggctgcgggtccctcgtgccctggtgcggccctggcttgaggccttggtttgggggtgttgtgccccccctaccagggctgagagcccacagtgacagcagaggggaggtgtgtgcgggggccgggcatcgatgctggacttgctgagggttgctttctggtggtgtgcacacatcttgggccagagtggtgtccccagagtgcctgctgctggaagagaaggctctgggtccttctggatgcccatcctggctgtgtggaccacggcggcaagggccacgtgcctggtcgtcaggccacggatgcttgtccggagctgcctcatgtggctcttgcacagaaggcaccattctagacattccaggtgggctccagtgaccatgaggggctggggttggcactggcgctgctcctctgaggtgttggacccacgtgggagctgcttgttcccctccagacactgattgtgaagaatctggaaggtccacgctagaggaggccacgacctgctggtgcgcctgcaagagtgctggcccaactggtctccatgcgtggtgcccgttggagggggtgggagggctcggctctgctctccccccgtgggtcttcgtgtcacagggtgcttgggggactctgctgcactgagatctccagcgtgacatgtccccgtcccaaacagccctgaaatggcaatgcctcatcctaggattaccgtcccttcccgaaggcttgaggtcctacttagatgtctactggactgctttttattttaatttacttgatactcagtctgggtgcgttgaagacgcggcctctggctgtcagcctgtccttgtgtgcagtgaccggtctacctgtctggccttgtgcctagacttgtggccgtcaccactatctctggggaggggtgaagtggactgggaggtaggagccgaattggagtcttctctttgttcctgaagttatcacagtcttggccagactgtggtcactgcgtgcgtgtgtgtgtgtgtgtgatgcgcagggcatttgctggtggaatagcacgggccattggcatttgcacctgaggcgtgcagcccccctgctgcacacctatggggtccctgcggtcaggtgagctctggggggtttctgagggtggagacagccacaacaacacttctttcctccaaatgcctgtgctgtgcacttgggtgcaggtggcttttaggggacatggctgggcactgccccacagtgtcacctctgtgtcctgtggtgcgtgctgtggactggcaccacaccccacgtgcttgttaggccagtttctctcaggtgtcggtcaccctaccatgcggcctttcttttgtcttttatctttagctaaggagtccatggcataccaaaagctgaatgatgacagccagtgtccccatcctgtcctccccaactttccacaggcagggacgctccccattcttgctgcatagtcttctgttgaccccatgtacctgagtgacccccacgtacctgagtgtgacaagcactatggtgcttgacctcagtccagctgcttagacctg

SEQ ID NO: 51102 - DNA, 1925 bp, Homo sapiens
agcacactgtcctgacctcatttcctgtctggaacacactgtgtcctgacctcatttcctgcctggagctctctgtgtcctgacctcatttcctgtctgtgccgctctgtcctgacctcattttctgtctgtgccaccctttgtcctgacctcatttcctgtctggaacatgctgtgtcctaactgcatttcctgtctggagctctctctgtcctgacctcatttcctgtctggatctctctatgtcctgacctcatttcctgtctggaacatgctgtatcctgatatcatttcctgtctgtgccactttgtccggacctcattttctgtctggagcactctgtatcctgacctcatttcctgtttgtgccaccctttgtcctgacctcatttcctgtctggaacatgctgtgtccggattgcatttcctctctggagctctctctgtcctgacctcatttcctgtctggagccagtgacctcatttcctgtctgtgtcactctgtcctgacctcatttcctgtctgtgccactctttgtcctgacctcatttcctgtatgcaacacactgtgcccggactgcatttcctgtctggagctctctctgtcctgatctcatttcctgtcaggagcactctgtgtactgacctcatttcctgtctgtgccactcttgtgtcctgacctcttttccagtctgtgccactctgtgtcctgacctcatttcttatctgtgccactctgtgtcctgacctcatttcctgtctggagcactctgtcctgacctcatttcctgtcttgtgtcctgacctcatttcctgtctggagctctctgtgtccttacctcatttcctgtctgtgctgctttctgtcttggagttgcgtgcctgacctcatttcctctccactgtgtgttcctggagttaggcatcatcttggtttttactcccttgcttggttttctcaggatctctggctgctccgtccttgctccagcgttcttctctgccccctccctctgtggtccagaggccgatggccagctggccctcacctgcccgccctgggtatttctgtgctcttcctggtgagggattctaggggttcccctcctgggttcatccttacctgagtagccacagcacactgtgcagttgggtgcctgggaggcacgtgctttgggtgttgcatggctgacctggtaactgggcacccgtgtatggagggctggaacagaacacttgtcggcgctcctcagcgtcttgcctctggtgtccccatggcgaagtcccctgccatctgctttgggctctgacatgtgacctgactgtgcccttcaggagctttcagaacctcctcttagatctggcattcaaaatgtcttgtcagacacctcgaggcggcttgtgtttggccctgtgttgggcgcctattgggcccttgtcaggtttttgttgccaggaggctcgcgccccgatcttcgggatggtgcccgtggcatcttctgctcggtgctccctagggctggacgttggtcctcctggcactggtgctccggttgctgtggtctccctgctgttcccttgtggctcaggattactctctggaggtctccgccttatcatgagcactttctttgttggctacttttagtttcatgatttcattttcgtttctaagatatctatctctttgtaaaagctcccaccttttgtgacttgtggatgctgtatctttctcctgttgctgcagacattaatgatgtttttcttgacagtttgtcctgctggtttcctctgcattcctttggttggtttcagacctcggctttaaaggggcatttccccacattgccaattcttgaccatctggtcacgtcaaggctgacgtgccaatggctgcaagggggagggcacctgggagcccg

SEQ ID NO: 51103 - DNA, 1001 bp, Homo sapiens
cagctcatcacttggccggttttctagaccagcatattcaaacccaaggtttggaatcttgggctggcttctgaaatgacatgctgtgggctccatccccagaattctgggttcccaggtccgaggtagggactgagaatgtgcatctctagcaagttcccagatgacatggtggctcctccggaacccctgcctccttttgtgggtaaagttttacaggtgcatggccacgccccaccgccctcgccggtgctgtctgtggctgttttgtgccacagcagaaaggctgagtaggtgcgagagagaccatgtggcctacaaacccaaaatatgtgtgatttggtcccttacggaaaacacttgcaggttcctgatctagagaaagaataattgtaacgcagggctacattgtttttgtgaaactctttaggatggaaaagggcatctctgaggtcagcgacagaagccgtggtggtttcatgccaccagtttacctttgtcctgagctgtggaggttgtttaaagctatagatcaaatgaagcctggaatataagggtgcagttaggatgattgctgtgtagttattttttaaaacggctttttgaggcataattaacataagctgcgtatatttaaagatacagttagataacttttgatgtatgcaaacacatataaaacatgtataaaaccctcgctgccgtccagatgatgaacctgtccgtcacccagaagctctctcctacccacacccctttctccccaggctgcagcagtctgcttttgggcctgtagattcgttgccttccttagagctttgtctaaatgaaatcctacaatatgttcttcttttggtctggcttccttccctcagcgtcattattttgggctccttggatgcgtggcgtgtgctgggcagtgttcccctgcgtggatgtcgcgtttgttcctccatttgcccgttggagcgtgtggagtgtttccagttcttgactgtcac

SEQ ID NO: 51104 - DNA, 1702 bp, Homo sapiens
gtctcgaactcctgatctcaggtgatccacctgccttggcctgccaaagtgctgggattacaggagtgagccacggcgcccggctggacatgcctttctttaagattgtctctttgtcactgctttgagccactttgctgtggtttccccgtgccgcatgtgtttggagtacgttgtgtagtttttgtcaggtttggaaggtgtgtctcctgcgtccctcctctgggcacttggtggcccgtgtgtcagtcatgtgaatgttgtcagctcagggtgctcttctcatcttctggattcttttttttcctctatttccctgtgagtagtttctgttactctgtgtccatatcacaaaccttttcttccacaatgtctcctccacggttaatcccatatagcggatgtttcatctctagaagtttgatttgggactatattatatctttcgtgtctttattttactcttttaaatatgtggaatacactgtaataacagttccagtgttctctgtgaatttctatgtctgtgtcaattctggttgtttgcgatggatggatgattttcttcattgtggtccacattttcttgctttctggattctagacgttttgaaatgtgcctgtttgggtgctgaatgtttttgtattcctataaattggctgggcatggtgactcacaccagtaatcctagcactttgggaggctgaggtgggcagattgcttgagtccaggagtttgagaccagcctgggcaacatggagaaaccctgtctctacttaaaaatacaaaaattagccaggcgtggtggtgcacacctgtagtcccagctactcaggaggctgaggtgggaggatcatttgaacccgggaggtggaggttgcagtgagcttcaatcgcgccactgcactccagcctgggtgacagagccagaccctatctcaaggaaaaaaataaaattaaaaaaaaatcttgagctttgtctagactgcgttcagttatttggaggcagcttgatccttttgagtcttgcttttgtgatttttttttaggtgggtctagagctgggctcagggctcattctaggcctgataattcaccactcctgtggcagaatcttctgagagacataggaccccatgaatttgggcaatttcctgtctgtcgggtggagacaggctctctgcctagcctggtgcaagcctcaggcctgttgtctctaaatctttgtgggtgactcttccccagcctcgtggagtttctgcacatacatactgtgatctggggtctgcggaattgccaggggcctctgcagaccccaggccctctgtgtggtgctcccttctctgctgctccgtcctgtgaattccagccgccatgctctccctgaattgtcagctccatctcaacccagtttctgctgggccctgcctgggtcctgcttcctgtaccatggctgggaactctcgggaggcagtgagctggggctgccagagggcttggctccactttgaattttggggaccaccgtcctttgctgcctgacctccagggtccctggggccattgtctcccatctcctgtcttgtctgcgtttttggcctttccagggaggagggtgatgggtctctgtgacttcaccttggctgcaggcgggccctggcatcgcagtccatgagtgacctccagcttctctcatcagcc

SEQ ID NO: 51105 - DNA, 1090 bp, Homo sapiens
tttaaaaacatcgctgaattgtgctgactggcacatccattgtgagcggatgtgttttccttctgcaataattttggctacattaaattcgttttgttaacatcttcatcaccgccttttcagtttcagcgggaattgattatgaacaaagtgccatgattttgactattcaggcgagcaactgcatcgagccagcactgaactggttttgtaacaagcttggtgtccatatcgctcttaataacatctgcaggcacaggcgacgatagcagttgtgggccagccgtcaggaaaggggggactagcacgtaccactcagaattcagcttgcgcgggctgcggtggagttctggggtttgtttgtgggcatttccaggtagtctgatcctgtgaggagcaaggaaggggtgtgttgacagggccgttcgggccggagcaggtgcgacaggaatgtcccacgtcctctcgtgtgctgtcgggagacaaacctcttcctgcttcaatatcccattcgttccagagcctcctttcagggtggaaggggtggtggatggctttgggattgggccaggcctgagggcactgagggagtggggcattaggggccacgtggtcagcactgcactctgctctcatcggaagctgggcagtggccagaggcctgggaaaggcttgttgtgggggcggggggcgcaccacacttcagggatgcagccggcctttgggcttcaggaaacgcagctgggacatcctgaggtgtgtgaggctgatgcatgggcctttctacttccagactgtcccaggacacgggtccacggtcacacggtctccaaatgagcaggaacaccttgcatgccctgcgagatgtgtttgaaagtcacactttggttccaggtcacagcttgaacctcaggccacctccagtgggaggctggaggtcctgtgtgccacccggggcctgtgtgctgtggtggtcgtggctctgtgggtgccgggcagaggcctcccaggctgggcagccgccacccctctgtggacgctactcacccttagaagcaggttcccacaggccagggcactcccaacagca

SEQ ID NO: 51106 - DNA, 1096 bp, Homo sapiens
ggggcttgggggcccctgcccgccccaggccaccttgctctctctccaggcctgcgtcctgcaaagaggccgggtcaaaaggtcactgccccgatttttattgctgtctcttacgttctcacgacctcttgccctctgcacagatgggcggggctggagcttccacgagggccggcctttccggggattaaaaacccactgaaaggtctgagcctagctaccaagcttaaatgtcttagtagcttaaaaatggtgttaaaaattaagcaaaacacacatagacttccaggtttagcataaatagaaaccagaggtgttgagaccgtgctgccccctcaaaccagcgcagtggaaagaggggcagagccctccacaggagccctccgctggggggttggggagacggccctggcccagcgtctgcagctcccagcggcactgaatggcagtggccgtccctgtggtctgggggcctccttcccccacaggctacacaagccctggtcctgccaaggctcggggaagccctttgtgactttagaaaaataataatggagggtgaactggttcctatttttgcattgtaattgattgccaagaacccctgaaattaaatacaaccatgtattttaaatggtgtccttaatgtagaatgtttttatcaaaaccaaaactccctgttgaggccttagtgttctgtcaatagcgtgttggagtctggttcccgtctcccctgccccggcctatgtgtgctgaccctgggaccggtgaggcagttctcaccacgccccgagcctccccctcccacgccccgagcctcgccctcccacgcccctcctgcccccgaggctcgctggcgtctgtgcttcttccaggcggagggggaggtggtaggcaccttgggtcttaaatcagagaaactgtcccagcagtagtaaaagtcatcagctggccccaaagagcccctggaaacacaggctgtaccccgcctccatggagacatttggtgccacctgcgttcagtgcagatgccacacggctcttcctgagatggcttccgaggccatttggcccttcatctcgggaacagaccaag

SEQ ID NO: 51107 - DNA, 1041 bp, Homo sapiens
agccaggtggtggtggggggtgttggggctaaggtttggttagggcccgagtgcttgcgcacccccccatccaatttcccatggtgctgggatgctgccgcctcctggaccctggcgttgaagtgccaccttcatctccctccccagacagtaagctccagacaagggcaggctgtggccgtcactctggccagctgctcgggggcttggtggctgctgggtggtcgcctggactctgccctcctgtctcctggtgtcccggaggggccttgctgggctgggccctccaccgccccattgggcgcctgactctcagggcgcagtcagttctttggggatggccctgatctctgagcgggactgcctctggcctttcttctgcatcccctacggaacagcagcctgctagacgccctgaggaggcaggctgaggggtggaaggggcgtggccgtgcccagcagagaccaccctctgatgacggtgggcgtcctttccagcccctctcggggcatcgcttcatcccttcccccatttccttcctggccctgctctccaagtcttgtgtgtgtggtggggcctggcttccctcccggcctctcgcctgttcccgcccatccctctctggttctctcaggcctcctctgggcttgccaggaatgtaggggaattagggggagggggacacaggaaatgcctcccctcctctgacaacagctccagctgcagggggaggggggaggggagagcagagtgggtgagacgagggagggctgaaggggggagtcggcttggggggagagtgttctcctgcccacccaggcactgggcgtggcccagccccacagacagaacagttctttcttccttattttattttttattagagacagggtctcactctgtcgcccaggctggagtgcagtcgtgtgattggcctcaagcgattctcccacctcagccttccaaagcactgggattacagcagtgagccagtgtgcccagcctcttcctaagtttacaccagtgtgggcatccagtga

SEQ ID NO: 51108 - DNA, 1026 bp, Homo sapiens
tttcccccttgtatcctttggccctaatacggggtcccgtttaccaatgagggcaaagagaccagtctaaggggaggctgaaaactcacaggcaggcctgtctggccttggggtctgggtgctgcttccaggcagaccacatcccaggtgaggtgcagacattcagagacagacgtggccgatcctggctgctgtatcaacgcgcccaccaaatggggccttctttgatcatcagtcaaaagcaagaatgtgcctgtggtgggcgggcgcgtgtgccagcttccaggccgtgggctccttggtgcccagagctcaccctgtggtgcttgcccactactcactcccgcctccccggagtcttgccctggggggtcctggtgtgggagctgccttctctagttgggtggagccttgcctgctggtgcctgtgagccctgggtgggtggatgccgggtggtcgtggaggttcacagcaggctctatgtggttgttttgtgtggatttggggtgtgaattctctcagcaaaggctgactcagaccccagtgttcagaaggttcaaggaagcgaccgtcagcgccgagtggccagcagggcggggatgcggcgttgagccccgtcattcagcttcagtgtggagaaggcccggagctgtgggcatcagctcggggacccgagtgactgtccctgcctcggggagggggggggccacacgggcaggcggggcagcagcttgtgcccatgtcctcctcacggactctggaagtgagaggcgctgaggccacagtgggggaagtggcccagctgacgacccgggctctcggtgccctgggaggagctgttgttaggacatgtgcagactgggttcagcctgtctggagtggctcaggtgcctggggacagaggccagctgtaaccgctgctgcactcggttctggattcagtgccctccgcctctgcggcgtctccctcggcagctgtccaggactccagcctccctgccagggtaggggacatggagcgtctc

SEQ ID NO: 51109 - DNA, 1611 bp, Homo sapiens
tgggtgcacgtgctgcaggggaggccacgggctttggccagatcttcccccagggccctccatccccataattggagcaccttgatggacagcctgccctgcgccccatcttccccctagggaagcagggtccctgctgcctccaggaggctggttcctgatgcagcgtcttctcctagagtcctggaggtgggaagagcccccggccctgagtgtgctctgtccaccaaggcttcctggctgagggcaagggcggagcccccaccgcccgactttgctgcctcctcttgaggttggcctcggcagagtgagtgggacctcacccctgtgaagggccccttgccctgtgtggcctgttctgcattggcctgtggtgtagacctggtgccagctgccctggagactctgtgctgtcctgtggggtctttggcagtagaggaatggcccattttacggagactgccctgtgattttgcttgggaagagaccttgggtctcagttgtgccttgcgggcagcaccgtctcaggggtttccagccgcagggctgtgggagttcacgtttgcctgaggctggatgtaccggctcaggcccccagcacacaacccacatcactcactggctcttgggggatgtgcctcagcacctgacacacaacacctggttctgagtgggctgggtccaggcaccttcgctaagcttcctccaccagcgggacctggttctgggtgggctgggtctgggcaccttcgctaagcttcctccagcaccggggctggcaaggagcgaggcaaaggtgtgtgtggtgccatcctgtaggagccaggctccttggggatggtgtccttcattttgaaaatgtttccttcccatggggagggggcagccagaatgcccactctttaatgcacctgtgccagtggcccacagggacacggtgtcccctccccgcgaccacccctgtgccgcagctgcccttcccagacgcatccgtcgtgagtggctctcgccgtgctgtggctggttgagctgagtgcccagcgctgggcaccctctgaggacacactcgggttctaggaaaggggtttggcaggagaaggacgagggactcctggccaggctgagccgctgtggaaggggagagtgggtcttggtgctccatcccaaacctgctgcagccgtgggtgaggtcacccggaatggcaggacaaggtccactctgttctctcggagatgacttgtccctcagcacagcctccacgtgcctgttgcgcgtggcctaagggcctttatgcaaagtgaacttggtctcctggggggtgccctggaatctgccttctgcgccactcagggtcgtttgtggccggagtgcatggggctctgactgccatgtgccagccacggggctggtggagggaccctgccctgggaaccacaggtgccaacaaaacctttcattgatcgcaggtctcctctgagcctccggcctccataagacccaaaacagatgacacctcttcccagtcccccgcgccttccgaaaaggacaagccgtccagctggctgcggaccttggccggctcttccaataaggtgctgtggggcctgtcg

SEQ ID NO: 51110 - DNA, 2086 bp, Homo sapiens
accacgttccgtgcgtgcccccccgacgggcacagggtgggtggttgctgggccctgcgtctcgtgagcctgtgtcctagcaggtggaggaggggccggcacgcggcactggggagggacagggagcggcgcaggagcctcgggtgggggaagcagcgtcgggccggggcagggcagcgagcaggcgccgctgaccactcggctccctttcagatcgaagacctgcaggtgaagctgcagcacgcggaggcggaccgggagcagctgcgggccgacctgctgcgggagcgcgaggcccgggagcacctggagaaggtggtgaaggagctgcaggaacagctgtggccgcgggcccgccccgaggctgcgggcagcgagggcgctgcggagctggagccgtagattccgtgcctgccgccgcagcgccgccgacaacgcgggtgcaggggggcgcggctgggcggtgcagctccgcccggctccgcccctgcagcccacacagcacaacgtcttaccgtgcctattaccaagcgagtgtttgtaaccatgtagttttggaacccactgcaaaattttctactggccaagttcaagtgagtaagccgcgtcccccaactacagctggagacggggccagctcggcggcctgctggtcctctgcttgctggaacattctaacatttacacttttgttataagctatttaaaaccagtaaggagacttgaaattcagaaaatcaacacatttttaaatgactaacttctaaaagccccaacacatgacgccatctgaagacccgcaacggagtgggggtggcggccgccccaccctccccacccggggaagccatcacagctcatctgcccgcggctgcgtgaggacagcaggggtttttcttcagagtctattttttcagcgacaaggacccaggtcttcctgctgctgccagggagagcagggacagtgccgcgtgcgagatgagctcgaacactgcccgccttactgccgcctaccccgcccgccacgccgccgtcgatgccagcgctgtccccacgggtaccaggaagtgcagagccgcacaggagctgccccggagctgaggggacggtcttcggctcctctgcaccccgtgattctgcccacgctcctccaccacgaggcactgacctgcgtcgggtggtgaccgtggctggcggtcacgccctcagcccctccgggcacacgtgccgcctgaccgggcgacccttttcagttcggcaaacgtcgctcccttcattttgggactgaggctgcagcattggaacaaaagagcattatttcaatttttctttctttttttttgttcgttcatttaaacgtatatttagaactgcactttgtccacaaccttcccttctctttctattccccagtgaactgaggtttttaccgatttatagagcagtcaaatccgaagtgctcgagtgcttagaaaccccctctggtgcttggttgaacaagggaatcacaagaaaacgaaaatgcaaaaactgaacttcgggggtcgttctgtgccttccagcatcttgtacagcaaatcctgactcgtgtctttttacccccaagatatctgtcttcagtagcgactgaatctgccactctcagaataagttccttgcatttattccaaataatctcgtttactctcacctgtttatgcaaattgtataaggtttcttatgcccaagcttgaaaaatgatttcccagtagacaagaggcggctacctatcctacagttacggtatttatttacataagaagatcttacaggagttctttgcttgaatccgttctaacacccgcggcagctgcacgcgctcacagaaggtggaggttacttgcccaggtacagacgacctcggggcagtgacgagcaaagaccagagactgctgagccctcgcatctgggtggcggaattgcctgcggggttttgcccttggtttactgaggggggtcttggttgctgctgaagccccccaccccttctaaagtgcaatgcaaaagggacatcatgtatatgcagcgtttgtttggaattttcttt

SEQ ID NO: 51111 - DNA, 1088 bp, Homo sapiens
tccccgaagcttccccagacacccaggcatccattccagacagcaaggcaggcagccactctcccacaccttctagaagcccagagccagtggcaaggctgcgtctcccagctgcggccatcctcgaggctcccagagcccagggcggcttcatcacagccatggctccagcctctggtccctgggagccccgtgagcgcctggcggttctgacactgccccttacccttggggttggctacgcccgtcggaggggaggctcctggcctgccaggcctgctccgacctgggtcaccagcctcccaggaggccaggcagacatcggccaggccgggcccacagaggagcccccgtgaaggacagataccaccgcgtcacgctgaccctgatcgctgcgtgtgagcggcgctcacctgggcctgccccttacatttggcaaattgctctgtagctgtttttcacttcaggatgaaaccacatttgtgtcagaagaaaaatagaaaatgatgtttcaatttagagaaagaaaaattgctgggaacagcagcagctgctgggtttccagtgtgttgagcggcgtcctctgggatttaattcccaatcagcagcctcggctttcaaagtcacaaaacccacgacaggaaatccagcgctgttttctccacacgggtgcggcggatgtggggatctgcacctcggggggctccttcgtggctgacaggtgcatcttgccgtccatcgaggctgacttttctgtaagctctctgcaaacacagaagcccggggccgtcagcttccttggttatcacagcaaaaccccgggcaggcatcggtgtcccctgtgcttgctgccagggccactgagggcccaagaaggtggccaggtggctacctggccatgctcctctccccatgcgccacccaccaggacaggccctggggaccctgggagggagcagagagccgtggcttcctagggctgctggcgcctctctggccagcatgcctgggagctaacgggcagccagccttggagagacgcagcgcctgggcctcgcctggactcccgccccggccccactcaccct

SEQ ID NO: 51112 - DNA, 1009 bp, Homo sapiens
tgggaagcacttctggtccattcatgctgttttctttccatgctttattggaagctatgccctctgttttcaggccctagtcaggcatccaccctcccctggcaccatcaggcacttcctgcctctggccctcctgggggggtcctgggtctggtgctccttggggttcaacagccctgggaggtgggggtgaagagcaggggctccagctttccccagtgttggcctcgagggtgctgtggtctggagaaagtaacccccaaccattgccaaaccttgggcatcaagagacggggcctttgctgaggttcacggcctggtgcaccaggtgggggctccgaggaccagctgcccagccccctcaggccacgtcatgagtgaggagcctgccggacccttctgcctgggccctgcgactgctcaggggctggtgtgccttggtggcacgggtggggctagctctggtttctgaagaccggccatttgcatcacttcatggtaacagtgaggaccaggggtcctgcatttgacctcgctggtcccatcgcaagtgcctgggcttcaaggtgtgaactgtgaggagttccagaggggacatggggcctgccctagtgtaaccctagtgcttccatgacggccccaacagccggccccctcctctgccccagggtggtggggggtccacatgaggcaagccggccagactccccacaggccatgcgtgctcaaacaccccaaattatctacatgattctcagtgttacatgcaccccaggagtcccccactggcccaggcttcctggactgtgacccctgggtccaagggcagtaggcccaaacgtggaggctataggccccgtggaggcccccggttgggcattcccacacacgcccagctgaggagaggaggctcggggactgcggcaggcaaagccgcccagaaggagccacctgctccgtgcagtgagcaggtgctcggcacccagcggcaactccgggaaagctggcg

SEQ ID NO: 51113 - DNA, 1076 bp, Homo sapiens
gttcagagcctcaccgagccgtgctgaggcctctgtgtagccaggtctggagggtctgtcatgttcctggggggccctgagccccatgcctcctagacttgctactttgctcctgcccgccctccaaggagcggagggcagatcccttctcagatgcaggaggaggcacaaagccaagtctgtctctcggtcccttctccaggacacgggtttctggtggaccgggatggacaagtgtaccagggctccttccatgacaacaagaggcacggccctgggcagatgctctttcagtgagtatgagtcttgtgggtactgcctggcgcatgacagatacacagggcaggtgtgaggccatgtggcctgggggtgtagacaggactgccatgggacaccccgggcctgttccggcccctgctgtctacccgccacccccccagtgccaagttgttgaaccacattctgtggtttcggtgttattctgtaattttccccttgtttattgaaattgaccaattgtgtgtttagataaaacatcccccccccccccgattaaaatacctcctgagaacgtcaggctggcggcaaagtggcaccacaggagcgtctccaggtctaaatgaggatgggggtgctctccggccagcagagcctcccgcctccgcctcccaagtgctaggcatcttcagcccgtgtggaaattcccacggcggagtctcagcctcactggctgtggagactgcagccccctcccgttgcctctcctgggtcatttcccattttgagtagcggaagctgagtgcgtcccgagcaggcctaccatctagggtgggggtgggcggacgtgtccccaccgcctgtcgtcggcccccagctggccctggcgaggcaggagctcttggggccatctgctcgggcctatttttgcctcggtcccgcagtgcctgcggagcccggtgggaggagccggtctgagtcactgccaccacccggctccccctgttgagagtggactccgtgcgtgtgtcccccaggaacggtgacaagtacgacggcgactgggtccgggaccggcg

SEQ ID NO: 51114 - DNA, 1856 bp, Homo sapiens
gttctggctcctgcccactgcgaacatgctgatgggccagggcaactctttagtctttgtgagcttcagttttcttatctgtaaatgagaacaataagactgaccccaactgttgctgaggaatgatgtctttgctttcatgtctggtatttcttagagcctcattttacagatgaggaaactgaggctggctgcgtgctcagagggtttgctgaaggcctcacagccgcttagcacaggtgggactttaagccaaacttgagaccagagtctgtttctcctcactgccctgccgagggagcagatggggggtggtgggggaggtgaacgtcacccctggcgtcttctctagctcaggggccaggaggcctctcatctttaaagtaggaatgacaaccggcaggccctgggtactgagctgtgctttaccgaagagcggcaggtcctgacgccgtctcctctcaggagtggggtggcggcgtgctcagctgaggagccaggtggcagtcaggcttggcttggcctgcccagaagcagggctgtggcaggaccttggacacgtggcttccactgtttgagacttggtgaaatgggggtcatgatgcccttcacttgagcatctgggaattaagtgggtgaacaatgtgacctctggcacctgggttctcaggtgaattcctcatggcatcacagcagtgttgaaataggagcagatacgttacctccgcttgccagataagaaactgggacgcagatggatggactacctgagagttgtagataacattttcctgttcatggggtggaggacctggccctgagaggacaggatccctcctgctcctgccagaccagagacccaggacagggcgtggagcagacaaggtgcctgggcgggggaaccctgagggatccacagagggtgcggtccttggagggaggacatgcagtgccacgtgccatggaccagccagtggaccccatggccagcaaggctgctcctggggccagtggggtggacagtcccgcccacgcaggtgactgaggtgccagtgtgggaatgaaaatgcggcctgtgctcctgggcccatgcgtctcacgctgcccttcctctccagggaagcctgtgtacctgctactttttcccgaacaattcatggtaaaaacacaaatggtatatggacaaaatactgaatgtggaagaaacctacttgacagtgttggtgaaaatagggccaggatttcacacccgtgaatgctttttactgaaaagtattttgtgtttttctcccagttacagaatgtctgaaggggacagtgtgggagaatccgtccatgggaaaccttcggtggtgtacagatttttcacaagacttggacaggttggtgggttttttagtagatgagtataaatatttgaaaaagaaacgggactcccagcattttcgggaaggatctgtttgctggtgttcctgatggagaagttacttcgcctcaggctcaaacttcctgaagacagcgttctcttcactgtgaagggccagctgtggagagatcgggctctggggccacacgtggtctatcaaacatatgcgttttctgtttctgttttccttttaccaagctttaaaaatataaaacccagtctcagctcccaggcaggacagatgcggccgtggctgccgttctgctcttgctgtccctctcccagccacccacgtccccggtgctggtagccccacctgccccgtgtcagctcggcggttctgtccttgagggtgagaggctcttgtgtgggctgcgtgtgcattgcttggtgagtgagggacctagagctgcctttgaacgctggagtc

SEQ ID NO: 51115 - DNA, 1023 bp, Homo sapiens
cacccggagtcgcctcgccaggcttctcagtatacccaggccgtcctgagcccagcctggccctgccctgggcacgtccaggcctggacagtggagccgctggtgtccctccgaccctgctgcatgatgctcaggacaaggttgcgctctgtggctgcctcattccttgggtgaagagtccatgccttgggtgtcatgaatgactcggcgtccaaagggtttatgtagcttttcctgagctctcccttgtgtgaggccaaagcacagtgcaggttgagacgccgagtcaagtaagagagacagtgaccgaagggggtcttgagggtttccttcgtgtgttttcgggcacccctaggtcaggtgatgtcgtctcagacttcacctgggtgctcctttacttgctggtaaacacggggtttctaggagcaaacctgtaagatgggaattcttcgtcggtctttagaggaggttacataatcttatgtgcagagcagggcatgttgaaagccttgtctgggctattttctcctctggggactgtagaagatacttccttgtttaaagcacacaccttaatttatttatttatttttgtttttaaattggaactgggtccattctctgatggaaagaatgacctagaaatcttgaatcagggacttcaggcaggagcagggggcgggaagagtgcagcacccacaggtcagttttattgcgttcgaaaccaagctcgtgcctcatttggcgtctcttcaggtgtggccctgcagccgaggatggacacacagacatcagttagccctcacatccggcgttcagccgaggatggacacacagacatcagttagccctcacatccggcgttcagccagggatggacacacagacatcagttagccctcacatctggcgttcagccgtctgactggaaaagcttttaggcagaaagacttcttgtttgtataagaaagttaaagcatttatatttttatttattgttttgagatggggtctcactctgtc

SEQ ID NO: 51116 - DNA, 1930 bp, Homo sapiens
tctgtggttagggcagtacatgtctgtgagctacatgcaaagggtcctgctgctgctgtgcccagggtagacccctcctttccacagggatgcttctgtttgcggggacggtcggtgcagctgcaaggctggaggcggccggcaggtgcccggtgctggctgcagatgcggcgctaaccttctctccccacttgaaggcatgcggctaccaagggcatccttgtggctatggtctgtactttcttcgacgctttcaacgtcccggtgttctggccgattctggtgatgtacttcatcatgctcttctgtatcacgatgaagaggcaaatcaaggtaaagcagaggcgctgccgccacgccggccgcaatcgctgttctgttacccgcagcattgggggagctgtgctgggctgtggtgggtggtggcagagtctgcctggtgtgaatgtggagctaagtggcaccgtcttgtgtgtgacgaggacactgctccgttcccagcacggccggctaactaaacggggagcgcagctgtgggagcgggcgggctcttggtggaaactttgtggaagccgggtgggagagccccggcgagtgcagtgtcccggtggctcctcttagggtgcccagtgccccgcgccagcctgcccgaggaggagggtgttagggggaagttagccgagactgcggactgtgcccttgacggtgtggccttcgtgctgcgggcctcactctgtgcccggggtgttggctgcagagagggccctgggccacctcacatcccccttgcccttcctccacgggaggctcacgaagcactgggattgatggggtttcaaacctaggcctcgtgggctgtggaaggtcttgctgtgttgatgtgggcgcaggaagccactggggctccgattccacttgtctgatgtatagaaaagatgggggacctttggccgctcagatttggggacagtgtgactgactggagagcggttgtgcagtaactgagtctgtgtttctctccccagcacatgattaagtaccggtacatcccgttcacacatgggaagagaaggtacagaggcaaggaggatgccggcaaggccttcgccagctagaagcgggactgaggctgcctcacgtgttgcaagaacagttttgagccattgttaacaatgccttttttcttcacataaagtagttgattacgagggagtcaaattttctttttaaaaaggagcttcaatgatttgtaactgaaatatcaggttctagaagaaactggcgcttaaaccaaatcgcatggatttctttttcagtgacgttcaagtgtttctcacggatggaattctagtcagctgcaggcgggaagccaggcgggtggagcccatgggagcaagggcgagtggccggtccccgctgtgccaggtgggcaggcaggagcaaggcctgcgagggaggaacgggccgctccccgccagccgccttccccagcagccgcaggtggtgccagccactccacagagcccgagggatgatctagcctgattcctgcgtgtccgaaagaacttaacgttttaaaggtgattgtcaagtaactgtgtggggttctaatgccagtttcctaattccatctcactggagatgtttaaagttggcctctatcctaatgactcaaaacttggttcttaactaccatgattgcttttgagggcccggaattataaatatatattatattttaattgtttgagattattttgacacatttctttgatacgtagagtgttttgtttttaatttaaatctgtcctcatgcaaccctccatgaggggcagcgaagctggcagggagcagactggctttgtaggttcagcactcggccccccactgcgggagaggcggaacccacttgcatgtcagcgtttttgat

SEQ ID NO: 51117 - DNA, 1055 bp, Homo sapiens
cccatacccccaggacctggctcgtgagtgcgtctgggtcaggaagagacctctctgtgcgtctcaggctgagatgcagatttctgttttctaaaactggaagcgaccttgacgtgtattgaaggtgtgtgtgccaaatgcttccgacggaggtgctggccttggttggtttctctctgccccgtgtggtcatcaagtcctgggggatgtgctctgcccagccgccctcggggagagcagcgccgcctcccatggggccgtggggctgctgttctcactgcactggctgaagcaacccgccagcctccgtgccccaccccacccagcacgcactcattcagtccattgccttaacacaagcctgatggggctgttttctcacaatataaacgaataaagtgtcttctggcctacttctgaattacttctcaactgtatggtttggggaagggagggaaacctaaaatcccgtccaaataagtgaaattcctgaagaagtggctgagtcctaccaggttggggttagggaaatgttctgggttcaggcgcccctcccagggctgagaaagcgcagccagggacagctttctgttctctcccagggtggctaggttagtatcttacatgacaaaaaactgagagtgttctaacttctgtgcaagcaaggttaatcctgagactaaatcttggcgttcagactcccgtagaggtcatctgtgtccaggcccacccgggcgccggctcagcggtagtgccgaaggtagatgagcttctggggagggaacttctcccggcagaggggacactccgcctgcggagaggagaaagggggtcacagcagctggggccactgggccatgcccatccccatcggcatttcttttcctgtccacattctctgcacatgacacacaacataaatgttgtatttccttcaactaatgaccaagaaagccagccttttttcagaaggccgagtcccagtgggggctggggcggggctgggggcgtagggctcagggtgtggggctcggccgggaggttccctcctgctc

SEQ ID NO: 51118 - DNA, 2701 bp, Homo sapiens
ccagctcctgggaaagcgtgcgctctcaccctgccggcatcttcggtgggtgtgagtcagtgtgctagggttttcaagtgtggtgaggaccccgggaggaagggtgtgctgggatgcgtggtgcaagcgtggggcctttcagggctggccactaccccaacctgcattcggcaaagcctcaatacacgtgaatttggaactttaaccccctcaacgaacccacatctgacctacctgggagcctttaaaaagatgcccacctctgtaccctcaaaactggagggtgctcagagccagactccccacttctgctgcagccaggtgcatcttgccggcacagccgctgaccaccccaggacggcagcaggctcccacctcaccttgctgctgcaccacgcggtgatgcactcccagcagaacaggtggccgcagggcgtggctgttgggtgcctgcgctcctccaggcacagggtgcacagggggtttctggaaacggctctctcctccaaggaggccctggggaaggtggggcagagcgtcaaggtgggtgcaccttacaggtccttgtgaagtgcccaggacacccccagcccccatgtgtggcccccgcacgcacctgcggtgagacaggccgcggtgcagcctccactccttcctggctcgctgccgctgcctgaaaccgtacagctgcagccccatggacagcaccaggtgcagcagtgagatgacccccagcagcctgtagctaacacgggccctcaggtcctctccgggcaggctgcggacacggagctgtaaggcagatggcgccacactcatcaggaccctgaggggatctggcctcagcgcctgctgggagggtcacacgttcagttggcacagagcacgttagaaccaggcctctcactggcatggggagtgcccggcagaaacgatcaagccagggggcaggttcagggagtctgaggtgcctgcttcgtagcctagcatgacggagaggcctgagctccagaccagccttggcattaccagtgcagaaagagtcttagctatgaggctggcagagcaggtgaggatgtggggatgtccagggaccacctctcagaaaaggaggcggggagcggaaatgtggggctgcagacgctgcccaccagctaccctgctacagggaccgaagccccagtgtaacaaggcacgtggccccagggacactgctgccaccctcctgctggtgacacaggtagcttctgaccgtgccactgaaggacagctggctgccctcggcttcccgtgtcactttccactggctgggaaatggagacagccagacagcctcggcccagggccgggaaccacatacagaggtggcaggtcacaccgccagcatgggccctgggtgtccagccacttcctggctgtcctaggagagagggagcctcccatctggtttgagccccacttccatgcccctgtcacagcagctcatcaaatccctcaccaacatggacggggcaagaaaccacatcaaatacgcaagtgaggctgggtacgctgaggacgaagacctgaccattggctctgcgacgaggtcacggtggcctcctgtttagggtgtgtgtggaggcggggttgcctggcaagtaggggctgaggggaccagtgcagctctagggacaaaaggaagggggttcctcagagggctgttctggaaggagctcatgcagtagtggctctggtgggccagggactaacgctgtggcaggtggacatggtggtgggaccacgggggaggcttcgttgctgaatctggaagcaggggcatcagctgggggtcaggataggcagaggtgccaacggctgtggaggggagaaggtgggaacggccgtctgatggggcagactgctgggccaggcaggggcgaggggtgaggggctggggccggggctgcagtccatgctcccacactgtctgggagaagctgtttgttccccacagcagtgacataggcagtcacgggcccaggttcagggatctgtggtgaggcgtgacccggggccccccggtcagtaaagagctaagcgcagggcccggtgtccatgaggggctgcagcaggagttcattctacacttagggtctggacttccttggatctttcagccaagtgtaattaaacaaaatctgctttttttccaagcagaggatttgggttcctgccttgacacagatgctggatgtagaaccctgttggctgagaggcctggagggccagctctgtgcatgcacccaagtccagtgggggtgacaaggacggcctaagcagctgtgccctcagcgcctgctacttacgtacgtgatccccgtgagcctcttggccaggtggtagaagacaccgtggatgtaaaaccaggcaacatgtagccgctggaggcaggcgaggccctgtctgaggacgaagaccgcccgcagcagcgccctcctctgctgctcagtcagggtggccgtgtggtgacgcatccagcgccgcgcccctgagcagccacgcccacctggccccaggctcccctgcaagggtcgcccactgtcggggtcagcctgcagctcctgctccagggggagcagggccttgtccagcaggtagggcaggacggcatgcagtgtcaccagcacgccacggcgcagcgaggagggcacatgtatcc

SEQ ID NO: 51119 - DNA, 1166 bp, Homo sapiens
gggtcctgtggctctcctcccctgccctttggttcttcccacctgactcttcagacacagctacccagccccactgcgctggcctatttacctatgaggggcagtgaagctgggctgcaatgcagcgcctgccagcaggggtcactgggcacacactgtgctccctcccccgagttatgcacctgcctggacagacctcacccaccaactccctctggccttcttgctctctctaggtgtgtgatgcgctgctggcccaggctacaccccgacaagggacaccgggggccccgggagcagagagacctcagagcagcctcctcctgcctcctgtggacggccggccccagctggtgatcccagccagtcccagctttcagttgctgcccccaccgacagtcctcagtccctccatgatggctcccccgacagccggcccccttcctggcccagctcttccgcctgaggacccagggccggatccggagagcaggtggcttttcttgagcgccaacattctgcccgtgggtgagtgaggccctggctacccacaccaagccagagaacattgttcttctcctgctgagtgcgtctctgtttcctggagcccagggacaatacggttcagggttcagttcagtgaccctgatgtcccgtgatgtcacctggggagaactggggctctgctagcaccccagggcaggtggggccgccacgtgcagaggagcctggcgtgcaattcaagagctctcagtgtgtgtcccttcgtgtgggcagagagggggtgggttcattcttgggggatggctctctgcccacctgctgcactgggggggtctgggagaggtgcccctgcagctcacgatgcttccttcttggtcgtgttgtcactgtcagaagggcgaaggcctcccgatgtggcggacagctctggggtctagtgtggagactttggggtgtggagctggtcccctgagctcctgagcttctgctgggatgccctggagtggcaggcctgtggctggctgccctgcgtgtgcgtgtgcgtgtgtgtgtgtgtgcacaccgctatctgccgcttctgctccccctgggggcccctgctgctctctgggcggccgctcccaggcaagaaccatggcagtggtgagcgtgtgtgcgtgtgt

SEQ ID NO: 51120 - DNA, 1049 bp, Homo sapiens
ttttccagccttccccaggggagaggcggagatgctgagccaccgctggccccttgttgatgacagccgcgaggcccatgctgcctgctgtgttaggacaagatcgatctccgccataaaaacaaaattaagccaacaccgccctggcttctgacagcgcgcgctcttcctctaatcagctgccacccgcccggttccagccttgggaagaaaggaaggggctgcaggagcaaacctctcacagtggggaaactgaggcactgagacagggaggacaacccaaggtcggggggcaggcccaggacccctgcttcccagcagccaccagggccaggcagtcagggtgggccggtgcagcccaggtgcgggggctgagcccaggggatcacgggcgcattcctctgcgtgtcaccgtggggcccgcagagccctcccatgcactctccccaactggggtgcagccccgtctgcccgtctgtccacccatccgcccatctgggtgcatctgtgtgggaggcttctccaggcccagggctgaagccggccagacccttgagagctggaccctggacaccagtgtggacactggctcccgtcacctcctcagagcaggcctggtggccttagctgcctctgtcctgcccgtccctccctgtccacctgtgtccagccagcgcctgctacgtgttggatcatggcctcacagggacagagcagggaggaggacttcgaggtccctgccccagggatgtcccggggtcaggcagtgctctgaggactggggagccccactgtgctgtgcagggacctgggggagcagcaggtgagccagggccctcctctccccgacggagcctatatctgcccgaccaggactgccggcccttcccagtctggcctctggtgtgggcccacagccaggtgcattgctacaatcccacctgagctcccacatcaggtgtcctggctcaggctcacgggaggggccgaggcggcctgggggtgggtgtggaccatggctgagggctgggcccctgtgtggaaccaca

SEQ ID NO: 51121 - DNA, 1037 bp, Homo sapiens
aggcttccctggccccgtggctccgagtccaccttgagaaacagcctgtgctctctcagacctttgcttggtggccccctgagccttctgcggatcgcagcatgttaagaacgctgtatctgttctgcctgggagtgatttggggtcttcacgttgagcagctgcctctgtcccacctgggagggatttggggtcttagcagctgcctctgtcctgcctgggagtgatttggggtcttcacgttgagcagctgcccctgtcccacctgggagggatttgggatctttacattgagcagctgcctctgtcccgcctgggagggatttggggtcttcacattgagcactgtggctgaaggtttttgttctgttgtcttaattttcttttctcctcctccatgcagtgtccttgaatccgacccctactttgggtttgaagaagcaaagaggaagttacaaggtacggatggccaagtaacttggggccttgccttgtgctggggccatgcctggacgttctctgcaacagcgaatgcagttgcggtcggggtccaggcacctcccctgctcaaggctctgtcagctgggcttcgggggcggggagaacttgcttcctggagagacgaacacctgaagacgcgtctccctgacccctgacctggagcaccgggctaatcatgtgtccctctctctgtctcagaaagaccctggctcgtggattcctacagcgagtggcttcagagattaaaggtatgtggaggggcctcccacctctgctgctggggacacagcggggcccgggggggtggtcactggagggaggtgggcatgggctgcctcgggtggccctcccctcctgttagagtctcaccatcctgcgagccaagggtctcagcatcccctgccccacacttgccctcctgtcgtgactgcttcttaggtcacctgctctaggcacaaagccttgccagaagagacaggcactggcccctgcaggccaatccgtccctggcgcctctggggtcctgaagccccagt

SEQ ID NO: 51122 - DNA, 1001 bp, Homo sapiens
ggcttcatgaatgaatgagtggatggtttagccatagtttgttaagccctcgctgtgtgcaggagccagggctgggcacatggatggggcccagtgggcgggaggggggtggcgaggctgtgagctcagagcctctgtgggaggggcatcagcgcccccaggcttggccatgagagtcctcccactggcggttggggtgggggcggggttcaccccagcgcagcacatggggcggggggcgggggagcctgtgtggctgagggcccactgagggcacacctgccctggctctgttgcaggtggagacggaggacaggttcgagtgggtcggcggcagctccattggaggcggcaccttctgggggcttggcgctctgctcaccaaaacgaaggtatgcggcagctgccagagaccttccaggggtctgcggagatgtctgcttccttcccccgaaggcctgcagctgggcggtgcaaaagctgcttccgggcctccctcctgactcgcgtcagtgggtctctggcctctgcggcttcactctttgcgccctgagggttgggtgtcccagcaacccagagcttctatcctggctgggtggcccgagggtcccgcttgccgcctcctgcctttggtcccacgcgatgagggcccatttaccccctgcccgcgcgtgcctcctgccatgggcttggtttctggggtcgtggggattccagcagctcctggcgcctcacccgccccctcgccgtgtcctgcagaagtttgacgagctcctgcacctggcctcgaggggccagcacagcaatgtggacatgctggtgcgggacgtctacggcggcgcccaccagactctcgggctgagcgggaacctcatcgccagcagcttcgggaagtcggccaccgccgaccaaggtgctcaccccggcctctgccgccagagagcaggatggtggggacacttggggtctcacggacaggagcttcccccaccattgctttc

SEQ ID NO: 51123 - DNA, 1045 bp, Homo sapiens
tggtgccaggtatgagaacgtgtgagtagcatctttagggaccgctgataggacttgggactgactggttattgggctgcaggtgctgagcttgcagccctagcctaggggattgtctaccgcaggcctcaccagaggctccccagccatgcttcccagccttctgagaccttgaggcccggtagagcgtgtgctctgcaaggttctgctgcccttacactgggggattctgttactggaagcaagtcgggattaaatgtttctgaaatgcaattgcagttgacctgcataagtcacttggggaatggccaggagaacagggctcaccgtggatgttctgtgtggccccgagaggccagtgaagccgcagagctggggctgtccaggaagggctgtcgcagccctagagggccctggagtaccagcctgttctccaggctgagcccagggggtttcttggtagaaggatactctaagaggtctgtttagtgctggtatttatttcccctcttcaaagtttctccctgcgtctgggtcctgtgtctctggttcttaagaggacctgttgactgatactgagagaccttttgtttgttactcctgaccgagctgctgggaggccacgctcagggtggggtgtcttcaacccaggaaccctcaaagccaaagtgcttgtcaacagtgttgtttaaaagcaggcttctcccatttcctcttcccttgcctgtgtctggatctaggaaagctcacctgccctgtgttctggcaagctgttttcctctcgatgggacgctgatgtctgctgagcagattcacctctttgaaagcagcagggacgttgtatttctcaaaacatactgcagcttcgatctgattttaggtttctgcgggctgtggggagggttcctcagaggcaggtgagacaggaaggggccacggggcggtggtgtctgcttggctgtcctgccctccattggtgcccaaagaggaaacacaggaccagagagaatggcagaggggatggggcctgtgggacagggagaac

SEQ ID NO: 51124 - DNA, 1069 bp, Homo sapiens
caagcttacagcaggcactcgctgaagggcagggctctctgacagtctgcagacccacgtgcccccttagaagcaggtgggcggcctctgcggcctccctcagcagggctcagagcacttgagttaagcctgtggacagcgcggtaaaagaacatcagtccagatgttctgtgctgatgcgcgatctctggaggataaccgcccgcccgcccgcagccccgggcctctcggacccctgcccagcactggccctagctcgccctgtagcggccgagacctcagaggccgggggtgggggagggaaggggcggggccggcgcctcattaacataatctatgcgagggggcgtttggcagtcaaatatatgcgcatatatctccatggctgatgagctggccgggcactttcaaaatggcggagtgtggagcgagcggcagcgggagcagcggggacagtctggacaagagcatcacgctgccccccgacgagatcttccgcaacctggagaacgccaagcgcttcgccatcgacataggtagccgcaggccgggcgccgggcgcgggctgcgggggcgggcggggcgccggcggtgggccggcgagcgggggcggcgggaaggacgaagggcgggggcgcgggcctcgcgcacagcctcacgggccttgtagtccgcgggcccgcgcacagcctcacgggccttgtagtccgcagggtcgctgatgcgcgggctcggggcgacggccggactacagctaccggcaggcgccgcagggaccagagcggggcctgccgggcctggtagttcgcgcggccgtcctgggtggctgggggccggggtccagcgttacccgccgcgaggtgggagggtcggcggaattttatgtcttcggccacatcggcatctgggcgccccggctccgccgcttggctggtggctggcctgagatttggggtccttagttctggtcgagacgaggacgagctcggcgggaagcccttggcagagtggccccgaaaaggccgcgcgttcccgcggcgtggccagctgtggcccgcgggccggacag

SEQ ID NO: 51125 - DNA, 1027 bp, Homo sapiens
aaccccggcccttctgtctgctggagcggccttgatatgcccacgggtcagcgtccctcatctctccctgcctccccgccccgcagctggtggctgggtggtgccctgcacagacctgggcccagcagcagagtctggacgagctctgccccgccggctccacctgttgcctctgggactcagcccctcttctgaggggaggggggacactcagccccgttttacccctccctgccctgcgggggtgggctgagcacggagggtgggcagaggaacagagggtcggaaggaggagggcgattctttgtggtgagtgggttgggggctggttctgcgcctggggcacacacatgtggcttccgctttccagagctctacctggatgagagcaagcagctttacaaggagctaggcttcaagcggtgagtgggggcgggaacccttgggtagcgtggggtggggggcccaggggttcccaccgctccctgccacctcctctccctgctgccctctgtggtgctgtccactcgggccttcctgggcaaggcggctctggtggcactgttgaccagcccttctgccaggccttctcttgggtgctgggtgactgtaatgagccacctcgtccggggcttactctcggtgtccagaccacctcgtggggtggagcctcgtggcccatcaggggccatcctagctttctggtgtctgtgccacaggctgcttcctttgcttggcagttgccagctgagccagatccctgggcacacccagcctggggccccatccatgctccctgcaccctctgtggaccctcggctagcagccactgggctcggtgtccaacctgccggtgggctgggctggctactgatctggtcgcctgtgccatctctgagccctggtgaggcgggtgggtggggtggggcctgacctaggaactggtctcatggacactggagcaggctctggacccaggcttctccggagtttggccaagcgacctggtgtcttcgcaggtacaaca

SEQ ID NO: 51126 - DNA, 1074 bp, Homo sapiens
gcctatcttggacagagtcccccatcaccctctgctttctggggcccaagtcgcctcctcctcagggaccccaggaaggaaccagatcttgggataggcctgggcccttgctctggtgtggccagggtaggccctggtccatcaaggcagagagagcccagagggagggtccccggagaggcggctcccagagaccggcttgtctatcacagctggatcatcggggcggcggtggtcaatgcgttctactccccaaaccgaaaccagattggtaagttcctccccctccctgcctgcccaggccctttggtgccagagttgaaggggtggcttgcagccccctgcccatcccttcctcctgggggcaccccagcctgttcttggaacattctcctatgtcaccccttgctgcccccgtggggaacactcactcccgtgcccatgagcggcttcgggagggacttggcaggcggcccagagcctttcctgcaggcagaacaggatggtgggaggaggccggactgaggtcctgggtctgccaggcacgagcccgcccagcctctgaacctccgtgtcttcatctgtaaattgagggaatcctgacctctgcctcccggtctgtgggatcaagtgtcagaacccctggcagcgccatccctgagcctggcacacaggagatgtgtccactcacagcttattctttgtcccgcccttggggacagtattccctgccgggatcctccagccccccttcttcagcaaggagcagccacaggccttgaactttggaggcattgggatggtgatcgggcacgagatcacgcacggctttgacgacaatggtgagcggccgcccctccaatcacacacgccctcccctctccgcggagaagcagccaggaaggggcctgggggcgctccattcaaccccttcacggtttcagtggggacaccgaggccaggtcctcagggagctgtgggggcagagcaggctttgaatgccaggctggggccctgtctgggggcactgactcccagcatggaggaggggacccagggactccagcccatgac

SEQ ID NO: 51127 - DNA, 1044 bp, Homo sapiens
ctcataaatcaagttgaaaagcattttctcatctctggaaagttttaataagattggcagttttccttaaatgtcagatagaatccactggtgaagccaaatgggtctggaaatttctttattggaaagtttcaaattaaatattccatttatttaacctagaagactattcatattttctatttctttttttgtcatttttgctaagttgtgtttttctaggaacttgcctgttatacttaggctttcgcatatatctgcatgatcgcttgggtttttacagctgtaggctctgtaataatgtcacccaccctttcctgattctgattacctgcacttctctcttattccttgaacattcttcaacaggggctgggtttcttagattcccaggaactgtttctccctctctctctctccctctttctccccacttcctctatctgcagggatttaactggactctgttcatacaaactgtgctatcctctgtcaaaatcaagctgctgccagatgaggaagtggtggtctatggcatcccctacctgcagaaccttgaaaacatcatcgacacctactcagccaggtgaggcccagggagggtctccaaaggcctcagcatctttgcccctgctctcccatcctccccaacacagcttctgctcccaggaggggaccctatgaagcatctgccctgaggggtgtgggacatgaggggttaagctttagtggccagtggagtcttacattaaaaatgtgtcacatcccaagcacccggggcagatgggctggatcttggaggtggttgtcctggaggttttctccagcacccataactctctggggtggaacgtgctggccaagggccctaagccatatctcctcccttgcaaagacctctcacctgttctcccctcaccctctaccttctgcccccaggaccatacagaactacctggtctggcgcctggtgctggaccgcattggtagcctaagccagagattcaaggacacacgagtgaactaccgcaaggtgagcccctt

SEQ ID NO: 51128 - DNA, 1012 bp, Homo sapiens
gaacaggcatgaggcatgaatgccccagagggccagacacaatccagggggcctcctggtggaggtgggctatgaactagactttgaaggatgaccaagcccagaggaagggccgtgtggccaaaggtggagcagtggggctgagagaaccacgccagagcaggagggactggagtgtctcaaaagcgccatgtctggccatgtgttcagaccaggcagctatgggccaagcctggccagagcattggcctgcactggggaagccctgcccagcgcgaggaaggcagctccctgaggagcaaacttcctcaggatcccactccagacactcaggccgggaagcacctgggtagggaagcccaaattagccctggcacccaccaccccggcacccaccaccctggcacccacagccccggcaggcccaagttagccctggcaccccaagcccagcaccccaaccccagcactgagagccccagcacccacctgtgcaaacccttataggcagccacacagtttaagccctgagcagccctgcagactaggtaccccgtccagtggctcgggcacaggtcacgcgtctgagacgctcccactcggcactctgtgtgcccgagagcctgctggtcaaggtgggtggacacgcattaggggcttccccatgtcctacgcccaccccacccccacagaaaactccctgggggccatggtggctgaggccacccagctctgcccggcgtcctttggcccaggtgcgggaagcctacctgcagttcatggtgtcagtggccacgttgctgcgggaggatgcaaacctgcccagggacagctgcctggtgcaggaggacatggtgcaggtgctggagctggagacacagctggccaaggtaagggggccggggcgggtggggagcgggcagcgagtgggctgggagccccaggcggtgtggctggccaaggtgagggggtgctgggtgggccggtagcaggcagggactgggccaggagc

SEQ ID NO: 51129 - DNA, 1153 bp, Homo sapiens
gactgcaaaagccctgcttgtcggggccccaccgtgctgagccgagacacaggacacacacaggccccagggctcccctgcctaccccgcgccccctcccagcccacccaccgctgcctgagtcctcgccgaggcttggcctgatcccagagcctcctctcctctcccaggctcctcgcctgctggccggctcccaggccccaggggctgcctcccatcatcctctttgtcccccggggctcatgtgcttttctcagcccccaggtctcctttcacgcccgtgtccagtctcagcctccgcctcctgcgctgcagagctgccaagatgctgacctgtgacgggagggtgcaggtgtaaaggcccagaggctgggaggccgcctctcgcggagcactgcaggggctgtggggacctgtgacgccggccaacggcgcccccacagttctgtgtcgtggcacgtgagccacagggaggctgggagagtgaccactgcgtcccttctcaggtgtgatagagaagcgaggctctcagcccctgctggacatcttggaggtggtgggaggctggccggtggcgatggacaggtggaacgagaccgtaggtaaggccgggcctggcagcagcctcacagacagacaaaggaggaccaggaccagggctccttcggtctgaggccttccaggaggggaccccacccccacccccagctggctgctctcaggagccccaagaggcccaacccagccggggcaacctcagggtcctgggaggtggtttaggttccatgctggggagttggtgccccgtggccagtcccatccagccctgcagaggggtgcccctcctcggcccctaggagcgctcgacactcaggccccagccaggctccggccaggccctggccccagggctccccactctgagcatgtgctccattcccccgggggcaggagtggcacctcacgtggctggcagccctgacaaccccatgctgctcccaaccccctccggtcacctgggggcccgcctgtggctcctgggctgttagggaaagtgtctcccacatcccccagcccctaaggcgcacaggtgagctccccaccctatggccccctagttcctggctccggaggccagattcaccgacaaggg

SEQ ID NO: 51130 - DNA, 1099 bp, Homo sapiens
gattcaagagaatatcaaagcccagagaagggaacctagcatttatgatgacttttcaccaggggcttctaccaatttcggaagatggggctgggagactcatcatctcaatgcctgacattggattaaagtgatcttggattgctagtgtttctatctagtaacatttagtaactatttagtagaaattatttagtaacaagtttctaactagttttctcccagaaacaaacataaattctctagaggaagaaaacttcactcttaggcttatatttcctttttgtagttttaaaagaaaagtaactggtactcaaccaaaaataactaggtatacaaggagataagacagtgtaaatgaaaaccaggaaaaaataggaaatataaacaggcctacaggaaccccaaatattggacttatcagacatagaaatgaaaacatctgtgcttattcaaggaaataatgcaaatgagttagaatttcaacagaaaactggaaactataaaaagaggaaccaaattaaaaaatcaagaactgaaaaatttaataatcagaattaggaacttagtggatagggtgaacaaaacaaataagacacagatggagagatatgcacagaaagggacccacaggaagctgtgaggatgaggcagggactggccaagaatcaccacgatgggcggcttgaagcagcaacttgagttgctatgatttttctaaaactgcataacacatctaaccacagatctaagaagttctacaaaccccaaacaggtctatgaaagttagggctgtgaatatgaggtggcctacagaaagatggagggagtaatcatcagggtgaggaccatctcctacccaagttcactgggcaaatgctgtctttctcatatctatacccatctctgtctttcctatctctacctttcctgggccttcatagaaaactgctcaaaaccagagaacaagagaaattctaaaaacaaccaaaaagtgtaagacccattactttcaaaaaagcttcaactagacagaaagctaggtaatagacacaactgaagcccaaagacaatgaaatgatgacttaaatttttgaaa

SEQ ID NO: 51131 - DNA, 1079 bp, Homo sapiens
ttccatgggcagcagggcagcaagggagaccacctccttgctgccctgactaaacaccagctttgcaaaagcaagaccctgccatccctagctcccctcacagacccagaggcagaggccttcagggccagcagtcaggatgggcagatgaagccacagtgtgccaaggcagcggcaaagcccccgtgagcaccaacccaagccttgcacccctgacatgtggaggcttctgaaattcccttgacgcctcaaatcgaacaccgccagcctccagcctcagaggtggcacctggctttcacttcccaaatgaactgaagctccaccatgttagatgaccttggaccaaaccacgggaacttgatgggcaggaggctggcccgggggccctggtgtgaccaggaaggtgggaggcccccgcggccaggccctctgcagtcaggtcctgtgcagtcaggccctgtgtggtcttccttgaggggaagttttctgttccttgggttctgcaggagcaggcaggaggccctgtgggtccaggagggcgcctcggggtctgcctggccaatgtcagaggggtaacggcccatctgcaactggactcagctgtggccacaggatggggacaggagagtggccacacgtaggaaacccagggtgagggacctcagcctgcagggtctggggaccattcccaaggagcccctgagctgggctgaatggtgttcagagatggggttccggggaaacctccctcaccccagtcagagctgaggctgggggtgcagctccgagggtcactcctggactcccttgctggcatccatgcctcggctgggtcaggacagagccggggttgggggccaatgcccagcaaccccctcccccaggatctggagctggacctggggggctggaggcaccctgttgccgcagcaaggagaggtggggtgcgcttcatctcagctgccccagggctgagctcagctttgcccgctttgtgcggagtccaccgagggggcctgggggacaggcgagattggaaagcgatggggccggcgcctgggtgctgcgtgggagcaag

SEQ ID NO: 51132 - DNA, 1001 bp, Homo sapiens
ggcccatccttggtgcctgctttcctgctgtgccctctctcccctctaccaagcccagaccagaagacaggctctgaggacggctcccaggagaacaaactaacaggggtcatttctaaagggcccctagtcagggaggtgcccaggaatcaccagaccagaggagtgaaccagtcagcctggggccggggccagccaggccagagccagctccagctccagcggtgctcagatctgctcctcttttcttctgagtgggaacaggggttgcccccacctggcctccctgtttggtgcatggtgacccctcccctgccacctgagggatctgcagccctcctcacccctgtagctccgtgtcctcaggcaatagctctggagtggtgagctctgggccaggcagggtctgggccaggcaggtgaggaacgtgggcctggggagctaaagcaggccccggagccctgggctgggtgtgcacatgtgtgtgcttgtgtgtgtctacacatgtgtctgaaccagtgttgaagccacatggtttgcactgtgctggcaaagtggtccatgtgcggctagacaggacgggcgggcggttccccaggaagagaagctccccacagcgcggtccccaggctggaccagagcggggctcccctggaagcaatccatcatgtgctgcaggagaaacggggcaaggacaattgccgggtgtcttttggaggctggtcctcaacgctggcaacagtttctctcgctatgagttggtcccagagagccccgattcacccttccggaaaaggcagtcctgtttggatcaaaaaataattagctgagctttaagtgggggtttcaagtacacatttaatttacactgattaacagtcatatgctaagtaaacaccagctgaatattaaacccgcaccattgagaagcgtggaacgcaaagtaatatagaaaacgcagtaaatacacagtttctataaccagtaattatattaataa

SEQ ID NO: 51133 - DNA, 1009 bp, Homo sapiens
ctcaggcacagggactcacctgggctcagggacagggactcacctgggctcagggacagggactcaccttttttttctcccagtgaccacaccattccgttgtggacccaacaaggtgcatggtgagcaagtgcttgggaaggggctccctggggcatgtcgggggcctgggatggcgggcgagcccctcctagcccctggtctttcctgttcctgggtctgagtggcgcatgggaacctcaccttgctttccgtttggctgaaattcattaactgccaggaaatcatggatttccaagcctggctttttccatagccttttgcttagcagagaaaatcaaatggatgcaagcaaataatgagaaacagctcccgaagagctttgctcaaacacggggctgtctggtggtgggcgttctgcggaggcaactccgatgcccacgaggggtccctgccaggtgccacaggccaggcgtctgaccgtggggaaccctcggaggttttccacagtgagcgtggacaattctagcaaggagagccaaacgctgaggcgcgtccgggcgaggctcacacgtgctgccaggtgacaaactgcttttgctaagcccacttggtttggcggctccctttaaatgaggccttctcaggaatacaaccccagggaacacatttcactggcctcaaaagagaaagtgctcacgaaggggacagtccctcgcatcgccagtaaccgcagcctcttctcatctgcacactggccctggctccctgacccacaaggttgaacagaatgcccacctcccatcacccagggatgacggctggaaagggaaccacagcgcggcctggggcccggcccaggtggggagaagccagaggactcactcgggtgaggttctttgcctctctgagtggccccatggttctcaccggtaaactggagttgccatgaagctcactgtgtctggcgctggccgtgcaccctggttcaattgctctgtcctcacgg

SEQ ID NO: 51134 - DNA, 1058 bp, Homo sapiens
atgtcacatttcccagcctattttatcctgcagctcgcctgatgcgactcagaaagcatcagaggtcctcgtgggtgcctgtcagccctgtaggccacgcccactctctcccggaaatgtgtctttcatgagctcatgtcttaaaacatcccgtgcttcccgccggatcccaggcgcgaacactgccatcgcggcagggcagggagattaataggaagtcccagaacaggcagctgcactccagggcttcattccaggccagggcagtgtggagccgctcacaaatcacacctggtggccacgctgccccggctgccgtcttccccgcctgccccggtcagccagtggcctaagagcagcctcagcttctccaactccaggggcacaggccccgacctgccagggagggatggctggctgtttaaattttcccaccacgacgtgactggccttgagggtctgaagctggcctggtgatcctgctgcaggggtcaggagagagggcgtccctgggacggctctgagagggaagcacccggagtgtcctgcccaggttgtgagggacgctaggccccggtgttggggtcccttgagtggtcctagggggactaacagccccacccccccacaaaaagtgcacttcctggtgggccctggcccttctgccggcctcacgcagccaattgtcggtggtatttttggcagggcccctgcctgggtggaaaatgggaacaccagtcggattccccctgtgcctcccagcctctggagtgcccggatggaggtgggctcctcatgggcaaatggcctgagcagggaagaggatccccagacgggtgggggcagggtcctgtgtcttgcccacctgctctcctggtggctcgtggctctggagaagtccccagccaggtccatgctcactgtcaggcctgccccaactcagacaggccgtggggaggttcctgtggcctccagcagcccttgagcacctccccgggctggcggcattaagagccctttgtaagaacaccgacggcctggggaccagaggctgcccc

SEQ ID NO: 51135 - DNA, 1043 bp, Homo sapiens
agaaaggcccagaaacagggaggatcccaggggcagtggggagcaggagcagggatgaggtgggctccatggcagagcaggtttttacccagctcttaaccatcccccaacgctggtttctttgttgggtatggggaggctgcctccccagggcaccaaccttggatcaccaccccagtgcccagaagaaagcctgttctgccattcgaggtgccttctgggcaggagtggggagcagcagtgacacttccacatctcttatgatcctacccatggtgcccttggcatactctgatctgtgtgtggaggaggtgcacatatgagggtgcgtgcacatgtgtgtgtgtgggtgggtgggtgtgagtgaatgtgtgtgcacatgcatatatgagctgcatctataagggtacatgtccatgtgtgtacgtgggtgggtatatgggggctgcatatataagggtacatgcccatgtgtgcacatgtgtgggtaggtgtgtgtgtatgtacgggcacgtaagtgtgtgtgtgcatgcatgtgtgtgtatggcctgcatctatgagggtacattcctgtgtgtgtgtgcatgtggcaggtgtgtgtgcatgggtgagcatgtaagcacatgtgtgtgcatggataggtgtgtgggggttgcatatataagggtatatgcctttgtgtgcatagcgtgtggctaactgcataggcatgtaagtgtgtgtgtgtgtgtgtgtgtgtgtgtgtgtgtatgggctgcttatatgggggtgccagcctacgtgtgggtaggtgcgtgtgcacgtgtggcatgtaagtgttgtgtgcgtgtgtcccaggcaccgttctctcaccgtggacttggtatggggaggtaaaaaaaaaaaaaaaaaaaaaaagccactgaaagggaaccagccgcatccatctctgatgggtgaattaggatccaaatttttaactaattgagtacattaaatagaaagtccctaagaaagaagggaggaaaagacgaatacaagacacttttcaaagcttctttaat

SEQ ID NO: 51136 - DNA, 1020 bp, Homo sapiens
gccttacccagtgggcatgccttcctgggtgcagcacagacactttattgtaatctttttccccagtagaatccaaattttaaaacaaaaagtcaacatgtggccacatacacacatccctgtcaggttgagacaggccacgcccttcctacctccacctcctcacctgtacgatgggtatcatggtggcagccacctccacagcggctgcagctgttaatggagatgacacctgcccggcacactctggggcccaaaggccggatgcctgcagtgtgcacacacctttcccctccctcagccttgggagtcgagtgccccccacccatcttcctaaagcgacccggtcaccgcccctgaagcgccctccctctgctgagcccggtgaccctgagccgtctttcaacggaaaccgtagtccctgtgcctcctctgagctctggccctgtttctggcatcacaacccacaggggccctcggagctgctgaggggtctcagccaagctccacttggggaggttgggctccccagggacacagcatccgtgcctggggagagaatgtttgaccgagccgggttacttggtccccaagtccctccacctgccaaaccagcaagcacgtctcaaccagggcctcctctggcctccacgctacctctccaggccttcctcctctgccaactcttcatttggcctcagatgacatggccctggcgtggagtgtccctgtgtaggaatatgtgtttgcatgtatgggtgtgtatgtgcatgcatgtctgtgtgtgtgtatgtgtatgtgcatgtgtgtgctggtgtggattgtgcatatgtgtgcacatataagtgtgtgtgcatgtgtgggcatgcgtgtgtgtgagacatgtgggcatgtgtgggcacgtgtgcatgcatgtgagtgtgcgtgtgtgtctgtgagacgtgtgggtgtgtgtaggcatgtgtgtgcgtgtgtgcgtgcgtatgtgtgtgtgtgtgtgagcgccagcatggttggtgg

SEQ ID NO: 51137 - DNA, 1042 bp, Homo sapiens
ggcggcatctttgccccgggcctgcccttgacccccagccccatgatggacaaggcaaaaccctcccccagcctcaatcacgccagcctgggcttcaacgagtactttccctccaggccgcacccggggagcctgcccttctccacggcgcctcccacgttccccgcactcacccccggcttcccgggcatcttccctccatccttgtacccccggccgcctctgctacctcccacatcgctgctcaagagccccctgaaccacacccaggacgccaagctccccagtcccctggggaacccagccctgcccctggtctccgccgtcagcaacagcagccagggcacgacggcagctgcggggcccgaggagaagttcgagagccgcctggaggactcctgtgtggagaagctgaagaccaggagcagcgacatgtcggacggcagtgactttgaggacgtcaacaccaccacggggaccgacctggacacgaccacggggacgggctcggacctggacagcgacgtggacagcgaccctgacaaggacaagggcaagggcaagtccgccgagggccagcccaagtttgggggcggcttggcgcccccgggggccccgaacagcgtggccgaggtgcctgtcttctattcccagcactcattcttcccgccacccgacgagcagctgctgactgcaacgggcgccgccggggactccatcaaggccatcgcatccattgccgagaagtactttggccccggcttcatggggatgcaggagaagaagctgggctcgctcccctaccactcggcgttccccttccagttcctgcccaacttcccccactccctttaccccttcacggaccgagccctcgcccacaacttgctggtcaaggccgagccaaagtcaccccgggacgccctcaaggtgggcggccccagtgccgagtgcccctttgatctcaccaccaagcccaaagacgtgaagcccatcctgcccatgcccaagggcccctcggcccccgcatccggcgaggagc

SEQ ID NO: 51138 - DNA, 1934 bp, Homo sapiens
cgtggtcactgacccccactctgagacagagcaagcatccccggctgccccagggctgtgtcccaactcgcagggtaaatgacagcttataccacttacgggtcatctgttcagcgctcacagccctccccaattcacaggcccccccttacccacccttcaaaaaatagtgacttacaacttaacaaaggctagcagcagaaagatttatttggtctggtcccctcccagaaaatgagctgtgtgttttttctgtaatgagagccgacttctggacagcgttgtgtgctaagagcccctagagggtcggggtggtgtttatagaagaatttaattatcattgatttcttttgctctctccaatctgtgagtttcgactttggtaacaataattgctttgcaagtttgtgttgcaaatcctgactttatctggctcaaggcaggtctgtgccgaggggtttggagcgtgtagctttccttttgataccactggtggtttctggactggctttgataatcagaaggattttaaattggaggagggaaagtgccggccatccccagaagcctgccaagaggagctcaaccccccatgcccgccccagtgtgagcccctttccggtgccagcacccacgtgtgtgcccgccgcatgtgcatatgtgtgtgccctggagaggtcgggctgacgcagccccgcgcaagcaggaggaagcaggcttctcatgggttgcctggagtgatagggtaatcaaaccagatgacattggaagcctcttccgtttaagtccttgcctcagatgacctgaaatcgttcagaatgtgtttcaaagccctgaggtagggaacgtagagcctttggtgcaccaaatatgtttcttggaggtaacttggcccctagcttctcctggcctagaggtctttgagtgaagcgggaaggtgagattgagttaatggcagtcttatttcttaaaaaaaaagttaagcatataggctttgcgggatttgggttggagaagcatgaaaattgaactgggagtggggagaggggctgctccttggtcttcgtcctgacagccggcccgggggtctctctgggaggctgcccagtggagcctggagtcacagcctggatgcgagcagggctgcccgggactcctgctgggaccgagattcctgcctcagggctgctgactccctagtctgccgtgtgcttccatcatctccccaggctccatcctgccttctgtgtgaagctggagcgtgcaagggaggcacagttgtgcttccatcgggggctgcacgcggcccgtgcatgtcctttcttttttagttgtatttttacggctgggtttcaaaatctcttctttcttcctcttccctcacttttacagtcaccaaaagcagatccccctgtagtggctgcaggagacctcactggatcctaggaaggatgccgctgcccagtgctcaggggctcgggggccctggccaccccccctgacctgcccatactctgttgttcccctgccaatggcttctctgggagtgcagcaggcacggtcacagcaaggtcctctcaaggccctccgcattgcaccagggccaggctaccctgcacgttctccttccttttggagctcacgggcgtgttattttacgcagtgagaccatcaatttcactggccgcttgtcagcttatttacaacgcagaccccagctgctcggagaactctgctccctcgcagccctgggctcacggctcccctaaatttcaaatggacttctctgtctgggccatttatttagattagaagcaagagagggccacgttcagggctctctgcaaccaaattgaacgcacagccctgttcgtggctctccccggccccagagcttcacacaagggacttgctctccagttttatgaacaagc

SEQ ID NO: 51139 - DNA, 1024 bp, Homo sapiens
ccccacgcgggaacccagcgccgtcctctgaaggcagggccttggccacgtcctgggtctcccacctcccacctgaccccagcggctccggtgtcctccacgtggctgccctggggagcaatcccagcggatcgctccgggccaccaagccgcacctgtgcctgagactccggatggacgacacagtcgtcacgtcgctcttcctgcgggttcttggcgagacacagcttgagaacagaagggcgtcgggggaacctgccgcaaggagcagagacagcacagccccccgggcccagccgcctccctctcttgggacgcaacttcttccccactcggatgggctttaaattattcccataggggccaatttcaaataataatttttttccctgatggaatttaccttaatctgtatataacttgtaattttttctaattcatttcttttcttattttatttcctccttaacagtatttttggcattagacattcttattgtgaagaaataatgttaatataagtatctggtgaaggaccaaaaccgtgtgataaggttgtgtgtcgtgtgggagtggggcgattttttatgtgccaaatacccccgtcccccccatgaatcctgctgtccctgctgccgtttaccagacaatcatatgtttttgttaaatttgcgtttcagttacatttgcatttaagacaagtgttctatttatttcttgtattgtttggaagaaaaaatgatgatagagtcccaaaaagaagagaaaaaaaatgcccaagttgccctttaaaaaaaaagagcgtaaatacaaacaggagtggtgcaagccgccttggtgtgggtttgtgtcacgtgtggacatctcctcaggctttgtgtcacgcgtggacatctcctcaggctgtccccagcggtgacgggaggtgtcctggctgctccaggacaaaagacaatcgtctctgtgggtgccgggtggtccaggcttgcactgaagacgtgccacggggaggctcctgcaggag

SEQ ID NO: 51140 - DNA, 1030 bp, Homo sapiens
gcctctgcttggcggccgtgaggccctgtggagctgacatctattgggcacagcttcgcatgtggagccgagaggtctctggggtcccagggcagaatcgccgtgggcaacacctgccccggctgacagctgcggtttctgtgtctctcttttgtgcagaagacgctggggaggaaacgtgggcacaagggttccttcaaggacggtgagtgtggcttcgggaggcaccgcgggctgggctccagttgaaactggtctcactggggcaccctggggttcgggtgggcctcagtttggtgtctcggggtcaccaaagctgcttgacagggtccttccagaggctgaggtcccagtggctggtctgttcatgtagccctgatgagtctagaaaggtctagaaagttcccttggactctattctgtgtgttctgaagggcagggtacagacagagcccccagtcttgccctgaacaccccatgtgtgtgctgggcccagcctacagtggccgtgttgggggaccaaggccagatcagagggcaccggccccacaccgcgggctctgcccggactcttcgaggctgaaggggagccatgtgttggggcctccagcatgggtggcggtggtgcacactcagcctgctcgggggagatgagaacatcccacagggaggttgacatagggaggtgcctgctacctgggtccaaatgcccgggggtgtaaagagattagaggcaatgaagcccggggagggctaaggcctcgagtgcccagctccaggcctgaggctccaagacacaatggccccttccagcccccagaagctttgtggacaggcatgggcccaggagggggtacccaggtctcctctacggaaatccctgggaagtgtccccaggaggcagcagcgatgccccacgtctcagggtaaggctggttgggggctgctgtgagggtttggaggcaccctgagccgggaccagcccatttcaggtgggacttgtggcataggagaggtcttgggactggtg

SEQ ID NO: 51141 - DNA, 1055 bp, Homo sapiens
cagaggggacccctgggcggtgtggcagccctcctggtcctgacgtgctctaccaatcgagccacactcccgccaaggcgacccgccagctgtgggccccgaggaggagggagcccgggcggaaacagcgtcacccatagcttccaggcagggcactgactcgcctcgcccaggtggggtctgagtcacagtcctgccctccacactccctccctgggtgggctccgcacctctccatctgccgggaagatctgtgggacaagatccccccccgccctctggcctctccctctggatgccccatgctctttctgggctgctttggggctctggcggctggggggagcggggggctgacccaaggcgggttacacagagaggaaggtgacggggataggccctcggcaggacaggcctactccaggatcggacctacctgagccctgtggggtggctgtccatgttggccctggtccatcaggaggaggaaagaagggagactttggcccaggcttctaggacgtgtgaccgagagctcctgggcctgtgtccccccaggtggtggaattgggcatcctggaccagctctccactgaggagcggaaaaggcaggaggtaaaagggccctgggcgggagggctgtcccccatggcctgggccatgcaacacccggggaggggcagcagccacggtggcaccacccagccatccctctgcggccacctccagtgccaggccctgtcacgctgaccagcgcctcacacagccccgggctgtgcttccacctgcgccaggccctgacggagccccttcacgtcaccgggtgaatcctcggagtccaggggctgccatcacccccttctctgacaaggacgggggtcgttgcccagcttcagccggctcataaggcacccagccaggggcatccagggacgtcgggctggcatctccaagctggccattctgacagccccatccaggggtgtgtctggggttcctgtccccacctgcccctgccacccgggtcacgtcctcctgttccaagcattggtcac

SEQ ID NO: 51142 - DNA, 1035 bp, Homo sapiens
gtgggcaagggtgtctgtgcatggctgtgtgtgcgtggtcaggggtgtgtgtgagtgggctggccccaaggcccggagggtggctcgggagcatccggcaccctggtgtgtatgcatgggtgtatgtgcatggatgtgtgtgtgggcaggggtgtgtgtgcgtggacaggtgtgtgtgcgtgggcaggggtgtatgtgcgtgggtgtgtgtgcctggccaggggtatgtgtgtgggcaggggtgtgtgtgcatgggcaggggtgtgcgtgggtgtgtgtgcctggccaggggtgtgtgtgcgtgggcaggggtgtgcgtgggtgtgtgtacctggccaggggtgtgtgtgcgtgggcagggatgtgtgtgtgcatggacaggtatgtgtgcatgggcaggggtgtgtgtgcgtgggtgtgtgtgcctgggcaggggtgtgtgtgcgtgggtgtgtgtgcctgggcaggggtatgtgtggtctcgaccctgtgctgctccctatatgcaggaggaccccggagcatcgagtctcctgagcctcagcctcaatgctaacctgaggggcggtgcctctggtcccctcgtgggcttgggtggcgctgggagatgattaggggcctgtagtgcctggcacagggctgccccaacagtggtggttgctggcgcattcttatatcagccccgcccctggcgagtcccacccatctgctgcctgtggggtgcccttgcggaactttggggccctgagggtgggcagggagccgccttgtccctggagacaggggcttcctgtagagctccagggaccagctatgggaaactcccaacctctgactcagcatgggatggggctgggggagggggaggggtctgggatagcggctgcccctcccccagctctgcccccagccaggcaggctttgtgttctctgagctctgtgtcctccggtcccctctgcctcaggcagctgcatgtttgcctctgacctcctcagggctttagattgctgccctggggcgggaagctccggcct

SEQ ID NO: 51143 - DNA, 1048 bp, Homo sapiens
gcagactggccacaccaggggcgagcttggggcgaccacacatgacacggcacccaacacaagggggccatgcacagggggcctggtgccggcccgcggcatcctgagtatgtccctggaaaatgtgtggccacggtctttgcctgggctcagagtcactgtgaaaatccaggttcttaagaaataactttaatgtatttagaaacctcaaaaccgaaatctccctgccgggtcccctccctccggccggccccttctcagaacgtggggcactcctgggcactcagggcccttcttgtcccactcaggggtaggaagggcataggaggagacctcgcattgcccccaataatcgctattggtgcctcctgtgcccatcagtccaggtggagttgccccctgggtgcagtggggaggtggggcccagcagctgaggggcccagccagccaacgggaataggctgggctccctgggacacggtgtggccccctcgagcttgcctgggggtgcctctctggggacatgtgatcttccttccgtgaagtgtctggagcccggcaccacagccacaggctcttgggaagccccagggaaccatgctgggtccttgagaccagctccccacgctctctagagccaggcacgaccacttgctgattggagacaggctgtgctgccgccggctggcctcgccagggctacacgtccgtctccacccgcagacgctccatcctgcggacattgccctccacggccacacggctggtgatgaagcgggcaaagtcctcggggaaccatcccgtctctccgtcccggagcctctcgccatagagccaccctgaacccggataggggtgggagggaggtgaggggaaggccgtgggtcccccggcccctctgagctgctatgcctgagcacaccagggccaggcttctcctagaactgaccacctgctcctgctcagagcagacagctgctgaggccttgctcatggtcaccgggcacccagcccctgctcaggtgctcgccactgagaagggtgctgg

SEQ ID NO: 51144 - DNA, 1149 bp, Homo sapiens
tcactgtgaggggcgctgtgcctgccggtggggaggcccctgccaccttgccaccggggcctgcctctgccctccggggtggcggggggctccaggtgtgagaatggtgagcacagcccccagttcagccagcattgggtgggtcgtacccacagcacctgctcccggcctgtcctggcccacagatccccacgggcccctcctagaagcctccgcagccctcatctttctgcagcctgcctgcggggctggtttggagaggcctgtgcccagcgctgcagctgcccgcctggcgctgcctgccaccacgtcactggggcctgccgctgtccccctggcttcactggctccggctgcgagcagggtaggtgctcccaagcccccaccccgaggagcggctgggcagggggaatccagagaggctgcctgttccttggcggggctgggccaggaccgaccctgcctgtctccacccagcctgcccacccggcagctttggggaggactgtgcgcagatgtgccagtgtcccggtgagaacccggcctgccaccctgccaccgggacctgctcatgtgctgctggctaccacggccccagctgccagcaacgtgagtgctgcccgtgcccacccagggactcggcagtgctgcctggcgtgctgggccccagttcccctggtccccgggaaggccctcatctgagggggtggaagatggagggtgtgggggtctcatgagagctgccttgctgtgttcaggggcactggggaagcctccagccccagcccctgcagctagcccctctccctgcaggatgtccgcccgggcggtatgggccaggctgtgaacagctgtgtgggtgtctcaacgggggctcctgtgatgcggccacgggggcctgccgctgccccactgggttcctcgggacggactgcaacctcagtgagtggctggtggcagcagtgctgagtggcgcctcctgtgtctccagggtagggccagccagcctgcaggaggatggcccccgactgcccacctccctgcccttcagccccctctggctgggcctggccccaagtggggctaagccagaggggcagaaaggacctgcagcgctgggggtgtctatgtggccccaggtcccacagg

SEQ ID NO: 51145 - DNA, 1019 bp, Homo sapiens
cagtgaggtccctgttcctggaagcattcaagtagagctggtgatggctgggtgaggtttgcagaagggattacttgggggccagtggctgcaagggatgatgttggctcccttattaactctgaagtttcagcctttctggaggaattagtccagaaaatgtttcccaggtggctaaagcttcatctttaagtcttcagacttcatcatttctgcctctttcgatggagagtgcagctaacgtatcataaactttctgcctttgtgagaggaagacagccaaccctagaacctgtcccccaggtggccccgtgagctttcctggccgtatgtgctgggctctgcagggctggttgcctggtggtggtggggaccccaggcagccacacagggcttcctacctcttccctgtcagtgtgcctcccttccccactttgtctgccctttctattctacagggtgctggggaacccccgtattcattcctgggtgctgcacccctgggatcgtgctgtaccctccaggctgcctgcagcgttgaggggtcacctccccttctccaggcctcctctttctgtctcggcttccgcctgcctctcagatgaggatgtttgtctttggattcagggccagcctggataatgtagggctactatggcaagcactgttgcaagaaatgcaactgtgcctagtctccaggtcctggggactaggacgtgtatgtagttgtgggggtaccttcagctgactaccgccttcagtaggaggaaggacgtggggcaggacccagccagagagaattgtttggggaagaaaggcgaggacctttctagctctggggccacctgcggcttgggcctgggaccttgtctactggggccacgtgtccttcccgctttgaggctctgagatcaagcttagtgaccaccaggggacagaagtcaggcggctcctgatgggggccagactttggggagagtggggcgtgagctttgtgcatctctccagtgtgggccgag

SEQ ID NO: 51146 - DNA, 1079 bp, Homo sapiens
gttttgtcgcctgactcataggggcctccaagctcctttcggcctttgctggggccccgctaacctcaggctcaggcccccacactggcctctgagtctcgggggccagtgcttcctgggggccctggtcccactacagggctcagtgggcagcatggtctgtgtgtaggcagcacgggatggtcctggatcacaggtctgcaaaggagggaacccagggagcaagcttctgcagggcacgcggctcccgtgaacctggctgtgtgaccagccccacagaggcacaggagtcggggggccggtctggcagagctggcactgggagccccgatttccagcccagatggtccgagtgtctgtgactcctgagacgacagtggtatcttctgcagttgtgccccgtgggtgcggtaacaaataaccacacactcagcacttaggacagcacggatttattacctgacagtcctgcgaggcccagtccaaagtgggctaaaatcaaggcgtgggcagggctgtgctccttctggaggctctaggggacagtctgtctcttgcccctttcagctttatagaggccgcctgcattcctggtcttgtggcccctcctccatcctcaaagcctatagcacagcacctgccaatccctgcctccctccgacctctgcttccacgctcacatctcctcctccccgccctctgaccctcctgcctccctcttataaggaccctgtgatcatgttgggcccacctggatatgccaggataacctcccatccagatcctcaactcagtcccatctgcaaaggtaggtccctctgccatatgagggtctgtggatgaggatgtggacatgtctgggggacattcgttattcagctgaccacattgtcctgaaaggccactgcgcctacggctcttcagatcacagccgcagccagggtcaccggctcagcacctgcggggtccttggagccgtctgggaatagctcagccctgccatcacgtggggtgccttgggagtggggcagagagggtttgggtgacgcgttcctaccttgctttctgagtgaaaatca

SEQ ID NO: 51147 - DNA, 1044 bp, Homo sapiens
ttcatcggagtgtctgtgggacgcgggtgggctctgtgggatgccacccttctcaagagcaaagggacctgctgtaagggggtgagctcagggtagcagggaccaccagagactccccccacggtgcccccagggagcccctgtgcccgggagtctgtcgctctgcccttcccacccatccccgcccactctctgctgccactgtgggctcggcctttcacacccttgcctgctgcctgagggcactgccaggttcccactgtccccagggagaggaaggcatgtgggaagtgaccgagggctgcgggctaggaagcctgggcgctgaccggctgcccccctcgggccagctgtgcctctcccgcggagcccaggcacgggagaaacgagtgggcaagggggcctgatttggaccctggtcctggcacccaggccaggtgcccgcatgtccgcctgcactccatgagccccttggtgctggagctttttctctgaccttcctgtgggagcaacactttgtcccacccatggcagggcctccacccaggagaacggcatttccacgggagtctcctggggaggctttaatgcttccaggactttgttgcttcctgggacgatgtgctcttgctgaaccggaagagtggtcatggtggccgaaagcctccgcaagccctgtgcgacccacactccatgccaagcctgggcggcagccccgctctgtgacgctcagtgctgaggccccccacggggcagtgccatgggggatttagagaatggagcaagaggcccagagggcgcaggagcatttgcggagtcagagctggagggtggcagaggggacaggtgcccagagccctttgaagtccagggccccagcctgcgcctggccccaccccgccctgacacctgggctgctgactgtttggccccaggatgccatctcccctttctagctggtggcttctctggatgtggaagaggcttcttactcattcccagtccccatgccagaagcgcccagcccttagtgggtattccaca

SEQ ID NO: 51148 - DNA, 1025 bp, Homo sapiens
cagctcctcctgcttgctgtctttttgggcagaagaggccccttctcggccctgatccatagccctgggtgggtgggtgggtgggtggtggggaccacctgtgcttctctccggccagcaggccccgtgcgtggggtgttggcctggtgggatccaggctttggtctttcctgctttctcccattgccctggacaagagggtgtggctgggttccaggacgggagagggccgggcaggacctgggatcagcccttgtcccactcccctgccagccgccctgtcttttccctgagggagctggaagaggccaacccccaaatcagtggccctagcctccacactgtggtttccagaatagtggccccgcgatgtccacagcctaatctcagggaactgtgacctttaccttgaatggcaacgactttgtagatgtgatcactttcaggaatttgagatgggaaggtggccctgggttgcccaggtggaccctgaatgctgtcactcatgtcctcatggagggagagaggctggcacaggagaggaggggcagggggacctcagagacagaggctagagtgagaggatccagttgtgggagaggctctggagcacctgcctggggggcccagtcattctcactttggacttccggcctctaaaactttaagagaggcttctgttgtttaagccacctggttagtgacactctggtacatcagccccaggaaagggatgtagctgcctcctgtagcagctgggaccctggggcccttacctgactccaggtgaattacctgcccctcttcccccaggctgaagccgccctcccctctcaccgggacacctggagtgccgtccccctcccgcctggcccggctgggtccccaccccttgttagaccccgctggcttttccagtgttcctgccatcccccagcgacactctctcggagccgcctggtcggggcgctggttgatgctcccagcccagtgttggaacccagagtcctcaccgtctcctcctg

SEQ ID NO: 51149 - DNA, 1026 bp, Homo sapiens
agatgctcgctctttacacggcccctgtgcaggacagacgctcactctttagagggccctgtgggtcagggcttggctctgtctctgccctctcttttctcaccctttgcccccttccttgtttctccatcaccctccagcccctgctggcaggggagggacaggggaggcccctgagccgatgatgccccccagcccccagccgttgtgaaatttccttgcttccgtgtgacctggacacccggccgtggaggacaatgtcagggcctgggagccctgccgtgtttgtgtaggagcgaggagtaggctaacgcccgtgagactggccggaagctgctaatcgtgttatgatttccctgagagccacttacttagtgccgggcggggcggtggggcctcatgaccggggcttccagagcccacaacgccttgcggagcctgtggcccgggtgcagtggggttcggacccactcctcttgctgggggggtgtccttcctgctcatggattctctgaattccacttttatcctggtccggtgccaggtttttcccagaccctgcccatgtttcagccggagtctccctggtcctggcagcaccatttaccttgggcacccctcctccaagccgggctccccggtgggcagagtggcagatgagcgccagcctggagcagctgactcgctggtccttccgcatgtacaccctgagatggaaccgtggaggaacaaagcccaggaataccctgcctgcagccccctgtaccccgcaactcctcatacgggctgtgctggcctggcccaggggagggggaggccactggacggagaggcagggcctcagcatacagttaggagctgcaccagctccatgggctgtgatgggcactgggaagggattctgtggtccagtaagcgcttcctaaaccagagttcagcagatttcttcttttgcaggaattttcagagcctttaatatgcgaatgtgccctgtggattcctgagacagactatacaggctttccc

SEQ ID NO: 51150 - DNA, 1029 bp, Homo sapiens
aaatgtctgtgaaaattcagaaaagatgctggattattttcttggattgacagaaatgttcgttcggggagctttcagggatgttttgcatctctctgtgggactctcagctctggaaggattaaagtcaggctgcagggaaggagcgtgcaaccgccagcccgcggaccggacatggggagcagtttgctttggaaattagcaccttgagttatccactgagctggtagtttgattcttctttctccctacgttatttctcctccatccaaaggctgtttttattatttccagcagagaatgagacaaaaacatggaaaggtagtgtcttttagtaatgcttttcaggcaagctagaggaattgtttgccagatttaaaaatggaagaaatggaagcctgtccactccttatgtctactggggagaggctctgagccaagcccagttctgcgtgtaacccaggagtggtggcctgggtgccccaccaggcctgaagcagtcgaggccaggtgggataaagaggggagaagcaggagagctgagcccactggatagggtggggggtggagaggctgggaccaggtgggtgggtcccacacgcgggcttccatgccaggtgctgtggctcagggccctcttgcaggcccgggtgcgggcatctacatttggggtctaatatagacctccattcggcctgcttcccacctggtgccttcccaagaacacgcagggatgtgatgactcaccgggtctgtacttcctaagtggagttggcatacctaacagtggaattgggatgtttggctatgatttcctgaaaggtgtttaggatggaacttggtctgggagctgaggcctgagctgcagctgtaacccaacaggtctctgaagccatgggaagcccccacttggaaagaggaccagagggaggccagtgggtccagccatgggaccagcgggttctaatacctgcgctctgcaccagggggcagtgccctgcaacaatctctgcagccgccctttctctc

SEQ ID NO: 51151 - DNA, 1036 bp, Homo sapiens
ccacgaccccacgcgccgcgcccgcgtcaaggagtacttcgtgttccgggtgaggcaggggccagggccggggcgggggccgagggcgcggggcgggatgggggcgggtggggtcggaggcgggcgccgggcggtcccgcagggagcgagctgtgacctgtgatctttgcccccgtcccccaccccgcaacccgcccagcccggcagcatcgagcaggcagtggaggagatccgcgtggtggtgcggcccgtggaggacggcgagatccagggagtgtggctgcttaccgagtaagccggggctgcgctctccttggtggggggactcgccccgagccgccgcgcagcaccttgcgaggacttcccggggtgctcgtgccacgctcaggcgccccgtgccgcccctgctgcccttccaggcgggctggccttggctaagtcgagacagccgcgtccagtgtggactgaggcccctcctctgcctacagggtggatcactggaacaatgagaaggagcggctggtgctggtcacggagcagtccctgcttatctgtaaatacgacttcatcagtctccagtgccagcaggtggtgcggatagcgctcaacgcagtagacaccatttcctacggagaattccagtttccccctaaatcgctcaacaagtaagcctgttcagagtccagtatcactggacctaagcaccagagtggaccttacaattcagcccttttaaatcagccccccaagcggtgtgtcttctctgtcattaattataagcacaaaggctccagctccaaatatcaatgggaagttccttaaaaagaagcgacttctgggcaattgagtgcattaaaaggaattctggcacagaaggcagctattaggctggtagtaaaaagacttacatgagttcaggatgcattgaagtagagcccagcgtgttaaaaaggaacttggatgttcttcaggaaaagtccaaactctgcatttttctccagccagggacagattgcatatgacacatcaagtcttg

SEQ ID NO: 51152 - DNA, 2125 bp, Homo sapiens
agtgtctcagaatgctaattttttcaagtaatagacattcttatcttgcctgacagttaaagctccatgtttttctctctttaaagttggaaagcttcaaggctctgttaatccaagctgtcaaaaaagcccaaaaagaaagccctttgccaggacaggcgaatggcgtgctgatcctggagcgccccctgctcatcgagacctacgtgggactcatgtccttcattaacaacgaggcgaaactgggctactccatgaccaggggcaaaataggcttttagccgctgcgttctgggagctcctcccccttctgggagctcctccccctccccagaaggccaagggatgtgggggctgggggactgggaggcctggcagtcttcatgctgccctgctgctgctggaaggatggggatctttcacctttagggatctcagcacaattagaatcgtaaagtgaattctatctatttaattggatattggactctgctcatataagctacagacaaaagccaaaagactctcgctgtccctgtgctgctggtatttcattctctgtaacttcagttctggtgttttccttgagtatctacttggcttctcgtggtttttcccaccccagctgccccagcacgcgggacccatagcacaccccttagcgcttgcctaggttgctgaaaacagggaggcacctggtatctcgagtgcctgcagttgcaagtatgtttacacctggtgtccaattttgtattttaaaatgtaatccatttttacttcagctcatccaaaagcagccagcagaccggttgactgagaccggtctgtggctgtgggccccttggtgacccgctgctcttttggaaatgggtgacctgaagtgacactttttccacaattaacccaagttgtgttaatacttcaggtctgtttcccagacccagaaagctttacagaaaatcattgtaagacaatttattaatttgagaaagtcaccttgacagttctttgcacacaagttttacacctctctggattcgaagtttgtattgtattcatagttaaagggaatcgggtactttgcttgttgaataatgcactttaaaacaaggaaccgtatcaggccagcatggtggctcatgcctgtaatcccagcattttgggaggctcaggcagacaaatcgctctagctcagaagttgcagagcagcctgggcaacatggtgaaacccgtctctaccaaacagacaaaaagcagccaggcgtggtggcacatctgtggtcccagctacttgagaggctgagccaggaggatcgcttgagcccaggaggcggaggttgcagtgagctgagatggcaccacttattgcactccagcccgggcgacagagcgagactccatctaccagatccttatgacgcagctgatgcctgccttggttcctaccactctggtgtagacagaggactttgtccaagtctcacactaaacatgcccgggcttcgatgtgcctggaggatttccccacagggacccacgcacctccctgtatctgcgcagcttgctcgtgtggctggaagcgctgtcgataagcttcacgcactggcttgccagttcttcagctctaggacttgtagctttaagcaaacggtgtggcatgggttgagtgtggccacctgcaggatgtgcagggctgcctcagaagctggctggggactctagcctctgtgttcataaagacattaagaagtggatggatgttgttccttttttgaagttgtcattaaagtaggtgcaacaaccaagaaagtgtctcttccctctttgaaagcctgccccatctctgccggctctgcacctgtgggcctgttctgcctgtaccatgcggactgcctgtcacagcagtgccgagtatggttctctgcagaaagagatcacgatatgcaacaacctaggtttgcaaccctgatccccccacctgtggtgccaaccaagtctggctgcctgccgagcaccagctggagagattgatggaatggttctgggtggttctaggcacttcctgcaaatagccagggtggagacccacgcacactggttccgaaaccagagtagacatgagact

SEQ ID NO: 51153 - DNA, 1054 bp, Homo sapiens
gtggtaggaaccaaggcaggcatcagctgcgtcataaggatctggtagatggagtctcgctctgtcgcccgggctggagtgcaataagtggtgccatctcagctcactgcaacctccgcctcctgggctcaagcgatcctcctggctcagcctctcaagtagctgggaccacagatgtgccaccacgcctggctgctttttgtctgtttggtagagacgggtttcaccatgttgcccaggctgctctgcaacttctgagctagagcgatttgtctgcctgagcctcccaaaatgctgggattacaggcatgagccaccatgctggcctgatacggttccttgttttaaagtgcattattcaacaagcaaagtacccgattccctttaactatgaatacaatacaaacttcgaatccagagaggtgtaaaacttgtgtgcaaagaactgtcaaggtgactttctcaaattaataaattgtcttacaatgattttctgtaaagctttctgggtctgggaaacagacctgaagtattaacacaacttgggttaattgtggaaaaagtgtcacttcaggtcacccatttccaaaagagcagcgggtcaccaaggggcccacagccacagaccggtctcagtcaaccggtctgctggctgcttttggatgagctgaagtaaaaatggattacattttaaaatacaaaattggacaccaggtgtaaacatacttgcaactgcaggcactcgagataccaggtgcctccctgttttcagcaacctaggcaagcgctaaggggtgtgctatgggtcccgcgtgctggggcagctggggtgggaaaaaccacgagaagccaagtagatactcaaggaaaacaccagaactgaagttacagagaatgaaataccagcagcacagggacagcgagagtcttttggcttttgtctgtagcttatatgagcagagtccaatatccaattaaatagatagaattcactttacgattctaattgtgctgagatccctaaaggtgaaagatccccatccttccagcagca

SEQ ID NO: 51154 - DNA, 1035 bp, Homo sapiens
gctgtgatgatggttcttccacagccggaaagtctaagggtactgacgctgaggtggaagggattgtgaactcagatgctggtagtcgacagaaaagtgctgaggagttggagctgctgagattgcagctaggacctgtccatgtccctctccagtcagcccctggcacgtggggtccaccccccacctagtcgggcctggcaggtgatggtgccactctcatccggggcacttgcgggcaggcccctcgctgcggctgccaggctttgcttagctcttcctgcccttgggccgcactttcctcccctttgaacagaggagctgggttcgcgatgcccgatgcaggcacagcagcctctcagccgcgtgcgtacttcccgaaagggtgacaatggcgtgttcttcctgttggtgttctagatgagatcgcctctgtcccagtctccttacagacactgaaacctgttaccgacagagcaaacccgaaaatcggcataggaatgctggcatttagtcctgacagctacttcctggcgacaaggaacggtcagttgtgctgacgcaggtgctgtctcaccctttactgtgtcctgtggccccaggtgtagaagcgactggaaaagaaaatgaagttgggggtttccgacacgtcacctcctttcacgtttctgcagtagccgaggtgctcacagaagctccttggaggcgctgggcctttgtcctgcagcagccgcaggtccgcgcatgagtcaggaggcctccaccctgctcacttgctccactctgctgagtagaaagcagggctgggcacactgcagcccgccttttgttaagggtttctccatttgtaaagggctaaaaaaaaaaaaaaaataccaaagaaagaaacacatttgggccccttacagcccgtgatggccaccctggccctggccaggagccctacagggcccaactgaacccagactgcagggtgcagccgccccaccccaccggttcttcccctcccctcctgtggtgtcaacagcagagcag

SEQ ID NO: 51155 - DNA, 1082 bp, Homo sapiens
gtttgtggggtgtggacagcacggagcgtgatgaaaggatacaggcggctgggcgtggtggctcacgcctgtaatcccagcactttgggaggctgagtcgggcggatcactaggtcaggagatcgagactatactggctcacacggtgaaaccccatctctactaaaaaatacaaaaaattagccaggcgtggtggcgggcgcctgtagtcccagctactcgggaggctgaggcaggagaatggcgtgaaccaggaaggtggagcttgcagtgagccaagatcgtgcaacaatgcgagactccatctcaaaaaaaaaaaaaaagaaagaaagaaaggatacagacatcctgaaccgggggctggggccaggtctgaaggctctgatcttcctttcttctgggtctagggcacatgagggtctgtgacctaattcagaggaaggccagagaactcttttatggcctgcctcagggtgacagggagcaggagagagcatacctgctttccctggcttctcagatgccaccgtgccaggttttggggtagtggtatgtcttgagcccaatcagtaccctgggggtcgtggccggcccccctccctccatgccacaggctctctggagaggccactgctgtatccccactgtgagctcgatctgagctgcctatgggaccacacctgagaacccccaagggtggcactggcagacttgaggtgcccaagtgaggctggtgcagcccctctgccctgccagtctgggcacgggcccctgggcatcgcgactcctaccttcctaccagcccagatgcagggcctgagccggcagggcttccacccagcccagggtgtgtccccctaccagaggcgctgcattggataggaaggacccacctgtttccctgcccagtaccagctggcaggccccccgtggctcagggtgcctgtgaggaggggtgggggctctaattgctcacctgctgctctgaggtgtcaggcagggttgggggtggcacctggggaaggctgggctgagggggcaggctgcccctcctgcaggagaggtgcagtatttcactgggt

SEQ ID NO: 51156 - DNA, 1039 bp, Homo sapiens
cacctggcccgggccaggaggagcatcgggcaggaggcgggtctcagggccgggcagtctgggtgtgcccacccctctagacgtgagtggccagagccagtcagcctccaaagggccacagaggggacggacttggccctgctggtgagatctctgccaagactggccagcggcttccccatgctcaggtgggatctttggtttgaaatcctgtcctggacagaggcacgggctctgctgccaagagttgtctgtccgagacaggcccacagccctagggtctgcagaacctgcctcctccaggcagcgagacgcatctgcgggtgggtggatttgggctttgctggcactgtctctggagtgtcatttccaggaattggcatgcaccaaggagatggggtggaaccaccgtgccaagggctcaggtcctcactgcggtgcccctggagacagactggcccacggtggggatcttgctaattctgataacatcacctgtgcacaaggccagtctcctcgagccaggcaccatgctcagggctttgagttgagctaactcttgcacccaccaacaacgcacagggctgactccatcactgctccccttttacagccaaggaggctgaggctcggggagggaagtggttcgcccagagttctgctcatagtaagtgggggcagccacctctgcatctgtattcctaaccactgagctgccctgcccagacagcttcaggggagggggtctgtcaggaggggcaaggtgaaggctgcatgaccccagccaggagtggagggcacgcaggggctgggcgggaaaagcagccccaagagccctccgggtctcccctcctgcaccgaggagggggcaagtgagccctgcctgggcacccaggccatggctgcaggaggggctctatgggacacatgttggtccggcccactgggcagcgtcccctcccccacgaggccccgcctccccgggcacagctcagtgctggccccctgaagtccatgcagggcggccgcattcccaccc

SEQ ID NO: 51157 - DNA, 1563 bp, Homo sapiens
ttatcacctctccgctgtcctcctgcccaaacctgcccgtgccgggcacccagctgccggggagcgaggagcgggcacaaggaaattagcagccccccgctgcaccctcccctcacccacccccgcaccagccctgccaggcccagggctcccagccaggccgggcccatgttgtactggggcgggggaggaggggaaggagaggagggtcggagaggagccggcagcgtggggagggatgggcacagtggcgtttgggcaaaccctttcctgcaagcaggacggtgcacgcaccctgggcaggcaagtccaggcggctccgtgtcaacagccgaagataaatacgattttatcagctcggaatctgttgaaacacatccatctagcggttctagggaaggagaaggcaggaggggggcggcggaggggaagtgtctccacgtgacctttcctatagaataggctccaccggagtcctcctcctcctgcccgttttccacagggccaagcccaggcctgaagcctagaggcctgctggggagacaggaggaaggagctgggggagcgctggagccgtcctgggctcagccaccctctagaaggacctggatctctcagggctcccttccctcctgtggccacctgtgtcacccacccccagatgctgccagggcaggggacatcacagacatcctccccgaggccacccagctccggcccggctgggcacctggggtccagttagtgccagggtgaggtctgccaggcatgtatgccccaaaggccatgtgagcactgcactggggacacctgtggggaggagagccaggcccaggaccttggtggccttactggccagaggggaggagaagtgctcacatcgcctgaggacaggggcctccttgctctccaccctgaggcctgggcctccctccgccactggcccaggtcgaagacctgtccgttctaggccgctccacactccagtccgagcccccacttcccggggtgggtggtccggccgccgcctgcaccgagtaccagggacagctcccggcgcgcccaagctcctccccggggcggggcggggcggggcatccacagtgctccccgcgcctgggcccccaggacctcttgcagacgggagtccctcagacagtgcagagacgggagcacgcactgggccctgcacccacttcgtagcgccctggcctgggacgccccaccacgcagcttccagagcaaggatcgccacttcaccctgcccggagacccagagggagtggggcgggctcagcagggcgctgctgagaggccgctgcctaggtctgcgaaatgggagcactgctgaccctgaggcccaggcgggcgggagctcaggctccgcagaggactatggccgggggtgctggggcaggggcctaggggaggggctgcaggggccaggcaggagctgtgaaacccctcacgctgttgagactccatggggctgtcagggagcgacggctgccggggcctctgcccgcaggcttggttgcacccagagccttactccatctgtgt

SEQ ID NO: 51158 - DNA, 1032 bp, Homo sapiens
ccacacagttttgtagatttttcctgagaacaaatgttgcagttgctgatgtctacatttgataactgttcttttctgaaatgtttttttcttttaaggttaagaaaacgacttctgatttgtttttggaagtaacaagtgccaccagtctgcagatttgcaaggatgtcatggatgccctcattctggtgagtgtggggtggctcctcctgagaaacgcttttgagcgtgagtggtgctctgctccttgacttcccacccgtcctgcttgcctcttttttgcttactgtgttggcagacagcagcatgtcttccctgggtcacctctcatctccaggttaaaaaggtattttttatttgcagaaaatggcagaaatgaaaaagtacactttagaaaataaagaggaaggatcactctcagatactgaagccgatgcagtctctggacaacttccagatcccacaacgaatcccagtgctggaaaggacgggccctcccttctggtggtggagcaggtccgggtggtggatctggaagggagcctgaaggtggtgtacccgtccaaggccgacctggccactgcccctccccacgtgactgtcgtgcgctgacgccagggccgcctgtccgcgtttgtttggccggttttgcggaggtttctatgcggcaatgctgaattatccgttagattttcaccccagtttttttgttggtttttttttttgagatggagtctcgctctgtcgccaggctggagtgcagtggcgtgatctcgagtcactgcagcctgtgtctcctgggttcaagcgattctcctgcctcagcctcccaagtagctgggactacaggtgtgtgccactaagctcagctaatttttgtatttttagtagagacggggtttcaccattttgaccaggatggtcttgatctcttgacctcatgatctgtccacctctgcccctcaaagtgctgggattacgtgatccacccgcctcagcctcccaaagtgctgggattacaggcgtgagctg

SEQ ID NO: 51159 - DNA, 1115 bp, Homo sapiens
gctgttcttgcaaagacatgaaataatgaaacagaccgcgtttgcggttactcgaagcggtgcacagctgtgagaggactcggcggatgagcagtcgttgggaaaatggtttccttcactcgctcactaccttttaatcagaaattttggtctctgtcccgatagtaaaaccgtttgcgtggggttggcagtagggtgagttgctgtgtcgtgctgtcctgggctgttgaatctgtggagtgcacgaggtcccggctgctcagcctttctctcctcttttggccttctgaggatggcagacctctggaaacagttgtgcatgagctggctttaaggttaagccctgcctcagtaggatcggtgtgtttgggcgtcaggtctccccgggacgctgcagtggcagcccacatgcagcttcttgctgcgtggtcccgtgggatgctccctgcctgctgtagagatgaatgagggcgggagtcgggagggctcattgaggcttaaggccgtaatcgacacgatgggcgagttctgtggctgtgaccctagtggagtttgtgggtttctgcccgatagattgtccccttggggcggaaagaagccaaggccaaggagctggtgcggcagctgcagctggaggccgaggagcagaggaagcagaagaagcggcagagtgtgtcgggcctgcacaggtgggcagcgtgcctggtggggtggggccgggcccgggggagtgccgcatgctggcctcagctgagttagtctgtgctcctcaggaaccgcctaatgctaccagaacccagaagcttcttaacagggtacaaagaaagcattctctttccaaaggagacgttgtggaaccagtctgtcatctagatggccctgacgtgagggaagtggaaggtgttaggagcggaggtattggccattccacagggggcgggtggccctcaggatgggacaggacaggatataaactagccattaggaaacagacataaatgccagcccaacccacagcattttatccataccgtgcgctgttgggtatcatccaagtcagggtccttggtgctgctctaagcaagatgatcatccgtaactagcccagtgatttc

SEQ ID NO: 51160 - DNA, 1007 bp, Homo sapiens
gaagtccacgagagccgggtcccgcacgcccctggggtccgggtgctgaggcgccgcctggccgcctccccgggccgcggcaccgctccgacccagccgccctctccaccggggccgcggcagcgccagtcggggcccttccctctaagcaggtaccttccgggccgctgcggcgccggcccagggccggagtggggagcggggcgcggggcgcggggcgcgggcgccgcgggggcgcggtccccacctgggagctgggtacgaagcctgggtgcgcggtgcaagcgcggacggtgtggagttagatgccggccttgctgtcgccgaagagccggcgcggccccgtcgtgccgtatgccggggagctcagcacgggtgctgggaccgcctgccccggccgggacggcccatttagcgtggaatattgttttcagatccggcttttcctcttctggatgcgtagcacatagggggccagtttcagatgtgttctgctgagcaaaagtttgaggaaaattgctctgtccctatagagattaaagtctgatggttggttgttttttgttttggagtttgttttgttttgtttgcacttaagttcagatttctctgaagccctttcagtcgctaagatgacttgatcagaaacccataagcctttgagacggtctcgctctgtcgcccaggctggagtgcaatggcacgatctcagctcactgcagcctccgcctcccgggttcaagcgattctcctgcctcagcctcccgagtagcccgactaatttttttatttttagtagagacggggtttcaccatgttggccaggctggtctcgaactcctgacctcaagtaatacgccctcctcggcctcccgaagtgctgggattacaggcatgagccaccgcgcgcagtcacacttaaaagtcttcttaaaaagaaaatcagagacaagttttgtttcctagtcttgtaacaaaatggaagttgctacactgagtttccgttt

SEQ ID NO: 51161 - DNA, 1340 bp, Homo sapiens
aagaaatactagcctctggattgaggcctgttttatttgctagatatgtctggttccccttacattttttttcttgacagacttcctcatcccacaaagccacagacacgcgaacgtccaagaagttcaaatgtgacaaaggacatcttgtgaagtcagaattacagaagcttgtccctaagaatgacagcgcttctttgccaaaagtgacacctgagaccccttgtgaaaatgagtttgctgaaggcagtgccttgcttccaggcagcgaggctggcgtttctgtgcagcagggggctgcaagtcttcctctcggtggctgcagagttgtgagtgactctcgcttagcaaagactagagatggcctgtccgtgccaaaacacagtgccgggtccggagcagaagaatccaacagcagctccactgtgcagaagcagaatgagccagggctacagacagaggatgtgcagaagccaccacttcagatggacaacagcgtctttctagatgacgacagcaatcagccaatgcccgtgagccggttctttggaaacgttgagctcatgcaggtaagagcggcgccttcctcctcccgtgggtactcaggcagcagctgcacattcaggtcacacactccccactcagtgcaggtaaataatgcctcgacacaacattaaacataaactaatcattttaacccacgaggagaaaatgaaaccgttggctaattgggggctctccctgcatctcccgagctgagaatcactgctctcgggaaaggtgtgtttccatgaaatcaggtttgtggtttttttgaacatccaccccgcgcttgctgttaatttcttttgttttgaacccagcacctttccttctctttactcgatcagcccagtagggaggaagttctcatctagaggcgagtgctgggactcaggcattttcacacgtctaaaagggaagagcgctctgcgagccctagagccgctgggtggggcacattgcaaatgcgggtgcagatatgtattgctcatgactgaagtcatgttttcttctccactaaggacctcccacctgcgtcttcatcttgtccttcaatgagcagacgagagttcagaaaaatgcatttcagagccaaagatgatgatgatgacgacgacgatgatgcagaaatgtaggggccatacaaaataatgtccttgagtatttagtaccattaacaatttgacaatttagcacattacaagatttatataaaatgtatctccaagagaatgtcttaatcaaacttcagaactgacccatctaagtcaatagtgcaaagcacccaatacctgtgg

SEQ ID NO: 51162 - DNA, 1092 bp, Homo sapiens
cgggggcctcgattcttgcttcgtcgagtccctggacagacgagggtaggagtcccatggtcactataagtggcctctggaaacccctgtggttcagaggaactagaccataacaggcaggcacgcaggacacttccctctgcagacttgatcagggatgaaggacaagccagctcgtcatttccagcttgtacacgtgcccctgggtgaggctgaggacaggggctttctcactcatcagctttccccaaagacaggtccattgtccattctgagatgaaggaacggaccaccccaacctgtacccaaaggctcccacacactctaggcccctctggcaggaaggacccaccacagcttttatcccgtcgaggcgttcgtggggaaactgagtcagcaccatggtctgactgatgctctttagttaagcaggtccctagctctgcgatcacacagctcactacttacccctcatcctccctgctgtaatagccacatttaaaattcaaatttcattttttttttttaaaaaaaaagagttgattgcttgattgtggttgatctttctgaagaggctgggaattaccgtttaatatgaaatgatgcgtagctcacgcctgcaagcgaaagacccacagtggaagtctggagttgtgtttgtgggtttccggcctctgcccgtccccctaccccaaactctttctcttccagctgtgcccaaagcgggaacactcgtcggaacagccaccagcggaagaccaaccagcaggaggagagctgccagaacctcacggacttcccctcggcccgggtgcccagcagcctggacatattcacggcctataacgagaccctgcagtgttctcacgagtgcgtcagggcatctgtgcccgtgtacaccgatgagacgctgcactcgacgacgggggagtacaaatccacatttaatggaaaccggtaagctcgggctctgctagaccctgcagctgtgaagctcttggtgctcctgacccccgggggccggtgtggctgagctgagagctgttggtcggtttaggtcttccctgaggtcgctttgaggggcccagccaa

SEQ ID NO: 51163 - DNA, 1052 bp, Homo sapiens
gcctctgggttggggctcctggtctcccgatcccagtccagggtctttccctgccactgccgctttggctgcactcttgcattccagctttgcccagctattcttgcattttgccgtcagtgaatgcatagacttgagtagttcctgtgactctttcttttgtttgagaaggacgaagacaggtaagaagcagcctgtcctccttctagaagcctgctgtgcttttagtagagatggggtttcgccatgttggccaggctgctcttgaactcctgacctcaggtgatccgcccaccttggccccagaatgctgggattacaggcatgagccactgcacccggcctagcttgacttcttaagatgcagagctgtggggaaccatgctttgagttcctcaccagaagatttactgtcatatccttggcagagaggagtgtgccttggttactggaaggaccaggagttgaacggtggtgcaaatgagctgtagcagcataatctacttctcagtcactgtttggggaccagcaaatctacatggatggaccctgatttcactgagtttatttaatttggatttatggctgcattcatgtcacattaaatgattaccttcagcccaggttccaagcattggaagacattgcctctcaaaacccaatgtaagagacttttaaatacccactagtgtttaacttatgatggaaacttttcatacttcagtatttcaccaacttatatggttcctttggagatcttaatgatatgcggctgtcactttaagtgaggtactttggctctcggttatgaataatcctttttattttctctgtaacattgcaagggagcaaagtttcattcatcacttaccacagaagagtgtgcattgagccgctagagggcactcagtctttatttttttgtaacttggaatttccctgacctatattttgcttttgaatgttcctctggtggtgtcagaattttggtttgtttgcttaatagatttgaaaacagccatgtagaaggggtcattgcaaacatgtaattg

SEQ ID NO: 51164 - DNA, 1031 bp, Homo sapiens
aagtgttgggattacagacgtgagccgctgtgtccggctgggtttgccatttctaagtgacttaaggaattgttctttaggccggagtaagggctggctttgaccaccagtgatggatttgaggtagtatggatatgggccaaagttgtactctagcactgattctctgtgggacttcaggtaagtgatttgagctcttggaccctgaatttattcatctgtatatgaggagtaatgataatgcatatctcgtaagttctgcttgaatattgagcgatgtgtttttcacaggtgcctggcaggcagtaggtgttcattcagcacacgctggctgagtgtctgtcgcgtgccaggctctgtgtaggagccgggcatacgggtggataggctggcgcatcatcctttcagctagggttaaagcctacatgtttactccaagtcagggtttctcaagcttgacaccactgacttgcgaatggataattgtttgctgtcgcggggctgtcgtctgtgctgtaggatgtttatcagcatccctggcaacgcactagatgccagggcactgcctccctgctccctggccctgttgtgacaaacgaaaaaaaatgtctccagacattgccaaatgtgccttagggagcagaatcatcgctggttgagaaccactgctccagatatacagctgtggaaattcctcagatgttgtcttgagacatttcagagttttgtaaatttccatggtgttttccaggaaagctcctcaattctcaggctgccttggttggggctgcgtgtgtgccagacatgcttggccacaagcaccaacggcttggggagctgctgctggcctcagctgcctctgccttccgcagaggatgggactggtggagtttagaaagctctagtgggcgtggtggtggctgaggcctccatgtgctttccttctgagaagtgcgcacgtggctgacgactgttctctgggtcctgtcttccaggttgcggctgtaccatggcacccccagagccctcct

SEQ ID NO: 51165 - DNA, 1033 bp, Homo sapiens
ccagcctggcaaaacccactctctacaaaaagtacaaaaattagccgggtgtggtggagtgcacctgtggtcccagctacttgacaggatgaggcaggaggattgcttgagcctgggaggtggaggctgcagtggccagacctccagcctgggtgacagacgagacccttttcttaaaaacaaaaacaaaacacaggtactatagctaaatatagttcctgcacttctcgctggctcctggagcacgtgtgctctcttcctctcaggacctttgagtttgctgctcctcctgcctggctccctctccccaaactccctgtggttcttctcatgccccccttgttctcagctcaaggatcatctcagagagcctgccctgccctgccctgccccgccccacccacctctctccccgttcttcaccatgtaagccctgtaagggcagagattttgtctgttccttgttgtttccctagtgcctggaaatgtgcctggcagagagtcaatgcgcagaatagatgtgtaagtaacgtttactaagtgaataggtgaaagaaaggtggaggactcttgtctcaggtaagaacctgtcacagaagagaaaaggctaaagcaatacttgctgtaagtggtaaagctccggggcagggtcctgcctgtctacactctggctgccgctctgggcagggtcctgcctgtctacactctggctgctttgttctgtatttgtagccatgatttctcaattctcaaagatctgctttttgctttgccaatgtcaccccaaaatctgggaagttgaggatttagtttctggttatatcaggaagggctcatttggttggaaatgattaacaaacccatccaaaatgatttacgtgagaggcgatttgttgactcacagcaaatccacagccagcataagcttcaggtgtggcttgagcgaggtctcaggtgatgtcccctggacttgttctctctcacctgttggctgctgggagccctgggcctcatcctggcaggcgcatgtgtc

SEQ ID NO: 51166 - DNA, 1006 bp, Homo sapiens
ccaactcccggcctcaagtgatccgcccgcctcggcctccctaaatgctgggattacagatgtgagccacctcactcggcctaaaaaagcagtttcttagacccactttcttctccactgtttcttgccttccatttgagaaaattcctcaaaaagttttccttcacttatctgcgattcctcttcttcttccggcttataaaccaactccaatcagcctctgccctcaccactccgtggaaactgcacttgccaaggttgcggtgacctcttcgttgctaggtccagcggtgcccatcgtatcggggtgacagaggtgctgcctgcggcttccccagctcccaggactccacgctcccctctcatccctccagccactccttctcagtctcctgggcttcttcctgctcatcgctgtcctccagtggctgcccttgctcagctcttgaatatattcttttccatccccacaaagcccctcagatttccacccatctcgtggctctgaaccccgtccccatgctgcagaccccaccccctctaccactcccctgaaccccagagctgtttatttcctgcctgtgtggctcagctatgagggtggggaacgtgtgcctcggattcctgggtcagacactgagctcccgactgccctcacccccagcccagttcttcccagggtggccccagatgagtaacgagctccccaccctcccaggtgtcagtcccactcccgggagtcaccccgactcctcccttcctcccacgtcccgcctcccacatccaatccatccctgggccaggggccccgtgcctctccctgtctcctctcctgcccagctgccaccggctctcatgctgctcctcacagcattccctgcgcccacctccacccccgccggcagactctacgcggccagggtgatcctcccagaacataagtcagattatgtcactgcttcactccaaaccttccaatggcttccattccattcagagccaaagt

SEQ ID NO: 51167 - DNA, 1003 bp, Homo sapiens
ctctctgccaccccactccctgccctactccttcccgtctgagcccacctgtctcagctctttcccttgatctttcagacaaaatggaagcccagctgggctacatggatgagaaagaccccggggcacagaagccaaggcagcccctggaagtccaggtgtggaacttgctggcgtctgggcctgtggtgtgtgtggggtggaggttgggtctggggaccttctcaggccctgtacagcgaggtggaacccaggcctcctggctcccttttcggggctctgaatcggcggggagcaggctaggagcaagcgacgggagccaggagactgggttcccagcccagcgcacgttccccgccctccgttcctggtgaggccccaggccttgtagttctcctggcttttcctctgcaggcccttccagccgccttggatagagtggagagtgaggacaagcacgagagcccagccagcaaggagagagcccgagaggagcggccagaggagacggagaaggccccgccctccccggagcagctgccgagaggttggggcttcttgcaggccacccaccccagtgccatgtctggcctcagcaggcctgggttcagagaagggcaggtggctgtacttccgctcatttctccctggcagagaggtagactccaaccctctgcaggccccctggtgaggggaggccaggagctcaggcctctatacatggacttaatggactttttttttttttggagaaagggtttcgctctgtcacccaggctggaatgcagtggtaccatctcggatcactgcaacatccgcctcccgggttcaagtgattcttgtgcctcagtctccctagtagctgggactacaggcgtgtaccaccacacccagctaatttttgtatttttagtagagacgagatttcatcatgttggtcaggatggtctcgatctcttgtagctgggactataggtgcataccaccacacccaactaatttt

SEQ ID NO: 51168 - DNA, 1943 bp, Homo sapiens
ctgcacagagtctcaggcacttccttgtattatactgggcagattcagctccttgctgccctcagaaggtggctgcgtgtctccagcacatggtcttgtggtcccattagtggttcgctcacagggaaatgcagcctcctacctccccgtggcccccacgaagctctgtgtggcttcagttacacccagcacactggccgtatcatccctcacacactcttgcacacctgcagtcctgcctgcttccaatggctagaagcttttccactccaaacccagcctggcacccaggcttgtgggaggctccgcagtcagggagggagcccagctgcagtggtgggctccacacacctggacgcaccacacgcctttccctacacagtcatgcagcccattccatgctcttgagctcatgggtgtgatctcctccattgcctggagccctgggtgagccacgggtgctgaggtgcaggtctccccaggccttcagccgcgcccaccgcatcggccagaacaagaaggtgatgatctaccgcttcgtgactcgggcctcggtggaggagcgcatcacgcaggtggccaagcgcaagatgatgctcacccacctggtggtgcggcccggcctcggctccaagtcggggtccatgaccaagcaggagctggacgacatcctcaagttcggcacggaggaactcttcaaggacgacgtggagggtgggcctctgttccgagggagcgtggcaggggactggggtggcccggctgagacacccatccagggcttgcttgggtccctgcccgctccaacacacagcctctcttctgcaccccccacctgtatctcctggctaggacagcccagggtggtgtctctgggcactgcccgccaaccctgcagccctctgtggtcctgcaccagtgctttccttctctgtctgacaggcatgatgtctcagggccagaggccggtcacacccatccctgatgtccagtcctccaaaggggggaacttggccgccagtgcaaagaagaagcacggtagcaccccgccaggtaggggccaacccagcccagcctcagctcctcctccgaccaggtggctgctcctgcagaggaggggttccctgacctgccctcacttgggcgtcctgggactgccaggtgggcggcgagtggggctgttacagcgcagtttcctctgtctggtcaccatgcctctcagctgcagcccctgctggggatgggaagggccattgttgggagtctgttcctgggaccccggggctggaccagggcagtctttgtcctcacactgcatttgcctgctccccaggtgacaacaaggacgtggaggacagcagtgtgatccactatgacgatgcggccatctccaagctgctggaccggaaccaggacgctacagatgacacggagctacagaacatgaacgagtacctgagctccttcaaggtggcgcagtacgtggtgcgcgaggaggacggcgtggtaaggtccccggcccgccctccatccgcagccccgccctccatccgcagccccgccccccactgtgtccacgccttccactgtgaccccgccctcccgccgcagccagccctccaagctgtgaccccgccctccagccgcagccccgccctccctgctgtgccccgcactccagcgtgtgctccgccctccaaccacgtgctccggcctctgcagggcggccctgtcgctccacccgcgggctcaggactagagacacaacagtgagggaagggacggaggcagcgctgagggcagtacagccacatgggccggccactgcccttgcacacatcagccgcctgctccgtggcgtcatcccggctccagtccagcttccccactctctgaagtgcaagctgatctgccaccccgttgcacagagccctgtccccggg

SEQ ID NO: 51169 - DNA, 1049 bp, Homo sapiens
ggcaatgccagggctccctggttcaccagctagccggcctacatgggctaggcgctctgcaccctgcctcccctgccccggtcctctgctcctggctgttatcccagctttttgttgcagcaacctggagggcttcctggaggagtttgctgacatctccaaggaagaccagatcaagaagctgcatgacctgctggggccgcacatgctcaggcggctcaaggctgacgtgttcaagaacatgccggccaagaccgagctcattgtccgggtggagctgagccagatgcagaagtgagtgatgggctgaccccggagcagcctgtgctcgccctttcccctgggctggtctcctgggtcgattcccaggtgggcggagggctcttcagcctcactgaggtctcggctaatgctttgcatacactttcttcgtggggcctcttctcaggttttagtgaccagagtttgggtcgcttgagtgctggcagtgtcccccagtcacttgcagggggactccaggccggtggcttcacctcttgggggtcccttgggtctctctgtaaatgggtgcttggccaccagcttccagccccactgcagagcagagagagccctcatggaggcgggtctgacccagcctgcctttcctcgtgccctgctgcaggaagtactacaagttcatcctcacacggaactttgaggcactgaactccaaggggggcgggaaccaagtatcgctgctcaacatcatgatggacctgaaaaagtgctgcaaccacccctacctcttccctgtggctgccgtggtaggtttccccggccatcatggcagcttctccatgaccgccatggtaggtgcctgtggccgccatggtaggtccctgtggccgctgtgataggttctcctggccattgtggcgatttctgtggctgtcatggtaggtttccctggccatcatggaaggttgcctgtggccactctggtaggtgctggggaacttaccgtggaacccgctgctgtggtagggctggtgcggctgtgagccctg

SEQ ID NO: 51170 - DNA, 1128 bp, Homo sapiens
ggtactcaagaggaggcagtgaacaggaccaaggtggtgatgacaacctgggctcagagtcagagaattcaacagtcgggaaatttccctgataggagaagtacagggctgccatgggaggacactgtgggagcacttcagccaggctgggagtcagggagggcttcctagaggaagaggtgttccatccaagaactggagaagagttaggaagacagacaggagtgggaagagtgttccaggcagaaggaattgcatgtgcaaaggcctgtagtgtggactctggtggcccaggatctggggcgtgtctgaaccgctgcctcccctgcagcccacggtcaagttcgacaagcagccatggtacatcgactccacaggcggcacactgcacccgtaccagctggagggcctcaactggctgcgcttctcttgggcccagggcactgacaccatcctggccgatgagatgggtctgggcaagacggtgcagaccatcgtgttcctttactccctctacaaggaggtgggcaggcggggcaggcggccaggaggggtggctggtcctggccaagggcaggtggtctcacggcatcggcctctctctccagggccactccaaagggccctacctggttagcgcgcccctctccaccatcatcaactgggaacgcgagtttgagatgtgggcgcccgacttctacgtggtcacctacacgggggacaaggagagccgctcggtgattcgggagaacgagttttcctttgaggacaacgccattcggagtgggaagaaggtattccgtatgaaggtgagggctcgctatccttggaaggacggtaggaaggcccccggtctagttcagggaccacgggtgccgtgcactcctttggggtccctcagcctgggagggctaccgaggccggcaggctctgaggggcttgtcctagaggctgagttacagccatgtcagttttctggggctcctgtaacaaagtgtcacaaatggagtggcttcaaacagcagaaatgtattcggtcacagttctggaggctggaggttggaaatcaaggtgagggcagggccacgtgcctctgaaagccctaggggagaacccttccttcctcct

SEQ ID NO: 51171 - DNA, 1070 bp, Homo sapiens
caacctccgcctcccaggttcaagcgattctcctgcctcagcctcctgagtagctgggattgcaggcatgtaccaccatgcccagctaattttgtatttttttttcagtagagaaagtgtttctccaagttggtcaggctagtcttgagctcccaaccttaggtgatctgcccgcctcggcctcccaaagtgctgggatttcaagcgtgagtcaccgcgcccagcctcaaggcattttcttacagtctccctggttctatcctttctggcattcccagttcacagacgatgaagctgaggtttagctcgctacagtgacttggccaagtctcaggcttgcaaggggcagagcctccctggggagcccgggactcactggcaggccacgtaggattaaccgtgggtccctcaacttcatcctcggtaggtttgtggggtttgctctctagcagctgaaggccacccagggccccttcctccggccagccccagcctctgtccgtggtgctgaagttcatggcggcctctcttgtccttacctttgctggggtgagggctcagggagagcgtgtctctcagatctcctgaagggcggtctcttgaagctggccaaactctgacaccctcaacgggacgtggacatcactgtctcatctccacctccccaaaggaccgaggccgagcttgggagccgtggctccagggcccagcatctcctccagccttgagagcaggctcccagccagtggctgtgtcagtattcccggaaacacccgggttccggaaaagcaaagagcacagaggccctgctgcctggcagctggcagcgccgctgactctggaggcttaatgggctaagaggtttgggagcagggaggctggtgggcaggggagagggagcggggcttccaggagaggagggaagtgcaggcagcctgttggaaggggtgcttcccagctggatgtcagagggggcccccacctcccctgtcagtgaccgtctccccctccacgaactgttggatgtgactgtttggagccactctcctgggaaaaggcaggtcatcccc

SEQ ID NO: 51172 - DNA, 1044 bp, Homo sapiens
gacaactgaaaggggctaccaaggctgggaaaaaaatgcaattgttgctgtgagtgactttgaaagactctggtgccttgtggtgcccttctgaaattcaaacagtaatgcaaaagtgtctgcattagaatttacggtgtctaaaattcatgtttttaaaagagcttgcctacagatggtttccacacttgaaattgtgccctgcgagttgcatagctggaagttcaatgctcagtcctaccttggctcccattaaacatttggtgctctgtggattgagttgaacgtgttgaggctttgcaatttcacttgtgttaaaggctctggcatttttccatttctatgcaaatttctttgaagcagaattgcttgcatatttcttctctgccgtcacagaaagcagagtttctttcaaacttcactgaggcatcagttgctctttggcaatgtcccttaaccatgattattaactaagtttgtggcttgagtttacaaattctacttgttgcattgatgttcccatgtagtaagtcatttttagtttggttgtgaaaaaaccctgggctgaagttggcatttcagttaaaagaaaaaaagaaactagtcccagatttgaaaacttgtaataaaattgaaactcactggttttctatgtctttttgaactcttgtaatcgagttttgatcatattttctattaaagtggctaacacctggctactcttactgtacgaggctttgttttttttaaggactggcatgtgaagaaaagctttgtcctcacgaattagttgctgtaccaacagttacgttggtctttattaggcttagaagaaaagatgtcctttatttccacttttcttcccttagttgtgctgttttgccgcagtgagattcaggggttggctgtcactgaactctgtgtagaatttctccagatccagagtctggggatcaactttgccagcaaatgccgttttctgatggggaataggtagtgtcaacttgaattccatcacaaccatgacaccagctgcgcccaaag

SEQ ID NO: 51173 - DNA, 2305 bp, Homo sapiens
acaaaaattagctggacatggtgttatacacctgtaatcccagctacatgggagactgaggcatgagaattgcttgaatcctggaggcagaggttgcagtgagcctgggccacagaaggagattctgtctaaaaaaataaataaaagagtttttaaatgatccctgttgtggtgagtgtttagctctcacctggctaaagcagcaattgggcaggctgactgaaaggctttgtgctctctgggcgtgagcgcagtggcagggtggcattctgtccctgtgtgttgggtggtgagcaggagcgagtgtgtgcacacccctaagaagcagtcctcatcatccagacaacctcaaaagggggtttgactccgtgaggtgatgtgtgcgcagcgcttacagctctttggaaacccactattttctgcataaaaggtattgaggttgcgtacttaactgtaaatttctatcatgttatctttctccagtggtcactaaaaaccatgttataggtgtttgctgcattttcatggacaactggtacatctacttatctacttatctgctcttgttttttttttttgtttttttttttttgagatggagtcttgctctgtcgcccaggctggagtgcaatggcgccatctcggctcactgcagcctctgcctcccgggttcaagcgattctcttacctcagcctcctgactagctgggactacaggcgcccagcacgacgtctggctaattttttgtatttttagtagagatagggttgcatcgtgttagccaggatggtctccgtttcctgacctcatgatccgcctgcctcagccctccaaaatgctgggattacaggtgtgagccagtgcccctggcctagttttttttcttttttctttttttggaggcagtcttgctctgtcacccaggctggaatacagtggtacaatcttagctcactacaccctccgcctcctggattcaagggatcctcatgcctcagcctcccgagtagctgggattacaggcgtgcaccaccacgcccagctaatttttttatttttagtagagatggggtttcaccatgttgttcaggctggtctcgaactcctgacctcaagtgatctgcctgccttggcctcccaaagcgctgggattacaggcctgagccaccatgctgaggctattctaattgttactgccgatgtcgatggtacgtggctgataactcagagccttggctgggtgtatttgccttacctttgccatttttgaggcttgggaaaacaccttgaattgtaatgattttgagtgctgggttttataaatgttaaaatgttttagaatgcaagcaccaactgtctagtggagttcttgtgtcctttctctgcaggtatttgaaatatctcaccaaaaaatatttgaagaagaataatctacgtgactggttgcgcgtagttgctaacagcaaagagagttacgaattacgttacttccagattaaccaggacgaagaagaggaggaagacgaggattaaatttcatttatctggaaaattttgtatgagttcttgaataaaacttgggaaccaaaatggtggtttatccttgtatctctgcagtgtggattgaacagaaaattggaaatcatagtcaaagggcttcccttggttcgccactcatttatttgtaacttgacttctttttttttctgcttaaaaatttcaattctcgtggtaataccagagtagaaggagagggtgactttaccgaactgacagccattggggaggcagatgcgggtgtggaggtgtgggctgaaggtagtgactgtttgattttaaaaagtgtgactgtcagttgtatctgttgcttttctcaatgattcagggatacaaatgggcttctctcattcattaaaagaaaacgcgacatctttctaagattctctgtgggaaaatgactgtcaataaaatgcgggtttctgggccattcgtcttactttcattttttgattacaaatttctcttgacgcacacaattatgtctgctaatcctcttcttcctagagagagaaactgtgctccttcagtgttgctgccataaaggggtttggggaatcgattgtaaaagtcccaggttctaaattaactaaatgtgtacagaaatgaacgtgtaagtaatgtttctacaggtctttgcaacaaactgtcactttcgtctccagcagagggagctgtaggaatagtgcttccagatgtggtctcccgtgtggggcccagcaatgggggcccctgatgccaagagct

SEQ ID NO: 51174 - DNA, 1094 bp, Homo sapiens
ggagttggagaccagcatgaccaacgtggagaaaccccgtctctactaaaaatacaaaattagctgggcctggtggcgaatgcctgtaatcccagctacttgggaggcggagcaggagaatcacttgaacctgggaggcggaggttgcagtgagccgagatcgcgccattgcactccagcctgggcaacaagagctaaactccatctcaaaaaaaaaaaaaaaaaattgtaaagtcagctggggccaggtgggatggctcatgcccgtaatcctagcactttgagaggctgaggtgggaggatcacttgagtctgggaggtcgagacttgagcttgggaggttgagactgcagtgagctgtgattgcgctggtgagactctgtctccaaaaccaaaacaaaaaatgatattagttcagtgttgggagacagataaaatattctgttgagacagatgaacttgtcacttcattggtcaatttaatgatttctacaggagcagtttttgcaagaaaggatcaaagtgaacggaaaagctgggaaccttggtggaggggtggtgaccatcgaaaggagcaagagcaagatcaccgtgacatccgaggtgcctttctccaaaaggtacaggagggaagtgtgtgtgtggcctgcgtgcacccagtgcccagcccgccttttccctgcatgggagtgggggcacccgcagagtgattggtttgcatctgttaatttctggaactatgctcagtgcaggaggcagtggatgaatgctattatggttgttaacaatagtcaacttttggtggttttaaaattttgtctttcacaggctaaagtgttttatttttttttgagctggagtctcactccatcgcccaggctgttgtgcaatggcgcgatctcggctcactgcagcctccgcctcctgggttcaagcagttgtcctgcctcagcctcctgagtagctgagactacaggcacctgccaccatgcccggataatttttgtatttttagtagaaacgggggtttcaccatgttggccaggctgctctcaaattcctcccctcaagtgatccacccgccttggcttccc

SEQ ID NO: 51175 - DNA, 2887 bp, Homo sapiens
ggaagccatagtggtctggcattgggacctctgaacgaaatttcccggtggctacaaggaattttcccacttccccaaattagtagattcgatttccatcccactagctggtaatttacagtatagtgaatttccttatttcttttttcttcccaagactttcaaaaagtaaagccaacccctttatttatctttgggctcgtccagtctggcttcccccctccgatcgttcgcagtgggacagcccgccgggcctccttccttccccagaaaccctccaggcctgggagaggacgcgttttgcattcaggaaaaaccaatcgctcccctatcgtacataaccaagagaaaaggtggcggacgaggggcgtggcaaagtgattagtgcggcctggaccctgcgtgccttgcgcgctgcgggctctttgcgtctgcgtagttcgctcacctccctttctaactccgctgccgccatggctcctgtggttagtatggctccgcgtgaggcctcggctccaggggaggcacgtgggcctcgccgagcccggcatctacccaggctcgctggggacggcgccctgcagcgtcctgctggggtgggctggcaggtcggccggagcgggccagagcccctgccgatcccagcacgttgtaggcggaggaggccgcggcccgaggctcgtgagggagatccgggaggtctcggaggcccggggccccagctaggggctagcggggagctggagcctggagactgcggtctgggccggccactggtcctcggaccccggccgggggcctgattacctgggtggagggcggggaagaagaacgggacctgctaccctggggagccgcgcattcggaagtccacggccaagactcggggacgaatccgcggaagggcggcttggtcggcgtgctttcggagaggaggcctgggtttgaggagctttttagcgtccccagaggaaattagtttatcagggcgcactgtacagacccaaacgggtgttgcagtggtgtagggagaaggctctcattgcattctcctttagctatgctgggactgggctgtgcggcgccctcctcctaggttatttgagaaagttgtttttccgtgttcttcgtcccaagatcctacttttcctcttttgttgggactccctggttaacatttccggttcttctgctctttctgtctggttgggcttttgaatgccttttggtttaaaaccttgatggagaagtatcaagcccgttgtgggtaggtctcttgattgattgtgtgtgttcggaatagatcttaaagtacccctcttagattattactgcgaagagacgttgtaaaaaataaatcagtgatttttgtagtggccaaatgtttgaaaagttgatccagttaacacaagttttagatgaagttcttttaaacatgaagggaggtaagatgtgtttttggaaaagtctatttagttctgcagagcttttaaacgtgaaagtacaggttggtacgatgcacaagtgcattaatggtgtcaagtttgtagagagataagattaacacaagcttcttcgtaagagtgaagaaactggaaccttgtaggatgtgctttgccgggtggtttggaagtactaatgcatagatgaagcgaatcaaaatgtcagaagttcttgacggtagtgttgtaataagattctaggttttagccttaaccttgtccaagctggagtggacaggcacctagaatactttgcaactcccttcatgagaaggtggatgagacaggattaagggagatgagctaagacggatcaggaccctactctgaacatgtaggacaaggattgatttcatatgaaaattgtgggtatgcaaggcattttgtatgcctgcactctaattttggaaaaatagtatttttttgaaattgggaatgttagggcaaacaaaaggaagtgttcattttattgtggttcataaactaagagaccttcatgcctgtagagattggggagactggaaagtttgagtgagtcaagagtgctagaatgatttccccatcaaaagggcatgaccccaggccccaagcttgtacagcagcatctgccccattatacctctggcactcaggcagtgatgcctcttggccctctggcaaagggagcacacttccgttagttttgtatttgtatggacttttatacctatgacgtttctggttctgttaatcttgtttttccgactgactgaaacttcatctctgttatcatttgtgtattttcttagaaaaagcttgtggtgaaggggggcaaaaaaaagaagcaagttctgaagttcactcttgattgcacccaccctgtagaagatggaatcatggatgctgccaattttgtaagttacatccttattgccactcgggtggtcacgaacattttgagatactgttgagaaaacctactggggtacatttctgttttcaggcttataggcagcttcacaggtctggctgtatcatctcaccctgggaatgtgggcagattacttgtttgtttccaagtcttgtttcttcttgtgtgtgcaacagttgtgaggagtaaaaggagatgggcttagaataagcaagaagggctctagcacagaggtgttagaggactatcttgtttttctcctttagtttccacaaatgattttacttaaaagttacccagaaacaagccaggcacggtggctcacgcccgtaatcccaacactttaggaggctgaggcgggcagatcatgaggtcaggagttcgagaccagtctggccaacatagtgaaaccccgtctccactaaaaatacaaaaaaattagctgggtgtggtggtgtgcacctgtaatcccagc

SEQ ID NO: 51176 - DNA, 1232 bp, Homo sapiens
ccagctggaaggagcccaggaggcaggtcttagggtttcatggtgaaatgctgtctgacaccagggaaaacttgacgtactctgctttggagaggaattccaggggtagggatggtgggagaacattcccaccctgtttataatcccagagcagaagtcagcaattacttagggataaaagatgaactccattttttttattttcttaagacagtcttgctctgtggcccaggctggaggctggagtgcagtggcaccatttcggctcaccgcaacctctgcctcccgggttcaagcgattctcctgcctcagcctcctgagtagctgggattacaggcttgggccaccatgcccagctaatttttttgtatttttagtagagacggggtttcaccatgatggccaggctggtctcgaactcctgacctcaagtgatccacgcgcctcggcctcccaaagtgctgggattacaggcgtgagccaccacgcccagccaagatgaactccttaaggacaggatttggtaagtgattgacttctttttagttccatgatcttgagattatttttagctttataaatttagcagtggcagggcccgtggagaatcaggttaatgaggtaaaggctttctgggtatttgctgccaaggccacatcaccaattttctcgatttaaaaaactgtcaagagatttatttttccattgcaggttttaaagtggagattctgaagtggaaaataggtactgtcagaacaaagctacctggaaacagcatagagtgaagcctttcgtgagggcttgcaggccgctgctgagtggcagtttacagaagaggtcgcggggtgagcctcttagcaggacagaaaacaaggcagcagcgcacctgccaccccttcacgagctgctccttgagcctaaaaagtaggctttattcatcccttctgttcatttaccaacctgggggattgatacgaccggggaaaatgttcctaaaccaggaagctgcgttagccgatcaggctttgtaagatctcgccaacagctagctgcttaggagtacccccacgatacgcacagcacaccactgtcccttcactgcactttcttcctgccttaggtagttgggcttgcccaccctagtttgcttttgtagtggtttggcaaggttagaaggcctcggcctctctgtcatgctgggaagtgcctactctctgggccactgctgcag

SEQ ID NO: 51177 - DNA, 1056 bp, Homo sapiens
gcctcagtctcccaaagtgctgggattacaggcgtgagccatcgcgcctggccgccttatttcttgaaactgtttcttgattctttactcttggtcctagaaaaacttggccaaagaatgtgaatagatcttggaaaattcacgaagtgtttgggaaaagtctccaagtctttgggcaaatccagagatctctcaggcatcccatcagcaatgcatggtccttggtgactctggtgacccctaacggtataggtggggcaaatgatcacatagcatttacaatttttgtttctgaaacatgtaaaaccgccacattaacaatcaccttccctgggaacaaattagttatgactgaataatgtaatttgccataaatgcttgcttcctgtatatgtgtgtgcactagaaccaaagggttttccatacctttttgcccatagattttttttacattgtgctccagcacttgtgtgtgtatgaaaggaacatgtctttcctgatataatacttacacttactgtttacaaaatcctgttttctatcttattatttcaatactgttcataatgtactaaatgatttcatggcttagtaacaggctgcagcctgctatagagaactcccactgtagggtatccccagcaagctatgccagatgtgagggtacaggccccggagtcactgactgggccagtcctgattctgacattcactgcttggcctccttctcctctcatgttaaagtgggggcagctagacatagtggcacatgcctgtagttccccctactctggaagctgaggcaggaggatggcttgaggccaagagttcaagtccagcctgggcaatatagtgagaccctgtctttaaaaaataataaaattttaaaaaaaacaaagtggggatagtagcgtgccctcaaaggtttgccatgagagttgaacagggtaatgattgtaaagggcttagcatggcgctgggaacatagtaagtgctcaataagagaaggtgtgagaggtcaggacatgagcctggctctccgggtggctgtattgg

SEQ ID NO: 51178 - DNA, 1013 bp, Homo sapiens
cagcactttaggaggccgaggtgggcagatcacgaggtcaggagttcaagaccagcctggccaagccaggagttcgagaccagccttgccaacatagcgaaaccctgtctctactaaaaatacaaaaatgaactgggcgtggtggtgggcacctgtagtctgagctacttgagaggctgaggcaggagaatcgcttgaacctgggaggcggaggttgcagtgagctgagatcacgcagttgcattccagcctgggcgacacagcgagactctgtctcaaacaaaacaaaacaaaacaccagaaacaaaaacagccccttaaaaactccactttttgcaaacctgaggtagtagatgctgcagatgggtacctgtgtccactctcagacaggtgagaacagggcctcatagacttagggacagctcaggagacccagatgtgcacttatggttaacttggttctcttgtcccaacttaactctctttttgtctttaaataggtacatgtgctccctgtcattgttccactattctgaatacttggtgacagcagtcaataatcccaaaagtctgtccttggattcctttctcctgaatcacagcctggagtatacagtagctgctctttcttcttggttagagttcacacttgaaaatatcttttggccaggttcgtgtgccttatgtccccctctggaggggaaaagggtggctcccattcaggctgaggacagtgacattgattcacctttcaggtctaatctcccccaagcgattttccgcagacctctatcctcactaagctatttataaaggatgagctccgctcatgaattctgcctctggatattgactcgaggacgtgctgaccttttgctttaaagtttgcatcacatagtgcaccatctaatttgaagccccaaccttgagtagttgtgattctaattttataatcagatgatatttagacgtttcatgtaagagtttactggccgggcacggtggcgaacgcc

SEQ ID NO: 51179 - DNA, 1027 bp, Homo sapiens
aaggccccgcagtgacgtgggtggggctgggcgcacaggcccgggtgccctgacctcataaactaggcttaagcagttttcctacagccctgaatagtaatcacgaataataataataatgacagctaaaatgtaggtagcagttagtcttaagtgttttacgtgggtaatccttactgcagtcctaaaaggtaggtactgttatcccctggctgtagatggggaagcaagctcagagaggttaaataatttgggaggccacacagccagagagcggtgggtgcagaatttgaacccaggtcgcccacttctccctttcaacctcagcaaatcggctctatctgcttgcctgtgggttgcctattccgggaaggtcagcagcccagatctgtactctgaggactgtgaatgactgagcttctcttgggttcctttcagatagccatccgagcttgtttcctggggtttgtgttcggctgcggcacgctgctaagttttagccagtcttcttggagtcactttggctggtaagaattccttcggaaatactggttttcaggcgagggtggacagatcagagggtctgtagcggcatttcctcatccctgtctcatctgtgaccggcagaaggctgttcagggttctctggaaacgaagtctcctggcttccccctagttgctcacatttcagcccttgtgatttcgtgcctgtgggttgattgtgaatcaggcagaaacagatctccctggcacccccaaaggtgctgtcatccgcagctgtggtgacagcattccgtaacttgagcagcccttcccggaaggggtgcaggtcctcggtggcgggcaggggcagggctctggcttgtcttcatgggcctttttcatctctaatttctattaggtcacatctagtgcatccccacagccactgtaggatttttccctacactatgatttcagtcccttgagccttctagtctgacctggatatgaaccagtggcttcaaggtaaaaagttttatctcct

SEQ ID NO: 51180 - DNA, 1081 bp, Homo sapiens
ccactcagtggtggctgcactgctcgtaaatctgattaactatggtcttgccaagggaagctgtgctttataacagcacttccaggcccacgagcactatgacaatctgagtgtcttgctgcccgcagaacagctgttgcctcagaggcattccctgtttccccttccttactgcccccatgtctctgtcctccctcgaattccagggtgggctcagctccctcttccgagcctggccatcccaagcccaggcttctgccacttccgagtattgtgtttgagactcatacagctccattctgcctggaatttgtgaaactctgggctatgagttctgcttactttgtcgacatgttagacgttcttcactaaatggggcatttccgtcgtcgctgtctacgtgctgaaaagtccacacccttaagcccagtctttctttctttatgtgctgaaaggcatcagtgagatgccaggagtgggagaagtcactggagaagccccttggaagtccgcagcatgtcatgttcatttacggtgtctaagctgcttcactgatacaggcacatgttaagatgtgtattaggaataatggctttacaataatgcctattttagtagggattttctgcccacaatttgtaaaaaaatctaataattttaccaagcttaaccttctctcttttttttttttttttttttttttttagacagagtctcactctgtcgcccacccaggctggagtgtagtggcgtgatctcggctcactgcaagctctgcctcccgggttcacaccattctcctgcctcagcctcccaagtagctgggactacaggtgcccgccaccacgcccagataattttttgtatttttagtagagacgggttttcagcatgttagccaggatggtctcgatctcctgaccccgtgatctgcccgcctcggcctcccaaagtgctgggattacaggcatgagccaccgtgcccagccttaaccttctcttatagggcctggtaactcaccacgagtgaatgaataaaataaacaccacattgaaaacacgaactgtgattttatcgtat

SEQ ID NO: 51181 - DNA, 1042 bp, Homo sapiens
cgctggccgcacgcccgggcatggcgcacagcgaggaggtgcgtgcccgccagcccgcgcgcgccggctgcccgcgcctcggccctgccgcccgcggctcactcgaaggcccctccgctcccccgcaggcggcgctgcttcctgggaaccatgttcctaacggctgcgccgcggaccccaaggcgtccagggagctgccaccgccgcccccaccgccgccgccgcccctgccggaggccgcgagttcgccaccgccggccccgcctctgcccctcgagagcgctggccctggctgcgggcagcgccgctcctcctcgtccaccggcagtgagtaggggcaggttgaggggcgtggggcggcgctagccctgaaaggggagggaaatctagacaccgccccctccccagctgtcactgcccgggtccttcctcttctacatggtcttccggccacccctaccccattgagtacttgaccctaagagagggctctgggttgcttgaggtcctgccaaagcacgaccgggctgcacggcctggggcaagtcccttccccaatctgggcctgcctcccaccccctagctgtgtggcctgggcaagtcccctcccctctctgggcctcctcccaccagctagaaagggcctcccagctctggcgctggtgtttcccatgagctggtgctggtgtttctgatgagctggtactggagggacactcgaagtagaaccagcttcagagaggccccgcagctagccacccttccccctgcccgtctatcctgagcctctcttcctctctccacgtctttctcttgtccttccaagcagcacagacctgaagtcttcttagatatgccaggaactcttcctagccagtttctgccaggggccctgggccagccaaggcgtggctatgggggcaaagctgtgacccaccgtgtttccccctccctccccggtgacttccctaggcaaccttttttaagagctagactggtgcaggattcctgggctgcttttctgtagggtgggacagtgtcc

SEQ ID NO: 51182 - DNA, 1037 bp, Homo sapiens
ctgtcgcccaggctggagtgcagtggtgcgatctcgactcactgcaaccttcgcctcccaggttcaaatgattctcctgcctcagcctcccaggtagctgggattacaggcgcctgccaccacgcccagctaatttttttgtatttttattagagacggggtttcactatgttggccagagctgggattacaggcatgaaccaccgtgcccggccattttctttagggaaagcagggtggtacaaccctgtttggggcttgtcccagtctccacacacacccccaccagcttgtccttggaagtgagacagcagcctttctcagactctccttcaccggcccagcacctgggatctggttaaaaggcctgttcggatttaggaggtctgggcggggctgaggctcgcatttctagccagctcctgggtgaggctgctgatgctgctggtccaaggaccacactgagtagccaagagggctttggtctcagtcttagggacctgggctccattgctgtgctgccgccttccagctgccgatactgagcctcatccagcctcagtttccttctctgtaaggtgggctgatcagcaccagctggcaggatgagttgccttttattcatccaacaactattccccaaatgccatttatttttattttttattttttgagacagggtctcactctgttactgaggctggagtacagtggtgcgatctcgactcactgcaacctccacctcctgggttcaagcgattctcccgcctcagcctcccgagtagctgggactacaaatgcccgccaacaatgccctgctaatttttgtattcttagtagagatggggtttcaccatgttggccaggccggtctcgaactcctggcctcaagtgatccgcctgcctcggcctcccaaagtgctgggattacaggcgtgagccaccacgcctggcccccgagtgccatttatgtgccccacacactgttgtagcctctggagattcatggtgaacatatcaaggcctgctctaaggtg

SEQ ID NO: 51183 - DNA, 1148 bp, Homo sapiens
aatgacaggaacattcttgggtagagtgagaggcctggggagggaagggtctctaggatggagcagatgctgggcagtcttagggagcccctcctggcatgcaccccctcatccctcaggccacccccgtcccttgcaggagcaccctggggagctgtccagagcgctgtgccgctgtctgtggctggaggcagagtaggtggtgtgctgggaatgcgagtgggagaactgggatggaccgaggggaggcgggtgaggaggggggcaaccacccaacacccaccagctgctttcagtgttctgggtccaggtgctcctggctggccttgtggtccccctcctgcttggggccaccctgacctacacataccgccactgctggcctcacaagcccctggttactggtaagtacacacacccacacacgcacccagaagcctggggtcaggatgggtagcccagagtctactcaaccctgatacagaaggggaaactgaggcagggagtgtggggtgcagaggaaccctagaggagctgtaccagcacccaggtccaggaggcttgcctggtggctgaccgcaatctctctgtgtctgtcagcagatgaagctgggatggaggctctgaccccaccaccggtaagaacctcactgtgtgattctgggctgccttctggagctggaagatcaagccttactatgatccctggagcttggcacgcggccagcaccgggtagccctagtggacagaggtgttgggagcagagtcatcagtggatgagaccagcacagtgcctgccctcaaggggtgctcagtcagctggagttcagattcgtacacaggagctaacagttcaatggaaggagagccccatggtgctgggggacaagaggaaggaggcgggggcaggggactcaaggcagaagcaagagttctgctgggctacagtgagagcagggccaactgtgggaggtgtcattgcgggggtgtctgctgactgaaccagggactgtcccctcctggagaggcactgcgggtaaggggccttacttggcaagcagggctgacctggggcccctcttggcttccaggccacccatctgtcacccttggacagcgcccacacccttctagcacctcctgacag

SEQ ID NO: 51184 - DNA, 1477 bp, Homo sapiens
tccatcccaggctggcctgaggccctggaaacccgccctggggtggggccatgggggctggcagggggtcccggccctgaccacccttccctgaccaggcccctggccgccgccgcaagaacatgtcggagttcctgggggaggcgagcatccccgggcaggagccccccacgccctccagctgctctctgcccagcggcagcagtggcagcaccaacactggcgacagctggaagaaccgggcggccagtcgcttcagcggctttttcagctccggccccagcaccagcgcctttggccgggtatgtggccccatctgcccagggtcaggcagctggctggccatgacccctgaccctgaccagggtatctttccaggaggtagacaagatggagcagctggagggcaagctgcacacctacagcctcttcgggctgcccaggctgccccgggggctgcgcttcgaccatgactcctgggaggaggagtacgatgaagacgaggatgaggacaatgcctgcctgaggctggaggacagctggcgggagctcattgatgggcatgaggtgagtgcgggccacagtgctgctccctccttgtcccgaaaggaggacagccctcgggaggacccagtgatcagatgttccatgggacgccccaaagaggccactgttaccattagcccactttggagacactgaggctagatgaaaatggtgtgctgcttggctgttttaatggcagaggagggcccagatcttgggtgtcttaactgtgattactcatgtggtgtcaagggtgaccctgctcctcttgggacctccatgtccccattgggaaaatgagagttgcatgcaggttgcttatcctccccggccaccctaaggtgctccaggcctcgtgaatgacccatcctgccctccctctagaagctgacccggcggcagtgccaccagcaggaggcggtgtgggagctgctgcacacggaggcctcctacatcaggaaactgcgggtgatcatcaacgtgagtaggggctgcgctggtccccgtggccaccctgcccccctctttctgacagccctcagctgagtctgagcctttgcagaaggagcaggtgcctggcaatgaggtgggggcaggaaagtcagacaagggctgcgcccagggaggaggtgcctcctagaggaacctgggagggggcttcgggcaggtttgtcaggttcagctgaattagcacaggtgaggcctcattctttcactttcgttcagtggctgtttcccaacacttgctgtgtgctgggtgcccagcaggccacgccctggacgggacagagtgagctggcagtgtagggatttcggctcagggaggggagcacctaccctgggcttggagcttcctggagggaggaagcaccctcagaggtgaaatctggaggctaagccagggcagaggtggagaagggaattccaggca

SEQ ID NO: 51185 - DNA, 1287 bp, Homo sapiens
atcagacattcaggaccagatgctctggcgccttcctcaagtaaggctgatgggcagacctcttcccacgcctgtggctgtcctgactccgggaagaggccacccagcctgggccagcctccagggtgcttgggatcctagcccacaccagaccaggtaccgttcgatgtgactcccgtgttggccaccagagggcgcacagccctatgcgggcctggccgggttgaatccacgcgggttacctgtcacctggggtgagccaagggcggggaggccacaggcccactcgccgcccacgctggcgagggccacccacacctccagcctctgccctcctcgcttccctgcagggaccggaagagcacaggcctgaaactctccaagaagaaagcaaggaggagacacacggatgtgaggagccccccagagccggcagatgcgggttccctacagcctgcgcccttccccgagcctgggccttcctccgggatgggggtggggaggtctgcatcccagggtgcagaggtctgggagatcgctggggttccctttcttgctggggttcccatccgagaccggagggtggggagggtggggaggagggttgggaaggagggtgggaaggagggtggggaggagggttgggaaggagggtgggaaggagggtggggaggagggcgggaatgagggcggtgaggagaagctcacagcccccacccccaccatcctcccaggacccaagcaaggaatgcttcactctgaaatttgacctgaatgtggacattgagacagagatcgtcccagccatgaagaagaagtcactggggtagggcttgatggggctcagggtggaagtgggactgggagtaggggtggccccatgttgcaggctccgggtctctgcaggtgtgacgtgtgtgtctgtgtggtggcccgtgagcgagcgcatccctgcgtgggcagacccgtgctggtgtgcacgccagtgtgagggagtgcggtggggtctgtgtacttgtgcattttaatcatgtatgcaggagccaggcctgcgtgtgggcaggcgtgtgacaggtctgccgtggtatgcagatgcgcctgtgtgagcacctctgcgggcaggtgtctgtggacctgcgtgtgatcccatgcgggcttcccttttccgttgggaaggtgggggcagctggggctgtgggtggggcgggggctcgtgggggcggggcccaagctgaagcgactggccgcctggttctaacacacatgcctcctgtcctgggggcaggg

SEQ ID NO: 51186 - DNA, 1055 bp, Homo sapiens
cctaaggaacagtcccccacccttgctgagtacccaggcagcagcctcactcagggatggccagggcccaggcactcaggtgacctctggtgatccgccctgacccagccctggtggtctccacttgatgcaacctggttaccccacaccggtgggctccccacaagctggctttgggatctgccgtgtcttcaggaaggcaatctccagggccctgttgcccaaaccaacattcagctgtcttcaggccccacgcctgccctgtgcctgaggcacccatttccctacgtagcagcagctggtgactttggggcaagtcagttgacacaggccttagtttctctatctgttaaatggggattgtaacagtatctcctcctaagagtctttgagaagagcgaatgggattcactgcctggaactcccacgatggggtggcacatggaatgctcagtgaaatgcagttatctgcctacaggacagtatgggggtggaggtctggggcaagaccacccgatttgaagtaggaactcacctgcccagggccagcaggcccaaggtcatggatactaggaggaggaagagaccttcggtctggcagtggggaaggctctgttgactgtcggccacaggaagggatatcctggccgagccctttcctgtccccatgtccttctgtggcatgaaggcccttctgccttcatctgttcactgatctcatccccaccaagcgcacctactgtgcaccaggactgttctaagtgccgaggacacagtgagatgcagacggccaaggcgctggcttctggagaggacagtctggtagggaagaatgatgataaaaaagtgaacaaagaaatgaattacaggtagtaataaacactaagaaggaaataatttaacttaaaggaattgagagtgggagggtaagggtggtttattttaagatgagggaaaaggacgtcttagaggtaacatttaagttggggcccggtgtcagctgtttcaagatagggtgcgtggaattccagacagaaaatacagaggagaaggcc

SEQ ID NO: 51187 - DNA, 1052 bp, Homo sapiens
attttacagatgtggaatcgggaagtgtcacggccgaggctgcccagcttgggaggcagaagcctaaccctgaaccaagccctcccctgccgggggctgccctcagaaaacccctgcagtgggaaggggtcatccagggtggttgaggggagaaaggatgttcaggggcccgtggagcccccagcctgtgagcttaggcaggaaaagtgccccagagcctacgtctcccgagtggccgtggcttcctggcgtgggggtcgatggccgggtcctgccacctgtttctcttcctcttttggccccttactcagcgagaccttgcgggggtggaccctgcttgggtcctccctcacttggcacttccgctctcaaggaaacagctgtagtttgcagaggactcgccccctccccatgtccaaggccattgccaggaacgggatgaagcgggcccttgtctttagcccctgtccctctgcctgtcctggttccagccccaggccaggggatgctcactggagcacagaaggaaccagaggtgggacgagaggcaaatcttagggtctccgggcccagggccacagctcccagccccaggggcagcccgcgtgagggcacaaaccaattgtctctgctcccctgggatcttcctgtccagaggccgtgaggcttccaggggactgagtcccccgagataggtctggggctgtgggagagcagccctccagctgagggcccgcctgcctctctcgggcctctagctccctgtctgtacccagcagtgacttcgagaggcgctacaggtgggtgaggagggccaggcctagagcggggtgggcagtgcggccagcagtgtgtgtaccgctctggggctcagccctggctctccctcttcctagctctgtgtggccctgggcaagttgcctgtcatggcctcagcttctccatctctgtggtggggacagtagcacctgctattggggatgaagtgtggattggagatgatgtgtgaatagtgcttgctcagtatggcattgggccatggtaagtggaga

SEQ ID NO: 51188 - DNA, 1867 bp, Homo sapiens
tttatacagactttgcattcagaataactccaagaaataggtaactaaccctcatttggctgaagaattatttttccttccgtcgaaaaagacctgccattctcaattcctctaaaggcctgagtcctctaagatcttcaggtccctgtcacagctgtgcatgcacaaagacgaaccagttgttttctgaactgttatgttcccagtggaaatatccagaagtgtcccctacctctggctgccagcaactttgacttaaaggagagtctttacacttcctgtttttccagttggggtccgtcaagggggggcagtgttggaaagcccagtactctgtgaaaatgtgacctctgtgatgacaggtgtgggaggtggccgttgagggttaaatgtctacttaccttgttgtgatttgcctttcagagagtcacataacaaaattcttcgagatctgtccatcttgagttaccttagccagctgcagcccccgatgcccaaaccactttctcctttacatagcctgacaccctatcaggtaatctgaacttacaggagaaattgtcttcattttgttacacacttgtgtggttttctgtgtgctgggcgctctcctaaccactacataactcctcgctcatttaatcctcagaacatcccagtgacacagcttgtgtcgttattcccactttacagatggggaacctgaggtgtagagaggctgagggactcagcactaggggctgggctggcatgcaggcccaggcagttcagctccagtgactgctcttagccatggttctgtactgaggataagtgtgggtccgtgctgggtttgaatgtcccatctggtcgcaggggctgctccagcacttccacttttccgctgtagagcaggggtgctactgggcctcagagagtgaacgtgtggattcagggagcgttcacagtggaacctggcacccagagaacactcttaaagtacttcacattagccgggcgtggtggctcacacctgtaatcccagcactttgggaggccaaggcgggcagatcacgaggtcaggagatcgagaccatcctggctaacacagtgaaaccccctctctattaaaaatacaaaaaattagccaggcatggtggcacgtgcctatagtcccagctactcaggaggctgaggcaggagaatcgcttgaacccaggaggcggaggttgcagtgatctgagatcatgacactgcactccagcctgggtgacagagcgagatgccgacttaaaagaaaaaaaaaagaagtacttcacattactgtcatcaaaagtagattccaccaccagagtatttgcaacttggaatccaggctgctaataattgttttgggaggaaagcatgatagtgttaggattcgggatgatgaaaaaacaaaactagcggcaggtagcacttctgaaatgcttactctgtgcagtactctgttctaagcctgtgtaactccactacttaccgtggtcctgttattatccccattttacagatggtaaaagcaaggccagggactgggagtcagcttgcccaaaatggtgtagtcaaagttgaggctaggactgaagccgcaggacgcccgactctgagcccaggtctgtgctctgccgcacagcatgtccggttttgagcgcttgctctgtgccaggcactctgcgaagcatggaggggctcagtgacttcatggccaccctgtgagagaaaggctaagacgtgcttcatttacagctttgagcattgggcattgtcaggtggaagcatttgccttaggtcacataggctgaagcggcagacctgggcagcaaggatatgtttcttgggcccgatggtg

SEQ ID NO: 51189 - DNA, 1024 bp, Homo sapiens
gaaagaaaattagaggctatatgtgaagggcctcttagaacagagtcattgctgtattgctataagacacacatggctattcattgccctttcattgggatagaagccctgtgagggtggggatgtttgtctgttttgtttacagatatgtcccaaatcactggaacaagcccagcagttagcagatttgtgtgttcgctgaatgaatggccatgttaggacataattggcattagccatttatgtgaaagtgagcatgtctttgtgttaagttgaaagcttagatttccaaaaaatggaattagagtgttcctgtaggtaggatggtctcagatttcctaaggttctttgtcagtgataacggctgaaacaaaaccctcaccaccttttaagtagccaggattgatcactcaccttactcatctgattactcatctttatctttttaggaccacctttcactcacctgaggactccacagaagatggtatattatgggaaaccttcttgtaaaaacaactatgagaattatattgacatagtgaaatatgtgttcagcgcttacaagagagagtcccctctcatcgtcaacactatgggatgggtttcaggtaagcctgcatgtgcacatctgcaagggaaggacaggcagtgtgagtactgttggtttcagacattcacgttaaagcccagtgttttgttttttgtttttaattgaggcagggtctcactctgtcgcccaggctggagtgcaatggcgtgatctcggctcactgcatcctctgcctcccaggctcaaacaatcctcccacctcagcttccagagtagctgggaccacaggcgtgtgccactctgcccagctaatttttgtagttttagtaaagatggggttttgccatgttggccatgctgatcttgaacttctggcctcaagtgatccgcccaccttggcctgtcaaggcatgctgggattacaaacatgagccactgtgcccagccgaagtccaacgtattgatggtttc

SEQ ID NO: 51190 - DNA, 1069 bp, Homo sapiens
tagccgggcgtggtggcacatgcctgtaatcccagctacttgggaggctgaggcaggagaattgctcaagcccgggagacggaggttatagtgagccaagatcgcgccactgcactccaacctgggcgacagagcaggactccatctcaaaaaaaaaattcagctgggctcagtgcctcaggcctataatcccagcactttgggggaccgaggtgggcagatcacgaacgagatcaggagatcgagaccatcctggctaacatggtgaaaccctgtctctactaaaaatacaaaaattagccgggcatggtggtgggtgcctgtagtcccagctactccggaggctgaggcaggagaatggcatgaacccaggaggtggagcttgcagtgagccgagattgtgcactgcagcccagcctgggcaacagcgtgagactccatcgtaaaaaaaaaaaaaaaatctgaaagagcaagttgttatccgtgttacaaatggacattgtgaccatgcctgcactgcgtttctctggactcgtttttaaacagcgattgtcatcttgaggcttcacttctaaagtgctgtgtgtggtggattatgcctgcgtgtcacatgaaatctttactgtgtgattatcctttctactgagtaaagctagttaggattttctttcttttttcttttttaaaaatttgcagtcttccctgcgttgactatttggaatgtgatctgggacagacagaatttacccctcctggttgcatttctttgcttaatattacagaaccagttctgggtatgtattacatatttctcaaatgtcttggttttatgaaattcatatgtgatgatgctaacaaaaactcagaaatcgaagagtataaaatattaaaagggaacatgcgcctaccaaactcatggtctttccataacttgttcctctaacctccaaaaaacaaactatggtgctttctcattttaggaaatggaactgctactcattttgttttatgaaattagttgggtatggtggcaaaaattattttgttttatgtaaattagaaacacatg

SEQ ID NO: 51191 - DNA, 1110 bp, Homo sapiens
ccctccgccgtccgggatcctctcactgtgccgggccagtccgttcgctctcatcccatgtctcctttccccaaacttggatttttctcaccaggcccttcttcacgaccctggccccccatccagcatcccccctggccaatccaatatggcccccggcccccgggaggctgtcagtgtgttccagccctccgcgtgcacccctcaccctgacccaagccctcgtgctgataaatatgattatttgagtagaggccaacttcccgtttctctctcttgactccaggagctttctcttgcataccctcgcttaggctggccggggtgtcacttctgcctccctgccctccagaccatggacggctccttcgtccagcacagtgtgagggttctgcaggagctcaacaagcagcgggagaagggccagtactgcgacgccactctggacgtggggggcctggtgtttaaggcacactggagtgtccttgcctgctgcagtcactttttccagagcctctacggggatggctcagggggcagtgtcgtcctccctgctggcttcgctgagatctttggcctcttgttggactttttctacactggtcacctcgctctcacctcagggaaccgggatcaggtgctcctggcagccagggagttgcgagtgccagaggccgtagagctgtgccagagcttcaagcccaaaacttcagtgggacaggcagcaggtggccagagtgggctggggccccctgcctcccagaatgtgaacagccacgtcaaggagccggcaggcttggaagaagaggaagtttcgaggactctgggtctagtccccagggatcaggagcccagaggcagtcatagtcctcagaggccccagctccattccccagctcagagtgagggcccctcctccctctgtgggaaactgaagcaggccttgaagccttgtccccttgaggacaagaaacccgaggactgcaaagtgcccccaaggcccttagaggctgaaggtgcccagctgcagggcggcagtaatgaggtactgtgcccagggtgttgggactggggagacaaatagagggaatagacacttttttggtataa

SEQ ID NO: 51192 - DNA, 1060 bp, Homo sapiens
cttgccacacagtaccccacagctatagaacgtggggaccaaagcctcctggacacagaccaggctgcttgaaggaagggccccaccctcctcagacccccaggcgtgctcagctacactaactgggcccaatccttgattctgcccaacaaggccagccccgtgggccctgatcactctactgaactccagaagcttagtaatgaattctatctccagaagccggtatcacctcagctctaaaataggaatactggtgctctaactggccagcgttccccactctaaaatcctgcagtaatgaggaacagaatacagatgtggagagcagccaaggccagaggtttggcccccaaaggaaccccatccaagcctcgctcagctgaggtttcctgacaggaggggaagctgccagctgagctgaggcccacataggaccgggcagggcactactctctcctgaaggcgtgggtgggaaggcagcacttccccaactccaggacacgggaacagactgtcaggctgaaatacgagagtccaaagccacacggtttattgaggggtggggccaagtgggctctggtggccagaatgggctatgtgtcacagtcctcggggacagcagctgtgatgatgagggagggctccaggacacctgggccggtgaagctctcctctgcacacagtctctggccggggagctgggaggccaggccgccctgggccagggactccacaatgacctccgccgagcccacctccagctctgcaggcggctgcagcgccaccaccaccatcttctcgtcctcgatgatcaggttgcggagcttgcgctgccgcgggttgtagttctctacccggtcgtggatctccatgtgcctccgcaggtgggcctggcggggagggtgagctcagaactttgggggatcctagggtaggggaaggggcccaggccctggcctacctgtcgggtaaacttgtagccacactcggtgcactcaaacttcctcacccccttgtgccgtctgacgtgcacacgcagttgctccacggctgcaag

SEQ ID NO: 51193 - DNA, 1055 bp, Homo sapiens
gcccctgtggaactctgggttcctgttttctcagtcttttttgcggctttgctgtggttggcagctgccgtactccaggcttgtgtcggccactcagatgagggctgtggtgcgagccagtgcaggagagctgcgcttgggattgtgccctctcctgtgtctgtcctccggacctacccaggtctccaccatcaggaccctgtctttgggtttagaagaccaagtatggggaaaaccaggcaccagcctctgcagcaatgggtccctctagcctgtggacaccagctgggggatccagggtcaggccccctcctctccccagtttccctctgctgtgggttctgggctgtcatgtctccaccacttaaggatgtctttacactgacttcaggatagatgctgggatgcctgggcatggccacatgttacatgtacagaactttgtctacagcacaaattaagttatataaacacagtgactggtatttaatgctgatctactataaggtattctatatttatatgacttcagagacgcgtatgtaataaaggacgccctccctccagtgtccacatccagttcaccccagagggtcgggcaggttgacatatttatttttgtctattctgtaggcttccatgtccagaatcctgcttaaggttttagggtaccttcagtactttttgcaataaaagtatttcctatccatttggagtcattgcctttgtcctcctgctactgtcttctgggactcttgggctgaggacagatgtcaggggaacaggcagcatggagcccagggttcacactgagggtcttaaacagccttccaggccctttctcatctcagattgtagcaagtgatgaagcgttggaaaagacatgccccagaggctgggtgtggtggctcacacctgcaatcccagtgctttgggaggctgaagagggaggatcacttgagcccaggggttcaagaccaccctgagcaatacgggaagaccttgtctccatttaaagagagaggcctgagaagtaaatgctgtggaacagatga

SEQ ID NO: 51194 - DNA, 1062 bp, Homo sapiens
gtagatacaaaaggatattcttaaaatttttatagagacagggtcttgctgtgttacccaggctggtctcacactcctggcctcaagtgaccctcctgtctcagcctcccaaagtgctaggattataggcgtgaaccaccacgcccagctggttcctgaggaagtcagtgtgggaatactttttttttttttatacggagtctcgctctgtcacccaggctggagtgcagtggcacgatctcggctcactgcaagctccatctcccaggttcacgccattctcccgcctcaacctcccgagtagctgggactacaggtacccaccaccacgcccagctaattttgtttgtgtatttttagtagagacgggatttcactgtgttagccaggatggtctggatctcctgaccttgtgatctgcctggctcagcctcccaaagtgctgggattacaggcatgagccaccatgcccagcccactgtgggaatacttgtgttgagcacttgctgtgtgttctgaataggacaaccagggtccaccccttctctctgggcttgttgagaagaggggtgcccagcctgacagtgatgggacagggaggcttcagtgccatttggccatgtgagcagtgttagtctgaggtacacatcatattgcctacagccttctttcctgtgtgtctgttaacatttccaaacctacactccgtgacatccagcctcacagcttacatcacagcttaatgtcctggcatttaagagacccagcgttctgttttccccgcagtaagctgcacatagtcatagcgaatttgggaaagatggaaggaatcatccagcctcgcggttcagagcccagctctgccactgtcagccatgcaagcctcagttttcccatctgtaacatggggagaacagcactgctcagcccagagggccactgcagagattctgagagagaacgtaggaagcgctgctcggcacgacctgcacacggggaggcctggcgctgcagcgggcaccctcatcaccatagggaaggcccagctgcctccggggaggc

SEQ ID NO: 51195 - DNA, 1132 bp, Homo sapiens
ctcgctggacagtggtcagcgtgtgctttgccttagccacaacatgtggcctgggcttttggggagagggtgtgcgtctggggtgaagcccagtgatgttaattcctcccaaggcagaggcccttgcggaagttcgggagggtgcaggtgggtgactcacctgagtgggctgatcttctgcctgtcatgcgtcctggcaggtgggtccgatggctcccggctctatgactgcgtgtggaggtacaactcaagcgtgaatgagtgggcggaggtggcgcccatgctgaaggcccgcgagtaccacagctcctctgtgctggacggactgctgtacgtggtggccgccgacagcaccgagcgctatgaccacaccactgactcctgggaggccctgcagcccatgacctaccccatggacaactgctccaccactgcgtgccgtggccggctctatgccatcggctccctggctggcaaggagaccatggtgatgcagtgctacgacccggacaccgacctgtggtcgctggtggactgcggccagctcccgccctggtccttcgcccccaagactgcgactctaaacggactcatgtactttgtcaggtgagttccaggtgccgagccccactgtgtgtttggtgtctcttaccaggccctgtcttaagcacacatcatggctgttctcccttttccacagatgagaaactgaggcctagctggggttggaggctgggtctgtctctttgtttttgttttgttttgtttttgagacggagtctcgctctgtcgcccaggctggagtgctgtggcgcaatctcagctcactgcaagctccaccttccgggttcacgccattctcctgcctcagcctccagagtagctgggactacaggcgcccaccaccatgcctggctaatttttttgtattttttgtagagacggggtttcaccgtgttagccaggatggtcttgatctcctgacctcatgatcggtccgccttggcctcccaaagtgctgggattacgggcgtgagccactgcacccggtctgtttttttttgttttgttttgtttttttaaaagaagagtttcgcttttgttgcccaagctggagtacagtggcgcgatc

SEQ ID NO: 51196 - DNA, 1574 bp, Homo sapiens
gtgctcgtgggcggctgcgaccaggactgtgacgagctggtcactgtcgactgctacaacccgcagacgggtcagtggcgctacctggccgagttcccagaccacctgggcggaggctacagcatcgtggcgctgggcaatgacatctacgtgacgggtgagtgggccaggggctgggcaggctctctggggttgaacctcgccggtacgggagcccagctattcgcgggggaagcgcacagagcctggaatcctaggggcgcacctgagtccaagctggggctctggtgactacatgtctctgggcgatacttttaaccttgaagaagggccccttgtgtgagccgggacaagtagctgcttgtgggtctctgtgccccgtgcggccggggctgccaggctgagccaactccgtgcccaggaggtgcctccccacttggttggaagatactggggcattcaccccgcacaatgggtgctttctttttctccttaaggaatccagggacgggcaggaggccgacgcccggtgaggcatctgttccccacaagccggggaatttctccctccctgctgagccacaccgggccccctgactcactctttgtcacccggtgacaaggttcccttgggcttgcacctaggctctgtgctctggtcacatggtgtttaggctgaactccccggagcctgtaaacatggtcacatgttaagaggttttcttccagttacttggcccaaaccccaaaacactgccgagtcatggtaggcgggtcccagtccgcctgagtttgggcttctacggtttttattaaagataaatcccagttcaaacacgaggctacctcctttgtcggggtgaggaagggcggtctctgtgactgctatataaggaaagaacccaccaggcaggcgtgtgaggcggttatcaggcaaggaggtggggactgggatgtcacagctgctgtgcccagccttgcatgttcgcgagagagcccactctgggacgtgctccgagttccagtggggctctgaggtgtcaggtgggacagttgctggattctgttgccacagcttccttagcctgctgctctgagtccagcctctgctgggttctgccagaatctgtgcctctttccaatccaaggttgtccccaagttgattggggaccgtgtccctcccctcttctgaaagtctgaccagtggctttgagcagataatttcttcccagaactggccacactggccccagctttctgcacacccttccataaatgtcccagcagagcagttaatcccttgggtttaggcaggtggctggttcattcctttcagctgcctttcacacagctccatggaagggaggaggccggcagagctcacttcctaagaacaagaacttgcttttctccctttagagctcagggctgtgaaacagaatgtcttgtccgctctgtcctgtggcgccagcctgggaggccaaggggtacagcccccaggatgcttggggtcccttcatgtcctggggtttctaatagacctggtgtaatttacgattacagccagtaccac

SEQ ID NO: 51197 - DNA, 1065 bp, Homo sapiens
ggccggcgcccttgggaagtctggcgtgaaaggaggggtggctttggtttcagggccgagctcgcctctcccgggttgggttcagcagccgggccgggtgggtcgtgggcaaccccgggaggcccccggtcccggcgcgcggcgaggccgccctcggacctggcacttgtcactcgctgtccccggcccgggcgtcagcggggagacgcagaagggcggagggagggagccggccgcggacagcggtgactcagcctgcggagccgggggcgggcgccgcgcgggggacaggcgagcccgcgctcgcggggggcggtggcgcccggcacagaggggttaagggggcggtgcagacgtctccccgcccatcccgcccctcgagagccgcggcgccccgccctatttatagcagcggtgcctagcgcgccgcgtctctccgcaggccccggccgcggcgtcctcgacaacctatcgaaggcgccatggagcgaccggcgcccctggccgtgcttcccttctcggaccccgcgcacgccctgagcctgctgcgcggcctgagccagctgcgcgccgagcgcaagttcctggacgtgaccctggaggcggcgggcgggcgcgacttcccggcgcaccgtgcggtgctggccgccgccagcccctacttccgcgccatgttcgcggggcagctgcgcgagagccgcgccgagcgggtgcgcctgcacggagtgcctcccgacatgctgcagctgctgctggacttcagctacacgggccgcgtggcggtaagcggcgacaacgctgagccgctgctgcgcgccgccgacctgctgcagttcccggccgtgaaggaggcgtgcggggccttcctgcagcagcagctcgacctggccaactgcctggacatgcaggacttcgctgaggccttcagctgctcgggactggcgagcgcggcgcagcggttcattctgcgccacgtgggcgagctgggcgccgagcagctggagcggctgccactggcgcgcctgctgcgctacctgcgggacgacgggctgtgtgtgcccaagg

SEQ ID NO: 51198 - DNA, 1522 bp, Homo sapiens
gggtaacatgggccttcaggatgaccccttggaactgtgccgagttccttaaatctcagctgggatcctggacctgggaggcccctgtgagggccagctctggaaaaacctgggagttgatgccggaggctgtggaagaactctgctcgagggcagggtgccctggaacactggtagttctggggctgggagggagaggggctccggctttctctgaaatgaacactgctcttcagcagttcaagtacttgttctcaaaacattttctaattgattggtaggttttcataagcattgtttctttaaggcatggaaagggaagaatgctcaagcaagtcatgtttgttttcagtgggatgggcccgcgttctcactgctgggggcttccccttcatgtggcacctttgtgccaggccaccaggcagactcttcccaccttctcccactgaagcaccaaggggcttgaaccgtaatttggctaatcagaggcattttttttgtcctagtatctttcacacttgtccaaccgtcttatttttttaaaagttctgttgcttgtattaacacgaaactagagagaaatagtttctgaagccagtttattgtgaagatccccaagggggaggttcggtagagaaaaatagtaagctggtttagaaactgacgagggcaaacagccaggacgcattggagaggaatttgccaaagatctaccctgagataacgcctgtccagtgtcttcaccacgtgaataaccagcgctccaaagtgtttttctgctttgaaaaaaaaaaattccacaagcttttaaaggtgcatttaagaatccatgtgactttagaatggaactgccggccctggcaactgtcacgtgtgctagaaggttcgatgcctctggaatgcatgtgatactcatctccattttgtttccttgattgcatttttgttcttttagcagatctgtccctgtgggtggtgtctaagaagtcggacaccttggtttttgtgttagattgagctgggcagctgcaatcagcttctttatatgcaaattaggcacgacccatctgtggttcctggttggtggctaatgaagtgaggggagggagggatgtcaccccaaaagtaggccctcccattggctttggccaggccagacacttcacatcgtttacatggttctgtgtaattttaaagtttatgtgtataaagcgaagctgtttctgtgaaactgtatattttgtaaataaatatattgctactttgaggttcatgattcaaggttcaggcgattgcgttctgtgctgaaggacaattgtgtttcttttctccttgctacctccccaaagcatgattacatcaagtctctgggaaggcagcgtctcagtgtgcacttagcaggatggaaaatgcccacggtgttaaggtaccttgctggtgaattccttagaaacaaaccacaggacgagtagatgtgaatggtttttgcagtttcttcatcagattgaggattagctcaagc

SEQ ID NO: 51199 - DNA, 1337 bp, Homo sapiens
cctgggagcagagacgccaactagcccttgacccatgattcactcagagcccatgatttgtgccctaaaaggggggctggggccctttcacaggtagaattagagtgagcgcgttggaaactgcggcttgagtggcgggggatgaaagcagacctctacgttccagcagcagttgattttcagcagcgggtgctctgcctcgcctgggcccagccagctgctggtccgggtgactgctgagccccatcagtagaaaggtgcatgggaatggccaccttctgatcacctgcgtctgtcttttcctttacagcccacaggatcgatacagatggataaactgccaagaaccagatttttaaaaggccgcaaaaaatcttttcctgggagtctacaaatttggaaatgaaaaaacccagacatcagatgtttttattttatattattattatagaaggtggtaccattatcaattatgtgaagggacatgcagacaccccagcttttgagggtgctgggggtaggactgaggcagccccactgggaaccagactgcagcctggcccatggctgttttcccaaggatcagttcctggagggaagggctctggccctgactccgctgtgtcccgagcacacgtgctgaccgcagcccgccgccctgtagttcttggctgggtctggaggtgtctgtggagcaccctgccctcaccacaggagcgtgagccacttctgcagtccacgctgaacatgggaaacaacctgaaaagcaggcaggcctcccggtcagggagcctctgctgtgctggcttcccatgaccacctcctcttgctgaaatattactgcttgaatctggagcagattgcgggtttataaaactgctttttatctgagaacaaacgggtttggaaattagtcgtcttttttccccactcccagagctgctcaagtcattccaccggccccctcggcttgggacagggtagtgtaactcccgatcccagggcctagccctgacacaggtggcttcccgtatcccggtgggaaaacgccctgccaccagcgggcttgagctggcctgtgtccctccaccgcctgcaccacccacctccagagtgcagtgctgggcaagggcagctcaagaggacaggaccaggcgcttggcaagacatcagacacacccaacccaaaggcgtggaccccaggcccggcccgtggtacccagcaggtggcactgcagctccccgctcctgcaggtccagcgtcctcacaggaacaccagggcctgtgctccggagccttccttcagacccttcctccacgtgcccacttgggatgc

SEQ ID NO: 51200 - DNA, 1051 bp, Homo sapiens
accctctgtctccccagctgggaatccctcactcctttgcactgatcagctatcagcacaaattccaagatgacgatcagactcgtgtgaaaggatccctcaagtaagtcctggcctggctaaaatggaagcacactggtactgcatgcgggtcttcacagtggaaccagttggtgtaagacaccttgctcgtgtgaatatctacgtgtgtgtgacatttttggagagcttcctattttgaggctgtgggggatttaacactacagtcccagcccttgaggagcttagagagtgttgtggaagaactagaccatgggtgtcccaactttcttctgtcatgaatctgctccctgggggtcgaggaggctggagggagggaagggaaggtacctggcctcttctcaaatgacagctgcccctgaagtgatgaatgaggggcacaggcacagaccgcgttctctccctgcagagcaggcttctttgggacggtggtggagtacggagctgagaggaagatctccaggcacagcgttttgggtgcagctgtcagcgttggagttccacagggtgtttctctcaaagtcaagtaagttgaacttaggcctttcgggtcaaggaatgcctgtcaccttcactcaaccaggctttacccaagttaaggctgaaatagcctttgcattgtaattttgttcttaaagacacagttgcttggctaggtgcagtggcttatgcctgtaatcccagcactttaggaggccaaggcggccggatcgcctgaggtcaggagtttgagaccagcctggccaacgtggtgaaaccccatctctactgaaaatacaaaaattagccagacgtggtggcacacgcctataatcccagctatttgggaggccgaggcaggagaattgcttgaacccgaaggcggaggttgcagtgagctgagatggagatcgtgccactgcactccagcctggaggacagtgagactccgtctcaaaaaatataaaaaaaaaaattcagccaggtgccgtggatcacgaggtcaggagat

SEQ ID NO: 51201 - DNA, 1109 bp, Homo sapiens
ccaagcccacactgaaggaatcagcatgccggcgaagaagccaccagccgtgatttgtggatgagccaggtgattccagcgtgcagtatgagcaccactgtcttggactgcttaatatgagaccctccgttggtgattctgacttgcactcctcggcccccatccattctaacttgagtggggttgcatctgctggcataggaatgcagacagtcaggtgcctatttggttgtagctaaagttagggcggctgaggggagtcgggaggttactaggaagattctggctaggaccctccccctctgtgtggatagaggcctgacctcctgcttttttttttactgggagctggcccagggatgcatagacgtgacagtaagtgaggtcttagccaggcagagaggaagtaacagaacagctgagagcaggtgctatccaggacctattctgtctctgtgtctctccagctttgtgacaacaaactgtgctctgcagttttcatcccgtggaatccgacccggcctgaccactgtcctagctcggaacctagacaagaacaccgtgggctacctgcagtggcgatggggtatccagtcagccatgaacactagcatcgtccgagacactaaaaccagccacttcactgtggccctgcaggtgagccgagcagccatcatctcctgcagacagagctctgggaggacccctcctcccaagcactcagtgctccccttaaatcctgcgtcctgatcaccactaagtctaagcccatacagggccctgaggggcaggctctcggtgctcacactcgagtgacctggtggaaccttcgagtatgaaatgcagttgccttcaggcgcctggggcagctttgttggatcatcttaaagcagaacaacatcttaatgtctggtgggagccacccacggaattgggggcgggcagatgaagccccatagcagaatcatgccctcggacgcccctgtggccacaccagggctggtacatgagaagccccacacgggccactgctccttggctctcaccagccgctgccacctaggagcataggctcagtgtcaccagagttttttatttcttgtgagaag

SEQ ID NO: 51202 - DNA, 1300 bp, Homo sapiens
gaaggtggattaattttaaagtctcccatttgttcataatttgtgctgctttatctttgaaggtatttttatttaaagagttttagggtagttttgtggtataaggttgtttaccaaaaaatgtttaatccatgtagctcatttctaggtggttttgtgcattcttgggtcctgtttggtctctgaaaatcaaactgtctagctcttactcctttgactaacacttttgtctttggcgtgtcattgctctgcagacatgcggaccggctctcctggtcaaatgatgttttctagctctggacgtctgtggtgctctgcagtttggttcggactgtgacattcatgctttgtgggcttcctggtggagtgtcctacctaaacccagtgaaccctgaagtcaaatgacttgttcaattaaagcgagctggctgttgaagtgtagcattgtctttcattccacaaataccacccgttctgctgacggcttgtttttctgccccagggaacgatcagcgttggagtagatgccaccgacctttttgatcgctatgatgaggagtatgaagatgtgtccggcagtagctttccgcagattgaaattaataaaatgcacatatcccagtccattgaggtaaagcacacaaccacctctccgagtacagcaagggctcgagttaatgaggcacagcacaccaagcagctggaatgagagtctgcccagggtttttctcatctttatttatgaaaggatgcaattagccacttaaaaaagaaagcgcttcattcccagccgtgtgttaccgctgtgctggcatgtgagccagcaggagtgtgggctggggcacttggctcccaaggtcttgggcctttccagcagagggtgttaatggtctgggagaagtagaggcccaaggtcatggggttctgggagagaaagcagacctccatggatcattctaacaaccagttttagttttaaggcaaattctgctaggtgccgcaaggctatagcagctctcatcctgagccctgggcacgcgaaaatgtcaccattctgcccactatttggatgtgacgaggtcaggtcattctcctgagcgtttatagtaggtctttgtctcctcagctcattaatttattctccattgcatcagccaacaacgtggagtcctaacttggggaaatttgccccctcttggagctccctgagtcagttgatacagaatacagccatgggaaggtcttcagtccccctggaaccctgatggcaaaccacagagggaaggcacacagtgaagtc

SEQ ID NO: 51203 - DNA, 1041 bp, Homo sapiens
tctttataaaatcataaagtcatctcactgtatacataatagcttgtagtgtttttcactttatagttttaccaaaaagttagattttaatggccagtgaaaatcaggctgcagtgtgtgataaatgtgtacagtcggtgtagtgtcattaccaaatttaactgtattcagatcatttgcatggcggttgtgaagagtagcctgttctttttattgtattctgttatctaaatgggtgcattaattttactgttgtctaaattagccacatagtttgcttgtattgtgttggagacctggggaagagttaaagaaaaaccctaccagtgctagtgaaagtgccacaacagcagacctggcctcatgtttagcttaaagggagactcaggtaaaatagtgaatgaataattccttattaaatgctggagaggaacacaagtttggctcctgtgttttccaggggccagcatttcttcctttcccgttagatttgattatgcatagtatcatttatgtggtttttaaattaggcctacaaatatatgggaactgtcaggggagaagagacccaaaggtcttggcagaaattggtgaagcagagggggaagagaacaaccattggccttgctgacatttgagttcagttgggatatcgttcagttgggatatcgtttgaacagccctcaccgttagctgagaaatccttttctgatgtattttgggtgatgtggccaacaacatgataagagatgtttttgtcttttaaaattatttacaaatagagaggagaagtgcacaaaagaaatgtagcctgtctttggagttaacagaactctatagagtaaataacaaatcagctttttctagtatctgagcctgtttctacttttatagcaagcttctttagaaactggaacccactctttcaagtcagtgtacttttatacaccgtggcagaaatttaccaaattatcttaaaaacaacgttcatgtcctttcccaatgcaggagcccgtgccacttcctgcatggtgcaccttg

SEQ ID NO: 51204 - DNA, 1120 bp, Homo sapiens
ccactgaatgtgctgccttctggaattagaggttgcattcgagtgcacgtgggccttacaagtttgtctttgaatttcaaggattcatgttcgttatgtcattaaattgatgtcatttctgtctaatggtatatagcttttctttgcctgaacctgttctgtttagagtgccttggcatgatttacttcaaataagttaaagagttagcacgtctctgtgacatttttgtttcagctcagagcacactgagccattccagagacccaaacgttcattcattggatagcagcacttcccagcaaaacccagtccctattgatgtatgtaattgatcactttattaactggcaaaaagaagccttgttgaggtgataaaccgaacttcattacatcctgtatgtcgagagcaaacacattgggacgtggctgatgggttcccatttcaaggctgattctgatgatgataatgtttaagtagcattgattgttctctaattgaatttttctttctttaggcctcttctgaagagctgaaagctgcctaccggaggctctgtatgctctaccatccagacaagcacagagacccagagctcaagtcacaggcggaacgactgtttaaccttgttcaccaggcttatgaaggtcagtggagggccggactttgtagaaacatcctggtaacagatattcgatttttaggaggtgcgatttgtagaggatagaaaaagagagtccttagaggtatataaaacaggtggttagtttagtacttttcactgacagggtcctttgaaagaatagtattttgctttggaaatcaatacgtgtccagtaagtagaaaatgagagaccgggcgaggtaatagacagagtctcaattgcaagggaatactcaagttttaaatcgtttaccagttttcttctaaagggaactcttataggtaaaaggctgatcgttacagggaaggtttctttgttctcttttttgttagaagatacaaggacattttttcatccaaaagtgattttattggttctgaagcagttatcggttgtaataaaagaaagaaaatgatgttaagaaggcttataggaaatagaaccaagtgattcaca

SEQ ID NO: 51205 - DNA, 1068 bp, Homo sapiens
tggtataggtggtatattgataagtgtagcaagaaatgcatttaaagttgggaggaaaacaaaacactacagcaagaagaaaaaggagaaaatgcagagatggaaatatggaggcccacctcttctagagaaccttgtatttttatagaaatagaatatacatgcagaaaagtggtcatctcctgagtatacagcacaatgaattttcacaagcaggactgcttcatgaatgaatgtttccgttatccatgcaccagggcggtgccctctgaattgttccagtttcagtactcctgttgccaaaaagataccacaactgaattgtgatgatggtaataacaaaagtggttatggtcctagtatgagctggacattgttaggcactcatgcttgtattatctcaattacgcctcacaaagactcagaaagaagcactattgtccacagtttgcaggtgatgaaacagaaaggggcttaaaggagctataattcctaagtttttgctgtgtgttgggcactgtgtgaagcacttcatagtctctgtctggtttcattctcacactgtccttgcaagggttgtcatccccttttatggaggagaagactaaatgccagaaatctcacttgccatggtcacaaagcttggaagtgacagatcctgcatccaaacatgggccgttgactgccacacctgcattctctactagcagaatggaaggctgtgttgccccagagcgaaccacatgagcatggctggaagacaggcagccagcccctgtttggcagtgccgtccctgaagtctgcaccaaagggaagatgggagaaagagatttgccgcggagtggggtctcaccaattctcagaggccaggagctgctcattcagcaagatccttgaccctattctgacagagtagttcatggaaccttcaaggagctcctactttaaaatggcatgcagcagagttgcctctctccaaaccagcgggaagctctctgtggcctgctttaaagggcaagctgaatggcttgggtctagctagttttttttccccctctgtcacccag

SEQ ID NO: 51206 - DNA, 1165 bp, Homo sapiens
ccaactactcaagaggctgaggcaggagaatggcatgaacccgggaggcggagcttgcagtgagccgagatcatgccactgcactccagcctgggcgacagagcgagactctgtctcaaaaaaaaaaaaaaaaaaaagggactgtattgtgtaaagcctcaggctatatggttggaacctttacaaaatgaaatagggaatttttttttttttaccaagtccagttaagtggttgctttttaatgcctgataagtaagtggcttggtctcttagtataatcagtatctactaaatgacaccaaataatatgtgacaccctttctctccgtagaacagctcttactcagcacaaagcacccatgctgtcttggtgttaattagctctgaaatctgctttttcttttaaagtgcgtaagcaccaactatcataataaacactgcaggtttttatgagctgatgcagtttctttccatcagattattggggaacatatggacagtaatgaatcttcaattgtggtaatcaggcaaacttcccaaaatccagtagaatatagtttgtggagccttcattggtgaaatttagtaatacagatacatcgcctggaagttcgagtttgaaaatacaggctaaagcaacaaaaaacctggtggctttaatattcccaaagtgaatataaatatgaggtgttattaagttgttatttgcatgctctattcagtcttcaaagtatcaaattaaatatcatcatcatggtaggtataagtaccgttcacccaatgtggttggttctttgcttgcccagcacatggtaggactgcacttgctagttagtgtccttgtggtcaagtgagaccttgggactagttctagctggtgatgtcagtggaagtgaggtgtgtcacttctaggtccaagcattgaaatgccagtgtgagccagggagcctgctgtcccctctgccttggtgattggcacaggatgactgctgtgtcatcctgggacctgaagacattgccaaactgtactagctggcctcagatggacatgtaaagtgagagagaaataagccattgaaatttttggattgtttgttactgcagtatcatctagcccagcagttatcaagctttttggtgttaggattcctttacattcttaag

SEQ ID NO: 51207 - DNA, 2351 bp, Homo sapiens
atacaaaaaaattaactgggcgtggtggcgcgcgcctggagtcccagctactcgggaggctgaggcaggagaatcgcttgaacccgggaggtggaggcttcagtgagccgggattgcgccactgcacacacaccaggctgggcgacagagtatgactccgtctcaaaaaaaaaaaaaaaaagcaaagtttccctttctagtacaggaaaagccctagggagtcctggctggatctcaggcccccgaggacgcagccacgccgcgtgccacgcgtccattgggagcacgaagagacacccgcgtggtcaccccgccagggctgcctaggcgccgcgtcccgccctaggccgcgcgggggcgcaaagcgcaggcgcactcccgccgggcgcggacggctccgggccgccaggggccgctgtggcgcagccgggctggcccgcgctgtccctgacgcggatcactggcccctcttgagcacggccttgccggtttggcggggtgaaaggttgcgaagatggcgacggccttgagcgaggaggagctggacaatgaagactattactcgttgctgaacgtgcgcagggaggtgaggccagcggctggacgctctgggggctgaggccgagcccggtcgttcgggagggccgggctggcggtggccgccccacccccgccacgggaggctcgggtccgtcggggaggccgcgtgaccccggcgacgtgcacgccagccgcccgatggaggcgtccccaccgcccagaccctcccgccgggggttccggggccagcctccgccccagctcctgaaggccagtgcgccgcgtgcactgtgtccgggtagggccagaggcccccgcacgctcaagaggaaacgggggccccgaggaggccaccgtagtggggttagcagtcctccgagaccccgtctcgcgctcagcccacatactcgtcctggctgaggggctgtgtcatcgcccgccgccagcaggatggcgaactgagtctcacccaccaaggtcaaggccactagggaacgtccttagggctttttccggttcccgagtctttcgtggggacgctctgcctctgaagtgggtccagcctcagaggcatgcgtctcatgccctctttcattcccctggacccgatgtccagaaattgcaggcagagcctccgggacacagaccctcggctcggaggctgcagattaggaagaagccctaggccagaaaagtggtgccctaacaacagcttcaacattcacaccaagcacttgtaccctgtctcctcaacgaataaaagataacatgagagagtctcacatagcctggcagtagtagggccccactacactcctttgttcttgactagtctggagttgagataggtgtgaagggcgagaaggcttccagggtcaggtcatgaggtggatcagtttctttaagccgatgggtccagacttttcagccctgccagagaattcctaattccatctctcaggttttccagtggtaatgaaagctagccaagtttggctatgctaaccaaagcgggttcagtgtgtgttgtcagtaaatattagtctatgtgatgttaataatacaaacttatcttgtgtgggaccactatgctgaatgaactttgtactgttatctcatttaattctgaggatagctcttaaggtaagtattatgatagcccttgatttacacttgaggaaaccaaggcatagagagattaagtagtgtgtctaaagtcacactactagaaagtgcaagagcctgaactcaacccaggcagtctgactctggagcccagcttgtgagctccatgctagtctgtcaccttaccttaccagtccttggactacaaagctgctagttctggtactgtatccttgagtgtcacgcgcgtccgtgtgaagagaccaccaaacaggctttgtgtgagcaataaacctttttaatcacctgggtgcgtatgggctgagtccgaaaagagagtcagcaaagggtggtgggattatcattagttcttataggtttgggataggcggtggagttaggagcaattttttgtgggcagggggtggatctcacaaagtacattctcaagagtggggagaatattacaaagtaccttcttaagggcggaatatcacaaagtacattatcacaagggcggggagcgtgtattgtcataaggccaattgaccagttagggtggggcaggagtaaatcaccatggtggaatatcttcagttaaggcaggacctggctattttcacttcttttgtggatcttcagttgcttcaggccatctggatgtatatgtgcaggtcataggggat

SEQ ID NO: 51208 - DNA, 1037 bp, Homo sapiens
cgggggcggggcttcccttcgccgctcccgagttccgggaaccccctttgattggtctggacggcctgggaaacactgtagtgacgcccaatcaaaacgccacgtctcggcctcgaggaaatattccgtgtcgggcccgtcctgattggacagttctttcgggttctggccactaggaagctttgtttaggtccggaaggcgggctttcctgggagtgggtggggagggggcgttgattcttgaccaatcctttcagtccgttgggtggtgaccagccaatgggccggatggataggacgctcctcccggagagtagtgagacccctggtgcggggcgattggcggcgggagcgatgagtggcagccgcacggcccaacgggagctgtgcgtgggccgcggggcggggccagggcgggtgcgcggcggcggcggggtggctgggccggcggcggcggcggtacgaggcgcgcgctcggggtcccggtcgcgaggaggaggaggatgtggcgcgcggaggggaaatggctgccgaaaacaagccggaaggtaagagccggagcgcgaggggctggggggcggcgcggcgggcggcgggacccggccccgccggacatcccgggcatcggcggcgccgggcgggagcgcgggggcgcggcgggcgggcgggcgggcgacccggccggggagggggccggcggggtgggggggcggagcgcggccgagtcctgaggtgactcgcggggccggcggagcgcggcgccccacaccccacccccgggggcgggctggggccggagggggcggggggctcgcggggcggggaccgggcccagcgaggaggaggagccggcggagggccggcgcctcccccacccggaccgggcatccccgccgctcccgagcccgctgcgcggcccccgcacccccggcgctgggtccacggtgggggccgcggggcggaaagtttatccgcctcgggtcctcctggccccgcgccccactgctccgggccggtccccgtcgggcggcagcggc

SEQ ID NO: 51209 - DNA, 1028 bp, Homo sapiens
ctcagtgtttggctctatcctgacatggttgcttgttctcctgtacatgaatccttttgcagttactttcttgtttttgtttttcaaatttagccagggctttcaagtcacgtaacatatcctttcctgagactgtgagccgaaggtaacttcaaggaagatatgcttgtttggggctgtattcatcactctgctctctacggttttgtagttttcatgtgtacaaagtgacatttcttgaaagaaacgtttggggctgtgttcttaatagttttaaacatgttattatgtggagactaagtggcaaaggtctcaccccaacttcatttcttcataccactcatatatatcttatatatatataccccactcttatatatatatataccccactcttatatatatcttatatatatctcccctacctgcaaatcccaaaacaatagtcatagcaacagaaaagcaaaaccttgtgaagcccagctctgattggttctgctgtgcagttcagtcgctagttttggacaggtgcataagcagataatttttggatgtgtaatattctcagtggggctgatgtgtgacttttgggacatagagcattcattcgttcagcagaccatgcagtatctcttccatttttttccccttatcagttaccacaaggtaagattatgtattcagtcacttaaaaacacttgcaaagtggatttttccccatttattcctatctaaccattggaataaatgttgacagtagtaaattaccatgtccctatttttgtgttcaacatgtctaagagaatggggagctaacttccagtaagggcagtacagtcagtcatgactctttctccatgtagcctgtgcattgtgcagtgatgatttatactttcagctaaatttagtgtctatgataagggatacatcagatgtttaagttcacttaatctcttttacagtgtgcattcaacaaggtgtatttgtgtcttatattagaatgaaatgcagatacaaccagaggtatt

SEQ ID NO: 51210 - DNA, 1174 bp, Homo sapiens
tctgaaaagtcatttctgaggatatatgtgccctgttggttttctgggcacttggatatcaaatcatttgggagtgataataagaaattggtacaaagtgtgaaattatcagatagaaagaaaaaagatgttatagtggaaaaaattactcatttatgattaaaaataatctcaaagtgatgactggaagtataaattcagatatttgaagaagaaatggaatgttgatagggttattgtattgaatcaacacatgcacacgtataaagaatgctccccaaaatggggacgcttagaggacaaataagttgattggattggttttaagaaaaatattgtttgtctttttaaaaagtaattgaaataacccttcttagtgaagaaaatgaaaactttgatggaagttcagcagaatggaatatttaaaaagattcaagagaaggatttttttattgcgaatccacaagggggtagtgatgttctttcaaagatatttgtggtggcaacaatgtgagatgatctcttcacattttagatttacagataaaactggcatgtttgcattttaacttaataagatcttctttttaaaatgtttattggcaaaattgtttattgcttaaattaaaaaaaatccattttgggtgaatggctactttaagccatatgaatggtaaagaagagagaatgtccttacagttttgtgctttggagaggtcaccaaggatgtgagggtcactgttattttctaagaatgtaataatcttaaattccctgggaaacattagacatctaggaatcagttacttaagtgtcctgaataaaaggattttagtaaattgtgtctaaactttacagaagtttgtattactagttgtattttcagtgctgccgagagatgaaaaatatgaacaatccatgccactagccacttttaatagttctaagtaaatcaaatttttataatcttttttattagtttatattacatcattagataaaggctttttttttgttttttttgtttttttgtttttttgttttttcttccctcacataaaaattcaggagctttcttctggtcactgagttccaccccatattattcagaattacttaaaatcaggtgtggtaggcctgtgctgggtcattttcagtggaggactgcctagct

SEQ ID NO: 51211 - DNA, 1052 bp, Homo sapiens
cactagctgggaatgctggtgagcaggactcaaggatcccagcagagctgcatcctgtgctgtctttgctgccacttaggtggaccaggagctagaagcctttctctccatggcctccataccttcttttaccagatggtatttctgcatttatcactcttgattccagcacagcttttcctcatcttgcttttctcagacctcagctcttatgtaatgagatagttggtagtcattttgaggggattcatgtgttgggtaaagggttttcctagcgatgacctcgaaagttccttcccattaataataattactattaataattaatagcaataactaatgataaaacagaacagttgcagcaatatactgtaataaaagttgtgtgaatgtggtctctctctctctctgattatcttattgtaccatactcacctatttttggaccttagttgaccgcttgtaactgaaaccatggataagagggggactattgtgtaaggaaatgaagtcggagatatggaatttcatttcagggcttgctttcctgatattcagctattctgtataactgtatcttttccttttgaggtccttgctccaggacaagaataatatgttgactcaagctgtatggggggatttgaactacagacactcagatatctcctttctgaggtacatagagggcttaattttttaggtctgtctgtttaatatactatatttactttaaaaaacgtaggccgggtgctgtggctcggtgcctataatctaagcactttgggaggccgagacgggaggattgctttagccctggagttcgagaccagcctgggcaacatagtgagaccttgtctctactaaaaatagaaaaaattagccagatgtgttggtgtgcgcctgtgatcccaggtacctgggaggctgaggttggaggattacttgagcccttgaggtcaaggctgcagtgagctacgatcacgccactgcactccagtctggatgacagagtgagatcctgtctcaaaacaaacaaaatgtaaaaaaat

SEQ ID NO: 51212 - DNA, 1349 bp, Homo sapiens
tgtcttggcacccttgttgaaaatcaactgactataaatctgtgggtttatttttagagtcttgattctattccattgatctatatgtctatctttgtgccattaccacaatgtcttgattctgtagctttgtagtaagttttgaaatcaggaactgtcagtcctttaactctgttcttctttttcaagattgttttggctgtgctagctcccttgtatttccgtatgaatattaggatcagcttgttagtttccacagaagagacaactgagatataatggggattatattcaatctgaggatctatttggggagtttaaattcattttatggatttgctgtatgcttaggaagtcctggctaactcagacacccaagcatcttgccttaaaaacacaaaattttgttttaatttattgatgtagtaggctgccttggtgaaacactgtaattcactgttagactggaattggacttttcaggttctaagagagcaaacagctcttccacgtagcgtgtaggttgacttcctgtagtaaatgtttttttgatgtgaaagtttgctgataccttgcatgttttaaaaaaaatgtggtattctggttaatatacattctggttaatagagaactagcagattatatatatgaatatttatcaaagagttaggacatgttacaataaaattgtgacattaaaatttatataattgttattattactggaggaatcagaagatattttaggaccttgtagtcccgcaggggccacgtgaacattggttattgttatacttttaagtcacttcatttactcaacaaataacaaagtgcctatctgtgccaggcacaaggaaggacagacccagtctctgtccttatggagctaagggggagacggacattaatcaagatgccatatgaaatttcagctgggactcagtgctgtgaaggtgcgtgcaatatgtcataaagggatttgactaatctgcaaggttgggggaggcttcttgagagctctggaggaaaatgggaattaattgtgggaagaattaaggagaaaagttccaggtaattgggtgagtttgttagtgagttgtgtggagatactctggttatatcctgtttatcacttttgggaaagagtatctgaatacttggctctggcctttactctgtcccttaaatgccttgtggctgagcaggtactctttctgagcttgttcacatactgttttttaaatttctgtagccatttttatttacagatacttacatgaaaacatacagaaatctaggcttttggttgattgttttcatataattaaaaaatcattcactttgggagg

SEQ ID NO: 51213 - DNA, 1024 bp, Homo sapiens
agtgagtggtggactggaacacaccaccgcggctctgcaggtgcttaaggccagcccgcctccctctatggcagagccgccccagtattgcagacaggcgcctagagggagatcaaaacacgaagttgtcctgtgaaagttcctggcccagtgtttggcacaggggtatctagtacaaggtagccctttcttatcatggaagtttttttgtgctttggcttgttttgagaacctatggttttcaaagatagaatgacttgatttcagttttaactttggtttctttcctagttaactatggagacttcattatgcagtgctgtggagagagtgtgattggtttttgtctatgatatttctgtgtcatatgttattttagtgccaagttcttcctgttatttcagatattctgtcactgatttacttattgttagactttgaagttgggtataaaaatccttttttatgaagctattcattagtgtgtcccactgaaccaaagtgatttttaaaaacttttcacctaagaccattgttaagatatctcaaatggtaatcttataccgtcagtttttgataataggaagccaggaaatgttaagccttgaatgtaagacattatttttaacatcgtaaaatttcaagttttaattcagaaactaaattaaaatgaggtattacattcatgtgattagtgggctgttactggtgactcttaaagatgttacaagaagtcagcgtgctgctgacttttcccctattggagatcttcccatgaaccacttttcctaaggtatgatgattccatgctcacagtcatgggtagaaagtaatgttggattttccaaaggatacatgaattccgagccttgtctagtctatagggtgaatccttggacatgactgttaccacagatgttatcatagttaactactttttttgtttttgtgtcagggtctcattctgtcacccaagctagagtgcaatagcatggtcatggttcactttaggctcaaattcctg

SEQ ID NO: 51214 - DNA, 1022 bp, Homo sapiens
ctacctcagtccccccaggtatctgggaccataggtgtgttgccaccatgcctggctaatttttgtatctttggtagaggtgaggttttgccatgttatccaggctggtctttaactcctaagctcaaataatccacccgcattggctccgcaaagtgttgggattacaggcatgagccaccacatttatttatttatttattattattatttttaaagatgaggccttgttctgttgcccaggctggagcaggagtgtagtggtgttatcatggttcactgcagccttaaaagtcctgggctcaagcgatcttcctaccacagcctcctgagtagctgagactacaggcacaagccaccatgcctggtagcttttaaatataaaatgttgagggtggttgttgaacttgtaaactatctttggttttctaagtgtataaatatgtggtttataatgtaggatgaataatctaaaattttatttaatactgcagccaaacaaaaaagatatttttaggactgaaaataattggccgtcaatattcaaaaaattttctttttttttaaaaagttaccgttgtgtaggttttaggtgaaatctttaattttatctgagtgaagcagcctgacagccagagaccttgtttctttcctgttaacggaattccccttgatttacttgccatgccataatactagttggcgctctgcacattttttgggtgagtcgggtgttgggtttattgttgggaaatggttaaaaatgttgttggtgttgactgagcttcaaaatgaatatgacattggttcttagcaaaaatttcctctatgtacagcacacatacttcccatttaaacaaattacacaagttatgcatgttcatcagcacagaccttttctcacatatgtatctaaaattttgaagcagccttaagcttgcagtgcaaagaacggtttccccctgagccatttgaggataaattgctgataagttccatcactctcaaatacttgatcatgt

SEQ ID NO: 51215 - DNA, 1676 bp, Homo sapiens
cattgaaagatacacaatgtgcacgttgacttaactaaagtagcatgagtttctgtctgtgttttcttgcattttagtgtcttgcatttagtggttaaccctgcctgcatgccagttaaacgttagttgttatgtcttcatgaattaataaatatacagtcccactgttccacagaatgtgtagtgtcttgacaatgtgaatttttgtagagttggaaagggcaggtttcataggagtgaaacagcttttcgtcctttctaatgaagaaagtttgcttaatgctaagaatttttattaagattgaaggctgtacagtagattatgtatttagcatccaattagaaagtagatttatgaagtagaatgaaaaaagttaatcatcttggatgatgtttccttttttggtaaattttaatccaggagtcttactgttaggagtggattgctttgtcatcttttttattttgaaatctgaatatttcaatttaaggtaatacccgtttagtgtggtgatgagaattgggtatacgtccatcaatttgggagttatattcctttaattcagatggctggggttgctggttttgccaagttccatttgtgtgccttggctcaacattgatgtccaagttaaagcaaatttagcaccctatccttattggacactcagttctgttaaaagacacaagaagaaaatagtgctgcctattgagccttattttttaaagattctttggcgctaactacttcctgattcagaatgcttttgttttgcgtggtgggaggttatgtggataaaagtctctttccttatcacaggttagatttaaatactcactggaaccttacagctttgttaacttgtctcaactgattgtaaaattctttgaaggactctatgttttgatcattttcataaattacattttcccgtcagacagaatgtttttgctttgacaaatgtttgctagtttagaggcctgctgtttaaccagttatttattaactatttcagacatttttagacgtgaaaatgaagtagatatgcttaaaattagtcttaatcatagtttgttactctttcagcaaaatagtattatataatttggaagccatttaataagtcggaacttgattatgaattatttaaaaactcagtgtatttcttagtattccctgaaacgtagatttgataccaaattattatacacgttagttctagtttatttataaatgtaacccaacccataataagtatgtatttttccatattatatttcctgtggaattggcagcttatttattttattttttcccatggacccatgtcttgtggcagtttattttaactatgatttgacattatatttgaaaccagaaattgcttagtgaattaaaatcagtggcctgaagagtcttataaagctggatgtagcagtgctgggaatttagttggtagattatttccatcagtggcttcaaaactttttgaaacttttcagcataacccttcaactttcacatgtttaataaaacctctaaattatttacatgttgcaccttactagtatattagatacgttttaaagcatccgataaagaatttttatagaggatgagattaaaagaaaaaaatgagaagtttttccttattttctttctggacctcagtcca

SEQ ID NO: 51216 - DNA, 1994 bp, Homo sapiens
gcactcgagactctgtactgtgcagacagtttattggtggagttgcctcaggataaaaatacccagctcttctcagtagtgggtgggagactttgggtgatggtgatttccgtaaaggagaagctgagcctggttggaaggaaaaaggaagaatatacggagaggctggcattctttagctgagtggatttaggcttgagctggagtcagaatcacctgggaggcttgttcaaacacagattgctgggccccatccccagagtttctgttccagtaggtcctgggtggggcctgaggatgtgcatttctaacaagtgcccaggtgaaagctcacttagaggaagaatctcagcctcctggaagtgtgttctaattaacttcactggactgtaggctcagctttgccatccccataccactcatgcatgttttggtgtgctttggctacataggttacagttgagctttctagagcttttttctcatgtctttagctagtaggcacctaaaagttgtagaatgcataggttttatttttggcatttatctgaagtatctgttcatgtcttgacatataggaagctcttttaaagtttgggtggcagtggagagggcatatagaagcatattctaatttttcaatgttttttgaaagggtagcatgaacaatagtctccccactccttcttcatatccgtttggctcaagtagctgaaaacagcagaaccttaaagctgagtgtcacagtctgcctgcctacctgcctgtctacctgtctacctgcctatccagctacctgcctacccaccttcaagtcttttcgaatactgcctaccccaggtttctgatgataaattctgttatcttggtaattatgaagttattttgaaggttttaaaagaagctcctaaaaaataacctaagttttacagtattagtgcttttagaaagctggaaaagcaagtgaagaaacaacaaaaagaaatcctttctagatggatgagaaaccacagatgggttggggtgaatgcgatgaaatagaaatgtgtgtttgggagagtgttttctctgtaaggaagaatattctctgtaaggaaggcaggctatgtggctttcatgaggtcttcttagaagcttctgtggtaatgttcactggtctggcgaagggggtagacttgaaaaaattgtaaaatggcgagaacctggaatttacatttggggagaaaagaaactgggaggcccttcagctctggggaattggacaaggtgaagcagagtccacatgtgtgtgtatgtgtgtgtatgtgtgtgtgcatgtgcgcgtatgtgcatgcatgtgcactcatccaggtggggcgtctgcggtagcaccgaggtggattctgaggcaagcttcatttggccctgagttcattttattgtgactccaaaggagttcatgggggaaataaaggctctcatgtgcaagaaacaaggaagcagaaaagtcatttgacctaggctagaaaaggcggccacctctagtctatagtcagaagagaagcagctgttcagaggggctgagacaggtaatgctggtcccaggccaagcctcttgaggaaagagaacaacattccgaaattctgtgagtagctcataccctgaaggagttcttttttttttttttttgagatggagtctctgttgcataggctggagtgcagtggcgcaatctcggctcactgcaatctccgctcactgcaatctccgccacccgggttcatgccattctcctgcctcagcctcccaagcagctgggactacaggcacgcgccaccatacccggctaatttttttgtatttttttagtagagatggggtttcactgtgttagccaggatgggctcgatctcctgacctcgtgatccacccgcctcggcctcccaaagtgctgggattacaggcgtgagccaccgtgcctggcaggagttcccttttaagatcgctgtaggaa

SEQ ID NO: 51217 - DNA, 1460 bp, Homo sapiens
atgtgttttgtttacagagtaggatagatgtgagcaactttcattgggagagagagctagaccatagagggaagagaaggcattcgttaactcaacaaatatttgaatgtctgtatgacaggcaatactctaagctcttggaacatacaaaacataaaaaacattcctgtcttctggagcttaatgttctaaagtggggacactgaaaatcaaatcatgtgccgagtgcactgtaaaaagaaaaaaaaagcctattaatggggagatctagggatgttgaggtgggacggccagaaggatgtaattttatgttgtgggtggcactgatggatttgatgccactagaatgcaagatatgccagggcagagattttagttttactcactgctgcatctccagtttagaatggtgcctggcacatagtaaatgctcaataaagaattgctgtgcgaatgaattaatgattcaggatcccaggaatgggaaggaatgaggagtgggatactgaagaaagaaagataggccagtcataaatgaagacatattgtagggatgttagtactgatatctccaattcaaattacagttgtttttgcttttaaaggattttaactgttcaattgtattttgaattctttgaattagctttgtttcatggcattcattttgtttactgtatgtttcttagacacagtaatatagtttacagaactacttatccttagggacattacccacttaagaagtgactgttttcagtattattacaataaaattgagattacatatcactttgtatattgaggttctgttacaacctgtcttttcagcattatccttaaagtggtgtgtgtggtggtggtggtggtggtggtggtggtgtgtgtgtgtgtgttggggggggggtgttgtgattgttttatgcccattacagaaaccagtttagccggcattatactggtgtggttatatattaaataagttaaatttcttgcagctactcttttgatcagttaattggtctgatcctatagtgggtattttcatgggtctctgctaagtttagcctcacaatgattttgtgtgtctgaaatcgtattgacaggctgtagctccttctaatttatgcatgcgtgaagaagattgtcctctatttgctgagtcttatgcttttatatgaggaccccagtgtcgtaactttgccataactcaggaagatctaacttctgactgtgcagtatagagcattcctttgtctaaaaaaataatatggatgttttaagaccattcagtcataactggaagctgccttatagttaaaggactttacatattaatgaagaaagggaacatacaaatcattatgtcctttttgccatagattgctgtcccctcccatagaaattatcttattatattttattacaacagtgtatgtaaaatatatacttataaaagt

SEQ ID NO: 51218 - DNA, 1082 bp, Homo sapiens
tctaacatctctgttactggtttcagtaagatcacatcatcttttttgtcctttggcagcagaagttgtaggttaacgaaaactaaagcaacttttcttgtcactgagatggaattgaaatgatctctaacccatacttcttcagccatgacttctcacatcttagaacacattaaaaataagaatatttgtaggacgtactggagaatgaatgagtatccttgaggtcagaaaccactggtcaggggttagcgtggcttagttcccctcacaaggcacgtgtaacccatttacattgaactgcatgtcagtagggaagtgtttaggaagtgctgctgtaggctaatgttcttcaactttaaaattttctcatgacacgtcattgtagcttgatatggattggccaaactgctttaaaaaatttttaattgtggtaaaatatacatatataaaatttgttgtcttaaccatttaaacattcacattgctgtgcaaccatcagcaccatccatctccagaactcttctcatcttgtaaaaccgaaactctgtacccagtcaacagtaactccccattctccctacccctcgcccccggcaaccacccttttactgtctgtctgtatgaatttgactattctaagtacctcataaagtgaagtcatatagtatttgtcttttttttttttttttgagacggagtcttactctgtcacccaggctggagtgcagtggtgcaatcttggctcactgcaacccctgcctcccgggttcaagctattctcctgcctcagcctcctgagtagctgggattacaggcttctgccacaatgcctggctactttttatatttttagtagagacaggatttcaccatgttggccatggttggccaggctggtctcaaactcctgacttcaggtgttccacctgcctcggcctcccaaagtgctaggattgcaggcgtgagccaccacgcccagcctagtatttgtctttttttgtgactggtctatttcatttagccttatatcatcaaggttcgtccatgttggagcatgtgttagcctttcctgcccttta

SEQ ID NO: 51219 - DNA, 1722 bp, Homo sapiens
gatcactattaagtagaaggaacatttttcctttttaatgatttttcagacatactcacccactttggctgtgccatcctcccttggctcttgggatggtgcatgccccctgtttctctcccacttaggagatttcctttgtgaccctcctctcgcatcatttaaaggtggaatttccccagagcttgaccctgggccttctgtctgtgaccattaaatgtgggtatttctcagcaattagagcgaggctcttttcttttcccttgttttggaaagaagagagtcaaaaaagcttaatcaaataatctcatcttttacccaaaaaagataactattttcttcgggaaaaaaggtgacaagaatataaatcatcagaattacactaatttgtttctgaaggaaatgataaactttcccccagctttgttgaggtataattgacaagtaaaaggtgtatatgttcaaagtatacaatgtaatttgatgtgtgtgtacattgtgtaatgattagcacaatcaaccagcacgtccctcactatacggtgttttactgtgtgtgtatggtggaggagaggagtgaggacacttaagatctgcttattaatttgcttagcaaatttcaaataaacaatacagtattattagctgtagtcaccgtgctgtacattacagccccagaaaatattcatcttataaccaaaagtttataccctttgaccaccatctccccattccctccccaacccctgtgagttcaggcccttctctatattccttcttattctaggtgacccccatctgcttacagagatccaatctgctgatggctcctaggtttgtttcatgaggtcagagctctttgctgagccccactccagagctgcctccttgctgtctatgctgagtgtctgatgggtgctccagcctcatgtctgagatagagcttcatgattttcctcccacgtccccttccgtgttctcagtgaagggtacttgagcctcccaggcgatcaagtcaaatttcagggatcagttttaaagtaaactttttaatttaggatagtttcagagttatagaaatgtctgaagaatattaaggagagttcctgtgcactccacacctgtttcccctgctaacattactgtggtacatgtttcacaccagtgaaccagtaccaacacattatttacactgaactctacacttcattcagatttccttaattttcccctaaagtcttgttctttttcagaatcccattcaggatgccacgttacatctagttgtcatatatcttcttaggctccattagactgacagtttgttagatttcttcttgtttttgttgaccttgacagactaagtattttatacagtgttcttcaatttggatttgtctactgtttttctcgtgattagacttggataatgggttttggggaaggaagaccacagcggcaaagtaccattctcatcacatcatatcaagggtacctgctctcaacatgatttactactgatgatattaaccttgatcacctggctgaggtagtgtttgttagatttcttcactgtaaaattactgacatttttgacactttcctcttctttttatctgttttgaatccaaaacaattcctgctggttctttttcccaaataaatttccattctgtccaagtcactctttgcagccactgctgcagtccaagccacaattgc

SEQ ID NO: 51220 - DNA, 1301 bp, Homo sapiens
ttgccttctccagcccagtctccacccagatgccaatgtggtccttttcaaatgccagttggtcagtggtactcttgttcccaagcctttgagcggcttcttgttgtacttgagataccaccccaccttctagacacagtctgccaggcctgcttaagctcgtctcttgtcacctctctcatctcctgccaagcccctctcgccttgtcctctgttccagccaccggtttcttgcccgagtcccttcaacactctcagctcccttagacatgtcgttgcctctgcttagaatgatggtcgccctccaccttggttcccttgggaccccagcttacatgccatttacatgttgtttcttcaggggacatttcccatccacttgcagggtccatggggcactcttgctgggtgtttctggagcatgccacactgtacccctgatgctgggagttacttgttctatgtcggaattgttcctcagtgctggggtggacaaggctgagacgtgcctcggcatgtcactgtgtgtccctgttacctgtactgagcctgtgccagagtggatgcttgataagtatttgttgactgggtgaaattttttaaaaattaaaacatttttaatagaaatggggtctcactatgtggcccaggctggtctgaaacttctgggctcaagcagtcttccctccttggcctcccaaagtgctagaattacaggtgtgagccaccgtgcccagcctgaatgggtggattttatcttttgaatggaaaacactcttcatttttagcatgccagtatgcaaaaaagtacttgaatttatttttcttagtccattgatttaaatcccacatgtattcttttaaatctgtcacataaggtgctgtggtgggtacagtagtggatctagaaagtgtgttcagcctctgccactcctgagggcccattcattcattctctcattcaccagacagttactgggaacctgggtctgccaggcctagtgcagagtgtggggttatgagggcttgtgagtgagcctgttgagggagagggagaaacttatagatccttcagcatttccagttgtggttaggatagatttgggcggatttagtttgaattctggctctaccatttttaagatctgcactcttgagcttaacctctacccgtctgcaaaaatgtgggcagcattgtctcccttgtaagttgtggaaagaatcagctaagaaaaggaatgtaagaggatcagtataatcatagtaatcacagaactaatggtttttgcctttgaggtcct

SEQ ID NO: 51221 - DNA, 1002 bp, Homo sapiens
tgtaacactgatgacttgatggacttgtgaaagtgaaacttggtgtgtttcttctttcagcctccatgtaactcacagatagggcagtgtagagtagatttccagttttagattaaggatagcttgtatcctatgcaaggttttgggggttggttagggtctttgagtatttcctgtctaattcacttactagttacaaagagacaagctgtaatgtaaaaagtcttccttgagctagactagctttctgtactctttgatttaaaaatacctggtagttctgccagttggggatttgtttggggtgaatgaaaacccctcaggctcagtctgttcatgcactggtgtgtattaattcagtccattcatagtcatgagctgactgtgccttattgaagaaagggaggcttctggaagagagaggaagatggataatcttggatcctgaagcactgctgctggcgcctgggagtggggcaggaagacaggaggttctgaagagagggctttgtatccaaagttaagacttaggccagcccttgatggggagagaagctactcaggcccaataacctcaaatagttcaggttaaatcgacagttgtcaagtctaattcctctttacagcattatttctgtgggaaaatgtgtgtggcttatatacttgcctcagcaaacagaccggactcagaatcagctctttgttgtcataatttaagtggaattagttactccctagggttgcattgccccttggatggcttctagccttctttttacttattaaattatattccaggttccttgactgtgagggacatagtaaactcctagtagcctttaccttcccctccctaaatagcaaactcatgtagaaaacattagctaaaatcctttgcagatttttttgaaatcacctaaaatgttgttattggcaccatttcatttggagccattttgtcagaaccactaagtatttaggtgaggcgattgatttcattcc

SEQ ID NO: 51222 - DNA, 2589 bp, Homo sapiens
accaccaccaccaccaccaccaccacataccctttcctctgcagagtaacttatctttctttcagaaatagtagcaacttgaatttattagtcttagctgccacattatacatcttcagattatattttgtattctgaagtattttggggagaaaaagcttagacttttaattttaatttcatttaaggactagaaaaatacaaagttgcctcattacccaaattcacctttccccactcttttaatattttatttctttaattttaggcataagttaagaacaagcaatttaacatgaccaaaaaatgtacttttgtctctgccaaaacctggtcagccagccctggtagtctcaataccagattgatttctgccatatgcaatttcatgactgtttttcaaacaatgcatttttattgtatttctcttttcagaaaattcttaatctaaagcaaaacaaaccaaaaccgaaagacagaaaccaaacttgagtcagttctttgaactggcaagatactccttagaaatcatgtccttaaaaaaaacatgtgaattctctcagcatggcccactgaagcacagattactttttaagtgtctcattattttattctctaacatttaatgctgatgttttaattgcacacagctgaagctgctaaatgagtactgaaatggatttaagtcctctttgagctttgttgatacctataaaagtttatgtcattcattagaaccacaaattaaaattagtcgtggttagctgttcactggcgattggaactctcacgaacagttttgttcaggctcacgagcttgttcttgcctagtatacttggatgcctgaaaagctgcctttggcctgttgggtatgttttcttttcacagaattgcaaaatatcagagctgagaaatacaaataggtaaaccatcctatgattataaagcccctgtgatttataatgtcccagtagtcaggagcaacttttttgctaaacctggaattttaaggtgattttttttttttttaaataatgcttttcacagttgtgctggcatgtttaccagatccccaaagacttttttgccttaagtatgtcctttatttgttcctttgatgccatgtccttctagcactaaaggaatggcatctggctcagtggatggtacatggaagccatgtggggggccatgactgcttgttgcctccattcctcttgctcaagcagccccaaaccggctgacccctgagggatgagctggttgatggtccccaggagagtcacagctccctgctgttggaatcggctcccctggggctcccatctgcctttgaggtagacagtactttatttgtaagtccagtagcagctgaagagaaattaataggttaagacgagaaaagtttttaattctcttattttacgattagatcagttagattttctttaaagttttctgcttaatacattttaagataacctcatttttctaagagagctagtacatggacacatttatggcttatttccaatgagccttgtttatttggttagcatttaggacatttagtagactgtaagccaatggatgtttttgtaaatgtgattcattgagaaaaaccttcatttgagagtcaggtaacctgctttggactagcaaagtctctggatatgttactggtatctgttgaggtagtcacacaaaactgaaatactccaacagaaagacttcagaagactttcattttggtgtaaaaacagtgaaattagctgtttgacttaaaatataggagttgtaagacatttcatcgatgctacttctgttttatcctctgtgaaatgtagatactgtgtgtctcccacttgctttttagggttgttgggaggataaatgaaactgtatgacagacacactgggaactcagaagaaaggtgctgttgaaactgaacctcatcctatggctgtgccgttggcaggcataaccggtgtgctgagaggcagtggtagtgaaccccgtggtgaaaggccaggaccatgggctctggagccaggctgccttggttcgaatcccacctcgacctcttgcaagtggtctgaccacagcaaatcacccaacctctctgtgcctgagtttccccctctttaaattggggatgataatagtacccactaaaggatcctggtgagttttagctgagcacatgtccacaaagtccttagagcagtgcctgccatgtagtgtggctgatcctcacacccagaaaaccccagcagggggactcacaccttacagaaaatcaggttcgaaaccattccccagtagtcttctaacactgacttagagacccttatatgtttagagagaggaaccgaatagtttatggtaattaagctcctctaaaacagatgcaagttcaggtgcataaagttaaatctgggtttttaatctcttaggaagaaaagtttagatcacaaagagctccataaccctttgttgataggttcttttaactgtttttggctatggagggacaaggaaggaaacctgagggacagacccaccttttacctgcttagcctttctc

SEQ ID NO: 51223 - DNA, 2232 bp, Homo sapiens
tttgagatggagtctcgcactgtcacccaggctgagtgcagtggcgcgatctcagctcactgcaacctctgcctcctgggttcaagcgattctcctgcctgagtagctgggattacaggcgcccgcgaccacacctagctaatttttttgtatttttagtagaaacgaggtttcaccatgttggccaggctggtctcgaactttcctgacctcgtgatttgtccactttggcctcccgatgtgctgggattattggtgtgagccactgtgcctggcccagaccttttaatgcaacagcgcccctaacttctgaaggcccctagctggcttcaacaaccgcccctcttcctgccccccatggagggctctgtcatacatgtgtcacttttagggactcttattaccaatggcttccttaatcctggctgcacatccagattcctctgtacagcttttaaaataattcactttttaagaaacacttgccccatcccaagactcttgttctagagagatggataggttcagaaatacaggaagtttattttgtaaacaagaaaacaaataggtccttacattgtgcacatatggatctgtgcttctggagtgtgggccaatgctgttaattctgtagttgactccattgtaaggtaaaatgagttttatgggccagtttagttgttcagccaacaattgttagtactgtttctgtaggaaaagttcctggcatccaccctgtagaataccatcttccatgagtgagcacttgatcaccacagaagccaggtttgaatttagttagagtgaaatgaagtagagggccctgcttgcttgcttgttctttcatttttttttctcttcctctcttttatgggtttatcgttcccttcttttcttctccttcgtagttccctctttccttgttttctctttcttccaccatctggcgtatgtttacaatgtatctgtcatcagactgtgaggtccctgaaatccttcaggtgcctaccacagagttgacgtgcaaatgaatgtttctttattttttaattaattaatttttttttttttgagacggagttttgctcttgtcgcccaggctggagtgcaatggtgtgatcttaactcactgcaaacctccgccttctgggttctaccgattctcctgcctcagcctccaaagtagctgggattacaggcgtgtgccaccgtgcccaactaatttttgtatttttagtacagacaggatttcactatgttggctaggctggtctcgaactcctgacctcaggtgatccacccgcctcggcctcctagagtgctgggattaccgtggtgagctgctgcgcctggccaaatgaacatttcttaatttgtcttagtatctgtctttcaaagaagtaggtactgcccgtcattagcttgaaaattgtcagattttgtttgtgattgtctgtcctaacttaggtggtttatcttgaagatcttaggtaatttagcctcatagatttagatagatcgagaaatggcaggcttcaatcactgaatagtacagaatgttgggcaataagatggatttggaccattcaagggagcacttatgtcaggcttttagcatatctgctgcatagtttttagagctggaaggtctgagatcatctgggttggacccttcatttttggtggtgaggaacccactcctgagagagaaaggtgcttcttcggtgcccgcctccaggccaggacttgcctcctcctcctctgtgtccttagctgagtgagagttgggatggcggagagcagaggcaatgtgaccgcatagctgctgcgattaactgcctgcctctagacatgttggagaaacagtcaaagtaatcatccttctgcgctccccctcccatggaaacaaatgatagaaggttagggcagttttgagggcaagcggcagacttcctcactgtgaaagtcgggaagctttggttgtgccctagaccctgtccttttggccttggcaccaccaagtgggctgctttaggtgtccatcctgatggtgtttaaccctgcttgaggcttttgaggacactaagaaacacatggtgaaggtgtggaaggattttttgtcattcctcaatgaagatctgccctaggtagaaagggagttaatgaaggaaaagtcggcaacgctattgctgcacgatcaggaaataacagaaaacgtctcccatttgttct

SEQ ID NO: 51224 - DNA, 1050 bp, Homo sapiens
ccaaaggagaaaccagaatgacttttgtcactcttttgtaatggtgggaaaaggactggtaggggaaactaccaaggtttgacctgggatctactttacctgctctagttcaccttggagcatctgaccatacataggtccttgcacatagtagatactcagcaaacattaactgtcttttcatttctcattagcacaggtaattaggaacaggagctgatagactgcacgtatctgtgcagagatatatctgtaattaaagttttaattaaagaaacaccagaccaggcagatggttcttatccctgcatcctgtaaaccaaacagccgtggcttttcgatcttgcaaacatgcaaagctgagagtagcaacattcatggtggtacaccaaagggaataggttgtcttataaactaaccataatctaattttggtagcactctatgtgatgccagattcaaggataatcattgcagtttgaaatgaaagacaatacatcaaagttatgtcccaaccaaagcttttaagcctcaagtcaagggcattaccacagcccagctcgtagatcacaagacgtgtggttttgtgctagatcacaaaagctgacaaggtgttatttaggattatcagctaaatacagtattaaattagagggctatcattctgatttttcaggcattgccacggtatagcagtacagaattgagaagtgacttgtacctgcctgcctcatgcagatcctctcagccatgtcacagtgaccttaatggtcaattgagtgcagaatttgaaaacaaaaaacaaaaacacccacaaagagtgacagaagacgacttctctcatatcttagcacttttccaggaaccgctcccccaaggatccccagcgatttgttctagttccgttgccatcagcaggaagctggatcagtaagggacgtgggcagatggtaaagtccatggcagttcaccatgaccgcttgggcttcacccattccataacccccagtttcttacccctcctcaaaacccttcactttgtcacacatg

SEQ ID NO: 51225 - DNA, 1038 bp, Homo sapiens
tggttcatgaaggattggccgtgtagatctaaaaccatttctcactccttctgaggggagcaaggctgaagaggaaggaggggacaccatggcagttggtagaggtcatgtgcttcgatggctgaacctagcagccttttaccatgcagagaatttagcttattctctagagacacacacacacacacacacacacacacacacacacacacacacaattttgtttggctttgatccacacaatgtgtttttaaagatgaataaaaattgataatatcaggtattttttagcctcgtaggccaggaaaaagtaaaatattttgaaagagtaaacaggagcgtctcagcagcatacatgttacttttcatcttaatcatgtgagcctctcatgaaagcctccaaggaggaggttaatggatgccccaattctgtacctttatcaggtttaagcttacttcagtttccctttagtttgttgcctgcagtatcataattaaccaaagaattcttctcaaaaattaccctcaaaaatcctacaaaccccactgttaggaagcgagcccattttgaggaagtatttgtgaaccctgtgttcttggatgccttatgtgttgaaggaataattacttgttcattttgtagtgctaaaatcctgggaatgcgcagtctaagcagtctagagcatgtcagtatcccacctttggaaatctcctaggagcatgtagagactctggtttatcattaactgtgttgctttcctatcttttacacaaagtattctccttcccgcaccattgtattcacatgacagaaagctcagttaatgccttttagtaataatgaaagcttactcattacatacattttcttaaactctctttattctaattaaaatgtttccatctgatgaggaagtgtatggataccaagaagtggaaattaagcaagaaattaaaagaacattaatggctttcttgtaatttgttttgaggtttttcttcctgctaaatggtgttttgcttacagagtcacccctc

SEQ ID NO: 51226 - DNA, 2941 bp, Homo sapiens
cactcaagtgggagctccttgggcaagggtgctggtcctcccttatttttgttttccttgagcccaccatctgcacgtggttatgggtggatggatgggggaagtgacagtggggtaacataccttcaagcccaaaatgtaaacttaataagtgttttggaggaagagaagaataaatactgtttttgtttatacaggtcttaaaattttggtagcagaaagcaaatgtgcaaagagcaatggaaaacaagtcagaagctgctgtctgattccagaggaactcgtattttatgttaaaaaaaatgtaattgacatttgattgccttgaaatcttcaatttgttgtgctgatatcttaagtaactaattatttagttgaataactactagggaaataggccataaatgtcactcgtgctttccttgtaagaagcccacagctcttctcgcagcatgctcttttcagtacctgttctaggtacttgtgacttgtgaaagtcactggcctctgcgcattgggcacaggcctgaaggcgatgttttactcacattttgtccactggaattaaacagctgtgctgatattcagttgatttgaggtttgtttggaaatcagtcccaaatttgggaagcaaatgagacagaaccctccacaccctaccacatgcttccagctcatcccatgaaaactcatgagcacagtgtggagtgttttatctacagccactccctttttgacccttcccccaaaatagtgagggagagaaatgaaagaacagatctggggcttgccttcagcttcactgtgcatttttggtcattttggtcattttagaagtcatctttcacttgttaggatgttacattaattgggagatgctagtcgttttgttcatggaaaccagagtatccctttgaagtattatattcttctaatctatgaaactggcccaggaagtaacaatgggaagtgctggaaatggaatttaagaagtccaccttcttagtcctgtgcttaagcagagagtctctagcagggagcctctgcaagcattgtgttctgttgtatcaatatgtacttagatatgttaatctgaattagggagttgattgtacataatgactcccctgggttgctatgttagaagaaaacccaaaacttaagtagtttgctgaatatgcatagtaagtaaaaaaattcttccaaaattagtgttaattgaatctgagccttgatcttctttgaacctttaattttttatttgatcttttaaaaaagttttgtggcctcttaaagataaaacctacaacccaataaaagtcatgctgtaacgattgcaaaaagaccattgtatgagacccagttttggattatcataggcgaagaagtcagacatatatggttgtatgtacatgtgtatagtatgtgggtgggggtagatacatacctgttcatctgtatacgtatgtgtgtgtttaatatatactttagtttgcctttacccagatgtctcctcctctctctgcctctggaaatggggcaaatttttcttcagttaaaaacagaaatagaagcgacggttttgacccattttacacctatttatttcaggctctcaccacacacttgttcatgggcgcagcaaagaagagggatccacagagctggagccatgagggctgacacattggaatgaaagctggcagaattcgtagggagagctttcccatcctgccagccccatgtctggctttaagacagttctattagtgaattaactgttctcaaaaccccaaattaatttgaaccgaatgttactaaaaatgaaatagaataaagtgacctactcttgcctcatccggagttattacgaaggagctccgcagcctgactgagctctggagagcagggctctgtgcacacgcctcctggtccagaggcctccgtgaccatccatgatgccactctgtcccctcagcaagctgcctttttcttcctagcacctgccccagcggtggtatgttttccagtcagttaccacctgtctcatcagaatggaagctccatgagagcagggcctttgtcttgtccccttgtatcttcagtgcataggacagtgctgacacagtgcagagtctaaataaacgctgttgaacgaatgtgtgggtcacttgcgtcgcatcctttctgaatgtttttcctttaacttgccatttataaataccttttccaatgataaagcagtgaaagtttggaaagaagcataaagcttttgttgtgattgaagtaactggaagcctagttcagggtgctgtgagaagctggagcatatcaggactttggaattatgaattacagacttactatatgtgatggtatcggtgcctcctgaagaagtagaagacagagatgcatagaaacatgagtcatgtctctggaatactgtaatatcgacatctagtgagagtctagaaagaaacatggagaaataaaagggaggcaggaaacaggcaaatacttagtggttctcagttatttaaggtaaattttggcatcgagtaaacaagataaatcaaaatattttctagatcaagtaggcattaacaaagatatagaggaaacttggaggcgattacttagataatactaacagaagtacttttgttccagatacctccacagatgccatggttaccccgtctttattcgttgtgtgttggcataggccagaataccaatattgttcttaaaaacctttgaggaagtttttctttttttctttcttttttttttttaagcaaagaacagaaacaaaaccaaggagacagtatcctgtgatgtaggctgttacctcaaggtgagtttatttgtagcactaacttgtaacgaattgtttaaagaactgaaacttctttttaggtatagcttatttgtcagattt

SEQ ID NO: 51227 - DNA, 1489 bp, Homo sapiens
actaaaatcaggaaaaccaatgtccaattgaacttgagttttattttgcatagagaagtaaccaatatttctgatcaaaccattaaagctgtttcagttccttttaaataaaagcaaaggctaaattttttacataccacaaagcaaaataaaacgaaaaaacctttggtcatgatgcattttttattcaactgattgctgaattattttgattatataatcttacactcttatgaaagtataacaagtatgaattttctgaggtgaagaaataaatgtagaaagcagttaatgaggcagaactcacaaatctgtatttatagtttcatggcaaataaatcataagcagaggatacagatgtaaagaaaaattcttgattgcattcaagaaatgcaaggtcgaactaactttttactgaaatggaattgtatcgctgctcagagggatgtggggagtaaagtaagtgggatgtgcttagaacagcaagctaggccgcagtgcgcactcgtcagtgtctgctgcttgtcttacgaggattctagcacagaagattaaatcatgttttaatcatgcttaataaatggtactgtagttttattatggttaatgtccacttgtaattcaatgaagagtggctttttaaagcaaaggagaaatcagcatgtttttcttggcgctcttatattgtgtgtgtgtagaagatgctgggatgggttatccatacgacaacccctgtgaccagagatgcaggagcacatgcatcactcttagttttattttatttgttttatatgttattttcataaatctgaaggtttgatcagcttactgtttttagtattttctgctgctgcatgtgtgtacctttaagttttgtagaattaaattgaaaattttgaccagcaaatgcttaaagccactgtcaaaattacatagttagcacttcattgatttgaaggctagttttcattcaacattcctgcagtttgtgtgtgacctgattttaaagagcagttccatgagttagtgccctctggtggcacacagaggacgtcaggcagagagggactctgacccaggagccttccggaggctctgctgaagagaagccagtttatgactggccctgtaatttcatattttttcatgtgttcagtgctcgtcagtttcctactccattaagccatggccctggcattgactcagtaccagctttatagcaagtcttcagcagcttaggttgtgagggaatttccaggtggacttgatataagaagggattaccaatgttgagatttcccatgaggaaccaggacatccatttttggatgcatctcttagctccttttgaagagcagaccatgtcacttcctgggttaaggaaggaaggctccctgatggcctttgagtgactgactggcacagcttggggtgggccttcagtgggttagtctttgataggcctttgtttcccattttggtcttccc

SEQ ID NO: 51228 - DNA, 2036 bp, Homo sapiens
tacagacacatcctgagcaccagcccacccacttctgccatcaggaggctttgaaactgctgtggttcccctcttaaaatggctaacctctacttcagcaaccttatttatgcattcatatacataatcattctttaaagtctagtagacaattttcacattttgtttcagcccagatctttactaaattttgtgagatcagcattgttgggcttgaattaaccaaacttcgccatactgtgccttcagaaatcccagattgggcgggttgtgagttcatctcatcctcttcctgacattgacactaccagcaccatcagcaggctctgggataactgcggccccctctgagaggctacatcttgtttgcgatctgtgggttacatattgtgctagagataaaccttgacagtagagacgtgtgacatattttttacaagagtcactgagatacttgaatgagaagatgatgtagtttgaaaaagtgataaatgggccaggttcttgagaaactagcagaatgtcttattgaaaccttgggatccaatctgaaaacagaaatgagtcttccaagcaaatttttttcttttctttttttttttttttttgcaaatgtggtgggggtagatgcttttatataaattctatacctgtttctgtggtataaaaatcaaattttgtcctcttttgcctcggttggttggtttcattttcaactaggtctccgtttctaacagcatctcaggtaacttttctgaaaaatgtgggttcagaggagctcatgtgctggtggctgtagtggcagctagttctagactatgagatctcagtgaccactttggtgggtgttttgttttaaatcaacaatagaggtgaatctgtactacaaagtaaaatgtatgagtagataggttttcatgttttgaagttttttatcttcagaaataaagaaacagcctcattaaagaactgttaaaaaaaaaaagagctgtggccgggcgcggtggctcacgcctgtaatcccagcacttttgggaggccgaggcgggcggatcacgaggtcaggagttcgagaccagcctggccaacatggtgaagccctcatctctactaaaaatgcaaaaaattagccgggcatggtggcgtgcctgtaatcccagctactcaggaggctgaggcaggaggtggaggttgcagtcagccgagatcgcgtcattgcactccagcctgggcgacagagcaagactccatctcgaggaaaaaaagaaaagaagaaaaaaaaagctgtttgtctgttctagcctggcacctatgagttctggagcagcacccaaagccagttcctgctggctttcctaggagcctctttggcgtgggtgggcgagctgctcccttgcagcagtttcagatgtcacttgagaaaaatatttgttgttgtttggttgccctcttcagttgtgatgcttttaggaagttaggaaacagatgagacagtctggctggaataagagggtgggtaaccactgatctgagatcatccctgttgattaggtttgcagaattctaaatggagattgtagcttcacatgcgcactgagggggttgtgcgttttcataggcttatgttccatcgggcttctgcatgatcttggaagagagagactaggtgtggttcttggctctgttggctggtgggtttagctgtggatcacttaagagacccataatccttgcttttgtaccgttctgtattccgtttgtcaggctgcgagggaagggggtttgtgctaatttgtatcttactgaccctgactggaaaagagattaagattttggttgtataattaacataaatgaccaaaaatatcaagcccactcctcacacaggtgacccaggcatccaaatatttactccaatgattagtgtctttcagctgtagatgggcacttctttcctttcctttctcctctctcttttctttacccaccagatagattcacactgaaagattaaaacaggctgtgggatttaaatg

SEQ ID NO: 51229 - DNA, 1029 bp, Homo sapiens
ataagaatgctaaatgggggttccttttaaaaatagaaatggcggcttgcatttacataattactgctaactagcacaacattttaaatggtgacaaactcagggtagaaaaagtatctgttttaaaagcctggtaaaaggaagcagaaaatgctctgtgagcagctgcttcagatggagggtctttgcaaagccgggagaccaagacttttcagtagggagggcgaggtcaagggaggaggcaagaggtagctcaggcaaactacttacaggccctgagcctgtgtgtgggcctgaactcacccacctttcattttggagcatgattgtctaagtattaacacttaaatctgccttggtgtctgtccggacagggtgcagtgttctctgtccgctgttaaaaggtgtcaggtgagggttgaagttcaaagttggtgaaagagcatggaagaatatttatgaacatgaaggctgagattcacttaacacaaactcatcagtagttcaagccagaatctcaggcctgtccttgattctgcccttttttccccatcccagacacccatctttctccttccaaaatacatccatctttgcacatctctgctagtaccaccctagtccaagccaccttcttttctttgcctggagatctgtcacattttcctgtgtggacttcatgtctccagtttgctccccttggaatagattccccatgcactagccagggcaatctatgaagaatgtaaataggattcgttcactagcttaaaccctacagtgactttctatccatttggagtccggtcagcatgaataatctggcctctgcctctccatttcctaccaggtgcctcttccctctaagcacccttcccatacggggaatccatcaaacatgattcttttttgcattcgctgttttctctacctaaaattatttcctctcctccccatctttgtttgctggctcctttgtgtcattcagggctcacctcaaatgttatatcctcagagagaccctccccc

SEQ ID NO: 51230 - DNA, 1841 bp, Homo sapiens
ttggcagaagctcccctgtgcaacttttcattcttgttgctgtctttatcagggcattattacagtgattgggttgtgcaaggagaaacagtaacttcccagttaatttatagtgaaatggacctttttagaactgagacctagagataaagccatggagctggaggatttcagttgcttttgagtgagcatcaattcattagactagttttaagagaacctctcccttctcatgtttgaccagagctgaagatgcctcgactctgcctggttccccacttgcctgagtagagaacaggttcaggtaggagggaacaaacaggttgagcacaggcagagtcaggaaagggcctggcctgttcaggatcaagatgtgtgaaatgaaggtgggaagatgggggtggaaaatgggttttgaccaacatatggatggtcttgtgtgcaagaagcatgtaagcacagcagattgtgttcccatggtgacaagctgctgagccactgtgtgtttagggtcagtgtggggcggggagtagtgttggaagtccatgtcagtcattggtttcctagttagtgcaaactcaataagcctgtatttactggaagccatttttctcatatatacacccccagattgtatatcgcttttctgatttgactttttggctgattgcttttgaagttaatgtggtttagtcaactgaatgttctaaacatctccctttacctacctggtcggtactcctggtgagtttttgaaaggcagtgtctttcccacagagattaattagaagttagtgtgtgcagtacacttgaccctatgtttgacacacattcagtatatggtggtgattatttgtttgaaaatgaaacagagctctctgatggaacctgaagaagtgggattggcacttctagatggatatatgggttgtgtttaactgctttgaatgttagtaagggaaaagtatccacttactattgttcatttcttttttcccagccttaagagccaaaatgattttctgcccacaaacgtcttggttttctttttctagcctgtcttttcatggctaagatatttgcagaaatttctggctagccaccagtccataactttttctcttctttgcagacactgtgtttagtggtatctgaaaaaccctacgaatccaaagttgtttaccctacgaaagttgagattccagttcatttgctaacctgcagtttcttatttcttgtcttggtacttcagttggctcattaaatatttcttaaaattggttgaggagcttaaatatttgttaaaattgtaatgtgtcctgatttagaggaaactaattattatgtacatcttactagatccatctgttgcccattcctcagatacagtgatagaaggagagagaaattctgggccgggcacggtggctcaaacctgtaatctcagcactctgggaggccgaggcaggcagatcacgaggtcaggagatcgagaccatcctggctaacacggtgaaaccccgtctctactaaaaatagaaaaaattagctgggcatggtggcgggtgcctgtagtcccagctactcgggaggctgaggcaggagaatggtgtgaacccaggaggcggagcttgcagtgagctgagatcgcaccactatactccagcctgggtgacagagcaagagcccatctccaaaaataaacaaacaaacaaaaggagatagaaattctgtctccaggcagataagttatagttcatagagtgtgagagaatgggctcataatggaacagttatcctgggtggagttggtgcttcgtgatggtacagatgctttccag

SEQ ID NO: 51231 - DNA, 1007 bp, Homo sapiens
ccatcatggaagcgtgcccagtctgtttccccatctttgatgcactgtggatgataaataatcatcactgctgtgtgatggctgagagggattccagccagtgtgtgctaggttatagtgttttcctgatggatggagcctattctgggaagcagcttattgtctcacgtgaacaggctttctaaaataaatgactgctttcttaatattttgaatccttttcttcagcacatgttttgttgccgtggtttgaaagcttgccaaatatatgcctttgcacaactccctgtagggctgggtatacaatcagaccaaacagtgtgatttaagtttgagcataattgggaattcagcaatcacttgccttgcatttgatggaatggcagtggagtgcttgagagttacttcgctgttaaaaaattatatgtgtataacgcgcacgcgcgcgcgcacacacacacacacacacacacacacacacacacacacagagtttcactatctcataataaagttgtacctgaaaccactgggcaaaaataacactagcatgataaataattgcttgatttttgtgatggaggcaggaattaacttcaacaaatcatagcagttgatactgtagatatgactgaggacttaagttatataaggttgtggaatggaagaaaatcacgtggtggcagcaatacattttaaacacaagcccttgtcaagtccttcatcggttgatctgtttccttgtttctgtgtactttagtaattgagccataaacttggtgaacttggtgttgcctctgtgttatacaagcatctttggattttacattgccaacactgtgcgtgtttgttgctgttggattgtcagttacctataattgagaccttttcgtgtgtctctttgctggtgggaaaaatgctgtcaacagccccactccctgcagctctttgaaaagtcacatgtgaaatccagagtttgtttaccaggctgaaagagatcactttac

SEQ ID NO: 51232 - DNA, 1040 bp, Homo sapiens
cttagaataaaactaagaatatgtgtaagacctctatgctgaaaaccacaaaatatctgtgagagaaattaagagaagatctatataaatggagggctataccatgtattgaaagactaaatagtaagatgtctgttttccctaaattgatttatgaattccgtgccatcctactcaaaatctagataaactaattgcaaggtttttatggaaatgcaaaagatctagaaagaccaaagcagctttgaaaaagagcaaagctaggagatagcctgatttcaagacttcctgtaatgctacagtaatcaagacagtgtggtattgcaaaaagatggacatataaatcaatggaaccaaatagggaatccagaaacagatccacacatagatgctcaattggtttttgacagaggtgcaaagggaattcaatggagaaaggatagtcttttcaacagattgtaatggaacaactggacattcatgtgcaaataaaatgaacctcaacccataccccatactgtatataaaaattaactcaaagtggatcatagacctaagtttaaatctataagccttctggaagaaaacatgggagaaagttttcatgaccttgggttagcagtgatttattagatatggcaccaattgtgcaatccataagagacaaaacatcagacttcctagaaattaaaaaatcctgttcttcaaaaggtactgtttagataatgaaaaaacaagccacagactgggaggaacctttgtaaaacatacgtctaataagggatccataatgtatgaagaactttaaaacctttaaaaactttaaaacaacccaatttaaaaatgggcaagagagttctctagacatcttaggatacacagatggcaactaagcacatgaagaatgttcaacagcgttattcatcattgaaatgaaactaaaaaccacaatgagatgctggtacacagttactagggtatcttcccaaaataaaaccaaaaagaccctggtaataccaagtgctggtgaacatgtaggg

SEQ ID NO: 51233 - DNA, 1103 bp, Homo sapiens
tgagccaggcaccgttcggggcttcatgggactcctgctgaatggtgagccggtggtcccctgggtccatagtctcttcccagtaagactgaaggttctgagtcgagcagcaggtacggggccagcctgcccagggcgtaaggacgaccacccctggcctgggaggagtgccctcagccactccagaagtagcgtgggcatgtgccccgtgactggcagaccagtcagccctcggtggggcccttcctgtccagcccttctgctcctgccccacctgggagccactgtggtcctcagacctggcgcagttccagcctctcccgccccactgtcattcctgcctgcccatcacagtgcccacaaaacccagaggcctcccagccctattgccgtggtggtctgccttccggctccctcgccagcctcgtggcctcatgtcttgtcactttttccttgcctactggagccaggctggccattttttctccctcagacgtgccaagtaagttgctgtcccttctgcctggacccccagacagtgcccaccctgtgacttgagaaccccttctttgctcgtcaccctttatgaagaagacatcccatccccttctgcctgcatcattttcttccaggcacttaatgctatccgtcatcatcccacgtcctgtcccctccagggtgccaaggcacacgcagaggggccgttactccccctcactcccttcacgcctcttgtgtccagcagtgcccacggcaagcaggctgacaggccagggttcttgccttgtttctccaccatgccctctgctctcaagtttatctcctggctctggaaatgctgcccgctgctcgctgcaagtgtgaagccagaatattcaagaagtatatttaaagtaaaagttgagcatgctttccccaagaaaaggttttcatgtcagtgaactggcaacgcgatcacctcctgatggtctactgtcaactggaggctcttaggaaagtggctctgtcatcttctccagggtttggtgcagcccaggttcatagttgtggattatagtcctcgttccttttcttggggtagagagttagggaaatggacatga

SEQ ID NO: 51234 - DNA, 2570 bp, Homo sapiens
tgcttggttcaactttgataacatacccttcatgagactctggggttatggcattgtgagctcaaccccagagctaggtaggagtcttcgtggaagtgctcctggcttcgcctcccctgcagctgctcagtgggacagcctgtgccagggcccctgaatgtgcagttctccaccaggagttgttattgacaagtaagtgtgcaatattaatttagccagatgctggcatcttcagaatcacacatgagtattgagaagtcatggctgaaactgctcgatcaatttaaatttaattaaaaagcatcgaatcaaagaataacatggcgaagtacaataataaccacaagcatctgcatcattttatatcataatccttttaaaaatttttttccaatggtgacaggtaggattaagcaggctgacttgctacgttctcttctactcctcaagaaaacaaggatttcctggcctctaaaagaaaactcaatttatttgtctgctttgatcatctgaagtattagatgtggactggagaatccttgggacttttaataatttagatgaaaggacacacaaagtcacctaatactacttaataatacctagtacctaatatttggatacagtatgtctgaattacttccgaatacttgtgaatttctaagcaaaagtatagttatttcattctcaggaactccctaaaaatgacaaagaagtgcttctggcatcacgagggaggttggaagcaggcacaatttggaaattcagagccagaaaaggcccatctccagcagggtaacagttctcaggttggggcggggggcctctaccctgcagtgggctctacagcagacccttgggctggcagacacagcaggcggtagagctgtgcctcacaggggtttggctgtatgggattggcgcagcccatggggcgtggagggctctggtctcctaaggggcctctgcctgcctgtgagtttgcaatgagggactaactggagcaggtggggtgacccacaggaggtggcctgggtacattcagctctgtcctggactgattctgtgaccttgaggatgagccagatacaattaatctgtgtgcacaaaaagacttggggaaaagactcctgagtgaacttcctgggtctcccggttttcaggctcagctctaagcaaggatagtggtgacttttggctttggcccctctggtgttaagctgaagccaaggaagttttcctgcctctgcatgtacttaggctggttgccccaagggtggcccagcctgtatggaactctctggagcagctaacctggtccaggtcaccaatcctgaaaatcagttggcctttctcacaatgtgccattgtggaatttgcagcaatccttgtttgcttttggctttatctatatattgactaggtgtttgggtccaggccaagccacttgctgtcctcttggagttgacatgctaaggcactagtacccgttatagggcccaggtggctgcccagcaatgcaaggggcaccttgtttattgttctcctgctgggtcataattaaggttcactattcagatgattccaaagccttcatgggcttgatctaggtgacctgctggtttgaaaggagaagctgtagtctcaaaacaccagtatggcaactgtttttttcttctttttaccccagttttctttcagcttctgcataggcacagagtcacctgggtggccccaaacttctttttagccaggctggaacgtaactttgcagggttcattccctctactgaaatgtttttgctacattggaggctcagctcattttttgaggggagcagggtggggagggaaatgctggtcttgtttcttgaaaggaaaatgctaatgtaacttgacttgggcctgagctgttggaaagcgggtctctgcataccttgagtccctccaacatgtcactatctgggaaggtcattgtgtccttgcagtccatcttgtgccttttctgtttatagagcgcagcaaacagggtcaggaacccatgctgaatatttaatgaggaaatatttcaaaggcggaggtgtgcttgcctgtcacctactggggctatatgtgggaacccaaggttgctggatccgtggagctttggacccaggccctgggctgctagaaccctgtggctggacttcagcagctcagaaccttctgctgggggtgctttgttcataattgctcaacagtgaggaaatggaagtggcgggcaaggagtggacttgccagggagctgtgtgtccccattgctcgcgtccaggatgtcatcctaaattgcagtacatctgctaatgaggagacaaggtgttaccttccgtttggagcagctgcattaattacatcctctcagacatcccctgtgcctaccactcctggccagcttcctttgttttaagttaatagaccaaattggagggaaagaggggagggtgtccttggagaccaggtgccctctgctccttgaacgtggtgaggacgttagctcaggactgggagctggtggcaaatggcaggctggc

SEQ ID NO: 51235 - DNA, 1107 bp, Homo sapiens
ggagctcatagaaaagcccacgtagtctgtgtggggtgggtcagggaagacttctctgagcaagtggtgtctaagctgagacatgaaggatgagtgagagttagccaggtgaagggggccagggagagaaagattgttccaggcagagggagttgccctataaagagatggcatccagggagagagtggcatgttcatgacagtggaggaagccagagggtttgcagtgtggggaatgagcctgttcatgacactggaggaagccagagggtttgcagtgtggggaatgagggtgtggctggtgcaggatgagggtggagttgtgtgcaggtgggcgggatgcagggcctggtaagccgtggtggtttaaatgaagtgccgtggagggcctaggagagagccagctgatgagatatctgacttggagaagcccagggtggcaagattggatgcgaggaaactgttaagagaccaagaacttgcaattattaacctaggtgacagttggcccagagtgtggcaatggagctggagagaagtgacagattcaagagattggtaagaaaaggaatctgtaggacttggccatcgatcagacattgagggtggggggaagggaggcgttaaggacagccctgaggtctctgttttggcacccactgccatgacccaggaggagcagaggagagttcagttggaggccgccctgagacagccaggtgcggctttgcagtaggatttatgggcttgaaattcagagccaaggatagcccaggaaatacagatttgggagtagagaggaagacccacaggagagggcagagtggggtgggggagggggccccgagaaagacgcagcaaggaggggaagggcagaagcaaaacccatcgggggcggggggggacatctacatgccatctttggtgctgtgaacaagggacagtatttcagcaggtggaggccatgggtcacagcgaagacgttccaggtagctggaccaacatgaccaaggtggagaggcaagaggtgtccatgctgtctgggacctaggctgggtggggctgggttaggcctcacatctagaaggccccaaatgcccaagttct

SEQ ID NO: 51236 - DNA, 1632 bp, Homo sapiens
ctcccccttataatcccgtcagatcccctgagacttattcgctattataagaacagcatgagaaagacccgtcccgctaattcagtcttctcccactgggtccctcccacaacacatgggaattatgggagctacaagatgagatttgggtggggacacagagccaaaccatatcagtggggctgacccaggatggccaacttctgatttgaccaaatgaggccattaaaagccagttgtcagctactgtatcatcatttcataaaatgaaataaaggaaagaatattttgacaccaacaatataagaaggccatcatttcaagatacaaaatatttcttcagttgattataattggttttatgaaggatttgctccactatacctgtttttttaactccccctttttccttatttctcttttttttgccaaaaactcacacaattctgttctgggtccccaggcctctagtttcagatgagcaaaagcaggtgcagagggaagggacctggccagggtccacagctagtgagatttgtgtattgtttcagttatttctggcttcataacaaatctctcctgactcagcagtgtgaaacaacagtcatttattattatcacctctcttggttctggggctggcccaagcagcttcacttggggtctcagtgctgttgcagtcagatagtggctgggctgtcatcttaaaggcttctctgagtgggtctgggaagatgcaagcatttggggacagagcagccagggctcctctggcatccctttctccatgtggttttcagcatgacggctgcaggacagccacatttctcccctggggcctcaaatgcatgtcctgagaaaagccggtggatgctgtgttgcctttcatgaactggccttgaaagtcacacggcatccctcctgccgagttctattagttacaagtgagccattaaggccagcctgtattcagtgggaggagaattggcctccacttcttggtgggaggagtgccagaggatttgcagacatgttttaaaaccacagtgtggatccaataggctaagtccaaagcgccctagggagggccaggttttaatttggagcgctgggatcttggaacacacccccttccgttaagtgttccaggaatgagtctgctggaggatcactccggtgacggtggcaagctctgcttcctggtccctgcttgcacttgtatgaagtgataaatttcacgaataaggtagattccatcaaataagtatcaattaagctgttttatgatctagttgagatgatgaattaaagtcgatttagataaatgatcagtaaaagaacagagacttcaggaagacagcataaactctctgaattgcaggcactcactcttcatcagaaagcagcctcccacacttgtgcacttgttgagcgcttgctgtgtgcatagatagcactggctggtgctgtccgaccagtgatggctgcagtggtatgtggaagcgagaggggtcccagtttgcactcctgagtatctgtgatccaattcgggtcatccctgtgccatctgttaggatctgagtgtgggaagggggagcactgatctcttttcaatccccattcctgggtgtg

SEQ ID NO: 51237 - DNA, 2042 bp, Homo sapiens
cccctcccctttacctttattcccatctgccctccccaccctaactctcccctgggaagatgcctgccgttgcctgttcccagagagccccttacttgcagtttcagagcctgctgcctcactcctcctccctcactgacttctgtcaatttgaagatctcccagctcattctcaccccaggacctttgcacttgccattccccctacctggggttccattatcaggcccgtccttggcttgccccagctcattttccaggtctcactttaaatgttactccttaaacagcccagccaagagcaccctgtctaaggcaggcccccagctcctctgtttgctcctcatggccctttaaatgcaagcttcatcatgcaggcagagaccacgtccatctgcatctaccatgttcactgttgtttacttagcacttagtcctgtgcctggcccatcggaggcaccagcaagcgtgtctgtaggagtggggcttccgcaggacagtgctgctttttattattatttttttaaatagaagggacttaagggccaatgacttttaattctgctgagtaagatgtagaaaaattacagctaccatatatcatcaacatgttgtaaaagttggaaggacatactcttagaataaagaacagttcttttcttttcttctctttttgttttgtttcgtttcgtttcatttcaagacagagtctcgctgtgtcactcaggctggagtgcaatggtgcgatctcggctcactgcaacctccgcctcctgggttcaagtgattctcctgcctcagcttcccaagtagttgggactataggcgcataccaccatgcccagctaatttttttttttttgtttgtttgtttgtttgtttttgagatggagtgttgctgtgtcgcccagctggagtgcagtggcgtgatctcagctcactgctagctccgcctcctgggttcacgccattctcctgcctcaagcctcccgagtagctgggactacaggcgcccgccaccacgcctggctaagtttttgtatttttggtagagacggggtttcaccatgttagccaggatgatcttaatctcctgacctcgtgatccgcccgcctcggcttcccaaagtgctgggattacaggcgtgagccaccgtgcccggcctaatttttgtatttttagtagagatggggtttcactgtgttggccaggctggtcttgaactcctgacctcgtgatctgcctgcctcggcctcccaaagtgttgggattaccggcgtgagccactgtgcccggcccttaaaggacagttctttaaatggcataactttagcactattgaaaacctgctgtgtcgtccctcttctcacctcttggaggttggatgaaaattctccttcggtccatgagcacctaggaggtgctgcatttgccctcggtggaacttagtaacccattcaatgtggtcttgaccgtgctctcgtggtatttgtcccctacaccaggctgtaaatgctgtggcgggacatggtgttttaggatgagcctttgcaccaggctgtaaatgctgtggctggacactgtgttttagggtgagcctttgcacatgctcttccttctgcctccagtaccttgttggtctctgggtacctccaagttctgcccagacgccctctcctgaagctttgcaggactggccttgcctctcctcgatccttggtaatcactgtcgactcgcctgcctgctgggatccaagtcttctctgttttggaccagggtgctggcgtaccatgttcccaccattgtacaccgtcatatgctgaaggatgaaggatgttggctggtggcgactttgagtatgtggcagaaacagataggccaccctcaaggactctacatggagcccactctgtctttctgtaactgattctaatttctacttcagtctttcattccaccaggttacagaaacagaatcacatttaattgtgggttttctcagccaacagaaagttcctccagcctcctgggtttgcgcgc

SEQ ID NO: 51238 - DNA, 1064 bp, Homo sapiens
cactttgggaggctgaagcaggaggatcacttgagtccaggagttcgagagcagcctgggcaacatagtgagacccctatttctacacaaaaataatgataaaaaattagctggatgtggtggcctataatcccagctacttgggaggctaaggtgagaggatcacctgagcccaggagatcaaggttgcagtgagctatgattgtgccattgcactccagcctgggtgacagagtgagaccctgtctctaaaaaaataaaaaataaaaccaaaacaaaccatgggctctttgtgccacaaacggagaagggagctgagccagttgggaggagcacaagctgtagccaggtctgccctgagaggcctgatagtctgagtggccctgtacccctgtgaggccagtgtggccagctgtgatgggcagcacggccagacacgatgtttgcgtgtttaaggacttcagtctgtgcttggacactctcactcagagtggcccctgggcagtctgctctgggccgagcagggcatgagaaggtgccacagggcagaacgagaacacgaatgcagaggccccggctccagcttccagtgatttctgttgggggccttcgatgtcctgggcaacgtgctgaccactctgtaagcactatccctgctcaaggtcaccagcaacctgcttgtggctggtgccgtgactggccctcattccttatctcgtgggaccccattagcagcggttaacacagccactccggccctcctcccctcctcccctccgtccttcctcccctcttctcctcctcccctcctccctgaccgtcctcacctggcgtccaggacaccatggttcctggttttcctccctcctctcagcctcctcagggctcaactgtggtccccttgtctcccattgtctaccttggggctgctacagtcaggagcattgagggtccctgtggcagaggggaggaggcacctgatttcagagagcggggaagtgcaacctgtcctgcaccagaaataggtggcgccccacacctcctcactcatttcccaactctgc

SEQ ID NO: 51239 - DNA, 1064 bp, Homo sapiens
ttcaatttttttcttttttttttttatgagctttctggtacgtacagcacataatcctacataaaatggctgagcacgacactggcataaacagccggtgatggggtggaagtccgtgaaacgacgggtttgcctctgtgggagaagccgcagtctttcagcactgagcaggctccggattccagggctggggttgccaggtcttctgagtgctgctgacctgagggcggcactcgagggcttgggtccttggggagggacgctcaggcccctgcctgggaaggatgcctgcgtggcttgaaccctgacctccaccatcagccacatgtgccatttgggacttgtcctttttctcaccatttcatgaaaagcttgtgttgcttttgccagccagccagccagccagctgggaaagctggtcccacatcatggctttctaaatgacgccctggctggtcgcctgatgattgagcaggccatggttaaggctcttgacagcacgtccaagggccaggtgccccgtggaaagactggagcagacttgatgtcagttccccagctgttgtggggttgaaggggatttaccctgcaggagtaacgctcctattgctcgagctgttggggtgtggacgggggaagctccagcttatttatcctcataaaccatagtgctatcccctttgtcccacgagttccagtatttcattatccaaagtggatctcctaggctgcctccaaattgcacacaatgattttgtcagattttgaggtctgagttttcctttgcagaataggaagagtcactctgtcccagccttgcacctggtacatagtagcccgagtggtggggagtctgccaatgagatgataaaagactctcagaggttaaggctcttgctcaaggccacacaggagacaggctctgagctcgggggagcccgacccttaagactaaatcctcaaggaccgcgagtgcctttgaaagccctgccccgccgcctgggcagctggagtgggagccacgcaggcaggcacttgtttctgagcacagctgagctggcggg

SEQ ID NO: 51240 - DNA, 1003 bp, Homo sapiens
cctgcaataaaacagagcctccaagaagtgcatgaagcgaatctcctcccagcctagtccaccacccctctgcagcttcccgagctgtcaccctccagggtggccacatacagtatttattttttttaattaagctgcgttgctgtgtggctcaccctccacagatgctttataaagcccagccttgtaagttgctgaaagtttttatttttttttaagcggatagtaaaattaagcagttattagtattcacgaaaaatgctcgtggcaggcttcgcacacgtaatgagaagccacctgcagttcaaagcagtacttgataatgctgtaattagatttgagatgcaaaaaagctcattaaaattaaataacatatttgtcactgttttaagaggtacagattgcctagaaccatgctggtctcttgaccttgagtattttggcagagtccttgctgccgacaattcaaaaataacatcagcaattctgcagagagtcctgaaaacatgctcatccttggttcagtttgtattgaaaaaattatatagatatccaggggaaatcacagatttgtacacagtgtgttctgggagaaaagggtggccacagtcctctctgagccagtagctcagacgctgtgaagaagagatggatgtgtgcctgtgggaggctggggcaggtggaggggtcccccataggacacggggacactgtgagggagtttgcaggaagcggcggccttgggcaccactgcttaccactaagctgagctggatgaagccacttgctcagagcaggcccagggcgactggtaatcagattgtcagtcagtgtttcccgggtgcctaccggtgtaccgggtcccgggcaggggatggtggggccgcaagtgccagtgagatttgcctcaggctgcaaaagaggtcatagcctcatcacggagatgaggcataaagtcaggtgccaggaaagtatttattgttaataaaagtagctaatgttg

SEQ ID NO: 51241 - DNA, 1001 bp, Homo sapiens
cccatttgaccagggagtgcaaccagcagaccaaaggtaatgcatttcagctgcctgtgggggaaggtaaatgtggtttattagcccccctggctcagagggggctgggcactggtagcagctgaagcaaggcggctctagatggagggaggggacaggttggtgattgtgtgccctggtttctctaaaggaaaaaaaatggacgtgccgcctgttagctaatcaacagtgaggagaaagtcctgacaacaagtaaagaaaacttagctggcaataaaataagggactttttatggtggtttttatgagaacattttcgctttgggagttattagagttagtgccggttgtgacaaaagctgcatttgcatatcgccgtgatgaggtctggatggagcctgaatgcggcattaactgcatatcagagaccctttcagaagccaaacaggatgacatttattgcaagctcgatgccgcacgtctggcattagttactgcttgttgtgtcctgtggaaactagattttctgtcttgggatctttctgggactggtcgcagcagcttcctaggtcaagaacaagctagggctttgggagtgtgtgggggatctcggggatggggaggggacaccatcgggagaggagaaggagttaggcttcacagggctgcgcgctggccaggtgcctgtcacaggctgacctagatgagactgccactctcagattcaagccccacaccaggacaaacaggaatttttcccacttttttaatttttaaaattacgatgtaattaacatatcacgcaatttactcattttaagtattcaattccatggcttttagtatattcacaaaaacgtgcaaccattgccccagtctattttaggacatttgtgttaccccaagagaaacccctcacttcttagccgtcaccccaaccccctcatcctccctagccctaaacgaccatacatctacttctgtctctattgatttgctgc

SEQ ID NO: 51242 - DNA, 1081 bp, Homo sapiens
ccagagcatcttgaatgctcactcgagccaggcaccaggatgcctaaagcaaagctgttggagtcagactttgacctaattgagttggggttccaggaagatcaatctgatcatgggacaaaacgaaacagtcagtgcctggaggcagaggccccgctgagtctttcttgggcttcttggaagaaggccacaaaggtcaggacgaggaacagccggagaagtgtgactgcatgcatgtcaaggagaactcatcagcaggacctcctgctgtgtgtgtgtgagatggggcagggagacggatctggcacttctggcctggaaaactgggcctggggtgaggattgtgtggtggctgatgggaaggggagaaataggcgtttccacctgtgccttgcctttcagagtgttggcaggcacagagttcagttggctgctggactgtgcaagggggacgtgggagacaagggatcccacagaatccatctttatggaatctacctttcagagagagcagatccacgtgaaagccaggctctcgggagcagtagagcatctgtgatggaccctaggtgagtggcttgcccaggaggaaaggacatgggccaggatgatccaggagggctttctgagagggaggagccaagctctccgtgaaggatggatgtgccgagcatcagcagaggagggaagagaatattccagacatgtcaggcaaatagcaagcacagggtgatatggtttcgctgtgtccccacccaaatctcatcttgaattgtaactcccataattcccacttgttgtgggagggactcagtgggaggtaatagaaccatggggacgggtctttcccatgctgttctcgtgatagtgaataagtctcacaaaatctgatggttttataaagggcagttcccctgcacatgatttcttgcctgctgccatgtaagacatgccttctcttctcctttgcctttcaccatgattgtgaggcctccctagccatgtggaactgtgagtcccttaaacctctttcctttataaattatccagtctcgggtctgtctttattagcagcgtcaga

SEQ ID NO: 51243 - DNA, 1060 bp, Homo sapiens
ttctgggccgggtcatccactcctccagaagagaggccagggagcattccatcagccccacctctccagaggcccggcacacagtaggcactcaatggttgtaaactgtatccacctacaaagcccctagagcttgtgagacccgggaaacagcgttccatacaattgagtgacagagccctgcgtggaaagggaggcccgtgttggtgccctgtcctcatccagtgggaggggaggagagacctggaaggaagatgggagtcccaccccagcctgcgtgtttctctgggaaacaggtttcaagtgcagggaggtggtggagggctgacttcatggccagcactgtcctgggcaccgtgggtcgtggaagggaggtggagctcggttttccgtctgggcctcaggtggactcagaggaggttcttagagaaccatacagggcatatcaggtaagcacgggtacacaatgcagagaaacagtgcttgctgcaattagagaaagcagagaaataggagctggagtggtcactaaaggcacgaacggccttgacggtggagtggggagaggcagacacattgccggcacaaagagcatgctggatgacaggtttcgtggcttgtttgttgctttaattgatgtggacaggggattccaggtaggagaatccaggcaggctaggaaggagcttggctctgtgtggggcatgagaagacgtgctggtcttagcggaaggtccccagaggaggggaggctcaggggccggcaaggtggctgagcctcgagcaccctccacagagcaccgtgccaggggcctggggcgcatgttgtaacctggctgtctacactagatgaatagaactttcacaggttagtggcttcatcttgattgtttaaatttcataaggcgttgggaccccttacgagtagctctgaaagggaatggattgctaataaatgcaaactgtaaaatattcatttgagatgattattttatattattgcataagtgcaaaatgaatgaactttctgcttacttatggtggaatccacaaccatctg

SEQ ID NO: 51244 - DNA, 1055 bp, Homo sapiens
ttgatgctgggggaaggactctttatgatcccttccctccagactttggctggctggctgttgaggtgagtggaaaggccacaggatgactctgccgtgggtattgggtgggccagtggtaggggctagctgtgcaatcaagaggctatgaggagtgaggtttcctcttggattggccttctaattagtctaggatgacataaagaagcctctcttttaaaaaaaggcaaatttggtcagttcttggtttccagggttttggaatgtccaggcaaaattgccttggcaccttctgaaatcctagagaggtagtgtagcccacttgctggggctgacttctgttgccagcgcctcacctccatctgattgcagggtattggttggccatatgcttcagggatttgaaggagggttacctatgtctagggcttaacgtgttcttggagaatattgggcaagagtatgattccctgagtctgggggaaggaggagctccagtggaacttccagtcaagatgccaactatgcatatgtgggaatctctgttctctcactctaaacccatagaaatgttggattagttataatagcaacaaaaacatagctgaattcaaaggtgaggttgggagatttccaggtgccggaagccaggatgaaatttagagtgcaagtcgagtggccttactggagtttccacagtaaaccccttaagggctgaggtttcacaggccccagggagctggaaccaagtttcttgtacaaaactgggaacaagaagggactgtcttttctgtcatcaaaaaatagaaaaattcttcccattggctcaggaacacggtataccccagtcccccaagccgtagcttctaagagtttccttcaagaacgagggataccaagcctaagctgtatatagatatgagaccaaatcctgcactatcaatgtgggcagaaactccgagctgagaacctaacataaaatttggtcccgaattagtggtacccttaaagctgtgtcagatgtaagcgtaaaacttgttatgggggatgattcc

SEQ ID NO: 51245 - DNA, 1041 bp, Homo sapiens
gtagtagaaggggcaaataaattgcagtattcttatataatgaaatagtatatagcagttgaaatgaataagctaaggctgtgtgtatatatgtataaagatcaaaattcagtggggaaaaaaacaagttgcaaaaagaaatgtacagcacggtaccatttatataagcttaaaacgtaaaaaatatttgttgtttatggacgcctacgtatatagtaaataaaaactaaatggaagatagcagctgcctctgagagggagggaggagaatgagatgggcaggtacagagtagctgcagttatatctgtaattcttttttatttctaaaaaataaattggaggatatctagtgaatttttatgacagaaaatacgattggttggcacgcaggtttttattagattatcctctataggttttggaaagcttgaagtcttccataatcatcatcatcatcactgagaaatagagaagaagagagaatgtgtgaacacatgatggattctcagttctacgtgaaaactgctaaatgaatactagttggcgagcccaccacgattattatcatagtgctaacagctgccattatggagagggtgcgatcagccagggacctcacctagtttcatattcagctttattatcacctatgaagtaggacttacgatcctaattccacaacagagacgactagcattcagaaaggttaagttacatgctgatgtcatgcagtgagtcagttatgaagtcatgattggaaactaggccttttgggttcaaggtttgtgctttttccattccgctaacatctgaggtgattggcttgttatctgaagttactctgtttttatttctctttcagctcttcttccaaacctattttcgggcatagtttgttacgtttctgctaagcgagttggctctatcaattacagtatttttgttgccacagcaacaataatgcagccatattattaggtatcactactgttttgttctgctgtgagcttcagccaggcaggtgccctgctatttgcaga

SEQ ID NO: 51246 - DNA, 1074 bp, Homo sapiens
tagtaaattaaaagtttcaggaatgggtcttctcaggagaggggagcgtctgctgttggctttggtgtggctacgccagctgggccctaatctcagcctttgcccggagagattctgcagcacctgccgagtgagcagtcatcccatttgagctctgtaagagatccagcgttcctctgggagtgtcctgagcacgcccaccaccacctgtccctgagccttcccttgcaacagtcttgccttcctttcattctcttctcagctggtcttgagtccgaagtgagcggcttcctttgtcgcttgggagctgcagcttgcaccgcactcaggtgtaaggacctgcaggtgtgtgcagacacagtctgtgtgttcctcagaaggaatgaccacttgaagcagagctttgtgacgaggccttccccaagtgcatctgagaacgttcacaggacttctgagactctaagatgagccgtcaacctgtgttgcaaatctcctccagctttaggaattagtttaaaattaaacttacagacaggccaaatctccccagactcaggccgacttaggaaagtacaatgcgtggcttcattttaacaagtagttccctgatacggtacatgaggaaaatgctgctgaacgtcagctagttaacttgaggacccagcatcagccattctccggactgcgagctcagcttgtttcaagtctgggggttcatgtacgaactacaggctggttctggggtctcagcctaagctgaagatccggcggggaccaatatggacaaagcatagaggaaactgcccagtcagaaaggcagtgagccagaagccaagatgttccttaggaacacccagggagggggcagcgtcaaggccagggggtgcagggcctgccagctcacctgtctcccaccttcacgtacatcctctattctgggaaagtgtgatcgatcctgctatgcatattgttgcattccatcttcattttgtgtctcttgattgttggggttttttgtttgtttgtttttttgttttgagatggagtctcgctctgttgcccaggctggagtat

SEQ ID NO: 51247 - DNA, 1029 bp, Homo sapiens
ttgtgtgtctatttgtctattttaacccagaacatcttctgagaggatcagttttaccaggcaagggcaacttttgatggtttccccaatagcattcccgtcttatttcttgccgacaggaccttgactgtgttcaggtgtcagtggccaaattcttggggagatgccagggccctctccagtcccaggggataaacctagatccgtctaagcccatcatggtcagtgattggtttaggggcggcctgtaactcagttattgccagtgagatggctaggcacttctaggacaatttcctggctcttaaaaaagggtgtatgatttctgtcttctggactttggaaaatgtgatggttatgggaggccgctatggtcaccttgcagccatgtgggtccagcccaaggtcatagcatggttgagccgagagaaggaacccagctgacatcaaccctacctccagacttcttgtgacatgagatggtacattttccttcttctttaaggtaatttaggttggattttctgtaattttgcagcccaaaatatcctacttgaaagcaaaagacatctgccctcgtattcatgcagcggtgtggtcgctttagcctttctccaggctcattgtgttgtgctcagttttgtacacaagtacgttcttttctaaatggcaagacgcttaagatgcttggatttcctcttccaccgcctctctccagcacagcactgagcttaatatcttgtatgtcgtgggatatcaataaacgcttattgagttgaatttgagttttacggacatgagtttaaatttggtgactacccacgggcttctgagaaattattgaaagccaatctatggcccaaagagaggacggcctgatcaaggcatgtgctgttgggccaggcagaccacgatggggatgaacgtgccctgtgtgaggtgccagagaaaatccatcatgcatcccgagctctgttttttattgaaaaatccatttataaataatctggacaaataaagtaaaaggca

SEQ ID NO: 51248 - DNA, 1031 bp, Homo sapiens
catccgccagttggaacttttaacctgacggctgcatccttcagccgggtgcttggaaggcttcacaggcaggagcctcaggggaagtttattttgggaaattgctcgcctgccactagtgttctctagaaacgtgctttgaaaaaagagaaaccagcttaactgcccacttttatctcaacttgtctacaaactgaaagtcaagttcttgattggtggtaaagagatccccccaaatcagaagcaatggctaagctcgcagtttattatgcagtaaatgtccttgaacctgctaactgccgcaaacacttagcttctctcaccacttgggaatagagggaattagtgaaaatatagctgacctgcgttccgccagcaccagtgatgttaccatcttgtgaacggtgatgttgggacttagggttgattttaaaaggcagcctcttttggtcctccccaactctaggtttttatttttggaatgttacaatctagagcttcggaaatacatggccactctcttccaattgccgtaagttttctgttagcagtgacaggacccaggtgtttattagctggcggggtggtagctggagtgtggtttacacaggatgcctggactgcaggcttgaactgaagtggtggaatgtccagttggtttcacgttggacagaagccccagagtccccaggtttgttaggaccagggaagggttgagtgtgtcctctgtgcccgtggcccatcagcttgacctgttcatccttcctgagtcatgggaaaggtcatccttgggaatgtttattccttctagaaggtattttaaaataccacattattaggctgagatatttactggttagcatcttttaggtgagggcacaatcctcccctttgaaggaggctagagggcattgtggaaggaaggttagttattgaggctcccttccccaggtggctctgaatggttcacctctggcctgagaatgggaggagagtctgtccgcaggagtccccaaaacctcagcctgctg

SEQ ID NO: 51249 - DNA, 1054 bp, Homo sapiens
ttgcccagagtcgtgccgagtgggacccactccccttgttttctcattcttcctctctctcctcttcgtttcctgctcactctcaagttaacttgctgtttcactctcttgcttttttctctttttccaagtctttttcagtctgcagaaagaaatgcctcaaagtgcagtttggaggtttctaagtgcgcagctgctcagggctgggaaatcctgctgctgacatgcacacatgcttcttgtgtgtgaggccccaggtgcgcagcccgacccacaccaagccccggcgctggcctcctgtccaccttcttaatgcaccattcttagtttagagcctttcctggcattggcacaggggcgtggtgtggcctctccctgagcagaatttcagggatcttggggacggccagggccatccactatgctgtgcatgtcccctaacagtgggatctcgatggcttttatttttacatggttctgcatgtgtcttctttggattttactgggacaaaagccttcgcggcagaggcttcgtgccagggtgcctgtgatgcacgttggggtgctctgacaccccaacaggagactgcccgcccagggtgacccttgccagcatctctaagcaggacacctggcagtgaatacttccgagaatggaaaagccccctggcactgtgcccacactgatcgataagtatttgcatgccctgtccgtgtccatcgatggtcattttgttttgtttctggcgccccgcaggccccgcagtttattcttagcatcttcagccctgtctccttggtttggagaattaggactgcctggtatttctgtcacgggcgtggattggcatctgtggtgtttcctctggatcaattctgatctaataaattgttactcgctgcccatggaaagggaaagggagttggcctgcgggccttgtggcattatgagataggaaggcgagttcttggaataaaggactttttgcaattcataagtttctgtgtaatgagtaatcaccagatcatctgggggttctgggctggagattct

SEQ ID NO: 51250 - DNA, 1048 bp, Homo sapiens
gctgacttggtgtgctatggcgtctgacctggctgaaagccatgacgcttggcctttggttgggatagcaccacttgattcatcactggcagctgcggaggggcagagcggagggaacatgtcagtactttatgggcaatcccaatgtgagaagggactgaggccggatagcccagtggtggaaatcccgtcattgtagaagggagggcctgggatctcaaatctgggaatttttgagttagatctagaacctgaggctggaggcaagttggatggaactgtctgtgcttgtggccgctgctagccattgagccgagtgccacctgcaggagcagtgatgatgggggtcaggcccagcccctgagtgcacgctgcccgccagtgtgtgctgggcatcacggccccctcacaaccctgcaaggtaagacgtgtgactcccatttaacagatgaaggagcgagcctagtgggattatgtaggttacattgtgagtcaatgacagggttaggatctgaacccaggagtgaggagtgaatgcagcgtcaccggaaggaaaaggaaagaaggagaactggaggatgatctgtctcaggcaagctttagtctgaggttctaagtcatgctgtgaaggtctctgcagagtcactccttggcttcattatgcagagagcttgtagccaggtggcactgggcaggggctcatcccaggtgcctaaaccccacatgcatcaaaacttagaggagaccagcgtcttctgctggtcctttaaaaatagtcatttgggccaggcacagtggctcacacctgtaatcccagcactttggaaggccaaggcgggaggatcacctgaggtcaggagttcgagaccagcctggccaacatggtgaaaccccatctcaactgaaaaataaaaaaattagcagggtatggtggcaggcgtctgtaatcccagctactcgggagcctgaggcagggagaattgcttgaaccaggagttggaggctgcagtgagccgagattgcaccactgtactccagcctgggcgac

SEQ ID NO: 51251 - DNA, 1036 bp, Homo sapiens
cctccctagacagccccagccctttctctttgttccaaggggcccagccaccatattgattgtttcatccctctgcactgcccagagctgcctcctggagcacgctctcttctttcctgatggcaacggtcccacctgatggcaatggtccctgggccagaggatgcccattggtcttcatggagagagcttgggtcaggcccacttggtctccaatcctggcttcgccgcgtgccagctctgcagtggtgccagcttatcctgctaagcctagcttcctcttctacgtgggtatatctgcctcaggtgcagctgtgaggatccggggtgatgctcatgaggtgcccggcaccctgtgtggcacagaaatgaccagaaaataccaactcacccaatgccaagtcttcactgtccttaagatctcaaacctttttttcttgatcttcttcccttgatgaccaacgctcttgttcctctcgcccttgcgggccaccccctcatacatctttccttgggccacaacttaggcctttgccttgcctttacttacctgttgatccacccacccacccacccacccacccatccaaccattcatttcttgcttcattcatccagtgatgtactgaatgtttcctacatgtgtatgtcaggctagggtgagcaaagcagattcagtgtctccctaccctaaacttagtgcaggagaggatagagacaatggaacaggtgcatgtgcgtgtgagtatgtgtatgtgtgattgtgtgcgtatgtgtgtgagtgtatgcatgcgtgtgtgtatgtgtgtgtgagtgtgtgatgggaggtaggtgctaacagggagagtcttgagaaatggatactagggtcacctaacagggtcctgaggggtcaggaaagcttcatagaggaagtgactcttacctccttgagcagatataagcaacctgaggccaggggttgtgctttctagggcctcagaacaccagcatcgtcaacaggtgagtgcctgccatttatatgaggccctgggtt

SEQ ID NO: 51252 - DNA, 1090 bp, Homo sapiens
cttatcctcctagcaacgcggccctctcggctcttaaggcgtgacttgccatggatgttctgcctttggaaccagtgggtggtcacagcacagaggctgttggtttcatggctgtcacatgcacagagacagccctgtccactgagcctgttctgtggcagaaggaaccccctagcctggaccatctttgggtggaaacaccagcccctcacgtctgactgtcattttcagatgtgaagagaacacacagtgttgctgatgtgtttgtattgcctgtaaacaacgaagagtttctttgacttcttaactgccttaaagctagaagcccggcattaggatggcagtggtggtaatgaggttatgttttgagacttggcctcattagaagtgatgttctttatttgggcacttaggccacatataaaaaaaaaagaaagcacctcttttaaaataggaatgatattgtagttactgcattaggaattaacagggcatgaaataactgtctgccctgtggcaatgccagatcatttcagctccgcttgcagccataagataaattggtatcttgcttgcagccactggaaaacattttaaatagccagccatgaacatgtatggtgcccaaatcaagtttgaaaaacagcaataaatagataaagtggaggtaaggtgcctaatgaaatgaatgaggggcaggagctcacagaaggcaaacaaaccagcagggaggcgctgcgtgtttcacatacaatacgtatttctacttttagtaaaaaatcatgtgtctcacgaacagaaaacccaacaccgcatgttctcactcataagtgggagatgaacactgagaagacatgggcacagggaggggaacatcacatacctgggcctgtcagggagtcgggggctaggagagggagagcattaggagaaatacctaatgtagatgacaggttgatgggtgcagcgaaccactgtggcgcgtgtatacctatgtaacaaaactgcatgttctgcacatgtacgccagagcttaaagtacaattaaaataaaaaaataaaaaattataataataagaaaattaaatta

SEQ ID NO: 51253 - DNA, 1094 bp, Homo sapiens
gtgggcagttctgccctcaaccaagtactcacagggtacctccaggcagacttctagggcctactttctgcacaagattcttctctccagagcccagacctgtaagttctagctgctttagcagccccaaactcttgatttttgccttctcctataatctaggctgctgtgccccatcgtcctgcataatgggccaaaaggctgggcaaacatggggcttatcttgtgtgttttttttctggcagaaccacagtcctgaactgcctgttgtacaatccctacaaagagtagcctcagatatttttgtctagtttcatgattgtttacagcaggagggcaaatccaatcctagtcacttcattgtggcaggaatcaatatctatttggtttaatgtttaccattccttcccattccctataccagctcatcacccttgtcagcggcagttctatatatgtttgtagtcctttcagttgaaataaaattgagtcaaacaatttataatctgaaatgaacaaagaccatgtaaattcttttcagttgcctttttaggctggtatctgtctgtagaggactcccagggaaggattctcaaggaagactcaatgggaagcctttggatggcaagctacagggctgagtacgagggtggccttcctgtgcggggtgtaggattagcatcagagaaacaaatcaggaatccctgggtataacagtaggggctgcattgtcattttagccttctccagagatgcatgatccaccccccaccccgcaggtcttttcctctctatgaaagtcactgacaagttcctgtggatcccctggggtccccaggaatgtatttctactctgagggccagtgagtatctttttcttggccatgagccatgaatagaaacgggacccttaatactgcctgacctgccacatgcagccctctcttctgggactgtctacacaagtacatttccaccatctacaggggcggaattccggtcatttgctacaggggaaattctagatttttgtttctaaagggccccaggttaccaaggtctcttgtatattagaattttaccacttctctctg

SEQ ID NO: 51254 - DNA, 1035 bp, Homo sapiens
tagcatgcttgaaagaaagggggtgggggaagatgacggcaaggctgacgtcagggcccagtgtgccagtgcagaagcagggaggccccatccctggctggaaatttactgcagctcagagaacaggcctgtgttcctccaaataaggcagaaattttcctgcattgctagttgtacaaacacagggaggcactgagcagtggcaggtggcacttggagattttctgaatttcaggcattgggtcagcccgtaaaggcttccctggggtatggtggacttggtcagtgactggttggctggaagtctctctcctgggtggttacctggtatataatgaataaaatatagcactggacaacttaacagggaatgggaggcgaaggccagtgagtttcacagccattttcaggggatatttacaagggacccttaccttggttaaagaaaaatgtaatgtgaccagagctacgtatttctgatttttcgcctccatcttggtatccaatgaatcacagctaatatgagctctgactgtatgaaaggggttttcttagttgaccactcagctgagagagctaccaaatcagaattccacaggagaggatggttgggttcctcagctattttggaggatgacataaaatgttgcagagggagaacccttctctgcaatcagacgagattttcctcattgttctgcagggcctcacatgttaccaatgaaagccagctccctggtgccacgcgttttactcattgctggatccctagggcctagcacagtgcctggaacatgcacgtgcctctgggcatattcagtgaatgaatgaacaagggaatggaggtgggtgaaggtggactgctagggaaaccgggaacatatgaaggcagcacgaaatcgtgtgtgttggggtgaaaatggacgactggagtctcagcttattgaattgtgggtaatgttcattcaactagtcagtcaaaggatattttgggaaacttcttataccagatacatttcttgccttcatggagtc

SEQ ID NO: 51255 - DNA, 1028 bp, Homo sapiens
agaggaaaaaacgtgaagtgatgaaggcagagagtggaatgatgcaactcaagccaaggaatgccaagtgttgccagcaagcacctgaaacgagataagaaaagattctccctcacagccttcagagagaacatggccctgccagcaccttgatttcagacttaagacttccagaactgtgagagaatatgtttctgttgctgtcatcacccaagtttgtggcactttgttatggcagccccaagaaactaatacaatgagggagtgagtaggaaagaacatcagaatcagccctgaggcttgtcagggacataggaggtccaggaaagcaggtagagaagatatgaccatgaggtaggaaggacccctcaggagaagtgcactgtgacagccaagcgaacaaaaaaggatgaagaaggaggaggtgatatgctgtcttcaggtcacattcaaagagccctgagaactggccattgattcagcaatgaggaggtttttgacaaaagtagttaagtggataggcgggggggaaagtctgttggagttgatttaaaagagaccaggaggaggccgggcgcagtggctcacgcttgtaatcccagcactttgggaggccgaggcaggcggatcacgaggtcaggagatcgagaccacggtgaaaccctgtctctactaaaaatacaaaaaaaattagccaggcttggtggtgggcgcctgtagtcccagctacttggagaggctgaggcaggagaatggcatgaacccgggagacggagcttgcagtgagccgagatcacgccactgcactccagcctgggcaacagagtgagactccatctcaaaaaaaaaaaaaaaaaaagaaaaaagaccaggaggaaagaaatgggagacaagtaagtaaagatgtctgtttttagggataactgcaaggaaagcaaaggaataaggtggtagtgttggagacatgaggagaaggtttttttaagattgaagaaatagcagcatgtttccctgcaggttggaatgat

SEQ ID NO: 51256 - DNA, 1030 bp, Homo sapiens
gaagagggcttgtttggcagcacagcttttgtgtgtgtgtgtgtggggggggggggggggggtgggggtggggggtgtcagaccccgaggctacccttctggggttttgtttagattcttctgtgcaagttcccaccaagttttcagtgagttagactttcagggtaatcccggtttgccttgcaaagctgaggaaatgaggaatgtcatgggtatcaatatctttcctgagaactgaaatttaccagtagcacattcctatcgggcatttatcaaaacaaacatataggtcaaatgaccgtttactcagcagccacctgtcagtgccttgggacgtcagcagtcccggggatgcccgtcaaagcagctgagtgatctcggccctgaacattgccaacttcccgcctgatgccctggagctgaggctccagcttgaggcttcccagtgctttggataaaaagatgggtctgcacctgagagccatatacatctcgctctggggagaaaacccaggcagggctttcacacagaggaagagtgaggccaggatttatactcagagaggatgggcaaatagcattcacgcgtgtgtcctccagggtggaatctgccaggctgacttacagtgcaggaattttgccagtcagtggaggtagatgtgtttatagataacgttaaaaaaaaaaaaaaaggcaaaaaccaagacctctgcaaccttggtatttgaaacacagaacacgggtttgtgtactaagtaaaatgtggttaaataagattaatctattgatggtggggaagagagcctgtaaggcagattgggtgtctcagaggcataattatttatcaaactaattaaaatgtaaccaccggctcatcgactctggaaaccggctttcctgcccaagaagcagccctctcctgagcacctgtgattttatttttcattcattatcccactgaaacacaaaacaaagacccaaattggccacctggagtggccgctctcaccctctgcctggccatggcctg

SEQ ID NO: 51257 - DNA, 1019 bp, Homo sapiens
tgtatttccaaatcaggtcccattcataggctctgaggttaggatgtggacgtatgttttggggtgccataatttattcagcttaggaggacagtggtttgatacaccgtgtagaggactggacctcacagcaaggccgtgggacagaggcagctctggcgagggactgaccaggggctgtgctcactcgcagggcctctggtgtctctgcctccactctgcatgcctacctctctgtcttctcactgccccccagctttgtgttccctctggtgtcccctttctcttcgtcttgtggcctctggttctcacgccttgcctcaattcctcctggcccagcttcagcgttctggccttggtctcgacgacttcttggctgcagtttctgctgctgactgcctcattcccatgcccatgctgtttcccagttgggttcctgagcaaggaggtcgtgccagtcatgcctgtcttctcacatgggcacagatgacaccccgccaggccaaccttggattgatggtcctgggggtcgtggggcccactcgtggtccagacagcaggatggggctgtggtacgaagcataaccacctccacctggcccttggaaggtgcaggaacatggcagaaacagggtaaaggttcggccgcctacaaaggcgactgcgtggtccctgcaggagaacttccagggcgaggatccaactaagtggaattgtcaaattgtcagttaactgaagtatttccagtttgagaggagagagcaagagataataggaacctggagaaaaagcagccacagggggtgttcggcttcaatccaggtccgttcaccccttacgttcaaaacagcaaatttcaggaatgccacagtccgttaagcatcaaagagagatggggccacccacgttcactgtattacgaccctcattagacagaaaaggacgtctgtgattgaggaaagattttccaacgacatccctcagttgcccatcaaagttgcctacttctcatttcctca

SEQ ID NO: 51258 - DNA, 1040 bp, Homo sapiens
atgataacattgagctcttcccaccccactgatgtgtctttgatggcacagctgtggatatttttatttgcccagtcaagtcggctcctcggtgcacatgtctgaagtgaaggcccttgggtctgcaagctgcagagggcactggcgccagccttgtgcgttgacaggagactgcaggaacccgccagcttggttgctggcttcctgagctctgtctgtgggttccctccctggaatggacaagggggagcagccgatttctgatacagctcatctgtctgggtcactggttccagaagttaattttggatggaacttcacaggcacctggcgtctggttatgcaaaacctgacctttggcttcactctggggccttcccttctcctcaccccagggctcctgctgcctccctctctgtgccattctttcctcttaaaaaaaaatatcctgctgacaggagctttctaacttgtcattttggagatcatcaacaaattctatagagaggtgacctccattatgagaaagagacggggagttggctgggacccaagccaaggagctggagcctcttttgactggcaaggtgacattgagtgtcatatcagcattcatggccagctctcttctcctcagagagtaattatttctttcagagcgaaaggtccaatttgctgtaaagaacagagccccaggtaaaacgaaagagctataagctcccctgacataaaggagaccagactgcccccgtccccagccctgctcactccacatcataatggccatttggccagatttattatgtttacttgtacttccttcctgtcataacacattagggtggttgcacattgcatgggtgaggccggctcagcaggtggagctgaacaccttgcagctgacactggctcttgtatccttggccagcacctggctctgggcagggattgagatggcacctttggagaaacactgggagagctgatgcctggcatttggggccaagctgagctctgggccctctgcactctcctggtat

SEQ ID NO: 51259 - DNA, 1007 bp, Homo sapiens
agggaggccaaataaatatttcaaggtcacctaagggctcccttgggtcttgtttatttatagcatcctggccacctccatctagaaatgtttcaaagtgcagaagtatgaatagtaagaaggcagctcttcatttatttatttggttatgaatgtatttattttcgctgtctctgccaactcgaagggcctgggcataactggccagcacatggccctgctctggcccttggcatctgcctgcttgctcagggagcatctaagtggaactctgcattgcatttagtcctcagctgcaaaaaggaagctagttagctccagggggctcgcgaggagactgtacctgccaccacacatacacgtgagccaaggtgtgctgtcatcctggagaccctggcccaattccctggagcatctatggagacagagtataagcagtgcctaatttagtgagtccagcagtgtggacgttccataccagtgaactcatgcagcagaaggggtcagtattagctgggcttcattgtcctccctctattcctggatgataccgccctcctaagaggtaagtgtcatcacacccatttcatactagagactggaagagatcaaaattgtagccccaggttgtgaacatggaggatggtggagctaggacttgaacctggctctgtccgacgtcttcccctgtctcaacactggtgtctcttttgccctggagatggaagccaatggtactgtctgcccaggattggttaacatttgtccccagcccttgcctatgtgagcaaaatgacctctcagataggctgctccctgggagctagtctgtcctcagcctgtgtccaaaggctctaatggatgagatcacagaccggatcacagattcggatctgtctggaagtgctggacccctgctgcatgtccattctgaaaagtgctctgcccaggcaagatggcactcaagctccactctacattaatttaattaatacaattaatttaga

SEQ ID NO: 51260 - DNA, 1048 bp, Homo sapiens
atggtgaccatggtggtgaatctgctgctgctgctcatcaggaggatgatgatgatggtggaggtgacagtgataataacgatggtgatggtgatgacagcgataacatggatgatggtgattttggtggtggtgatgatgatggtggtgaacctgctgccgatgatgatgatgggtatgaggatgacgatgatggggatgatggtggaggtgatggtgacagggatcttgatatgtttctaccattttgaggctccatgaggatccatggcttcaggtcttggcaagcctctctgttacctgaccagggccgggacatagaataacctgccccttccctctcattctctgcatgttcacccacagggaagcctgctggagaggcctctatttctgccctgtgggccagtaaaggcaccaagtaaaatctttgctaaatccctgcacttccaaggctcgccatctgtttcctattagagtctcatgcatccctttgacatatttttattgtcaggttagaagaaaatattccactcatttgcaacattctcattatattccctttataacaatttctaaaagagaataaatataaaatatttctctgtattgtggagatatttcagcctgactttaatatgctgcatagttttccaactcacaattcttctaaccttgtgatgacagttaagaaatcttcaggctggggaaaacatgtggatcaatgagttagtggaagtgcaggacactttatgaggactcagggagagcggctttctgccgactcagagatgccttctcagccttttgagaataaactgttccaacagtcccaaagtctctttcccttgggccatttctaagaactcagagatgtctcctttgagatcgatcagcagctgggtcctcaaggagcctggccaggaagcttggtttgaaagggcaaaagtggaaacccttgtccacagcctctgagtaagcctggctgctccaggtggcagtcacgactgaccctaccccagaggacccagtcaaagggcatccagat

SEQ ID NO: 51261 - DNA, 1029 bp, Homo sapiens
ctcctggctgaattggcctcttctactgttttgctaaatatttaaagaccccttattaaaagagttaccatcttaaaaatgtcagatcttcatctgtcatgtccttcctctggagtgtggcctcagggctgtatccaagcaccccagaaacagaaaccctctttgccctgggccccaggatcatttcaagtggtttctgaggacccactctgtacccagcactgtggctgcccgagcatctgcctctccagccacagtagcttctgccacgtgatgggctggcaccagcctgagcaggtctcagggaatatggtgaggaggcagcttgggctgcagtacgtggccatagtgcactctgcccagcccaaggttctgtttgctgcttccctcctccctgggcaccaggctgggctggaggcagagaagctaaggacagcccagcctagggagtgaggaagcaggaagtgaagccctgagccacggcaaggtcttggccctgctgatgatgttgggcaagcagagggtcatgggggcaccgagcaagaagcatccacttctgcctggaggaattagagccagattagaggagaagctgttgtaggattaggatgagaattaggtctttgagcagcacctaaaaggtgaataccagttcactggacatagaaatgggggtttcccccaaccctctaaaaacaaagaaaaccagacaacacaaagacatacaggttcaaagacttgttcaacaagcaattgagcacctactgtatgccaggaaccatgccaggccctgagaatatagaactgagtgtgacatgttcctgcttcccgtaaaatttgcccgcctagctggggaaatagactaaaaacagcccatgatgtggaatcaaatgtgctgtaataaaagcggttgcagctgcctccctagcacggggtaggaggtgggggatggggtgggggttacctctgtgcctcaggtgggaggtgggaggggtgcctcaaggggaggtgatgtctaagcaggttttg

SEQ ID NO: 51262 - DNA, 1049 bp, Homo sapiens
tctctcagccccctgcagggggtgagccttctagaaaggtaagggcattggaggaaagagggaggaaggaaaggaagaagtgcttctggaaaaaggagactttctccaaggaatagcacccactgccccacctttgtagcctcagttcagtggccgcctcctgccggcccactgtgaactcgctcctgccctctgagatgctccagctgatgtcacccaaggccacttagcacttagtgggcacgtctgcctatgttggcctcgattttcctctccaactagtcagctcccaagggagagacatgaattcctgtctcccctgagtgcccagcccagagccacagccaccacagggcaggagccagcatttgggagagccatgttctgctgtggtgacgtatccaccccggggcgggaatgagcaggcctcgcagactcggggcctggagctcaggattggtgccaagatttacagagaagggcctgagttgacgtggcacgtaagcttctgagtcatcgggctttcaggggagggtgctacctctctgtctgtgtctgtctgtctgtctttcaggctctctgtctctctctgcgtctctctctgtcatgttctccctccccatctctccattgctgacaaatattctattaggctatgagcgaggagacgggcagggagcctctcacaggcagggcactagagcccatgtggcccataggctcataaagccattggcatgaccagtaaccaccatgtgaggtcaccaggacagctggggagggaccagatgacctgagctcagcccactccagctgggcagggccagagccatgacctggaagaggccacctcttcccctctgctggtggcacccatcctcagcattgctgggggctctgtgtcacagctgacagggccttcaggctcccctgagcctacccagtgcattttctagaaggatttctgagacccagcgagagcagggccaggcccaggtcacccagtgggtcaggggaggagcaggcagtgctccgttctcccgatgcct

SEQ ID NO: 51263 - DNA, 1065 bp, Homo sapiens
cattatcctctctgagaaaagtcactgggcattttctagaagattccctcttcccgattccttccttcacccctccccgcctctggggactgggcgacaggaggacatccagtcggctttctcagagggtccccttgcaggccccattgctcacccttcaccttgcagactgcggcggccaacgtctgctatgtggccagagccctctggggaggggcaccctctgctcccgccgtgtggacgagtgggtactgagtacaggggagacctcggggcatcaggaaagtcttcctcctggccacctatgtgggaccaccagagccaaaggttttgaattcatcaccacccttatgagccaagtgactctggccaactgaatcaacttctttgaaccttatttcctttttggtaaaataaaataaaatacctccctcctgagctgaatgggaagatgaattgagctaagacacacagaggtcttttggactcggcagccccctgggaagtggtggctgttttcaccccaccaggaccctttccagcagcttttactctaggggattggacgggtggaatagcagtggtcggggaagggggtcccctgagaaggtcctatccaacccagtttgcaaatggcaaaatgctaggcttgtgagatgcaactgtgattaggaacaaaactcacttgttccgcagcctcaggcgggaatctggtgtctggctgagtgagatggaagctctgccttctggcacttgtctcctgtgtgccaccctccccgagcctctctgctccacaccatcccctgtgactgccaccaggacctctcctggcctggcctgccgacgctcctctgtccctcagcccttagggactgggctgcccaggcttgactgggagagaggaaggatgaagcttccggagccgcagttccttagagatggaaattattaattagtcttattatccagaacttgtcagtctcttaatccttccgtcggcagaggggtttatgcctccacagcgtgtgctgtcagcttggctaaacaatcgcttttcatatacag

SEQ ID NO: 51264 - DNA, 1087 bp, Homo sapiens
gggttgtcctgatgcagccgcaaggtcaggccctgggtgttcacactgacctgggttctaatcccccttcttcaaccacgtggagctgtgtcacctcgggctaattaacccaaaaccaggggctcagtttcctcatccgcagaatttttaaagcactttgcacagggtcggacatagaccagcattcagataacaatcgtggccgggcacggtggctcacgcctgtaatcccagcactttgggaggccaaggcaggtggatcacaaggtcaggagatcaagaccatcctggctaacacggtgaaatcccgtctctactaaaaatataaaaaattagccaggcatggtggtggacacctgtagtcccaactactcaggaggctgaggcaggagaatggcatgaacctgggaggcggagcttgcagtgagctgagatcgcaccactgcactccaacctgggcgacagagcgagactatgtctcagaaaaaaaaaaaatcgtggctgttgtcatgaccgttgtgttgttacaaaaccacgtgataacccctgatagagccgcccgtgctgagctgggcccacaaagaccccgtcctaggctctctcccctctctggccatcagttgagttgtacactgtgacccaccaggccactgcttccagcattcacagccaaagaccttggccaagcaccggcccacgctcaccatgggccatgcctgccctggtgactctgggaatgtccccagagctgcccggacctggatccagccccttctgttgcctccaaaaggcttggattcagaattccacaggaggatcttctctggctgcccatccccagtcccccaccctttcctggccaatggcctccctgtgtcccctgatgtctgagcctgaaagccacggcccttgtgcgcgcattacatagctgcagttgccagttgtcacccatgtctccatcgtgcctcgtctctcagggtgtgtcagagcagtcactcccactgccttaggggagacaagaaggaagccccatcccaccaccctcctgacagccactcgtgctccctgccacatgctgctctcagct

SEQ ID NO: 51265 - DNA, 1015 bp, Homo sapiens
taaacgctgacaaaggtagagtgggccaagcatccctggcagcccccagaggtgacatggcagcccccagaggtgacattccagcccccgtcatcgtgtgtattaagtgacagggctcataaaaccccacagctcctttccccaccccttgcagtctggctcccagaggggcagatagttggagattctcatgcaaaataaattgctctgcactttcattaaaaagtaactgcaactgactcagcactttcagggtgagcggcagggaggggctttgtggcaaaatcaaaggacggggaggaggtgcctgcccctgggttcactctgcgtccctgccgctgcagcctgccctttgctgtgggttcggtttctctgcatcctagtcccaagtctgtgaccattgggtgtccttaaacaggcagctggagatcccagaatttggatcatgattttactggagctgggcaggccttgacaggggctctagcccagggttccctattctggaacaaaactaggaccgggcagggctgctgggggcagggacggggctgggacaccggcccctgggtccagcgagtgtgtgaagggctgcctccatggtgcactgggctgaggtgtggacgcagggctttctgcacggcaggcgcgacgctcatttaaatagcagatccgaccaaggccttccctctgctccacccgcggagtgctgccccgctgcctgcagcctgaagccctaaccctctaaagagtcccctgagctactcccagggatcccagctggccaaggtctcactgaccccaggcatcaactctggtggctcctgcccccattgatctctcgtccccctccctgcccacatcttcctcgtccctctgccatctcaagacatcacctgctccagagagcgtcctggaccaagcatggtcaggaagccctcggcttaggcaggggctccctgtccagtcaggtagcagcctctgagcaggcagcaggtgacattcatctgcagct

SEQ ID NO: 51266 - DNA, 1058 bp, Homo sapiens
tttccagccaaagccttgaaaacgagggagacgataaacagtacagagtcagtctttggggcagaggccccaagccagggagaaagctgacgtcttttccaaaggtgcagagttgagagcctggagccgcacacaaagcaggataaagaggagtgggcatagaattgggaaaagagggcctcccgatcctagaaagtggttctcctgggtggggagctgctgaggcttggcacagggtggaatctggtctggcttgggaggtgatataggctgagatgccatctctccactgaccactcagctaacaccttcttgagttacaggcactagagatatggagatggaagaagagagagtcagtgtcctcagggtcgaggtgaagaagacagatgatgtgccagtgtgatgtgatcaaggccagccaaaatgacaacatgggatgaaggtatgatgatggcccccaaggaacctgcccaggctgctgtgggagcaccacatcttagaagcagactcaagtccatctgggtaattcaggagctcccactgtgtgcatggtacaggggtgacttcttgtccagagcatgctaagaactaatgtcgatctgtgccaggccttgggctgcaggctttgagtagcttcctgtgttgaattctcctaagaaccttattgtgatcagccccaccttagagctgaggaaatgggctcttggaagttggggaccccgattctccattcactggactatttcacaatcaagaagatcggggacccaagagcaaattcctctgaggaacaggaatcctggtcctctggaaatagtaccttagaccttatgtgtatgcatgggggtgggggggtgggtgtgcatgaccaaagtccttcaggtgaccctaccattgagacatctggcacccctgctgtgtcctttcctgggtgtctaagtgtctgcttagcagggaaaggggctgctctgagattgaggacctcatcagctttgaggccttatttgctttgctgatatgctggccctagagcctgagggtagaggactcaaatt

SEQ ID NO: 51267 - DNA, 1032 bp, Homo sapiens
gacaacgcagaaccctgcctatgcgatttctgggaccccatctgagcttagtgggaaagagtgccatccgccatggttccagtgcagaattccaagggccaagatggggagtagggatttgtgtatgagtggttggttggaacaaatcatcctggtataccactgctcccacaggtggaaacagagaaactgggttaaaatgaagactccagtaaattcgcatgcagaagtacccagaaaggcccttgccatgtccttcactctgccttggtgaaggtggaagagatgaagggagagggtgatgggtgggtggtgggtgtgctggccaccgactggcacagcccccagcacaggggctgtctctagtgaccgatccaggatgagtgtccccattcagatgcagtcaacccaccactgattcaaccaacacttgctgactgcctatcagggaatacatttccttctgatgcacactctgctctcaggaagtctggggtccagagagggaatggaggtgccagccagcctgaagatcagtggaaagagtgaggctggctgatgctgcaggagagacacagaggactgtcaggggagtcccaaagggaatgaaattattttggttggaaggataaagggaggctggaaggacagtgtgacgttggatctgggtcttgacaagtaggtggaatgtggagagattccaggccttgggaacagcgtgggcagggccagtggcagagcaggctgaatggtctggttgactgagccaagaggggtgagaagggtgcatgggaggtggatccagccgatcatggaggccattgggatcaggagtggggttgcattcacaggaaatggggagccaggaaaggttagcagtgggtgacgtcatcagagctgggacttgggaagatggctctgagagttggatgggagtgcctggctcaaaggcagaccagtcaggaggctgatgccaaggagcatggggaaggcagtgaggggagactggggcggtggcctcaagggccaaga

SEQ ID NO: 51268 - DNA, 1056 bp, Homo sapiens
ctccagagtgggggaacccgtattcttagctttcatggatctagagttagaagcaactttcacctcttctcccctttctgaagactcgaatcacatttcctctccactgttatctttctggaccggaaagcccttatcttcattttcctggagctgcctgcccctcctcagttggtgctccctcacccctgcactccctagttcagacccagctctgcagcaaggacgcctcggccattctgtctccagttcccaggtcctgccctcctctccaggctgggccctttctggtccctgcaacaactgtggaccagtggcttctgtggatcctgggaggtcctctctcggggggcctggcagtggcagctcgagctgccagcctccgttgccaatttgctttactcatcctgagcctctcgccctgcacgtcactgccctgggatacatctgtagctcccataccctctgacactggctctttttcgttactcattaaaatttagtgtcatctgcaaacgtggagattttatcggacatgtcttcccccgggtcatttataatgattttaaataaggccagcccgggcccccacgcatacgtgctgttgggcagccaggtcttgctgcgcaatgaaaagtcctcccctcccgggcagcgcccctccaggatggcttgacccccctctcagcctttgggtgggactgtttcagaggcctctggaaagtgcaggcagacgggaccctctgtcccctcttgaggtacatgcatctttatctgctcagcgagagtggagaactcccttcatccagcattctctgggtgtctaggatgtgcccaggattgtgtcaggcatgatctcccaccataaatgtgtttttcctacactacctttgggctaaaggaggcagggcaagccagcccctgagccggcatggttcccggaaccccgcaccaggtggaaattgtttaactatattcccatgactggaaaattctggtaattgtgtaacagcagcagcactcagcaattacccagggtttttcatcttcagacca

SEQ ID NO: 51269 - DNA, 1031 bp, Homo sapiens
gtgcagctgatgggaccccggcccggcgggagtggcggggagggcactgtggaattaaacagtgcacccatcatctgctgccagaatgcgacttgcctggcctataaatagatgccacttcctgtacctggttctcgcctggctaaggaccagggcagggctgcttaggtctgctctcagttatctgacccctctacagaaaaagaaaggctgggctttgtgtggccccggggctggagtcagccacactcgggtccatcccagatcagccagaaaccatccctgttgctggagctcagtgcctgacctctctgggcctcagtttctacagctctgaaaactgcctgccagcagggcgagagcagtgagtgagaggaggtgtgtgaagcacctggcccagtgctccattcctgaagggttcccattaaggaggccttcgctcttcctttcccaagggggagttcggagagggtaccagggcagtttgggtctcaacaggcagttctcctggtcctggggcatttctgggtccccagagatggcaggtagagtctctgcccaggccactcaccctcctagctgttcaggctcattatatgagccataatgtgtctcggaccaagggaccaggagccacaaggctcaaggcacactgagagctgggactcccctgctagagccagcactctgtcttcagctaactccacaaagggggcctcctttggacatctctgctttgaggcccaaattggaacacattgctctgtaaaacagcactggatgtattaattcattcattcatttcttcatttgccaaataacttttgagtagcccctgcttgctctgcacagagtaggggcctggaatggagcaaacaataagacccagcttctcaccgggcccctgatcgtaaggggctctcggtccagggaggagtgcagtgcgcaaatgaatcactgctccggagatgacgctggctgcttggggacctcatctttgggtctccccagaggaatctgaggctgagctc

SEQ ID NO: 51270 - DNA, 1059 bp, Homo sapiens
gggggaaggggagccacccaactgcttcatgacagacacaccccgggacctcggccaccccaggcccctcgagatgggcctgccgccaagctgggcacctgctccctagctgcccccccccccagaactttgagctctgaactctgtgggcctccaagttgaaataagcacccctgcacctgcaggatacacaggagggtgacaggaattggggcggcgatgacatcaaggcctgggcgtccagcagcatcgcctctgttaccaccagccagggcacagctaggggaacagtagctccgcagcttggacccccagctcagagcgccctgctgaaccagaggggaccagcctggggtccacctcggcccaggggccctgcagagagcagatcagggccctgaaggacgctttcctttggtctgggccagttgtcctttcaaggaatgagtgggaggcagggacagaggaactgccagaccccacctggctggggagaagcgggtcttccctggctattctttttccccctaaatgaatacaaggcactcacccacccaagggcccagccttcccagcctttcaccagcttgataaatactaagggaggggaggggaagcagcgccgcagtcgcagcgcaaagggggccgcgggaacagctagtcgggagcgcgggggtcccgggcctctggccagccacggggcctggccatgaactttgcgtccgggccaatgctgcagtggccgggcggtggtgagccttccgttccccgcctgtccctcccggcccctcccctcggtctccgcagcttctcggctcagcccctcccgtccccgcgggcgctgggccgattctccctccgcgctggccaggccgtggagacgggttcgccgcggagaggggaggagggctggggaaggggtgggcgccaggggactgcagcgcggagcaaactggggcacggctgccggcggcgcgcgtgcacacactctctcccacgcgcgcgccctcccgccgacgcgcagccgcaatgcggggcccttcgcggaactgctggcgg

SEQ ID NO: 51271 - DNA, 1146 bp, Homo sapiens
ggggggcgtgggtccggggcgcagagaacacgcgcgcgcgcgcgcgcgccagcagcagcagcagcagcagctgctgcggcgaagtctttgtccccgcggcgcagcctttgtccccgcggcgtagcttttgtttgcgcagccccgccctgcggagggcgatcgtccccacgttggggccggggggcagggacccgacgtccccaaaatctcagctggggcgcagccatcctgggagagaccgggcgtggagatgggggaaggtgggaggaggaatcgcagccttctggatcccggagctgcagcgcctcccccagacctaggggtcttcccctcccttcccctgcgccccactgtgagctccagggtcaaaggccctgtctgctggacccccatcacttagcccagggttggcacgtggtgggctgcagtacatatttgtgatatgaatgcaggcacacgtgaatgagtgcaggagggactgtcaaaaagctgaatccaactagtggtaaggaaggtttcacagaggaaacgacccccttggtgagacctgaagcctgagcagggttagcccgggaagagggggcatcaagggtggcaggagagggaatgagcggctgcctttaacccagggtcttcgggaactgccgttttcaccatttctcctccacccacaaaggtgcggattcagaacaaatttcctctgtcctgacctgaccccaggccatttgcacaggaccccagggaggtctgagcaggccagctcttcatacaaagatgcaagggggacctcttccaggctagaggtaggcaggcaatggggtttaccctggagacccactggggaggatctctgggaaatgtcacttatacctgtgataggtcctatggatacaacagccagggccgtgctgaacttcaagaggatgctgtctgtgtagatttggcctcgcctgtgcctgtgtttacaaagagaataaacccaggcagttcaacactgcagccctggagctgaggggatggggcgggccctcttctggccaaggacactgggacacctttaagtgacctgggtccctagaagagaaggtgagcggaatttttgtgtgcctctttcttgtcttacagcatctgattctcccccaaggc

SEQ ID NO: 51272 - DNA, 1074 bp, Homo sapiens
ggcaaatggtgccctgcggagaaatggcctttaggaggaagcttgcctctcagcaaaggccgaggggcagcctttgccaccctgtcctggccgttggggcaggaagcaaagttgactctgtggaggacgccccaggactcgggcagatgcaggctcctctcccaggattggcttccctgccacctgcgggccagatggctccttccagagtgtgcatgactatggcagctcagaccctccaggggtcaagatcagccagctgttcctgtgactgccagacaaatgcccaccaactggctggcttcacacagagatgtgctctcacggctgtggagactggaagccagagttcaaggtcccagagagccgtgcccccaccaaaggcgctagggagggaccctctctggccacttgcagctctggtggctgctgatcatcgttatggatccatggcttgtggcaacagaaccccagtctctgcctgcactgtcctccctctgcgtgtgtctgtgtccctactttcttttaaggacaccagtcattggattaaggccaaccccatccggtgtgaacccgtcttaatgaattactaattacatttgtaatttactaattacaaagactccatttccaaatcaagtcccattctgaggttccctgtagacatgagcatttgaggaacactgttcaatgcagggctccatatcttgtaggcttagtccccagggcatggtcctgggcatgatcccagccgtcaggcctcactgaaggcaaaactgacccccagaaaataccagaagcctcctgagggtttgttgtgcacggggttctgccctaggtgttgtgagaagcgcagtgaagaagccgcgcaggttaggctccggggactccgcggtgtcggggagttcacaggcaccgtcccgcggtcacaggtggcatgttttgaggagttcgcaggcaccgtcccgtggtcacaggtggcgtgttttgaggagttcgcaggcaccgtcctgcggtcacaggtggtgtgttttgaggagttcgcaggcaccgtcctgaggtcacaggtggtgt

SEQ ID NO: 51273 - DNA, 1005 bp, Homo sapiens
tccgttcgggcaagaggcgattgtggctctgacaaggccggaacaatgactcctgagggacagggtgggtttggggttgtttggaggtgaagtgaagggctctgctgatgatttgaatatgaagaacgagagaggacaatgagtaataatgcctagatttggggcttcaaccaccggaggaacagcaaaccatttcctgagatggagaagtctgaagaagcagcaaacccaaggggataggggaatctagtgttcagttttggtcacgttacagctgacaacctcattagagatgcggggttcacattgcggtctgaaagtctggaggccaatgagagatccagaatggagatgacgtttaggagtcctccgcgtgcagatggcgtttagcgccctaggtctgagcacgaagactccgtgaaacagcacagatgaagcagaggagaggctgcaggatcaagcacaggctaccctggtatgaggacaccaagcagaggaggagctggccaaggagggagggggacagccagtgcaacggagggaaaccagcaggatgtgacccatggaggctaagaaacgaaggtgtttcaaaaaaaaggacgtggtcaggcaggtcagatgccaagcagggagctgggtaagagccctccaagcagggggaggtgggtaggaaggtcctgaggcaagagggagctccacggatttgcagaattcagagaagtggctggaaaatccaggtgacacggcaccatacctgtctctgagctcagagtcacagccttccacagtgtggggtcagatgagaaagggcaggagcctcctggactcttgcctggcccaggagatcgcgtgcctcccactgccccatccactgctcgttcagcagaaggcaaggccccgtcccctgcttttcccatcttgcacctctggtgttggtcttgccaaccttttgataggtccgtgggccccaggagggcagcttctgtgtccctgggctcgtggaga

SEQ ID NO: 51274 - DNA, 1094 bp, Homo sapiens
ctgcatcgattggtcttgagacacatggcagacttctgagccaccaggattgtttctttcagcaaaacaccttctggcacagagttgccaccaggagggacagcagctgacatctgcacatgcaccacctgccaggacctggccatgaagtactgatgtgtacccatgtgtagtgactcactgagactttccggcaacccgtgaggcccctgttccacagatggggatgctcagacaacagtgagtgggtggcgcagagagtcacacacagcagtgcgaccccatcatccgctcttgacctctatgccatgtgaggcttctggagcctcttcctgttgcacctgcactactttggagctgcctcccagggctagagcctgtccttgcttcccggttattcacgacaaccgtcagtggagtacccgttaggtgccaggcactgcgtcacgtgatgagtatcagaagaaatggatcagatgaggacctgcagtcaacgagcttcccgtccaggggaggaaacatccgaactgaccacctgtcttcgcacaaacaagcatttggggaccttatgatggaggatggtgacttctcgaggaggtctgggagggatttcttgaagaaatgacccccaaaccaagagctgaacgatgagcacaagttaactccctgaagagagaaggcaaacattccaggccgcaggaatggcacgcgcagaaactctgtggtgggagggagccatgaagccagtgaggcagaggggcaggcagtgaatcaggccacaggggctggagggaccctcagagccagggctgtgtgtgccaggctttatccccaaggagaggaaagccactgagggctcgagaggcagggacgtgaccaagttggcttctgaagaagcgcacatggcagccacatggagaacagattgaaggaggctcagagagggtgaggggagaccaggaaatcatcctggctagagatgatggtaacttggcagttctgggggcacagggacagtgtgagagccaccgaggagatggcatcaggaggtcttgtgggtggattcactatggaggctccatgtcattcacctt

SEQ ID NO: 51275 - DNA, 1059 bp, Homo sapiens
gtctctgtcctgcagacggcacccctggctcaagcaatgctctcctctcggtcaagtgtcctcccaatggctccatttgctgtgcggggttgtaaacggctccattttaagccaccagctccctccctccggccctctctgctgtctccctctcctgtgctgggggctgggaggctgaaggaagccctagcaccactgtcccctcctcgatggctactcttctccaacaagacctctcttcctctcctcaacactgatgggaatggatcggaccttgcaattagtgcccagctgggtgcagacagggatctctgagccagggcggggacctggggagagagcattcctgctcaataattcacccttaagggaaaggaaagctacgaatgcagcattcagccattttccaagacattaacaattcagtgtaattcctgaggcataaaaaatgcatcattgctctaattttataagctccatgatgtttattatgacatcagaaggtctggtctgggtcacccaggagagctaaagccaggagaaaccggtagatagctctgtacagggcctgcacagaggtgctttggagccagcccagaaatgctgcagacacagcccccacgaggtgggacctgatgccctggaagcccccagcactctggaacttggaaatgactgacgcattcatcatgagtctttacacccctcccctggaaagcagcaggcaagagcgagctctgagcagagagaagagggcgcggcagggagcctgaagctccaaggcccccaattgcactcaaagacatcattcctccccggcgttctcattttttcattcccagtaacagagtgagtgggtgctcatttttatatttggtgaaacgccctggcattattccaagtcacttgaaagtgagattagaccaggaggatcactgggtggggctgcgtttcttgttcccactctggagacagagcacgatccatggtatttcactttggacataggtgcttcttaggccctggggggcagcagagccaagcaggggacagcctcca

SEQ ID NO: 51276 - DNA, 1042 bp, Homo sapiens
cgaagtgatggtgatttccgggttctatcccctgagccctcactgggcacccaccaggccctgggctatctatttaagtttattatccaacttcatcccggccgtattccagatctttccatccccattctattgacgaggagcctgaatcttagaggagtcaagtgacttgtcctgtgtcacaccgctggggattcgaactcagggccatctgacattgcagcccagtgggcactttttcaccatgccttcccaccacctgaattgatttgggacaatccgctttttagtatcctgctccccttcacagcagagatgtctctgcatttcgcccactttaatggggagaatagctgtgtattttaacatccaacatgtgtgtaatagtgggggcctggtagaagttgctggcggaatggatgggcctgtgtcagccagcagggagaatgagttgaaggtggtttcactccgcttccttggattcttttctgcattatgtccattaggagaaacctgccagtttttgggctgatggctaatgcatctcttcctccctccatattacagctggcaccttcccaggatgacgccaatcatggcatatcctggtagcaaacactgtttctccccactatcctccacatcactgtcaggaccattatctctggccgtataacaagccaacccaaagctgaatggctcaaaatgatgagaatgggtactttctcttgatgccgtgggttggccaagctcacacatgcaactgcactcatgggactgatgattttaagcccagagtccctgcagctgaagcataggggcacctgctctgtcaggtcatgctggccacgcactgtgaccccccccccccccaccaacatggccttagacctgtcccttcagcagcaacaacggatttggattaaacaggatttttaaagaattatgttgagactctagtccagggtgtccaatcttttgtcttccctgggccacagcagaagaagaagaattgtcttgggtcacacataaagtacactaa

SEQ ID NO: 51277 - DNA, 1054 bp, Homo sapiens
ttcatataatacagcaggatgggcactgggtgtttcagctctaccattcactcagtgagaaaccttatgtaaattaccttgtatctccggctctcttacctgttttccaaacccattagtggttcagaaaagcatggtcaccatcatcagattttaaaatcagagtgcattgcacatagtaagcgtaagtattgatttgggaagctttttggtttccatatgggagtgtgtgtgctggcttctatttctttctgtggaccacagtttaaaaaagttgaaagccactagactggatatttcctaattctctttcaattcagctattctgctgtgattcttttctgtggtatgtgtctgttatgacgccacatttagcagtcgcataaggcctgaaagagttaagatacctccatatgtatgaattcaacagatagtctccagccaggccagagctcagtatacctttccttgtcttactgaatgttttggcagtcaacattgaatcagtgttttgaataagcaagacagtttattgctactgtcatttatcacatgttttgtagataaattctaatgctgcaagtgacaaaactccacctcagactggcttacataaaaaagggaacttggccgtgtgttggctcacacctgtaatcccagcatgttggggggtcgaggcaggaggatctcttgaagccaggagtctgagactagcctaggcaacatagcaagacctcatctttaaaaaaaatttaaaacaaatagctggacacagtggcacacacctatagtcccagctactcaggaggctgaagcaggaggattgcttgagcccaggagtttgaggctgcgggtgagccacgattacaccactgcactccagcctgggtgacagaacgagaccctgtctcaaaaaaaaaaaaaaaaaaaaaagaatttattgactcttaggaagtccagaattagtgttatcttcagctagaactagctctagatgtacaatgatgtcattaggcctcccccattgcccccaccccactctcctcctctatgt

SEQ ID NO: 51278 - DNA, 1051 bp, Homo sapiens
ctccaggtgcgtgtcaccacacctggctaatttttgtatttttagcagagacggagtttcaccatgttggtcaggctggtctcaaactcctgacctcaggtgatcttcccgcctcggcctcccaaaatgctgggattacaggtgtgagccaccacgtttggcccacagcatccttcttattaggacctatgggagaaatttatttcagatcctagtaccagggaaagtcatactatccaaagcaactgacgtagtgtgatcttgaaactcactgcccccttttgctttgtttgctacgttcagccccatttgggactcacatttcaccattttggagggtttagtctgtgttttctgtgaaacagttttcctggagctttcttttattcttgtctgtaacatcatgagtcctgattttgcctgatctgctattaatcacaagtatttttgttagccacctcacacaggattgttaccagttaagtgagagcaggaagggaaataaagaggcccgggggaatgggctgggacagggaaggaaaatcaggaaaaggggggaagagcagagaacagactaaggagcatctggaggtattagggattcgagagagaggatcctcagaaacagtgcacagtgccaccggagttggctattaacgttttgttccattatttaaccattccgtcaaccacttgggggggttctgtaaggatctgcagattgcatagcccctgaaactggatgaagtcaagctgcatcccatagccacacactttttttttttttttcttgaggcacggtctctctctctgagccagactggaatgcagtggcacagtcatggctcactgcagccttgaactcctgggctcaagtgatcctcccacctcagcctcccaaagcgctgggattacaggtgtagccactgtgccagccacatccccctttcacagaaagcacccttaagtgttttgcttttttacgtaatccaagggatgctttaatgctggcctcagtaattcatacatttgttcaggcctcactgatttg

SEQ ID NO: 51279 - DNA, 1136 bp, Homo sapiens
ctcttttgtagactctttaaaggtgggtgcagaatctgtatgggagttccaaatctcttttgtgcttcatgccaattagctgcagttttactacctttgtctttagttggatttgttacttcactgacagcagagttggctcctgcgtggtggaggtgccgtcggtgcctgagactgtgttgtgatgtggctgcctgaatgttccttggagaataggtttgagattttcaccctgagacacccctagctctagtattgaaagatttcaaatgagagatgattgtcagtttgctttgctgcccttgtaacattttgtctaatcactgttggtccgttgttttggcagtatcctgaatgatttttctgaacaagtccaagactgaatatggggatagtgtaaaacaaagatcaggaagaagaaatatggatgcagaattatgacaaatgaagaagtcctaagcagcattgctcattgccatttctagtgttttggtatacagagtcagagagttttcaaaaagtggagtatggcggttttttctacggctaaatttagccattgctttggaaaatcagagtggtacagcttgtgcctcatctccacccggcccttacccttccctctgcacttggacatcttaaacggcttgccagggaggagcagcttaatatactctcgtggcaccatttattctgggagggaattaagtgacttcattttccctgtccttctgagcttcctaaaaaatttaggagacttcctaagcagcgctcacagtgctctacagaaatagttgcaggcatgcctcctttgcctcctcagctctccctgccagggcagccaagggctgtaagtggaatgagagatggatggcagtgggagagcacatgtgcacttgagctacaaataacgtgttttaaaatagcagatggtatttgacgattgcttcttcattcacttacctgccaaggcaaaactttttcttctcctctggcaacaagacctgagatggctcagctcagcagttgtaataacaagttctcacgtttgccgatattattcattagctgatgtgcaggcattcatattcatggacgctttctggggctgttctagaaagtgttccttttgttta

SEQ ID NO: 51280 - DNA, 1038 bp, Homo sapiens
atttgaagattgaaagtgagttgtgtaaaatccagaggaagcagtaggtgctgctggggcctgagggcctgggaaatctggctaggagctggtttcctggcatagacactttctcactcacagcagacgcccagacactcgggattctccacttttacagcagcaaatcccagcccttctaaacttagaacacactgtgggtgtctgatttcatgaaattgtctctgtctttaaaacattgctaaggaattttaaacatttaaatgaatattaatttgggacattttaaagtgagtccctttgaaggttaggaacccctgtcagagaaagaggaaaagatgtcccatgactgtgctgtgtgacacttcgtggaacagctgtgatggagaggctaggatggggtcgacccagcaaaagaaaagggaatctgaagccccaactaaccattccttgacccttgggccattgtttggaagagttttttcatcttcttcttgatcgttgtaatactcaaagctattctgggattatgagtctatttctatttatacttatgctttctaatattgttggaaactaagaattgaagtataataaggtaaatgaatatactactatactataacctatgcttatacttttgagatacaggagttaaacctgaaggtctcttttttttttagtttaatatatcaataaggtttcttttcagcatttcatttatcggtttattacagctaggtaacacacacagttactttcatcatcatttgatctatttttaaaatgccagctgggcatggtggctcatgcctgtaattgcagcactttggaaggctgaggcaggcaggaggatagcttgaggccaggagttcaggaccagtctgggcaacatagcaagaccgcagctctaaaaaaaaataccctcagaaggctctaataaacactgcagtgctatagtagacacagagacatcagtaggaactcatgtttacattagtgtgtatacaggtagatatatacatatatacgtatatt

SEQ ID NO: 51281 - DNA, 1049 bp, Homo sapiens
tggtgataaaatatttcttctccagattatccctttgcatgattcagatgactgtattttgaaaatagttatgttctcaacagttggaggagaaatatgtggtcacagctgttcagtcagcttccacagacattgacttcatttgtctaaagatgatggtgatggcaagcatgctaacctaggatttatcatgttctgagcacttacatagattaacagccctctgaggtaggtgtaactactgtccccatttaagggttgaggaaacggaggcatgaaaggttttgttctaagttcaaagctacacagcttttatatggcagagccagggctctgcacagccattcactggtctgactcctgcacacctccagctctatcgtctcctgcgtctcctgctctccctccctctgtgctccagccacacggtcttctgctccctgaaagccctgcctcagggccttcgcatgtgctattaccaggcctcagttctggacatgtttggctctttctcatcattctgagcaaactcgaagtgtcacctttcctgacttgtctaaactctgtccccatcccatccctccttattacgttatcctgccttcttcacttaccaaggcctgcctgtgctagagtagggagagacctcccctcttcgctattgaatatctggcacagtgttccttaaaatttgtgaggtgtggccaggcacggggtttcagcctgtaatcccagcactttgggaggctgaggcgggcagatcacttgaggtcaggagttcaagaccagcctggccaacatggtgaaaccccgtctctactaaaaatacaaaaaagattagctgggcctggtggcatgtgcctgtagtcccagctacttgggtggctgagccaagataatcgcttaaactcaggaggcggaggttgcagtgagccaagatcatgccattgcactccagcctgggcaacagagtgagattccatctcaaagtctcaatctctctctctctctctctctatatatatatatatatatttaacatatatatg

SEQ ID NO: 51282 - DNA, 1085 bp, Homo sapiens
gttacaatcagctgagattgcaccactgcaccccagtctgcgcaacagagcaagattctgtctcaaaaaaaagaaaaaaaagagagataatgtagcataatgtttccccctaattcagctgaagttttctaatggcagtagagtgtactgctactaggttttagtatttagcatagtactaaagttatgataggtgttgagtataaacttactcaatcgaaggacactgggtatgtttagcaacttgcctaactgaatgaaggcatgttcctaattgcccacagtggcttctggcagataccatcttggctcattcattaatatctaatgggtggtgcaaatcaatcattaatctgtctctcctttttctcctcttgtttcagaagtgcatataacgagcctctaaccccttcttctaataccagcttgagccctgttggctctcccgtcagtgaaatcgctttcgagaaacctaaccttccctccgccgcggattggtcagaattcctgagtgcatctaccagtgagaaggtagagaatgagtttgctcagctcactctgtctgatcatgaacagagagaactctatgaggctgccaggcttgtccagacagctttccggaaatacaaggtaaactagaacagaaccttcgttttgtgacattcttaagatcagagaggacagatgaaagtcagaatcatgcgaacaaaaacatttactatttctttttttcctctgaatttgtagaatttttttggaagtctccaatttattaagattcactatataacatatctgtgtgtgtatctgctttgtaaaaatattttatggtaaaatattcataacataaagtttgccattttgtctgttttaaagtgtgcagtgtgggggcattaagtatattcacagtgctgtgcaactgtcactgctacccatttccagagctttctcattctcccaaaccatttgcttttaacaaccaatttttaaacagttaaacatgaaatttttatcaaatgtttacaaagttcctaaagcaccttcatagaagagtttcagaagcgtagtcttctcagttatctgag

SEQ ID NO: 51283 - DNA, 1390 bp, Homo sapiens
cttttatcagattgtgctttaggtagttataaatttttatttaaggaataataaattctaatatgtgtaatggtcacatagaaattagggattctatcaccttgtcataatccaggacttgcctcaatttctgatatgggttgccgtttcctcaagcttctctaggattaagccctattaatgggggtggggggacgtctttggcttcgagccagttgagttcatgatcccagaaaaggaaggtttattgtgcaaacgctgacaccacagtgcctgtagctctatagcagggagccgcactggcttctgtttggtgagcaggcttcctgggagcacaagtgatacacagaatgaaggtttcaagtctgtgattacaacaggtattgattccaaaatatgagtttggttttttaaaaaaaaaaaccctccccagaaactgtcatctacagctaggaagacagaaggcattatttttggaaagagtaacaactataaaacaaatattttggaagatggaaggcattaatatagccaggttgccttttttttttttcttggttgggagttttattgattctggtttttaatttcattatattcagcaatgtaacattaatcttgtattttctgtttttcccccaagctgacatggatagccttgaaggtaatgatacacccaagccctctcacaaaccattccaccagagtcacaaacttcacacccatcaccagctacagggagggccattaagatggcacagtcatggagtaaacatatcccccttgccaggccacctaagcacagttcctctgtcgtctggggaccacgtggttattcagctggagtgggtttcgacattaataactggacattttttggctggtgttaatccatctaagccagttcctgtgagccctgtggccactaagtaaataccctttttcccaaagcgcttcactgtggcccgatgggtctgagtgtgtagtgtgcacaggtggagacgatggaaaccacaggggctctgtagtctgcagcattcttgtcttcaaagactttcagaccagtgaaaaggtaaagcaggtcagataagaccaaagaaggttcttgcagaagggtcctggttcttggacaattctgagaagtcagtttccctccctcatttcacctcctcatacatccagagatacagttaggcagatacagggattttctggggaatatttttccttgcgacggtaagttgccgtcttataagcaaagggcttcattgcaacttctcatccccagagtcatactctgtttgattagaaatttggacgtagcattttaagaccatggagagctctgtatttttagtgcctagagactgatgttgagaattcaccctgg

SEQ ID NO: 51284 - DNA, 1028 bp, Homo sapiens
gttggtcttacgagtgttcatcttttacaggttaaaatggcttaaaggtgtcagcgtttcatgataagccttgtatttgggaccttgcaactcagtcagaaacttgtcgtgtggaatgatagttaaaaatcagaggctgaatgctaagtagatttgtgtatggtgggaattggaaggcataaaaaaattatgttagtgtttcaaaactggatagaaaatattaatccgaagcatttaaaattttactgtcgaaatctgtttttagattcataaacgtctaagggtattgctattaaaatttttctccaagaagggcaagatattttgatattttagggaaaaaatatatgtctgaaggcaacccttaaagtaatattttacattttggaaaggtaggtgtaaagattcctcatttgcctcttttgtgattaaaccccggacagagaatgtgataatagaggggaaaagcattttctcttcttcccttcccggtaagctcgaaggacgctgagcccgtgcagcccctgttgttactgtgtcgcttgttcttgtttcccctgcagtacgcactttataaaaagatgacacaggctgccatccttatccagagcaaattccgaagttactatgaacaaaaaaaattccagcagagccgacgggctgctgtgctcatccaaaagtactaccgaagttataagaaatgtggcaaaagacggcaggctcgccggacggctgtgattgtacaacagaaactcaggtgggtggagaagagctcatggaggtaaagctccctagggaagagaactctgacttctttgaaagacttgtcctgggctgacattggagtctggggtgggcctaaagcattggcagtcactgtgttccagaacgttttaggcatggtggctgataagtacacctgtgctgagtctggttttgaatatttagctctttctctccacctcccacccaattattttgatattgccacccaattttaccttatatcagaatttggcagcaccagt

SEQ ID NO: 51285 - DNA, 1032 bp, Homo sapiens
tattgggcctctctgtcttttttgttttgcaatccaaatgagatttctggaaaatggcaagatctctcttttcctaaattccccacaagctattgcagctctcaaagcaacaggtaataatcagaaagccgcatccgctgccctgtctatttttgacgtccagcattgcgagaatattcccgctgaactccactgactcatgagacatttctctggctgagcatcactgagtagatgtaatgaagcagctttgccttacgctttacccatggagccattgtttgctacaagtttctgaagcaggcctacttcattgattcataaatgatcattggacgtctgatggaagtaaaccctgtgggcttttgctggctttcagtgctgttgcttacgacatcacttcagtacattacgatgcaactttttgggaagggggaattgagactacaatggtatcccagagtggtgattattctcagcctagaatgcttggggaaatactgggattgtctttaatgttaatagctgaatggtaacaggtcagtcttgctattctaattactgtgagtctgagccaataagagttctactttgcaagttactgataggagtcagaaatgtggccgcacagctctcctgagggcagcactggcgctgtgggaactgtagcttctgtcctgcattgcctctatgagctcagggaagactgctttgcctgtcttctgtgtaagtgaatttagaagtaagtgcagttataattttttttttttagatagcctggacatttttagattcagttctttcttagccctgaatgagtcgaacagttgtaattccttaagagaactgagcactcagtaacccttagctaagtgtgtgtaacataacaaaagtttatcatgcacctgtgttccaagttctatagatatggtgaccacaggtcctggattttcaagtctaattccaatttcaaaaattcttgtctatatttaccaagtttgtatactgaaaaatttgcttacaacataggta

SEQ ID NO: 51286 - DNA, 2044 bp, Homo sapiens
gatttttttttcaccttaagtagggtcacgtctttcctttgaatattttccccaacaatttcacaggagtttcttttgccgtcaatcctcaaaacggttttagtcttggcttttcagttcagagggagtggtaatacccctttcctttacttggtcacaattcactatagagttatcgcctgctgttttgttttgtttctcttccagagtgaaagaattgaaaaaggccaaggaacttgaagacatacagcagcatcccttagcaatgtgacattgcttttcagactgttttcatttctgtttttagcagagacatgcaacaacaacacacacgcacacacgcacacacacacacgtacacacacatacaaaatccctctgcagttttggggagatcagctgcaggattttaacaggaatgttttggtcattgcatttgcactttcatggacaacttttaatttgatcagcaagacatcttggaactcaatcttctgttggatcacgggaaatcaagacacccaggaggaattgaaagaggcttcctcttctcaggaagaagccatttccttctcatatagggctgtattcaaacatcgtgtggaactgtacaaatatttataccaaaaatatagataagaaaaggtggggctatactagcaacaaaaaaagaatgctgttcctgcacctgccggttatttccaagaagctgaatctttgggactgattctcagtggagggcttagatcatacaaaaatctttattgggtccgtgtgttctcatttccttcactgtttatttttgtttgtttgtttgtttgttttaatctctacagcacatttaatgcaacttttgaaatctgcaggtttttaatgtcttgtggaaatttgcagaggggcaggtgtgtggtaaacgggtaatgcatgggaaataatgagaagcagctcacagagtttaaactattttcttgtccccaccaccttccaagaacctgcgagggtagtaatcatcttgtcccctttttcatgttcagcactttaatttttttgccttactttcatgtgcaatgagaattacttaagaattggtaacgcatgtagccttttttagtaaccttggaagctgtagtaattctaaggaatcatgaaccttgcctggacatttgccacctaaacgatcagtgtggtgctgcgttctggccagtaaattccatgtttttggctatatctcatccaaactgagcagtttctgtgtatatatagaaggtagaaatgaaaagtgagaaaatatttgaaagggattatattaattgctaaatattttattcacaaaggtcaataacatggcaagataaaattatttgtatagttttgtctgaatgagcgagaaaaatgtggatgtactgtttgtatatattgtatatattaaaacagagatatgtgcatgaaatcaagaaaaaagaaatgaacaaaagcaaagcattagtggctatggtctgtaaaatgaaacaaaaaaactttatttcactataagagtactttattttaaatgttctttaggagaacattttgctaaagcatgactaaactgcaaaaaaaaaaaaagagctactgtatttagacttaggaaaaaaggcagagtaacattacttaaaaaaaaaaggatatgtttacatttaattttggctaccaggagtttagtttattttatttaaaatttttttgccaatggtgccaagtaatgtgaatgctaatactgcttaagaaaattaagttacttttgcaaaacagataatcataagatgaatcagtatgtagcttaacaccatccactcactccaacaaagaacacttagaatgataaaaaaaaaaaaaaaaaacctgacaaaagaaatagtatgaaaagtagaaaaatgtcacgtttccatatctcctgctggaaatcagaaaatataataaaattgcacaaaaaaaaaaatgaaaaagatgcagactggtcttttagagacggcatggtatattactatttccacataatgaggag

SEQ ID NO: 51287 - DNA, 1664 bp, Homo sapiens
ttcttggttctggctgccaactgtgagttaaaactcaaggcttgttgtgaagcctaaaaatattcacaaataagcttttaaactggtgtctttggaaggaaggtagatacaaaaagattgtggtaaaaactggggtcagtgctcttggtgccttttctataattgtacttgttttttaattacttcctttcactgccaacctcgaattactgtacagtatatgtctttctgcttgtgatcagctttgacaacagtgacagccccacaactagtagccacctgtacatttgtaaactgacctgactccattttgtttttaaatgtgtgggttatgttgcagctgttgcagtcccccagatacctattattttacacaatttgacctataggaggacactgagtaatttacaaacacaactgcattcataaatgggaatagaacgtgaaagccagctctttcagaatatcctctattaatactgaatttagatatctttattccatttattatggtacaaataactgatgttttaaccagagtaatgacctcagtggatttgctttaaccctcacattttttttttaatgtttcacatgttacattattagctgaatacgttagaaaatgacagatggtagagacttccatagaattaagagggttctcatggaggggataggaagtaggtttaaagcctaccagtgtaacctaccagtacaactgtgaatcctaggcaaggcaaaaatgcacttccactgaaacgaagcatttctgaccgctttttcttggttatgaatcttaatttcgaatataagatgataggtaagcgcagctttcttggataatctgaattcccaagtgccaggagtaggatttcattataaaattaatagctaatcttattctatctcctgaagatttaattgctattgttacccattcgaaatcagctgtactgtgtgaacgaaataaagacaataatacgaacccctctctggctgcacggtcgcttatggcagttccacacagtagttggcgcccaatggggggtccctgagacttgcatgtaaaactagtctagatgtcttctttttttgtaagttttatttttgtaattgtgcatgtaaagcatcattgaatcaatggatctgttgaagaactcagctgctggaaaccatgcaaaatgttttgaattgcccttaaaatatggaaaatgttttctgaatgctttatattctttctgctgtaaattaaaaatgaagaaaatttccccatactacgtgtgtgttttgctttaatatgaccgggtagtgaaatctaaggtgatgggcacatgtttcaaaacatatgtaataatgtcaaggatttccttctgatccagatgtaatgttttgacattgaatgttacattgtttcagctaggtccatgaaagaaaaaatgtcttccagccaccattcagagagcttttcccctatctttccaggcacctctcaacatgtcaatcatttgtgtaaggcagtgcaattatttgaaagataaagacattaatttaattcaccttttcagttacaatcctctaaagtcttctaaaaggcattttccagcagattacgaacgtcgtcctttctgagtattgtgtcatcgccgctcccttcccgttca

SEQ ID NO: 51288 - DNA, 1049 bp, Homo sapiens
ctcgaactcctgaccacaggtgatccacccacctcggcctcccaaagtgctaggattacaggcgtgagccaccgcacctggccctgttcctccattctttgtgcattacttgctgtgatcacactcatctaggtggtggacataatgcgagttaacgtggacaaggttctggaaagagaccagaagctctctgagttagacgaccgtgcagacgcactgcaggcaggcgcttctcaatttgaaacgagcgcagccaagttgaagaggaaatattggtggaagaattgcaaggtaattatcttttaactgacctttacatttaaccccccttctccattctcagagaattaacaggctacagataatggactttcacgactctgggaggtgggtttgacttcctccacatggaaatgtgggtccactgtgaatccgaaacactgactgcataccctttcctagccccacactaggaatcctctatgtgctgtggctgatcttcagaagatgcaggtagaacaggaatatccaaaatcactcacagtcatcagcccctcccaaccctctaccccagcagggccccaaacagataggagagggctggaattggtcagttttctcgtagttctgtgaatggttccaaggtcaagggaaagaaatgctagaaagccacagtgtgcccaacagaagagtagaaagcagctctcccaggagcacgagccaaagcagattttatacagttagcgtgctgcaatcagatccagatgtatcctgtcctctgccttgtttacaagtgacactttgagacacagggcaagctgagcagcctttccatatgtggaaaacttgtatacacaaacaaatgcctagctagaggccacacatcatttgaacatcttttaaaagcagataagttaccttcaggccctaattgagaacatttaatttaggctttagaaattattaattactccagactgtatgcacctgaatttccctttcagtgactagatgaatattatataatactcttcaacaagcacattatg

SEQ ID NO: 51289 - DNA, 1021 bp, Homo sapiens
caaaaaaataaataaataaaataaataaaaattgcttaggttggtgcctggcatataataataaaaataatagctatataaataatatatatgtatacacaaacacacacacaactattattatataatattcaaacaactcactgccatcggtagcccagtatatgagaaccgaaacatgacttctttcattgatagatggatgttagtggatgtttccttttagcaggaaggtacagttacttggatccttttgactctagtctccttcctctagccctctatagaatggagagaagccagtagtaggaaatcagcccagtctaatttctgatcacatttagactgcagcattggatgttggcttgggattcacactgagagactaacctgctgtttcccctgcctttttgcatctctcctccttcttagtgtgggttgtctcttcatgaagaaccagcggaactcaaaactgctgttcaagaaacctcttcaagacttttgacttagaacctgctatattatcaagcttacctactgttatctctaaaattttttttgtgttaatgtaaagttgaatttctaggaaacgtgcctttgttttttaatatgcactccaaattagaaggccggccccgtccacattttgcacagtgcctttacagatttacgtatgggctgatgaagaggccttcttaagttccagagtgctataatctagatgtaatgttgtcactaattaattgccattactcccagttagttacccttgtcatttggcattattttcagaaccacattttaaacctttgggtaatcagatttccaacttatgccttccagaaaaaaacactactgcctaacacaaatctgtgataacaacaggctgtgccttattttgataattttctgattccctagaagagaaccctctactttttgtaagcactactgactctcgctgtatttaagatgctggtgaagagcttttgctcttgcattagatttgaagatgtttaca

SEQ ID NO: 51290 - DNA, 1027 bp, Homo sapiens
aataagctagtatattttttggcatagaaattgaaccttcagtaggtgaagtgcaggtcttaggagaagatttaagaagcatgttggagaaaattatttgaggagttttgttgcatttgtaggttgtgcctgtgtattttaagatactggtcatgttagagatccagaagaaatttacctttcagggaatattgctagtgagtatctcaatatttgcatttattttaaatgtttttcataggatacctttgtggcagtattttcatttctgtctggaaggttagtgcacatttctgaacaggctgctttgatcctgaatcgtaagaaagatgtcctggcgtcttctcactttgttgacctgcttgcacctcaagacatgagggtattctacgcgcacactgccagagctcagcttcctttctggaacaactggacccaaagaggtaacaggaccaatgttcagatgtctatctttcctcatcaagatcagtttcattcttacaggaatagtacagaaattaacatattatttagaacatgcacactatctggtttttcttattcctgttatagaaagtcacgtgatgaaaacagcattttaaaagcttctgataacatactcaatacgtttgtttccattttgtcacatctgtttcacagatgatatgtcataaatattatttcattaccagcgtattgtatagtggtttagttgctatgaaggctctgtttcctttaagttaaaattaaatgtttttcctccttcatgatttccttgtatgagaaattttactttggagataaaatttggatcattaggctgggcaaggtggctcacgcctgtaatcccagcactttgggaggttgaggcaggtggatcacctgaggtcaggagttccagaccagcctggccaacatggtaaaaccccatctgtactaaaagtacaaaaattagtcaggcatggtagtgcatgcctgtaatcccagctactcaggaggttgaggcacgagaagcacttgaacccgg

SEQ ID NO: 51291 - DNA, 1070 bp, Homo sapiens
aggaaacttaacaatcatggcagacggggacatgtccttcacgtggcaacagcaaggagaagcgccaagcaaaagggggaaaagcctcttataaaaccatgagctctcatgagaactcactatcacgagaacgggatgacggcaaccacccccatgattcagttacctcccaccaggtccctcccttgacatgtggggattatgggaactacaattcaagatgagatttgggtggggacacagccaaaccatatcaccttttatgtaaaatcttaatatgccctgaaataattcttttggatctcaaaattcacttatgccataaggcacgatataattctagtttactctttatattgtacttttgccttatgaatctcaaggattgatactgagagcagttggttaatgccaccccctttataggctatgcctgcgttacccccttcgattccttactttgagcacatagaacatcaagaggacttaggaagcaatccactcagctgttgtcaacctctggtcctgtattagaatatgtttctatttaacatgtcttgtacaaacctcttagaaggatctgaccattacttcttcagagtacgcttttagaaacaagcatcacatatttacagcctaggaatggaaatgcattgtgggtgcacgtctgctgtcttagatcacgtagtctagctttcagtggtccaggacttctagtgagtgcagttggagttcatgtgtctggtgtgatgaataaatggtataagcaaactgacctcacagtagaggccgttttctgtagaagattataccaatcttcagtgctttattaatgctttctgactcttctgtgatcgtctcttagaagtatcaagacctgggctgcttattcaatattttggttgttttggattttcactgtttatgctaccttcagtgtatattttttgaacatctcacagttttccatggttcctataactgaagacttcttgtttcagtgaacaaatgcccaaaagatattcaggaagctctaatcagaggaaatacatatagtcaacaaacactgg

SEQ ID NO: 51292 - DNA, 1863 bp, Homo sapiens
gggtgggccatgcctggcctgtgggaggagtgacacggagctgctgtggcctgagtggaggaaggaacgaggatggaagaagacgggaaagcacgggccacaccacagggagcagtgacttctgcacgaagtgttttatttcagtttatcacttgcttattttcaaaacgttttactttgggaattttcaaacataacacaaaagaagagaagataatgtaatgaactgctgcggtgtcatcacccagctttttaagaactcgaaccctggccagtctggcgtcatctctgccagcagcagttctttaaccccctcttcccaggttaccagacagcgtagctcagatctcgtctgatttcctgcatcagtatttcagaatgtcattctaagagaggaagttctcattcacgtttgtggggttcaaaatggtcccatctttggccagtaggaatccctttgggttggcccctgtacccttgtgagagtgccccatggtctttgacagcttccattgttttaagcatgagacaccccagacccattttagacattccttagcccagacttggcatcagccatttctctaaggatccctggttccttttggtgggaaatggcattcacatttggaggccaaatctggatggtagggatggttattgctacagggttatcattgcatctagaaattttcagtgaacagaggtaggaaacgttcatttcagtttcctttttttttttttttttgagacaggatctcactgtgtcccccaagctggagtgcagtggcacgatctcggctcactgcaatctctgcctcctgggttccaacaattctcccacctcagcctcccaagtagctgggactacaggcatgcaccgccacagctaatttttatattttttgtagagacggggtttctccatgttggccaggctggtctcgaactcctggcctcaagtgatccaacctcctcggcctcccaaagtgttgggattacaggcgtgagccaccatgcctggcccggaaacagtttccaatatgaaagactggtgttggctgcagtgttgaagatactttggagggggaagaagggaggcagggagggcagttagaggctgttacagaggtacaggctataggccagcgttccggggggaggtataaatatttgtatattctggatattttttacacttgatcttagccaaaaggccaagaagcgatattctggatatttttagagaacaaattaccagaatttattaatgggttatatttggagtgagtgtgaagtaagagtcaaggataataccaggagttttgggctggagttatcattttttgaggcagacgaaattctaggaaaatcaacttcctggaggtggagagaaagaatgtggtgcttagttttagataagttaagtttgtgatacctgttgaatatccaagttgagactctatgagagtctggagttaaggaaaacttttaggctagaggtagatatttgggtcatcagcgtgtaaatggcatttaaaacctttggactggatgagcctggaaaatgcattcgtggatgtggagggaagctggaaggtgtgagcatggatgtgagcatggatgtgggtcggcagcaccgggacacagctcacttcccggtgattctcttttcttggtgaaatgggaagcaaggtcatcagttgagggtgcagagtgggagaagattctgtagtgtgtggtagaagagaaagagcaaggtggggctgggcgcagtggctcacgcctgtaatcccagtactttgggaggccaaggtgggctgatcacctgaggtcaggagtttgagaccagcctgacgaaca

SEQ ID NO: 51293 - DNA, 1064 bp, Homo sapiens
attattcatttaacatcatcagcatctttctacgttacgatgtgctttttgtagactttttaaatggcaacataaacataattatggagggcatcagagtcctctaaggaacttgctaaaagacagatgcctggtcttatttccagagcttctgatttagtaagcatacagcgagactgtggatctgtattttagcaagttcgctagatgattttgatgtaatgtgtcagatgaccaacatgtgttagattatacagccatttcccccaggatgggcacttgggttctttgctgtttttataaatgctaagataaacagctttgcataaaattgtctcacatttagaatgaaatacagaagtatttttaaaagtgtataagaattacctgatgagtatgccacctgtgttgtgtatctgtatcccagagcagtgcctttgctgggttacctacctcaggacctgattggaacatcgatcctaagctacctgcaccctgaagatcgttctctgatggttgccatacaccaaaaaggtcaggacctactcctttataggaggaaatatttttctctcattgatttgttctaatttttcttttcatctcattagagcgcaacctttaaccagagaggcattacattgaagctgctaaagcaattgttttctatttaaacatactaaaacaggccaggcacagtgggtcacacctgtaatcccagcactttgggaggccgaggtgggcgaattgcctgaggtcaggagttggagaccagcctggccaacatggtgtaacccatctatactaaaagtacaaaaattagccaggcatggtggtgcacgcctgtaatctcagctactcaggaggctgaggcacaagaactgcttgaacctgggaggcggaagttgcagtgagccaatatcatgccactgcactccagcctaggcaacagagcgagactcaatctcaaaaaaaaccactaaaacatttacaaataaatggcttaaaaaggacatttgtaatcagtatctgtgttaagtaaatcctatttttgtcttattatt

SEQ ID NO: 51294 - DNA, 1060 bp, Homo sapiens
cctgcctgacccccctgtctgtcctctgttgtcgccatcgtttttgccatgtccattcctgggggcgacagcctcttctgcgatatcaccctcaatgtcgtcagcaatgagtccaactctggacccacccccttcagtcaccagccaaaggagagaggaggaaaagtgggaggcacaaagcgaggggcacccgttcattacttcgagaagcagctcacccttgcagttaaacttacttcaggaagagatgcccagaccctctgaatctccagatcagatgagaaggaacacgtgcccacaaactgagtatgtaagtgatgctcattttcaacactcaagtgagaaagtgaatatcttactaaagttaaggtggttgcgttgggactcagtgctgacattctcagtaggtaatccgcgtggctactgtgagtgagcctgttagcctaattctgtgtaaacatgaaacacatctgcctggctctgtttggaaagtagacatgaaagaatcatctatgttctagtttcttatatactttgtgaggttttttccaaagtgctatcttttaagttttcatgtgaactggattccctctactctttaaaattcgttacaggtattacgcttaagtgttcattgcctataacacgtatttgtttacttacaaccggggttatggtcaggtgagataggaataagccatattgacaatttaacgattgtacttcttcatgcacagtcacaggacaacaggtgtgtatgaagaggtaggagctattttatttgttatcagtagagtaggcagtttatagtttcacacttaaacatgtcatttttttcaaaaccaaaagcttttttggtctgcttcctttaacttttcatccctttacctaaaaagccattctcaggtttatttagcaggttaaactttggaatctgacgttcctatatttaggtatagaatccaaggcaagtgtgaatatttacacagatttttctttgaccttctctttaaggtacaatacccttctttaacagatattcaaaatctagtgatacaaa

SEQ ID NO: 51295 - DNA, 1036 bp, Homo sapiens
catatggcaaaatgctgatcactgttttgaatttggtttcattcctctaatctcaaatccagtgttttaaggacatgctaaatgctttgtcctggagagctatcttaagggacaaaatcgttttcccagcgtcatctgtgacacatcctgacagtagagagctgcttccaagaagcaatttgaagtgccattatcaggcagggacgggggctctaggggatttcggggtcagcagatatgaaatgaatgatttcatagggctgtcacagagctgtggtgggaatttcccatgagaccccgcccctggctgagtcaccgcactcctgtgtttgacctgaagtcctctcgagctgcagaagcctgaagaccaaggagtggaaagttctccggcagccctgagatctcaaggtctgtccatctgggggagtgggtgggggcactgagaaggggtgagattggaacttttgctccctttgcccatttctagactttttctcctaatatgtaataacttctcttcaatagccctttaaataaacatcaataacttagcctgaagagtttttcactccttagttttgttaccatacaaacttcacatctcaaaacatgtctctgtttaagaaaatgtgttagtgagttgaacagggaggtctttccacatgttagtagttaggtgttcagctaaagggggaagagtgattatgtgatagcttcttcttgaactgaattgtctgatgcccctgacagattctctttgtaaggagtttatttcaggggcaataagtaattggcattattgctggttggtactgcaaagtacctatgaaagtccccaaaagttcttgctattgttatttctgcattttggcagaacatgatggaaaatgcaccctcaaactttggcaaaccggcacaaagctgtgtgtttaatcacgcctgccttgtcctagtggtttctatgaatctgctacttttccgtaatattgcatcattaattgttcctgaaaaaccctgagttatcctcttatagaat

SEQ ID NO: 51296 - DNA, 1260 bp, Homo sapiens
tggctcaacgtctataatcccagtggtttgggaggctgagacaggaggattgcttgaggccaggagtttgagaccagcctaagtaacacatcgagacgccatctctacaaaaaattttcttttaattagctgggcacggtggtgcacacttgtagtcccagctactcgggaggctatggtgggaggatgacttgaggccagggatttgaggctgcagtgagctgtgaatgcaccactgcattctagcctgggcaacaaagcaagaacctgtcttatcagaaaaaaaaaatgttgccatggaagtaagctgaattggtgggaccgttatgaacagatgtcgatgaatacagtccaaagtaagatgatttggtttttttccaccagcagaagaatgatcagattttgtgttttgagaagggcaaattgtctactcaaagtcttaactgggggaagctgtggggctagggctgccagcaggaatggcaaatgccatcagcagagaccattgttcctcattttaagtcgtatgtgaggagtcagaggccagggtgaggggcacacctgcaggcagagttggggctgccagaagtaagaagtgggttgtgtcagacacaagggatcttttcctgctagattctgttcctctctctgccatctgaaaacacccaaaacaccacattccctcccatttctttctccctggagtacaaaatggcaagggtcaaattgcttcttctgatctttaaatgtggaagagtgcgtttctcttatgagaaatgccttgcttgggtttaagaatataatatagacacattttgatcatttttataccaatgatttagaaatattgttggaaaataggtcagagagcttgtggtttaaactaaaattaaattcttccaaagtttcctagtgagtgattggttagtggcttaatgataactttatgtatttttggttttcttttcactagtctgctgctgtgaaggagatactgaaggagcaggaaaaccggaagggcctgatagccgccatctgtgcaggtgacgtgcaggggcagcctgtgttgcagcgtcattggtgggtggggtagcctttcattcgatggtttgattccaaatagctcttccccttcataaagcatgcagggcatctgtgttggtgtatttagtttgggtggcatgaagttggtgtcatttcagagatgaggacaattgttctgttttctgcctctccatgcctttggtctacatgctgtga

SEQ ID NO: 51297 - DNA, 1006 bp, Homo sapiens
gggaaggtgagagaggtgagcacattttgtttatctgtgtatgctctgctggtatcaaggtaaatcttcttgagtaaatggttattgaagtattttgagtttctgtgcttttgccagatgtgctcagcaaatcgtttgttataaacatactttatctctcatactaggaagtgtttcatttcagaatcgtagctgtatgtttggtaagagcctcttgattttgaagaatactttgctgttgcagtttttgttgttgttagagaaggggtctgtgttgcccaggctgatgttgaattcctgggctcaagcaatttttctacctaggcctccccaattgctgggattacaggcatgagccactgtgccaggcactattgcgattttttaaacatgggcttttctatatctgcacttagatctttttatttttattcttaggtcctactgctctgttggctcatgaaataggttttggaagtaaagttacaacacaccctcttgctaaagacaaaatgatgaatggaggtaagtatatgcttgtttttgtttgtttgtttgttttttgagatggagtctcgctccatcgcccaggctggagtgcagtggcgtgatcttggcttactgcaatccctgcctcccgggttcaagcgattcttctctctcagcctcctgagtagctgggattacaggcgcatgccatcacacccagctaatttttgtatttttagtagagatggagtttcaccatgttggtcaggctggtctcaaactctttttttttttttttttttttttttttttgagacagagtctcgctctgttgcccaggctggagtgccatggtgcgttctctgctcactgcaacttccgcctcccgggttcaagtgattcttctgcctcagcctcctgagtagctgggatcacaggtgtgctccaccacgcctggctaatttttgtattttttagtagagatggggtttctccatgttggtcatgctggtcttga

SEQ ID NO: 51298 - DNA, 1363 bp, Homo sapiens
gcacacgcacactcacatgcatacccgcctccattacgttgtgctgtggttgtttttgaggcatcagagggtgtgcgtgccgccacatgttgattggggtggcttctgcgttcagcgctgccgcatcccttcacccttccccggcacttcagaattgacacttgagctttgttgtaaatagtgatgtgagtaactgtcattcaccgacatctcccccaacacttaaagtcttagcagctgcatttaactcacgcatatttgtttcattctaacagtggtttctgtcaccctttgctctgcacagttttaaaaatacctttgtagggggcttctaagagcttggagtgcctagtaaatgtttttgaatggttagctacagtgttgggtttatatgctgtaatagtgaatttaattggtaagtaatcgtctttctcgtcacatagcccattaggatgtcaccttttctgtttctactttgcaggtcattacacctactctgagaatcgtgtggaaaaagacggcctgattcttacaagccgggggcctgggaccagcttcgagtttgcgcttgcaattgttgaagccctgaatggcaaggaggtggcggctcaagtgaaggctccacttgttcttaaagactagagcagcgaactgcgacgatcacttagagaaacaggccgttaggaatccattctcactgtgttcgctctaaacaaaacagtggtaggttaatgtgttcagaagtcgctgtccttactacttttgcggaagtatggaagtcacaactacacagagatttctcagcctacaaattgtgtctatacatttctaagccttgtttgcagaataaacagggcatttagcaaactactgattgtttcttgttttgtctctcatttcttttgtgaaattaaattccgtatcaccttcatttgcagctcttaactgtccatatggcactgaaataaaagaacagtgaccacattttacacagcaaggaggaaaggcatacaaacagaatttaagaggcttgtgattttctctgcttattagctgtgtgtttttaatgtgctattaaaaaataccaatgagggctgggtgtggtggctcatgcctgtaatcccagcactttaggaaaccgagccaggaggattgcttgaggccaggagttcaagaccagcctgggcaacatagcaagtctccatctctacaaaaaaatacaaaaactagccaggcatggtggcatgcacctgtagtcccagctacttaggagcctgaggtgagaggatcacttgagccccagggggtcaaggctacaatgagctgtgatcacaccaccgcaccccagcctgggtgtcacagc

SEQ ID NO: 51299 - DNA, 1382 bp, Homo sapiens
gatagaggagatagtttgttctttgaaccacaccatgtgcgttaagaatcttctgctctctaattacacctgtggtggttgcatgggtgttctcggggtgacagcagtcaagtgtttcactcaggaagaaagctgtggaagcataggtagctggggtgctctctccctcacacaggtggagagaggattgttgatcttttattaatatctctcgttcattccagggcatgcttccaaatctgctccgatgaatggccactgctttgcagaaaatggtccatctcaaaagtccagcttgccccctcttcttattcccccaagtgaaaacttgggaccacatgaagaggatcaagttgtatgtggttttaagaaactcacagtgaatggggtttgtgcttccacccctccactgacacccataaaaaactccccttcccttttcccctgtgcccctctttgtgaacggggttctaggcctcttccaccgttgccaatctctgaagccctctctctggatgacacagactgtgaggtggaattcctaactagctcagatacagacttccttttagaagactctacactttctgatttcaaatatgatgttcctggcaggcgaagcttccgtgggtgtggacaaatcaactatgcatattttgataccccagctgtttctgcagcagatctcagctatgtgtctgaccaaaatggaggtgtcccagatccaaatcctcctccacctcagacccaccgaagattaagaaggtctcattcgggaccagctggctcctttaacaagccagccataaggatatccaactgttgtatacacagagcttctcctaactccgatgaagacaaacctgaggttccccccagagttcccatacctcctagaccagtaaagccagattatagaagatggtcagcagaagttacttcgagcacctatagtgatgaagacaggcctcccaaagtaccgccaagagaacctttgtcaccgagtaactcgcgcacaccgagtcccaaaagccttccgtcttacctcaatggggtcatgcccccgacacagagctttgcccctgatcccaagtatgtcagcagcaaagcactgcaaagacagaacagcgaaggatctgccagtaaggttccttgcattctgcccattattgaaaatgggaagaaggttagttcaacacattattacctactacctgaacgaccaccatacctggacaaatatgaaaaattttttagggaagcagaagaaacaaatggaggcgcccaaatccagccattacctgctgactgcggtatatcttcagccacagaaaagccagactcaaaaacaaaaatggatctgggtggccacgtgaagcgta

SEQ ID NO: 51300 - DNA, 1032 bp, Homo sapiens
gaactactaatttaagaaaaatgtacttattttgttatccatgccttgcagctaagcaagatatgagttactgggtgtttcacaaaggaggatgtaaagaatgtacctttaacttgtctttaaaagggagggaggaagctgtcccaggcttttactgaagccagtaatcttgcagaacttgatttttacaggataatggaaattagtatcttcatatattactgtttgttccttgaacaagtagtaactggagaatttgtctccccatggccaaccctgaaatacaaaatccagataaatgctagaccctggggtagtcaggtgccaatactgtagaaactcttgcttagtttcagcattgtgttttagtgagtattagttctacagcataaaatacagtggcttctgaaattacttttttagcttgggaaaaataagcaggatccactggtgcttcatgcccagtgcagccgtaacttagaaggctggtttaataagtcaggggagggtctgtgtgcattgccaagtgagtgtgatttgttgtgcaactctcaggctgtgcagtaggaggtctgcttttgctggcaatagattatttctcatttcactaaaacatttcatgtcttttggattagcatttacacaaaaaatcatttttagtgtttacatataagtaccctcacgagctgtgagaattaagtgaaagtctacaactaattttttctattcagcatcccccaaatcctctgttagctttgctgtaatttagactgtcctaatggaggtatttctgaattgttttctttattctctcatctcttctacctcccagggaatgaaagctactggttgattttaaagtgcctgggcctcacaggtttggagatgtcccagaataaggcacaatgtcaatagcaggagttgctgctcaggagatcagagtcccattaaaaactggatttctacataatggccgagccatggggaatatgaggaagacctactggagcagtcgcagtgagtttaaaaagt

SEQ ID NO: 51301 - DNA, 1017 bp, Homo sapiens
atagtcagtcggatcctacttcgccagtttaaaaagccgtagggacaggaagaggcagtgtggtgtgttggtgaagggcctggacactgaggccgggctgtctagttgaagtcctggccccattgctcaccagttttgaccttgagcaagttctttaactctgtgcctcaagtaagtgagagtaataatagtagcccaccttatggcattgtagagaggattaaatgagttcatacacataaagcacttagaaccatgcttgcctggcagttgtatgtccagtgaatgttagttatcattaatggttttatattaattgtaacaatctagagttacccatcgggtaacttaaatgcttgttaaataaatttgaagttttaaagacttgcgtcccatcattagaccattgtgctcgttgtctttagattagaattcacttttatagtaagaaataatctattgttatatgtcaaaaagaaataatatttttctcccctctgtgtgtatatatagttactgattgtgctactctgtaggagaaatacaaaggacaaaagaatgtattcctgctatcctacttttctgctgtcacactaaaattgtgtgggaggcttaagtgagttgaaagactggattatggtagttgagggaatgggttttttgttagtttaccattttttaaaatacttagctagaaagcattctgaattattgaataaattacgtcatttattttttatttgacagtttgaagataaattattttctctgttgcctctatttcaccacctacaaatggtccattatgttctggacatgtttaagagcctctgaggaatggagctgcaaacacagacacaaatgttcatctttgccacactgaactatattttaatgtttactgaagccatcaagcttttcttgaattcatgcaggagtattttaattacattaaaacatggcattattttaaaagtaatctatgtttttaatttaaaggctacttatgcttaccat

SEQ ID NO: 51302 - DNA, 2188 bp, Homo sapiens
ctttaaccgtgaatggtgctgtattagtgcttgctaagtctttattaggatttcatcattgcttgaaagaaaccagtctcttacctgataaaaatatgaatagatggttagtcataaacttaagtcagaatggagactgtagctttaaaagagatgtgtcggtgacttgaggtacacctgcaacacaggtagggcaagactggtttctaggcaactgtcaggggtgaagaaaggtgaggttaaaatgccctttttttcccttccagaacaaatgttcaaccttttataaatgtgtaagaatgcagtgggtacacacatttgttgagactgaacatcccaagttcaccgtacctatttttttaactgcatttcttttcttatatttctgtaattacaatatacagttttaagtgaaattttatttgaacagagaccaaagacaggctaggtatcagcaaatgatcaaattttgcaaagaccaaaataaaagaagctggtttcttgctaacatgctggctataattggttaccaatatgttatcaagcaagttcttttccagatattagcaagtttgaagaaaaataacaaaggatttagcatggacttcagaaactatttgtcattccctttgcttcaagcagaagtttattttcacctgtgtgttccaggggacactcgataataagtgatagaggtcttagactaacgatttataacctgacagatatattagattgtaaactccttaagggtaggcactctgccttgtatagcttctatcttatgcagccttgcacatagttgatgttgataaataattgcatgaaagcatgttttaccttttaaggctcagcaggattggagcagtcattgataagggttggaaagcaaatctgtttaatttttttatggctgttatgaaatgcctgaattattgatatttttgacgggtaaaactgttgtttcaatcatcggttttcctacttgcagttcacaatatatactggtcactctttataagatttaattatgcttgagtttttgtgtgaaaatacctcttgactgctgcttctcaaaagttgagctagataatacttcctttctgctgaaactaatggtggcttttcaaagcaatttgcgtaaattacaggcacaatctaacatgcttgaaactgacctgattgtctgcataccatcagattgctttagaaaggagcagaggaaggaaaggaggtgtcaggggtaactccaggaattggaatggcataggctccctctgccagagaaacaactctgctcttgatctaaataaatttgaattggtacctcatcatctggatccatttggatacatttagcatcctttgcgggtgtctggctatacaaaagctaataaagaactcgctacataaacgcagtccagttgtggtattctggcattgttcacacagcataaacacgtgctttgtaaaggtagatgaggcgaatgagtttgagggtcctaaatgtaagttactaccttaacaattagttttaagatagggaaaagttactgaggggggttcagatttcagaaggtggtggggaggattctcagatttcaagtctttgttgatactgtagtccaattcctcacaccataaaattgggcaatattacgaaaagaccactcttccaggtctcaatgaatgtgtctttaaaatgtggggcttttggccgggctcagtggctcaggcctgtaatctcagcactttgggaggccaaggcgggcagatggcttgagcccaagagtatgagaccaacctgggcaacatggtgaaaccctgtcactacaaaaaaacacaaaaattagctgggtatggtggcacacgtctgtagtcccagctactcaggaggctgaggtgggaggattgcttgagcctgggaggcagaggttgcagtaagccaagatcacacgactgcactacagcctggtgacagagtgagactctgtctttaaaaaataaacaaacaaaaaaatgtggggctttggctacagaaatggagcccttttcaacttggaaacaataggaaggtaaggattggaagacattatccaaaagctcttattcaataccccagatgtgaaactggactagttacagattgttttttaaacaactattcgctcagtagaattgtcttctg

SEQ ID NO: 51303 - DNA, 3620 bp, Homo sapiens
caccccctacccccgtgacctgcctggggccatcccaccccccatgtcagcagcccaccagctgcaggccatgcatgcccagtcggccgagctgcagagactggccatggagcagcagtggctgcatggacacccccacatgcatggtggccacctaccaagtcaggaagattattacaggtgaggtggggtgctgggagggagtggaggggttatctgagcccaggctcccaacctccccgtgtgcccagggccaggctcctccccctctgcctgctgggccctggaggggacattgtggaaccatggtgatgggagaaacagaggaagggaggtgttgggagggtaggtcagctacacaggaggctgcgggcttggggttggattgcctggctgttgtctttggggttgcctccagcctgcgtgactgcctgcctaggcctgagactaaatacgctttcctgttttgtctttccagtcgactgaagaaagaaggtgacaagcagttataagttatttatttgttaacgctggctgtggaaaccccagttcttggggggagaaacaggactttttacataaaataggagctgcaaaagcaaaaagaatatcttctaaagatttctttatatatttaaaaacccacaactaaaaatgtatccacatagtagtgttcgtttgtcgagaggatttcctgagactggtttggatctccctgcatgacagtcccccagaaacttagtgagtcctggactggactgaacatccagaaagcttccctgcaatcttggggtttggctttagttttcttttccttgatttctcagtaggtgctagaatccagttcacacccttcactgtgcgtgcagacacactgacacactccgccacgagtgctccagagcccacgaggcttgcagatcgggggcataggaatttggaatccaagagctataatttttaaaaaaaaaaatcttttattttaatacattgtaggaaatcttcataattggagaaagttctgcagcatggctttttacgtctgtaaataaataattttagaacagcctttttttcttccataaactactattgtgatctattttttccagccatgtcactaattgtgaattcctaccaactattgacagaatacagagttgattttttaataaaaagttatatataattatccctttaattaaagggagcaaaggggcgttccacatggacagaggcttggaccgaggcctggtcacagcagcgagcatccagggtttgcagggacgatgttacagactctgttttctgcctggcgtttcacttgtgtctgctcctagcctgtgctctgccagcagcacagacatctgctccatcagacctcttccattttgcacagggagtgcaggaggtgaatgttcactttctgttctccagtgtcactgttctgtttccacgggatggaaagcgcatgggcctgtgtccattgtagatttccttctagatttctgtgtacacacacttgattgttctggatgaatgtcttttttaatactccgaaaatttcatcatctaagaaaatgattccatacaaataactcagcacacaagtgacccaggacatatgcctgccaaagggatgtgttagaaggctgccttctcatgcgcattgtcacttggatcttgtggtgaggacggccccatctttcttgccacagattgaggccacttttgagcaagggagatcctggagttaagacaggtgttgggggcagcctgtattttaccctaggggcaggtctgcatggtgaccccacattgcactggtaaaccatttgagtcccactcttcatcctggaagtgggaactggagtcccacccacagtgcattcagaaagcatgctgtgtgggggctgcttctcaggaggccaggcccttctgagcggaaccgtcctggagagagcctgccctcgtttccaggctgcagccgtaacgcactttctcccaggctgagggcgggtgttctggggtgtctgccctctgtcggccctgcttcctgccaggacgtggcctcttccgatccttttctctcagacactggaggtctcttctgccattgtgctggtcccatcccaagaattgtaggacagagaccacactgggtcggcggacacaaagtccatccaggacccaggccgcagagggagcaggaagagatgctgatagtttgatctagaaaccagcagctactggctcaaattcaggttctggcgtcaaatagcgacatttccagtttctcttaaaaaccgtgtttggtttcagttgggataggcttgttttgtctgttgaaaatgtttctagttttttttctttcatttttctctcattccatttctgccttaactttagtttgttcacagggaggcaaagctgacatgaaccttttgtcgtgggacttcaggccacattggcttgaaggcattcgtttccttctggggtggggacaggccctcatggcaggcttgttcccgtggctctgagcgaggcctcttcctgctgggctcccagactcctgcatccaggcccccaccttctcggcttctggtttttctttctttttggtagaacacaacatctaccattcagttaaaccttctttatctcctcctttggcatccatttttccaaagaagagtcgagtcctctgaggtctgtgcttgaaagccgtccgaaggcattcttgttagctttgcttttctccccatatcccaaggcgaagcgctgagattcttccatctaaaaaaccctcgacccgaaaccctcaccagataaactacagtttgtttaggaggccctgaccttcatggtgtctttgaagcccaaccactcggtttccttcggattttcctccctttgttcggggtttggtttggctcctctgtgtgtgtccgtatcttgttcggtgtcctcgaggttgagcttcactccactgcggcagaggcagcgtgcacactcggatttgctacgtttctatatatcttgaagctaaatgtatatatgagtagtttgccatgagataacacagtgtaaacagtagacacccagaaatcgtgacttctgtgttctctccatttgagtattttgtaatttttttgaaatatttgtggacataaataaaaccaagctacactacaacccttgggtgtctcccgtgcactgtctcattcctggagagtgggcggggatcctggctgttaccccaggtggggaagggacagagggagagtcggctgttccctgctgctcgggaccctgtttgcatcccagagtggcttccagaaacatcctctgtctgggaagaggctttccctggtgagggtgctgtctttctttggaggctccccaagcagcgggatgggccctaagcaggcactggcattgggactaagagcatcttcccccaccccttgccattcaccccacacctctaatccgtgggcgttaccagcatgtatgggcatgtggcaccctgcctgctcaggagacacatcggaaccaccccatcctagcggcctcctgcctggcccccatctgcctccccgtggcctaccagtgccccc

SEQ ID NO: 51304 - DNA, 1832 bp, Homo sapiens
ctcccacagcgcctgttccccacacccacatccaacaggcaccggccttgcacccccagcggccgccctcaccgcatcccccgccgcatccctcgccacatcccccgctgcagcctctgactgggtcggcgggccagccttctgcaccctctcatgcccagcccccactgcacggtcagggcccacccggccctcacagcctgcaggctgggcccctgctgcagcacccaggccccccacagccctttggcctccctccccaggcctcccaaggccaggcccctctggggacctccccagcagcagcgtaccctcacacctccctgcagctgccagcctctcagtcagcgctgcagtcccaacagcctccacgggagcagcccctgccaccagcgcccttggccatgccccacatcaagcccccgcctaccactcccatcccccagctgccggcgccacaggcccacaagcaccctccccacctctcggggccctcacccttctccatgaatgccaacctgcctccccctccagccctgaagcccctgagctccctgtccacacatcaccccccgtcggctcaccccccacccctgcaactcatgcctcagagccagccattgccctcctcgcccgcccagccccccgggctgacccagagccagaacctgcccccgccccctgcctcccacccccctacaggcctccaccaggtggccccccaacccccgtttgctcagcacccctttgtccctggaggccctcctcccatcacccctccgacctgcccctccacctctaccccaccggcgggacctggcacctcggcccagccaccctgctctggtgcggcggcttcaggaggcagcatagcgggggggtcgtcctgcccactccccaccgtccagatcaaggaggaggctctggacgacgctgaggagcctgagagcccccctcccccaccaaggagcccgtccccggagcccactgtggtggacacccccagtcacgccagccagtcagctaggtacgcttcctagggctccaggacgggtcaggcacaggtgggctggtgggggcaagttctggtgggagggagggccggggtgggtctcggcaggagctcccagcaagatctgtggcttttctcaggttctacaaacacctggaccggggctacaactcgtgtgcccggacagacctgtacttcatgcctctggccgggtccaagctggccaagaagagggaggaggccattgagaaggccaagcgcgaggctgagcagaaagcccgagaggagcgagagcgggagaaggagaaggagaaggagcgggagcgggagcgagagcgggagcgcgaggcagagcgggcggctgtgagtccagggttggcgaggtgtgacggggggcgctggtccatcctgcgcctgggagccacgctgggccaccgagctctgcccttggctgcctgactcggcctcctggcagctagagggttgggtgctatttacaccctgtctccacacctctgacgggtgctgcacatccgaagctgccggggtaactgcgcatggcaggtctaggctgactcccagcagtgactgtgcgtcctcctaccggagggccttcgaggaaagggcctgtccttctcctgcagcctttgggttcataacttctaagtaatttgaaggagtcggggagaagcacaagggggcgccttgagagaagacctgagcactcaggcgataagcaggctgcgaggggcctctccagctgccctgcctttgtggccccctcgtgggctgggtgctgtggtggtggccagctctctgc

SEQ ID NO: 51305 - DNA, 1042 bp, Homo sapiens
ccacaggtgctcaaatctcatatacatcgacacatggtttgcatgtgaccagtcacatcctcctgtagactctaaatcatccctaggttacttctactgcccagtgcaatgtaaatgcagtttaaacagtggttccactgtctagttcaggagataatgacaagaaaacattgtgtgcacgttcagtatagatgtaaccatcacagtcctgcctacattttcagtccatggttgcttgaatctgaggatgcaaacccacaggtgcagagggctggctctcattcccacccccagatacgtgttccttcttggccccagttgacccttctagagctttttgctcctggagatggaactcagaatgagggagcaaagtgtctgcaaaccgtcatttccttgctgaggctgatgggatggtctcccttggcctgattgctccttgtgggcttttcccctgcagaaggtgaaggaggaagcctcttcccctcttaagagtaacaaacgccagcgggagaaggtggcctctgatacggaggaggctgacaggaccagctccaagaagacaaaaacgcaggtgaggtttgctgctgagccttgctgagtaaagctaatgcttcttcagaagcccccagccggggttctccctagttggtggccgtgccctgtctcctagggtggggctggagtggcctttgacactggctgggtcagggcacgacctgtggtcccggagccaagcttgctgcttcatctgcacaaacattactgtgtgtccggcactggtggtgcagagcagacagggctctgccctcctgggacttccatccttcccttctctgactccaggagatcagcaggcccaactcgccatctgaaggtgagggagagagttcagacagtcgcagcgtcaacgatgagggtagcagtgaccccaaagacatcgaccaggacaatcgcagcacgtccccgagcatccccagcccccaggacaatgagagtgactcggactcgtcagcccagcagcagatgctgcaggcccagc

SEQ ID NO: 51306 - DNA, 1050 bp, Homo sapiens
tgtttactgaatacttattcaagatgttgtcttagacctgtggggtactcacagatgagatagcacgtactttggcaagttgggtgggcccatgtatggttacagcacagggaagcctgtctgtgccagcacagaggcgggaatgaaaagatgtaggagtgaaacctgtatgatgccatccagtggtgggggagtgaagtgaagggaaggcttcatggagaagaaggcagcaaatgtgatgaattgagtcctgagtgatgaggaggactacagggcctggacagaggaggaggtgggggtggtatggggctcaggggctcacccagcaggcaggagagtgctgaggaacagaaaactggccattgtgtttgacataagccaaaggccgtgaggcgggggaatatggtagaaaggaatatggtagaaaagtcttccggtaacacagagaaagtctcagaagaagtagtcaagcagctgggcctttgttccttaggccctgaggaacctttgaccgtttggagaagaagtggcaaggtactagcggggctttgggaagactcacctggtctgtgtgcagcatgggagggccggcccagggaagagctgtggcaggacctcaggtccagacgtctgagtggaggtgtggggccagggtgggattagcaaatggctgagttcatccaccagaacaacacagagcttaggaaatctcattacagtgttcagtgttggcagaaatcttgagctattgcagttcctttgcactgtacaaatggagtggtaaatgtagtggtaaaaaaaaaattttttttaactgattttttaaaatgttataaaaaggtgcctgggtaaggaacatcttcatgagtgtcttagactggccccacctatttacaagttaaagccacaagaccttcacgtacttccctcctttccctttgcctttccccagaagaggatctggaggtggcaccgagggactgccttgcctggaggcagctgcctcctcactgtgggcttcctcgtgggtggcggtttagatcagagccc

SEQ ID NO: 51307 - DNA, 2027 bp, Homo sapiens
tcgttaattcatgtggaggcagctgagagtgccacctggtcctgaagaaattgggatacttgtgggcacaaaggtggacctgagatcactggagccaagctggtggaagtgttgaccactgccgttggcagagagctgtcattactggtgcttcaggccacagctcagcaggctgtccttgttctgttttgttaagagcctagcagcatggctagcttgcaggcataatcccagagcctcttgctatctgcctgcaggaagtctctatgtgctccagcacactgaaggaatttggtgctcactttctcctgcttttgagctttggtcctgtgttattactaatccttagaggaagattttgactgtaaccactttcctgagtgctcttaaggcaggtccagaggattctcacagcgtgaaatgagaaaacgctcagcctcagaaaaatggaagttattcttttagtgccaaagtgtcattggaccacagtgcagcttggttaattcaggttaagacttagcccctggaacagtgtcaagccaaggcctgtgtggtttcatcatagatttgtaaaacaaaaaacacgtgtgttctggtaaattccaagcgcacattagtgcatacgtgtatgtgcaggaacactccctgtaagactcttgttctcatttcacactggcgcgtccccggggctggggaaatcattttcatttttgagagtaaccttaactaattaaatggatcaagggactctttgtgttttgttttcattttgttttgttttttactttaatgtacagataaattaagggaaataataattaccttgaataattttgattctcgtaactaattttccacctatgtgtgtttagctcaattttgaaatggttcactgaaagatttccaaatttcttatcactgaaactgagttatttcacttttatgactgttagtgactcctctgttttatgtatttctggtgcagtataattcttctatgtctgtgtgtctgtgatagatctcagttcaagttagcgtttcccgagcacccatcttgtgtcaggcactctgctaatgattgcgcaggttacaaggtttagagtggccacatcccctgttcacttgcagtttagagtccagtcggaggaaagggaggaggggaatcatgttatagacataacttgatatcctgcaggactcagtgatgtatgagccacaaaaaggtcacagctgagtgagagagttggtaatcatggaaacaggcgcatcggaaactcgcttcctatgggtcagtaaagtgtgtatgaggtggtgtggatgacagcacatagagctggaggggtgggccagcagcaaccaggagaaggcgttccaggtgtctgcacccaaggagatcctggggtcagaggcaggacatgtgggaaaaaccattggtcccttttacccagggaaggactcaagaagccgaacgtggtaggagatggaggctcccaagccctggcagacgttacagcagcgctgagcactttcaggaccaggactccaaggtccagctctggaacgcccctctctgccctgactttggttccttcatcagcagaggggctcctgggctatgggctcaagtctgaagtcaccttaaagagaaatctctacctttctgttctccttcattgctgaggattttgacttgtgttgaaaagtttctgaagctttctgcagctggaaaatcaagcttttaaaaaagctcttgatgggccaggcttggtggctcacgcctgtaatcccagcactttaggaggccaaggcaggtggatcacgagatcaggagtttgagactagcctggtcaacatggtgaaacgccatccctactaaaaatacaaaaattagccaggtgcggtggcacgtgcctatagttccagctgctcaggaggttgagggagaagaatcacttaaacccaggaggtggaggttgcagtgagctgagaccatgccactgcactccagcctgggcaacagagcaagg

SEQ ID NO: 51308 - DNA, 1039 bp, Homo sapiens
tgtcatgctacggtccaatcagaaaggcccagatgatgtggatgctatggttcctggctttgggcccccagtcacacaggccacgctaaataggatactgcatcttacttggcatttattacccttgatggaggcggaaataagaactgttgtatttggatcttcctagagcagttggtgaactgatggtgcactagactaaaaaattcacagaaacatctggaaaggtaagatcaagtactataaagtgtaggacagtttctggcaaagtagcctccttcttggtaggttgagtctttgggaacttggggacgaatccctgcagaagtccaatctgagcaccttgctattccttctcatgagtaagcccaccacattctccttctcctactttcaggataaacttcatcatggtattttggtgcacatcttcattgggtagtatccaactatattttccaccgtctctacatggtttagaatcctttcattttctatgaaatggaaacccttgaaaatgcccccagagaatgcacatcgtgttctctgcagcactctgtatcgcttgctttggtcagagggctgcttcacgaagagctgaaactttgctcgcaaacatccctccagggctggtaatcttccagacaggatggcccacttgatagaaatgttttcagcacaaccttgcagcagatgtttgctctggtgtgctggcgtaacagatgctgaccatatctcttgagggcctccacgtccctcatagatggactctactgctagtgtgagttatgcgtacttcagggccataattaaagctcctagatggaggggtgggggtagatactggctgtgttcaaagtgggtgtttatggttgataggaaaaggcaaatgttttgtctttgctgaatttttagaaagctaggaatgaagaatgagacccaggggagaggaaaaagttttggctaagtttgtttttatctagatagatagatggatagacagagagatatatagatagagatattcattttccaggtt

SEQ ID NO: 51309 - DNA, 1088 bp, Homo sapiens
ttggccagcctgtgggatgtgatacagtagaaatgtttctggtgccctttgttactactcggctttgattaggtttatttcccgtaagcttgattttgctagcccttcccccaccctccctttttttaatggctgaggaggttaacttagccaaggttaagcgttttattatgcaggctgcttcaacctagtagagtcactttggccaggcttttgtggcagagagagacaaggggaagctatgttctccctctgtgtttgcatttcttcctcccaaggctgccttttacttttaatgccagcgttcatagaaggtaacaagctaggtaagctgtattggtttcccatttctttactcagaatgttccaggaaaccattgtacaacttgtcttgagattttgttagtcaaggtaaaaatcatggtagacctctctagggtttctgccaggtggagggcaaggccttgagagccgcagttaacagcagcacgcctttgatcctccctgtggttctctgtttcaaaagaaagaagtggctgcagctttaaaaaggttttaaatgctgctttgaccttgtatttatagctctttcgcccttgccattaagaacattttatagacatcagctcagcagtcatccccataagtctacgggggctgccagtatcattccacatgcacaggtggagaaactgaggcacggtgatactaaaaatggcaccctcacaggtcttgtccaggtcatggggtggggatgagccaagaactagggccttgagaggtaggcttcccccacagagcttctgttgcaagtgcttgcatctgggacaagatttgctttttatagaaaaaaaaagtggaattttattatcttagacattctttgttcacagtaggattccttggccaccttataaagtataaatgtatgtgcttcctttgtatcctagagctgttgagatgcgaactgtctcataaggtagcagaaagcactgtgatggaagcttctgtttcatcggtgtcctggaatctgctccatccccttctctaggcagcaatatggtcctgcttccttctgggtttaggtc

SEQ ID NO: 51310 - DNA, 1051 bp, Homo sapiens
tcacaggaactgtgtcccgacagaagtgtggacagttctccttttctctctgctgcctcatgcggttgttagaacaagctaattccatctgagtaggtagtatagcttttctttctgtttactattgctgggtgacaggagagcaagggcagaagttatggtagatagctcagctttacaaccattgtcggggctaaacatgaatcctcagcaatcgggttggccattcctcttctcaaacgttgtactccctctgctggttttgagacaactgatatttccttaagaagtgtgaggctctgccttcaaaacggcacagtctcttttccccagatctgcaactgtgtgtgttgcacacccacaaagaagacagttctttctggctgtggggaaatgatttcagttcttgggcaaggatggcaaggaataaatgtagaagaaattcctttctgataccattctcctacctcacatcctacccccaaatcattgcgggacatttagacttgtttgggggacccccaaacacagcattctcaggcgttgtattcacttctacttgttttctttgaccaccaccacctcctgccccaagcccagcctccacctccccgcagcactcacggcaggagtcattttttatagcacacataacctttacaccaaaaggaaaaagtgcattgcttgtaacaaaatgaatctcttttctgcttttattttgaaaagtcctccctgttgtttaatgtggaggatattcatgctgaaagcctgttccaagtaggcatttgtgcgtcccagaggaacttttgatttatttccttaactctgccctcctttctctgtggttcagaaacctttaatgatctgtgaagctcagagacttcagtgcgaaacagtagtcgttttaagaacccctcccactatataaaaggcctgccagtttccacatgctgggtttttgactccctgaaaggctgacctcttacaaattttggttgtacagcagggcatcctgggttggggccttgataatgcttttgtgaaatctttt

SEQ ID NO: 51311 - DNA, 1051 bp, Homo sapiens
ggtacatgagctttgatgttaaggtaatgcctgaaaaagtaggaggcctaatagagaatcttaattacctaaaggtgaatccatgttaggaataacacaaaatcgtggatgatccaaaaataattttttgtttgatttgtctatacattgcagttttcttcaaaatcatgagataattattcaagcagtggtgacatatctcttctctgaggacatatcagttatttgaaccaaagactttttgtgtctggcacctggatgattgtcccttgaatcctggcctttgtttatagctgtgtctcctattacttagacaaattcagctggcactgggtcgtagtccaggagcgcttcctcagtgacctgccgttgcttgtctctggtgcaactaagattggtgagaagacaatgtgatctaccccagcttggtagccaagaggtgttcccaaagtgttagcccctggagggagatggaaggtgaaaggggacatgctttggctgtctttctcgtctctttctttttatttttgagcacctagcccagtgaagattaagcttgtgtcatttgtaatcccagttggtggtgcattgacacttactacactggaaactcattttcattcacttcccattatcagaactaaattttgtgtatagttcaattttttaaagttctgggtgcccactgagcactgcaatgggtagggtatctataaagagaagcaaggtgccatccctgccctgcagggagccagcacgacatttacatacctgccatacttggtagaatgtgctgagggccctggtgggtggaggttcaggccccacaaagtgagcacagaggctcctggaaagctaattggaggggcggtgtttgaactgggctttgaaggaaggattcatttttgacaggcccaggttgggagggtagaggaaaagcaactttccagccataggaaatactatgaacaaaggcacggagacaggaaattgtaaaacgtgcccagcaagtacatgagcatggttggaaaggaggttgcataagcggatg

SEQ ID NO: 51312 - DNA, 1138 bp, Homo sapiens
tattatgcctgacatttgctaaatattcatagtgtccttgctgtcttttgcattgcactggaggagtttggtagtagggtaaatctgtaagtattataatgagctgggagaggcactcatcttgtgttttcttattttctctagttatcaacatagccaagctaatcattcacagcccacagggaggggagggcagaggtcattttttactttttgctgcagaagatgagatttgcatgtaccagtgttgttgattcagaacttgctgggtagaattcttatagtcatgccccttttgatagcaaatccctctaatatagatacttttcacattctctctctctttctctctctctcttttttaatgagacaagatctaactctgttgccctggctggtctcaaactcctgggctcaagtgatcctcccctgaatagctgggattacaggtgcacgctaccatgcctggcttacattttcttctgtctaccagaattattaactcatttctttgttattcgcaagtgacttggaacttgagaagggtgtcagcatccaaaagaacatgcctgattgggcattggtgcaagggtcagcagacctgtgttctattcttggccttactggtaactatagtacttgatgatctctttttaattgtgcagtctgccttgagctgttcattggaaagctcaggtcaaatcttgacaacactgggaagttattttctgtaaaatggtgtttctctgcatgagaattgtgtaggtgctgtggtcgttataaaatgcctgtacgtcgttacttgctgcagtgcctgagaacgaagtgatgattcttgccttctctgctacttacttgctctggaaccttaggcagattattcatcccctctgtcctttaatttctgcgtttgtaaaatggggtgataattcctacccttttgattattttgagaatttaaatgagataatgtttgtaaagagtgcatagaaatacttggaaatgattgttcttcctgtctaccttaaatactacataaggtggtagctaaatgctttgaaaagtacagaattcctttctgcttgtaaatatactgagcctgtataaaaataagttacctgtttttcattaatctgtc

SEQ ID NO: 51313 - DNA, 1044 bp, Homo sapiens
ccctcctcatctccttccctggtggtgtagaggcagatggggagagagtcttccctctggctaggccacgggatagggcagatgggatggagttggagcagccactccactgtctgaaggcgaagggaggactcattaaccagaaacactcttcaggactttgggaggagtgatccatgtttaatctgcctagacattgagctgcttttttagggagtggaggtgggagatggatgcaagaatatctactataaaagtatgcggataatttgggttttttggcttaattttttaattggatgttgtttactgatttcctcttgtttaattctgtctttttaaaaatgagctgtttttctggacacttactgtatagtacctcaaggacagtgataactcatggggaagaagggttttgtgatttcaagtatagtcttgtatatataaatggatgatttgcatcagtcaatgacaattaaatttaagtattacgcatctcatatgctaggatggatcatattgagaatggtaaaaaacagagagagagaaacctgtttatgaacattaaactaagatgtattatgatgccaatctatataatcaacttatttcttacccttcccagaacagggtagagttatttaatatggaatattgagatacatattttaagttttctggggatttcagtgacttgaagtttgatatgattaaaaattaaaatgcctttgcccgagtgtaggaagtttggtttggctgagtaaaaaagagatcagtgagtagatttctcctgatcgctcagattgtagcctctcaagttctctgtctctgctctgctaaaagttgcaaaccatgaagaatttgatacagaactatcttgacaattattttatctttcagttttaaaaaataaattcataattggaagattaagcattaaatctaaattctaccatctggcatttggaaatgctcggtaattttacttagtgttttatctccgtagtggaagcagatgtgagtaacctttaacctagttaagtt

SEQ ID NO: 51314 - DNA, 1033 bp, Homo sapiens
gcagcacctagttgggttggttgggcatgaacacaccagagaaacaagtgccaacatctcaagacgctcagttcgtgcgtctgagagtgggcaggctatgagctggggagcataaacagcagagctgcccagcgctggcagcagtggccaagtcagtgacttgccttctatatttccttcctcctttacccttggcatcctgctattctaatatctatacactgggagtgatagaaaaactaatggacacagaaataattcatgagaccttgaatttcagcactggaaatgccgaatttcagctcaacaactagaagactcttaagaaacagactgtctccatgaacttgcatttagaggcttatagggcctgttgatttataagtcaatagtgttaattgttaaagtcttaaaaacttcggggtcttcatttgaagagcgatgaatttatagagggaaaggagacagccgcaacagaagtctctttcacgtgtgaccccttccaatcattgactactgtgagtggtcgtctttgtttcgattttcagggctactctacatttctggtaaaccacaagctaaaggctggtctctgagaagcagatgttttgctggttttgaggccttgtggctttccatagagaagtaacagtacaggccacatgaagcttttacttccttttttttttttttttttttttaaagtggggccaagggtgcttttgctcttgatagcattatattgacatacattgacagctgtggtaggtctgtgttcaccaccagatgtcaaattcctatttctggaagtaattagtttgagatacctgtgaaacgttcaagttgagtgttcccagtggacttggaccatagatttagtcttagaaataccagtgacaatctcgaaagatatttagagccaagggaacagtggagatcatatggggagaggatatatatagcagaaagccctaggacaaagctttggggagactccagcatttagaggttgagtagagaattaggccaagtg

SEQ ID NO: 51315 - DNA, 1051 bp, Homo sapiens
gctatttattgaaaaagtagtgccttactcaagtcaccctttcattaaaatgttaaatatgtaaaaccaaaaccaaatgatacatctcaaagcagtatcaacagtaaagctccagaaggaaatatgttttagatatggggtgacgggatctgcaaccaacaggatgatatggatgaagtacagttctcatccagtggtttatcagtgagagccagcatcatgtaatacaaatgtttggaaaggcttttatttcttctgcctggcatccatgttcccttttttcaccctacccctccttaccatttaacatttaggacatgtctttttcgtctgctgctctgtgtcttcagtggagccatgggtctgttcctcttacccactgcctgtgtgtctcctcgggggagctgtagtttgcttactagcagatctgcctgcttttctgtcccctgtgaaccaataaattattaacataaaattttgtgcagaaatcagggtaaaacagaaggagccattttcacagtgggaatcattttaatacctacagtgttttccaaacagttatgtaagaggactgagtagatgtcccttttcagaagtcatggtgagtttctgactgtgatacactagttaaaattcaccagagggagttaattttgaaagctctcagccaggggttaatgcagaggtatcttttagccatttttgtagcttagcccctgtcttctgctctcttgctactgcagataggggtcaggtccagcacctgggatgacgccagaatgagatgtgctgggagtttcatgtgtagatgaggggaatttgcacaccttaccctttcagggtttactctcagcccagtattctctatccacacatagaatttttgggaaacaatatcttgggatgcaaacacaggcagcagccacatcatcacatcccttgtctgcaccctcggctccattcctaggcccaccacagctctgaggcttcccaattttttacactggtcccccttgaccctcccagcctggttcaaggatttagtgataca

SEQ ID NO: 51316 - DNA, 1158 bp, Homo sapiens
gagatctactttgccaaggaaaggtgaacattttaatgacataacttaggagccactttacaggggcatttatgtagcgactgtagggtgatattgtagggagagaaggagcctcccatgcccatttggattctgttatgagtgttgggttattttatttattttttatttatttatttgagattgagtctcgctctgtcgcccaggttggagtgcagtggcacaatctcagctcattgcaacctctgtctcccgggttcaagcaattctcctgcctcagcctcccaaggagctgagatcacaggcacacgccaccacgcctggctaatttttgtatttttagtagagttggggtttcaccatgttgaccaggctggtctcaaactcctgacctcgtgatctgcctgcctcagcctcccaaagtgctgggattacaggcatgagccagtgcacctggccgtgttgggttatttttaatttgggcgtagctgtgtggccataattggcaagaggcatttggctggcacaatctctacatctgttaatgctgctgcttaactagccagttctcatttgacttgaaagtgcattgatgcatgctttctgatattcacccagtggcagtactttttgttgggcctgcaataatgaaaggacttcagtgtactcagtgtaattatctagacccagaggggcactgacagagatgtatatataggatagctcaatgggctgtgctagtgggtgcagttgctgtttaaaccacaacatgaggtcattttcccattgggcacatggtctttgaatgaaaaatggagtaacttttatttgatatttgagacctcctgggaagggtttttggcatgcaggtgtgttgacaaaggaaatcactggctctactctggatgctgagctggcatcacggaggggatggtgtagttcctctagtgggtttgaacgaagaacatctaatggttttgtcagtagtagttagagagttagaaacttaacagtgcagtgaatatatattaagagacgttgagtcaaactggagaacaggtgatgagaggtcaaatagccttggaggaacactaagcccaatcatctccagatacattcttgtactgaaccagtggttgtcaagcacctgctatatgt

SEQ ID NO: 51317 - DNA, 1044 bp, Homo sapiens
ctgtgaacctgaaattgctctaacaaataaagtttatgaaaacattttgaaaatgcaaagattctgccttactatatgctgttgtaacagatgttttagtaggtctccctcttcgtatgtatatacatctttttaactgaaaattatcctatattgatttttttcctacaggagtgagatctggctgggcacagtggctcatgccataatcccaactctttgggaggctgaggcagcaggattgcttgaaatcaagagttcaagaccaagcctgggcaacatagtgagaaccccgtctctacaaaaaaatatttttaaaattagctgggcatggtaactgacacatacctgtagtctgacctacttgggaggccgagccaggaggatcatttgagcccggaagctccacgttacagtgaactgtgatcataccactgtagcctaggtggcagagcaagaccctgtctctaaaaataataataaataataataaaagtgaaatctaacagcacttgttgaggtttctccttcatagcatctcaaatatcacaaacgaggatgaaaaggactctatttcgggggacatactgcatgggggtggggggagcagaagtctcagcctgggttagcagtaatctgagcatttctttttgtaaaattttagagaaatactttggaactcaaactcccctctgcatgcagcccattgtatccagctgtgtatgtaaatgagctattagtatgtttgtattccttataaatatacagatctaatctgtttgtgtgtgtaatttacacacagctgtgttcatgctcccgtattaccaatattgtcagcaagagtgaggtatcatgggagcgctattgttccaaacaaaagccagcagcgtagccttgtggtggggcccattaccagcccctgatcttgggaccctcccttgggggactctcttgaaagtcacagccattctgcatggggatagccatcctgcatggggtaggcgggagaccagagtgcctgtaatagaaaaaaaaaacaatgat

SEQ ID NO: 51318 - DNA, 1181 bp, Homo sapiens
gctctcataattcttcctctagttgaatcttctgttcctatcattgttagtttgttcttctattattcaagtgactttttttttatttggcttagttttttggaaacaagacttagaaaaaacattattgatttctgtgtacaaaaggaagggagcgtatcagtgactttaaacaaacagcatttgttctttcactgctaagatctctgcaggagttaccaccaaccttggtaactgcttggcagtatggcaggtgacatgccatcccactgtggtatccttgactgatttgggtagtgggtgtaaatgagtgcttgagttggatttatcaccacagaatctagagaggggacagcagccacacaattgaaaatttgttttgagtgcctcttttgcttcagatggtgttctggggctcacagggcctgctgaggtgagcagcttgctccctgctcttggacagggagatcaggaagggtgctgtagaggaggcttatttgagaggaccttgaaggatggataggatttcaccgggcagagttgacagaggttagttaattggagaacaagggctaaaagaatttgagtggttggttagtagcaagttgttgcccagtttggatgaagcttatgggtgggggaggatgtgaggtagctaattcagagccttccacttttgactgagaagtttatgtttaattcaacaggaaacgaggaaaaattatatatttttgaatgtgtggggaaggataggactggagctgcccttgaagaccagtctggcagtagcattggaagagtggaggtgggctgaggacgtcttgtaaacttggctgtgcgttagagtcatcgggagaacttgaaaatgccccaatgctggcctgtaccccagcaagtcagagcagaatccctagggtgggacatgggcatccaggccctgagaactactggactggatcaggactatgcccctagtgagagacgttgagagctgtcggtgtacagcagcacttcacactattagcacgctggagtcacatgaggaacttcagacacacagagcagaaacttgggtccaatttaattcatctggggtacaagtttccagtgtcccaggatgttaggacactaatatgcagccaaagtgggtggaagattgggctagaaaattggtgggaggt

SEQ ID NO: 51319 - DNA, 1171 bp, Homo sapiens
ttactcattttcttttttcagatagggcctctaattaattagggtgacagagctaagtaagcttggttatccaattttaaaagagaattttagaaaatgaattaaaaaaaaatttttttttgagacagagtcttgctctgttgcccaggctggaccagtgcaatggtgtgatctcagctcactgcaacctctgcctcccgggttcaagtgatcctcccacttcagcctccccagtagctgggactacaggtgtgtgtcaccacacccggctaatttttgtatttttagtagagacagggtttcaccatgttagccaggctggtcttgaactcctaacctcaaatgatctgcccaccttggcctcctagagtgctgggattacaggtgtgagccgccatgcccggcctaaggagatcttgataagcaaaggtttgggaaactggttgacctcgaccaaaaacccacctaacattaatctaagaaataaaggagctttgcctagagaagacctggagctttgatctgtggtgatctctcccacgttgaagtcttgatttcatcaggcagagctgttccaattctcagagcagcttaaagagtggggtgggctctggatttttgggatcctactgctcagttcagtccatggaaatgaaattctccagtcctttagcaataacaaaagtagaaaattattttcagatcgtcctttgagacaacccaacttctttgtcagcttcatagtcactttccaagtttatgaccccagagcaatctgaccttggtagcttgtctccctcattaaattctctgacttcataatcagctcacattcccttcctctctctccctctctttttaaatatctgtaaaacattcaaatgatccacgtagatttatcttgcttttaggccacactctgagatgtgtaatccggttgctcacacatttagaggagtccatgagcatcacgccatgctactctccactggtttgaacatcttaggcactcaggcattccgttacgaagatgggcatgtgtacgggtgcactctactgagcctgagtatcttcacaaaaggggtggtggattcttgaaggtgaagagcaaacatttttgtctgtttctggataattaaatttaccttaaaaatatacatggaaaaaggaa

SEQ ID NO: 51320 - DNA, 1052 bp, Homo sapiens
ggctctcagagcttgtagttatggttacgtggatttcagatactaataatcttggtgattttgttttaaaattttacatccacaatataggggaagggttagttatatttattttaggaatggtaaaatttccagagttgttgaccattttatgtagtcattcaaaaatgatgataggagagtcttgtaggtcatctagtacgaaccttttcactttcttattctttttagggttttgtgcagattgttttttttattgttagaacaacatcctaaaatcattaaagggaatttaaaacctcaccactaacacgtcgtctcacagtgtctggcttcatcgtctcatttgctggcttcttgctctcttctggtctttgtttatgtacgtacgtggttttatgtcattgtcaacttacgtatgtgtacaggtttgcatacatgtgagttgagtcagaacattgaaattatctttctaaagaaattataacttgaaaatttttacaattcatttggaacctttgccattaacccaaaatatagatacaatgtatctactgcatcacatagtaggtacttagtacattttaaattgaatcacagtagattctcctctctactaaccacccttcctccagttttaaatgacagtggtactgtttcttatgaagaactaaatttgtatatatgagagtaggaaaaataagagaaatagaaatgttgatatattacacgtatgtacatattactccatattatgtattcttaatgtgacctatagtgagaattagcccttaatattaaaaaagaaaaatgtagattcaagtgagatttgcctgaagttccaactattaataaaattggactatttttcctatggttaattcccatcggcctttgaaccaaacccttgcttaaagaagtcaatagtatggatagaatggagtttattgtcaagtcctttcggaaatgagacagcaaattaaaaatcaattatatgcacagaaaagttggtgtaaggcagtcagttctgtcaattagtttgcagaaagatt

SEQ ID NO: 51321 - DNA, 2033 bp, Homo sapiens
gtgacttgctccgacagtggggctcacactggccgctgagtccggtggtctctgggggttgctgcacaccaggctgggactggtggctgggtggtgtggcagcagtggtcgtgataagaagcagcgagatccaggctgcaccttgaaggtagagaaaagagaatttgctcctagaatggctgtgggtgagggtgggcaagggctgaggaatgggaaaagctaggcggagctgagatgcactgaaatggccctagggtttggtaatggagtgcttgttgaatagttccttaagactttaactttatcagacttacagagttcatgaagctgttttaaaacaaacaaaaccataaaaatcttaacgttattattaaagagaaagaaacatcttaaacattttaaaatgtttagacaacgttaaattcagttttgagaagtcgtagtgatactgtttttttactgtaagcctgtttatgtgaggagtggataagagatctgattgacaaggttttaaaattctgcgaaaagcctgtgtggaagaaacacataaggagatgaaaaggatggaacaagtgtatagactgtggtcgtttaaccaccctttgtgagattgtcttcagtcctctcagcctggcctaggcggcctcagggccttgtcagcttgcaatccatggctgcttctgcttctgcatttccctcagttcctggccatctcctctctcttcagtctccatgccctttggcgtcctctctccttccccacttccctgcctcttcttggtgtctcccaccctccccactcctcactcatgcctcccagcccctcgctagccatggctctcctctctcccttctttcatttctcttgtgacctttcattccctctggaattttaaaaatacacagccaaagtcctctcttcctgctgaagagaaagctgctttccttttcctgcagcgcctgcttgtaacatcaggcagctgttgattgtctccccattgctgctgcttgaggatttgtcgctgtgagctgagagggaagttttgcacatcagaaagagcctggtttattttgaaaaacaaaacaggactccaaagtggtgaatattttgagtatggaataatgatccttaactgtatacatccgtatccgtttggggtcatttttatcatgtttgcttcttggtttgaaaaatgtcttggcagccatccagcccttgtagagcctcaggatcaaatggttcccttatgtgtaggaagtgaagcttcactttgaaaacctcagcagtgaagaagagagactgactgaataattgagaggttgaaggaagcttctggtgaatggatccaaatcaaatctttgaagagatttatgtggcaacaaggcagtcccctctttaccctcgcctggctttggctgtgaaaaaacacctgctgtgttcatgtggcccccttctgttaaatttaccacattttctcacctcaggaatcacaggaataagcaaaacaaatgtgttccagctaacataaatacatgggcctacctcccccttttttcctcccagttttctatatacttggaacattctaattattatttttattattatcattactattttttaagagatgggggtcttgctatgttgtccaggctggactcaaactgttgggctcaagtgatcctcccacatcagcctctgagcagctgggactacaggcaagccacaatgcctggctacttattactaaacttcgctgccgctggcatattaatttgttctaactacccagtgtctgatctgactacaacagtcttgatgaacgggtttcccttggcatttttacatgaatactttgaagcagctgctctgtgagagggttggtgaaataagcacctgaaggtgtgagttccctgctgtgcagcggacaggctgggcctctgcacctcctgggcctggcaggcctgctgctctatgaagaaactaacctctcatgccagtgcagaccctactcgttctccagtctcagctc

SEQ ID NO: 51322 - DNA, 2080 bp, Homo sapiens
ctacattatctgcaagttggaactcagaaacttggagtgtctggagcatctttgcgaggtgggaaggtgtccatggtgccagacactacacagggttgaaaagacgcagggtgagaaaagttgattagctttgacaagaaacaagtctggtcctaaagggaatatgtagataaacctgcatctttattcatatgtactgaaaaactagcatactattacagacttactttctttaaaaagctcttaaattttagccactttaaatattttgtttttgtgtgaaattagcacagtcaaaaaacttaagaaatgctaaaaagaaagaacataatctagtgtgactttacgctgctttgcggagaatgaggcaagagtaggggtcctcctggctgggttggagtcttggcttcaccacctgctggctcagtgtggtgaacatctttacttgatctttctgtgcctcagtttcctcatctgtgaagtagggcgatgatagctcctaaaccgtagattaaatgagagaatactttccccataggattaagtaagataatgattgcatggaatgtcctgagcactgggcggggccaaacattccctaaatgtttgctttatgggaatataggggaatcctattcctatctttgccaaaatattttctgccttgcctgcctccctctcccagagtgagtagaataggggttgggatagggtggtcttggatgagaacaaattcctgcgcctactgaaatgatggagtctcagtgcccctttcctgactcttctgtgggagatagtcaatgaggagcttgccttggatcgattgtgtcctgtctgttatttggtgcagttagctaactataattgttgttgttttagctgcatgaaagcggttacgatgctggcaaagccctgcagcgcctggtgaagaagcctgtgcccaagctcatcgagaagtgctggaccgaggacgaagtggtgagcaggaaccagcatttgccttgtgctctggggcatcgggccaccggcgtctcagtgtgtgacctccctgctgctcagggaaagcagaagcttcagtcatgcagaatggctgtccgtggcagcgccaggcaggaggatggggcccttcagccccttaattgtacagaaagacttgattttattaagattaggcttcatagatgtcgggaaagattgtccaactttcatggaaagaaaggagaaattgatagttactcctaaaaaaagttaatttgaacttgtttttggtgcaagctagcttgtgatacctccctatttaaagacagcatgttaaaacccgtggacatataacctaaagtagggttggtgacttgtcttttttttaatcataattattttagagaagggggttttgccgtgttgctcaggctggttttgaactcctgggctccatcagtcctcttgccccagcttcttaagtagctgggactgtaggcatgctctaccatgcttggcttggtgacttgtttttatagggcttgtaagacccctgacctccttaaaggacattgattacaagcgggaagcagagagttgatgaaataaatatgctggattttacatactgattgtattgctgtggcctgttgaaggaagtggggggagagaaatgtgcccacagatacagccttgcaaacccatggattcccatccagcagacagttttaatgaagctacatctccatcttgtgacttgtaaaaggcattgctgtaaacgacttacggatttcttgtgcttttgcaaatacagtcttcagtatgaatgttaccgcttgacatttgcctttcaggtcgaatgaaatttaaatgaaggctggcactaatacacctattgattgcaagttcctctcctgtattttaaaatatgctaagaaagaatgtttagaaattgtatgtgctttcctgatcccgctctttcattgattcagcaatatttactgagtgcctgcttgcgtgccaggtgttgtccctccttgggagtcttaagttttaagaggggagaccttcataaatgagtatgtgccgggggtggtgaagc

SEQ ID NO: 51323 - DNA, 1035 bp, Homo sapiens
gttgaggcaggagaatcgcttgaactgggaggcggaggttgcagtgagtcgagatcacgccactgcactccagcctgggcaacagagtgagactccatctccaaaaagaaagaaaaaaatttgtcactttgggtaaataatcccacactttttacttctcagatgtgtctttgtgtaggggtgaggacgggtagggactctcaatacttactgataacatgggaaactcaggaatagggactatttttttgaggaatagggatattttaagaggccagccagacaacaggtcaaacaaaaggagagaatccgccattatatagagaacagagtagggaaggaagctcgagttaccgtgtcactggaatagcttcttcaggagaaactgccatctgaaataaagttttgtgaaggaagtaggaatgccaggacttgttcagaggagtgcctctttccccattaagctcatcactagaaattcagctgaggggcattgtgcaggctgcagccatgctctctaacaaacggaacaaccacaacgagatgttcaacacttcagtggaagcatctcttccagctatagtttaaaactcttcttggttcaccaaaaggccggaatgccacagggattaatgatatttgattgagcttcatccactcagcagtttgcttttggagtgggctttatgttctcacgagcaatttcctggtagcaggcacataagattttatttttcttattactattattatttttttgagacggggtctcactctgtctctcaggctggagtgcagtggcacgatctcagctcactgcaacctctgccgcctgggttcaagcgattctcctgcctgcctcagcctcccgaatagctgggattataggcccctgccactgtgcctgcctaatttttatagttttttagtagggatgcggtttcaccctgttggccaggctggtcttgaacacctgacttcatgatccaccaacctcagcctcccagagtgctgggattacaggcgtgagccacc

SEQ ID NO: 51324 - DNA, 1545 bp, Homo sapiens
aaggtgggtggatcacctgaggctgggagttccataccagcctggctaacatagtgaaacctcatctctactaaaattacaaaaattagctggacgtgatggtggcgcctgtaatcccagctacttgggaggctgaggcaggagaatggtgtggcctggaggcagagcttgcagtgagccgagatggcgctactgcactccagcctgggcgacagagcgagactccatctcaaaaaaaaaaaaaaagttttatttgtatttttatatattaaatataagcttatgttaaatatgaagaagtaatggtgtttccccagaaagatcttgtgtggaaatatttctgtgtgtgtttcctcatacagtgtttgcattaggctcatctgaacacttgcagctgacatataatttgtaaacatcatgctatataacatggagatgatctgtcttatcctaatggggttaatttagccacctttgagtgcttacatttatttggctatttacaaaatagacctttatattcctacttagaaactgcagaaaagccccatcatttgagactaaggttttctagaatatatcttgccaacttatttttactaaactgatattggatttccttctttgggctcaggtatctttcctggtttctaatacaattcaaattattttgctttttctttctcagtaatttattgccattttctcaccaacactaaacataactatatattcactgtgtgtaagtaaaatttataatcatgcaacaaagatttcacctccgcctggacagttttattccctgagatacgggtggcttttagacgtttggattaagctctttatgtattcaagagagtacatgtttgtttgcttatttatttatgcacacccacatctccttcagcaaagaattcaaggctcccagtggcttcatagtttttcatctctggtctataaatatcactatttgttaactgttgagtattaattatttgtgttttctaaccctagtctgatgcctgacacatggtagagagatactaaatggttgttgaatgattgaatagataaatcaagttcaagttcatatcacacttgatcatccagaaattgatgttaggaagttggcatagcagaatatgcagataaccctattctaaggatcattttcatttctcttttattctaaaaaattaagtccatagaatttttgtcagattttttgtttgttcattataaatggccttcactaaagtatctggacctggattagctttgcagtgcttatgacttgaatgtggaatatttctcagctcccaaataaggcattgccgggaggccctttcataagttttccctaagcatgtgagaggagccttctgacattcattccatacccacaccctttacttaaatgtttctatccagatgagtcaacattaaatggttagtgtttgctggcttgggttaaggtaagatgttgggttttcttgtcgttcaggattttttatttgttgttggaaagtctaatgggtaaagctg

SEQ ID NO: 51325 - DNA, 1046 bp, Homo sapiens
ctttctgcgtgagtgaagaggaacttaaatttatttttggtctgggcgtgatggctcacgcctgtaatcccagcactttaggaggctgaggtgagcagatcacctgaggtcaggagttcgagaccagcccgaccaacactgtgaaaccttgtctctactaaaaatacagaaattagctgggcatggggtgttcctgtaatctcagctactcgggaggccgaggcaggagaatcccttgaatcctggaggtggaggttgcagtgagccaagattgcgccactgtactccagcctggatgacagagtgagactccatctcaaaagaaaaaaaaaaaaaaataggagcagaggcagagctgggaactggttcatcatgcgtgtagtaatggaatttgttctgggctggaaatgtcctctgaaaattgaaggtctaagtctctgtcctgatattactatgtactaataaaggaaaaaccttttcttctgaaggagcatggcggcatttgcaggaatgtgtgatggaggctctacagaggacggctgtgtcgcagcctctcgggatgacaccactctgaatgcactgaacacagtaagtcttttgaagtcaccctgagtgggaagacacttctttttcccctgaactggctgtagggaatgtgtgatgagtgcggagcatgaagtcgcctgtagactcaggagtgagttgtggtcttggctgttgggtgccatgggggctccaggccagtgatgtggcacctgcaggttcatttcctaatctgtgtctgtgctgcaggtttgaggtgactctcaaatgagatcctaataatagcacctgatacttaactgaggcctcacaaagccaagtactgtgcatagaagatcttgcttaatcctcacaaccacctctaggttctatttttatttttatttattttttatttttttgagatggagtctcgctctggcagtggcgcgatctcagctcactgcaagctccgcttcccggcttcacaccgttctcctacctcagcctccggagtagctggg

SEQ ID NO: 51326 - DNA, 1526 bp, Homo sapiens
gcctcccgggtttaagcagttctctgcctcagcctcctgagtagctggaattataggcgcccgccaccgtgctcggctactttttgtatttttggtagagacaaggtttcagcatcttggccaggctggtcttgaactcctgaccttgtgatccacccacctcggcctcccaaagtgctgggattacaggcgtgagccaccaggcctggcctcaactatattttttaatgtttacttaatactcatctagttttggtattgaccatgacttatattgctattgactgtcttaagagtaacactattctaataggatagctcacttaattttttagcaaatatccttaggtgaggtatcatttgcatatgtcttctttgtcaacttgttatattggaaatgtatgtgtgtttccttctttatcaatagctgttatcatctaaagacattattttgtttttttgtttattttatgcatatgtgtgtgcttcagttttactcttggtatcatgctggcactggtttactttgacactgttaagcagatattaagcagtctattgtgaaatcttctatggtgaaatgatcctgacatgtgaaataggtcagtttaaatgactcatggttttgttgttatttttctgctgtccaaggaaagagtctcagtaaaacattgtatatgttcctaaagactgcttattgagatagctctttataattaatacatgccttgattgtgacttactcatccctgtcttacaggccaaacttccagatctgcaaccatttccttctccagatggtgatacagtgacccaacatgaggaactggtctggatgcctggagttaacgactgtgacctccttatgtacttgagggcagcaaggtaataggaatctacccccatcctgctttctgaattagaccatctgaactgattataggcagtaaactttgcatttcccctgagattttatttctatattgggcgttctctgactttaagtttggttacaccctctgtaatcgggaccctggctcttcttaccagagaaaaatagtttgaagtaatttttttcatgatgaagtaatgtttttcttcttggtgtttgccccacatcaaattttggaacttttcaagaggaaaacagcttaggccatacatacagttaccaaaacctctcaatccagttgagtacttcagtcattcagctcatctgaaaaccccactacagaggggtgggggtgaggggagggagagcattaggacaaatagctaatgcattcggggcttaaaacctagatgacgggttgataggtgcagcagagcaccacggcacacatatacctaatgtaacaaaccgacacgttctgcacttgtatcctggaccttaaagtaaaatttaaaacaaaaacaaaaccctctacagatttcatgttctgtctctactttgtggctgttcattagtgcctgtcctgaacttgacatttttgtggcttgcctacatgagaatatttatctgtgat

SEQ ID NO: 51327 - DNA, 1048 bp, Homo sapiens
tacattgtcttccctagatgtggaattaaacttgtctcagaagagccctcttttattgtagtgggaagtggtatttacatactgggtgctggggtattcattcttactgggttggttgctatttcgaggccttttcagtagacagaataggaaataggtgttttatttccctactttcttaaagataaaatacattctaaatttatgctgatacatccaattcaaattcagatttttctatggcctttatactaattctgtccttcttttatgtatatctttatttttttcccgtgactcaaatcccattttttaatgacaccaacaaaattacttatttgcttcaattccataatacacatataacagcccagaatagcaataatcacatggctacaaacagtatgcttattgaaaacagcttggtattgcattttgttatgtatatcctgccagggctgtataagcaaattaatatatcttagagttacttgaaacagttcctagagtagaaccagctcaattgttgcatttctttccatttggtgtagttttaatgagattattattatttaagcttcttattttcattccctctgccccttcttagataaataataacataatatacatccttttgctacctttcttttaacagtatattcttgtgttctcctcatagcagtatatagagctccttctcattcccttctataatactatttcatagaactccatgtatgaatgtagcagtttattcatctgatccctattaataggcatatgagttgattccagtcatttgccattacatgtaatgctgcagtgaatagcctgtgcatatagattttgatgtttttgccagtgtatcttggggctatatccccagaagcgggatggctgacttagaggacaagtgcatatataattttgggggttttgccacattcccctccacagagattgtatcagtttgtgttgacactagcaactaatatgagtgctaatttttttcgtggctttatgtgttgtcaaacatttggcttta

SEQ ID NO: 51328 - DNA, 1245 bp, Homo sapiens
cagaacaagggtctgacttgagccttttctgtcccagcaccttgggaatgggccacaggctacacgactgttaggacccaaggcttggggaggggctgaatgagggggtcagctcttgcccttagttgcttcatggtggtgccttctgttcatgtgttcttcccatatctctatcctcctccctcatcttcccttgtagaatcaagtgcctatcttaagcagtcaccgtgatcacatagagatctttgggcgtctttggtgaatgttcacagaacattgccttcctgccccttcccctttcttcagggtgaagaagtggccgcatcatgttctgggccaagcctctgggttgggctgggatcctgcatctagcaggcatgctcttctcacagaccctccctttgcctgccatcgccacctccatctcctctgcaaagatgcttctccctttttgatattcatttacaggctccctgctcctttctgtccattccctgtttacttcttagaataaaacgtttccatggtaacaggttacttttcaaagggaacatcttgtcattttatttaatccactgcagttgaagaggactgaaatattaagttgtagttgctatggatactgctttgttacactggggtttttttgtatcagatttcatatacaatgactttctgtttttttaatacttcaggaataaaaacaacaacttaccattattgttgtaatttggcttctggaactatttttttcatattctaaaacaaagatttgtagaataatgtaggctgaacttaagttgttttgaaaaacatattatttacattagctacacagagaaattccttcttttgctggggatgatagtgacacttcttaattcggtttttgtaatatgattcacagtataaagatgtctccaagatgatgaatccacagcagaaatccttagtaaacataaggaaaaaataaatatgtcacttggagttaatttcttgaatctcattgctaataagctgtggccctctttcttcagttactggttcagctgtgtacagtgtaatttgaggttgatctgtttgtcctttaatcagcttttctcatgtctggtgttctttctgatttcccatctgcctgtagtatatcccccccttcatttgacttttttaaaactttaaattttttggattcacaggaagttgcaaagataccacagagtggtctcatcttttgtaactgtaata

SEQ ID NO: 51329 - DNA, 1041 bp, Homo sapiens
atttcctgccactttctcacttacacacactaggtgcatgtgtgtgtgttagttattgcctgtttgtgttctcttccttctatattcataccactgcagcgaggaggaataaggcaattgtcatgtttttttataacatttccctgaggggacaaagaaacctttagacgtgttgtagacatgcttgcttggtccaaagtccctttttttttctgggggtgcttcattcagctttgttatacagtttgatttcaatatgcagaaagctagcaccatcttgggtcaggagagcagcttaatctacagtgactgctgctttgtaagtgggtttcggtcatagtggttttttttttttttttttttttaaaaagttttttggctgaatctccatgtgtgtgcaggcagctttgttaggccgcagcccctaaactttgccacaggccattacagtaaagttccctaggagcctgtggtggaatgttgttttatgacgttgccagatacacggtaggttaccacataatggagaagagagagaaggcagataagaaatttagacaacggagcaaagtcactatagcactttgaaactggatctttctcacctgttaaatttttttgaccagtttttttcctgacattactcatacattattgtgtgtggaggccatatttactgcatcttaccagcatggaaattcttattattcttcaggcaatgccaaatttctagttctggaccctgaattatatttaggaggaccctgtgggagagctgccggtgtggcctggagtcttcttcagtaattaactcagtgtgaccccttaaaagagcacttttctttcctcaggccttgatttcttctattaagctagaagattggatcaatggcctctcaggaactttccacagagaaaatttagaattttatgattttggattttggacaagttcttgtgttggcctttgtatttatttgtgtgtgaatatggaagtggtaactttaagttgactaaatctctttgttttttcatttgtat

SEQ ID NO: 51330 - DNA, 1017 bp, Homo sapiens
gtgataaagcatgagtctgatttatttttctttttggtctaatgagactcatgcttgaatgtacttttaaaacaattctgaaagataactgatctcatattgtatactctatgatactttgagtctaaggtaaaacacttaattcaactgggaaaattagagattatttctatcaaacttctttgagctacacatttatttgtgattatttgatttttttccctattggacatcaagcttttggggcaggggccaagtctattcttacggtctccatttctagtagagtacctggcaaatgggtctttggtatgaatatgttgaataaatgaatgcatcatctgtggtaagaggaaaggctagatttggagccaggtagtgtggttcagattccacctaataagtgacaattgggcaagcggtgacattcgacaggttccttccctcctctgagcttcatttttctcatgggtaatctggaaataaatatttcttacagtttttgtaaagattagatgaaaacaacttggaagtgcttggcacatagttgcttagtacattattgttattaattcgcaggtcaaatgtacagtctcaagctcatgtagatatgattatctcaacaacaacatatatttttaaatttttaattaaaaaaaataggcatgcaggtctcactttgttgcctgggttggtctcgaactcctggcctcaaactatcttcctgtcttggcctcccaaaatagtaggattataggcatgagccactgtgcctggccaacatctttttatttttaatagcctgttcaactaagacaatgctagggattgttttaggaattacactaattattaaccaccagtatgtttaataactatttactgatccactttcttcttactctctttgagtgtttatgtttttctttatacatcttggagttctttttttttttttttttgaaaaaaagaagctctacttccataatttataatattgggtgtgttcagcattaa

SEQ ID NO: 51331 - DNA, 3770 bp, Homo sapiens
tatttggggaatgttttatttattatttttagtttcttatctaaggaagattaagctgtttgcagaaaatacagttttctttagctaccctgctcacaataccatctacactgtgtctgtacctgtgtgacaaggccaagcactccataactttacccggattgtttggtctttttcaaaatgtttagagtttcaaaaagaaatttgtgaagttgcttctcttaagtagctactactatgtttttaaatgtgttgcagtatttctattagttgatcttgtgtgtagtcattcatatctgtcttttgattctatttcttggtgatcttgctttttaaaatcaccatttaccttaaaaaaaaaaaaaaaaagacaaaacttgctgttgtgctgacagagcagagagcatttaactgacgctcctccgtggcttggcttgctgagttcctgacagagcagggcatttaactgaagcctctccatggctgggcttgctcagttccctgctgttggctgtcttggatcccctttctaaggccccacttccctgcacactagcttggtgtgcagggagaagctgcagagtctgttggctgggctttatttacggaaacagcagggttgagattgattgcgtcgtggagagacagtgtgtggatgagggagggtcacagcacatgctcagtcctgtcagagtgaggggaagtttctgcgttctgcgtgaaggcttaggtcatagcacaagctcagtgaaagctctatgaggtctctgagactgcatgtgcctccattttgagttgttagtgtagaaaagggcagagttttagcagaaagtaaaggttcaggaatccagctagactcaccagagcccgtgttagtcatggatgatccattcagcccctgcaggtaggctatcttcccctggcctcaccgaaacagtgatgggttttgctgctctttctcacttctgaaggtgtttatgaatcatttcatcattcatagtgcatgttcctgagagcctttaattcagccctagctggccatgtaggtggtattgtgaagcgtaaaatcagaactaagaatggggactaccggagaggcattcagcagatatagaatgtgaagctttgcgggtccctctgtccctgtcctcttccccttacctcttcggctcgtagtataatcttaacctcagtcgtgctgggtgtgtgttgccaagcttgtttgccttcaagacctgcagagcaagcctgcaggccgcccccttgccttgtggctagtatggaatgcctgggccgcagagcagctctgtttggatgttttaggaaggatggtaggtgggcttctattggttgctttgaaggtgggtggaaccttgttttgattgagagcctgtttgccagagcaaattataatttttgtgatctttttctgaagtctgacatattcagggaacagttgtgaattatgattgcaacaataacaccttaaaattgatttttttaaaaatgaaaggttatgtcacatcagtttttacttagtctcttgccttcaaaaggaagcagactcatcttccttttagagcttatggaaaattctttggcaattaaaaaaagtatgcattgacttttgtgttagaaattgaagtttaggtattttgtttatttttgtatctgttttagaatcggatagcattttttgcatatgtgtatgttgtcatgtgacttggaattctattctcttaaatggagtaaaaagagtagttggtgctgagaaggcagtcattgacaaggcctcatttcgtacccactgcttgatagccagacactagtttcttctacccaggggaagttgtgcttttggggtgtcctgttgcagagcaggttcagacagatggctttcactgtggtttatttagggagccagtcagaataagatttaggacaaattgaattcttacccaagtagatattaaatgaagtttttgaattatactgtttgctcctttttgtttccactcctttttcttctgataaaggttagaaaaaatttgaatgccacctaaattttgtgcatttgtgaggatggaagaaagcatacaatatagaagaatgtgcaactgaaaaaccctcataggaaggagaagaaatttactatgcattgatacaaggagaaattccttgtgtaagctcttagtggtgtagtgtgaatttggagtgttgcatggtcaactctttccagggaggcccttgattttagtggaaagtttttaggaaggctaatgttggtgaattctagtcactgaaaatattactgaagtataatctgtattcttacagattcaattttgggattgcaactaaggagatgaattgtagaaggataatttagggtgtgcgtttattatttttgtgatcaatttttttacccatgtgagggctttcttcccattgtgaccatatttatttgggcattgcactggggagttttggggaggtaccccataccatataatgttgcttctggaactcgccttattttactctgtttaaaagcaccattgctcttccttcctgcttcttttaataaaagtatcccttcaatagacgagaggaactggacactgcaccactttctgtcatgcacttgtgggatctgggcaggactcacatttcatgctcaaggaacaaactcattgtttgagtcaggagaatattgcctttctgttctagatctttacctcttctgaaactttctttacagttaacaaataaaaatgtgaacaggaagctgtgctcacagccgaatcagctctggatcaggttcctgccactggtgtggctggcctgtgtgggcctagtacaaatctgtatttatggagcttggatgccgccatctatttgatggtgaagacttgtggttgctgactgtgatctgtggatattctgttgttaagagtcgaatttgtctatgtttcaaatccaataaagtaactctaatgagtgtggtatgtatttcttctatattatcctgtctgggaaaaatattttttggaatgctaaaggcttgcttcagggcttctgtgcttgtctggtggaggaggtgagggaacagcacatgggaagttactctggtggttgatgaagtctttggtctgtgtagcttgaacatggaaaagatgctagtttgtttcattttggcttatggttctgcttctgttgcacttgagaatatcaggaaatgttgggaatgtagcaagtagatgtttcaaaaaatagagaagttcacaaagttaatatcttattagttgttcttatcattgtaatagaatctcgaattcgaatctgagggagcctcacatttaaagcgttcctctgtcaacataagttttgcagtctgtctttggttgaaagctagaatgaacttgattgtgtttaattgacatgtcacttttttttctttttctttttgagataggttctcacgctgtcacccaggctggatggagtgcagtggtgtgatctcagctcactgcagccttgacctccctggggacctccctaggctaaggtgattctcctgcctcagcctcccacatagctgggactacaggtgggcgccaccacacctggctaattttttgtattttctgtagagaagggatttcaccttgttgcccaggttggtcttaaacttctggcctcaagcaatccatgctgccttggcctcccaaagtgccaggattacaggccagcgtgcctggcctgacact

SEQ ID NO: 51332 - DNA, 1001 bp, Homo sapiens
ggattcatttttctacatattaggatataaccctgagacaaggtaagtgagtcacttgtgtccattcattgagaactcttttccttttctcatttgtgtgtgtgtgtatgtgtgtgtgtgtgtagtttatgcttctggacatacactagtaacatacttaaaaaaaatgactccagagtccttcagtaaacttctttgggaggagttgtaattaatgtctttgacatctaaagtggctttttgtttgctctttacttttattcagaaaaagaaaaatgagaaaatttgggttgaaagaaggtgggataaagatatacttttagtttatctgtattttgaattaagtattaagaattggtagattatttccctgattcacattctgtcaagccttccataataccatattgaaaaagactaagtaattttggaaagtttgttggttactcatttgttttgttcactcttggtaataaaactccaggaacacacactgaaatatctttagtaagactactagtatgagtcagacacatcaagttctcaaaacatcttggtaagatctatgtaacagtttgaattactatttttttaaaatgagaagcaatagggtcagagtaatttaacaatttttatgtctgtcatagatgctactttaatgtagcacgtggaagaatttttatgagtgtatatattcatacttgccctgtattgatcatgtgactgcatattttattaaggattttaaaaacaggatgttagccactgatcaagtaatatatgctctggacacccaagacatgtttatacatgtgaagatttagaaggaaataaaacatccccggccaggtgcagtggctcatgcctgtaatcctagaaccttaggaggccacagtgggaggattgcttgagcgcttgagcccaggagtttgagaccagcctagctaggcaaaatggtgagacctcttctctcaacaaaatataaaataaaaattaactgg

SEQ ID NO: 51333 - DNA, 1384 bp, Homo sapiens
ggtgtcacgtgtgtgtgaacgcactggcctagtggtgcagttttgtgtgtgtgtggacgtgctggcccagtggtgcagggtcacacgtgtgtgtggacgcacttccctaatggtgcagggtcgcgttgctgtcacttagtgatccggcctcgctcttggcagcagcgctcactgtgaaagaagctttgcctgtcccattactcccataaaacagaatgggatggcagtgccccccagcagtctctgtttgttctctttctcttcacgaaggtagattagcttaaaaaatgtttggggtgtatttggtgggggatggttaaagttaagctttaccttttttttccaattttcttctcatagtttattcacagaaataatttattctttctccatagttataaaccagtactactaaaaataaattcaattttgagagagatacaaataaaatagtctgtgggcacatgaaaagggatcaaacaaatgtaatgaaaaaaaccatggggaacaaaaaagaaaaaagaaaaagactgatcatgttagtgcttagcaccattcttcttgaagatcaaagggctcggttgtgtggtttcatccggtcacagtaactctgagggggctcttgccattccattcactcaggaggaaactgatgtataaggtttgctttcaagctggtgctagagttgggttataaaggaggagagagagctttatcctttagccatggtgaatcaaaaggaaaacaaaatgccctgtagtttctttgtaaattgtgagattatagctttttcctaccagagtttcttcctataagaaaatctgagcccttcgcagttgtagaaatgtgtgttgaagttcagcattactgcattgctgttagttttgaattcttgaccttagctatcccttatctctacctttcaaggtaagtttctacagctgctgatcttatttcatcacactttatccataaccaccatagagtaaagttagcattttgaatattttttgagttctgtttattcccgggtaagaatttttggctggcattgtggtataatagactgaagttagaggacttgtgtttgagtcctggctctgctgtagccttgtggccagtgtcacgttttttaacgtttgagctaacctttgacaaacttgttcaaggtcacatgactaatgacagaatcctgaaccaaacacacacatctggttccacatccagtatggtaaggagtgtgaaagtccctcaaagagcatctcaggccctagtaacatgtgtagtacactccatagctcattgaatttctgctgagttcttaaaagtataagtggaagaaaagaaaaagtgaaattaagtgtaattttgtactgagttaat

SEQ ID NO: 51334 - DNA, 1576 bp, Homo sapiens
actccattttgtaatatttagcaagaaaaataagacaggatcactaagtattttggtagttgaaggaggtgctaggataagatagttgtttttcttctttttccatttgtgcttaatccattttggcaaaatatagggtcttactaaggggtataaaacatagccaagaagatactttgttgacaaaaactgtacattctgttattgttattcttgcaatttatgattcctcttctctattttgcatacttaacgatgctaaccaggcccggttatttagtgggtggtaaacgtgaaagaaaagttttacaaattttttttacttgttttgggaaactcagttttaatgtcgtcttaattaattttttgacagactctggaagagaacttgtcattacagacccagttatcaagaaccgagagctcttcatttctgattacgttgacacttaccatgctgctgcccttaggtaagtactggagacgtgctcttccatgtgaaggaggagtcactgagtgcaggaggtggagagtaatttctcctgatcttttagtagtcactgtattaatcagactcctcttttggcctcagtgaacatgccagtgtccgctctggattgttgagattgcagaggttctccgtgtcttcactaatctagctttacttctctctctcttttttttttttgataatttactttttaatgctgtttctatattattgtatcttcatttccttggaaattattatcctggtattgtttgctgaagtatgtgggtgaaatgttccgatgggccaggtgtggtggctcacatctgtaatcctggcattttgggaagctgaggtgggaaaaagtgttctgatggtctgcagtttactttctaaagatttaattcctgccactagaaaagacagagaaatggatgaagcagatatggcagcgtgtaattacttgagaacccaggcaaaatttatagagattttcattgaactattcttccattttctgtatgtctgaaaaatttcctactatacagcttcattggcagggggaggagatgggtagaaagatattgaagatttcattctgaggcagaaggtaacattccagccagtcataatgtcttcagaaattatgtcaaaaaaatgaccatgacatttgcatctttgggtattttctgtctctttcaagaaaaggatgcccataatggctcattttgtgtgtgtatggctgactttgtgccttttaagtggtataggaagtaagactactgatattcttaaaaccctttcctcactggaaataaagtggtgaaagactactttttttttgttaagtactgtaatatggttttaacaaaatactaggattttggtagcttttatcttaaaactacaatgagttacaataatttctccattctgatgctcagatggtattcaggaaaaccacctggagtcttttttgcaaagctacatagctaaagtcagttatttcaaggtaaattagtagcaactttagggcaggctttggcaagcttttcgggtcagctgatgtttcacatggtatctgtt

SEQ ID NO: 51335 - DNA, 1019 bp, Homo sapiens
tgtatctaaaaggtatttctgttgcccttcaggttttcagatgtcttaaatgtgttgcagaaatacatagatggtagattttaaaagattgttgttaggagtgctagtagatctggactcctgtatgctcagtgaagtaatacatttctgtgagcactgaagcatgtattagtagctcagtgactagagatcactatcatcccttgtaggaaaccaagttctggtgaagaagtaactcccacacttctcggcacagttcttcagatttttctgtgaactattggttacaatcacctaccaatagaggaaacaatattcattgagcacctactcagttctagatgctttctgtcttttctattctttcagtaattattttaggtagatttcagtatctcctttttacagaaaaggggagattgggagaatctcggtaatgtgccccaagtcacatacatgggaagtcatggaattgagattggagggggccacaggccttcccatcttctttccagtaggccatcttccctaccctgtagtgctcgaaccaggttttatttttgccattctgattttgttttccttaaaaaacaaaacaaaatgaattactagaccagtgatttctcaactagggacaattttgtccccacaggggagatttagcaatgtttagagacagttttggttgtcagaactggacgatgggtgctactggcaattagtggttagaagccggggatgtcataagcatctaacagtgcacaggcagatccccacaacaaagaatcctctggcccaaatgtcagtagtgctgaggttgagcaagtccttattatagacagcgtattttaactgaatgcatccccaagcactgccaaacaggtgctgcttcttcccctggtttatatatattttttctataatgagtaatcttatcctggtcctgctttttattatcctgccgagggaagaaactaagttttcttggagacaaaatataatttttcctctacccctct

SEQ ID NO: 51336 - DNA, 1142 bp, Homo sapiens
tagttaccagataatgatttctttattaatgcagaggcagtagtctctataaattccctaggcctggttccactatcttttcttctgtgtggtcagattgaattttcttgggcgttgtttcattttatgttccaataattatttactgccatttagaactctaacagtttttcttgttagcctatctgacataacattgatggtagagctagaaaatgatttcctacaattccctctatagctaatttttaccctccaattatagaatacggtaatattgttaataggttagtggtggctctattatgtgttaattaccaagagtcagctattaaagttttcttttgacagtaaaagcttttctgaacacagaggattaggaacgttttcttgattcttgttttaaagatcatcatgtgatggtagtaggcagagagctggaatgtgcatttctacgtagccatgaaatttaacttgtgctaatcgtggtggttctgcgtgagtaacagacatggacacagacagcggaacacagtggggcatagctttgtgcttgatggctgctttaactttggggctccaagcaaggatttcaagaaacatttctttggtcttaaaaactgggaaattaatagatcttctggacaggagggctccctaatttctgtggggcatgtgcctaaacaagggctccttagatattaacataacttctttgttagtaaccttgacaaaagctcaatttttacatgtatttatttttcatataaaggatcttttactgttttgtgttttaacacaaggggcagatgtctctagctctgagctgtgctttacagcatgtcttgtcttttgaatgtttctttcaactggagcagcttcctttgttaaaaggccaacaaccccctaagtgagatgttcttggaaagaccccttgacacttgaaaggtgagaaatccatttaaaccatgtgatgccttccactgctctactgctgggttctgcttgttttaatattagtgatagatgctctggctggtgtattcagtaattggaagtgaactatataatataaatgacatttcatggcatatgtgagggcacagtggatgacacttgatttcagtgttgcctgcctttag

SEQ ID NO: 51337 - DNA, 1135 bp, Homo sapiens
tataatttatttaataatatctttagcatgttttgaagtagtacattatagttttttgttttttatgagcccagttgttgtactgtccttgtctgtaggggtgttattctgttctgtattctctttttaaaatagtaacattatatgaggtttgtataatgtactttgcttttgcttgtttttatgcgaatttaattttcctgaatttttaactttacggagctcccccttctgttgtttttatgcagtgttaaaaaaatggcagcttgctgtgattttctgactctgttcctctccttcactttcatttggatcttcttttttctttaatttatttaaattatttaattaatttaaattattttgtattttttgcagaatttatattccattactggtagtttctcccctgccttggctccttgtgccggcagggagctatggtgggccagttttgaagagttcaaaagtgtctagatgacttcagcccctttagccctgcaaggtctctgggggttctgacctgctgtcggcatgggcaaccccaccaggcttcagctgctcttcacacattggccttcctcattgcctggtagctattttacggtcctcctgatcttagctgtatcccatatctcattgattgattctgttttctctcgtgcagatgctcatatccagagatcttatggctgatggtagtttatcccttccaacctgcttatattttgcggtttgtagagatgccttatttctgaattttgttgtgtgtcagcaggaatttgctttgactctctaatctgtttttgtgtggggattaagggacatttgtaaactatgctgccaatgctaccatccttctagtacttctagtatgttagtttttattgaaccagagttttactaagccccaggaccgcagacacttgagttcttaaatcttaacccattatctctcatggctgccaccattcctgtataaaccatgagggagaaatagatactgaagacaagatcagacagaggaatcgttttatcctttgctagttggcttttgtccccaacccccattgatatgatctagtctgtgtcagaggtacaagcatgtaagttttttctaggatttttcctaggc

SEQ ID NO: 51338 - DNA, 1036 bp, Homo sapiens
aacttttctgtttaatatttaacagttaagtatggatatggacaaatgctttagcattttttttttcagatgaaataaaatggttgatacccacataggcaaagaaattttacccaaagaaaagttagtccacagtcacagataacatggtagatccaaaccagcagctttttttttttttttttggacacggtcttgctctgtcacctaggctggaatgagtggtgtgatcatagagcactgcagccttaagctcctgggctcaagcgatcctcctgcctcagccttttgagtagctgggaccacacaagcacatgccaccacacctggctaattttgtaatgttttgtagagatgaagtctcactatgttgcccaggctggtatcaggctcctggcctcaaatgatcctcctgccttggcctcccaaggcactgggattaacaggtgtgagccactgtgcctggcccccgcagctttttaataatatgcttttgctcatcagggcctcctggaagtgagtggggatggctctctgccaaccttctttaccatcaaaagaatggttcagagcgcatctgattgccagtgattctcagaagtcttatttatgctaaaggataatatgttactattaaccatgacattattattcaaactgtcttaaacattattatttattaatatattgtatttacatctagtattagttgagactatatgttatatgtagaggctcaaatgttgagactatattgtagtatttgctcatagttcacttgctatattgctggctaaattattataaaaattgtctgtggtttctgcgcctctgtctactttcacagatgctttgttaccactgtaaaatgcagtacattctcactgtagccattaaatctgattttatattaactagttgactgtgacatttttgttgtatctttctacccagtggcatacacattttatgtagtttgttgtaagtacacacctctgatcatttacagcgtattttatgtacagtcgtgatgaga

SEQ ID NO: 51339 - DNA, 1066 bp, Homo sapiens
agatgttgtgagacgtattctctaccatgagaacagtgtgagggaaaccgccgccgtgatccatttatctccacccagcccccgtccttggcacgtgggcattattacagttcaaagtcagatttgggtgggacacagccaaccatataatatggttactgtggtttaagtaggcagacacatctgtgagaccaggagtttctctacaaatggatgaggaatggcacagaatcctaggtgacagtttaaggattgcatggcagaaaaggctctgtgattaaattctctgatgttgtcactgagctgtaaggctggagataagactgtctccttctgctgaaaataagaatcaatactcactccttgatgggctaaactattaaaaagagcccttcttacaatgtttcattatctgggatttgcctcagctggtgatttgttggtggcacagggagatttgtgaggcatttcatattaaaattagtcagtagccggtgaatccctttagataattctcttccgttttacagtgctcctgaatagatttgtgatttatttttgcctaagtagctttgtgtttttttggaattattaaaagagggttggacatctatacactttttttaaccttgtttttcctcatattctctgtgtttaacagtttagtattggccttagcaaaaaacatcaaatatatttgcgtggtacattgacctgacacttgattaacacacgttgaacttgatgtttttcccgtatgaaggaagttatacaagaagttggccttgcttttttcgttgattttaaccgtggacagggttggggttgttaattgttaggtggctggtaggatttcagctcctcgattgaaaaagaaaaacagcccatctcgtgaacctcagtgaccaaaagaaatggtcactgtgtcatttgggtgcttgttgtgtctcatcccagtgtagtgtgatggctagggagcaaagagaaggcgagcctctgagggtgacccctgccccgctgtccgccaggctgggagaagttctgcaggaggtcctgtcatgggcag

SEQ ID NO: 51340 - DNA, 1027 bp, Homo sapiens
tcaacctcctgagtagctgggactacaggcacgggccaccatgccctgctaattttaaaattttttgtaaagacagggtctcctccttatgttgcttacgttgaggatgtggaacttctgatgcagttccagggtctttcatgtttttgaaacttgagtatgtttacttcaaaaatagtttttgtgttcttctatattacttaatttcctcccttccccaatacacaaattaggtataatttgtgtgcttatatccctaatgcagctataaaaggcagtttataaattaatttcaaaccaaactacaaaaccaataaagttctgactaccaacattaatttaatagactgggcgatgatgttgtgaaataagtagccgcttgtgatgtaactgttactgcttccttatggcccatgttcttggatgctgggatggtgcctggtttgtgtagacggctggattccttgtaatgactcggttttcctgttgcttttctttcagttattgccactcagaaaccatcagtgtaaatacagcttgccatgaagtgactttgcctttgtttggcataaatgtgcccttggcacattgaggccatcttgtttatttaccagcttgtgataattatggtagtactacttagttatatgtaaacttagagccaaaatcttgtgcctctgaactctattaatgaagttgtaaaacatgtaattccaaaaatggatgttaaaaatattaaggtatacattgaaatgaaaaataaaagtgagcctctcctctccacctcccacttccagtcatctctcgcttctgcctgagaggcactgtcagccagcatcattctcacatcatgcctctgtacgtgtctgtcctcttagctagattaagagaaggggctgtgtttcattcacctttttgtccccagtgtctggaacagctcctggttcagagaaattgccccctatccattgtattgatagtttgttttaattacaagacagaaaagtcagattgattttttttttaa

SEQ ID NO: 51341 - DNA, 1035 bp, Homo sapiens
tttgtagagatggggttttaccacattggccagggtggtctcgaagtcctgacctcaggtgatccacccgcctcagcctcccaatccaatcaccctgggattacaggggtgagccaccgcacccgtcctttagttacctcttaaagtaagttgggaaggccaggctcagtggctcacatctgtaatcccagcactttgggaggctgaggcaggtggatcacaaggtcaggagattgagaccatactggataacacgatgaaacctcatctctactaaaaatacaaaaaattagcagggcatggtggcatgtgcctgtagtcccagctacttgggaggctgaagcaggagaattgcttgaatcagggaggtggaggttgcagtgagatcatgccatcgcaccccaacctgggcgacagagcgagactccgtcttgcgggaaaaaaaagaaaaaagttgggaaagagttgatttgtcctgtttttcaagggaataactgtagatttcactttactgaaattagttagagacattgttatattgactgacaagagatttcgtggtacaatttcccactgatccattaggattacaaaaaattatcagctgtatgggtggcaaacacttttcttcagatttttcttcagtaagataaacctcaattccaagcatcacagattttcttgaagcagaaactgtgccttacaaaagtttagcacagaagcagatgttttatgtagtagtggaagggtttagaaattgttgtgtggtcagttgtttggacttcagaatgcatttctctataaacataaacaggtttttttttggcaagttcgtaaatgctagtttgaatttgtaatgtagagaaatacagaaagatcgttcctttattgcccaccttacagatatgtggacttccttccttccttccttccttccttccttccttccttccttccttccttcctccctccctccctccctccctcccttccttccttccttccttccttctttttttaaactcctcagcttgc

SEQ ID NO: 51342 - DNA, 1853 bp, Homo sapiens
tggtcctgagggatgtgtaagaggcagcaggatgaagtatctgtagtgctttatcccttaaaacacagggacccatgtgggtgatcataggggttattatcgtttagtacatctccctttttttaggaaagttcacacttgtcttccttttttttcctgtaatggtaggacttaatggaggatttaatggtagtgttttctgaaagtcgagtatttattattctgaatgactagtgggttaatatgaaagaagtgtagttgcagttacattgacgtcagtgtaaagaagtgactgtggtgccccagttcatactgaattagcaaataatacaagaggatagcaagctctctcacacttagacacacacaatgcaagatactgtcaatatatggtgagttgttcagctgcagtgtagaatattaatatcttgggtcgtagaaaagaaagtgctccagatgggctgtggcacttggggaagttctgtgagggtgggtaggttttgaggagctgggtatgtttttcatacatcaataagaagtggataggcagagtgtaggagccttccaggtgtacatggcagcctgtccttataagcaacgcaggcagtgaggctgacgagtctgggagttgtgagaagatgacccgcaggacgtcactgaagagcacaggttagtggattttgggaggcagatgtggagatataaatggggctagattatagaggatcttcaaagttagcaaagttaagattttgtgtaataggcagtagagagcctgtgtaagcttttttactctaggcaagccatcttgcaggccactgcttaagaagattgactgtagcagtttgcagtgtggaacggggaaagatggtgaaaattccaagtagaaggctagggccgccattcatgggtaagatgaagaggaccaagacagtagagatgatatattgataattgtaaccaaatcaggagtaattgttgcaacagcataacacgtttacatatttgctgatgtaattactcaagggtcataccaaaaaaagggatgggggtttcacattatggaaaccttggaattctctgtcttacagtggaagacagaacccagtgtagtatagataaaagtctaattttaattcccagagaaagactgacatcttacgggacaaattagtagattcccaatgtgactacctacttctaaagcttcagcctttagcaattaccaatatgtcttatttaccgatatgtcttatttccacatatatctaaaaagtaggttttactttcaggctgatattttcttaatcaatgtggatgctattattaatacttttatttactgtaatactcaacaggaattgctgaatggattttaagtcttccccataataacattaatttttttgtaaactttttatattagaattaatgattagtatttattttttagcaataaaaatatttgtgtctactgatgatttaaataagttcatgactggtggagcacttgggtacattatatgtaggtgtaagagattctgtagtgaaaggataaatcttctttcagtcaagatgatgctacataaagctaactgtattgattgttctttaatgatgctttgtgctgccaaagtcatttgagctggatctgaatcagatccagttggcaaagcttccccatatgtggagttctcataaatcctgcaaggcacacagatctaatacagtgtaatgagagagctgctgggagaaaaaattgattacagggttgcagacaatatcattaacatttcttgccatgatacaccagatgtcttccctaatagactatttttgttaatttagttttt

SEQ ID NO: 51343 - DNA, 1026 bp, Homo sapiens
gataaaacattctgaacattagcttattttcctggtatttgttttgttttgtgtgtgtgtgtgtgtgtctatgtgtagggagcttaagagacttacaaaaatagataatgaaatatattaaaatctttgtttacagaaagttgttaattgctctttgcttttcaaagggaattatgtgtaacaggacaccctaataatgatctaatattaaaaggttgttcatctgtaatttttagacaaccgtaagacaggttcttatataagtattgggattttatggattttttttagttcattcaaaaccacatgaaattggtttaaaaatgttatgtgctgtctaaaatatttgaaaaggaacatactcaaactgttatctgaggtatactgtgctagctttcagaagttgctctatagtcttttttttcctggtttttaaatgttttcaaagttaattttaaaaagacacgtgatacatactaaactagttttgcctataaaaataagtaatgtctttctggaactttatgctctgtgcctattcattatactcaccttgtgggcgtttggagaaaattataactcatgtgaatattgtctttttccctctgttttggggcctttgtctatttactttgccttcagctttatacagttaaacttgaactttgagaaaatggcagggcctttctttggccacccaaatgccctatttccttattaagtacatgtcttatgtctctagcttctgtcattagaaactcttctgaaagctcagtttgtccacttgtgattcattttacggttgtatctgacaccattgcatttctgtttttattataagcatagcatgttgctgttaactgtgctttggcactatctcacatcttaacttggttattttgaggggcacacaccatactgctttatgataggacctggattaaagtgtggagccagaagggtcatacgtttgttcacactgaaataaggtaacagctttgattaatgcaaaaaggttaactttag

SEQ ID NO: 51344 - DNA, 1008 bp, Homo sapiens
ttgtgatttctaattttgtttaattctttaagagttaagaggtaggatggaattcttttttttttttttgagacagagtttcactcttgtcacccaggctggagtgcaatggcacgatctcagctctttccagcctccgcctctgggttcaagcgattctcctgcctcagcctcccaagtagctggaattacagacacctgccaccacccccggctatgtttttgtattcttagtagagacggggtttcactacattggccaggctggtcttgaactcctgaccttgtgatccgcccgcctcggcctcccaaagtgttgggattacaggcatgaaccaccgcatcaagcaagatggaattctttagccctgagtttggtgtactgagtcagaggaggttgtatatctatactcccctcccgccacaattatggagtaatggtgttgaaagttttttgaacgaccacatcctttttgcatgatactgatgtcaacctctagtggacagagtggtattaacataagtggaaatcaaaatgaggccttgggaataaataatcccagcattttgctggccccattttctgagcttgccagcaatttgtcttcactcgtggctgccagtcagggttgggcacttgggattttaagttttagtgtttaactactactgtgaggttgggtaattcattttcttctaatttacttgggtcaagggactctaagaaactattgaaaaagttttgtttaattatatatatttccataaaatatatttctgaaaatgttatttactaaaattgttatctatatgtgaaatttttttcaatgcagaaaactctaggtattctaattttaaaggagcttaagaaaggttgagacaatctgatatttgcagccatctactgtgcaagaatattggtaaagtcttgttcaaacttaattcttttcaattggaaatttgtaatttgtatgtatatatggatgcttgcattaagaaccaactcaa

SEQ ID NO: 51345 - DNA, 1019 bp, Homo sapiens
aaatagtaaaatagctggcaaagtctttatttagctttttgaaggactagtaatacggaatgacagtctgtgatccttgtggcctggcatgaaaagattaattgagccaaatttcatttttagaatttagagttgagaaactgagagactgaggcagttagtagaggggaaaggtgaatagataattcaagaattacccctaatatatctgtaaaaattaaaaataaaagaattacctgaatgacaagagcaaggttagggctggcataggcaagctcacttgctagggtaggaaactgggaaaagcagaggacaggcaagctgtgggaagagcagcagactgccaagggaagtgtgtgcacagccgtctcttccttgactctcctgggtcccactgcactgatgttcttcccacaggattcttagattatcctgttcgctctgagtaaagagctctcacctggctagcttgagtggctcttcatgaattgcaatggaaagagcctagattaatatctccaacccttctgctgccctcccatagcttttataggtcaccatgtgacttacttacttttagggttttgttctgaatgagtcaatatcattgaggagcattatatcacagagtgcaaatagaaatgttttgagctataatcagggacttccacaggcatttactgaatacctgctttgtgttctttatggaactcagcacctaaagggagactgaagaagtataaaatattgttcattccctcagtgatcttagattctaagtggacagacaacttgtggcattattggatgtcagtcttctttggagaacattctgaataggattgacaagaagggcattcactttagttctaaaagaaatgatttgtttgtttacgaaaaacaataaaatcatatttttatagaaacccaggcattaagaagtataatacaaataatttgccatctggaagtaatcatggagtccgagaatgctaacaaggtcatggagacactaattt

SEQ ID NO: 51346 - DNA, 1146 bp, Homo sapiens
aaatgtgctatttacttctaagatggatctattcttgataagcggcttttaactttcctggttgcattgcaaggtggccttgcagtttaatcttgtaaatcaaatgctttctatccagtttttatgtctatatgaatttttaaaaaccatttttagaggtctttgctacttattatatctttccttccaaagtgtgtttttttttttttttttttttttttaaacagatacagcactgacacctgaaatacgggtgtagccttattcctgaagagttttgttttggtagtggctgctgctactgcccttttcctgcccattgtctttttgtgtgatttttactaaaccaaacatcagtgcaccgtgaaaaatatatagctgtgaaataaaattgtaaatatttttattttacctattagatcttgagccccctttgtacagtttttgcacattagcaggtgccttcctgtttgaacagcatctcttatgaaatgctgattacaatgtgatagttgctgttctgggcagaggttcctgctgagttacggtaattgctcagggtattaacagcaataaaagctaaagcttctgttgtcagtattggtctaatacaacacattaaagctgtctacaaaaacagtgtgggaagtagggtgcagtatgtttagatacctttttctaaatcacacactgctgtttctcatgtttttgtttgaggttctgtattcagcacatcctcatagttgttgtgtaagaacaacagatgatgaaatatttgctctgggaataaatatagttatttccactttcttattttcttacttctctgtacttattaaaagataatcagatgagaatgatcaagatttttttctccttcagtttactgaagctataagggtaaaagatgagcagaaggaaataagctttgtttctctgcaagattttaagaagaagaagaaattgaatttgattttgctcccagcaaataacatgactagtggagcaatgaaagaaacaaaaacccgatggctttgaaatgttgagtaattaggtattttatctttttaataatcataaaataaaaagttggtttggggttataactgagagatgtgtttcattgtttatactataaatgagaat

SEQ ID NO: 51347 - DNA, 1616 bp, Homo sapiens
ctttttatttaagtgtcttaacatggcattttaaaaagcaaccttggccaagcgtggtggctcatgcctgtaatcctgacacttcgggtggctgaggtgggaggattgcttgagcccaggagttggagaggagaccagccaaaacaaaacaaaacaaaacaaacaaacaaacaaacaaaagcaacgctttacactccagtcattgagagcatcaaaaattattttccaaccactgccatgtcaaatgtaatttaagaaagcacccttcttccctgaagaaaatgcaatttggtttactttattccatctctgattagtggcattgtttttgtttacagttagaaaataaaatgtgtttagggtacaatgtaatggcaaattgtctgtaagagattagttttctttctctttttgattagttgaaaaggtcattgtaatagcatgttcaagctagtcatctttgcgtatttcatttatttcctcacaaaatatttattacaaatatagtagcacgtggcaaagccgtttctctttttcgaagacatgtgaacatgtatctgaataagatactcaagatttcatcttgatgtgtgatcttgagcaagcggtttcttttatctaaatgtcttcatctgaatatggataatcccttggactcctccccttcttcttcagggactctgaagaaaataatttaggcttcatcagattctttaaattattagaaaaataatcagaaagaaccaaagggcagttttcctttagcctaaagatatttgcaatttaatatcatcttttggaaaaaatttacaataaaagatatgtgctttgtcatttatttatttatgcagtggctttatgggccctgtctttgttccttaaaggtaaatgccattgttttaaaatttctttttcttttaaagactgtgtgtatatcgagagtcggaggccaaacacaccgtatttcatctgtagcattcaagacttcaaactggtaagcgtttttaatgtgctgttcactctgctctgtattctctctttttccagttccattggctatctcttattgttcctccatcgctgttgacgtggttaccagttcaccttttgagtgctaactgcctcgtggcagtagcactgaaatgagggttactagttccatcttttcagctttgtaacacttactctcataatgcttatattgtaaacaatatttctgaagtttttatccctttagtaacttttgacaatttcagatagtcccttgaatttctgaagtagcttgtttcttctcagccattgttaagagcctgaagtaaagtaaattcagtaaattgatgagtaggggaaataatataaacgggtcagagaatagtttccagtggaaacctgtcacttccttcaatatttcggcaggtgtggagtatatgatgttgaaattgttgtgggggtttcccggggtagcggttgaaagaagtctggcttgggcgtggtaaagttgttatactttctttccagttttagtgcatgtgttgcagaagtaaggacatagctactgtactttctcattaaaaattcttcctgaatatataagtgttgatgttcctcattatgaa

SEQ ID NO: 51348 - DNA, 1048 bp, Homo sapiens
atgcacacacacataacatatacactctttgtgtgtcttggaaaatggaggacatctgttttaactgtagagagatacttgtggattttttattctgcaatattagaccaacatactgtacctcattgactgttacctccaagcattgagggtggaggagtcatgtagaggagaaacagaaagcagaagagcggtgcagtcctgagagtcaacttcccatttcaccgctgtgccacccagcttggtctctgagaaatctctttgtgagaaagtctttgttcatgcgtgctttttacaatggggttttctattggaaattatatcagagtggcactgccatgctttgcaaagggatgagaaggtatttcaaagattaataggcggagacacattgatggaaaggaaaattctttatgaggtggagcagtggctgagcattgcctatatatgttgtgaccacagttttagtactggcgtgtgtggcactgcttgctaaattagtgggtgaggtaagtgtccactctgctctgtaggaggctgtcagaaaagatgctgacaggttctttgtgtttcataatgacacactgcctaatgcttcagactgagatttttacccttgaggggactgtgcttttgctatatttacataaacctgctgatttgctgagggttgaaaaagcagagagggccttctttgccttgagaatctgccttcacgttttggctgacttccttccccagcttagcaaatgctctgttgtttacagatggcacaatagatctttggacatgaagctatgctgaggttgtgagaaacagccagaaatacctctgttcagtatcattgcccaaattacggattttgttgctccctgttcacaaggatttgaggtcacttaatcctgtgatccattcccagacagaggttaggtgttaagagagtaggtctcaacctagacccatggtttcatttctagacatccctagtaaagacacattagttatcatgtgttgtttggactaattgatattgatggtaatagcctca

SEQ ID NO: 51349 - DNA, 1048 bp, Homo sapiens
gggaggcggagcttgcagtgaaccgagatcgcgccactgcactccagcctgggtgacagagcaagactccgtctctaaataaataagtaaatctttattctttgacttcaattagaagaagtaagacctgcccaaacaacagcaatgacaacaaaaacccgaatgaaaacaacaacgatttaagggagagaaggagtaggtatgggtagatttcgagagtcagggaacaggtttcatttgccctttcaagtttatataaactaaagcaaacaattaaatttgaagcctgctgacactgtaatagatttcaagtaagctggtagaatttaatgaagtgtattagatgtcagctatagtattagtagcattttaacaatcagccaataaaacaagagcacagtcttctgtgcctgcaactttgtagaagatgttttatagtggtatggtactgcaagataaaaaaagtagaaaggattttagcccttgatccttcattttgtggggagaaattgctctcatttagggaagtgatacgttagtaataggcattgagtgggcagataactgaatagaacaggttgtaagttggtggcatttgggtcctgaaggttgagcaggattgtgataggacctggttgggaagagcggttgtagtagcagcagcgtgaggatgggcatggcttggtcttgattgaatgtgtctataggagaggagaaacaaagccaggtgagcagactttgcttgctgaatgaaaagggtgtctctgtttttcctttacttctcatctgtcattgtgtgaccctggtggttatagtttggggcagcaaattctgggtccttaccttattactgtttgggtgttgatttgataagttcatttctcttcctcttttctttctttgacagagtctcactctgttgctcaggctggagtgcagtggcaccatctctgttcactgtagcttctgcctcctgtggtcaagcaatcctcccacctcagcctcctcagtagctgggaccacaggtgcacgccatcacacctgggta

SEQ ID NO: 51350 - DNA, 1054 bp, Homo sapiens
tgcagttaccaaattgattgtggcaatgttagtaatactgtgtataattataatttttcctttttagtagagggaaaggaaatgtcacaaaaaggtctcacctggtatgctgtatttttacatccttaggaacagtttaactgaaaagtagtagtttaattaccactatttcacagcatagaaatacacataaggttttgaagtttgcatctggtaattactctgttagcactcagacttggggagatgatatttcttccttgcaaggagttatataactcagtttctaactagacaatggagacttgatttccagtttattctctggactggctggaagatatttggttggagaaaaactcggagctatctttcagggttataaaccagaatgattttgaagtctgcagcagctatccccaaaatagatatttggcatcatggagcgcaagctttttaaagattgcagttggcatttaggtcaggattggtggaggctggctgttgtagagaccatcagttttgtcatatgttttacttctattatctcccagttgtcaggattctaagtgctgtggcatctgatacatgaacgtacggatttccagcacccttttcagtgttgtttctctaacttagcttctgtaatgattaagcgtggtccatttttatgttctctcccctgaatttacttactgcttcttcttttgccctttgagtacatttataatatttggctatagacttcaaaaatttttcttggctgggcgcggtggctcacgcctgtaatcccagcactttgggaggccgagatgggaggataatgagatcaggagatcgagaccatcctggccaacatggtgaaaccctgtctctactaaaaatgcaaacaattagccgggcgtgttggcgggtgcctgtagtcccagctactcagaaggctgaggcaagagaatggcatgaacacgggaggcggagcttcgcgccactgcactccagcctaggcgacagcgagactccatctcaaaaaaaaaaaaaaaaaaaaaaaaatttt

SEQ ID NO: 51351 - DNA, 1046 bp, Homo sapiens
ggtgtcataaaaaaccccaaaccatttgctgagaccaaaaactgtagtttttaaattttaacacttaatttttctcctgtggcttgtgcgaagtttttaggtgtaaagcatgaataagtaagagattcatttaacaaaacattattttaggaaacaaatatgaaaaagcgttaaaaccattcttttttctctcctagcatttttgaaacgttggggttgttggagtggttggattttccctggaattgagtgagaaattcagaagactgaagcccaggcttactgtctacctttcacggaggcctagccgtgagaggacagaagaaggcacgtggcgaatcatgacagcggacaaagacaaagacaaagacaaagagaaggaccgggaccgagaccgggaccgagagagagagaaaagagacaaagcaagagagagtgagaattcaaggccacgccggagctgtaccttggaaggaggagccaaaaattatgctgagagtgatcacagtgaagacgaggacaatgacaacaatagtgccaccgcagaggagtccacgaagaagaataagaagaaaccaccgaaaaaaaagtctcgttatgaaaggacagataccggtgagataacatcctacatcactgaagatgatgtggtctacagaccaggaggtaaggagccttacgtttgggtcttgccaatgtttacagtgggggaatgatcttggcattatggtgaaataaatacgctttgtacactttaaggaaggcttggaatctagaagagtaggaaacttaatttggtaaacatgtgacccacttttggtcagttaggttcacccacttcttgcttgtgtctgccttaatttgctcttgtgtcctggtttatgcattcatgagttcttttcttattttcctgtgctgcttgttctctaactggaccatctgcttagtatttttttgtcttttgaattcatgcttgctttttaatcttcaatcataaatgagactgtggtgaccctgcagaattgactgcttggtggagacaagta

SEQ ID NO: 51352 - DNA, 1028 bp, Homo sapiens
cgctcggctaattttttgtatttttagtagagatggggtttcaccgtgttagccaggatggtctcgacctcctgacctcgtgatctgcccacctcggcctcccaaagtgctgggattacaggtatgagccaccatgcctggctgaccaaagagaattttctctgcatctgaagcatgtaactgcaaactgatttgtttgtggttgtcaagtaaagaggaccaatcttttgtttgtttatatgcactgtttcctttctcaccctagttgcatgagaaacagaagcttcttagattgatcggttgcctccttttgttgcatttgagcattgagaacaaggaccatgagttttctcctccattgtggttttagttctaacacttggcacatagtatttagtaaagatttgttgaataagtgagatagggtattggggaagatcataagaaaaacaaaagataaattatttatttataaatttattgttaggtctattccaaaactgacttagaaagacaaaattttttcctgctataaaatatctgtaagaactgtgttagcttggagtttgggattcacttttcccattgcagacgcttaaaaacctcaagacttttcttgttgggtttctttttggggagtactttattagggataccatttatagtagaaatctggaagactgtaaaaaccacttaatattcccgaaagatggaagcttgtttctggaagctgttatgttttgttaaggcagagacaatacattttcttttctttattgagatggagtcttttgcccagactggagtgcagtggtgtgatctcggctcactgtaacctctgcctcctaggttcaagcgattctcctgcctcagcctcccaagtagctgggactataggcgtgtgccactgtgcccagctactttttgtgtgtttagtagagacagagtttcaccacgttggccaggctggtctcgaacttctgacctcacgtgatccccctgccttggcctcccaaagtgctgtgatt

SEQ ID NO: 51353 - DNA, 1772 bp, Homo sapiens
cagcggccagagtgatctccggtaaacagaagtcagatcatgcctttctttgctactcacatccctgctaaagtgtcattcgagtaacttcatttcacttgagtaaaagccagagtcctttccctggcccatgaggcctgccaggatccaggtcctcctccccctgccccttcaacctctgaactcatctctgacctctctccccctttttgtgctattcctgcccctctggtctcctgtgtcttgagtgggcctggctcattcctgcttctggaccttgcactttttcccctcttcaggaatcacctcccttcatgtgtccttggctttctctctaatgctcctactcagggtcaaagccccctcagagaggccttccctgaacatcttgtttaaaattgcagtcctgcaacactgtgtcccccttagatttcccatgtaagatcttctcattaggtatggtgccttttgttggtggtctctctccactgctgagcacataagctcaagataagggcaggggttttatgttgagttttctgctgtttaccaacacctggagctgtaaatagcacataataggcattcacttgacatttgttcactgagtagctgaagcttgttgtaaatctgaaatgtattctacattagattttcttccttttcttatttaaagcatgttataatgtgtttcctgtttcactgggttgggtagtgattgacacagatattttcaatgtttttggctttccgactggagaaaaatagctttgggggcagagtgagtgtgtttcttaaatctgtctgcgtgaatcatcagcatggatgaatgtaggagaagttggtgcctgtgaagagctggagatcctggcagcacaggcagcaggagttcctgtgcaagccagatagggttgagctctgagacagctgcactggaatcctacttcgtgcccattggctgcgtggccttgtgcagatgatctcttctgagttctgtagactgtaaagcgaggatgacaacttctgtccagttcacttcatgagttggaagaatcaaatgagggacttgctctgtaaacctcatggtgctataataaagatgctgttgttgtatcgtctactttgtagatcatttctagcaaattgaagtgacaactctccttctcagtgccatctggttcctctctgggtccctttctttatctgtcacatcattggtatgtgttgatcactgtacactaaggcgcagaagaattataattcatatgctaaacatagaggaaaaaaatatattcccattgagctgtattttagagccaaatgtaaatggtaattggattgacttttgcttagattattaatgttcatacttatctgaaagttggttatataaatatgtcattaatatataaatgatatggtattaattattcatataatttaatatattaatataacatgcagattatgtaatatataaatagagccaactttcagataaatcagaacattgattttataaatatacacatatactggattttgttttatagacatctttattgtttcttgaatttttaactttcttgctcacttttggcagaaacaactctattttctttgtaaatagaaacagtgtatgattttgtagtgagtagtgttgaatgtacaatttggacttactattttttctctttgagtgctgaaaaaatgttttctacacagttttctggagcagttatcttgttaaccccagggagaatgattttttt

SEQ ID NO: 51354 - DNA, 1524 bp, Homo sapiens
ttttcatcattcccagaagcagccccataaccatagcagttactctgtatttacccttgcaaccctaggcaacaagtaatctgctctctgtccctatggatctgtcttttctgtacatttattacaagtggaatcatatagtatctaatcttttgtgactggctcttttcatttagcataatgttttcaaggttcacccatgttgtaacatatatctgtacctcatttcttattgctggatattttattgtgtgtatgtatactacactttatttacccatctgcttgtgttttgcatttatcttttccacttggttttctgtttacagccatgctttgggaaagtgagtttagggattcttttcccctttcaagatcagggatttggtttcatcggcatttggcttcccttgcccttggcatttgtggacaccaggttttctctttagttgtgtgacagcggaagcttccacttgaccccatgaccagagcaggtcacctatgagtaattctgttcctagcaagcttcaggacttgccagtaaacaacagaattttcaggatatttgattatgttctcctaattcaccctcaaacatctgtggaattactgtttcaagcaatactttgaatttgtctagtttatttcagagaacaaagaacatggcagactatagttttcgtaatggtgttttatggattgcatattagtgaagcataattttgcatgaagcaacacagatgcttaaccctttgaaatctctgcaataggcaaataatttgtttaaagcagtagttctcaactgtgggcatatttgctccccaggggatatgtggcagtatctggagatatttttgtagttctcactggagcagtgggttgcgttgttagaatctgtatgggttgaggccaggaatgctgcgaaatatcctacaatgcacaggatagccccccacaacaaaaaattatctgtccccaaatgttaattgtagttcagttgagaagccctgtttagagtgagcagtgtatttcccttaacctgctgagtagaagagacacaactgttggcagtgtacaagctaactgtatataattggaaaagcttcacatttaaaagtatatgaaagcagttatttgtatgaatgagtttgtgtgggttttgttgttgttgttgttgttttttgagacggagtcttgctctgttgcccaggctggagtgcagtggcgccatcttggctcactgcaacctctgcctctcaggttcaagcaattctcctgcctcagcctcccaagtagctggaattacaggcacgtgccaccatgcccagctaattttttgtatttttagtagagatgggatttcgccatgtgggccaggctcgtctcaaattcttgacctcaggtgatcctcctgcctcggccccccgaacatgctgggattacaggcatgagccaccacacctagccgagtttgtgtgttttttaaagaaagacaggattttaaatttttattggaaacctcct

SEQ ID NO: 51355 - DNA, 1040 bp, Homo sapiens
ccatagtgctgggattacagatgggagccaccatgcccagccaaattacttttctgacacttgaagtggatgtgaatggtgtgcatttatcaaaaacccctcttgggctagtggcaaggacgcatgagcaaaggtgaaagggtgagctcaagcacaggggatctgtagagaaggcttgtattggagagtcaagggggaggctgtttagggaggactggaggagtggtttcttgaaggaggaaattgggcctgacatgatttttctttgtaagtttttgaatgaagatattaaaaactgagacaaatgtaggtggcatttgcagagagcaggaactgaggtctaggacaaatgagggcgctttgaatggagaaaaagattcacagaactgcctcagacgttttcctccagttcaagttagtgaccagcaataactgccctatttggtactcatccctgtgggtggttggaactccctggggaccacagagggattctgcctttgtccctagtttggagcctgggttgtgatgagggctcattgagggcagagatacttttgccttgggaccctaaggtggttttaggcattaagagtctctttttccttgagtttctggtattccttcttggtagtttagtttatgaacattttgatttaatgtcacacttgggaggtgacacctctctcattgctgtcaggttcttcttttttttttagtgtaaaaaaatatgtgacttactttagtccttcagcttgccatttaagaatgttttgtgacagaatcattctttacatggttcttcatgtgagctgagtctctaaggtgaaaagaaaggtcagttgggcttttttggattacttttctgaaaccccatcagtagataaggcacatattgatgtgacagatgtcagattcccactgagaactcctaagatagttaagtgcagttaaattgtaagatttgtgttattctaatctgtgactcacattctattctaaggaagagacttggcattgatcatttataagttttgtaa

SEQ ID NO: 51356 - DNA, 1052 bp, Homo sapiens
ttgcatagggttgggaaatcctctgagggagggtagacttaagattgtacccaggctgtcattacatatagcctgtctgccagagactctaggccctgatttcagagtgatggtataatatgttgagtgagtcagagaagatcagtgtggagaggggaatttataaaggaagagtgctgacggtgtaagataatggaacctgtgattctaaaacttggcagatgtgactatgatagataaaggtagtggaaaaaaatggtttcttgctcttttttcctcgggtcacgttgtgtaaattgctgaagaaatggaagaataaagccttagattgctatgggactgtctcactgtctttcctaagaagaattgtaatctgttgcctttgtgagagtcaaagataaagtcccctgggttcatgtttatgcatattcttgtacttgaggctattagagttgattaaaagagagtggcttattgaggaaatgagaatcttaatatttgtacttaccatacatttagctttagatcagcactgtggaatagaactttcagtggcaatggaaatgttctgtgtctgtgctgtccagtgtggtagctgctagccacatgtagctagtaagcacctgaaatgtggctagtgtgacctagaaagtacattttaaaaattttatttaattgaaatttatttaaatagccatgtagatagtgactactatactggacagcatggccctagattaaagttcttaagtgggtcatatggctgtaagaggaataatatctgagagcattctcttatgtctagacattttgtggttttgtggacacatgattatttctacattttttctttagagaaagttggaatggaaaggggaatgtaaagactattagcatgtgagttggagagttataatttactttttgtatttttatttttatttttttggagatggagtctcgctctgtcgcccaggctagagtgcagtggtacgatctcggctcactgcaacctccgcctccctgcaacctccgcctccctgcaacctccg

SEQ ID NO: 51357 - DNA, 1021 bp, Homo sapiens
tttcagtttgcgttttctgtaagttagaaaagacgaatggttttaaaagcctaggaaatttgtttcccgggacctcgatggttttacatgctttctgactcccattctccggctctccactcaggtggttgagccattggaaattttgacctgtatttagcattcgtagagggcacttggtaatttttatttttgcaagtattcctgcgagattgacccatattagtggtaagcagttgtctcagtcctttgtatgtttacctgtctctttctcccgggctatagtgtttttcaatttccgactcccagtctgagctgaatgtgaactgtgaaagggtgtgtagcttctaaattggtaaggtttattatactctgaaacggagttgaggaggtacaattcttttcctttaatcctagctgagtgctttcttttctctaaaggacccatttaaacatagatgttacttttcagtctctctttcctttttaccctgaagcccacagttctgattctcatgcttaagaactaagattttctcagactcctcctctgtcttccttcttttcctttctttcccccatccatatggcattacgtccttgttcttgaattgcttctttctgttgtcagagtccttctggaaacattttctatggaatcctctccattcaagctagaattccgggcgagaatttgctttatacaccacactacgtttgcttgctttctcagattcagaagtgctttggttagaaaggaatagttgcccacattttggcctcttctcatggcagatggctgacctttcccctcagagatcattggtacctggactcagagggcagaaggaagtactccagagaaatgcaacttatgcatatactcagatgtatttttttttcttttagtgaagtaataaccaaaaaatcagaatgataatcactgaacaggtttttctggctttctccattttccaccaggtgtataggaaaaggacattggtgtcacgtgactgccttt

SEQ ID NO: 51358 - DNA, 1107 bp, Homo sapiens
cagtgtttattttaccgaagtatagcattgagtagtagttgtatttcccatcattgaatctgttaccttcacactcagatccttgattgctctttggattaaattaaggcatgcgaaagaatcacttgtcatttctaataaagactgggttgaaaacctgattgaggctggcatacctgtgaagtatgagtcatcacttgcctaatttttattctgcattatagtactagagccggcatttcttgttaaacattattacatgcttcacatttctaggtatagagaagttcgtgaattagtatagttatttttattgtgtaggtaacaatttttaccacctatacattggaaggcttattaccagtccctagtggacactgaaatgtcaaagaaatcaagaaatacactcataaaacaagacatggtcccaatcattttgagaaagtttatggtgggtaaaactgaactggacagataattaatgtcatacaacaacaacagtgcccacaggaaagttccatttaaacaataaaacaagccacataatattttcatagtacctcagaacaggaattggttgtgtggcttaagcaaattcaaaggctgtggtattgataaagagatttatattgaaatgtgaagaatttattgtatcatggaaagaaatgagataggatttagttgaaattattagtcatgaaattatgaagaatatagagcctgactttgttatagacagcctataatataaagaagggaacaagtcccatttcacctattactaagcagacttcatctcatgatacgacagagcttcagtacaggttgggggtggtaagcctgggtagaggaaggccaaaatctgtcacttagccaaaacagggtaggtagggttcagagtaaaggagattatgatcaaaataagcccttagtctgattagggctttgcatggttatgttgaaatgagagtagaatatacaaaaatatttctggtgtggagtttattgtacttaagtgcttatttctcaaacccagaaccaagttgacttactatatttgcccagatctctcaatatgaatattaggatataaaagaatcaatttcg

SEQ ID NO: 51359 - DNA, 1001 bp, Homo sapiens
ggccttaaattttttgtagagataggggtctcatgttctccaggctcctctcaaactcgttggttcaagcgatcctcctgacttggccttccaaagtgttgagattataggcgttagtcgctgtgccctgaactgaaagtgaaaaatggaatagttgtgtggttacctagagtatgttttccactgaatgcgtatcacttttggactgttgttaatttgaaaaaatcgtatgttagaccctcttaagttggggaccatctgtgttcatagagttgtgcaaccaggaccatattattagaaatagatttttatatggcagttcttggtgattaattgaatgctgttagataatctttttgtgtaaatttgtacttctgtgaataagaatataactaaactaaaactaaatttgtacttctgtgaataagaatataagatgttttactttgcaatatataattggcttaaggcattaaaaccctgcttttgtttactgtggtctgacataagggagttaacttcagcttaaggttattaaatccttcaatgactgatgactcccttcaagttatgtatgacgaagcaattatgaatatggtgtgaaaatgggatgtaatctctttcaacacattatttggagaaattacgactctccccaagtattgtatattcaaatatgttagacactgaccattttcagcagtttgttagagaattttttatttatagtagaaagtcagagtcagcctttatgtctcagatttggtgagtttctcagtgttaattcccaattggttaataaacgtcaaatggagctttaaggctcctgggcaagtccattcacttatgcagtttcttagatgcctgtttcatacattgtccttttatacttcctccttggcctcatggtgggcttcctacttgcatgagaaaatcagaacagtcttaagagcccttctgcagactcctaccacatcttgccaccttccagggcatcctgt

SEQ ID NO: 51360 - DNA, 1025 bp, Homo sapiens
gcagaggttgcaataagccgagattgcaccactgcattccagcctggtgacagagcgagacaccgtctcaaaaataaataaataaataaataaaaataaaaaataaactaaaattttggccacatctaacaaaaggtacaaaatgaacatgaatacatacttttatgtagcagctcattcatggtttcatcttttagattctcctcctcttctattttttcctttgttccaaggaaaagagaagcaaatattgtataattaaaagtaaaggctttgtagcctgtgtgacccgtgaaactaggtgtgtgacctaaggaaactatccacaaaggtaaatacttaatacttcttagctattattctccaccaaataccctcatctgttcttaaattttattttacattgtctaaatctcagtaagctaccttcagccccctttaaagccatcctttcaaactatctttctctctcgatacaaagatttaatttctgcctagagacaatcagtaaagaaattgtgtaggcgagtgccgtggactgaattgtattgcctcaaaattcctatgttcaagccttagctttccgttccccaagtgctatagtatttggaggtggagcctttggaaggcagttaggtttagatgagatcctgagggtggggctcctcatgatgtgattagtgtccttataagaagaggaagagagaccagagatgaccagtgctcactctgacatgtaaggacacagccccagaaggtggccatttgcaagctaggaagagagccctcattgagaaagtgaatctgctggcaccttgatcttggacttctgagactccgaaactgcaagcgataaatttttgctgtttaagccacccagtctgtggtattctgttatggcggactaatacagagcataaattttatacctgcagaagatgatcagtatgttactacagagactgagctttttgagaacgaaatgaggattatacttctcttggcagaagactttagacctactg

SEQ ID NO: 51361 - DNA, 1052 bp, Homo sapiens
aaccccatcaacgtatcagtaaggctcagtgaattgcctgtgtgtgatgcagactagcttttcattttaactagtgcaactgtgtacagctgttaggtcagaatgcattggctgctcctacagggtagttttatcttacactgaaggttttatggacttgactggttgtgtttcttaatccctctcccatgccaccgtgcttgcttttaagcaagtgatagaacaagacaagcttttgtttacttatttaatagttgacttgtgagagatttatttttgattttgaggaaattggtaaaccatgtaacttattagtaggtattatatttaccatgcttttccaaggccaaagggttttgcttgctattgtgtaggctgagaagccgatggagccatccattttataatgacataggaagccaatattttgtgtaaaaatcaacaatgaaaaatgggttctttgttaactagtctaggattagtttgtaaaactcaagcagaaataaatgttggcatcattggagataaggtggctagaatgtttcccccttgtctcttacctctcgttacattgtacaaaaggacttgagcaacccattgaccaacagcagtttggccatgggctgggtggcacatagaagcttttagacgtgtctgctcaggggcatgtgtggccaacttgatattttatagtgttattgtttcaagttattagaaagtatttatgagtagatttgagtcttttcaggcttttcaggctgtaacatagattgtaatgtgactgacatgggttctcagtggtctggtctctttactgtctgctttcctgttgagtagatactactgtccagagctgttattatctactgcatttatttttatttttattttttttgagttggagtctcactctgtcacccaggctggagtgcaatggcatggtctcggctcactgcagcctccgtctcccgggttcaagtgattctccagcctcagcctcctgagtagctgggactacaagcgtgtgccaccacgcctggctaatttttgta

SEQ ID NO: 51362 - DNA, 1063 bp, Homo sapiens
atctcagttaattaaatcgaacagaaaacatttttttgaggggggagagaaaacactatttaaaaatacatgtatatgtatatatttttatttttttcttctgaaaggaaagtgcttttgaagccgagtataatgcagaagtcgctctttgatcagaaacttcattgctttactgtggaataaacaagtttaaaaataaaatgaatttgatggacttgatttgaggctacttaagtgacaaatgaaattttcttcttggaccgaactactgttattttgccagagtagctaaaatgcggaggtactcttgacgattgttttacgtttaaattgttaaaagaattttttagtgtgggatgctgtcttccttgtttctcctctcttgtttactcaactcttgttttctgaaactgtagggagacctgcttgaccactttttgtttgctgagaaggaaactcctgtaataggttactttgttttacttgcagcccttaagcgtccctggcgcacatgtgccccgcgctctgtgggcattgtttggctggaggcctctcagccacacggaaaatctaaaaaatggtctgtgaatgaacacgggtgtctacagagaaattccattttccctttgtgcctctgtgttttaagattgagacactgagtaaaagttgagaacagatttaacaaagtcctcacaattctgtgccaaaattactgttttgagttctggcttttttttttttttcctctttctggaaactccaaatttaaagtagacatgatttgaaaccttacagatgggaacaatatcccatgtaagcacgttgatctgtgggcaattatttccagaagcacaaccaactctacatttttatgcatgtgttagacttgggctctgagaggcagttgcctttctgaatatttacattgcctagtaaattacacaaggcagatttttagatgcttaacagcagcttcacaatagtgtgggggcagcagagttgagcttgtattttttttttctaactctgtaatttagtagtgtttaaactattttataaagat

SEQ ID NO: 51363 - DNA, 1279 bp, Homo sapiens
ttatgaagctatttgagagttccatgaaacttgcctggaaggggaaaggtgtaatagtgaagataccagaagtaatcatttaaattttcagcttgtacctttctaatttgggttgacactgagtgaacttaatagttagaatttgtattttataggaatacatttaaaaaattcctatacaatgtctttgggaggacaaaatgatcttggctatcaccactagagaatacatgctttaaatgtactttaattttaataaaatttagcaagttgatatatatattttttaccagaattaattgtgggtgggtaagaaattagtttgaaattaacagttggtaatctgttaagattcacataaaaattgaattaatgagggagtttggaatctggtagctggtaggttatatgtttatttaaagccacatggtaaggaatgtgcacttattttgcttccttattagatgaatttcaatcatgcacaatttaagctatgtcttgtctaacagatggatctttatttacttgtggaaaagggattggtgagatttttaaacaaatggcttgcagagaattcttaatgtgtaaggaaaactggggtcagaagtgttctttgacacgaaacaatgctgctttctcccggtgcatctttgaaataaatgtttagcttgtctgtgattgttggttgtttcatctgcatttattagacgtcagaggtggttggcattaatattcctggcagaagcagaggcagctctaggatgtgtgaaatgctgatcactcacagggatgcgctgcctctttaatatcttgcttgcagatgcattttctagctgaccacgctattaagagctgccatcaatcacgcaggctcccagttccggctgtcggaggggagggaggattggagcgggtggaggctggccaagcaacgaaggagataaaattgcagctggcattgtgtgtgcgcgcgcccgcggcggcggccagcaggggtgcgcgcggagcgggctgggctccagcccgggttttgccggccgccgccgtcgcggggagtctgctctttctctcccggcgtctgggtcaccggcatgtggcagtgctggcccggcctcccgggctgaaggagtgcgagctgagtgccgcggccgtgggcagcaggctcgggccagggcggccgcctccctagccgcgggcggggccccgcgcggccaccgcctcccggagccgccaagccgccgggacctgcgcccgcgccgcggtgccctgcggccgctca

SEQ ID NO: 51364 - DNA, 1551 bp, Homo sapiens
tagctaactggtactaatacaatcctggattcagtcactgtttgctggatgacgttggggtgtacttttgacattttgacatgggtgagctaaattacttggtctgaatggttgtactggataatgctataggaaagaatgttgattgtctcaggtaacttgatagttagaattttgacacttattagtgttattaaatgagtgctactgtttaaactttcatgtaaaaatgcagtttccttgctgcctcggtggtcttggaaagtggcccaaagttgccatcttcagaagatatggttatgattcttcctttgctgtgacagagcggagtggtggagagagtccatgcagggtggttgctccaggttaagggtctggaataatgtgggtcctgttcagctattgctaaggttccccttcacatttcccctgtgtgatgtttctggtcatagctttaatgttagtttaactagactttcgatttaattataactgttaggataaagtcagatgtcagctcacttggctgcatgctgaggcctgtagaatatagagtgctttgcttccagccacatctgttgtctcctctcattatctgttaatggtactcaacttgacagggttgttttgataaatgacgggtgttatggaaacggagagctggaatttgtgtggaatggagcttaggacaaaaagaagcaatggtgcagaccaggccagggagataacatgggaaccaaggaatcccttgtggaatgctgacagtcataatgagtattaatttgggagggatgtggtatatctaatatttttcatttatcttacataattattcttcctattactttttcatgtggtcatgtgcaaaacacctgaaaaattatagtttttgttgtaataactttgatttttcctcttcacaaagtaatttacaaactcatactaatgagggttaaaacaaatgtttcactttgaggagtacacccaccattgagttcctaggtggaaagagctctttcgaaggcttccatgtcaggtctgttacttagagaaaaaaacctgaaaataaagtaagttcagtgtaaaagggaggtaagaatgaactcccctcattcacagcagaatttggtagtgcttttgcattctgagaagctttgaagacaaactagtgtacaaagtactttctaagttttatattctgtttatattgctctgtgtgtatacaagatttagtcctctgtccagtttacctgtggctgtttgcatatcccttaagggctgggtaataggaagaacttggcttgaataaactagcgatggcttctatacttcattaactcttaaaaagtgtagcttggaaataggacactagttaggatctctgtgtttttgagtaaccccaggcacaattattttatatcttcataaaatggggataaaaatcctcctttttactagactttttatttttctaaatttttttttagagactgagtcttgttatgttgctggactcaaactcctaggctcaaaggatcctcctgtctcagc

SEQ ID NO: 51365 - DNA, 1075 bp, Homo sapiens
cttttcactgatgtgagatggccgaatgtgataaaaggaggcttgacagggactacttgtatttaggaggagtcatggaaagaaagagagaatcgccagaaaggtaggagatccaagagagtgcctaatccaaaaccaaaccaacaaaaaccagaataagagtatgggaacaggaccaggacccactgctggtaagagtataagttgtacagcttttggatggctgtttgactctctctgaaagagtgtatattcattgaactagggattccttcagtgtagaaatacatgtatgcacaaagaagtttgttgtagcactgtttataagagtaaaaaatgtgaaaaagactcaataaggggcttgttatataataattatgggactcccacactgttcagttctttgcagtaataaacaagaatgggatgttaatggtcttctgtaaagtgagagaagtgacttgctgtataacataaatagtgggatttcatctttgtgacaaaaaatcaacaagtgaaccctcagacaaatgaatacatatgtttttatgtatatgtgcatgcttttgtacctatgttctagagaagagcctggtaaaccttcagcctgttaagtggaattgcttggattttccgtaggaccatatactctaaaaaaaatctacaagggagctgggtgccgtggctcacccgtaatcttagcactttgggaggccgaggtgggtggattgcttgagctcaggagttcatgaccaacgtgggcaacatactgagaccctgtctcaatataagaaaaaaaaaaattaaaaaatctaaaagagcttcaagaattttatatttttcttttttcttttaaaaactctagagttgccgggcacggtggctcacgcctgtaatcccagcactttgggaagccaaggcgggcagatcatgaggtcaggagatcgagaccatcctggctaacacggtgaaacgccgtctctactaaaaaaatacaaaaaaaataaattagctgggtgtggtggcgggcacctgtagttccagctactcgggaggctgaggcagaagaatggcg

SEQ ID NO: 51366 - DNA, 1133 bp, Homo sapiens
tttaggaacttatatgaaagtcctaatgttttctaaggtaaattgactgcttactttctttcatacattgtgcttgctcttgttcttactctcacattctgctttagtaaagaaatggaggacataacagggatactattggtaaaacagatgtttctgacttgaaattgcatgcacttatggtcttgtgtgttaaccactcttaacaactgtgtttactattgaaactggaaatacagactttgattatagtttttccagcttgcctggtactattctcctgtaactggattatttttagttgaaatttttgctccaagccctttccccctacttagttgactcttcaatcaccacttggagtgcacatgtcagcattcccatggacattaaatacacacagtatagacagcacaatggcatcttctatgtgaattattggactcttttgatcacttttaatgctgaaaatgggatctatcctggttaccttccagtcctctgatgaaatttagggaatgtatgtctatctcctttcgaagtttatcctgatagctattggtggtcattgtaaaattatctgtctgaaacttaacagattgcaaatgaaataggaatcttagtatttattttgctactgcctaatgatgcctctgtttgagtcattgaatactttcaaagcataacctttaaggtatgtttctacatcttaatttgccacttggtgcatttagttctaacaaaccagaactaaagcaaattttgtttcatgagaaactgcttgccaagctttaatttaggtcttcttagaggattattaatgaactcgtgaagtgtacataagcactttttattgacaaaacaatggcattaaaattcagtattctcaatcgatgacaaggcgttattgtgtttgagaaatactgaaaactaccactgttgacctaatgattaacttgcaatttagaacatgcttgattttcctttcccttatccatcttattcttactctctttttcaaaaaccattagctgactatggaacataattgtgaataaacaaatgggtaaaatgctaaaaatgattttaaaaattcattaagttttttgaagctggatgatctatttgtactt

SEQ ID NO: 51367 - DNA, 1029 bp, Homo sapiens
acctccgcctcctgggttcaagcagttctcttgcctcagcctcctgagtaactgggattgcaggtgtgcatcaccatgtctggctaatttttgtaattttagtagagacggggttgcaccgtgttggtcaggctggtctcaaactcctgacctcaagtaatccgccctcttcagcctcccaaagtgttgggattacaggcgtgagccactgtgcccggctagatttttaattttaatggagcctggatgtttcatgtacaagtaacgtattttgggatgtgtgcttcttgtctactcttggggttatacaattataagaactcccctacagtggcctatgaggcctaccctgaccttggactcgactcgtccgttgccggcaccctccaccctcagttgtgttctagtcctgccggctcgcttgctctctcttgctcgttcttgttctctctctctctcttgctctctctctgactctgtctgtctgtctctcttctctctccagctggtacctaccctctgcatatgtttaatccttcttgctctacttttttttcttagcacttactgcctttgaatattgtgtgaaatttatagaatacaaaaaaatctgttggttattgtttgtttctccctgcagaatgtaaaccccttgaggtcaggagtgtctttctactttgttcatagatgtattctaagtgcttgtgctgttttttttttttttgagatggagtcttgctgccgccaggctggagtgctgtggcgcgatctcggctcattgcaacctctgcctcctgggttcaagcgattctcctgcctcagcctcctgagtagctggcactacaggcgtgcaccaccatgcccagctaaatttttttttttttgtatttttagtagaggcagggtttcaccatgttggccaggatggtctcgatctcttgaaatcatgatttgcccgcctcagccgccccaaagcatctggcacatattagggcttgtaagttccattaatgagtgagtaaattattc

SEQ ID NO: 51368 - DNA, 1034 bp, Homo sapiens
tgacaaaatgctggaacacacagagactatatagattcatttgatataagagcttcatttaagggaaggaattcaaggctctttcagcttgtgatttctattttggtgtattctgtccccacctaatgatttatacaatgtgatgatggtaattcagagctagaaagtaggttgtttctggtttcagtccttctttttatctgaaatactgaaagagccgaactgtattctgtacaggtagtggttacttttcttctgcttagacttaaaaacacagcctgtttgttagcttttgttggcaccaaatagtacttggacagtatatatttcacagcgacatattttttctacctaacattaagcacttgcttaatttgaagaactgttctgttgagcctgcctaagacaaaatttcagtgtacatagcacagtctgaattaatagaactcaaacttactaggccatgaaaatggcttaatcaacagtgaaccctttaaagaccttgtcaggtagtgttctaatagtgattttagaaaaaaaaacaatgattagtgtttaaagatactctttgttttagagtttgttttcttttttaaagccctcttgagtaacttctggggttgtgcctatgttctgtttagagggaaaaaaattgcatttctatactttatattgaaccacagccattcagtctaattactaatctcttcttggtagaagtcctttcagactgaattgtttattcttccttatctctaacctgagggtatattgttgctgagttgttagattttattcttctttgttgtcattctgcagtttcgattcctacctccccctcccattttggtgatggatggctgatctgatgtttgtgaggcattcaggatttgatagctgtgttaagagagactcagcattcctttctggacaccttctcttttctctgttgaaagttctgaatcgtttgtgctgtcagtagtttttgataggtagagggtcaaagacaactctgttgattaattgaatttcca

SEQ ID NO: 51369 - DNA, 1159 bp, Homo sapiens
ccactgcactccagcctgggctacagagcgagactcctttccccccaccccgcgccctccaaaaaaaagactactaatccactgaaaaaaggtcagttggctgggcccagtggctcatgctgtaatcccagcactttgggagccaaaggcgggtggatcacctgaggtcaggagtttgagaccagcctggccaacatggtgaaaacccgtctctactaagagtacaaaaatgagctgggtgtggtggtgcatggctgtgatcccagctactctggaggctgaggtaggggaattgcttgaactcaggaggtggaggttgcagtgagctgaggtcgtgccactgcactccagcctaggcaatagagggagacttcttctcaataaataaataaataaacgtcagtttacaatattagaatactgaaagcttgagtaattagaagagtcttatgattagaattaattatttcaggctaaaaaatattagaaggagactctagagggcagtataagtcaacatgttcatgcttctcctggcaatggaaagttaaattttgctttggaaaaatataccaggtgttctgaactctttccccaccacacggtgtcccggtttggtagaaatgtgagttttggaaagaagtgctctgatttggcttacaaagattagctaatgtatcagaattatatggccctagggaatatctctgcttggtttacaatactgtcttagaaaaactggaattgcctggccgggcgcgttggctcacgcctgtaaccccagcactttgggaggccgaggcgggtggatcacgaggtcaggagttcgagaccagcctgaccaacatggtgatgaaaccccatctctactaaaaatataaaaattaaccgagcgtggtggcgtgtgcttgtaatcccagctactcaggaggctgaggcagaactgcttgaactcgggaggtggagcttgcagtgagccgaaattacgctgctgcactccagcctgggcgatagagcaagactccgtctcaaaaaaaaaaaaaaaaaaaaaaaaagaaaagaaaaaaggaaaactggaattcccttattgactcaactaaattgagttgagtttgcttttcagacatttgtggagcattaagtgaaaggaatatatctt

SEQ ID NO: 51370 - DNA, 1041 bp, Homo sapiens
tctgggtatggagcatagcatcttagttttagtttcttttttgagggatgctttttggtgttatggtataccacaggtgcctagagaaaattccgttttaggtgctgtcctttgaggaaatactgctgatctcaaataactgtgggtaattgaaatatcataccttttaatggtgactactaatcccctaaaaagaatatagactttttcgctctaaacatggtttcaatagggtttttttttttttgatggtctcttatgactctagattgaaacaaacaagaaaataaccctacttctatagttactataacagctgaggcaagctatactaccagtggtgcatggtaaagcctgccttttaataagttcttaaatataaagaatgatagaaagtttcaagttatggtgtgttataggtgcctatggagttattaggttagaggaatgattttaatttacttggattccttagcacattgcttattgcatgcgtgctcagtaaaagtggatactggtgtttgtgctttgcagctaccgcaggtcttggttgtcatggcttctcattagtgcattaagatccctttagagctctggttgcctggcaagagaaaaggcaggaactgccaggagctgaaaggacagatgcttagctgcagaagtagcctctggggagcgttggctgcgttggctgaggttcgtgtgcatgtggtcaaatgtgtgaacttgggttttgctagacaaaactctgggctacatggattaattaatatatgctacaagtggtctttgttttagaagtctttgcagtttgagctatttaaaactttttttaaataagcaaattagaagattctgtttggggtgcattcctgtcctttggggaagtactgctgacctttaagaatagtgggtaattggccgggctcagtggctcacacctgtaatcccagcactttgagaggccgaggctggcggatcacgaggttaagagatcaagaccatcctggccaacatggtgaaacaccgtctctaccaaaa

SEQ ID NO: 51371 - DNA, 1895 bp, Homo sapiens
caagtaaaacagtacctgacacacagcttaccgagatcttgataaatgttagccattattaccatcatcactgtcccccatgcctatgaaataccagaatagagacccacttatttaattagctcctctttttaaaatatgtatgttctgatacctcattatgaacacttaagacctatttgggccttctaggaatggcagttttgattggataagaaaagagtaatttaggaaggtgggactaggtctgatgaggtccttgaaatgcttaaagtccacacctttggggctgggaagaaagacaaaaggagaaattgagcaatcaccaggtttttcgtacttggcgatattaatgagaatcttgaagttgggatgctgccaaaaattgcttggtaagttgctggtgctggaattaatgcatgcatactgatgaagaaagctcttgacacttttggctctgtttccatgatctgtaggtttcctaaccatatacttgcgttggagcacaaagcttgtgtttggaactgaagagagtatctgataatagtatggagaatggatggaaggggagggttatgcaagatacagcaacgtaacctgtgagcctattgtggtaactgagtttagagatgggaagctctgaactaagatagtgatggtgtgagagtgaatgacagagggcatctggcgtggggctgagagaagagtctaagataattcccacgtttctgactgaagtgattgtggatgagttagaatcccacgtttgagtctcagctccactatttaccagcataataacttctggcaagttactgcatttttctgagcttagtttcgttatctgtaaaatggtagaggtaaataagggtgtttctctcccagaattgtcttgaactttagacgaaattatgtgtagttgtatacaactacttaagtaatatagaaagttatggccgggcgtggtggctcacgcttgtaatcccagcactttgggaggctgaggtgggcggatcacttgaggtcaggagttcgagaccaggctagccaacatggtgaaaccccatctctactaaaataaatacaaaaattagctgggtgtggtggcatgcacctgtaatcctagctactcgggaggctgaggcaggagaattacttgaacccgggaggcggagttctcggcagtgagctgagattgtgccattgtactccagcgcgggcgacagagcaaagctctgtctcaaatatacctactctcttattatctttagtaacaactaggctaggaaataatattaatgagataatgagattagagagtaaaggaggattaggttttgggggtaaaatgtgtatgggatatttagttagagaattccagttcaccgtttgcatatgggctttgagtttaggaagatagttctgtaactagataaggtaatatttagagtgtcttaaatatagtagatactcagtaaatcaagtatgaatatcatgtgttgatttatctgtctttccaaagttgtaattggtagcaaaaaaaattagggtgtttaaaaaaaaaaattggacaaaactttctttgagccttcatcacctctggcctggttaccctagcaggttcttaacaggtcttgttctccctgcccacctcccacttccatgcccacccccatgccatttgttttcacaacacagcaagcctaaggatccttttaaaagttaagtcagggctgggcgcggtggctcatgcctgtaatcccagcactttgggaggccgaggtggtcagatcacgaggtcaggagatcgagaccatccaggttaacatggtgaaaccctgtctctactaaaaatacaaaaaattagctgggtgtggtggtgggcccctgtagtc

SEQ ID NO: 51372 - DNA, 1371 bp, Homo sapiens
caggtacacagaagttgccagcttttcttgccatccttgccattcgaatttcagttctgtacatctgcctatattccttgtgatagtgctttgctttttcataaataagcttcttccttgcctttcaaagcatgttttgggcagacttctttctcaggagcttgatcttcagctctgtgaaattcctttgctttttcttaagggtttctggcacagcaggaaccaccttcttctcttcaacaccctccatggttccagccggaaaaagaggctactggtttttaaaagactactgggtttgtgacactcacagatgttgaatgaggcagaatggtttctacatgtagcactttaccacccaagtcttagccctcatcttccgttaccttgatattgaagcattcatttattgaacacattgactactgactacgtgccaggcatggttctagaagtaacagtctcctaattcctctccagtcttccactttcatcactctataatccattctttttttttttttttttttgagacagaggcttgttctgtcacccaggctggagtacagtggcataatcttggctcactgtaacctcggcctctgcattcaagcgattctcatgtcttagcctcccgggtagctgagattacaggtgcccgccaccacgcctggttaatttttgtatttttagtagagatgaggtttcgctgtgtgggccagcttggtctcgaactcttggcctcaagttacccactcgccttggcctcccaaagtgctggaattactggtgtgagccactgcgcctggcctgtagttcattctttacacagagttggaggagtggaattgctttttcagaaacatagatcacctcgttctcttccttaaaaccctccagattctcattctgctgggagtaaaatacagattttttttcctccatggctgtgtgccagcatagttgatacttctgagtctctgatataactctgaccactctccacttgctcccttagcatcagtcacaatggcctcctgtcctttctgttgttttaggaactaacaaactaactcttacctaggtgtattgcattcatcataattgcctcagtgcggttccatcaggtttttttctttgcttcatcttataatttagatcgcatttcaatattattccttagggaggccctccctggcttccagtctaaagtagcgcattactctacatcaccttatccttttttttttttccagagcaaaattgtgttgttttcatttttacttatgtattttttggtgcctttcttgtgagttccataaaagcattatctacaattaaattcccagtggcaggaataattctcagaat

SEQ ID NO: 51373 - DNA, 1863 bp, Homo sapiens
ccttcctcatttaggcctattaaaataacatgctatacatttctttctaatagctcaggacagattattattattgttttaaaacaatacacaatttaataatgtctaatcaaaagtttctttaaatagaactttgattaaaatatttctggaaaatttttctttgtaatgtaatatctatgaaaacaaaatttaaaaattatgaaatggtttaaagtttggcacttcaaattatttccaacacaaactgtctctggtaagtttcctttaatttcttttgatcatatcagtttcctacaaaggcaatagcttcatttcttgaaacatctgctgtagcataggaaaagaaactcacaaggttttaagaaaccttgtttttatctacagccttacgatgagtacaagttacgttatctctcagtttgtcagtgttcttacttttaaaatatgtccctcaatgagataaagattaagatgaaacttaaacatgaacttttctgaattaccacttcactattgtttatcattttgatagtctcttctctgaacctgaatttctcttgtaaggattataggaataatgtagtttaatgccttccgtatctcttataactactagatgatactgggagtattttttttctttttttaaatgaaaatgttcctgagctatgctttagtacaagaatatgaaactgcaaaggaagtgtttcttttatgatgaaggattagaaataaaaagcaaagtcaaaattcatcatcgtatgatcgccttctgggtgatagtgaatttttttttttccatttgaagagtagcagcatgtggtgtataagaacacagacacgcaaggcaaatcctgtccctaccacttcactggcaagttacttagcctctgtgtctttttgctgtctgtaaaatggggataataatagtggcccttgaatggccgttatgaaggttaaatgggttattctagattagtgcctgccacataaagagctgtgttaagttttaactattattatattgaattgatcttttttttttttttttgcaatcttaaaacagttatttggggacagttcccgtactacagtcaagtgctgaaaattctattatgacttcttagaatcaagtctttttccatatttactttgttgttgttgtttctttggtgccttgcatatataactagatgataatgtaagttcttttttttttttttttaaagtgaaagggattctgagctaaaggtttggtataattataaagaacataaaactgcaaaggaagggcttctctgaggacgtctgtatgaagttaacactgggtctctgtttagcctccgagttgctataggaataagcgcagtattttggacttttcagaataataagccatgcatgttctgcatgtgctttcacctgtcagtgcagagaggatcatcagagcaaaactaactgggtagcataagtttgacttcggtgtagtttagtcactctggaagaaatggaatttgctcccttccacccttctcttaaattcttccatcagagaggttttcccataggtgccaggtattaaaaacatgattcttataagaatattgcctttgttactatagattgctatttatttggagatattagactcatagagtgtagtaaggagcaaatgagagactagatgcaaagtgcttggcataatccctggcatgtcctaagtgttttttccagtagcagggctggcagaggtagggttggtggatgtttgtaaatgggggctgcttgaataagtatgtttcagagttattgagagattgtcatgatgggcaacagaacactacctgttttgggaagtgt

SEQ ID NO: 51374 - DNA, 1053 bp, Homo sapiens
tgactgtatttagcttcatattaaattaagcatagccagtggcctacaaagtccatctgtactgctgccaaaggtagcactgaagacagtcagccgccttttatgtctgttaccactgctagctgctgtttccctcttgccatggtatttaagctttggaattgctcatgcaaaggtgagcctttgtattgaattggaatttgtattctgtaaatcgactgtactgaatgacaaggcttgcctttcagtagatagtctattcttatttttgcttacctataaaccagtggaaataaatacataagattagttaggggtttattgaggcttgaattctagaaagaggggaattactatattatacacaagtgccagttaaacatgtaccaatctgaagaagatctttctatacctgctactaatcatggaaaacaattaacttactggtttttgttatataaatacatattaagatctgaaaatctcagcagttagttttatttataatcagaaagacagatgttaacagtcactgaaaatctttatgttttaaatgaacgcaccttcacttttacttgacttctacttcatcagcataattggagaaccatagattctttccccatgagtgagggcaaaacatacatctgcagtgttcttagcatgaggatcattaagatggcagaccttgtagatcaaacaatttcctcccatacaccctcattctttcctagaaaagcattgagacagctctgaaattagacctggaaagcatgtgctaaggcaagaacaaatatcttgaaaattttatcataatgttgctttttaaagtcctaaatgtcctctaaaatgaaattcttttgtattaaccttctttcatatgctggctttcaccagactgcagaattgcctgatttgactttctaatgtaactgtaatgaatcttctgggaagctgaaacgattgaacacacatactctgcaactccattgtaaaatattcagtcagtactgtcgatgctgctgattaaaaaaggagaaaaaaaaaaaaagg

SEQ ID NO: 51375 - DNA, 1141 bp, Homo sapiens
agagttgtgttttaggatagctatttctagtatgtcatgaaaggaagagagtgaagactgggtggaaagtaatgagaatctaacctttcttttttcttttccttttttttgagacagagtttcactcttgttgcccagtctggagtgcaatggcgtgatcttggctcactgcaacctccgcctcttgggtttaagtgagtctcctgcctcagccttccgagtagctgggattacaggcatgcaccaccacgcccgactatttttttgtatttttagtagagacgggggagtttctccatgttggtcaggctggtcttgaactcctgaccttaggtgatctgcctgcctcgacctcccaaaatgctgggattacaggcatgagccaccatgcccggccgagaatctaacctttctaactgtaggggaaatgaagaggtatgacagatgggagacgttgtagaggtagaattagttggatttggcaactgttagaacaaggcatatagtcttacatgtgggggaggtgtgaagcataggtaatttgcattacacctgtgccattaaaaaattgggaacacaggaggacaaactgatttgaggaagaagatgctaataaatacagctttttattgagatgagtgatttttgtcattaggcagatggaaatatttaatatcttgagaagtcatcaaggttaagatggagatactgagaatggggtagttgaagccccgaggtggaataaaattgccaaaggatttagtgtcagatgtatcttttccaagtttgtcacattgcaaaacctgaaaatcctccagttttaggacaggattgctctggtgttgtttaaagaactcagattcttcctttgagtttttatttctctttgaggttctttcattttgattctcattttggtaagacggtaaagcataatggttccgagtctgagcttgagaacagaaggattgggtttgaatccttgttctgccacctctctgtcctgtaatcctgttagagttatggaacgtctttgtgcctccatttccttgtctatataatggagctgataatagctaaatgatagggttgtttatacattagtgggataatgtatgaaaataatttagcctggcacatg

SEQ ID NO: 51376 - DNA, 1704 bp, Homo sapiens
cggaggttggggtgagccgagatcgcgccattgcactccagcctgggcaacaagagcgaaactctgtagcaaaaaaaaaaaaaaaaaaaaaaatagtttgccaaaatgaaggagataatattaaattcctacaagcagtgagtataaaccagagaaagtagaagtgaaatctgaaagatgctgaaatgaagaaaactgaggaccaaagaaagacaggtacagttgaggctggagaacaaatgcatctcgaatattcaggattgctagtgattatggctagagaatgggatgcctcgaatgaatggctttagaggtagagcaagtttggctgcgtgtgtggattcgtggagagaggacacctaggaacaaggtacctggttagatgagtacatttttgttgccatcaccctggattatgataggatcctgttgagaaggaaggctatgagctgatgtcaaagacttgagtaaatgagtgggaaagatcattagagatcattctgttaaaattctatggcagttcttttgtgacatttccccttctcattgtctttgactgtcattgatgtcaaatgtatgtacagcattgtaacttactttagatgtaacttttttctgagatggagtctcgctctgtcgcccaggctggagtgcagtggcgcgatctcagctccctgcagtctctgcctcccaggttcaagcgattctcctgcctcagcctcccaagtagctggtattatagatgcgcaccaccacgcccggctaatttttgtgtttttagtagagacagggtttcaccgtgttggtcaggctggtctcgaactcctcaccttgtgattcgcccaccctggcctcccaaagtgctgggattacaggcgtgagctaccgtgcccagctaatttttgtatttttttacatggggttttgccatgttgtgcaggctggtcttgaacttcagagctcaagtgattggcgcaccttggcctcccaaagcactgggatttcaggtgtgagccaccgtacccggccagcaaccttctttcagcatctgctttctttggttgagagttgttatgaagacatatcatctggttatgatttaatataatttcatattattgctatagcatttcaaagcatgaaatatttcttgaacatctctatttagacagatgttttgacttttagatctttaagttaagatgacaaataatagtaacatttttggaccttaaaattctcaaaaactttctttggtaattcaatcaacaaaattctttttcttttaagtttagttgatattgtattaaaggtacagaccagatattcacttatttttttatttttattttttaaagaagtaaatttcttagttgcccaggctggaatacaatggcatgatctctgttcactgcaaccttcacctcctgggttcaagcgattcttgcgcctcagcttcccaagtagctgggattacatgcatgtgccaccaagcctggctaatttttgtacttttagtagatggggtttcactatgttggccaggctggccttgaactcctggcctcaagtgatccacctgcctcagccttccaaagtgctgggattacaggcatgagccactgtgcccagcccataaatttctttttcttttctttttttgagaccgagtcttgctctgttgcccaggctggagtgcagtgg

SEQ ID NO: 51377 - DNA, 1010 bp, Homo sapiens
cctatgttgcccaggctggtctcaaccctctgggctcaagtgattcttctaccttggcctcccagagtgctgcgattacagacatgagctaccgcgcctggcctcatggttctttaattgtggatgctaataaagtttgtgagtgtggggcagagaagtgaggtgtaggtaggtgttgaagggcaagtggtgcttgggaattctttgagattttcagttggaagattctctgaaagaggaagcattgtcctcatggattgctctcagatgacataaaatagatatagtaagattacaatagtttttattctaaggacttgagaatagcttcttttcctccagcagagaggtaagcatcctgttccattgtgtgatagttgttggctgacacacagatctactttttctatttccagcgggtgaaatcacttcctctccacctgtactttattttctggtccttttgacagtagggcttgatattttggtataccctggatggcattgttctcttgactcagatgacctaaattacttgctgtttattgtaaagtggttcaaggatgctttgaggtcctagagttaaaaatggatgattctgagtcagtgtggcttgaagagcatgtcactgaggatctcctagtccactgggatgcagcatttgatctgctccaggttgcatcccctttttctctgctgtttgtgttagtctttgctttctgaggtaactcaggcatgtactcgctgtaatgtctacccaaagccagtctcattaagaccagccaaggccaggaaatggggaggaaataatacatacgagggtgctggagcccaaataggttgtcctttaccccaaggtacaggtcaaattagtgacagagttggcattagaacccagtcttcttaatgcctaagttagtgacttagtcattttttttgagacagaatcttgccacctgagtagctgggattacaggtgcacaacaccatgcctgactaatttttgtatt

SEQ ID NO: 51378 - DNA, 1390 bp, Homo sapiens
ggtggctgctggcaatctttggtggcagtccccaggaactggggattaggacttggacatatctttctggggaccacccattcagtctacgatgtctgttgtgacttctgaggtagatgttcaccggtaaggggctgggggaatgtaaaggtgcttcttggggccttttcaggactttggcttaaattgaaatggggaaggcactggatggttttgagcaaagaagtgacatgatgtgatttgcattttctcttctttttttaaaaaatttaatttctgtttagtagagacagctctccttaggttgcccatgctggtctcaaactcctgagttcaaacagtcctcccacttcggcctcccatagtgcattatttgcattttaaaaggacagaagactcctttgtggacagcagactgggacaacaggctagaaataatgagataggtgggaggctatcatgataataattcatgtgagaaatggtggtgcttcatccatttgctagtagacttgtgaaaagtatatgacttctggatgtattttgaagatagagcgacagtattttctgatgagtttttaaatttttttagtcagaatctcactctgttgcccaggctgcagtgcagtggtgtgaacacggctcactgcagccttgacctccctggctcaggtgatccttctacctcagcctcccaagtagatgggaatataggcatgtgccaccatgctcagctaattttaaaaactttctgtagaaatggggtctcactatgttgcccaggctggtcttgaactcctgggctcacatgatcctcttgtctcgccctccccaagtgttggaattataggcatgaaccaccatgcctggtctctgatgaatttcactgtagggtaggggttgaaagaaaggagtcaaggatgattccaaggtttgggactgtgcagctcaaaggatggggttgtcaggagctgacatgggaaggctgtgtttagagcagattatttgtttgttttttaagatggagtctcactgtgtctcccaggctggagtgtagtggcgcagtcttggctcacttcaccctccacctcccgggttcaagtgattctcctgcctcggcctcctgagtagctgagactacaggtgcctgctaccacatccagctaatttttgtgtttttagtagagacaggatttcaccattttggccaggctggtctcgaattcctgacctcaagtgatctgcccacctcggcctcccaaagtgctgggattacaggtgtgagccaccgcgcctggcctcttgagcttactttggacacaccaaggttaaagtagtattagatactcaagtggagatgccaagtagacagttttaagatggtgtaaga

SEQ ID NO: 51379 - DNA, 1045 bp, Homo sapiens
ttcctctgttggagaatggaaccaggaaaggtaaggactaggacttggttgcattgtgaatccacttgctgatggaacaagaaagatggaacagcagatgtgcatattttcctctgtaatggtcattgatttaatataaaagatatgtctgaagaatgtatgcttggataagtaatatgctgaattctggtgtttggtgtgattgtattagcctagacctgtttagtagtaactttgaaatatgttgcagcaataataaggaatgtagtgggtgcctttctgctgttatcaaaatccattaacaggttttcctatgcttgactgcctttcattgttacgctttatggttcatactgagggggcatgtaaatgacatctcttctatggtttctcaaggtctttaaaacagtgttgtattttgagtaaatatctgtttattccatagtaaggatagatgctagacaggttatgatttgctttggttctactcccctactttggataggattttacctaggtggagcattggatcatgttcttgagctgtgtggaactttgatttgcttatgtgaatgcttcacactgctggccaccctttgttgcttaagcagtagagacataagctcatcctgggtacaccttttagtgtgcaaggttctgtgaaaagtgggtgaaggtgcttctcaagccattaaattgtagtggactgtctttttttctttagcaaaatttggttttgggagtatgaaatttaaacttgtgtctgccatttgtaagatacgaagtcatagtatgagtgtttttggggttttgtttgctttttttagagttggggtcttttaggatagaattcccttttccttaaccacttaaagcttgagaacaaagatttggaaaccttttttgggtagcagatcacttcattaatctgataaaaactgtgaattctgtttccagaaaaagacatatacatatacacgttcgttcaacagatttattcagcgtgtgtttattgaacagctactatctgccaggcatagtttat

SEQ ID NO: 51380 - DNA, 1419 bp, Homo sapiens
tgtttttcctcatgtttaattttttttgggggggtgtcctttaactatctcgcgtttcagtacatatgccatttcctgtcccaaaggagcacataagtctagtcctaatcttggtgcttgaacccgcagttccagagaaaagcaactggcactgaatgctctctggctcatctttccatccaggatctgtcagctagccaacaggtgtgggaggtgtgttttccaagtttaatgttgctgttagtgggatacaaaagaaataaaagttactatctttggcctcagaatttaggagggaagccttgcaagaatacaacatttagagatttctagaacaaaagcggaatttaaccaagtacttactgtttagcataacaaatttagttcagtttcaggttagagattggtgtggattaaataagttgaccaaagatccattgaaaagctgagtgggccatcgaagaatgggtgctgtttgaatagcagactgggagagcaggttaggacagtccaggcaggggtcggcctgaggcaggaatgcatatggtatgcgcagcgttcagtaaagagaacctggttgaagtacagaatttgtggggaggaatagtgccagataagttaggtagaccaaagaagacaggcttggaatgctaggcacggagtgtctgttggcacctgaagggaattggggcgaggtaataaggtagcacgtcagccagagactggagagtacatctctgtctgagtaattttggccccaaatttgtaatgtggggatgggaagtgtattggtcagtcctgataaagagttatgtgtgcatctgtgtgacgtgttaaaattgcttcctgccactgctcgtgtttggtcagatagtaggttaggctgaaggaaagagaggtagtagccacaggacagataagctttgagaagccagagtggttggtaaagtatttggctttcatttagtatctctcatatatatatatatatatatatattttttttttttttttttttggtagagaggaggtcttgctgtgttgcccaggctggtttcgaactcctgggatcaagcaaccctcccccatcggcttccccaaatgctgggattacaggtgtgagccactgtgcccagcctagtatcatattttatacaagataaattttaccaaaaattctaccatcaaatatagaagttactttagttttttaaaaaataatagttcacatattctgtttcatgtcttctcttgcctctcaccctgagcacccactgattcatacctgtttatctccccctcctttgcttcttagctcctgtttattcttcaggtctgagttttgggatcatttcatttggaaagcctcagggctgtgcccagggtgctctgcctggcccctgtactcccccgagccat

SEQ ID NO: 51381 - DNA, 1001 bp, Homo sapiens
gttggccaggctggtctggactcctggcctcaagtgatccacctgtcttggcctcccaaagtgctgggatgacaggtgttatagtacctgccctcaaattgtttattccagtctaatcatcaaggaaataagatctgaagagtcaaagagtaacttgtaattagaacagttaatatgggtcctttctttccgccctctgaacggtcctgactcagagttatctggttaagtgcctcttctcatgagaagttaatataatttaggttttctcacttttggtttggttatttggcatagtttcttcctgtaggaagcggccatatttttaccacttcttaggagaatacaggtgctgacaaattccttgcatccccaagtccattttgcttgggtcttaacctctttgcagttttctgggatgctgattgccagccttgttgttgtgggactggctttgaaatccaagacatcttttgaggatatcaaagtactgtaaaggatggaaatgttaaggttgcaaaatgcttggagagtatcacatgctgttgataggcttattgtagtgatttctgagccttagaaatttaggcctttgatacagctgtcatgaaggtgagcctcagccccatctgtgaatttctccagaatcattcagtttaggctcccagtatcaaaatagagccttctttctttctttctttcttttttttttttttttttttggagatggagtctcattctgtctcccaggctggagtgcagtggcgcgatctcagctcactgcaacctctgcctcctgggttctagcaattctcctgcctcggcctccaaagtagctgagattacaggcgcccgccaccatgcccagctaatttttgtatttgtagtagaaacggggtttcaccgtgttggccaggctggtctcgaactcctgacctcaagtgatccgcccacctcggcctcccaaagtgctgggattacaagcgtgagccactgcaccc

SEQ ID NO: 51382 - DNA, 1073 bp, Homo sapiens
ctgatctcaggtgatccacctgtctcggcctcccaaagtgctaggattacaggcgtgagccactgcatccggcctaagttttaaattttttatagaaatggggtcttgctatgtttcccaggttggtttcaaactcctggcctcaatcgatcctcccaccttggccttccaaagtgttgggattacaggaatgagccactgcgcctggcctagtcatttattttaaaattgagtgccaaccattgtcatattatttgtagtaaatgcctattaggctgaacttgaagttctctctttcttcattcagcatagtaggccccaaatttgaaatgagaaagtacaacttttcctgttacttttccagttagaggcttctcttactagagactgcagtcaggtacttggattctgaaatggagttaatgtgacaactgctttggaatctcagtgctttggtactggatttaaagtaacttacagttgaaactgatttccaactgcaagaggtgacacaaaccctgacttttttggaaaatgttttaaatataaaacctgaagtgaaaaaggcttctaaggtaaaaaagattttaaaatatggtaagtgctttaaattagtaagtcggttttttaggtgggtgattcaactgctttctagttagtctggtcattttttattccagagatttcttaatatgtctactaaagcatatgtgtgtttacgctaagatgactaaattgcttcaccttaagaacaataatgatctggcgtgtatctttcttttgtgattcatgctgattttttttttttttaggcggagtcttactctgtcacctaggctggtgtgcagtggtgtgatcttagctcactgcagcctccgcctcctgggttcaagtaattcttctgtcacacagttatttttaaagcataccagtaatttgtttgactgatttgttttcaattaaaacaacttttaatttttttctagggtctccctgtgttgcccaggctggtcttgaactcctggcctcaagtgatcctcctgcctcaggctcccaaagtgctgggatgacag

SEQ ID NO: 51383 - DNA, 1135 bp, Homo sapiens
aacttataaattctttttgtcaacttagttccaatgtcctgaatgtgttaagaagttgcagtgtccaaggacttcttagaacccatagttattgccttttcaggaggcataccagggccctgggcagctggatggagagggaaggatcttacctttcgtacttttcttacatagcgtttgttgcaggtaaacaagacctaattcaaatgaatgcatactaaaagcctgtttttttttaacttttagattcttgcccctttctttttattatatgctttagtgaaatacaagtttaattaatgtagcaaaatagggcatacaaaatgaccaagacagagattgtgcccatgatgattttctcattaatgggaaagatgagacatgtacacaactgagtactaggtagaagaaagtgcctcaaaaggtgttgatactgtggtttaagaaagagaatcagctctggatgggggcattagggaagatttggtgtaggagttggtgtgtcacctgtgttttgaaggattggcaggatttggacatgtgataagtagctaagaggatttgaggcaggaaattgcatgaagcaaaggcacagagcctggaaaacttgggaaatggtgagtacttttgctgcttctatgatggggattattaaattgtgtttcaattttctttttaaaaaagatctcttttaaaatgttttatagcagatgcaggcaggcgtagttttttcaactcaggtaatttgtatttgaagctgtagcgggtagctgttcagaccacatagtaagagcattttggagagggagtccttgggactggtttctcaaagaaggaacagactggtttggccagaaccatagagcactggaaagataggttgggatcatagcataggctgatttaacaccagggttaaatgactttatttgatagcttcatgtgttcaaatgaaatacaaattataattataaaattaatatatactcattgtaatcactttcacacaattcagtattcctccagacattttctctgcatatataagcatactatagatagtatcttgaatttaaaaaaattccaaacatatttttcaattcaatacttataactcaggtttgtttttgaaaac

SEQ ID NO: 51384 - DNA, 1092 bp, Homo sapiens
gtcacccaggctggagtgcgatggcacgatctcggctcactgcaactttgcttcccaggttcaagcgattttcctgcctcagtctcccgagtagctgggattacagacatgtgccaccacacctggctaatttttgtatttttagaagagacagggttttaccatgttggccaggctggtcttgaactcctaacctcaagtgatccacctgccttggcttcctaaagggccgggattacaggcgtgagccactgcacacggcatatttttaactggtaaaatttgccagtatgtcagcaagtgtgagcaatatatttaactgtgaaaattttccttatatggttagttataaaatgatgtggcctctaattcataaaccactcggtatttgaggaatcctcataccctatttgtcttgggtatttgcatcagaagtcgaagccatgggttttatcttaattttaaagtagttatatacatgacttttaaggactttggttaggctgtttttcattgcaaggaacagaaagtcttccgagtcatctcaagttggggaaaagtagaacagaaatttaagccgtacgagccaggcctcacctaagaacaaaaaccccaggtctgcagtgcctcatacatactggaatactgtcagggatatgggtcccacccagctttagcgaccagataccttgttgcctcctcagcaggaggagtttgtggcgccttaccctagtgccatggccctgtatatgaatgtccaggctgtgtgttgcaataaatataccaccccaaaggggacaatattaatgtggttggcctggactaaccttaaaagagagcttgtgaggaagcatggctgtgcagcatcttcagacagtcctgcagcagcagggcagagctcctcctacaaaaacccattctagctcacgcagccatgcacacacttagcagagcatgcacggacacattcattggcacctgtatatgttccctaggctcccagaagtctgattcttttttgagagagggtctcgctctgttgttcaggctggagtgcagtggcatgagcatagctcactgcagccttgaact

SEQ ID NO: 51385 - DNA, 4352 bp, Homo sapiens
gagcctaggttcaagtcgcaggaaaggtcacggcagggaagccccctcagcccctccgcgtcgcctccccgcgggccgcccctctcggccctgcgccccgcggccccgcagcctccgcgcggcctcccgccccatccccgccactttccccggagctgggccgcgaacacctcactattgatggtgtagcgctttaggggaaggtaagtgtccaacttgcccgcgccgggtcgtgtgctttcttttttggcccctcgtcctggtggtcagagagggtcggccgtgaaagcagtcactcgcccggggggaggcaggaagaaaaggctggggtcgaagccgaagtcgaggggagtcgggcgagggcagggcacttctttggtcctgtccgggccaggtgaccgttcctgcgtgccttctgacccctgctctctcttggcctcttattcatgctcttgttctacttgtttgaggttaaactatttcatgtgactacattattggctgaaactggaagggaaggaagtcaaggactgaaactgtaaatttcttgaatgtttgtggatttcggggtgctggggggaggactttattattaaagtatcattttctcattgggggaagatttcctctttgtgctcccaatctctagttctcagctgtatgtgattagaaaattatgaaacccaaagtcacttgcagcagaatagaattcttactatcctgttttagttctgctctctgaaggagggtggcttctatttattactaatttttaagatgatggaaagattcgtagttttacatacacgtgtgtatgtgtgtctgctaggaggggggaaaagtgttgcaggcttcctttgaaactggttgcttgagaagttgttgaaaggaaaacagaatgattcattgttgaattgtcattttcctctgtctcttttccaaggtttgcttacaatttttctggattacagacttcaaacattgatttaagtaaaatgggtccttgagaaactgggtgctttaaatgtttcagtatctgttgcttttttaaggtacatttagaaagtagttttgtatgaatcgtgaaatagccttcttcacagcgaatttttaaacgcaaaaaaagataactagtaagagggtgaacttggtgaattacaaaatagacattttaatatagcaggaattgatgcatctaagatttgaaacagttttcataattgctttccatttaaagagagacctttttgtctagtgtacactggtctttttagtctcagtctgttgggggaggggagagaagctggatctgtacaataataaaatcatctttgggttgatattttgttccatggatttgcttgctgagttaatactactgtaaattatcaaccagttttgattttgatggcctgggatgggtggaaagctggcttccagctctccctgttgttgttgaggtcgaagggaaaagaggcagaggcagacagacacacatatacacacacacacacacacatacacacacacacaataccaagctgagggctcattgttcttccatacacacattcattctctctctcccatatttgggactaggtttgcacagacaaacacagctctttttgggagagaagagagaagatgggggaagggagggtgcttttctgttacagctttcttccacccatctcatgcctggccgtttttgcaaccttgtgaggcagaagagtgcattggaaactaaaggacactcaaaaacatgttcagagacttctcttctctctgcctccctttattccttttgcagccgtggtttctgctgctctttcttttttgtatatgtaaagataaaatccctctttatatgttgtggccttacgttcagctctcattgcttttgtatttctcattgaccctgattttgttggggacagtgatttgttcacttgagtcttagtagtgaatgtgagcagagtctttctagatagaaatagattttattgattaatattataaaggttgtattgaggttaatatttagcaagatgatgtttgcatgtttttagtggtgtgatggtttgatggtcaggtttgctggcaattgagctgtcaatgttgtttttgtaaataagggttataagaaaagatctggttttctgtttagggggctcctttgaatactggacagggaataggctagtccacctgggataaacccagctgtggcccaaggatggaggttggtgtgaatacatgtgggttgcagaatagcaccttctactggttaattgtttggaaagatccagacgaagaggatgggggaggggattaatggctgaggcttaatgattttcttttaagcgcagttgttgtgcctttctgcaaatgccacttccccgagctgctaatacagatgtcctttgacaggcacggttgcattgaggcattattatgttactggttgtgcttcgacattaatttgttctgttaccagaagtatttacactttgtgacttcccaggactcctttgaatgataccttctcatcttttatgagataatttctcttgaaatattaaaccagagggtttatttctgttcccagtattggaaactatatacaccagcagtcttttaaaaaagtttttagtatcattaataaaaaatcaaataaacctactctatggaaagtaaaattgtagcactggacagaggtttttcttgggatttaaaccaggtagaggggtagaggaggagttgaaggagggaaatctcactaaaatcggcaattttgcaaatgtagtggccttgcattgcagtagtgttgttttcagtagtcttataaagtctgatagggtgacttattgtatggattagataaagaatttaaaattggaagccagagaaaatgtgaaatgagtgtgtacacaaattatcatagaagagggtcaaattgttgcccaaaggcttgtaaactaaggtgcagtttcagagataatctgcttaataaatgtctcaaaggatttttattttcacaaatcctggcccatctcagttgttctaatgtaatgaactattagagaggtttgcagtggtaaaggggactgggtgtgtaggataaacatctgttccagactgactgcttctaggaatgtgacttctgattcactttactttcaaaacttcaagagtaatctctaaagttgtgtatcttttacaatgaaatgtgaacagttcaaatgtattattttctcagtgggaatggattcaggggatttcagttcaatatattctccatcagtgttttgtcacaaggaaactagaactgagaaccaattcacaacaaaaaggtaatccaaatcaagaaataaaatgtaccagttaccttttcaactttgatttactggtcagtcgaaaaagcttttaaaaaataggacagtaaggcctagtgcggtggctcacgcctgtaatcccagcactttgggaggccaaggcgagtggaccacttgaggtcaggagttcgagaccagcctggccaacatggtgaaacctcgtctctactaaaaatacaaaaattagcctggcactttggcgcgtggctgtaatcccagctacttggggggctgaggcacgataattgcttgaactcagaggcagaggttgcagggagctgagattggcaccactgtactccatcctgggtgacacagcgagactctgtctaaaaaaaaaaaaaaaaaaaggaaaaaataggatagtaaacactgtcaggtcctgcaataattatgtgtaatactgaacagatactgaacagaaatgttccaggtgctgtaaaaacacacatataagaatataatctgtgcccttctaaaaacctgtatatgctgaatattatcatggatttagtaagcattcattacttaaaaattagtttcaaatatcagtgatcaaaaaaaatttaagtagtaaaataagttggacataccaagttcttttgagagtagtatgctttcctactaagctacttttggcagctacttttgcagtcgatttaaaggttaagatagcagaaaattcaaatgtttaagtgagtcattagtgtaacctagctgtgaacttcgttacacacacatacacacatcctgaaagaaaagctattgttttacataatcagtttctgataatgctgtgctctagttaattacgggatttctttttttactaccaggaattcctcttgaatgatatttaagtgattgttgaatcatatttgtgtgattggtatcctgataattattctgaagttgaagctctccttgtcctatttaagtgtgattttgccgagc

SEQ ID NO: 51386 - DNA, 1014 bp, Homo sapiens
cccaaaaggttcagaaatcaaagtgggaggccgggcgcagtggctcatgcctgtaatcccagcactttgggaggccaaggcgagtggatcacctgaagtcaggagttcgagaccagcctggccaacatggtgaaaccccgtctctactaaaaatacaaaaattagctgggcatgatggcaggcacctgtaatcccagctactcgggaggctgaggcaggagaatcacttgaatccaggatgtaaaggttgcagtgtgctgagatcacgccactgcactccagcctgggcgacaaagctagactctgtctcaacgacgacaacaaaaaagaaatcaaaatgggccaaggaagaagtctcgctttgaccaggtcccatggcctctgctgtgcctcgtcccagcatctgcggtgacacaggagagagtgttgacaaggatgtgctgtccgggaatctccctttatccagtgacagctccattcatctcaccgagctttgcccagagctctgggctggcttcactctggctctgagtccctgtgagccacagggtacagtccacttgcaacagtaaacctgcgccagccagctggggctggagagaaggaagggctgggatggcagccagcccagccaggcagcgtgcagagccagcagctaggggaggccacggaggcccagggtcttggggcagccccactgcgccccctggcggctgaaggaagctcctgggcgcgtctggacctggaccaccagctgaccttctgcacagttaaagagtagctgtgacctggctttcatatgcagaaataaataaataaataaataaataaatagagtagccaggaggagtagccaggatgagggccctgaccagggctccttacatattgtgtctcaccgcacccctagcaggcggatgcaggggcgccctgctctcatggcagggaaagctgagctgcacctgcagaaggttgggggaaggattaaccccctccaaccccccccggtacaga

SEQ ID NO: 51387 - DNA, 1952 bp, Homo sapiens
atcaaaatagacctggcgtgaactggttgcagtagcgcacacctgtagtcccagctaatcaagaggctgaggcaggaggatcacttaaacccaagagtttgagaccagcctctaggcaagaccagtatagtgaaaccctgtctctaaaaacatgagtcagagacctggtgagcatttcacagcaccctggcccctctggtgctcctcaagaagcaagtcttgggctcatctgtgagctagattgggatggtaggaccagaggggcttactgccctgtggggctctctggacccagtgccatgcttctctgctctgctctccccaggcgttcaatgtcatcaatggcggttctcatgctggcaacaagctggccatgcaggagttcatgatcctcccagtcggtgcagcaaacttcagggaagccatgcgcattggagcagaggtttaccacaacctgaagaatgtcatcaaggagaaatatgggaaagatgccaccaatgtgggggatgaaggcgggtttgctcccaacatcctggagaataaagaaggtaaaggcgctagggaaccgcccccccacccagccctgcagcgccagctccctctgttggggggtcgtccacacctgccactgtggaaatctattctttccacctgtagtttgtaaagatcaagacccttcaaacggttttaaggaggaaaaggggagcttcattttattttacttatttttttctttttttttttttttttgagatggagtctctgtcgcccaggctggagtgcagtggcgcaatctcggctcactacaacttccgcctcctgggctcaagtgatacctactagtttggggagccaagtgtctgtccgtctgtcctgctggcagggcagcttagccatggacagcagaccctgagcctgagctctcaacggcacagcctggcgggaggatcctgccatcccgggctgcctccactgggctttctcttggaccccgcttctgctctatttaaggcctgtgccttgggacagctgatctcagctgcttactgtaactgtatcttggccaggacagctgttcctgggcactaaatttgggagcatttgtcagtgagaagggctgctttcttggaaagagagctgaatttcccattttgtatgcaccaagaactctgacccatggtttcttgccccaaagcagaaaaaaagtaactgatgtcagaactactggttggggcctgaacacctgttgatctttgtgttacagtccctgtgtagcagctgttgaagggaagttttctctgtacctacctgttttccaaacctgttgtcaccatctcttcccaggcctggagctgctgaagactgctattgggaaagctggctacactgataaggtggtcatcggcatggacgtagcggcctccgagttcttcaggtctgggaagtatgacctggacttcaagtctcccgatgaccccagcaggtacatctcgcctgaccagctggctgacctgtacaagtccttcatcaaggactacccaggtgagtgttccccgagtgccatctccctttcctgccactgacctgcagcagggcagctggagcatctggctggctggtgatggctgcaaggaggggatggggagggagtgtctgaacttccagctcccgtaggggattcaccactgggtttgcccccagttgtgcatacacagggcttcacagaggttcttgtgtagctaaggagctcgggtgccagcagcgacattgcataataagttgttcacagtcaggagcagaggcagtctgtgctccattagacaggtgagggaaccaagccttcagaatcagaacagccacttggtactgagatgtatcatgcttcctgtgagctgggaatattcattttaggctgtgtgtgtgcacaggatagagactgtgaccacctttct

SEQ ID NO: 51388 - DNA, 4694 bp, Homo sapiens
gcaggagaatcgcttgaacccaggaggtggagattgcagtgagccaagatcacgccatacactctagcctgggggatagagcgagattctgtctcaaaagaaaaaaaaagtaccagaacgtcttcaatgccctgtgtggctcgcattggatttctcttgggcagtgctgctggagtaatccacagggcaccaatgcgagcttgtgagggatgcatatttgcctgggtcagaatctacattttaacaagacctccaggtggcatgtaggctctgctgtagaacactttctttctgctagaggaattagtcatctttgcagtaagttctgcagtacaggatcataaacatgtgaaaggcatgaagaacagcccagagcgtttaattcacacagctggtaggaggaagaaacagctccctaatgacaaatgcatctgtgggcgggaggggacttgggattgtgctggaactggatttctgaattgctactacatcttttttcctctcatccaggtctcttcagagctgctgtgcccagtggtgcttcaactggtatctatgaggccctagagctccgggacaatgataagactcgctatatggggaagggtaagccttagaacccacagcccatggcctccctgcttccagccccattcctggccttgcccagtcctgtcctctctgggtggcacttgcacttgcaggtttatggcaggtaaacctgctgtgacccatgatgttgatggaagcagtgcaccaccttgtggacaggaaagttggtgtgtggattccggggttcccgagcctgcatgctctgggtcgagagttccaatgcttgcttctattgcagtttgttcccaatctgcgaaatactccttcacggttaggacaggaacccaagcatgagaacagggcctgttaactaaagaaaagtttccccatctcccaggagggttctgtgggccctccagagatcatcagcctcttcacgggctagaaaggatccagggaaggtctaaccaatgacctgccctgaatggtgagctgcaggtgtgtcatttagtgtgattttcctgttgactgactcataggagccctgctctgtggcagagctagcctctggctgtattcaaattgacttagtgtgtgtgcaacattgacctttctagagatagaacatgtggccaaattacagaaaagcacatagggctagatcacgcattctcagtggggcacccggaaaactccaaaaaggctgcagggaggggacaatgatgaaatcaggttgtgaaacactgggctggtgtcgcagtggtggtgctgggtgttcagtcccgctttaatgctgtaagaagcactctacacacacgaacatgttaccatttgaccgttgtttaatggcgtacgtggggacttagccggagcaggatgatgctgtgccttgatggtaatgagtgctcagtaagtaagcatttgtggaagattgaacgcatggcccctgaaatgctctcctctgctttcctgccccctcactgtctctcactcgcagtccttaatcaccggttctcttctgagtctctctcatttttccttcttcatcctctgctgggcaggcgtctccagacccattaagtatattaatgagttcctggcaccagccctgtgcactcaggtaactgattgaacagcctttagtctgcagttggcgtttccagtgcatggtcttgcaaactaacctccagtcagatcgttctgagccagctgctgttttgtgtggctctaaccctctggggtcctaggtaggagcactcagactgggccggaaagtcctccgattctggggggaaaggggagagggggaagaggtcccacagaaggtcccttggtgggcttccgcgtcggcctcaacagtggttctctctaacaatgctgctcaagcctgttttaaagttaatgtcagtaatttgatttgattgttccttccaggtgtctcaaaggctgttgagcacatcaataaaactattgcgcctgccctggttagcaaggtaggacctgcctcctgataactaatgtgtctaatgccaccagagcgtctcccaggcccaggggctttcctgtttatggaagagcttattctgagagctgtagaagcctattggattccctgtcacgcacgagaacaatccatgcatgacataattctaacctgcccgctgcctcaccccacttttgggagcagatggaattgcatcagaagaatgagacacttcgagccctgaggtttcttcccccctgcaactctctggacctttgaagaaattaagatccagattttaagagtggctctcaggggtgtttgtggtagtgtccatggtgactaatttctcatgaactttggaattatttactataattctactgactttaacagtggagttcctgttaagtaaaatctggaaatctcagtatgtcaaacataaaagagctgctggaggtgaagtagggctggggacccagcaacccacccgactctgcaggttttatctcatttaccctcccttcggcccgtccctccgtaattcctgtggcgctcatcagatgggactggtttgaaaacccctgtctaaaaacactccgggccaggtgcagtggctcacacctgtaatcccagcactttgggaagctgaggtgtgtggatcacttgaggtcaggagttggagaccagtctagccaacatggtgaaaccctatctctactaaaagtacaaaaattggccgggcatggtggtgcacgcctgtagtcccagctacttgggagtctgagacatgagaatcgcttgaagctgggaggcagaggttgcagtgagcagagattgtgccactgcactccagcctgggcaacagagtgagactctgtctcaaaaaataaaaataacaaagctctctaggcccagtccaagcccagccacagcctccgtctattcttgaatctagtccctctcctccatgaattcattctgtacacgagggaaaaggaggagttcctttgttgtctctgtccctgactcgttggtttaggcctggcttttgtggcactctgtaattactccctgcccgaccagcccccagacaaaatgtcttgttaccgttctgtctgcaccaccccctgccagtctcccggacacctccacacataccttgttctctgtcccttcatacccctgcatagtgtgactcacacgatgagcaggatcccctgacttttttttaaccccctagagaaacataccaaactgttagtgagaattgacctctgaagctgtgtgcttgggtaactgcctgcctgttgcagtgatgccttgacaaagctgtgaaagacaccaaattgctcatacagcatgatgggatcagagttgattttctttgcatatttttttatatcaagcacatcatagataaaaataatgccttgttattaatatattagtttaaaatggaatgctgatttttggctgggtgcagtggctaacgcctgtaattccaacactttaggaggactttaggaggctgaggtgggcagatcccttgaggccaggagtttgagaccagcctgggcaacatggcaaagcccatctctataaaaaaaaaatataaaaattagccaggcatgatggtgcatgcctatagtcccagctgagtttggaggatcatttgagcccacgaggtggaggttgcagtgagctgagatcgtgacactgcattcctgccttggcaacagaatgagactctgtcttaaaaaataaaaattaaaaaattaaaaagtaatactgatttttattggattactttgagccagttctcagtacgtcagttttgttactttatagtctcatcaaaaattcattttgatccatcattagacgctttgctaaatgatttcggactacctgcagaaatcatgcctcccatcagaggatgaagatttgccatctttgcagttagccaagagtgagcagcagagcctgcctttcaagggctcagcctgcttgagtgaacagtgagctttgcttatttattgcctatgaaagccatgttcctgggtagcagtggtctacatagcacatacctgacagttctcttgggtgtaaagtcactttgggctccctgggtagactattaaccttttgttacaaaagcattgtctgagagtgccatctctgttgcattgttgggtgaatgcctgataaccatcaaagcaagcagaaggcagttttttgtctccccactgatttttgtcctccactttttttgcttataaaacaaacatcacagaattgattttgatattacacagttccaaagtcagattccatggtaggggagcaaaggctatgcagataagagtggccccaacccctcattctcccctctccctcgtagaaactgaacgtcacagaacaagagaagattgacaaactgatgatcgagatggatggaacagaaaataaatgtgagtggcctgaggtggcgtctttactggggaagatcatgaagtctcctgaagattttaaaacctttcaggaagaggcccatgatcttagtgatgagctacatgagcctgtggtctcttcccatttctttgctttactcttaagaaatcacacttttggccaggtgcggtggctcacgcctgta

SEQ ID NO: 51389 - DNA, 1058 bp, Homo sapiens
ccgcgggacgtcacccccctttccacgctactgcagccgtcgcagtcccacccctttccgggaggtgagggaatgagtgacggctctcccgacgaatggcgaggcggagctgagggggcgtgccccggaggcgggaagtgggtggggctcgccttagctaggcaggaagtcggcgcgggcggcgcggacagtatctgtgggtacccggagcacggagatctcgccggctttacgttcacctcggtgtctgcagcaccctccgcttcctctcctaggcgacgagacccagtggctaggtaatgattggggaagggctgagcaacgggcaggcggcgcagggcttttctgggcttgtggggctcttttccctccgagggaggcggcgcgcccgcaggcccagcgtggcggggtcgggggcacgtgcaagccgcctccctgggtgggaactggcgcccccgctcaccccgaggcccggggcgggggcgcaatgccaggcgcacgtgctgggcccccgatttctttggaggggaaagtgcagatcaacacgtgattaccgactgcggggccgagtcactgtcagggaaggtcgggagctgcacacgcgagctgcttagcacagcgggagttgggagtggaagttgcttttccatcgtagccaagtgtaaggtttttgggatagacgcagacttagcggcggtggccactcaggccaggcccttcctaaaatggaggagggcggcgatagtggagatggccacgaggctgcggccccctcccccaccggtagcccccgcctctcgcccgcgctcgcggcccgcgcttctgcctagtaagcggtgactcatttaactccgagaaggcacctcttgaggaacctacagcagagccgttagatcattggcaagtcctccaggcgacctcgcccaagttgggcaagagcggctccccggctggccaccaaaaatcgggcctgatctgatttggtttttttttttttttgagttttgctattgttgcccaggctggagtgcaattgcgcgatctcggatctcggttca

SEQ ID NO: 51390 - DNA, 1050 bp, Homo sapiens
atgagcccaaaccaaggcattttggtctttcttcaagggcacttacccagaagtctccaggggccatatttatttctttcattgatcataaaatgtgtcctctgcctagccatgataatggtgaccgcagcagttacacttaggagtacttccctatgtagtggttcaatgccagctgctttccagacgttattccttcttaccctcacaacaatcctgctgattattccctttctacagatgagaaaatggccgcagggtgagcacccggccaagagcactcagccaggagcaggtgtctgagtgcgtctatccccaaagtctctcctctcaatcccttccaggaagaagtaaactgggaaattgtttcttaatcatcagcttctatgttctgctgaactcaagagattggaacctggcgaggcctgggcctgagctgtcctcccgaggggcagcgctggtccctgacattctgttaccttctgtcttcttggtcaggacaaagaacaaccctgactggccttgacgttcaggacatgctgcccaggaacctccagcactactacacctaccatggctcactcaccacgcctccctgcactgagaacgtccactggtttgtgctggcagattttgtcaagctctccaggacacaggtaatgtatggtatcactttgccgaagtcttcccattcgattgcctggttaacaagggttctccccagcatctcaacgaacgtcaacaactaaggggtcctacagtattttctgtgtgcagggctactgtgcctcgtctagccaaccttttttttttttttttttttgtgagacagagtctcgctctgtcacctgggctggagtgcagtggcacgatctcagctcactgcaacctccgcctcccaggttcaagcaattctcctgcctcagcctcccgagtagctgggactccaggagtgtgccaccacgcccggctagtttttatttttagtagggacagggttttattatgttgcccaggcaggtctcaaactcccaggttcaagcagtctgc

SEQ ID NO: 51391 - DNA, 1076 bp, Homo sapiens
ggagcgtggagggacaggtgctgggacctgggggtgccctgaggtagggcttagggacctaggggcttaggggcgtggtgtgagggcgtgggcggggctcaggagcctcgggcaccgggtggagcttggaagcctcaggggcgtggcgggggcggggctcagggcccggggcaacgggacgaggaagggcacctgagccagggtcagggcccggaacacaggggtgtggcggggtgcgtgggcggagcggggcgcgtgggttaggctctaggcccaggtctctgggccctgtggacaggggatcggggcgcgtgggcggagctctaagtcccagtctcaacgcgggggcacacgggcggggggggggcgtgtgggcgggaagggcatgtgggccgggggacgtgtgtccggggctcggattgtgggcggggctcagggcctgggacggcgggacggggctgggagtgtaggcggggcttaaaggccggggtaccggggtggggcgcggcgcgtgggcggggctcagggcccgggatataggggcggggcgcagggcgtggacggggttcagggcccggggcccagatgggcgggggagcggccggacgcgggcggggcgggcgcctggacgcgagcctagggcgcctcggtgcccagacggcggcggcgtggccgcacgcgcggcccggcttctgtcctcgcggcgctccggctcctggccccccacgccatgcagccgtccccgccgcccaccgagctggtgccgtcggagcgcgccgtggtgctgctgtcgtgcgcactctccgcgctcggctcgggcctgctggtggccacgcacgccctgtggcccgacctgcgcagccgggcacggcgcctgctgctcttcctgtcgctggccgacctgctctcggccgcctcctacttctacggagtgctgcagaacttcgcgggcccgtcgtgggactgcgtgctgcagggcgcgctgtccaccttcgccaacaccagctccttcttctggaccgtggccattgcgctctacttgtacctcagcatcgtccgcgccgcgcgcgggcctc

SEQ ID NO: 51392 - DNA, 1048 bp, Homo sapiens
acagcacctgctgcgacccccacccccagcctctgctgcttctcccgttgcccttccagccactgccctgggcacctcccctgctcccgcctccctgcctgggcccatctttctttgcacctcaccaattgcggggcttcctagtgctggaggggaagggagcctgcttccattctcaccactctgaaagaagaccctgcagagaggttttctggaatttggagcctaaccttggccttgacacagtccagatgagaaggccgtcccccagttaagccagccctccctccctctcaatgctggagaggaaaccaggcagctggttgcttcagcaaaccccctccctatgggaattgtccttttcttcctcaaatagactggagtgcagaggacttgcttcagagagagcccctttgtaacgcacattgcacgggccgtgccccatgcccactctgccacaaactcccctcagctgcccagccccgtggagccaggcgtgggctgaagtggggccaatgaaatgcctggaatgccagccgcagtgacaggccagcactcagatgcctctcgggagttctgaccgaagcagcactgaggactgcttcagagcagaagtctacgccattttccccagttctaggcagaagtaaagaatgtctctaccttctcccaaccagcaattgattcagagtcctgagcttttaaattaaagggacccctctgttgctttatgcagtagccagcttattcatttgagttcaggtgaaatcattttcaagtaacctcttcctatccagctttacttttagttatgctgacataaaaacaataaaaattgtcctcctcagagttcacctgtaaaagttcctggataattagtaaggaaacagaaagagcagatagttgttgcttcagataaaagtgatgtctgggttgggcacggtggcgcatgcctgtaatcccagcacttggggaggcccaggtggatggatcccttgagctcaggagtttcagaccagcctgggcaacatctctacaaaaaatacaa

SEQ ID NO: 51393 - DNA, 1036 bp, Homo sapiens
ggattacaggtgtgaaccaccgtgcccagcctatttatttttttagagacaaggtctcgctctatcacccaggctggagtgcagtggtgtgatcacggctcactgcagcctccgcctcccaggctcaggtgatcctcctgcctcacaggcgtgcaccaccatgcccagctcactttttaattttttgtagagatagcaccttgcaatgttgcccagacaggtcttgaactcctgtcctcaagcagtcctccctcctcaggccctcaaagtgttggggattatatgcgtgagccaccagaccaggccaggatatacttctaaatgaaaagctaccggcccagccttagccgatttcggtcatgaaagtggcttttctttctgaatccatcacctgtggcccctactttagctgtgttggcctttaacctgttagaggacattaaagcaatctctttgctctcatatagtcatattgtgtttggatcagagggacgtctgaggtttcatctgcttatgcagacggtgccagctaagccgtgccttttgggtccaggtgacctccaaagcaggcctctccaacacataaagatcattgggacatagtcacgtgtgaagggtctgcccgtgtccgctgtgcattaggtgctgttggggaaatgggagcagaggatgaggtcatgaccccacacacccgcaacctgatgtttgctgtcatggtggaagcatgcccgtggtggggggtaagggtatggggcttcgttttgtttggtttggttttcagtatatttaccagtccccgccaccaggcttctagaacagttctggcaagagatccctccacctctaaacatgctgtgtcttcccattgctcctaaaacaaaggcgggttcttcgtggaggcctgcgaggtcgcccacttctgcctcacttgtccccgccttcttggttgcttcaacaccgtggcctccttggcaacttcagccaccacacgaccctcccaggctgctggtcctccctccccgagccctacttcacc

SEQ ID NO: 51394 - DNA, 2969 bp, Homo sapiens
ccaaatgtcccctgggtgacaaaatcatcccccaaactgctggattagaggctttggaaatggattttctgtgaccactgcttcaccattgtaagctgcctctcatttgggtgcagttttctttgttccttttccaaaaagctgacctcatcgggcccatttgtttgtttcgttgactcacccagtctaaccgcaagcagccttcctcctctgggggatcccaaatgacttatcatgggactttgtatgtaaatttcaaagattattttctactaaatcagaggcagaaatcctcaacttcttttttagcagccttggtaaatacttccttagagtgtttaaggggcgtgccgcactcctgctggtggtctgattgtgaacacctttgctgttcagttccctgaaatcgccaaatatttccctctcctttgggtctcagcccagtgactagcggatgatctaagggccagggcggtctgagttggctagtgcaccggggattttcttaaggcctttgacccggggactggtgtgggaggaaggcaaaggcctggttgtttatgagcaaggaggagtcaggtccgaggatggagcccttcggggtcactgccctgggccctgcccctctcctgcacatcaggccccttggacaaggcccgtgtgtttgcaggaccctcttggggcagcagagcaagggctggctttgagagagagcctcacttttttgtttttttttttttttttttttttaagtagagacggggtttctccatgttggtcaggccagtcttgaactcctcacctcaggtgatctgccctcctcggcctcccaaagtgctgggattacaggcgtgagcgaccgcgctcggccagggcttcactttcaagctcagtgctgctctgaggggtggacacagccctgatgtcagtagctgaagacctgcctggccacactcagcagcagttagccttctcctcccgcgccccgtgaacaaggctgtaccctgggaggttgggctctgtctgaattccatcacaggtcctctcctgggccttgccctgctttgttgcctccttaggaggatgtcttctggtttcctaggaagggctttatatcttaacatccaccctgcattcaaaacccaagttatcaagaccacagggcaccacaaccctcctcttggccttgcggtttctattcttcagtgactcccagaggtttggcttgattggcagcttagaagcacatgattgaacttgagcagtggttgaaactcagagtcagatgcctgacccgccccaatcccaggcacagagtctgacctcacacccaggctgtgctgtgtactcagttgttcagtatcgacttgagcttgacgggcatcaggggccagggagtgaaagggaagagaagccaaatctggctgctaagggctctcagtcctggagggcaggaaaatagtggccttgccgctagacctgatgccacctgcccctccagctgtaccccctcaacaccttgggtaatacctcaagccccacgtcctcttccaagccagataggaccccaagtgctgggtgatccttattgaagggtagggacaggagggacccgtgggattgtgtgtgctcagagcggagttcaggggcacctgagggcaaactgtctctttgctcccagggctgtcctccgtgcctttacctgtgctgggccctggcagagctctgagtcttctggattccagcgtccatagtagctagtctgtccactgctggagaaaagctgctttcccaaaatagccacccagggggaaagagcagccctggaatttgaccctgacgatcaccgtgacggggctgctggccccacctggcctgacctccacgacatcacggaaggactgttggttagttgtgggggccaggatttttcctctgtccccctcccctcttcttcttccctttcttctttctctctgccagcttcaggtttgaaattccagtgacaccgagggagatgctccagtgcctgtccggctggggggcaggtcacatggtgggagcagagaggggagggcacttgtgcgcctgcacctcttggcaggtgaatgcacacctatggaggggcctgggtgctggcagcgagccccgctccctgcggctgtgccaggcccagaggcggcagcgagcccaacaggtcagacaggtggagccaggctggggaagctgcaggaccagagctgacatccgatcaatccaaggtccttctttggcccacagagcaggtaacccacccttttctttcttttttttttttctttctttctttttttttctggtttaattcactgacaactttagggaacatttacaacccgagaaaaaggccattgagattggggggcaatcgcgaattgtttggagagggatttgtggtgttttgtgtggaggaaatttggcctcggcattagaaaagcatttctaattttcaggtctttgattctgaaagcagatttcttatggagcctgggtgctgggtggcatattggggaggcaaagcccagaagccatgagggttttcctgtgactgctgatggaacaccgtgggaggctgtagtttggtggcctgtttgcctccataaggaggggttggggcagagacagggtggtcgggggactgctccgcgacaggacttggctgtatgggggaagctctcccagttcctatcagagaaacacgtggagggctggactccctccaaaattcaaatttatgctacaggcccttactggggctggattttacttggagattgtttggagttttgaaatcacctctcctggtaagaagactcggtctcctgtgttcttgccccctctgtatcttggccagtgatggttcccttagacaaattgatgggggatttctggcctgaggacaggaagaaaaggagcccaggtctgtttca

SEQ ID NO: 51395 - DNA, 2280 bp, Homo sapiens
aatatgatgttatgcccacattgcatttattttattttatttttagagacagggtcttgctctgttgctcaggctggagtacagtggtgtgatcatagcctactgcagcctcaaaatcctgggttcaagcgatcctccctcctcagcctcttgagtaactgggactacaggtgcacacctggatgattttaaaatatttttttagagatggcctctccctgtgttgcccaagctggtctcaaactcctgggctcaagagatcctcccacctcagcttcccaaagcattaggattacaggtgtgagccaccgtgcctggtctgaatttcttgctttacatgttagctgggaagtagatgccctcaagaatggtggagcatatgagctgtccctctaggtcagtcccatggccacccagctccagccctgtctctaggtgtgtgaatcccttttgcacaacagagagcctggggaggtggaaggtcttggtgacaccttgtgagttattcacactggctgtgggtgacagagccagaggtgggagcacagagctctcacagcacagaggagtaaggagttgaagctgcagaaacaatgctgaggcctgaggtggaggaacagttgtaaatggaaaattagacggcagttctgcaggttggaaagtgggtgataaagtgggcgtgcaggcaccattccaggaggctgtgccttgtgtgcattgagagcaggtcaggtggccaggaggctccaagcttaaagctgccaggtgagccaagcattttttttttttttttttttttgagacagagtctccttctgtcacccaggctggagtgcagtagcgcgatcttggctcactgcaacttctgcctcccaggttcaagtgattctcctgcctcagcctcctgaatagctgggattacaggcgtgcgtcacacgcccagctaatttttgtatttttagtagagatggggtttcaccatgttggtcaggctggtcaggctggtcttgaactcctaacctcgtgatctgcctgccttgtcctcccaaagtgctgggattacagggtgagccactgcgcctggcctttctttcttttttctttttctttttctttttttttttttttgagacagtctcactctgtcacccaggctggagtgcagtggtgccatctcggctcactgcaacttccacctctggggttcatgcgattctcctgcctcagcctaccgagtagctgagattacaggtgtgtgccaccacgcctggctaatttttgtatttttggagacaccagtttcaccatgttggccaggctgatcttgaactgctgacctcaggtgattccgcctgcctcggcctcccaaagtgctgggatgacaggcatgagccaccacgcccggcctgggccaagcatttttgcagtgactttcctccttgtgagcagcctcagaggcaggcactggatccagaacctcgtcttgatcctaacagcctctgtgtgccagctgcaatagcatccaagctacagggaagcagtttctattttcgcattggagtcagcggctcctgcctgcctggtgggtcgcatcctcccattctttgctcaaacttcaaaagggccttccaggatccgccttcccagggtacattgaagagctggtgtttccccacatccaccctctctcccgaggaaaggccgtggtctgaggggaacggcagtggcaggggccacctactcagggggagtgcaggcaggaggtctaggggtgtaagatgggcagcctccctgctgcagggggctcccagctggagcgtggacttgtttctctcatttcctgaggtttgctggagacaggcgtttgcttagcgccgggagctgtctcctgtggtctctgtcctttgacttattcagagtctcacttggcgtcggttttccagggtctggtaaccaggatgaatgacgcatggagttgcaacccagactgcagttcaggagtttcccaagcaggcaaggctctgtatcccgtgaaagggggtgtggatacgagatattctgcccttattcttattttttcctaatgttcttttagatttataaaataagtaataatactcataaaaactcaaacgggccagacgcggtggctcatgcttgtaatcccagcactttgggaggctgaggctggagaaacacttgagcccagaggtttgagaccagcttgagcaacatagtaagaccctgtctctaaaagaattgttttaaacattagccggg

SEQ ID NO: 51396 - DNA, 1656 bp, Homo sapiens
tggtgaaaccctgtctctattaaaaatataaaaattagccaggcacggtggtgtgcatctgtgatcccagctactcagtgggctgaggtaggagaatcacttgaacccaggaggcagaggttgcagtgaaccgagaccacaccattgcactccagcctgggtgaaagagtgagacttcatctcaaaaaaaaaaaaaaaaaattttaaaggtggtatctcactctgtcacccaggctagtctcaaattcctggcctcaagcagtcctcccgcctcagctcaacctgttttcttatcctaaaataaatcattcctgtcctgcctacctcccagagtctctaggaggatcacacaagatgggtccttattcccaaatcctccctgatacacctcatgttcaaagctctgtcctccaggtacaatagctagacagctcattgccaccctgatggtctttacagtctggtcaggacaacagaaggtaaataactaatgcacaaatagccaacattgactgaatactcgcagtatgctcagcccttactgtaaagtgctaagcagtttacaaatattaccttatttcatccctatactagtcctctgaggtggctgctattgttcccatgtttacacataggaaactgaggcttagaggggttatgttgatgggcacatgcgtgatcatggtagagcctggcttgaacatgtgtagtatgacccagtgtctgtggacatgatcatggtgcttctgtcaaggtgcagggtgacaggcacgagaaccataaaccgcacacttgtccgggactgttgtcatggccacatcttcattatcatcatcagattagttttctattgctgcgtaacagaggactacaaagtagcttaggaaacacacatttattatcgcacagtttctgtgggtcaggagtctgggcacagtttagctgggtcctgtgtaaggctgccattaaggtctaagccagggctggggtctcatctggtgactcagctggggaaagatcctcttccaagctcactcaggttgttggtggaatttatctcgttgcggttggacgactggagtccttggcttcttgctggctgttgattggcactgctctcagctcctagagtccgcccgcaggcctttgccttgtagccccctccctaggctctcccacagcatggcagcttgtttctttaaagccagtgagggagagtgtcttcagcacgagcctgctagcaggagagggaatcttatataacgcagcgcaatccttgagtgacactctgccgtccatgccatattctgttggctagaagccagttacgggtcttgcccatactaaaggagggggtcacacaaaggcatgaacaccatgaggcagtggccataggggccaccttatcatttgtcgcccacaatttctaccttcatttgtgcttgtccttaaatatgtgtcaaatgaactttgttagaaattgtatgtaagtcagtggagaaatagaaaaaacattgggagtgacagtgttcctgatggtttcttgtcgtgtcaacaacttacaagaacatttaggatgccagcagcgtgtctgacatgttttttattccctcctggattccatggacctgccctctggggagttaatacagtcag

SEQ ID NO: 51397 - DNA, 2846 bp, Homo sapiens
gcacggtggtcctgggggcagcttgtcccggaagggcgcggggcgcactggctgggatctataatggttggggcaggagggtgggtggggagccccttctccatggcggcgggaggtcttcggcgctgcccctgcccgcgcctccctgcccaccccaagggcgcccgaccgtgcgcgcagggcagcgtggaaagggtgggaaatgcagggagcgcgccttgggggctgccccatgctcccccctgtagctccgcgctcaggacccgcgtccgactttgcgtctctgggaacctttaaggccggtgaggggggctgagccgcggcccctcggctgagccaagccctgccccacgcaaggtccccagcctggcgcacccggctccccagcgccgcgcgccggccatgtcccttcccaccccagccccccgggacccgagagccgtgcggggccgagcctcgtgccccgaggcacgccgagccaagtcacccctgcagcccgcggcgccggaacttgggggcgcagtgagtgggggcagggcgccgggccggcgggcggtggccgtggctgggtgccggttcctggctttagaagtcctttcgcatcttgttgaatccggggctgcattggccctccgagctctccggactggcaacgtcgcagagacaacaggtcctgacccgggacagaccccacacccgcgtccaggacgtgggtttcttccctcttccaggcgagaggccctcggactgggcgtcgcggcgagccccccgtggtttctgtttgcttttgtacggtcccccttccccccaccaccctgtcccggccccacccgggccttggtcccaccgcgaaggggcgaggagtccccggaagggtcgcgatggccggggagtccgggacctcggctctgggtaggcgcgccccgcgacccagcggcggcgtgggcgaggggcgctgcgcaaactacgcgctctcgctggggaaacgccagcccaggcgggcggcggcggtgaaggggatgaggaccaggaccccgtgcccggcgggactggccccgcaccccacgccgcccccctgcggtgcgcaccgcatctgcgccctaggccgaggccaggctccgacccctcccccgcaccgacgtgattcggatcgcgcggtgctggcgccgccttcatgcgccctgcctggcccccacctggtcctctttccttttcaggtggaggagatgccgctgtcccgtcggtctggggacagcccagctccccggatcccgggctggagagacgcgtcgcggccccggggcctggtggcacgagcaggaaggaggacccggcggcgggctctgcctgggcttgcctgggcttgttccgagccgggctgcttctcggtgaccacgcagatcgggggcatttggagattttgcgggagtcctgcagccaagctccggggcaggagaggcctggaagcctgcactacctgctcgccccgtcccagcatgcacccaggtaaacgcttgtgtttctcagtccgtgcgaaagtttgcaaagaaggaggcgggaactagaccaacaactttaataatcatagtcataataatgaaaaccctgttcaattgtgtagcctccgtaaggggaagaatttccaagaagcaacaaaatgttctttgatttcataatctctggggagaaaggattccttttttggggttttgctcggctagttctttcttccctcctctatctccagcgtggggcgaggaaggccgactggttcatgggtggcaaatggggaccctggctctcttgcgctgctggccacggtgatattgcagcaaatgctcaacctccccagttcctctcctcaccttgaaagtggaggcattgatactagccacccatggttgcaaaaaactcgcatgaaagggaaaggaaaagtgcttcggtcactaaagtagcgttgtctaagaggtcaaggctttggaagacttttgctctagaagaggggaacgggagaggggctttcagccaacctggccccgaggtgaacgcgcgcgccccctgctggctggagccctgtccagcctgtgagccgccagtggggaaggagactgaggggaggtggtccctggagttccttgctcctggcctggagcagcaggtgccagtgctcctgaggccccctctctcaggttacgtggatggggcctgtagcacagacagggcacatgcttcagcacctccctgtttctgcgtcaggtgggggacatgagctaggctctgcagaaggttccagagcctgggccttcctgttgcatccacactaggctcctggagcccagaggtggctgggatctctgcatacatgcatgtgaaactctagcagataccaagtcatgttaagggggctaaacggcccactgcagttatgttagccagttctgcctctgcccagttctgagatatctttgggacaaatggccactcctctgagcccctgtgtcttcctgcatgagccacaaatgctgtgtagtcatggctgaggaagagggaaggtacctgtgcttgcaaacattcctcttgaaggactatccaggagcagagggagcagctgggggcagcatcagttggtacctgagcccattggcacctactgccacatggggtagtggcctgtctcctgagcttccccaagctggccaaaactggccaggactgccctgctctcccctcccaatccagctttctcttgggcctccaggatcccttggctagctggtgtggtggccatgaggactgcacttttgcaccccacccctgcccttggcacacatcgcaaatcaataatg

SEQ ID NO: 51398 - DNA, 1073 bp, Homo sapiens
ctcttccttctgcatcagaatgtccttttaaaaagatccccaggaaattcaaatgctcattaaagtttgagaaacactgtaaaggttaaaaaaacataaaaaaaaaaatacccacacatactacccccacccatttaggaaagagttgttttttagttgttttgcaaccacagagtaagcaatcatgttgtaatacccaatatcttggatttgtttaaaggagtgctggcaacataacagataagggaggccaacctcagaaccggggacccacaacaggactggtcagggaggactgtggcaaacctcagagtcagaacaggattaaagagagggccaggagtcagttcaggccaggtggccatccgtcacagctgtctgcagtcttctggggtgggggcagaggtgctggcccttggggctcccccacctgcccatgccaggactctggaggcttagctcctccctttgtaccaggcacgtccagagccctggctaccaggatccgatcagcagctctgaagcgcagcctgccagctggcggctcctccttctccaggctgttctctgggcttcagatttcttgctgcctctctcctgcactgaccttgcagcttctccttctctccagacgagcgattgccggttgaggaaaaaacgcttgaagggccaaggacagggactggaaagcaggaggaaaaagcagaatggtcctgtggtccgtgtgtgtatttaggggtgagggcagatacagggagagtgggagaggaaggctggggagccacccgtgtggccctgatcctctagttaaagctccagtgatggacgcgtcgtgtgtcctgtagacactggctcagacactgtggttgggtcctcaccttgggttggtccctcactaggaccctcttggagatggatcttgagagagatgaggaagaggcagagggggtggtgggaggagggggtctgacgtcagggtcaagaggcagattggtgccctctgtatagggatggtggagaggtcattgggctggttctgtggggacttttgtaagttatctctttaaacctca

SEQ ID NO: 51399 - DNA, 1078 bp, Homo sapiens
gcagagctgtctgcaaggtgagcccagggcagctgccggatctcctgtccagagagagcaccagcaagcacactgtgctctccttggccctcacctctttttatttttagtaatcccagaaggtgttgatggggattgcagctggctcttagttgtcttttttttttttttttaatctatttttgttgagaaaacctggatttcccacaatgtggaagcaacgaggaaggggtttctggtcccggttctgaaggctgtgaccttcagcgcacatctatacaatgctgatagccccggcacctctctctctcgggtagttctaaggattaaatcagataatgcacacggaaatacgttacaaatggaagtgttgttgttcttccaagtttgcaaggagaggcagcggcagtgttcttgcagtgtgtctgagttccacgtgacttatattggattattatataaatcctgtaattgatctgtcatacttttatgtccattctttatgtcatatttctctctcacatatacatacacagttgtatacatacttaaatctctatgtattagcagtctgcacaacatataccttttaatatttatatttctgttcagttctgttcataccacagaatatgtgttataaactcttttattaagctttttggttgtttctagttttttgctattttattattattatcttggagtcttgttatgttacccaggctggtcttgaacgcctggtctcaagtgatcctctcttgctttaacctcccaaatagctgagactacaggagtgccccacctccccggcttctatcttagatggtactttgtgagctttttttaaaattgagatacaatgcacataccacaaaatttacgcttttaaaatataaaattaagtggtttttagtatatttacaaagttatgcaactactatctaattcgagaacatttatgagcattttaaaaaacatattccctttaagtatatacttcggcagtagaatgacggggccaaaggggagaagtgctttctagctgttactctctgttatgagtctgagcagcaca

SEQ ID NO: 51400 - DNA, 1218 bp, Homo sapiens
ctgctgggcatgggtgccgacgggcacacagcctccctcttcccacagtcacccactggcctggatggcgagcagctggtcgtgctgaccacgagcccctcccagccacaccgccgcatgagccttagcctgcctctcatcaaccgcgccaagaaggtggcagtcctggtcatgggcaggatgaagcgtgagatcaccacgctggtgagccgggtgggccatgagcccaagaagtggcccatctcgggtgtcctgccgcactccggccagctggtgtggtacatggactacgacgccttcctgggatgagggcgcctgtgccccttgcccgcttcgctcctgtgctttccttcgcccgtgtcttccctcccttctcggccccgccacctgcccagcgtgccctggctctccagaaccttctatcccacagtcaggccccagagagggcaggacaagccttgtcccgatgcctttgaccggcagctctgtgtattggtggatagatgcagaaacaaggaagaaatggagtctgctcctgagaagcttcaaattcaggccaggagagaagtcttaagaaaagacctccagcagttacacattcatatcaaccagcacaacacgggatggcgcccaaactccggcgttcacaagaggagacgtgacgtggtgggctgaggttaatcagggaaggtttcctgggggaggtgatccttgaactggctcccggggaacattcagagcatgattggtagacagaagggtgcagaggcgcccaggggagtacattgccccgtgcaaagcaggggcattggggactgtcttgagaccctgagggggtcaagcccctccttccccagctgcccctccttctagaacctctgcacatctagcctctggccctcctcttcactgcctccacctgctcccgcttgccatccctgtctcctccatcctggctgtgcagtaggaattccaggctcctccctgtgtctttgctgttcttcagactccatttatagagaatgagggctgataacaggaatacagtggcaaagactagactgtggaaagggttccagaaatcttttttcttttttaattaaaaaaaatatttgcagagatgagctcttgctatgttgcccaggctggtctcaaactcctgggctcaagcgatcctcccatctcagcctcccagagtgctgggattacaggtgtgag

SEQ ID NO: 51401 - DNA, 1298 bp, Homo sapiens
ctccctctgggtaagtgcttgtcgactgagtcaacgactgaatcagccgcggttgtcagggctcagctggactgagcgctgctgcctgtgggcgtttcctcctcatgtgttttttatcagcagcagcggctgcagggtccccgtgctcaggggttgcctctgtcgtgctcactctgccccgcgctctgtccacacccctgctccatccaactcgcagatggagcggtttcctttgagccccagtcctgtccaaacacacatgggtgctgggctttccctgtggcacattttctaccctctgtaggcaggaaagagcaagcacatggaggcagccctgttgtccttggcctttccaggacacctgggaggagacagcaccctgtgaggctaagagctggactctggagtcagaaaggtctgagttcaaatcccacccctgctgctgagagagtggcacagggcagtttcaccactgtgagcttgttcctcctctgtgaactgaataataaaccctgctttccagaaaagaggcgcacagagaggactttatcatagggcccacgatgagctcccggggtccgagcgagagacccgcagcaccacttggtgggggcagggccgtgtgtctgcatgtgcacctgttcatctgcccaccgcaggctctcacataccagggctttgtcttctgcaaggatgaccaagacatggccctgcactcaggaaatgacaggcaaggagcgttctcaggggtggcagatgtagcgagagcacttgggtcggagccacagggctctgggcagagactgcggttccgtgttgggggaaggaggttagggagtcaggaaagatctccatcatgtgggggccttgaattagaagttcagcaagtgccacagactgatttcacatcccaccacaagtatttattgagcacctattgtgtaataggcactgtgcctggtgctgggatacacggggtggtagcacaaaggaagacactgcccagggctcctggcctggcggggacacagacaagggcccaagggatggcagccccaaggggcagggccaagctgggccatgcggagggtgccgtgggactgcctggcaggagcatctgtccaccctggggatcagtgcagaacgtgattccatcctgatggaaaagacgtttcggctgggagcagaaagatgaggaaagcgctgctgtgtggcatggggccagctgcttcccctccctgagcctcggtctcctcacccacaagcggagggacttggagctctgctctctcaggttc

SEQ ID NO: 51402 - DNA, 1050 bp, Homo sapiens
gtgaggagggcaaggctgagaagctcagcggggctgggacaagagctgcacctgccggcacccagcctggccctctgcctgcctccccatgccgcatcacggacaaagcagtagggctgggaaccagctcagcagattccactgcgacaaaagaccccgtactggctccaagggacacagccccgtgccagtgttgcccacccacgttagctctcccacaggaaggcatcgcagcagcagtcaggactttgtggctgccttttgggtaccaggcacaaagcttcttgtgtcgttgtctcacgcaagtctttacaatacaacacacacaccttgtggtttctgctctccccgttttacagatgaggaaaccaagacctggagaggctcgagtcacatgacggggtgggagctgaatgtgaatgtgactcctgagctgcagcttctaaccatcgagtgatgcacactctgaggcccacagtgacatgtgcatggcacccttggcctgatgccagtgaccttgccctccacctgtgggatgcagcctggtttcgaccctctactagggcatcacgtgcagcaaagaacactgagtggggagttggtggggggcctcaggagcacaggcagccccacctacggagggaccgcactgctcacaaggttgctgactaattctctttgcaaacggttcagtttcacatgcttgagtttccagtaactatgtgggtggatttgtttcatttaaggggaaaacaaaacaaaacaaaacaaaacatggagttttctttcccaagaagagggctcgccagttacgggtttcacgcgtgcggctccgggcatcctggtgcagttctgcagccagcggggcctcttggcagacgggttcagaggtggaaattgcttagtcatttgcaaactgggaccaggtgcccaaggtcagggaggtggtgggtccgcagcggcacagtggtctccgggtcctgctgagggcaccacggtggtcctgtgttcttcctgactcagccttgccctgggctggcagggggtggg

SEQ ID NO: 51403 - DNA, 1450 bp, Homo sapiens
ctagactgtgctagggcagaggtgagagacagcccctggggcacaagggaggggcatgtgtgcacgtgtatttatgtgtgtgcatatgtgcttgtgtgtgtgtccccacacgggctcaaccaggtgatactggtactcagcaagcagagcagactttgatgggcacgtagggcagggtcctagggggctgctgctgggccaggcatcacgccttgaggtgctggatggcgaggaggggggggctgatcgaagcgggttcaggggctgccatttacgaaaggctgggagcgttttgctaccttagagcccacccgttcccgccatcttggggcacaggcgcaggtggtcagccgtgactcccggattcctgtggcgcggcacgggccttcgtcaggaccacggctgcttctccaggggagaccgccccggaagcggcattgggtctgggtctgggggccgcagcagcttcgagcccagcttgggaggtggctggctttccacctcggttctccctgctcctatgacctggccggaccttgtgacctctctgagcctcagtttccatctgtgaaatgcgggtataagagtgcccccgggtagagggagctgcctggtgctctccttctgatcgcagagatcccaggccccgtagcagggccaggcctcaccttggatgcaccttcctgcttccaagtggaaacacacggtggaatttagaatccttaacctggcctgtgagggtttgcttccggtgctctcgcgaaggaaagagagaactcacaaataatatattatactaggcagagggtgagaaaggtgcttagaggccagcaaggttctggccttggggatcagggtttactctcagcaggtgaatctgggaaggcttcctggaggaggtgatgctgaaactgggccttgggatgtgtaagcactggagagggaggaggaagggaagaagggaataaatgtcactggcggaaggtggcatgtgtgtgcaaaaccactgggagctttgatgatacccggtatatagtaagtgcttgataaaagtcatcaccgaaatcaatctgactccaggatttggtttaggtatctgggagaaggggtgtgggggcgtgtggtagagattttcagaccaccaggtgagaacagacaggttttttgtcgtttgtttttgagacagagtcttgctttgtcacccaggctggggacaaagctcactgcggcttctgcctcccaggctcggggatcctcacacctcagcctcttgagtagctgggacctcaggtatgcactaccacgcccagatatatatatatttttgtattttgtattttttgtagagttggggtttcaccctattgccaggctggtctcaaactcctgagctgaagcagtccaccctccttggcctcccagagtgttgggattacaggcgtgagtcacc

SEQ ID NO: 51404 - DNA, 1170 bp, Homo sapiens
agcattgttctaggcagggggttgcagctcgaccaagacagactgcagggcggtcatcagccattattgcctcttgggccgggactgtcctctgtgtctgtgtcgcctcctccatcccagccagatggctgaaagctcccggggactttgcctcctttcacctttcctccccctgccctgccccacgtgtgtgcagatatggggtggccccatctccgccatttgattgggaggcctctcgagggctgggagaagccgtttcccttggcgttccatagcacgctgctactgagatgttttgtgtatagtggcctcgctccgtgcatctaagttgttccttgatacacagaggaagcacgcagccctctcttccattttgcaagtatttggagcaatggagcaggagaaactgacttgccccaaatctctgatcattttctagacattgccctaccctggtgacttagggtcgtgactgcaccccgggctcgcctctctcggctctggctggccacgaccttccttttgaaggtgcctggagggtgactccgtgtttcttgtttcctcgtgggggattttaaatttatgtcactggtggtttggaagctacaacgtcctgcgccgggtttagcaggatggagttagagtgagctctggccacgaaaggctggcctgatggggaggggccaaacccctccccctgccaggctccagtggaaggtccccctcccctgcttaaaatctccttcccgagtccctggctgccactctccaggccaaggcagtgggagttgctgtgcgggggattctggctggaaaaggcagccgtgtaattacaggtactggaaatagtcctgtttccctttcagccttttccttctacccctcccccgaaaagaaaacaacaaccaaaaaatccccccaaaacacaaagctggaaaaagctcttaaaccttcttagtttagtctgcagaggcgtctcaggcggtgggccttaaacatttacattcttggggcttagctgactccttcgagcgtcgagtttctgggttgatggcacatccagggtgaaggaagaactccttacagagaaagcccgtgtgtgtggtggagctctagacagcccgatggcagggggtgggctccgagctccagggcccattcttggga

SEQ ID NO: 51405 - DNA, 1017 bp, Homo sapiens
gcggggaccctaaccccttctttcctgcttgctgcccttttccagacttccagattggagaggcacctggatcccgagaaccccagcctccttgcacctgggggtcttggcttaggggcaggtgctcagggcagggcactgggatggttcctcattcttagatgcatctgccgtcgtttcgtggggaagagactagcacaacccccagtgcccacttgcagcgcttccgggggtcccaggatggccctctaagcccacggcctccacagtggccactcatacgatgatccccctgagtatgggcagaaattggtagctatttttatctcatccagtttcatttctatttttgggatgtgtgtttcataatgtatgtaatctatcgatacagaagcatgtgagtagcacgtatgcatggatatgtatgtctttggcagatacatgcttaaaagtcgatcgccaggcaagcgcataactaaaacaggatagtagctgctggaaatgaggttctggggtgtaaagggaagggggtgtcatcgggggtccaggaaaggctgtgccatggggaatgcaccttacgaggcagagcaggcagactgggagtgtagggttgggcacgagctgggcagacagcaggatctgagcacttgtctgtgcttggggagcagctggccactccagtgcaccaggatgcaagcacctgagccagtaggacagagtcttgggggagtgtgggggagaaatttgacccctgtttcttcaccatttcctaaggtctcaaccaagggtcagcaaactttaagagcctgatggtaatgatttaggctttgtagaccatatggtgtctgccgcaactactcgactctgtagcgtgaaagcagccacagacaacatgtaaactggtgagcctggctgtgtgccaatcaagcttcacttccagaagtagatagtgggccatatttggcccctgggcatagtttgcccaactctggtctagatttaagaggacgggcccta

SEQ ID NO: 51406 - DNA, 1120 bp, Homo sapiens
ggattcagcaactatgggggcagcaatttacaatgtttggcgctaatgtgggaagccaagaagaggaggaattgagggagatgaggggtttgaatctgggtgaactagaggttgatgatagaaattggcagcattgtagaggccaggagggggccatttgagtctacaagggatgtatgagtgggagcagggtcactgctggggagatgatatttggtggacacgtcaggttcacaggcagacactccctggagccatgagagcaaaggatcccacggagggaggtcctgtggagggagagaccctcaaaaacatctgtgtgtaaggagcaggaagaacaggcggaggagctgagacagaaccttagagagtgagtcagatactgtcacaaaactaggagcgtttcaggtcaagggcatggtggtattttcagatacagttgagaggtagagagaggatgcttgttttttgggcccgttcaatttatcgattaggaggtcatgatcttggaagagcattttccctgcagggtctaggcctgaggtcagcttgctgcttctgcagcctgagtgcgtagagggtgacggagaccacaggaagtgtggtggcagcaggagagggcatcggctgtgggtggttctggcctgggccccatcctgggctccgtggctgagacttggtttcagtgctctccaccagcaagtgctcactgagcttctgccctcgtgggctgcgtcaggcacccagcaaacccccagggtccaagaatcagcctcccaggtgcacactccatgggaaaatggccagaaacatggaacccaccttcttcggtgagaaccttggtctgccctgttcagtgtctgctcccagagggaccagcacagccatctgtcacttcctggacagcagcctgtccctaattcttagccatttagggcctggtcttatatgcatttatctcctttttcaagtccacttctacttcctgtcagttctgtcttcttgtcagcttcttttttttttttttttttttaaggcagagtctcactctgttgcccaggctggagtgcaatggtgtgatctcggctcactgcaacctccgcctcccaggttcaggcga

SEQ ID NO: 51407 - DNA, 1621 bp, Homo sapiens
acaagagttggccctgaagtccctctaagaggccaaggacgggggctcagtgggggaaagaggagagggctcctgacactcaggggaggagtgtggccagggcaggcacctcacacctggccagccacctgcccacctagccagtgagattgttcactcgttttaactttaaggcctccatggtttggggacaggaagccctctttggggggatgggagaacagggtgaggctgggggtaggggaggggtgcaccctaacctcgcaccccagccctctgcgggcttttctccccttcagctgtgagtgcagcgcctccagccttgctgaggtggggtccccagttaggtgcctctctgggggtggcatccgctcagagcctcaggccaccctcctgatggggactccctggccaccggggccctgagccaatatccgtggaggctgcagagccgctggtaaggatgaacctccctgctccctgcctccgttcgttctcttgctccctcactctgtctctgtctctcctgggacgccccatgaagccagggcagctgctctagccgaagatcagcatggggaaaaacagacccaagagcacctttaggggcgggaggggtaacttaagagagtgacctggtggctcttccggtgaggaagggacgtgggtctgctgccaacgctctggccaaggtcagcagcctgtctctgaaaaaaggcagggatggagatgtccccacctcctcagctggggtgcagggaagagggagcaggtttgaattggttcctggaagacattgagtgctcagatgggggaggggccaacatctctccctgcaggtcccctgtcccctcgctcctccccccagacctggagacatggaggttggcggttggggggtgccactcagctctcccctaccccgtttcttcaggcttctgctcatggagacctgggagacagccaaggccctggccgtgggctccccaggacccctttgtggggtgcccctgcccaggggagaccctgtccccagggaggaggttcgtgactgtatgggggctctgggtgtgctgtgacaggaggcagttggggatccatgcctaggctatcctggctgcgcctaaggcccctccaggacagcacttgtgggggtcagtgtacctaaggccacccaggacagcacttgctggggaggacagggggcacagccagatgctgccctggccactctcttgccagctccggcctcgcccaggaggaagtatactttcttctttgctggtgagtttctgttcatttcaggacaagttgcctgggaaccagagagttggtcacagctggaaaagggtctgggaagggaatcgtgctggcttcacctttgagtctggccttgcaggcagggctggggtcttcagtgccgccttttgaggtctgagggggcgtcacctcccccatatgacttcgtggctgtgaaacgtgggtggcgtgggccacgattctgccttcgccccagcttcctgggggcgctcccgccttgctctgctgtgctttcctgaatgggatgagggggtctttgggtcttggggagggtgcagcagccacagaacaggagcgtgga

SEQ ID NO: 51408 - DNA, 1100 bp, Homo sapiens
gatggatgatgaatgaatagatggatgaatgattggttggatggatggatgatgaatagatggatagatgagtgaataatggatggatgcgtgtataatgaattgatggatgaatgtttggattgatagataagtggttgaacaaacagatggatggatgtgggtggatgggtgggtagggggtggatgagtgtttagattgatggatggatgagtggatgaacaagtggatggatgaatgagtggatggataaatgaacggatggatgggtgggtggatggatggatggatggatgagtggatggatggatggatgagtggatggatggatgggtggatggatgggtggatggatgggtggatggatgagtggatggatggatgggtggatggatcagtgaatgaatggatggatggatggatggataaatgaacaggtggatgagtgggtagatggatggatggatggatgagtgggtggatggatcagtgaatggatggatgagtggatggataagcagatagactaatgaattgatggataaatggatagatggatgaattaataagtaggtggtctttgtttctctgggtgacctgcctccaggtttgatcctcagttgaccaaattctagcccagttgccagcatatcatcgagctggggtttgtaaccttggggatactagggcctctccggtaaatgaatgctagtgacctctctcactcattagacaggcttagagtctttctcttctgccagaggcttctgagtgggctctgagatacagtcctgagggacttcttcagtcatgaagttggggaggagcatgcagatcagaaacagactgagtcaacagcgaactccacctgtccctttgggaaggggagtggcctttctcagactgtgaatgcagcccatgtgtaggggcaccgtgctggtgtgggaggtgaaggctccatggctgcccagctgggagtccgtggtagcaggagggcctggcgttgcagaacggctcaccccgtgtacggccctctctcagagttccttgcctgcatgagtcccttctaccgcctgcaagtcccacgttgggaagcaag

SEQ ID NO: 51409 - DNA, 1041 bp, Homo sapiens
tgtgcctggctttttttttttttaagagctagggtctgtcgcccaggctgggtgcagtggctcttcacaggagcagtcatagttcactgcagcctcgaactcctgggctcaagtgatgcccccaccttagcctgtagctgggactacaggcatgcgtcaccacacccagcttatgactgtacgttttgatggtttcatgcaacaaaggctgctctttgtcttggaagaaaccaagacaagcattttatcccaatggctaaaaaactctgactgtcctcctccacacccttgacagagggccatctgccagtgattgggaatgcactagacagcccatcctaattttggacggaattaattgttagaatctgctttgtaacactaggccaaatctatctcttgtaagtcctggtctggccttcaggagctacacagacccagttcctcctctttacggcgttaaatatttgacgatggccgatggccctgggctctgggccacccttatgaggcctccaagtcttctgttcacaaattgaacaccttcccccaacaaaaaaggtgttttttttcttttcttaacgatgcttttatgaatattcttgtacataaatctcttcatatttgcctttggatacatttctataaatgaaacttctgggacaaatggtgcattttatagtttgtgctatatatttccagattaccctccagaatggatgattttttgcttgtacgcccaccagcaatttacaagagagcctgtttccccacagcttacccaccaacatggggaattttcattctttttaatcattgccaatctgataaggggaaatgattatttcatggttgccttaattttcatttctttgattatgagtgagattggacatgttttccaaccacatcctatacttttgcaatcgagttttggagctcaatgcaggacctaacatgtattccagttaaattttatcttgttggattcaaccaatcattccttcctgttgagataattttggacctgactctgcagtc

SEQ ID NO: 51410 - DNA, 1023 bp, Homo sapiens
gcacaatcggctcactgcagcctctgcctcctgggttcacgccattctcctgcctcagcctcccgagtagctgggactacaggcgcctgccaccacgcccagctaatttttttctttttttgtatttttagtagagacagggtttcactgtgttagccaggatggtctcgatctgctgacctcgtgatccacccacctcagcctcccaaagtgctgggattacaggcgtgagccaccgcgcccggcacgttctagttttaaagagagaaaagctaagcttagcattccattgtgtagggaatagtatagcttctctgatctgctttggtttcccttacaggtgtggaggcacagttggtgctattttcacttgtccactagaagtcattaagacacggttgcagtcttcaagattagctctccggacagtctactatcctcaggttcatctggggaccattagtggagctggaatggtgagaccaacatccgtgacacctggactctttcaggttctgaagtaagttcagtcttgtctgctcctgccacctgcacaccctgtaccgccactgtcaacagagaatgttcatcaagcttatcaaatgtgatgttctgtttgcatagccttggtcctaacttaagaattagatttctttaccaatacctttgagctctgaccttgctcccctggcagcggggggtcccagtgtacatgtgaccatcatccagggcagttaaagtaaacctagcaaagcaaaccaaaaatccacgtgtaaattgttgcatcacatcattgctcttgctcaaagcttttgagggaaatgaagataagaggtgatagagtaaaattttaaaaattgcacaacagaagagttgtgaatattttattttattttatttatttactttttttgagacagaagaatctcgctctgtcacccaagctggagtgcaatggtgcgatcttggctcgctgcaggtgatctgcccaccttggcctcccaaagtgctggtattacaggc

SEQ ID NO: 51411 - DNA, 1224 bp, Homo sapiens
tgcagtgagccgagatcacgccattgcactccagcctgggcaacaagagtgaaactccgtctaaataataataataaataaataaaaatacaaaattagctgggtgtggtggtgagtgcctgtaatcccagctacttgggaggctgaggcaggagaattgctagaacccaggaggcagaggttccagtgagccgagatcatgttactgcactccagcctgggcaacagagcgagactccatctcaaaaagaaaaaaaaaagggagagaaagaaaatatgtctaactgatgctttttgaggcatgttttttcactgtgctaatgatagcagtattctacagccttccgattctgtattgtaaccaaatcagataagagtcgagcttgacatctctcaaacattttattctctcaaggaactaatgagaaggttgactctttatcatttttaataggccttgcctgaggggttttaaaggtttgtcttttcttattattcaggtcgatcttggagaaagagggaccaaagtcactttttagaggcttgggtccaaatttggttggagttgcaccatcaaggtaagcattaaactttccagctagctcatgctaagcagtatggaattctgggtcctttcttaccaaagggtgatgctgctgaatgaccagtgtctttttctatgttggatttgcctaaatatagcggacatagcaaatagtcattgagaatgctaggcgtgtcttcagtgtgtgaaagaaaggattctacttactgtattctttatattcttaagtgtgaaaattaatctgctatcattactgtaatgtactttaagtgtttgctactctaagtatggcatgtggccagcagcattagtattgtatgagagcttgttataaacacacaatcccagggcacatcccagacctacatcagaatctgcattttaacagaacccccaggtgactccaacgcagttagaaacactgatccagaggaattgtaaaggcttttaacttcactttctgtaaaatgacatcctcatatctttgcagggcttctcctgaaagcctgtttgaaatatacagaactgtactgtcccagtacataagggtagtcactggccacatggagcagtttaaatgtaaattaatcagaattaaaggttcagttgctcagtcttcatgtttcaagcactcaatctccacatgcagctaatggcta

SEQ ID NO: 51412 - DNA, 1557 bp, Homo sapiens
gtgggaaatagacacagttgtaaccttgacaattttattttatttatttattttttgagacagagtcttgcttgctccgtggcccaggctggagtgtagtggcacgatcccgactcattgcgaccttcacctcccaggttcaagcgatcctcattcctcagccactctagtagtaggcgtgcaccaccttgcctggctaatttttgtttttcagtagagacggggtttcaccatgttggccaggctggtctccaactcctggcctcaagtgatccacccgcctcggcctcccaaagttctgggattacaggtgtgagccaccgcacccggcctaaccttgacagttttaaagttgtgtgctgtggattcgttccccatttaatatgtggcgtaaagtaggtctttctctctctgcagaagtcataaggacgaggctccgggaagagggcaccaagtacaagtcttttgtccagacggcgcgcctggtgttccgggaagaaggctaccttgccttttatagaggactgtttgcccagcttatccggcagatcccaaatactgccattgtgttgtctacttatgagttaattgtgtacctgttagaagaccgtactcagtaacaggccggaaaattgtgctctagaagaataaaactgaaaaactctagagaattttttttccccattgatgtttagaaagtttgagactgaaacaggaaaggccataaaatatctggttcatatcacctgttggacatttccttttggattcatgctttctggaaggtttaaattcattaacgttaatagttaattataactttttttttaacttaagaggattcagggttaagcaccaactaaattaaatcatgctatttaatttaagtatacatttggcttgtgtcctcttttatgctcactatactatgaaggacttaagtaattcagataaacctgccctagaactgcagagaaaaatgataaagtgagaatacaacttgttttataatctgactttaagatcttgcactgctagacagggaagaagtgtcgcattttggctgggcactgtggctcacgcccgtaatcccagcactttgggaggccgaggcagatggatcacgtgaagtcaggagttccagaccagcctggccaacatggcgaaaccctgtctctactaaaaatacaaaaattagccggacgtgtgcctgtaatcccagctacttgggaggctgaggcaggagaatcacttgaaacccagggggcagaggttgcagcgagctgagatcacgtcacttcactccagcctggtcgacagagtgagactccatctcaaaaaaaaaaaaattgtgtcacattttggtggtggtgtgtggaccaggacaaacttcccagcaatttttcttctttgtacatttccaattacttgcagattgatcatctaagcgttcagactgctgagatgaatatatataactttctgagactcaatattttaagctataaaaaacttcctgaagttatccttttctccctactttgaaccaaaggcaag

SEQ ID NO: 51413 - DNA, 1284 bp, Homo sapiens
cgcctgcccgcctgcccgcctacccgcctacccgcctacccgcctacccccctgccggcctgccgtccttccacgcggagagccatggagggagtgagcgcgctgctggcccgctgccccacggccggcctggccggcggcctgggggtcacggcgtgcgccgcggccggcgtgttgctctaccggatcgcgcggaggtgagtgcatggttcggccccacgcggccctctgcgccgcccgccaggcccgcccccgcgccgccccggcccgctgcccccctcggccgggacccgggctgcccgcgggcgcgcggagacccccggcgcgcgccgccgccccccgagaccgggttgagactgcagtcgggaagcggctgcggagtcgagtggagcggcggggactccgggaacgtggggcgcgggcgagagcgccgcgcgggggccacaaacttcctccgggagccgcggggggctggagccggtgcgcacgggccgcccctgccctcagccccgtgctgggccccggtgcacggcgatgctggcgatcgcggctggcggttgctgctcggcatgtgacgtcccgggcgtttttctacacgcctcgcatccgcgcgtttcagagccacagcccctgcttacgctagagcagctgagggacagggaggctcagtaacttgctgttaatgagaggaatcatggtttgagccgatggaatctgcagggcagaccccgaggctgggctgcctcccagaggtgggcaaggcctgagatgcctccaaacagttcaagacgggccggggccaccctcctccctgcccggctcacgggccatgcgggcccccgggttcagatccggcctctttcatcggcctccatcgccaggcataaaagcttagtggcctgttgcttcagcagagcctcgcaggtagcttactgtttctccacttgatccacctttccagagggcaggggggaaagtggggttgtgagaacatcctagaaagagtggatgggtttgcagcttcggcaagggatgcaatgagctcacacccttaggaaaaaggggagaagggacttgcccactcagcagcaagtggcagagctggggtttgaaccctgatcgtctggctggtctgtttgttcttccttaacacataccggtgctgcttctctcctccaggggggaaacggggaaaaagaagtacaggtggttgagtcacagaggcttcccagaggaggaaggcatgggagggacatcagctgtgtctggaggatgggccagatg

SEQ ID NO: 51414 - DNA, 1049 bp, Homo sapiens
gcctgctacaaccactgagctccccagggcagggaccaagccccatccagtgccccctctagcaggttccccctacctggtgctttcctaggctgaggacccagcgctgggctcgcacctagaacagagcccctcccacctgcagggaatagtgaggcatcccgcaggagctttgtttcaatacatgtccgtgctcagggctctggagtggtgtcatcattaaggacacgtgcccgtcttgttttccctcagtgtgtatgttgggcttgtggacggggcaggtacagagcatgcagctgccctagctttttcttagggacccatctccctccgggcttcctcaggcttcccaggggctcggcatcgagctagcaggagccgagatagtggcctccaggccctcgtgtccacccatcaaatgggacccatagggccagctgctgtccccccagagctggaaccgttgtgggcaggggcagcccctccaggcccgagctcctctcttgcttgtgttgcagggacattctgtcacgttacctcaaaccttgcccaccaactgtggtttgtcccagagtcaagttaaggacggaggttgttggcttgcagaagagaagtgggctgaggggtttatcagggaaacttgggggcttctcccagagcaaaaacagggtccagcctaggctggctcagaagagattgacccagatgctgcctcaacaggccgggcagaggcaagcataggctaggggccaggacttcccccacctgcgtggggacctcgtccgagctgtggacagtgtttcacatgtggtcatgtgtctgacgccgccgtgctggtgcctgggggacctgcaattcatgcccagctccccatcgacccctggcctacctgcctcttgggacctttcagggctcacccccaaaggcactgtgggagaggaccccctggcaggtagggcccgcctggccaaagtgggtggcagctgctctggccaccagagagcccacccccaactctagcagggattacccagggctgagagtgacag

SEQ ID NO: 51415 - DNA, 1050 bp, Homo sapiens
cggggttgtccatctgccccactccaggcagtgtcagcccgcagccaccttcccccatgttcacccaccttcttggagctctgcatctggggagcagaccctgagctcctggcctgcgggtgcgtccctggagcaacagaaccttgttagtgtccccatcacttgtgggccctgccctggattggctctaactcccggtagtccacatggctctacacagtgggcatttgtcctgttgggcagaggggaagcaggttcaaagtggggttgacttgcccccggtcatcccctagtaagtggcaggtcaggatctgattccacgtctgacctgtaagatggaggcagctcatccacccctgcagatgccgagcctgttcccccaaccccacagggcaggtatgacgaggaggtcgaggtgtaccggcatcacctggagcagatgtacaagctgtgccggccgtgccaagcggctgtggagtactacatcaagcaccagaaccgccagctgcgcgccctgttgctcagccaccagttcaagcgccgggaggccgaccagacccacgcacaggtgagaggcggcatccacagggcgggggtgggggtgttgagtttgttcaggaaaccctcccaggaggctgggcactagtgaccagagggtagctcttcagagctgagcccctttatttttattttattttattttatttttgagataaagttttgctgggattacaggcacacgccaccacgcctggctaattttgtatttttggtagaaacggggtttctccgtgttgttcaggctggtctcgaactcccgatctctggtgatccgcctgccttggcctcccaaagttctgggattacagatgtgagccactgcacccgtccttttttttttttaaacagagtcttgctctgtcacccaggctggagtgcagtggcacgatctcggctcactataaccttgcctcccaggttcaagcgattctcccgtctcagcctcccgagtagctgggattacaggcacccgccatcatgcccagttaa

SEQ ID NO: 51416 - DNA, 1400 bp, Homo sapiens
agtcgagagtggcccgaggccgtccctcaccgggcatgttccctctggctgcccactccctcagggcccacatgtcctgccactcgccactctgagcacgagttcaccttccagatgtggccagggtgtgccagctcctctctcctgtgcgttggaaccccgggggaggcaagagcagatcacaggtgcatgagggttacacccgtcacctgggtctgccgggatgggttgggggggcaggtgccaggcctcactgctgtgaatctgccacgcctgggggtcctagaggctgccccaccccagtgattgggtagcagctcacatcccacccagcttcacaagtgaggaacccaggtgcatcgggagaccctcgggggcttctgtggcctctgtgcccgatgacctgcgtggcttcagacaaggccccagcgttactgggctcagcttgttgttctgtgtggagcgtgaggtgagaaaacccctctgaaaagatgtggtcggggccacgcttcccactggttctgcagtgaggagttggggcgggtgagccaaagcggccccccatggtgtctacctgaggggcagggaaccgcctgcctgtgcactcacgccaccccccagcccacaaagagcccatctgagagaaggacgtggtggagccaggacgggaaagcgtcctgtcggctggccatgctgttgcttgcgtctcgaatcttcggttctcgaggaagtgttgacagtgtgatgctaatgtctgcttttcttggcgttgggtagaagcaggacatctgtgtgtatgtgcgtatttaaattagattatttataataaccagagccagccctcgcgctggccaggatcctcctgccgagctgatgtcgctcctgccctctgccggggtccggaagcgacatctcaggaggtagctctcagcagagtgaggattcctgcctttcgtagagttttgtgtgactttttaaattattcatgtgtcccttaaaagtttcactacgtggagaaaattccagcaccaagtgttgtggcaacagctgagagagtgcaggcaccactgtgttgtggcttgttgaccgggaatgtgtcacccctgccagggaactcttctcctcgcgggggacttgggatggccatcagaccttctagggtctggctggggtcatcctaggtatgggtgaccgtccctgagacataagcgaggtagattcagccatcctcaccctcagacttgaggtccccacccaggccaagccggccccccgtaccccttgcctgggagcaaaccgccaggacgcagcctccacgccgcacctgccacattcagccctgcccaggaaggaacacatgacccttctgtctgtgactgttgctgagtctctgtctcatg

SEQ ID NO: 51417 - DNA, 1741 bp, Homo sapiens
acatcccccaacggtactctcaggtcactgggggacctggtcacccttggctgactcttggctatgtctgtgctgccgggcagggtgggcacaggaagcctagcgcagagccctgccccacaaactccctcccatggagggtcatgccccaaggtcccagcaacaccttcactgcccctgcctaaaggtgccctcagggtcattccctgaagtcgctgcgctgtcccgccaaatggaatcagaattctaacatgacgacacaaaacctcatcttctgtgtagaggtggagccttccctggagtcttgggggcaagcagcgggcgctgggcctgggaatcacaggtcagcaggcggaacaaggatgtgtccagtccggctgaccggggccttccccagggtccccagctcagctcctgccttgatgcccacattcgccaaacatggcctcgcctttggttctgaagtccaggtggtctcctggcaccttggaaggcattagaaaggttacatgattctccgggaagtcaagagctggccccacactttccttataaaacttttttagagggaaagtagcagggaggttggtggcgcgcggcttggctagcgatccccgagcatgcagtcatgctgggcgcaggtcccttaagcagcccccggctcctgcagggcgtgggccagcctgcccgctcaccagcacgttgtccactgggctcatttgtcccttggcaccgaggtaaggctggacccccggagctccgtccagacggtggactaatgtattaactgcctctgtccctctcttccctctgtaattgggtgccttaatcagaagcatggttgacgttctggcgtggggccatcaggtcctgttgtgtgatttgtaccatctcgagttaaagagacactgtcaccttccgtctttcgggcagccttgcggtcgtggatgggtctcttctaagttcggttttggcgttgtcctgtgagagcctcttccagggggttccaaggcctggctgccccccagttctgctctaccaggaacttcagaggagtttccagagtgcaaggccagagagcaggaggcagccttctaagggcagagctgtgggaggacttccaggaatcacacctgggaacagagggtgcccagagccgtgctggggcctgacttcctatgatccaggcccatctgggagatgagccaggatgtccctgagcccggccgctctgtgggaaggctcggcacagaacaagaagtggcaaggagtccaagtccattaaccttcattgagtgcctggcacggggctgggcatttttgcttcaaggcgaaagggttggcatgaggttggcaaaggcgacagtgtcactttaataccgagactcgtagtggagatagtttgctgtgagccgagggggtaggagggggcatgtggggagggccgggtcttgctggcacctcccagccacccgctcctaatggcgtgaatgtggtcggattgcttttctgctttaactaacgcacgcctcctctgggaccccagctgaggcccccaccttgcactgtgggagaggggtgggacccactgcaaggctgcctccaggacctcccgctgaccctcttcttgtcccgtgcctgacgggcccttgcaggttcttcccaggagactctgccggccttttccccaccagccccagcttggccatccctcacccgagtgtcggaggctctccagcgt

SEQ ID NO: 51418 - DNA, 1142 bp, Homo sapiens
tctgtaaagtggccattgtggtcactgcctcatcacccaggccccagctcatgacagcccagcccatggccttcctggcggctcagggttaggaaaagctgtgccttcagggaggcagggagtgggggtctttcctgctagggaagcctttggccaagagaagaattgggggtgagcctcaccagtctcagagagtaccctgggcagagccttgagctccccacaaactgcatgctctagggggctgctcagctgcacagcgaacccacccacccaaacaatgttctgaccaggtctctgctttgcaggtcgtttcggcccttccctggtccggggcctcctggccgtgagcttggccgccaacgccctgttcacctcggtgtttctgtaccagagcctgcgctgacccaccgttggagcccctcggaggggagcaacccggtgcctgctgcttcaccactgccggcctcaggaccctccctggaggggctgccacctctgccctcatctccagggccttgacctcactggactgtgactgtcctcaggacacctgcccctcctcacctaacggactgcagggctgagcatgtgtctgaggtcacactctctgcccactcacctccttggctgacatcggttgtgtttggtgctgacactctgatcccgaagccagggagccccaaggggctgcatgaccctggggtgccccacacagttcagccctgcctggcagggacgccagtactactgtaactgcagcaggagctgcccggcctgccttctggccccacgcccacaggcgtagtcacatctttgtactgtactcccctgtctcacctggggcaacctcagagccccactaagctgaaggccccctgggggagggggaagcatggtccttatcatctgccctatcttgccccttcctgtggagtgggcagaagggctcccgggatcctcagagctcccaggtctgagcagccaaaggcccagctgggcctccaggaccagcgcgagcccctgccccaccctcccctgccccatgtgccctgctttgtgacctctgttgaccttcctggaagcagccccattaccctgagaatgcggagcgccctggcccacctcgccctgtgtttcca

SEQ ID NO: 51419 - DNA, 1067 bp, Homo sapiens
tccatttccctggctcaagccatcctcccacctcagcctcccgagtagctgggactacaaggtgtgcaccaccacgactggctaatttttaatttttttgtagagacgggggtttccctatgttgcccaggctggcttgaattcctgggctcaagtgatcctcccgcctcggcctcccaaattgctgggattgcaggagtgagccacagtgccaggcctggagattttctttatagatagaaatcattttacaaaaggacagcttttcagatctactcctgtgcctgcagtttctaagaataatcccttcaaaatatggcgaagaagtatattttggggtggcacacgctggtctcccatagtcacattttgggtgtgtgtcctgagccccaacactggtcacctcgcaatggcgcttggggtccctgggtgcctagagctgcaggttaccccctcttcttctcctgctctcagcctttctcccgctcctgctgaaattctttcctgcgtgaaggcggagcgcttaaaggcgcctaggacctttatttcgttgttttcctttgcataaaaagaaaacttgttttgtagaagggcaagcaaggtgcagcttccagaggcacctgggatgatgcccctctagcggtaggcgaactggggagtgtgggcggcgggggaaggcgaggccctggaggacctgttgtttttcctgttgcaagtgaaaaggaaacaaagtgggaagtggagtgtgcgggttggcggcaggcggggcgccccggcgcgccccgcctccctccctcgaggctcactcgcgcccagcgcagtcgctccgagcggccgcgagcagagccgcccagccctgccagctgcgccgggacggtaagcgatcgccgctggctgcgtcaggggaggtgggaagaggaccgcggccaggggctttgggagctgcggctgcgctcgggggcgcggggctggctggcgggcgtctctccggcacacacagcccgtgcgccctggccctgggcgcctccccgagtctagcgagccgggtcctgggagccccgggggcc

SEQ ID NO: 51420 - DNA, 1016 bp, Homo sapiens
tgaatccccatctctactgaaaatacaaaaaattagccaggtgtggtggtagatgcctgtaatcccagctactcgggaggctgaggccgaagaattgcttgaacctgggaggtggaggttgcagtgaactgagatgtgggccattgcattccagcctgggcgacaagagcgaaactctgtctcaaaaaaaaatcagcctgtgtggtggcatgtgcctgtgatcctagctactcaggaagctgaggcaggaggatcacttgagcctgggagtttgaggctgcagtgagccatgatttgccactgcactccagcctgggtgacagagtgaaaccccgtctgtaaaataaacaagcaaacaaacagacaaaaacaaacacaaaaaataaatgtaggaaaagtagaaaaaggaaaaaaattacctctgatccagccatatgagaaaaccacagtgaatactttggctattgcctgttttctcctctatgtacagtgttttttttgtaataattctgattatgacctttcatatctttttttctgagttaacggtataacattttattcatgttattaactttatatagataccattgtattttattttgcttgagaatggtctcactttgttgcacaggctggaatgcagtggcataatcctagctctctgcagccttgacatcctgggcccaagcgatcttcccatcttagcctactgagtagctgggactacaggcatgcaccaccatgcctggctaattttattttttattattattattattatttttgtaacggtggaccttgccatgttgcccaagctatagatagcattttagttttttatttttatactttttttttttttttttgagacagggtcttgctctgtcatccaggctgtagtgcagtggcatgatcacagctcatggcagcctcaacctcctgggctcaaatgattcccccatctcagcctcctgagtagctgggactacaggtgcatgccaccataaccaact

SEQ ID NO: 51421 - DNA, 1049 bp, Homo sapiens
gcatggaagaggggctgggtccagctgggctgggggctgtggtgctccctggaggcaccagggcggtgcctgcagcctgtgagggctgcacctgcctcaacctctaggggctgagcccacctccctgttgtctcttaacactttcacacgctccatcgcaacagcctgcagtcatgggctttattgtcctgtttgctggacatgatacctgagtcctcagaggttggccctcctgcctggagtgtgtttcactggggaaatcgtataagcagggcaggtctgggttccactggcaggaatcgagggggactggatcagagggacttccagggtggtggtgtcaggtggaattggaaggggccggacatcaggtggcaggaaaagtccttccccacccacatgggctcataggaatctgagaagtccagggagccctaggatgttagagcaagggtccctgaagttcttgatccctgatggggaaactgaggcctggagtggggaatggacatgccccgaggtccccagagttggggtagctgagacagggcacccatgcacagcccgtggtaccctccctcaccccagggccgctcatgcccctcaggccttccctgtgctgcaccaccttccttcgtgtgggaagtagagttcagacccacctgaggacattcaagggggagactgacaccttaagggggaggggagaggggctgggcctctgcctcctcacccatcatcccggcaccttctacagctggtggtgcaggccgggcttttccacggcaacgagatgctgtgcaagacggtgtccagctcggaggtgagcgtgtgctcggagcccgtgtggaagcagcggctggagttcgacatcaacatctgcgacctgccccgcatggcccgtctctgctttgcgctgtacgccgtgatcgagaaagccaagaaggctcgctccaccaagaagaagtccaagaaggcggtgggtcccagggccggctgggaggggtgcagaccccggagagccagtacagccccttgctgggccactc

SEQ ID NO: 51422 - DNA, 2358 bp, Homo sapiens
ccaacccccacccgttcgcaggtaggacatggggagggagaccaagcggagatgctccatgccgtccgccctgcccccaccccaccgtgggcacagcctcctgctcagcatgaccgccggtctttccctgtcccaattattccccatcacacacaaggaaactaaagccctcgaagagggcagatgatgtcacccgcagccatggagcaggacgtggccgagccaggttggaggcccatggcgagcttttcctggtatttcctcctggcctgtgggttcagctgaagcgtgctgtccagcccgttttgaccaggcacagccgaggaggtcaagggcacagtggccttctgggccgagtgacctcgcatcccgccccctcattctcccacagtcgtccccagcactgcgacagttgtgatcgtggtgtgcgtcagcttcctggtgttcatgattatcctgggggtatttcggatccgggccgcacatcggcggaccatgcgggatcaggacaccgggaaggagaacgagatggactgggacgactctgccctgaccatcaccgtcaaccccatggaggtaggagtgggcgggcgacctccaggactgagaggcagcacaggccagggcctccgagaagccggtacggcgcggctccttcaggttcacatgctttccatcgcgtcatctgctcagcaagcctggggcttaggtgtcttcgtgggtaaaccgaggctgagagagaccttattcaaggccgttctgccttaagtgtagagaagagccatgccagggcttggcgctcttgggtcatggtaatcctgagagagttctctggtggggcagctgaggtgctgtcccaagctgctttgtatgtgggtgactccgtgggtgctgactggagctttgttttcccttcacttctaatataacttccggtgccgtcctggctgctctgtcgctggggagggagacgctggggcaagttctccttcctctgtggctgtcgagaggagaatgccaggtgacggggctgtgggcagggccggactcatgtggccgtcacttctccttgccagacctatgaggaccagcacagcagtgaggaggaggaggaagaggaagaggaagaggaaagcgaggacggcgaagaagaggatgacatcaccagcgccgagtcggagagcagcgaggaggaggagggggagcagggcgacccccagaacgcaacccggcagcagcagctggagtgggatgactccaccctcagctactgacccgtgcccccggccacctcggtttctgctttcgaagactctgctgccatccgttctcccagtcccaagggtccacgatgtacaaagtcatttcggccagtaggtgtgcagacccctccccgccacgatcgtcgctgtgcttggtgtgtaggaccctaggctccccgcccaccctctgcctggtcgcgctcttcagtcccacgaggagctgacacgtcctctctggccgccatccggctcgcacaggggcctcccagcgcctcaggccccgcgtttgtgtctggagtctccccccggggagaggacactggcccctcgcactccagaaaagccatgccagctgggctcgttgacaaagggtaaaacatgctcactcccacccggtaatcatttttttctttttttaaaaaaagtttttattttttccaaactagtgcatgtataaataatggcaggatggggggtactgtgtagatgattaactgactttttaatattttgtaaataaatcggattccttgtgtcctttgtgctagtgtaacccgggactggaatgtaaagtgaagttcggagctctgagcacgggctcttcccgccgggtcctccctccccagaccccagagggagaggcccaccccgcccagccccgccccagcccctgctcaggtctgagtatggctgggagtcgggggccacaggcctctagctgtgctgctcaagagactggatcagggtagctacaagtggccgggccttgcctttgggattctacctgttcctaatttggtgtggggtgcggggtccctggccccttttccacactcctcctccgacagcagctccctgggcagtggcctggtctcaccgtgtgcagccttgtggtttatgcttaaatgtacattttcctgctggtaaaaggagaaactgagaggtgtcctgcagaccggctgaccactccttttggagacggcaggaggcctgagcgatccgtactcagaacgtccaggagagacgcatggcccgaagtcaaagtgctggaattttccaaaacagcctgttctctcctctctcctccccagagcac

SEQ ID NO: 51423 - DNA, 1079 bp, Homo sapiens
aggcacaatgtccccacaattcttgctcaggacacatgaaactccccccctttttttttttttttgagatggagtctcactctgtcgcccaggctggagtgcaatggtgtcatcttggctaactgcagcatccacctcctgagttcaagcgattctcctgcctcagcctcccgaatagctgggattacagggacctgccacaacgcccggttaatttttgtatttttagtagagacgggctttcaccctgttggccaggctggtctcaaactcctgacctcaggtgatccacccgtcttggcctcccaaagtgctgggattacaggcgtgagccactgcgcccagccgtttcttgaaagcaactctcgcttgcttctgtcgttggtccttacgagagccatgtaggtttggggtgagccggcagggcatccagtgtgccccgccacgctgggccccactgcccctacttaatatttctggttgggcctcttttgcagttcaagaatcactggtgtccgaggagatcgtgcacgacctggatacctgtgaggtcacggtggagggagaggagctgaaccacgagcaggagagcctggaggtggacatggcccgcctgcagcagaagggcattgaagtgagcagctctgaactgggcatgaccttcacaggtaaggggagcgctgcagccacgcaggtgggccaggctgcaagaggggactttgagagctcttggctggctgctgcctgccatctgagaatgttgagttatcttagagggagatggggaaggagcacgttcgctgggatcattgttggctgcacgcatactcctgtctcctggacaggtaccggatgtgtagccactactctctaaagggggagggttgaggcgtgggatgacacgtcccccacagagggaagaatgcccctgtgcacattgcatttattcccatggctagaaagccaacttgtgtgaccccttggcctagctaacctgggtgtctaattgagcctgcctgtgctgacggctgcagccctgcccatgctcctgccctaagccacccggcaatcttccccct

SEQ ID NO: 51424 - DNA, 1050 bp, Homo sapiens
tgtgtgggttcattccccagggcgtgccaggtagagaaaacagccatgtggaacccagccagctgagaaggcagtggctggagaggctggtggcgtaggaagtgtcaccatgcaccctggtgatgagaacagggtaggccaccttaccaggtagtggccagaggtgtggggaccctcaggggacctcttggcttcaggtgagacacccccaactctccctttctccaggccatgtgcatgatcataaacggtttaatttcttcattgcgcttccatgtagattgcaaggctaacaggacttggtatgaactaacccgcatgtccatccactgagctgccagcaccggtaacaccgtgttgagtgagaagtgagttgggcgatgctgggttgcacgcctgacttcgccttttctcccctgacccaaaggtggcgacctgcacatgacccagtttttccgaggcaatctggctggcttaactctccgttccgggaaactcgcggataagaaggtgatcgactgtctgtatacctgcaaggaggggctggacctgcaggtcctcgaagacagtggcagaggcgtgcaggtaacaccgagcgctcgactgcacaccactcatgggccccttagactacagccccggaggctggtgggatgagggagtgagtaatctgtgattgatacgtttactgttgggtaaaagagttgtgttcactggacttaaacgagcttttctttttcaagtcagcaattcaaatcgaacccaggccagtcccctttgtggaggcatctgtggtttcagctcctgcggttactggcttattcttctcctctctgtggctggtgtgatttcagatccaagcacaccccagccagttggtattgaccttggagggagaagacctcggggaattggataaggccatgcagcacatctcgtacctgaactcccggcagttccccacgcccggaattcgcagactcaaaatcaccagcacaatcaagtacgtcctgatttttaacagccggcctgttttgcccaatgacactt

SEQ ID NO: 51425 - DNA, 1108 bp, Homo sapiens
tgggaggcaggagaatcacttgaacccaggaggctgaggttgcagtgagccaagatcacaccactgcactccagcctgggcaacagagtgagactctatctcaaaacaaacaaacaaaaaaaccccacagattgtttaaaattcagttaacaggagagaggatctccttttcttttttgtggttgattctgccacttttgctacacgttggccgtggagagcttgggctgtgggcagcagcttcattcccttctaccagcgtgttgtgggggagtcttggtgtgtgtggaggtagcacaggcccgtggctcacatgggcttcacctggatacacctctagccttgccccttgatgcagccccgcacagccgcagcccaaaaggggccctagcacaccatagaggggagggctgcagggctgcagggcttgaggagtggcctttcccctcagcatgacctggagagtgttggttctgtgcttagccgctgtgtgtgtgcctttctggtaggttgtattactctgtacactggatccaggagctagaggagctgaaggtggtgagggtccccaggtccaccgtaggctatgcttccctaggtgggttccttagcctctgcatctccctctcattcagaaaaagtgattgagaatgtcttctttcctctgtcgcccaaaggttaatggctagacagatgtaaacttgtttggagcttccaaaatatacagacttccgcatgcttactgtgtaccaggcttgggacacgtgtgtgctatgcctttttgtctgcgcagtgtcttccctattaggagaagaggtgctgttggtccggaacttggtggtgtttatatcgggagcagcattgcagcccaggctcagcctctgtggagtgtcctacttcatagcacggattggggaggggaacgaattccatgtgtgtgctttcattcatcttattttgaatctaacatatgttttggcaaggaggatgtgggaaggtggaacaaaagaagcctggggttgggggtggtaaagtcacttctgggaaaaggtgattaaatacaagcttgcgtccagatgggtacatcccagagcgggatcacgaggga

SEQ ID NO: 51426 - DNA, 1428 bp, Homo sapiens
gccactgcgcccggcctaaaggcactttttatttttattcagaaaaggaatggccagtggtaaactaactcaaccctttcgagggtgggtatccagcttgcccatacaggaacttcctggtgccacactgttggcagagcagaattgggcagctccctacttgggctgtgtcctctggttagtgagcaatgcagcccccgtagtttggaaatgccctagagatgcttggcttcttttggtgagatgtatttgcagatattttgtggttagatttttttcatccttttcctcctaggaagacccttgtgttgggtgacttggtttccatgggcattgatgagaaggaaagtggacatctcacacctccccgcttccctttgcctctgtaggtctgtgatgaggaatggcaccactacgtcctcaatgtagaattcccgagtgtgactctctatgtggatggcacgtcccacgagcccttctctgtgactgaggattacccgctccatccatccaagatagaaactcagctcgtggtgggggcttgctggcaaggtacctgtcattaccccccgccctcgactcgagaattaagttgtacctctttactaggttggtggcagcaggctgtgatcggtatcctacagccttaccctcgtgtcctggatcttttccttccatttcctgtgtacagcctttttggggacactgccgttaccccactctagctagcatagctctgtctgtaggtgctccataaaggtgataggactgaccacaccgtcacctttcccggaaacccaagagggagcgttccacagagggagcgtgtagtggggggaactgttttataaattaatccgtttattgaaaggttcacaaggacaaagaggcaacagcaagagtcaggcacagaaataaaggacgcagaagtagaagtgcgccttggacctggaggactcttccagagtgtttatcacttggtgacctggtaggagggctgcgagggctctgttcaccctcagcaagggccacgtgtggggaggattccatggaagtctctgctgagaggggatatgataaccaccagagcaccagtgcttcttacctgtacttaccaagtggcaggctgtgtgccaactcctttatacacgttgtctcacctaaaccttagaatcccttttttatagctgaagaaactcaggcccacagaagcagcaagccaggtgtcacccagctgatgaatcaggagccagggttttgaatttttttactttgagaagcctgtgggccaggcgcggtgtctcacacctataatcccagcactttgggaggctgaggcgggcagatcacttgaggtcaggagttcgagaccagcctggccaacgtggtgaaaccccatctctactaaatatacaaaaattagccatg

SEQ ID NO: 51427 - DNA, 1572 bp, Homo sapiens
tcacgaggtcaggagttccaggccagcctggccaacatggtgaaactccggctctcctgaaaatgcaaaaattagccagttttaatggggcgcgcctgtaatcccagctactcgggaggctgaggcaggagaacagcttgaacccgggaggtggaggttgcaatgaaccgagatcgcgccactgtactccagcctggggacaaagcaagactctgtctcgaaagaaaaaaaaaaagtaaactggagccagcagattgcctaagtgtaagacaagcacgtgcctgggggcttgaggtgcgcgggacctctggctcctcacatgagtttcaccgagcactgtggcttcaggtgcggccgcgggcactgccgagctgctgccatccccgagtggatccctcaactggaccatgggcctgcccaccgacaatggccacgacagcgaccaggtgtttgagttcaacggcacccaggcagtgaggatcccggatggcgtcgtgtcggtcagccccaaagagccgttcaccatctcggtgtggatgagacatgggccattcggcaggaagaaggagacaattctttgcagttctgataaaacaggtagggtaatagctctgcaagcgatgccaggccccagtgtccagtagggtgggtgccagcggcaggctccctctcctttcccagggtcccctgccagcctggtgctcgtaggccatgtgccatgctgtgtgcctggggcacttggttccctagagccacggcctgggcatttgggtattagctgttgttgctcagtggggtccacggtgatcacaggctccgcctctcaggaaagcccaagtgtatttgtttctaagccctgccttggcttagccgaagagttcatttatgcagatgaaattgtgtcttcaaaatccattcaagaaacagctttaatttctcctttggatctttagttggcaatttacccatagaaactgcctttgcagatatgaatcggcaccactactccctctatgtccacgggtgccggctgatcttcctcttccgtcaggatccttctgaggagaagaaatacagacctgcagagttccactggaagttgaatcaggtgagtgaattgaaaacgcactaatagggccgggcaaggtgctcacacctataatcccagcactttgggaggctggggcacgaggattgcttgagcccaggggttcgagaccagcctgggcaacattactaagatcctgtccctacaaaaaaaaaaaaacccacgaaaattagctgggcatggtggcacatgcctgtagtcctggctacttggggagctgaggtgggatgattgatggagcccaggaggtcaaggctgtaatgagctgcgattgtgccacttcactccagcctggatgacagagtgagaccccgtctccaaagaaaaagaaaaacactgtcatcttctaagagagagtaagcaggtactgcaaccttgcacatggatggctgtgtatagtcagtgtatatttataattttatgagtagctgggactacagacacatgccaccacacccagctaa

SEQ ID NO: 51428 - DNA, 1055 bp, Homo sapiens
gcgttttagcttctctctggtccaaatcaaactggctgccagccctcccaggagctggggcagcgctggtgttctcaggcctggctgtgtgctaatgagactccttttaccctcgagctatctaagtgctcctgtggaatgcctgtctatattttcttctctctctcttttgtattcctgcatgaatggatgcaaagtaaacaagttgcttggaaagccagaatctgcttcatcttactaaagcccgagaacttccccatgtttaaaacacagtgcccctgctttgtccacggaccctccaaacccctggctgccaaattgttgtcatttattttctttgggggtggagatggggggaggagggcaaggtgcagaagatctatgtggtaggaattcttacctgttctgctttgactccctaggtgagatttgtggatttaaaattcacgggcagaatgtcccctttgatgcagtggtagtggataaatccactggtgagggagtcattcgctccaaagagaaactggactgtgagctgcagaaagactattcattcaccatccaggcctatgattgtgggaagggacctgatggcaccaacgtgaaaaagtctcataagtaagtaagctggacaaagagtgaacataacccaccgagtaaacgtgtgtgcgcagaacgaaaatagtagtgactattgcctgctccccaagactgtttttgaaataggcagaagatagttctcaagtgtctacaattagattgtaaacacttggagggcaggaatcatgtctctctacccttgtatacagtttctagcaagagccttgctcacattaggcatattaggttttttggggttgtttttgtttgttttttgagatggagttttgctcttgttgcccaggctggagtgcaatggcatgatcttggctcgccgcaacctccgcctcctgggttcaagcgattctcctgcctcaacctcccacatagctgggattacaggcatgcgccaccacgctcagctaattttgtatttttagtagagatggggattc

SEQ ID NO: 51429 - DNA, 1056 bp, Homo sapiens
atttaggttggaaatgaacatctgaaaactgcaaaataacaaatagatgtacttattcatggtttgtcactagagtgttcattaaaagaaaaatcctgccgggcacgggggctcactcctgtaatcccagcactttgggaggccgaggtgggcggatcacgaggtcaggagatcgagaccatcctggctaacatggtgataccctgtctctactaaaaatacaaaaaattatccgggcgtggtggcgggcgcctgtagtcccagctactcgggaggctgaggcaggagaatggtgaacccaggaggcggagcttgcagtgagccgagatagcaccactgcattccagcctgggtgacagagcgagactctgtctcaaaaaaaagaaaaatcctaatgacccctgagggtgttaggacacttcatgtaggagtatttcatccctaaattaataacttcagaattatgcagtagttcatggtaagttggattcaaagtgacattttgttcctgaagattaggttttgctgtagcaatcgtagaagccggtcgctgagcttggtgtggaaatgtgtaatatgtgcacctttgacttttttccttagtgtattccatcttcattctttcctgtattactgacatgggcttatcttttctccctttagagagttttgaggtgacagtcaccaaagaaggtgataaagggttctttcttcccctcttatgaatattaacccactaactttgtttataaaattgggaatcagcccttaaacaggagaaactgtcatgctcttttatccttatttattctcctactttgtttctattttaaagtatattgatggaaattgtatgtaaccagacccttggttagaaatatctggaaatcagacatccatttgaactgtatggataacactgtacatttttgtttaatagaacttcagagatttgctttataacaattttctattagttggaattgtggaaggagtgcagtcttattttcatgtgaaatacattttgtggagtttcacatcgacatcaaaacattt

SEQ ID NO: 51430 - DNA, 1226 bp, Homo sapiens
ctgcagcctccacctcctggactcaagcaatcctcctgcctcagcctcccacagtgctgagattacaggcatgtcactgtgcccagccgtgcaggagaagatctgatctggaaaaatatgcgaaaacaactcttaaaaattaactttacaatgtcaactccaactctgaggcagaaaaaaggtggcgcagcccattctctaccagttaaggacccaacgtgaagccagaacagctctgacttggaaaatgctattaagtgttagcaatgtacacggttattacagtatgaaaatctccaaagcaatgctacaggtttgtctctataaagactgaggctacaatctcatgtctttaaaattcactgaaggtaaaatctatgccaaaagcattcctctataaagaccgctcaacttcttcaagtaagtcttctcaggtcattgaaatctaggtaatgcaaggaacccctggcgctgtgattctccggctccatgccacttgaggaccagcaacaccagcagtacctaggagcaggtgagaaaggcagaatctcaggtcctcccagacccgctgtctctacattcctcaggtactccgtgtgcaccctagagccagggatgcactggtctaggagttatctggctacattaagataaagaaaaaaattatgcaattaaattaaacagtttgtttttcaactataagaacaggcctttttgtcagctaccccaactattaaaaggaaaaaaaaacatgctacaaaggacgctacaaataaccctcagctatggagacattttcagaaacgctcagcattacccaaatgggatgtgcagaatgcttcctgaccaggcccgattcatcaagagtcaatgaaagccccgttcctacctgcaaatcgcagaggcgcatctttatccagcgcgatcagtggggggtcgaggagcacggtgttgtcgttctctgtgactatgccgtggtaggtgggctccagccagggcttgtgcttgttaactgtgtttaaaacaagagaaaaaaatagacaaggttagaaatattattttcaactccactacttttgaagacacacacctgctattaaaataataaaactctcattaggcttgaagacagtgctcacagttctgtcgcaaaatttggtatcaagacccaaatgagatgaaattctaaattccagaataagtaatgttgaaattatctgaatcca

SEQ ID NO: 51431 - DNA, 1058 bp, Homo sapiens
tggtgcacacacatagtcccagctacctgggaggctgagtgggaggatcacctgaacctgggaggttgaggctgcagtgagtcatgattacaccattgtgctccagcctgggtgacagagcaagactctgtctcaaaaaatcataaagaagtgaaaatacctttctttgtaacttttcagtgataggctgaaaacagagatagtcttcccgtagccatcagtctttttttttcccttgatttctagagcaatttatttcttatttctggttgcttcatggattcagataatttcaacattacttattctggaatttagaatttcatctcatttgggtcttgataccaaattttgcgacagaactgtgagcactgtcttcaagcctaatgagagttttattattttaatagcaggtgtgtgtcttcaaaagtagtggagttgaaaataatatttctaaccttgtctatttttttctcttgttttaaacacagttaacaagcacaagccctggctggagcccacctaccacggcatagtcacagagaacgacaacaccgtgctcctcgaccccccactgatcgcgctggataaagatgcgcctctgcgatttgcaggtaggaacggggctttcattgactcttgatgaatcgggcctggtcaggaagcattctgcacatcccatttgggtaatgctgagcgtttctgaaaatgtctccatagctgagggttatttgtagcgtcctttgtagcatgtttttttttccttttaatagttggggtagctgacaaaaaggcctgttcttatagttgaaaaacaaactgtttaatttaattgcataatttttttctttatcttaatgtagccagataactcctagaccagtgcatccctggctctagggtgcacacggagtacctgaggaatgtagagacagcgggtctgggaggacctgagattctgcctttctcacctgctcctaggtactgctggtgttgctggtcctcaagtggcatggagccggagaatcacagcgccaggggttccttgcattacctag

SEQ ID NO: 51432 - DNA, 1080 bp, Homo sapiens
tggaaaaggttaagttatggaaggttagattacagagggacttaatatgaaatcaaacccagaccataaagaccaaaaataaaagtgtctttgaaatccgtcttctccccccgtccataggctgctctgaaacaagagactggctaagaagagaataaggggccggatgcggtggctcacgcctgtaatcttagcactttgggaggccaaggcgggtggatcacctgaggtcaggagttcgagaccagcctggccaacatggtaaaaccccgtctgtactaaaaaaaaaaaattacaaaaattagccgggcgtggtggcaggcaactgtaataccagctactcaggaggctgaggcaggagaatcgcttgaacccaggaggcagaggttgcagtgtgccaagaccgtgccattgcactccagcctgggagagaagcgagagacttcgtctcaaaaaaaaaaaaaaagaagaagaagaagaagaaggctggctatggtacggcacctttctcctgcgagcctccctggagcagcagggggtctgccggcaggaggtatgtgtgaggctgtctgtgggagctttacgcacagactgcaccagcatcaggtctgaaacggctctctgagagaataacttgactttgcaatcaggttgaacactttatctaaccactgaaactcaacatcctctccagattatctttttaaaaaaatttttaggacgggtgcagtggctcatgcctgtaatcccagcaccttgggaggtcaaggcaggccaattacctaaggtgaggagctcaagaccagcctggccaacatagtgaaactccgtctctaccaaaaatacaaaaattagccaggcgtaatcccagctactcaggaggctgaggcaggagaatcgcttgaacccgggaggtggaggttgcagtgagccaagatcgcaccactccaacatggagaaaccatggagtttgactccagcctgggcgacaagagtgaaactctgtctcaaaaaacaaaaaaaaaagtttttttagttgagatgaagtcttgctatgttgcccacgctggtgtcaaactc

SEQ ID NO: 51433 - DNA, 1064 bp, Homo sapiens
acacatttcacagttttctagtttgttagaattttaagttgaatttttcctagtctaggtgcaaaccggcatttcatccaaccaattccttcctttgccattgtctctcatataatttctactctggactttagactttgagttgaaaggaactttgaaagttctttcctctatactttaaatagccttccctgtaaaacagacatttcctcatatgttcttgtgtgttgatcattcagcctctgtttgaactctgctgctgtggggctcttggtagctcacagagcaacccttttcttaaaaacattgagcctttggtcagctttcctgaggactaaattttatcacgcctttgtatttttgcaggcatccaagcctacagtctgttgtttttaccacctcacacattaagagagactgagagcactgaggcctaggccttgatttctgtagatttcttaggaaatctgagcctagcacagggctacacatgcagtgtttgggggacagccacccagacacatgcagagtcaatatcctggttccaggagcagggcttaacttaatgaaagggactggaaaaaacacgagaattttcaaactacaactagtttagaaaagtgacatttttctttttttttttttgagacaggatcttgctctgttgcccaggctggagtgcagtggcacaatcacagctcactgcagcctcaacctcccttggcttaaactatccttccacctcagcctcctgagtaggtgtgcacaccgccatgcctggctaattttaaaatttttgtagagacgggatcttcctatgttgcccaggctggtctcgaacttttgggctcaagcattctgccctttttggccctccaaagtgctgcgattataggcgtgagccaccatgtccagctgacatttcttcattcattacatttttgttatgctagttggctaaaaatgtgctttgttaaaaagtaaattattttttctagtcctttgattttatttaactattcctcaattacccaatcttcaaacatataaaatgcttagaaata

SEQ ID NO: 51434 - DNA, 1142 bp, Homo sapiens
ttccaagatcccgattctgtgttgctgcaccgcggacaccacgacttcgcccctttccgcctcctcccagagtccttcagacgttgtctgtttccagtggagccgaggctgaaacttagtgcttccctcccaccttttcacccaaaggtgaaatcgcgatgagatttgcgaccgcgggctcacccagtgttagaaatctccgtctctgctacccctggtgccttggtgctgtttttctgacggtcatttagaccgtggagggttagatgttctctacaaaaacgagaaacctctctggttttttaggattgtaggaccgaaattattttatggctcggtgggaagtagtatttcttggctaatttattattagcttttaaccttcatccacttaaccttttaaaccttgcatgcctctgctattgactggtcttgccaacgaaaagcttacgcattgcagatacagtatttgcttctgagtggatcttgaaatcgtaaacattttccttggccttagagcagagtaatctaggtgtagtctgtagaatctactgtaggcttaaatctgttgttctgatttttttttaatcaaaagaaattttggggaggaggattgatagaaatctagatgaaatggtcatatttgaatttagcaagctttttaaaaattcttattttcccttccctggcgtgacataaggagagaagtatggtgttcacgaattaaagggcagaggcggcaaatgcatcttttgttccatgttcctttctaaacatcgaggatgataaactttgaatacttcttttatttcatttctaacattctgttgactctgtcaaattcagatcttagtcactaagtatctcattgctggccatttgatttttaaaagtaacatcaagctaagtttgaaatgttctttccagatgtgggttggaggtctgaaactctaatatatccaagagaaatgtcaaaagttttgcttctcttggggaaaacccacacattttaaaaatatgtgcttggattgggtattttgggaacagtttaagtatatttagtcagtgataccatttcttgttaaaattggtgctttcttaaatagcacctacatttgttagtcattatttaattgccttgg

SEQ ID NO: 51435 - DNA, 1069 bp, Homo sapiens
agttcaagaccagcctggccaacatggcaacatcctgtctctattaaaaatacaaaaattagctgagcatggtggcaggtgccagtagtcccagctacccagctacttgggagattaaggcaggagaaccgcttgaatctgggaggcggagcttgcgatgagccaagatcacaccactttactccagcctgggcaacagagctagactctgtctcaaaaaataataataataataattgttaggggataggactatataagaaactttaactttccaagtcacacatttttgtaaaactaatattttaacattgtacatttgtttctttgtcataagggaaagttaaaaaaaatatttttaggagaactcttgcctagccgaacccacagttaagaataaaaatgagctctgccaagttgttgaggaaggtcagtgaccccacttagctgttgaccttgccctgaaactgctgagcagtaggagcaagctggcagctgtgaccaactgtgtgggccgtggagtccaggcccttctgggtgggtggtgtctgtccacagctacttctttctccggggaggggtcttctggagctgaagctggagccagggaagaccccagggaatcgttgcggaataggtggtgggagtcactccctgctgctggggcgccctgtggactgcccctacctccataaagatacctctaacctggctgccggggcctgagccacacagacctgagctgcaggaggttctgagaattctgtggactgggagtggagaggggaggggtcagccatgtctggaagagtttcataagcatatttattttctttgcgagcctaacgacaccacaaacaaacacaacaacaataacagcagaactgcaatcagcccagtcccatactgggcttacccatgtgagggcaggaccctgcatctgcctgtgccatgtgggcaaatggatctctgttaaaatctcacctgcccaccttctccatcgcagagccaatctcagctgatgctgcaggatcctgctgtcagaggctcagacactgcttaggtggaa

SEQ ID NO: 51436 - DNA, 1073 bp, Homo sapiens
gagccacggctgtagagggaatatgagggtaagcttggatctgaccgcctgcctcagtgcgtgggagggacagaaggagccctttctttttgcttcctgtccagcgtgcaggtcctggggaagctgtctccaggcaggtttgtgcctgtgctggagcactttggtgtgtgtggcatgcctgctggtggcctgcagagcttgctctgaacaggagccccttcatagaaaggaggatgccccagtggttccaggcgcctccctcccagcctggttgccgtgtcagtacctttcctgcagtaggtaggcggctcagctgggtgcagcattgcattctggccattgcggggctgtattgaatgaggtcaggtggatttgatttaaatgctcccagaaccttccgaaagggccttcatcagagagctctggacctggaacagcgtgcacggcactgctgtgaaggggacaggcgggctactctgatctcggagtgtgcatagggcaaactgttgagaattccagaatcactcccacggcagcagacctgtagccagagaggaaagggtcctcctgcatttgggcttcatggctgcccccactggaggagggctagctgtggctaacatggggtggtctgggatgcgatgcagatggcactgtgtgtagacagatgcagggcctctccccatcgccttacattaccatttcttaattttttttttttttgaggcagtcttgctctgtcacccaggctggagtgcagtggcgcgatctcggctcactgcagtctctgcctcctgggctcaagcgattctcctgcctcagcctcacacccagctaatttttggtattttttagtagagacggggtttcaccatgtttgccaggctggtcttgaactcctgacctcaggtgatccgcgcacctcagcctcccaaagtgctgggattacaggcatgagccaccgcgcccggccaccatgcccagcttttaaatttttttttttattttttgtagagatggggtttcaccttgttgcccaggctcaaactcctggcctcaagtgatactcccac

SEQ ID NO: 51437 - DNA, 1973 bp, Homo sapiens
ttcaaagaccaaggtcagggaggtctagcaagcagttcatgtgaaagcacacagtgttcctctctccctccagccagggctgggtagagagggcaaagggctggcagaggcagccactcacatttggagtgagaggagggtgccaggacagcgaggcatatccttgtgcgatgttattttcaccagcccttgtcatgtcactgtatgtggcactcccggtgctaatcagctggcccttcaagctgaggggcggggcagcagcatccagcatctgattaggaaggcaaggcctgcacagcgaggaggccaggtcactcagtgcacctggacatcttcaagtgtgattggagcccgcagtgacgctgtttcagctagaagattgtgacccacttccatatcctctcccacatggagagctggggaggaggctttgagagccagctccaattaaggtgtttttttcaggcccgagtagcacccaagtgtctaacccacatgttttctgctgctggaatcctgtggtcaatgtccttgacctgaaccgaataaccaccccagggcagatgaagttaccacccctgaagtcctagattccaccagcaaggcttcctgcaaagatcaggatcccttgtggatcaaacacctcacataatatgggccccacccctgttcttcctgatcaatcaccaagcaaaccttggaccagtttccaaggagatacttagccttgacctccctgcccagacaggcctcacagccacctgcctcaggcagccctggcttcccagagacccatcctgaccctgacttgcacccttgccaaatatcctaaatatccttctgctgcaggaatatgaaatgagacctgtttctgaacttctaggtttctgttattctttccaggtagatgacattttaatgcttctctgtaattttacatttcttttttgtgtgttggggaggggcctggggtatgatttaaatacgtgaagctgttagtactggtagcacttaagctggtgaagtggtgggtctgagcccctgaataatcccattttacttaccaagaagggagcaaaagtacctgccaaggtcagctctggctaggccctatgagcctgttcctgagcgtgtgctcacactcggcttctggactgaggcagaaggtccttctccctccgtgtgtgttaatactgttggcactgcccacagcctccaggggcacatagccttcctctggccgatcgctggagttgcaggaagatgaggtgctggtgattttttggaagacatggtggggcttacaggcaagcaagctggcccccagttctgctttcctgcacagagcagtcttccagagtttgtggtgggatgtaagggagctcgggcagccggagcagtgcagagacctggctccttcctccctcctgaggtctgctgctgctggcacaaggggtcacgtgtgcccgtttgccttgtgtttgctttgggtgctggcttcccactctcacttcctaatctctaaagaggagtggcctgttaggtccatgagtggtgacagtggagattgaagtgcttagcgtcaggcaccgcactgcactggcaagagcactcagatgaagggtgttctttcattctcatctgaccgcattccacttcatttaaaaacatcattcgcccaggctggagtgtggtgacacgatcacagctcaccgtgatcacagcctcaacctcccaggctcaagtgatcctcccatctcggcctcccaagtagttgggaccacaagcacatgccaccatgctgtgctaattttttgtatttttagtagagatggggtttcaccttgttagccaggatggtctcaatcttgtgatctgctcgcctcggccttccaaagtgctgggattacaagcgtgagccacagcacccggcctccacctcactcattttaatggcattctattgattgttt

SEQ ID NO: 51438 - DNA, 1061 bp, Homo sapiens
ggtggtgtttgagccaaagtgcttttgaacttcttttatgaaagggaactgagcaccaactactgttatactcagttattaaagacctattatgctctggtcttccatgaagccttgttaaaaagggaaagacaacagtccccagagggaagggtgtccttctgtgggggaatagctggacaaaaacattgttctccccttttgaagtttcttaaggattgagggtcatacctgtggctccatttttcatggttgtgttgtagtgtagaaacttctgtaaacaggtatgtgttctgtgcatcataacatgattgaggacccccaatggcagggccaagagggagttaaagggcttggtttctaatcttggttctgatgttttttataagccaggatcacagagacaccaagaagtggtggttgtcttccattactcctccctccctcccctccttccttctaatgactcattgattcaattaacaaatatttattaaggctttattacaatctggacaccatcataggtactaggaatatcgtggcaagcaggacaaaaatagttattccccagccgggcgtggtggctcacgcctgtaatcccagcactttgggaggccaaggcaggcggatcacgaggtcaggagattgagaccatcttggctaacatggtgaaaccccgtctttactaaaaatacaaaaaattagcctggcgtggtggtacgcacctgtagtcccagctactcgggaggctgaggcaggagaattgcttgaacgctggaggcggaggttgcagtgagctgagattgcaccattgcactccagcctgggcaatagagtgagactctgtctcaaaaaaaaagaaaaaaaaaaaagttcttccccataccaagctcttagtctaggaccaaaaggcttattatatagttgggatcgtgtgaatgaagaaagaatgatttgatgagagtgctttgaactcttaggaggagagtcaggacatgatctccagatgcacactggccccagtggctacctgccctgagtggacattaaggtggggg

SEQ ID NO: 51439 - DNA, 1069 bp, Homo sapiens
tgggagtccctactgtgggaaaaagcctacaattctgttactcctgtcttttcctttcctggaggtgaggtaaattactttttctgttatatttccttctcttaaaagttgtgctaaaaagatcttataatagcccaagacatcctaatgaaagaatgtgattgagttggtgggaatgtatgtgttatagtatagtctgtctcagtagggtgtcattagcagcagaaatggaaggcaaattaaaactagttcctttatccttttcagaccctgcagcccctttagcatgctgcttctatatgtttcctactctgaaaagaaattaaatgggaattgcctactcaaagctgttttaaaatgtcctaagtgtcacctggatgcttgtttgaggcctgcctgcatcctcctctgtgagcctgccttcctctctttcctaagaacgtgcttctgcatattagtgaaataagtgcctctttctgttctgtctatagttagccaccaattaataagatgagcagaaatgctcccatgctgagcactgtgctaggggcagggaagaagctgacactactttatgaggcaagctatgtaagcgcctttttatctcctaggagaggccctcaataggttcggtctaccccctggagcctgtagctatttcaggctactcattaaagtcaatctaggatattgccaaagcctttgaattctttaagtgaattgcctccacttgaagtcagctaaaaatagttcactttcgctccccaggacggcccccaagttacatgaactacctgctagactcacaccccagcaaaaatattgatgtccccagcaagattagcttcctgttaaagatccaggacctgtgaatacatgcgtaactgcaagaatggaagcaaaggatgaacccaagttaaagcccagcacaagaatatgatgtaagcgcttttgggaaatgcagagattttcttttctcttcaaataataaattacatctaaaaattaatgagagtataggccgggtgtggtggcttaatgcctgtaatcccagcactttcggagtctg

SEQ ID NO: 51440 - DNA, 1050 bp, Homo sapiens
gctgggcatggtggcacgtgcctgtaatcccagctactagggaggctgaggcaaggataattgcttgaacccaggaggtggaagttgcagtgagccgagatcgcaccactgcactccagcctgggcgacaagagcgaaactccatctcaaaaaaataaataaataaataaattaaattttacatattatatttcatagctagaataaggatttataactaataagtccccctttgtagctggattgtttgtgcagagggaaggaaattgggatggcaatgggaacgtgtaggggttaatacactgataatggaggctaattatattttctgttttaatatctatatgatagattttttcccactttaccaggaattgcaactgcacttgaaataatctttttgtttattatgtgtcttttttcttaggctctggagacaaaattcttgctctggcaagttttgaggttgaaaaaacaaaaaaatgacatggtgcagaagcttgtaacattgatcacattcttaatgtaaatggtgtctttcttctggggttttcagttattgcaaagaaatgaagagattctggaaatgcatcaataacctaagaaaaagcgacataaaaatatacttatggcttgtgtttatgctcttcatcattgtgcgttgtgtgcggttacctgcttgagtgatcctgaacttgttgcgacagagggactcactggactctgttcgttatgatttgtctgtttaagagagaaaacaaagtggacttgatttttattaaggctgtttgtttttaagtgttgatagtgaacgaaaagatgtgaagtaatgatatttttctgcttacaacttatccccactcattggagtgaacagtgacgcaagctcaatagacttcataagtgttcatagaattttacaattctgagtgatcttagaaatcatttctgtttttacaaacaaggaaactgaggtccagaaagagcaagcgactttgcttaaagtcgcatcagagagctgagggtaagactcaggtgtcctgactccca

SEQ ID NO: 51441 - DNA, 1832 bp, Homo sapiens
tcggcctcccaaagtgctgggattacaggcctgagccaccggcgcctggccgcagctgcatatttttaattgcactagggactgggtgtggtggcttatgcctataatcccacctctttggtagtccaagatgggagggtcactttaggccagatgttccgagaccagcctgggcaacatagtgagactctgtctctacaaaaaataaaacttaaaaaaattgcactggtatgttaatttcatatggtatgtgggtttattgtttcacatagagattaaaatggcttccagaggaaagacagagacaagcaaattaaagcagaatttagaagaacagttggatagactcatgcaacaattacaagatctggaggaatgcaggtaagagtttaattgtatgttgttatgctggaaactggcgttttttctgcagctagctccgtggatgcaggcccatgtgtgatgattctgcattcccctgtagtgttctttgcagtgctttgtctattagagaagtaaacttattgcaggctttggagtcataaaggctgggaaatgaaagtcattcagttaactactaagtgcatgtgaacttgagcaaaatacttaccttccttgaagtagaaataacacctactttgtctttagtatttaaatcagtcctacctgctgtcaggctaagaaggtactacttgaacttctggcatgtagtttcagccttacctgcacaaaggaccacaacagttcattgcagcttttttttttttttttgagacagagtcttgctgtattgcccaggctggagtgcagtggcgagatctcagcccactgcaacttctgcttcccaagttcaagcgattctcctgcctcagcctcccgagtagctgggattacaggcatgcaccaccatgcccggctaattttgtatttttagtagagacggggttttaccatgttggctaggctggcctcgaactcctgacctcaggtgatctgcccatctcagccttccaaagtgctgggattacaggtgtgagctacggcaccctgctttattatgtggtttcttaagtatcctcattttggtaaaagaaaaatgtttaccaaagtaactatattgcaggaaaatgccctcactactactatgtgaacacattcaccatcagcattttgatatttcccttcagtctttctctaatgtacaagtattaagattgcatttttcacttggaactcttcatttttccatatcatgatgttcacctatttcagagaggaacttgatacagatgaatatgaagaaaccaaaaaggaaactctggagcaactaagtgaatttaatgattcactaaagaaaattatgtctggaaatatgactttggtagatgaactaagtggaatgcagctggtaagtataacatataggcgacagaggacagactttgtttttttgtttgttcttgtttttgtttgagatgcattcttactctgtcgcccaggctggagtgcagtggggcagtcttggctcactgcaacctccgcctcccaggttcaagcgattctccttactcagcctcctgaggagctgggattacaggcatgtgccaccatacccagctaattttgtatttttagtagagacggggtttctccatgttggtcaggctggtcttgaactcccaacctcaggtatctgtctgcctcggcctcccaaagtgctgggattacaagcgtgagccactgtgcctggcctttagttttttttttttagagatggggtcttgctacatttccaaggctggtctcaaactcatgggctcaagcaatcctcc

SEQ ID NO: 51442 - DNA, 1095 bp, Homo sapiens
ttaccgcgccctcactgtccgccggcccgagtgctaccggagatcaccagcggcccggacgccagcgagtggaacatctcggtcgcactctcattggttccagggggccggaagtgcgtgcgtccagcggaagtgctcccccggcgcggtccgccaggccagtgccctcaggtaggcggggcccctggccctaaactctgggactggcgggcggtcaggcggcacagggggaatcccgggggcctaaggaggttgtcccagtttttgtcaggtaggcccggaaggagtttcggggaccatgggtttacggctacctctggtggcaattggggcctgttggagcccggccgccgcgggacctacgtgccggacttcaagttcccgcgtggggtgggatttgctgcggtggccggagctgattcttcacccagtcctgttggttctgggccaaaccctcctcactttcaaggaagaggcgtgctctccgcccttaccttttccaagcctctgggtttgacgccatccctcaaggcgtgtccggatgcgggattttcctcaaagaccctctcggcctcgctaggaagaaactcagaaaggctgcggtaggcgcagtcgagggggaaagtgcccccgcccttgatgtctcaggctgctcaagtggaagttatctggactgccttagggcaagtttatatatagcaaataaaattacttgttaatggtttccttttttccagcatctccaccccgaggtggtttgaactttgagccttttgtagtcctgatgaataatttcattttcctcaagtttatgacactcggaacgtcaagaactggaggtttgtgcaatttgagaccggtcggcactgtgcagagatcagagtactaagagacaggtgagcatgaatgaggaccctccgctccagatatagtgtctgagagcggtttctgtagtttcgtaaaagtgaaaagtgcaccacatttagtgactactaggtggtgccaacgagttaatctttcggggataaatctcaactaatgtagtaccaggttaaggcttttaaaatgcacccatttttactgaaatgtattcag

SEQ ID NO: 51443 - DNA, 1092 bp, Homo sapiens
gatttatccccgaaagattaactcgttggcaccacctagtagtcactaaatgtggtgcacttttcacttttacgaaactacagaaaccgctctcagacactatatctggagcggagggtcctcattcatgctcacctgtctcttagtactctgatctctgcacagtgccgaccggtctcaaattgcacaaacctccagttcttgacgttccgagtgtcataaacttgaggaaaatgaaattattcatcaggactacaaaaggctcaaagttcaaaccacctcggggtggagatgctggaaaaaaggaaaccattaacaagtaattttatttgctatatataaacttgccctaaggcagtccagataacttccacttgagcagcctgagacatcaagggcgggggcactttccccctcgactgcgcctaccgcagcctttctgagtttcttcctagcgaggccgagagggtctttgaggaaaatcccgcatccggacacgccttgagggatggcgtcaaacccagaggcttggaaaaggtaagggcggagagcacgcctcttccttgaaagtgaggagggtttggcccagaaccaacaggactgggtgaagaatcagctccggccaccgcagcaaatcccaccccacgcgggaacttgaagtccggcacgtaggtcccgcggcggccgggctccaacaggccccaattgccaccagaggtagccgtaaacccatggtccccgaaactccttccgggcctacctgacaaaaactgggacaacctccttaggcccccgggattccccctgtgccgcctgaccgcccgccagtcccagagtttagggccaggggccccgcctacctgagggcactggcctggcggaccgcgccgggggagcacttccgctggacgcacgcacttccggccccctggaaccaatgagagtgcgaccgagatgttccactcgctggcgtccgggccgctggtgatctccggtagcactcgggccggcggacagtgagggcgcggtaagctccccgcaaggagcccctgagaaactggtcgctttttgtcctagatataggggagtcca

SEQ ID NO: 51444 - DNA, 1051 bp, Homo sapiens
tagtagagacagggtttcaccgtgttagccaggatggtcttgatctcctgacctcgtgatccacccgcctcgaactcccaaagtgctgggattacaggagtgagccaccgcgcctggcctaattttttaattttttgtagaaactgggtcccactgttttgcccatgttggtgttgagctcctgggctcaagtgattctcctgccttggtctcccaaaacactgggataacaggtgtgagccaccacacctggcctcgatttttttgttacataaatgatcatataatatgctgataggtagatggatggatggatgctaaagctcactatttgcctatgacattgagaaatgggcttttgcatacatctaggtggacaatacaaattaaggctttttacaaagtaatttggcaatatcaatagaaatttaactgtataggggaatgaggtgaagtacagagtgtcagttggggaagatgagaaaattctggagatagataggagcgatggttgcacaacagcatgtttgcagttaatatcatagaactgtacgcttgggtatattttaccataatttcagtcagttaattgatcagctaataagctggaatccctaaagaaagagaatctgtgattataaaacaatattggccaggtgtggtgactcatgcctgtagtcccagcactttgggaggctgaggcaggcagatcacttgaggtcaggagttggagaccagcttggctaacatggtaaaaaccccatctctactaaaaatacaaaaattaaccagcatggtggcatgcgcccgtaatcccagctactcaggagtctgactcaggagaattgcttcaacccaggaggcggaggttgcagtgagccgagatcactccagtgcggcctggggaacagagcaagactctgtctcaaaaaacaaaacaaaacaaataatattgatcgtaatatttcctgtgcataaagtctaatttgttatacctagtgtgaaacctaactttttatctaggaaggtacacagttgtcaaaggcatcat

SEQ ID NO: 51445 - DNA, 2556 bp, Homo sapiens
tcgtccctccccttgccagcctacctggctcaggcccgccgcgcccgcagccccagcgcggtcgccgtggcaacgccccgcccagccgccagcctccctttgcccctccccacgtccggcgcggctgcgcgggacggggtgggacggaggcggggagaggacgcaggcgagaggaactcggcggcgcggcgcccgcggcctattggctgccacgtcccggcgccagaagccccgcctccctgacgggggtcacgtgatccctttcaaagatggccgccctgttgttttgatgaataatacttggtggggcgagggggaaagagtaggggtggaggggtaggaggatttactcttccagcgagagctacgcgcatcccatcctccccctcccccctacccgggctccggcgtggaggcggggcgtggccggcctgctttgggaggggaggggcttcccttacagtgctgggctctgccaggacggctgtggggtcgccttacctcggggtatccactctgcagtcgaccagttcccgccaggagcaaagggtaggaaggagagcaggatctgctgtaggaacgcagctaccgcgccactatcacgaagaaacagcaggctcggggcacgagacgaactggagaccgcgctgcctagctgggtaacctgggaagcagagggtaataagtggcgccttaagacaaccctgtagcagcagcagtggcggccaaaggaggctgctcagggaacaagcggctgtagtagtctgtggggcgactggagtgaccgaagccaaggcagtttagtgcctctcgtgttcttattttttaacctctgactatgcaattctgaaacctcccccattcgggggaccagacagcctgatagacaccttccactctccttcctcccgccgtggtctcgagaacagaaggatctctccttaacgcctttcaccattaagaggaaagcgatggaggagctgagcgctgatgaggtgaggaggttgggggacaccttgagggattagttggcaactcgttagcgctttggacagggatggtattgcgccagtgctgtctggcctttgggcttggagaaggaacggagatgatattttccaagaataacgtgactccccgatagggtctctggttttgttctcctttattctgttgccttctttcttcattctgaactccatttgcttctttccgagtgttcttttagggtatgaacaagaggagagagcatcttgaggtgtttattcttttcttcagggtatgcgaacaagaagggcgagatttacatgaagttaaagtgtgtgtgtgtctgtgtcttcaggaatttaaagaacaattttggatggaatgagaatgtatggtgggtgaatatttttaaagaaagcatttgaaattccagatatgtgtggttattgcactgtataagcttgattaaacatatatttttgcttgaggggtggtttacagacagattctttgatatttaacaaaatatgtatcttctccacagtttagagaattccagttatattctggtacttaatagaccactaatgacttctggcattcttctgttacattctatcttttcctacttcttgaatctttcaaacttgtgttttgctgtagcagagactgaacgggaagcaagtggaagcaaatgactttctaaactctctcctgttctcatttcttaaaggagttatacagatctacttcttgatgttttaaagattgtttaataaattaggttgttgtaaaaaaaaaaacaaccaaaaagcagtggcaattagggtacaaggaatttcctatgattctactgccttttctcttcctttttgcaaattaggagcttccctttcaggacccctactggccataccctctttagcctacctccacatttcttcactggttcatcatgtaaacttccctacagtattaggaaagcagtcatccatcaagttgattgtactacaagacttccatgctccagttttagctacagagtacttagtgtgtttacttagggactgaaattctcctgggataggacacgcagtggtgtgttaagggtcaggtaggaaaggaagcaaatgattttgttgattgtgatacttggatacttggtttggaaaatcaggactgcccattcggcgttactttgtttttttcgaatacagcagaaatgtaatcttaagtgaagagaatattacacagtttctttcattcggtaggaaatctccttagaatcgctttattttatgtgggtttttttttgtttgtttgtttttttgagacggagtcttgctctgtcgcccaggctgcagtgcagtggcgcgatctcgtctcactgcaagctccgcctcccgggttcacaccattctcctgcctcagccccctgagtagctgggactacaggcgcccgctaccacgcccggctattttttgtatttttagtagagatggggtttcaccatgttggccaggatggtctccatctcttgacctcgtgatgcacccgcctcagcctcc

SEQ ID NO: 51446 - DNA, 1028 bp, Homo sapiens
taggaggccggggctggtatggcagctctgcgctcattaggagcccaggtgccttctgtcttgtacctactttcctaccatatggcttccatcttttggcccttgtatgtctgcattctggccagagaggggaggggaggtcatgtgcctcttcatggcacagcttgaaagttgcacagatcactcctgtttacctctcactggctggaacccaagtcacatggccacagctacttgctgggaaggctgagaaatagtttttcttgggcagccatgtgttcagctatacgttctctcacatcagaaagggagagcagtctatgcctttctttccaaacccttctcccgagggagacaaccccggatcaacttcagagtccagaatccctgggtgatgtacattccaggaatctttagtttaaaacaaagttatcaggggctctgctgtcccccatacagtggtggagaggttaggataatggaagtagaaagtcctgtttggaaaagggaagaatggggagtaatactctgcgctggtccatagccattgtcagctcctgccaggctgagctgtgagcgcttcctcccctggcagtactgtgaggttctgacctcgcctttctggcaaccttgattctggtctcttgaaggagctcccttgtgcctggccctctgtagcctctgactttattttctggagagtttttctgtgtttcttttcctctggggtcagatctgaagtggacattggaggctatcctttttgtagggctaaacagtttctccagcttgcttcttgtggatattgaaggagtaggctttttcaaccctacttagccccaaattaccagactctgaaaactttgattgtagaccgcggacattcctcaggcagactgtattccctttcatctttgcatgcgaattggcaagctttggcttgagtctgcttcatgtttgcaggacttcttagccagtaagcaccaaattttgtattgttcgaccagttcccctagaattacaggcca

SEQ ID NO: 51447 - DNA, 1065 bp, Homo sapiens
ttagtgcttttgtacacactcgtattatttagataaagcagaaccctacacaaaggggaaactgagcctaagaggaagattaaaagagcaaagggatggagaaaactgctaggctgaaattatttttttaaaaaagactatttactgtgtgtcaagtaaacacttttcatttgttcagcaaatatttaccgagtgctctctgggagttaggtactgtcatagttgctgggaatacagcggtgaataaactagaccaaatccctgctctcttggagcttgtattgtactgggtggggataaactataagctgataaatacatactaattctagttgtttgttatattacctttatttctgatgactattttataagataagaaatattttgtcactttcttataaatggggaaatcgaggctcagagagataacccagctggaaacaggtgcagctgggatcctggccagcgctagctacgcgattgctcattgtgtagagggcttgagaagatggggcctggggtagcacttcactcacccattgcacatggtctggtctctgtttcactttcaggtggactgcttcattcatttattcatgagacaaggcctcactctgccacccaggctggagtgcagtggcacattcatggctcactgcagcctcagcctccccagcccacctcagcctcctgagtagctgggactacaggcatgtgccaccacacctggctcatttttgtatttttttttttctgtagagatggggttttgccacactgatcttgaattcctgggctctggtgattggcccgcctcagccttccaaaatgctgggattacaggtgtgagccaccacacctggccccttattattctaatttgaagtaataatattaatattttaagtattatgggtgacttaagaaaacactttaattaggcagttttatgcctttggtccttagttctcaccagctggcagaatggggttaggcgtgtttaacgttcttcatgttatcaattagatgcaaaaaacacaattaacaatttttgttacagtt

SEQ ID NO: 51448 - DNA, 1033 bp, Homo sapiens
cagtgagctatgattgaaatactgcactccagcttgggtgacagagagactctctctaaaatgaagtgtaatatgcttaccgtaaattcgccatgtcagccaaggaggtgtgataaacagagatggtaagggaactaacatacagtatatacgtatttatgtatgtatttatgtatgtatgaattagaggtgggttgtcactgctttgctcaggctggtcttgaactcctaggctcaagcgattacccccacctcaccctcccaagtagctgagactataggcaggcaccgctgaacctggccaaaatacagttgttaaaaactcaagtgatagagcttgtaggaatactggtagagcgagttattctctcagaagagtacttttgctgaaggcatattgagttgttaaactctggtttggttatgaataatgtcattctctggcagaattgtgtttctgctgattagttatagaatgcccttttcccctcatgttgtagattcgacggaggcgccttgcacgacttgctggtggacagacctctcagccaaccaccccactcacctctccccagagggagaaccctccggggcctcccatagcggcatcagccccaggaccctctcagagtcttggtctcaatgtccacaacatgaccccagctacctccccaataggtgcatcaggtaagcccaagcttcatacctgggactcttttgtaattcttcttagctttttgttaagctgatggttgtgatgtttccagaacagattaaaatgaagcagacatcagctctttaaaatcctccaagcagtagtttaaatatcattgcaatgtgttgtgttatcgcttttttttttattgcaatctgttaaaccaattgcttttctttccataacttccatctttttttttttcaaacaggtttaggtattatctctgatgacaagatgattaagactgaatttggttctgctgattttatgaatttggttgatggttttaagataaaataatctgaaaatgcaaga

SEQ ID NO: 51449 - DNA, 1208 bp, Homo sapiens
tgcccaggctggagtgcaatggtgcgatctcggcttaccgcaacctctgtgtcctgagttcaagtgattctgctgcatcagcctgccgagtagctgggattacaggcatgtgccaccacgcctgactaattttatatttttagtagagatggggtttctccatgttggtcaggctgatctcgaactcctgacctcaggtgatccacctgccttggcctcccaaagtgctgggattacaggcgtgagccactgcactcggccaatgatatacttttaaaaagtaagcccaagaaaatgacaacttaggaaaaatatttccaacatgtataagagacaaattgtttagatcctaatttatgaagaactcttaaaaattaataagaaaaaagatggaccattatcattttcctttcctgattaactgatattttaaaacattttctcacccagcagctacagtgacattgtgcggatttataaaaggtaaaaggcttgtttgtcttttgtactttaagcatgtcccaggtggatgtggattcaggaattgaaaacatggaggttgatgaaaatgatcgaagagaaaagcggagcctcagtgataaggttggtaagcgatgaagcccttggtacaggtaatagaaataaacacatttcatgtcttgtatctgtagagtctgttagattggggccacccgaaatcaggaagtcctaggcaggtgattatttttattcttttgaggaaaaatgaataacctagattacccttattcatgaaagtgtaactcagtcctttgatctgataatatccatctgtttttggttcagggccatgattttatcagtaaatttaggttgtaataggaactaatttagagcaaattagaattctttctgttggtcttttgcttttttttttttttttttttttttttttgagacagagtctcgctctgtcgcccaggctggagtgcagtggtgcgatctcggctcactgcaagctccgcctcccaggttcacaccattctcctgcctcagcttcccaagtagctgggactacaggcgcccgccaccacgcccagctaattttttgtatttttagtagagatgggttttcaccgtgttagccaggatggtcttgatctattgaccttatgatccacctgccttggcttcccaaagtgtgggattacaggcgtgagccactgcgc

SEQ ID NO: 51450 - DNA, 2008 bp, Homo sapiens
ataaatcttaagattctctgtcttacacatgtaagtggcaaatctgtcttacacatgtaagtggcaattttaaataaccaaatcagataaaatttccatgagttaaaacttttgttaaaacaagtgtcttacacatgttaagtggcaactctgtcttacacatgtaagtggcaattttaaataaccaaatcagataaaatttccatgagttaaaacttttgtttagtggtatttaaaatgtatctaaagaccaacagtaaatcaactgggagctgcaaagaataagaaggaagctagaatgtagcatttgctcctgaaagccacatggtgactagatgttggacccttcataaaatcttttgaaccttggacttaatagttttattactatctataaaacatatctagactaagaaatattaacccagttgcatttgtagtataataaagtaacctctatagttgggagtagcttctttttacaattaatatacatcagcggtaactctcaatgactgtaccccaactttctttttaataaacttttaattttggaatagtttcagttagtgcagggagttcctatatatactttacccagtttcccctgacgttaatatcttatataaccatggtacatttgtcaaaactaagaaattactactaactaaacacaaggctttatttaggttttccactaatatccttttaccattccagaatctaatccaggatactgcatcgaaccatttggggtcagctggcttattcaagggctgtgtaacctgtgttcgaactgtgtgtaacctgttctttgttctgcctttccaacagtattctccgattttaaggacttgattggccagattttaatggaagtgctaatgatgtccactcagaccagagatgaaaacccatttgccagtctgacagccacatcacagccaattgctgcagcagcacggtcaccagacagaaatctcttgctaaacactggctccaatccaggaacaagccccatgttctgcagcgtggcttcctttggtgccagctctttgtctaggtcagtgtggttctctttgcacatcttactggtagtaaaataactgtgaactacgtaggagaagggaatgtttgttgacagtgttaatcagtgtcatacagggtatggcatatatcatatttggggaggtggatttagtcattggaagtggaattctcttttctagattattattttttggctctctatggttaagatattgctagatgaaattttagaagcagttggctgtgtatactacatcattcttcgaatggggactttatcgtcttgtaagtatagcctctagatcaatagggcaattagattataattatttagatgtttatctgctagatatacttgaactgaaatgattctcctttaaaagcttgatattttctgttttagttagttatctcaagtttttctttgatttttctcttctttcctccctttctcaactaatttagcctctatgaaagtagtccggctcccactcccagtttctggagctctgttcccgtgatgggcccgtctcttgcctcaccttcccgtgcagccagccagttggctgtgccttccactcccctcagtcctcacagtgcagcctctggaactgctgcgggaagccagccttcatccccgcggtatcgcccctacactgtcactcacccatgggcgtcctcaggcgtctccattctgtcgagctccccaagtccccctgccctcgccagtagcccccaagcagtgcccgccagcagttccagacagaggcccagcagcacgggtccacccctaccacccgcctcacccagtgccacgagcagacgcccctcctccctgaggatctctcctaggtatttatcccacaggagagttgcatgtgtgtttgcggtgcagggaaaggagattaacacggtttggaagaagtgctgtgtgacactgactctgttaaattgttgt

SEQ ID NO: 51451 - DNA, 1037 bp, Homo sapiens
gagcaagagaatataatagcaccttctttctaatcctctgactcattgtcttacaattttgctcttaaattgaagtttcctgtggactgagttggtgtttgtgcccagcactgttcaaaaataactccaggctataaatagagactgcagtaggagttaggtacacttcattcaattcgatggtgttcagaagaatcattagagaatacgtaaagagacagaggaatgttgatgcaaggttgaatattgattcaggaaggttgatatttgtattacgctgaacattttatcaccatttctcaagtaaatttcccaaaggtgaaagtgtctttttcacgtagataaaatcctattgcatgattatagtaataaagcaggcatccttcctaggaaccagtttccacatggtaaaagtgctgtgttacctgttttactgtaaattttctgtgggagaaattctctctccctggcctatttagttgtgactttctctaacaaccgtatcagattgtgtgctgcttttactaatacctctctttctggacttctaacaccccagccttgcctcagatctaaattctctccctactaggaggaataaaatgtaccaagtgtataaaaatagctgcaaatactcatggagcattgtgcgccagatgtggtgtcagctctgtccatgtatcagcccctttactcctcgctgtagcctgctgtgaggaagtggcagggggaacgggggggccggggggacagacaagagggtcaaaatcatagaaatgcattcagacttgagcatcctgaatccagactcatgttcaccaccgcaccgtgctgccacccacttttccatttctgcccaaataggtcttgtttgttcttgttccttactactgtttttgctgccgagagtctgtgcatctactcggttcctttggcagggaagtgccagcatttcactccttaattacaaaatgccatcccagtcagttgatatgtcccttgttggccgttacagtgaactgtgatcatccagattt

SEQ ID NO: 51452 - DNA, 1048 bp, Homo sapiens
agtcacaaagatgagggctattttgtcagtcccttataacttttcccccaaagagtttgattacagcagtagcatagtctggctttaacctacagccctctgagtgatgccattctttttggttaaagtacctgtgatgtcccttccaatgcttaacacttggtaccagttcttagtgcttctggttttctaagttgccacctgcagtaagaagcagcccttcttaggtccctgaaatgttaccaaaagttactattgttggctttggagcaggtgaaacaagcagtcagggtggatcttggccgcatgggtgtttgtgctttgttatgtgtacagggatcctaacaggctttctgctgcagaaatgcaaactctgccaaaaataatcaagagataagaatcagaatttcttcttgtcttctctgaagtttgggagcctctggtggagcaagtaattgggattcctacagtgaccatttcaccattgaaacctgcaaagagacagatatgctgaactacctcatcgagtgtttcgaccgagttggaatagaggaaaaaaaagcaccaaaggtaatatgaaatggattaacttaaaaaaaaaaaagcctagttatttgtttgattatccccacccctggagcattcattgatttattcaatcagtaaagcaattattgagcatttgccatgtgccaggcacaatactaggaacttaggatgtgtcgatgaacaaaacagagatccctgccctcgtggaactcacattctaatagagacagagccaaggtttgaacctagatggcctggcttcagagtcctctcttgaccacactgtagctcggtaccgccagtgactcatatggccctgataattctactgctttgttataataaccaacattatagagcctctgtagattgccaaggactgtgccaggtcgacattagcttgtatcctcagttgctctgttagtgcagtggaacccggtataacataggcattcttttttcaacgtatgactaagcaaatgactctcagagagattaa

SEQ ID NO: 51453 - DNA, 1061 bp, Homo sapiens
agggaaaccacaaaagctgctatgtagacggaccaaaacagaagggggcagccaggaacagacccaagggggcagccaggaacagacccaagaaggcagctgcaagggcgtgagtgcttcggtccgggtgagacaggccagtggctgcagctgctttgccagaggagaaaagggcatccttccttgactagtaataaataatgaatgaatgatgtgatgtgtatactcagaagcaaaaatcatgtagagagaagagcacagatcttgtgatttctgatcgtggttccaccgtttactaactgcgggaccttagacagtgactcctctgtgcctccatttcctcatctgctaagctgcggtactactggtactgggtttattatatataaagctgttagagtggtgcctggtacacagtgatcactcaaccaatattaactatcattcttatcattgttgtattattatttttttcttaacagaggtaatcaagttacattgttatattgctaatgcaggagcatgctgatgctgtcacctagagaaacaatgtcacatgataagaagtggagcaacttgttttgatgctcttgagggaaataaagaggagaaagaggccgggcatggtggctcacgcctgtaatctcagcactttgggaggccgaggtgggaggatcacttgagcccaggcatttgagaccagccctggcgacataatgagaccccatctctacaaaatatacaaaagtcatctgggcatggtggctggtgcatgcctatagtttcagctacttgggaggctgaggcaagaggatcacttgagccagggaggtcgagaccagcctgggcaacatagggagaccctgtctctacaaaaaaaataaaaaattagccagtatagtggcatagacctgtagacccagttattcaggaggctgaagtgggaggatcacttaagcccgggaggttgaggctgcagtgagctatgtttgcaccactgcactacagcctgggcaacagagtaaaaccctgtctcaaaaaaaaaaaagaaagaaagaaag

SEQ ID NO: 51454 - DNA, 1040 bp, Homo sapiens
catggtgaaaccccatctctactaaaaatacaaaaattagcgggtgtggtggcacgcacctgtaatcccagctactcaggaggctgaggcaggagaattgtgtgaacccaggaggctgagcttgcagtgagccatgatcacggcactgcactccagcctgggcaacagagtgagactctgtctcaaaaaaaaaaaaaaaacagatacaaattgaaaaaaaaaatcaagttatcataatatatctataaaaaagccaaaaccaaagtgataaaatagaatgtaagtttttgaagaagtaggtgatatttaatcaatttatttaacctatctgaagtgaattctggtgattcatagcaaaaaatataatactgttgttctcaataattctacttttcaggttatattcccaaagttggaggaaaaaggaataattttgtttacataaatcctcccagtagtaacattatttataatagaaaaaaattagaaaaaagaaatatgcagggaaacggctctggaatcagtagtttattaacataatttaataccatttcgagatttaaatatttctgtattgtgttgaaaaatggagattttatacaatacatcagtaaggaacatcaccaaagattgttgatgggctgggaatggtggctcacatccataatcccagcacttttggaagctgaggtgggaggagagcttgagcccaggagttcaagaccagcctgggcaaaataaggaaaccccatgtctacaaagaaaaaaattagcccagcatggtggcacatgcctgtgttcccagccacccaggagactgaggcaggaggattgcctgagcccaggaaattgaggctgcagtgatctgtgatcttaccactgcactgcactgcagcctaggtgacactaggtgacagagtaagaccctcttaaaaaaaaaaaaaaaaaaagattgtgatggacatctgtatgcacatttaacgaggtaggacagaatacggtggtccttgaatggagctaacaggaattctcttcttctt

SEQ ID NO: 51455 - DNA, 1023 bp, Homo sapiens
caaggggcccttatctggggtctgtgcacccccctaagcagtccacagatgtgtttcaaggggatctataaactgcttaaattgccaggcatggtggctcacaccagtaatcccagcactttgagaggccgaggcaggcagatcacctgaggtcaggagttcgagaccagcctggccaacatggtgaaaccccgtctctactaaaaatacaaaaattaactgggtgtggtggcacacgactgaaatctctgccattcgggagactgaggcaggagaattgcttgaacctggtaggcagaggttgcagtgagccaagatcgcgccactgcacttcagcctgggcaacagagcaagactctgtctcaaaataaataaataagaaacataaaaactgcttaaatgtatacatcagtgtgtgcatgcatgtgtgtgtaattctgtcaacaggcctctaggtaggaattccatccttagtggccagcattttgcccgagggcagctcgtaagaggcgacactggaattcagacactgattgtttggctttttcccactaaccaccctgacacccaaagggcctccctgtcgccaccctctcctcatcaggttatttacttgtgactgttggaactcaacattttgagctttaactgtgtgctagacctggtggtactcggtggtttgcttgccacgcctttgtttttctcaggaaaaaggtcttgagacacaaccagcatcttatagctagttaggagatgaagctctagaagctctggaacccaaatttcccatctcctggccccagtccctgcccagtccccctgtagggacttagctactgactgatctttgggtggggacatccctgcttccacagaaactggtacggtgcaaggcctgtgctgatgctggcctacttgacgagagcttcctgagaagatgtctgaatttttatggccttctcattcagctgctgctccgcatcctggaccccgcatatcccgagtgagtgtgcttcttcctgt

SEQ ID NO: 51456 - DNA, 1456 bp, Homo sapiens
ccaacatggtgaaaccccatctctattaaaaatacaaaacattaactgggtgtggtggcgcacgtctgttatcctagctacttgggaagctgaggcaggagaatcacttgaacccgggaggcagaatttgcagtgagccgagattgtgccagtgctctccagcctgggtgacagagcgagactccgtctcaaaaaaaaaaaaaaaaaggaaaagaaaagatcctataaatatgctgagatgatgggttaagtgtttttttggtgttttctacgatgacagtgttaaatgaagttgtcagaatgagtgaaatgaaatcttagttcctgaatgttggaaggactttagattttgcaacaattaggtcagagttgtcatttaaagtatcattctttgtggtaaggccctaaaccttaattaaagacttttcatatacctacctgaaatctgagtgactgcttaaacctggacattagtaattccatctaaattatctgtcagtgcctaaaaacaaaagggagatgaagatgctgaactcttgaattattcttcaaaaattttatcccatctaagggccgggcgtggtggctcatgcctgtaatcccagcactttgggaggccgagcagggcggatcaggaggtcaggagatcgagaccatcctggctaacatggtgaaaccccgtctctactaaaaataccaaaaaattagccaggcatggtggtgggcgcggtggcgggcgcctgtagtcccagctactcaggaggctgaggcaggagaatggcgtgaacctgggaggcggagcttgcagtgagccgagatggtgccactgcactccagcctgggcgacagagtgagactccgtctcaaataaataaataaataaataaaaattttatcccacctacttggatcttttgcaacccatgttagatctttgatcaaatctagctatacttgttaaccgaattactagtcaataatatacaaattaccagtggaataactatttgccagatagatttctgtgaagcaaactttttaactttttgtttccataaactgctcttatggtcagaattgtgttccagctaaagcctggcacgaggcaggcccatggcttggtctgaatggtgctgattggagcgcttgtcctgaacttgccatgttcctgagatcgaggcctcctgcacttgttcacaggaacttctcttctccagcatgggcttaccaccccgtagttgcacagttgtagaccctgaagtgtagcttctttttttctctacgaatctggcatctccagagtctaacagaggtaggccaagctatttcagttcaccagcaagttctcattataacacgatctgcagaacagttccttagattggaggcttccagttttaaagtaagttaatatcccactttatcaatattacaggttccaatttttcttccatgc

SEQ ID NO: 51457 - DNA, 1046 bp, Homo sapiens
cacgggcagagctgctttggggctgcatttgtgggtctgatgatatgcgatctgacatgctgggattttccttccatgaaatcatattgcaggattggaataggaaaattcttaaataccttatctgaagctaagaaatgggttgagaagtctttgaaaatgtacactgaaaactttctctgcctttttaattttaaagggcttttttggagatgagcttttattgtctgaatatattaatattcatgaacataattaggaaagaaatctctagaattatgtctgctggacaagaatttgatttgttcctatgggcttctctaggcaactgtgtgaatcactcaggatcctggcggggtgttttttccctttcagttgatcttgggttttatattcagttattaatagaaaagaggcctggcttgccaggttccatggaaagcacgtgccgtgccagtaccagtgctctttcctgacgtgcgtagcagccactgagatacttccttggtcgcttatgaggcccttgacagttgctggtgacttcttagattggcttaggtttattgattctgttcttggaattgtcaggctcagaatcagaactgatttccataaggggttctcatgtcaaagtggggactgctttttcttcactttttcttttttttttttttttgagacggagtttcactcttgtcgcccacgcaggagtacagtggtgcgatctcttctcactgcaatccccgcttctccggttgaagcgattttcgtgcctcagccttctgaatagctgggattacaggcgcctgccaccacacctggctagtttttgtattttgtttgtttgtttttgagacggagtcttgctctttcacccatgctggagtgcagtggcacgatctcagctcactgcaatctttgcctcctgggtacaagtgattctcctgcctcagcctcccaagtagttgggactacaggcacctgccactacgcctggcttattttttgtatttttagtagagatggggtttcaccgtgttagccag

SEQ ID NO: 51458 - DNA, 1061 bp, Homo sapiens
gtgacaggtgcctgtaatcccagctatttggaaggctgaggtgggagaatcacttgaacccaggaggcagaggttgcagtgagctgataccatgccactacatttcacatttcagcctgggcaacagagcgagactccgtctcaaaaaagaaaaaaaaaaagaaagaaagagtcttgctctgtcacccaggctggagtgcaatgacagatcttagctcactacagcctacaacctcctggcctcaagcagtcctcccacctcagcctcccaaaatgctgggattatagttgtgagccaccatggctggccagcgtatattttagatgttggaatgcaggtctatagcacattctcgtattcatagtcagtacttaatagcatttgtttatgagccaactgaacaaataatattgatttttcctgtgttaatggatgaaaaaggcccaaataattcccacaattgctatttcagaaataatttttatttggctttgaagtcactttctacctcccactgccctggctgttcctgctcatctccctgacgtctgagcttggtgagctccagcactcagcccttaggcttcaatttctttcccactcatgctctctaggttagtgtttctcaacgagggcactagttggaattttgagcctagtggaatttggtataataataactcatgatgagaaaccatcccatatattgcaggacatttaggatctctgtttcctgccatttaatgtcagggatgtaccctcctacccccagccttcaggcaacgagaaacactgccacacataacctgatgtcccccggtgaacatcactgcttggtgagctcaggtataccaaggcattaaatacctgtgttctaaagactccagaatatatctccctggctcagatctgactgcagacttgcagaccaagtatttgtctaatcagtgtctcaaactcactgtgtccaaaacggaacccttgatgttgtccacatctcctgcctgagtctgcccaatctcagtaaatggcgccttcattctaccagctgctcaggctc

SEQ ID NO: 51459 - DNA, 1069 bp, Homo sapiens
cgacggggtttcaccatgttggccagggtggtctcgatctcgacctcgtgattcgcccaccttggcttcgcaaagtgctgggattacacgcgtgagccaccacgcccggcagatggtgacttcttttatcattgaggaagcagagttaaataaggcaccaacatcacctggctggaagtctcaaagagctccgatgctgaaaggatgaaacttcagttatctgggacatgtggcaggcggttctgtcattccctaagcatgttgggtttatcacgcactttccagttatgtgcttggcgctttgctgagctgatgaccaggaccgagccttactcagcgtctgttcgatgtgtcctaggatcagcagcaggctcgtcagtctcagcttgctcaggatgagcgtgtgtcccgctcttacctcgccctggccaccgaaaccgtggacatgttccacatcctcacgaagcaggtccagaagcccttcctcagaccggtgagtagaaacccggggctctgtttggtggtttggactccacattcagactctctcacttataactttagcagttgttgaagttctggaaattttaggatcacagtcatcaataagtgaaattctgtgactgattttgttcccagttatgctaattgataccagactctgttgatggactgaagagcagatgtctgatgtcaccacatagtctacagccacttccaaatgccttactgcactttgtgcttagacagtacattggattattcatgttgatgtcatgacatatttttaccattattgattcctatattttacttatagaaaaagcataaggtgccgggtgcggtggctcacgcctgtaatcccagcactttgggagcccaaggcgggcagatcacgaggtcaggagatggagaccatcctggctaacacagtgaaaccccatctctactaaaagtacaaaaaattagctgggcgtggtggtgggcacctgtagtcccagctactcaggaggctgaggcaggagaatggcgtgaacccgggaggcagagctggcagtgagccgagatg

SEQ ID NO: 51460 - DNA, 1065 bp, Homo sapiens
aactttttttgctcagataatggtaagatttgtataattttctctcttttacttgtttctcaatgaatttggagtgatactttttttaattaaaagcataaatgtaaagaaaagtttggcttcttttggtatttataaataaatatttcatcagcctgcaacattccattaagtattagaattatcagatcagaaatggggagtaaagttgaaatataatgttgtctttcttcagcttatgatacacagcacctgtaaggattctttgaagattaatccaaccaattcctgttcctccactgaaatgggagtttttggtccttttcacttgtctcaacagcatgaattgtcctattatcctgtgatttcctaggagcttggaccccgattggctgcaatgctgaactttaatcttcagcaactttgtggccccaagtgccgtgacctgaaagttgaaaaccctgagaaatacggctttgaaccaaagaagctgttggaccaactgacggatatttacttacagctggactgtgctcggttcgcgaaagccattgctgacgaccaggtcagtgagttgagttggtctctctgtgagtttactggcagatttggagataataaccacagtggccagggaactcgtctggtgtaaatgaagatgagtgggttgttttcctttgagtgtgaagagcagatttgggctgggcgcggtggctcaggcctgtaatcccaacattctgggaggccaaggcagggggattgcttgaggccagactgcagtgagccgtgattgcaccaccacactccagaatgggtgagagagtgagatcctgtctcaaaaacacggtggctcacgcctgtaatcccaacactttgggaggtcgaggcgggcagatcaagaggtcaggagtttgagaccagcctggctaacatggtgaaaccccatctctactaaagatacaaaaaattacctcagtgtggtggtgcatgcctgtaatcacagctactcgggaggctgaggcaggagaatcgcttgaacccaggaggcagaggtttcagtgagct

SEQ ID NO: 51461 - DNA, 3570 bp, Homo sapiens
gaacaggagaaggctcctctagagtatgaacaatagtggattgtttttaccatgcttacctttgtggaagagagctgaaattttcacctcttctttcttataggctgccagggcacagtgccccccaaggactgaaatagactagatttccttctctttttaatgtttaaactttaaaagaaatgcgtgctagctgtaaaaattcaaaaaaaaagcccgtctgcctcagtcctgcagccctctccagagggagtgacctcgtacagtttggcacatattattccagtctttatccatttgtaagcataaaaagtgcatacttttatgaggctataaatgcataaagacggatatataaaatatataagtgtatatataattttagggcttttttagtgggggaaaatccacaaatggataatactttggatattttctgcagctcgcttttttccacctgacgtacatttacgtctcacattgccattcctcctttgcagagatcctacagtaaggaattgtttgaagaagttatttcaaagatgcggaaggcagggatcaaatccacaatagcaatagaaaaatttaagctgctcgccgagaaagtggaggagatagtggccaagaacgcacgcgcagaaatcgactacagcgacgctcctgatgagttcagaggcaagtggactcgtcgttttcatgctgatttcttttgagttaactggaaatcgataacattacaagaggacgtcctgtgcaattaattttttaatggtgtgctagagctgctttttgagacaatctgtcttaaattacatttgcctatttttagctcatattgtaaattgagaggaagaaacatccttagcttagcctgacttaaagccagataacaaccctgaagattctaagggcagggctgcctttgcaagtggggattcacattttcaaagaattcccagaagtcctaagacaaagaattccagcctgccgtcctcgccacggagcctgtggggcctgctgctgggtctgtcccaggctttcttctctgttccctccccccagcagtagctgacaaagaagcgccttccccttacaaaaggcaatgtatatgcctttattgaaggctgatttccttctaaacctgggggcctcacaggggccctttgattgctgttcctttggatagatttttcgctggtagaacgggctttgttttctttttcagtcgtgggctctcagtagattagagtttgctttgctttgtccccgcagaccctctgatggacaccctcatgacagaccccgtgcggctgccctctggcaccatcatggaccgctccatcatcctgcggcacctgctcaactcccccacggaccccttcaaccggcagacgctgacagagagcatgctggaaccaggtagaggagggtgcagtttgaggtgcagcgctggcgtcagtaccaagagataaagcccaagtcacatattggagatgaagcagaagggaaatttatcaaatgcagaaactacctactttatgacactctgtagcaaagacccaaaacactcttggccctttttccctgcagacatccagtccctccctctcatgtcccagtccttctggagtcttcggctcaatgagggaaagaatggccttttcttcccatttatacagagcgacaagcatcctctctcaggaagagccctcccatctggggcattaatcctcctttttttcttttctcagtgccagaactgaaagagcagattcaggcgtggatgagagagaaacagaacagcgatcactaaaccgttccgccgcccaccctctgctagacacagccaaggccaacgaggcaagcagaagcagcggccgcagcgaagctgccgttcatgtgttggaggccaaatgtggcaaaccaaccccaggcccacccagagcgagcaaacgctgagacctgaaaggacatggatgagaagaggagcccgcttcctgtacatatatttaagtgacaaacacggtcaaaagcttaagggacaggttttatggttgcttgtgtaataaagcatgtccttcgtatgtcacagtttggggcaacggaagtcttttagtgatggctaatgggtctgggcagcatcccttcatgaatttttttttaatccaatatccgttgatttgattgtgattagagaaccttggacattttgctgctaaagaatcttttttcccctctcccccttcctgaccctacttgcactgctgtggatttttttaagagaagcaaaaacaaaagtaaactcctttccctggccctccaaacatatattctgtgagataactgtgcctgctaccaagtgttaatcctgggatcgtatttttatatcatattcacatatttgtttttttaattggtgttagatgacatgattaataaaaaaggcaagatattttcagaatttgaatttcagttttttttttcttttgaaatgtccctttaagatttttttattctaaacaaaataaagaaaatcctgctgctctggtccttgtgataagcctctcttcggcatctgaggagcagctgcagcaaaatctaggggtgtaagtgtatcaggacttatgtgacttatattttggggagatgagggttgggttttttttttaatgctacgtgacagtttgaaaccttcacagttatcctctgggggtaaatcaattcttcaacccttgggtgtgtgagtttgaggcagggtcatttgtgtgatgtgtttggccttaccaaagcaaaagagggtgcaagaatgtgggagtatgtctgccggtttcaacacacacagacaaacacagccacacgcgcacacaagtataagactttttgtattactgctccctacttaacatacttgaattctcaaatttcctttggggtaaaaaaaaaaaaaggatttgaaaccataaagtgttctgaagaaattaagtctataaaaagcatactttcttttttcttttccttttttccctccacagacaatgtcctctgttcaattcctaacgcaaactacaataaatggtgacacacgttcagaagaaatcttctttgagtctcttctcttttgtggaaaaaaaaaaagggcagggcgggtgggtaaacaagagccaagtgagtttgcatgtggtgaatgatctttcctggatccaattaggagctgctatttttaaaagaaaactttcttattcatgtcagtctcgacatttggttctcatttcactgtttgctgatttgagggggtaagctttgtcatattcagtcttctgcctttcttgagtttcttctgctttatctcaagtatcttccctgaccttcaagattcttcctcaggccgggcccggtggctcacgcctgtaatcccagcactttgggaggctgaggcggatggatcacctgacgtcaggaattcgagaccagcctggccagcatggtgaaaccccatctctactaaaaatacaaaaaattagccgggcgtagtggcagcgcctgtagtcccagctactcgggaggctgaga

SEQ ID NO: 51462 - DNA, 1896 bp, Homo sapiens
ccggccccccgcgcccccgcgcgccgcggctcctgttgacccggtccgcccgtcggtctgcagcgcggctgaggtaaggcggcggggctggccgcggttggcgccgcggtcgcggggttggggagggggccgcttccgcggggaggagcggccgggccggggtccgggcggggtctgaggggaggtagcgcgggacgggcgccgggtgcgggagcctcgccctcgggggaggggacccctccctaggccagcagcgagtcccgggccggcgtccagcggtcggctggggcccccgcagtgccctgcaccggccctccgtttcccccgcgctgccaggccccggctgtgcccagcgctctccagacccgccgctgcctggccgttccctgggctccgcgcacgttgcagcccggggggcggctgtgcttcgtttgaagccatcgtttctcattttccctctcccctttcctcctttgtggtgggcatcgggcttcggctgggaatgtggttatgccctttgccagatggcgataggaaaggtcatcgcttggcgctgggggagccgagggctcgaggcctggaaagaggggtgcgataggaagggagggggcttgttggatgctggccaggtgtgaggaaggctggtgtggtctcggcattcagccgactgggattactcgggcagccatattgggaggatgatctgacaaatcctttaggagccaagtccagttgttggaaggcaccgagtgacagccctggcagctttcagggtgactggccagaccagaagccaagttgtgggggttgggaggctgcttgagcaagctagtcattgttcatgcaacacaaaacattcccgcccctaacgccagaatggagcttccagatccctttttttttttttccttgattgctaaatgagcttccaaggtaaactgccttcaagattccattcttgttggggtgaaattccgtgtttctctattcatcttctgcgtccagtgcgggggctgtgaaaggcctgctgatgctttacatgtgcataggccgatctgagaattgctaaggccactgtatcagtatggaggcctcgagtagccgtagagcattggatggatagattttcagagtcgctcgacttgcagagaagaagtaaaccagagtattctgatagtgggcgaggctagtggcggcatttctgaggacgcaggctgtcatctttgtggaatctcgaggtagctgaaattagattgtcaacagatcccttgctcatatctcttactgctctgagcagctgttctgccaccattgaacattccgctttgtgtcatgatgtgcctgtctgagcctgatgaaagtgtgctgatgagatttgaataactcttaagaggtgatatcatggtggatattttatttaaaggctggcattttgtctccttagtttagtcataacaaaatctagttcttgtgttcctctaagaagtgaggtggtgctttctgattaagttgatatggttgctggattatagagcaagtgttgttaatgtattgtttgaaggtggaatatgagaattacacataggttggtattgtaaagcaggtctggagatgatcaataactgggttcagcatgagtctgtagatctgttcttttctatatcctagatgtggacaggacctggagagatggcatgcctgctttcttctttgtggcctttgctttcattcaagttcaatttgttcataaatacattctcataacttctcaggttgaactatgtaaaaaattttgggatgggtgtggtggctcatgccttgtaatcccaacactttgggaggctgagacaggaggatcccttgagctcaggagttcgagaccaccctgggcaacag

SEQ ID NO: 51463 - DNA, 1033 bp, Homo sapiens
acctcctgggctcaagtggtcctcctatctcagtctcctgagtagctgggatcacaggcatgcgctaccatgcccagctaatttttaaatttttgtagagatggaggtctcactatattgcctattgcccagcctggtcttgaactcctgagctcaagtgatccacctcagtcttccaaagtgggaggattaaaggcatgagcccctgtgcccagccccattgctcttttggattactatattgttggcttagttctctctttcatccagatttttgacatcatcttggcagatgtcaatgactatgtaaataaacaataacagaaacaacaatagtgataaaatagcttattcatattgagcactttctgtgtgccaggcttttttctaagcactttacgtttattaactaatttaaccctaatagcagccatatgaaataaatactgttattcccattttacagatgaaactaaaacaggccaagtgacttccccaaaatcataagtactagtaagtaaccactatgctgagtttcctttgtaactaccgttaactgtgaaatttcttgaattgagctcaagcaaacattggcttcattctgttccagttgtttagtgttatggccacatttttaacttgtcatcatgttaaggtctcaaattcaccttcaagtcttaaactgtgataattgatagctttcactttcataatcactttatgtgtgttctcccactctaagtctcctaaaccgtcggcctcttccagattttacttcttttccttccttttctatactacgacctctgggttgcattgcttgcagtttttattctttcttattattcttcaggacttactatgcagaagccagcctcacatcatccctaccatccataccctccattcttactccgtgtcatggagaaacctgcatagtgctggggattagtgccacaattaatgtgtagtccgaggtctcccttaaatctgtctttggtccctgtcggagcagttctgcttagctccctcc

SEQ ID NO: 51464 - DNA, 1058 bp, Homo sapiens
cttgttggaaatgaatatgctgtacacatgtgttagctgcattaaaaaggctgctttgctggcaagctggcctggactgttgctcacaaggattataactgattgcagatggaatgcactagaatgtttctgccataaactctcttatgaaaaagtagaagagtatgaagagtactttagggaatgtgctaaatctgaaaactgagaagtagctattttatttaagcactttctggtcttggaggaaatattctccatggcacaaataaatgttactgtcttgacattttggagtcccaagcacatgcaaatggctctgttcaataatatcccattatattccaaggttctcccacttgagaagcatttcttattgtctaattacttggtaaaaagggaaatgagccaaagtgaatgatctaaccgcttacatttatggttaggttatttgtgtaaacctggagacattaaacctgtataaatgcactcaaaaacaggaagtagataaaattggttttcacttataatatgaggtacactccatcaagtgactgaactgtgatattttactttatttttacccacaaattgtctcttgccctttggtgaattttgttcatatatttaacaaccttcctttgccaggaccttttttttccccagtgcccaatcttggttgggatagaagtagccctgacttttttttcctgtttattactcatattatatgtcttataggctttttcattcacgcatacatttctaaaccaaatgccgcacagcgtaactgatacaaataatgatttcatgtccactattgaaaatttggggggtgggtgcagtgactcaatgcctgtaatcccagtactttgggaggctgaggcaggcagagtgcttgagtccaggagtttgagaccagcctgggcaacatggcgaaaccctgtctctacaaaaaatacaaaaaagctagctgggtgtggtggtgtgcacctgtagtcgtagctactagggaggctgaggtgggagtatcacttgagccctggaggtcaaggctgcgg

SEQ ID NO: 51465 - DNA, 1087 bp, Homo sapiens
tcccagtagctggagtgagttcaaagaagtatttttatatgtggacttgacctttggtcttttattctcattttccacttaagaaaatcttggctgtgtgaatgaaagagtgatacttttaaggttatagaaagtgaaatgtaatcatgccagataattttatatagatatttttatgtatggctgacctggatgactctaacagtgcatgtgtttgtgagtgtgtgtgtgtgcatgtgcgtgtatttaatgagaaaagtaaacttgtgtataggaggcttaaaaaatgtgtagggaattttaggtgactgttctgattccagacacttttattatggaagcaatcaagtaagtataggaagaaatattaataaaaggttatttatttctccttttactctttacagcccgaagatccctgttttgcatctcaaaaccgtgtgtacaatgacattggcaaggaaatgctcttacacgcctttgagggatataatgtctgtatttttgcctatgggcagactggtgctggaaaatcttatacaatgatgggtaaacaagaagaaagccaggctggcatcattccacaggtgaaaaacaaaacaaaacaaaaatcttctcttcattattagtgttagtcttaaattgctttaacagttatttttatttggcgaacatttatgcggggattgttttatgtcaggcacaaagatgaacaacccattattttccctcagaggagctcacaattgaatgggaaggattgacatgtacacatgtctgtcattaaaggtgggaaagtcagtgttttgtaatgattttgccatatatccaatgccatattattttgtcatttgaaaagtgttaccagcttgttaaagctctgttctaagtcctggagatggggggatattgttgatctgattttttttcaaattccatgcatagattacctctgaagaatgtgattatttttggtttttttgatagccttattcggagatactttcattttattttcctaatttaatactatgactttaaacttcaaacactctgagattctccctctttttttttttttttagaa

SEQ ID NO: 51466 - DNA, 1128 bp, Homo sapiens
gtggcacgatcttggctcactgcaacctccgcctcctgggttcaagcgattctcctgcctcagcctccagaatagctgggactatttttgtatttttagtagagatggggtttcaccatgttggccaagatgttctcgatctcctgaccttgtgatctgcctgcctcgtcctcccaaagtgctgggattacaggcatgagccaccttgcccagcccaaatttttaatttttgaaaaaaaatttaaacttttttgttaaaaacttaggcacacatttattagcctaggcctacacagggtcaggatcatcaagatatcactaggtgacaggaattttccagctttcttataatcttatggggatcactatcatatatgcagtccatcgttgaccgaatcatggttatgcagcgcatgactgactttattcaaagcattaatcgtatcttgatgtttatgacataatatattttgagatggagcaagaaaggacgtctggctaattcattgagcacgcgtggatgacttagtactcctctcatttgtgctcttcatgcctctctcattctacttccctagttatgtgaagaactttttgagaaaatcaatgacaactgtaatgaagaaatgtcttactctgtagaggtgagtacagccgtgagttgacaccgtaagcccttgttttccattctctcaagcatcacttaaatggctccaaattatgactgtggtacacatcacttcaccattccttcatttttgtcctttcaggctatttctgggttttgggtataatgaatagtgtcctgctttaatcttttttttggggggtgcgcggtggggacagggtctcactctgttgcccaggccctggagtgcagtggcgtgatcacagctcactgcagccttgaccttctgggccaaagcgatcttaccccctcagcttctcaagtagctgggacaacaggtgtgtgccaccaccacccctagataattgatttttttgtagagatggagtttccctatgttgcccaggttggtgttgaactcttgggctcaagcaatcttgcctcctccacctctgaaagtgctggggttgcagtgtgaatcactgagcccagccacaatt

SEQ ID NO: 51467 - DNA, 1176 bp, Homo sapiens
gaggccacatttatagctatgaaagttgctttaattgtggagtcctctgatcctttgactgtgctgtaacagtgagggcttcagagtgttaagtatcttctcatctaaacagtacattgctgaaacatgttagagctctcattgagttttactcttaggttttgatcaagtcatggtaaaatgttagttatcatgtatatatgcggctgtggtagtaattgattctggaataaatgagcaccaataaagaataaaaattaaatgcttcattggtttctaaagggatagctggagtatgaaaaatgattctgatggggtgcctttggaattggagagtaacttgatgggctcacaaataaggcagtattgagagcaattgtgtaagtgacaatcttgcaatctgtgaataagtttaagactattgcttgtgattgttatgcttataatgtggagcctgctgtccatttcaactctcatctaagaattcccttgtcacgtggtcacctttatgtttatttaggacagtggcagctacaaacatgaatgaaacaagtagccgttcccacgctgtgtttacgattgttttcacccagaagaaacacgataatgagaccaacctttccactgagaaggtaggagagtttcagtctctaggcttgagttgtgaaggatggagattttgagaagtcccttttgttgccctctgctttttgtggaaggttgggtgttggggggtgctcttttacttaatggagggtgttttatacctctgcttatcatttttcttccaccctacaccagttttctgtataggttcttaaatgaagttgtaagatagagaatagggttaagaaaaaaacaatccaggactttgggtctcaaaaactactcaatacaagacagttaagcagtcttgcaggagaaagttctttcttttcttcttcttgactgaacctttttattaccttattagctgcctttggtatgtgtattctttttttttttttttttgagctatgataatgttatagtgggattaaatgtttaagcaaatgatatgtttcattcctggaaaataactccacaacagttctggtgttcttcaaatacctttctttgcttattgatttttcattttctatagtggttaaatgtcacagactttagcgttggatt

SEQ ID NO: 51468 - DNA, 1984 bp, Homo sapiens
ttaaagcttcacttttagtaagccatttaatgagttgatgagttttatatatttttataacatactctagtaaattatgtcatgtttatcctaaagttacttttttttgaaccgtgataattgctatgaattttgtgcatgctctttttttttttaattaaaaaaaatttttttttagagacacaagggtgttatatgttgccaggctggagtgcagcagacagctttgaactcctgggctcaaaggagcttcctgagtagctgggactacaggcatgtgccattgcacctgccgtgtgtactgtttaaactaactgatagatgttgtcttgatctttttgtgccatatttaaaagctctaatacttttagttttttccataccttaatcttttaaaaagcattctgcctctaaatatttcctgcttctatcttgcttatttttgaattgcccccatgttattgttctttatcaggtcagtaaaatcagcttggtggatctagcaggaagtgaacgagctgattcaactggtgccaaagggactcgattaaaggtatttattttagcaaataaatggcctgatcaataaatggccactacctgtttttgtaaataaaattttattgaaacacagctacatacatttgtttatgtattgtctatggctgcttttgcactacaatggcagtgttgtgacagagaccgtatggcccagaaaacctaaaataatttgtgtctgtccttctacggaaaaattttgctgactcctgatctgtaacttcaatggaaggataagttatctaactaaatagttagggagcacatcatagtcagggtgagagttgaattgcattttaaggaacaggtagaatttggctagatggaattaagagatggcagtgggaataggatatacaagattcagatgtgagaacagaaatttcatgtcgataagttgagggaagaaggctgcacacatctgtaagcttttggagcacaaatatctcgaagatacttcaggactgtgagttaggcatgtggtctcagcatgttattatcaagtggaaaagaggacagatggaggactaaaggttgtttttagaacttgtaataaagaaatatgctagcatatggcaaatcatattttatgttctgtatgatatagcagtagtagaaattcttcatcattctttcatatttggtatttattttaggaaggagcaaatattaataagtctcttacaactttgggcaaagtcatttcagccttggccgaggtggtaagttttatacttcattataaggggagttgtgtctgttcagcaaatatacttgatgatattttattattgtttatgaaggctgtctttttgtggcccttttctgtaatcttgcctttctccttttagagcttttcagataagatactaggtataacacagtttgactttgtactgaaagtaaaagatactaaggagaacaaaagtaaatatagatctgtaaaaactagagcaaacactgaaggtttgactcatttttttgagccttattttatgtttctcacaaaaaccaagtatatttattgtctcttcttttcctgtataatcttttctgagtaagatgcagtatcttttggagtattttgagcagtttggctttggtgaatgctgttgatttgagggccagtagttttttttttttttttcccccaatagttttgttctttcctactcctttatggtagaacagtaaaactaaaactattttttttaaattaggggctttgttgtctacattatttaaattagtcattgtgtgttctagtttagtttaaaacctctttttaattgctaagaagaatgaaatgctttcttgcttgccttggagaaatcataatctatgacatgaaatttaaacaaaatctaattttctacttggaggcttatcctgtgttcttattttctcctttaaatgctttcacctg

SEQ ID NO: 51469 - DNA, 1073 bp, Homo sapiens
aaaattgaggatggggtatttgatgatgttagggaattattgtttattttggtaagtgtgataatggtcctgtggtgttttgttttgtttttaaaaaacatgaccttttccttcacagtaagaaaaaggataaaaaatgatatggacaggatattaggtaatagtattgtgttgatgtttaattttttgaatttggtcattgttttctgtgtaagagaatgttcttatatgctgaagtgtttaggggtaaatggagatgaggtccgcaactgacttcaaaatgggtcaggaaaataagttgtagaaaagtgtttgggggataattgaaagatgattggcagagtattttggtaatggttgaagctgcacgttgggtatggtagctcattatactgctctctcaactgttgtgtatattacacagttttcaaaataaaatgtaaaatgaaaaaattaccttgttgcgtgagtttttggttttgtgaagaattgaaactatgaatgataaacttccacagtgtcggggttgtactgtaatttaatttacttgggaattttagactgatttgcctttcttgggaatttttttccctaacgaaaaatgctaagaccatttcttttcctttaatagagtaaaaagaagaagaaaacagattttattccctacagggattctgtacttacttggctccttcgagaaaatttaggtatgttgaccactagtgaaaagtagttatctttttaactttgattatcttttgtggttaattgtcctgtgtctgttttggagacaaataatctctagatattcatgttactacttgagtgttccttgcctgctttcatttttactcctaatttcagttggttggattcccttggttttaagccagggtatactcccatatctcattttcttcagggcatgaactgtgcagtagttgtcctcccgactccccatacttgcttcagattattgctctttcttcgaagttatttcaaaactccatgcttctctgaggtgcacaaaattagacattgccaacccttaatcctcctcgttgctgatgttt

SEQ ID NO: 51470 - DNA, 1598 bp, Homo sapiens
agatatgcagatcgtgcaaaacaaattaaatgcaatgctgttatcaatgaggaccccaatgccaaactggttcgtgaattaaaggaggaggtgacacggctgaaggaccttcttcgtgctcagggcctgggagatattattgatagtaagtgaattaaggatcgttacaaaatctaatcctttcttcttcagggttcttattcagcgttcttatatttaaaataaacttcaagttaaggagcatgatgaagctaaatggtagtgaaaatgttttgttttgttttgttttctttttccttaaaaaacccaatggaaatgatctctagattcctttatgtaatgtgtaccagactatccatttgaactcaggaaattagttttaaatcgcaaatatgtcactagtatttttgttagaattctgttttagatcagcaatgaagtttatttggaacgttaaacctgttatcactgagcaattaattacttcatagaaatgttatttgaaattttgagttttgtttcatgggttgctctggattagtgtcgtggcagtaatataagaaacgcaccattcaagcctaccttcagataagattcacctttgaatggccccctcctcctgtaaaatgctggagtgccccgtgctgcctatgaacatatgaaggggaaaagttcaattcctatgaagttcaagaactacacttccagagagtattgttttacaatgttgtattaaaatttatcttaaaaaatctccgtgatgtgcctatccagtggcttattcagaagttctcttaagtgagtaaaatggattcatataggaatagaatatggtagaatatgggttagtttagtaaagcatttttttttagtgtaaagttaaacttatattccttgaagttctaataagattttcaaggcctcttctagtttaattcttcttattgattagagtccgagtttagatgaataccgtttgtaaaaatgataccgtattctaagtattaacttttccatctccccaaatgccaaaaactgctctgttccctctctgtgtcactgctgaacctgaactttgacccttctcgtattttccctcctgcttaccttcagttgatccattgatcgatgattactctggaagtggaagcaaatgtgtgtatttcacatattggttatttccagtactctgacttgctaatctgcctctgctggatcagccttaaaataagctttgcatgctggcaatccttacagggaaatcccagacagagcatagtatagaatcagaaatgatcctatttttgcccttcttcatttagcaaactaatctttgctgaatttcagtttgtggcttgagtgaagttgaaaggcttaagaatctcttgctgcttctactcttcagtttttcccattgtgattcaattaaatccaaaaatcatagatgatagcaactgacacttactgattttgcataatatgccaggccctattctaggcaccttgaatatattgtcccttttaattctgttaatggctctgaaaatattttattatgttccttttaccaataatcatttttagtcagcaaaactatc

SEQ ID NO: 51471 - DNA, 1617 bp, Homo sapiens
accaatactgagtgtaaaagcaaaattaacagttctattaaagacttagtaaatggaagtatgttcctaaaacttgcattttatactaggaagcaggcttagcagtgacccatggttgtactgttaggctaattaagggccttaaattagcaaataatcagccttattttttgcttgctctgacagaagaatggaacctgcactaaaactcattaatctgctaattgttcttccctgttgaggcaatcaattagtcctgagtttttaaccaggacttatacaaaattcctctcatttctataattaccccttttttatttaagacatattaaaaatccttttagcatgttgaaatgttgccatacaaagcatactactcagtgcacaaattttgttttaactgtaacattttcttggaaatttttgctgaattacacgtaacactgagccagaccaatatggattattattgataaataaatgatcattgttttcccttactgttacaaactactggaaaagtgtaaatctgaagacattgtagactaggaacactagaaagactaaatggaaggtagtttggcttttttagggagagtgcctaagcagtatcctttgaggctctggtttatccccctgcgagatacagcgttaacctacattggaatcttttagtttgtaaatgcagaaatgattctgaacctgtaggataccactattaaagacagacatgttttagaactgccatctagaacagttgtaacctgtgtttgtattatagcgtgtcttggtcttggcgctttaatgctgtcctttcttacaacgatattccttcctgtctttttttcttcctctgcttctttcccttttccctacttttcctgccttctcttctttctatctcccagatctgaaagattttcagaacaataagcatagatacttgctagcctctgagaatcaacgccctggccatttttccacagcatccatggggtccctcacttcatccccatcttcctgctcactcagtagtcaggtgggcttgacgtctgtgaccagtattcaagagaggatcatgtctacacctggaggagaggaagctattgaacgtttaaaggtaagtaatagttcagactgaatacaaggtattctatgtagctccacaaggaagaactaggagtaaaaatcactaagatttcgactcagcatatggagaactctttgactcttagaagtgtcctgaaaattgaattttgtgctttgtaagttaatttcttttcattagaatgcctgagtctgacatggccaggcagagttgggagaagtgcatgggcagttcataggctggcaaggcagagtaacagattaatagatgtgtacgttaattctgggatagtacatcaagttacagtgtaattgttttgttagaaatttatttggaaacgtggtttcattgaaagatggaattctgtgtagagccatgcttctgttaataaagatgaagtttgggccgggtgcagtggctcacgcctgtaatcccagcactttgggaggccgaggcggggtggatcacgaggtcaggagatcaagaccatcctggctaacacggtgaga

SEQ ID NO: 51472 - DNA, 1030 bp, Homo sapiens
cctagagtggggtatgggaagccctggacaccagcatgcctgcctgccagcagaatgagttgatgctcctgagactgaatgctgttttgcacttggcttccctatttatactaagtttgctactcaggcttgaacagaatatccttcactttttcttaacttagggtgaactgtttcatagaacatttacttgaaagcctattgatcctgttttatttgaagaaagaacagtgagtcagcaaatagctctagacctgtctcagtgagtagtgtgggctcacttagcttctctggtctgttggaacacagtggcaccatcttggctcagtgcaacctctgccttccaggttcaagcgaatctcctgcttcagcctcccaagtaactgggactacaggtgcgtgccactgtgcccggctaattttcgtatttttagtagagatggggtttcaccatgtgagccagctgatcttgaactcttgtctctggtccagttttcttatctcgtgaatggttccagaataaacgattttgcaggcttttttcagccctgaagttgtgctaatgtgactcacagttattattttctctaagtttcccccaaagtttttaaaaatagctttctagacaacctaaaaattgcagctgaaaactgtaataaaaataaaagttgtaccttactcattaaatctcttttctgcaaagagatcatgttctgatttacccttcagttggtaagtaaaattagataagtcatattagagttggctgcaaaatggtaagaggattcctagacagtaattttgctttcttagagtgagttctacagttgccccaaaataggatggctttaatatgactagataatcctctgctctgaaataacctttttctgaaggtaatcaactaggaagaaatatttttaaaatatctcatatgtcagtttgtattccataatcaacagtggtttattgtggttagtactataataagtactagtcaagatgccttgtttaggtcgggtgcatcctg

SEQ ID NO: 51473 - DNA, 1027 bp, Homo sapiens
ctttcaggacctactctcccccttattatcttgatacttgccttaatttcagatatttctgatttcatcttagagcatggtcttatagtacaaaggcagcctatttctaaaatgcctatcttgtttactgtttacaaaagaaaaaacctaaggcaatatgtaacctttggccatgattcagtttgtttagtcatctttatttgttgctttctcttaaattcccagcctaacctagcgtactttcagttttggctactctttcatgtagattttcccacagaagtcgtctaccctgctttataactttttggaaccaatttcagctgtacaggtttgtggagaataatactgcttccatttgcttctgcaatttgtattatagacagccattgtactaagtaaagcaattcctgtccctatccttctagactcctctgcttccttcttcattttttaaaaagtgtctccaatagttaccttcctttttacataatcatagttatgaagtagttacgtagcttttagctaattagagtagtaagggtttttttgtttttttcttaaactaagttgcaacgtcttgttggatactagaaaatgactatcaaatggttattttgtgtgcttatgtatcagaaaataggagaacatatatcgatgtacaaagcatgtattttatgccactagtaaattgtcctttatttcaagtgacctcacattggctattggagacttaaacatctttattcataggttctgttgatgatctctctaagttaggatacaaggggtggtgagttttgaattggtacttttatgtgatatgaaatattcctgtggttttcgctacaattcttctggtcaggtttttctatcctggccacataacttttttttttttttcttcccaaattccaatgtgttattttcaacagaaaagactgatgtaaagacattttagatgcatattgtagaatagaacagttaagtattttatatgtttatattatgaaaggttagtggtttt

SEQ ID NO: 51474 - DNA, 1036 bp, Homo sapiens
ggatttattctacttactgcaaatcctgataagcaactgctttccattatttgattccaatagtttgtaatgataacattagtttgtgtttgttcctcttagttatcgtgaccttagagccctgtgagcgctcagaaacctacgtaaatggcaagagggtgtcccagcctgttcagctgcgctcaggtgagactgggagaggtttgccatcttcagcaatgtgcacatggcttctgtgacaactctaatttttggctgtttaaaggctgaagtaatagtcagcattaggatttttgttcttgtaaaaacaacagctctgaaagctgtcttttcacattagggaggggtgaggttgttaaatagatactatatattaaaaaaattatttcttaaccctatttttctgttttgtgctaggaaaccgtatcatcatgggtaaaaaccatgttttccgctttaaccacccggaacaagcacgagctgagcgagagaagactccttctgctgagaccccctctgagcctgtggactggacatttgcccagagggagcttctggaaaaacaaggaattgatatgaaacaagagatggagaaaaggtaatgcacagttacgcagcccatatgactgtttcttcttttaaacatgtaatactaatagcattcttgaatttttttttttttttttacttctaggctacaggaaatggagatcttatacaaaaaggagaaggaagaagcagatcttcttttggagcagcagagactggtaggagtcctgaatctgctaaactgttgggaaaagggcagcttgttcccatactttccctgttccacagagcagtactcacccaaattgcttctgtctcaatgataccaagcactattctttaatttccttaatggagaatgaacttaaatctcccggtagccttagcctgaaaaaatagtccacagaggtactcttttgggctttttatgtcttaaagccaaatcttaacttctgttacaaccaaatactttttaaggaaatagagc

SEQ ID NO: 51475 - DNA, 1497 bp, Homo sapiens
tgtataagtaaaatatgtaatattacctccagttgaggaaaccaaaacttggctgggcgcggtgggtcacgcctgtaatcccagcactttgggaagcctaggcaggtggatcctgggacctcacttagaataactaagcacggtgctcgcttcggcagcacatatactaaaattggaacgatacagagaagattagcatggcccctgcgcaaggatgacacgcaaattcgtgaagcgttccatatttaaaaaaaaaaaaaaagaaacaaaaaccacaaaaacaaaacaaaacaagacaaacaaaaaaaaagaataactaagcacggcagaataaggatgcctggtgctatccataaccaagagttggtgatcattctgtgccctaaaataaagatggccactaaataaagagaaagtgaatgtctaagacgtatttagtttctagggaatgtacataccctgcagataatcagattctggttgttgtttgctctgtgtatctgaaagcaagccaggatttcaagagcagcttcttaaagcaaggaagttgctttcctctcaaaggtctgtctgttccactttcatttcttgacttaagggaggaactgatttctaacacttcagcctgaagaatatctaccagtagtaatactgaatggaaaatgtctttatatattaccctgtattggtcaattaacagatgtatttctaatgcaccctgtgaataaacattgagagaatacaaaggaattattaatcagtaaatatttatttaatatttaccatatgtaatcactttttgcataatgtcagcattaaacaatggaattcaggctcatgagttttctattctgatagttcccaaatgcatcacattgttagggtgctgagtattttcttcagttagtgctctaggataccctggtcctttctgtgcttgctttttacacacagttttgggatcttctctcttcttatttgcataagttccttgcagagtctctttaggaggcctactttgcatttggcatttaatgaaagccgaaggatcattttgtgacatgtgaattgaccagacctcagtagcttttccaactccttaataaatgaatctaaatattttaaaaatctggccaggcgcggtggctcacgcctgtaatcccagcactttgggaggccagggctggcagatcacttgaggtcaggagttcgagaccagcctggccaacatagtgaaaccccatctctactgaaaatacaaaaattagcaggacgtcttggtgggcacctgtaatcccagctgcttgggaggctgaggcaggagaattgcttaaacctagcaggcggaggttgcagtgagccaagatcgcgcaactgcactcaagcctgggtgataaagctagactcagtgtcaaataataataataataataataataataatatagataaatataaaaaattctttttttgacatggagataggatttatatcac

SEQ ID NO: 51476 - DNA, 1050 bp, Homo sapiens
tcactcatgggggaaagagattctggaagaagcaacagcaataaccaaggcaaatgtggggaagtgtctgcatgggttgttagcatgatgtgtggggcctaggttttacttcattttcttcgaatagtgaggtcgttaagtcacgccatttgaataattttgtatgaccatagggtgacatactcatccctgttgtcaattctcctaagaaatttggtggcaaatttcatcacttaagccagaaagtggaaatttggattagggatgccaaataagcaaatctttatattgatagaaatgtacataggcgtatgtcttaatagacttccacattattgaggggttttttttggttttgttttgttttttagtttttttggtcttatttttaaatttggttaaggcttttttgcttgctttttcttcgatttaattttccttttttacattttaattttggttattttggggccattttttgattttgtttttccaaaggacgcggattctgatagcggggacgattctgacaagaggtcgtgtgaagagagctggaaactgattacttctctgagagaaaagctacctcccagcaagttgcaaaccattgttaaaaaatgtggcctcccaagcagtgggaagaaacgtgaaccaattaaaatgtatcagataccccaaagaaggcgcttgagtaaagattccaagtgggtcacaatctcagatcttaaaattcaggctgtcaaagagatttgctatgaggttgctctcaatgacttcaggcacagtcggcaggagattgaagccctggccattgtcaagatgaaggagctttgtgccatgtatggcaagaaagaccccaatgagcgggactcctggagggcagtggccagggacgtctgggataccgtcggtgttggggatgagaagatcgaagacgtcatggccactgggaaaggcagcactgatgtagatgacctcaaggttcatatagacaagctggaagatattttgcaagaagtcaaaaagcaaaataacatgaaagacgaggag

SEQ ID NO: 51477 - DNA, 1022 bp, Homo sapiens
agtcttaagaaataaaatgctcaaaatggaaaaagtcttgccactgatcggatctcaggaacagaaaagcccaggaagccacaaagcaaaggagcctgttggtgctggtgttagtagcacctctgagaataatgtaagtaaaggagacaatggagaacttgcaaaagaagaacgtgtttcccagctgatgaatggggatccagcttttagacgtggacgtctgcgctggatgaggcaagagcaaattcggtttaagaacttgcaacagcaggagataacaaagcagcttcgtcggcagaatgtacctcataggttcatccctcctgagaaccggaagccccgcttcccctttaagagcaaccctaaacacagaaactcttggagtcctgggacacatatcatcataacagaagatgaggttatagagcttaggattccaaaagacgatgaagcaaggaaagggaataaagaagagagccaagaaaaagggggtaaaggagcttttaaggatccccagtttccatggggctctcaaggaatgagaagtcaagatcacatccaagttagcaagcagcacattaataatcagcaacagccacctcaactacgttggagaagcaattctctcaataatggccagccgaaaagtacgcgctgccaggcatctgcctccgcggagtcattaaactcccacagtggtcaccccactgctgatgtacagactttccaggcaaagcgccatattcatcaacaccgtcagtcttactgtaattataacactggaggtcagttagagggcaatgcagccacttcctatcagaagcagactgacaaacccagccactgtagccagtttgtgacacctccgcggatgaggagacagttctcagcacccaatctcaaagctggtcgagaaaccacagtataaatcagttactggacaaacttgaaatcatggtggaagaaacagacagtgttagctcatgatttgatttggttctacctttggccttgagttctta

SEQ ID NO: 51478 - DNA, 1099 bp, Homo sapiens
cagggtttcaccacgttggtcaggctggtctcgaattcctaacctcaggtgatccacctgccttggcctcccaaagtgctgagattacaggcgtgagccaccgcgcctggcctgtttgtttttttaacatgatttttctctaagcttaaataccacaaggccaaagagaaatggtcataatttaaaccattattatattgttgaggtatccctagctattattatagcaaagtgggaaaaaagtgtttattctattgaagttatgtaatgatccgacattaatgggaatatagaggagtcctaattaattggtataatttcacaaagcggaatggtattccttggagagttaaagacattctctttagtaagtgtaaaccaaagggcattttctttattcctgcttctaattccttctagcccagtgaattatttctcttttcactggtaatgtgatgaatgggaattgtttattacattgaagtgacttgaagtgaccttttgtgctttaggtgcaggttgacactgaaaaaaaaacaaaacactgaatttttcacacctatgtctgcattaaaggctgttttactaccggaagttacatagacttcctgcagtcagctgctgtgccccagtgccttactggtcctttgtagatttgccttaatgatttgtacaaatgactgggaggcggggatgctgcctgtgtcctggtgaaccttaatgaaggggccgtcttaggcacagtgcaaaacaagcatttgtcctgtactgttagagccaaaattgtgatgagcaatactgataattgtccagtttatgtcatctttcccagattttaaaatctgttctagatattcttagcttgaaccacttttgattgtgaaatgtattaggtgttgtcccattattactgtaaaatgaagttttgaatcttcttgttaataaactgtggatttcccctctcaatttcttaaacaacaacaaaaaaatgcttgaagattgtctttgagtgtaagatctgccttttcagaaagggagtgttagtttgtaatgttaaaaaataaagacctcattcaataaaagttgaagtcatctttta

SEQ ID NO: 51479 - DNA, 1081 bp, Homo sapiens
aatcggtctgcttccagcctcatacccttttccttcaggtactttgtaatcctttgctgtcggagaaactgttggaaaagttgcaatgtccctaccgtttatagggtgacacagaagattacagtgtgatatgtgtagtgacactgtgctgatgagactgtggccacacagtgctgctggtggtgagaagcgaagttaagtgttgtcaacaactggggtgtcatcttgggtgtggatattttccttccagctattgcttgctaattataatctgccattaggagccaagcctttaatgtctaaaacagcctaaccggaaaactcagaatggtgatattgattttactgtgaatatcaccttctcagaggtgccttaattgtaccaccatcatctctcatcgagagtaccctagcttgtctctttgcttctattcttgacccctataatccaatgtccacatagcaaccaagatcatcttttaaaaacataaatcatatcttgtcagtgtcctcaggggctttccattgcatgaaagaatcttagtcttactgtagtctccaaggctttacatgttttggctgcttacctaccactcttaacactgtcactctcacaccacagacactctgcccttttttttgttccttgtatatgccaagtttcttcccacctctgggctcttgcacttctcaagcctggagcccatttccatcatgcttacctccccttccagacttgagctcctcagctctttctgcccagcccaccacaagttgactcactgttttaataatgatggcctgtaattatcttttctttgtatttgtttggttcttccacgagaatgtaaactcacctagaataaatgccgtatctgtcttattcacttcgccagtcatataaatccataacctggaagagtggttctcaaactttaatgtcagttagaattttggggtcttatgagaacacagactattgggcccaccttcagagtttctgattcactaggtctggggcgagacctgataaatttgcatacctcataaattcccaggtgattctgatgctgctggtcca

SEQ ID NO: 51480 - DNA, 4358 bp, Homo sapiens
taatagaaaaatacttctcttgggtttctgaataattttaattttcttccacttttctgttattaagtttgcacctctaagtttggtatgcccctttgccattgatctgcttctcctctagggtctgagaggcactgctgtgtagtggacaagcacatgcaccctggacccagacagtccaggttccagtcccagctccacgagtggtgttgatccccctagccctgtgcctccattcccccatctacataatggggttggcagcagtacctggcaccaagggattttgtgaggaatgaaaatgggcatatgcataaagcacttatagtgtctggcatggtaaaaggcaataaatgttattcatttttgtaagtattaccaaaacttcacaccaaaccttagattcagtcttctgtatgcccccgtgtttatcagtttcttcactgctaagattacagtggaagaccatattgtgtagtaggtaagagcatggaccacctaactttggggaaattaattatcttctcctagaactaaattctagttttagggaatacgatatgttcttcattcataatcttggcagcctttctcattttataattatttattagccactcctctcctcaagtagactaaataaaggcagtaactgtctttttttcttactactgtgcatagcatttaattaatattaaataattgtttaataattgttggtgaaactataacgtggtagggagaaataaatgatgcaatgtcgtgaagtacttaccatatttattaaacacttttataaaaccatatttattaaacacttttttttatgagataggatctggctctgtcgcccaggctggagtacagtggcgcaattatggctcactactgcctccaccttctgggctgggctcagtttgtagagacagggtctcactgtgttgcctaggctggtctcaaactcctgggctcaagtgatccttccgcctcggccttctagtgtgctgggattacaggtgtgaacttccgtgcccagccaaataaatgcttttaagagcagtagttgcaatcctctgaatttaaaatgggaaaccttgctgtgttttcatcctctctcattagtgagggactagatatgcattttgtggtcgaccttttgttctctggtataaattctataaaagtcttcattcattcaatcaaaatgtatttataaagattttatgccgggtgtggtgggttgtgcctgtgatctgagccgccgaggtgggtggatcatttgagctcaggagttcaagaccagcctgggcaatgtggttaaaccccatctctacaaaaaatttttaaaaatcagctaggctggtgatgcatgcctgtagtcccaggtactcaggaggctgagatggtaggatcacctgagcctaggaggtggaggctacagtgctctgtgattgcatcactgcacccagcctgggtgacagagtgtaaccttgtccccaccgtgcctcccctcaagaagattttcgtatgtgcaaaaacactgccaggctaggaaaacaaagtccttaaatagcttaatttgaagttagggttattccctatgactgctaacaggtggccatatttttcagtagaaagttagtcacaagatatttgttgagcacattcgacctctttcccattgggtatgattgtatcgtctcatctctgaagcttgcttgctgaaaaccatttgtcaatggtttattctttctattcaggtgcagtttcagtttgttctgctgactgacacactgtactcccctttgcctcctgaattacttcccactgagatggaaaaaactcatgaggacaggcctttccctcgcacagtggtagcagtagaagtccaggatttgaagaatggagcaacacactattggtctttggagaaactcaagtatgaaaacattcataaaggctggttgttttatttaggaaataacaatgacctgctcaagtgagctccctccagctctcctctctctgaggacactgttgcttacttccctgtactttctaaatgctgttgttggccaatggtattaccatccatctgttttcttttaagtgaataaatgcactcctcacacactctgacatttgtagatatttaagtttaccctccatagaccctcttataaattttaaatattccagtttcatcatatttctgttacagatttggaacttatttattttttctatcctggacctcaggataatcaataataaacatggaagttataatctggcttcttttacatgtagtataatgaggtatttcccccgtctcagtgtatttgagatgtcacatacagttgacctacaatattcccccttatgacttttcacccggtagaggataggtggccattcttgacttttgatggcttatctctagaatcaagacactttagatactgagtgttggtttctgtatttttgggcttcattctttttagtaacattaaacagtgggagcaactcctttttttttttttgaagaaaatcttgaacggaagatgcttccaaagtgaaagtttaatgcaatctcattatattaacccaatgtgctttgtgtttactaaataggcagaggctggatttgatgcgagagatgtatgatagggcaggggagatggcctccagtgcccaagacgaaagcgaaaccactgtgactggcagcgatcccttctatgatcggttccactggttcaaacttgtggggaggtatgtgatgattttgttgatgtcttcttttaaaataatgattagttttaagtgtttaaaacctgagcagataatataaaaagttaagaggaaaaaaaaaggtgtaaaaaggccttatctataatcttatccactcacaaccactgcgtcatttggtatatttcccttcagttatattcagcaggcatttttgtttcgactctcaaactttcagccaaagtatttaaatcttccctgactttaaacttacaaagtgttctgtaattgattaagataaatttagaaggaaaagaaaacttacgcctgtatcctacacagtttaaattcatagtacagcttatcagacacaatctcttcgtgatctgatttgtttttcttttttttaaaaagcaattcatcccactttagtcattgcaagggtaaattaattgcaccttggtagtccccttcagcctcattttttttttatacattatttccagcacttaatgaaaacacatagtgcctctatgagtccatattgagtcaagtgttcttagaggttttcaaattttcaaagcagggaaatttaactttgagcttatgatttcagaatttgaattgctttttcaattgcagaaaaccctgtgatgttttttaaagaggctgggtaaaaaggagttgctgaagtcatagtatgttgtggaaatgaagtaaatcttttccactctgctctgatagcaaagtagtttttcaaagagatgaattggccaaacacatcttaccctagcaaagcacatgctgctttgccatatgccatttcatccattttggtttctgctccaaaatgacgtgagaatttcagtaaagactgaaagccttcttgtttcactttgatgttgagtgggtcctttgaggcctggatgctgatcttttatgtgaactggagaatgtaaacgtgttatagcacagtatttacctaggatggtctactcacgtgtttcctttgcttttcttattctaaggattagtccttacataactttttcaacttgcccttgttccctttcacctgacccaaatgatttatgcttattttatccttttgcttttccatttgcttttattgtgttgattccccagtggattctgtcctgttagcacctattgcttcctgtttaaccaactattcctctctccctggctgtgttaattggcgtcttacctggtgtctagctcccccattttccacggctgtgtgaacgagcgccttgccgaccgcacaccctcccccactttttccacggccgattccgacatcactgagctggctgacgagcagcaagatgagatggaggattttgatgatgaggcattcgtggatgacgccggctctgacgcagggacggaggagggatcagatctcttcagtgacgggcatgacccgttttacgaccgatccccttggttcattttagtgggaaggttggtgaggttattgtgagaaaggcgaaaagggaccagctcttgctctgaaggcctccctgcttgcacaattttggataaccttgcattagccaattcaactcatgaatgctctttttcaa

SEQ ID NO: 51481 - DNA, 1038 bp, Homo sapiens
gccactgcacttcagcctgggcaacagagcaaagactctgtctagggggaaaaaaaaattagtttcttgtgaaattccattagtaagtttgttttttagccatgactgcctctgctaaaactttatattgcaagtgaaaaagagcttgtccctttagctattctcttatggcatgctgggatgttatgaaccatccatcataatttgggatgaaatgtaaaatatttaagctagtcttctgggttaaaagggggttaaagatgatgattctgtgatctctctaagtaccttaactgacattctttctataagtagcaccataattttgctaatttttcttatctttatgttgaccagtttgttccactttttgaagtaacttcattgaactttctgctaacgtatcctttccatattcccctctctcatccctgttctccttcagtctgctaggtcaaagtataaggattctcaaaaatgcagagtaattatgaaaattctgtttaaaaagcttcagaatagaatgtttatatagcattgatttggagctaagggctatattctggtaacataacaaggtgctatctagtgaatgtgtgattgtgtagtcatggagctgatgtccctgccatagaattacagaattatctaaaaagggaaatctataataatggccttcaatgctcccacacttggactagccattgccataggcagaaaggcaatctcatctttactgtgtgtgcaaacagtactttaatgtaatgtgtgcttaatataagctttctttaaaaaaaaaaaaggtggctcctgtttttgaatagctatttttaagatagatatagttaggaatctaaatgtgttctatatagttaatatccattatgaggtggctctgaaaaatcaacctagtataagttggatggctttgcttttctgcttctgttataacccatttttctagaaaagcttccacttctacttaaagataagaggcaaatcattttcctgttcccttatgcacatagatgttcactt

SEQ ID NO: 51482 - DNA, 1044 bp, Homo sapiens
aaaaaaaaaaaaaaagacatcaaaggcatgaggtgtaggcatcgagtgcagagaggactccaggcaggggacatgtgcgatggctctttaatggcccaggccttgaaatgggcaagtctagctggggtgcccataatagaggagggtgatctgtgtatgtgttgactttgaaagtgaaattatccatttgataccttacgccaaattctttgtcttttaaattctgttgcagtagttgttgtttgagggtcttgtttagaactttttagaacttttcattcttacgtttttttacaccagagcttcaactctctgtttcttagcatttctctctctcctgctttggagcagactgaaagggaagtggcattatttcatctgatttaatgttcatttgcagttatttttgttatatgtttcatttgtatttcatttatgctctagttatgttaacatttgtttttctgtgatgtattatgtctgttttcataattttcattactttgagttgaaatcccaaatacccagtctatcctcctcctctctttgttttaaaatagatttcagagcaggaaaagcatcagataaacatgtatgtcacttggttttgtttgatttattgatacaagtgtctgtctttgtcttttgtcttatgttcgaagatcagcatataccaaatgggaagactggaatcatagtaggaactagattctatttccctttcactaattggaatgaacactctagctttgtgaccaccagtttttattgcttttttaaaaaagtagtagctacacaataaagaagaaaatacaaatgtgataggactttgctagtttgcttgaaatataaagtgttagagctataatttagctttcacttatgcatttctgaattaggttttgaactctaggagcaaacgcaaaccttttaggcatcaactgtcatcttctcccttaacatttatcttttttctttttttctcttgagacgaagtcttgctcttgtcccccaggctggagtgcaatggtgcgatctcggctc

SEQ ID NO: 51483 - DNA, 1038 bp, Homo sapiens
tgaatagagtgcgaagcagcccatgccgtgttactactttggtatcattctctcatgccaaagacttgagtttataatccagcaagagctttttccctccctccccctgtgtagtctcactcaattcttgctaatttttttttctgctttagcggatgaagaagctcctgattatggctctggaattcgacagtcaggaacagctaaaatatcttttgataatgaatactttaatcaggtgagaaaccgtcaggaagaaggaaaaccctgtggaaagagaaagaatgttcagcattggagatcagttctcctgtaaaactgaaaaatacagggtgctggttgccacagagtagttcaatagaatatgggacatgtctaacaattatgaaggtaaaggtgtatagactcaatattcatattttattcattgcctttcctcagacagccctcagtccatataattttccagtcactattatttgttggacagataaacagaagtaaggcaactggggaaaaatacgtttttatactactttaccatgtatctgcccctgcctttttttcagagtgacttttcgtctgttgcaatgactcgttctggtctgtccttggaggagttgaggattgtggaaggacagggtcagagttctgaggtcatcactcctccagaagaaatcagtcgaattaatgacttgggtatgtagacatagtttactgtgcttggggacattttcgacaaagggaaaatattgaccattatcaagggacatagtggccttcatcaactaggaatggaaagcatgcccaactccctcctctttgcattatttgaaccatctgtgtcttcatttgaccctctttagatttgaagtcaagcactttgctggatggtaagatggtaatggaagggttttctgaagagattggcaaccacctgaaactgggcagtgccttcactttccgagtaacagtgttgcaggccagtggaatcctcccagagtatgcagatatcttctgtcagttcaagtaagctgc

SEQ ID NO: 51484 - DNA, 1045 bp, Homo sapiens
tttctgttgttttcttgtattatagtttaccataggaaagagaaaaaagaaacaaacttctgtttgctggcaggggctgtggagaaagagggaaggagtgagagggtacatatgtatgtctggggagggggagtggcagaaataaagaggggtgctttgactatccatgggcaaaatcacgagcaatactatttccctgaagtcagcagtaattctgcatagctttctgttttctgccaatgttcagccgggttttaccaccacattttctttgtagctatgaaaaatgtattgtaaatttccctagggtacttagtaaaatatacagggaaagatgggctttggttgaaatactggttattctaattttgcctccattagagtaactttaagaagtcctttaattcacgcccaacaacaggtcaggtgctacaagaaatgaatttggctttgttagaagcagcttatcttgtgagttagaatgagttcatcaaaaaaggctgaagtcaagaataacaacaacaacaaaaaacaccttaaatatttctgttctcatttaaactatataaatctacattaatttatcaaacttttgctggaaagccatggccttttctttaattataagatcatttactggagttctgattgtctttcttgcaaaaccacacccataattcatcatctatgactttcagtttggtggagcaagaattagaaacctgtgaagaaaatctaagttcaaaatcctttaaattttttatcatttattaacattaatcatttaaacattttatcattttcccctttcttttacatttgtctcacccaaacttaacagttatttttaaacaactcaccattttctaaccttttgaaaacattcaacttagttttcacaggaacaaaaattatttatgttttcatatttcattgatttgcctaatgtttaatgaagttagataataataataagtacaactggcataaacagatttgggaccagatactactgacatttgataagcactcaactcttcggagc

SEQ ID NO: 51485 - DNA, 1064 bp, Homo sapiens
cccaggaggcggagcttgcagtgggctgagatcacgccactgcactccagcctgggcaacagagcgagactccatctcaaaaaaaaaaaaaaaagaattattaattcgttttgacctaaacttggaattgaattttttttctgaaacaaaaacttgtttcctcttgtcttaggtatgcagagaaggagaagaaaaatcttagatacgtcagtggcatatgtgcggggagaagagaacttagcaggctggcggccccgtggagacagcctcatccttgagcaccagtgggagctggagaagctggagctcctacatgaggtatccaggggcagggttgttcagatgcaagaactctcggacaagattgccaaagtatcagtcttcctccccgctgctgcatgtgatcatagcttttcacttttctctcctgaggtcttaacgagctttgtgtttgctatagcagtagtattgatcttctcaggtggaaaaaacccgccactttttgctgctgcgtgagagacttggtgacagcatccccaaatccctgagcgactcgttatcccccagcctcagcagtgggaccctcagcacctccaccagtatctcctctcagatctcaaccactacctttgaaagcgccatcacacctagcgagagcagtggctatgattcaggagacatcgaaagcctggtggaccgagagaaagagctggctaccaaggtgtgaatcccttcctctttgctgaacgtcttcccacaaggctccacaaactagcctctcggtttattcattttcaacacctttgttcgaggtgtttgaaggcctgtgataatactgtgaatgtagaaataaaaagacgcagttcctaccctcaacaagcttacagggccaggcacagtgcctgatgcctattatcccaccactttgggaggctgaagcaaagggattgcttgagcccaggagttaaagacaagcccaggctaacatagtgagaccttgtctctacaaaaacaaaaattaggccaggcatggtggctcacacctgtaatcccagcactttgca

SEQ ID NO: 51486 - DNA, 1378 bp, Homo sapiens
aaggacaggagtgtaaattggttgtggggtggtaatgaggcctctgcatcttgtaaggcattgtcatgttctgaaccaccagggatactctggtcacacatgtgcaccaattattttccttctttgtctttttgttctcaagagttctaaagatggggctcaggggagagagtaaagggaggacagtgagaaccttaatggtctcccaacctccagccctgtgattcagcctcacgttctgagggcttgtgtcacagggtcccggagtagacggcttagaggactaggcctgcggtgccaaataggaagatgctccaggagggagcctcagagggagaggactgtgaggggacaagacttgtacccagacttctaatcctacctccccgtttgtcccccataggtcaaagctttcccgcagatgcccgagccagtcgaaatactaagtgactctgccgagtgccctcactcgccttcgagagataaagaaagcgttacctctcatttctctttgtgattcttgacggtgactcttgtatgtaatcctgtggcttaactacttctccctccttgtccagcacttttctagctctcccgttccccatctccattgctctgtactcttttcttttttcttgtgctgagaatctcgttagtagcatgtggcctaacaaaaggaaaaaatgtttttaaacacacacacacacacacacacacacacacacatacacagacaaaaacacaaaaactctgaggggatctggtgaatctccaaattattgtgggtgtactttggcttccttttgtatgataggtccccatcatgaccacctctgatgtctgtgctgctgtcaccaggcacctttgtttttcaagacaacatactttttttttcttttctctgtttgtgatatcactttaatttttcttgggtggcttagagactaagggaggagacatctggcctttttagaacctgagaggaaaaaaagagtctttttttcccctctgtctctttttgccatggctaatccctgcatttccattcagggaaaaggtggtagtgagcatagaactgcaacagttatattctgagtcaaagttggggctttttacggcataattatggaatttttatttactggtagagaggagacgagaggctttttcagtgggcctgggacagtggctgctcttgactttgtgtgaagggaaatgccaaggatgcttctggtggacttcaggggaccccagggtttggccgtgggccgtgatggcagcaggcggtgggatgcttgtagctcctcacagcaggattcctgcccactgttttttctctgttgggagggaagctcttttctaggagtgtctcagttct

SEQ ID NO: 51487 - DNA, 2507 bp, Homo sapiens
ttatcactgcattgtgaagaggaggaaaagtgaatcacggagagagaaaggaaaggatagaatcacaggctgcgtctgcacctgaaaagtgacccgcggaaactctatggcggattttttttttaactttcttcttcctgttaaaacataggtcactaactgtgatgttatttgttttctaagtggtatgtgagattttctaatgtagttagaagtttcattgtctgatggacacaatatgcccttccggttctattcaaaccagcaggatctgtcggtgcttagagatggctgcctggactggaatcaaatctaatttcagggaaatgaagatggaatttgaaggtcacttttaaaattaagtcattgatgctgctgttacagagtgtgacagaggatccatgtctgtgacacaggacggtgggaagcctgagagagagtgaaattatgtgatacactgaaatgacttttgtttttcttctaactcatacaaaactggtttggaaagtctttgctttggaagcgtcagacattagaacaggccaaactggactgtctgttcatagcgtgcctgaataagaaggcctcttagggagccagagggagcagagtggtcgtgtcctgcgtgctcttcaccctctggggcgcccctgctgcggctggcaggtgcagacagcctttgctggtccccagcacgtccagggtgggtgctcccttgcccgacagaaccatccccactgtgaggctgtgagagatttgtggcaggaactgtttatgaggctctagttgttgctgttgtggcgggaaagttaagaaacatagcccttaaggaaaccacctttatgtattttcttaaagcacgcctttaaataagcaaaaactttaaaaggcaggaaagagaattcttaggcaaattcagagaaataagtgctagttaatactaatcacctcctcctctgtctctcatcctcctttctcccatcaaagcaaaatatggcctcaccaccagccccaaatcagtgctcagaccctctctgtgtctgtgtgccctcctgggagtcagtcagcgctcaggccaggactgtgcagggccagccagcccatgcgctagtcaggagcacaggcaaggggtgcttgtggcagtggccgggcacctgagccccagctcgttgttaaacgtgctgacggcaaggggcaatggagtgagtttcccaactaagaaaccactattatatattttttcccttcagtcacatagacttcagacaactctcctattttttatggatttttcagctcatttcagatgaaggaactaagtcattgtgaactgtctcttgagatctaaaaacaagatgacttttcctggcacatattccaaagcaaagactttgttgcctgctgcttattgtctaatttacagggatatttaattttgtcaggtctatgtatatttatccagctatacttacttgcacagtggattggagagaaaggattctccagtgtgcacactcatcggtactctttctgcatttccctcgtgctgtgtcccgctcgggttccaatggacagtatcagggcttgtttgacttaggtctttcagttttcctttcggttcccttttaaaaatgtgattgttaacctgcctcttgaaagattcaaccgggtgtggtggctcacgcctgtaatcccagcacattgggaggccaaggcaggtggatcacctgaggtcagaagtttgagaccagcctggccaacatggtgaaaccccgtctctactaaaaatacaaaaagtagccaggcgtggtggcgtgtgcctgtagtcccagctacttgggaggctgaggcaggagaatagcttgaacctgggaggtggaggctgcagtgagttgagactgcaccattgcactccagcctgggtgacaaagcaggactccgtctcaaaaaaaaagaaaagattcatgatgctgctgctcccagaaggtttgctggatgtgtttacataggactctaacttgtgtgcactacagttgttcaccagggccagtgattcaccccagtgtgtggccagaccatgactgtgtagcaggaatgttttaatttgtgcttccttagtaaattgaaatatcagctgagagattatttgctgctgttattcaaaaggccatttatgaagttagtatttgagccccataagatctttaaaaagcctccaatcatttaaaggaagaaatcagagttgctataaaattcagtaaaaagctcatagccaaacggctgtgctcagatggaaagtctgagctgaggttggtctcttgccaaaccgtggctgttgtgtgttgttcttcatgtcttcgagttcattttttttcattctgcctattctggcatcagctcacttgaggagtccctcagccttcttgtatttaaggcatcgtcttagactttgtggctctaaagtacctgtctgttgagatttcaagtctcttgtcaccatcctcaca

SEQ ID NO: 51488 - DNA, 1052 bp, Homo sapiens
ccaggggcagcccggctcggcctcagcgggcggggaactctttgggggtcgagatctccctcgttctctccgacgcctcccaccctgggggtcgcctgagctcacttggggctctgtgaccctggccctacggcgtctcgggcccagagctccttccctgcgggcccggccccctgccctctcggccgcgcaggcatggggcggggcgggtcccttcgagggccagggaggaggcgcggccaggcctcgccgagtctgcagggacacctgcgggacgcgtgccagcgggagccgggcgcgagggcggggctgggggccgcctgcccggccgaggctctgcagcgtgcgcgcccggcttctgggggcccgcgggaggcgcggaggaaagtgcagactcccagtcacggccaaatgtggaaggaccggacccctgggttgcagcgcgtcgagcggtgctgactctttcctttgttctgtttctgcctctctagagctgacatcgcgctgatcggattggccgtcatgggccagaacttaattctgaacatgaatgaccacggctttgtggtaagcggcgtgggcgcgttgtcttctctctggttcccgggcgctttagccgaggccggcgataggtttgggagcttacgggtctcctggccgtgctttgctaatgtgctctgttgctgctcgtggcatttttgtatggaaaggagaagcaccctgtaggcgtgggcgggccgatcccgaacttagtcctgcggagtgtgcctgtgggtccgtgaggttcacagcccgaatgaacgaattagtgtcttaagtagagaagaagggtgcgggaggagaacccttgctggctgtgtagagctctaacttgattgcctgatgagatctggggagagtgaaaatgtttcttctaaatgttaaagtggcttagacgccaggatgatcaataacaacagatagagcctgttgaaccggccagttcctggatttgattttgagtcctaacacgttgggtgtggattctacctgacacaccgggggtagttggc

SEQ ID NO: 51489 - DNA, 1049 bp, Homo sapiens
gtggctcaggcctgtaatcccagcactttttgggaggctggttcagatggatcgtttgagcccaggagttcgagaccagcctgggcaacatggcgaaaccctgtctctacataaaattaaaaaattagctgggtatggtggtgtaagcttatggtcccagctacaagcttatggtcccaggttcgagaccagcctggccaacatggtgaaaccccgtctctactaaaaatataaaaattagctgggctttgtggctcatgcctgtaatcccagttactcgggaggctgaggaatgagaatcacttgaacctgggaggtggaggttacagtgacctgagattgtgccactccagtttggcgacagagcgagactccgtctcaaaaaaaaaatgaaaataaaatcaagatctccttagggaatcctagggaactggatgcttatttttgtaccaaacaatttgttggctttagcaggtatatcttttttggaagaaaaaagtaggggaaccagtggaaataatgtgtttagatacccaaaataattctatagtaacaactctgaaaaaacccaggcactcccatttagaagaaatgttttgctgtaagcagtgcagtgatagctcaggggaggctgagcattcctttctagaggagtcgtgtcaacagtggggttgtttccacagggagaaggatttgtaaccagtatgccactgtttttcaatcaaatgacctagaaaggaagaacactgagtttaaaaaaaggacatactaaattttttgtgtggcaagctgcctgtaatcagtttcagacagagaaaactgaaaaatggtggattattcttcagtataggaaaatactaagtaatgttaactggagccttgtagggggaagattgaataatataatgaagcccaggctgggcgcggtggctcacgcctgtaatcccagcactttgggaggcagaggtgggtggatcatgaggtcaggagatcgagaccatcctagctaacacggtgaaaccccatctctactaaaaatacaaaaaatt

SEQ ID NO: 51490 - DNA, 1094 bp, Homo sapiens
tgctcctgtaatcccagctcatcaggaggctgaggcgttagaattgcttgaacccaggaggcaggtgttgtgctgagccaagatcacaccgctgcactccagcctgggcgacagagcgagactccgtttcaaaaaaaaaaaagaaacacggacaatggagtcctgatgtgagcgtcagttatacaactgacggtccaggtggtgacagccaggagagagactgcccaggtcatccaaacacctggcctcctgggcaggtgtgtccctgtcatggagctgggtgtagatgactgagagtttgatgccatgaactgtttggctctcgtcactccctttgttccagttcttgacaactaaataattttcggataatctggcttcccagttgcttgtctatagggccagaatgtgttgaccggactaacatttgtaaccacgaagatccatagttaaggttttcatcctacattcattaacgggtattctgattttatacatcttgccagcttataaataaagatctggtctttatttataaatataaatataaatataaatataatgatggggccttggagggactcctttctgggcttacaaggttgagaccttggatctagggtcattttacttttcagtagccattaggaacaactacaatacatttatattttgaaaaaaaacaagtgatttaattggccaatatattttaacctctagttgctagaaaagtggtaactttgggaaaaagaggactttttttcttgtgggtgggggctgggaaggtggggagttgctttgaatgatgagaaagagtagaaaatacaggctagagagccataagtattgaaagtgaattcagggactttgagaaaccttgagaagaatgagtctagaattagtgttaaataatattgtactggactgaagcttgctttgaattgctatatgattcttgtatcaaaaatgctgtactcattttatacttgttattttttgtgtggagaggtagccttgccagggatgttggcatgaaagctgatgtggacttctctgatgtgtcgcctgtttctctgaaggcctcttggtgcttg

SEQ ID NO: 51491 - DNA, 1030 bp, Homo sapiens
agtcttttataaggaatactttctgaaaatactaaatgtcttaatattaaaatactacattgactttttaattcaaatgaagtaaagtggttaaacttgaatgattacggctatactgaaaaccgtaaaatataaaaacctaacatttttttgagaggtgagtccgtaaatgtgacttatcaatgtaaaatcttcaaaaaaaaaaattaaggtcctctaaattgaatttgaaattttactcatggaccaacactgagtattctacataacagtggtttttattttattttactggttttagagacagggtctcactgtgttgcccaggctggagagcagtggtgtgatcatggctcactgtagccttgaactcctgggctcaagtgatcctcccacctcagcctgccaaagtgctgggattacaggtgttagccaccttgcccagccataacagtggtttctatctcttcattttccctcaaaactcccttttgaatttcatgttaatctttgtgattgaatactcatgtttgtattggaagattgtcttaagagttttagttatcaaattaactgtttagagcttcttataaaagttccttccgatccatgtcaacttttgtggcctaaggttgaaactttcagctctttgtataaacagactttcctgctccacctttcttctggttgctgtgcgaactttggtaattttcatgcgcatccgtgtgaaaagaccaccaaacaggctttgtgtgagcaataaagctttttaatcacctgggtgcaggcaggttgagtccgaagagtcagcgaagggagataggggtggggccattttataggatttgggcaggtagtggaaaattacagtcaaagggggtttttctcttacgggcagggccgaggggtcacaaggtgctcagttggggaggttctgagccaggagaaggaatgtcacaaggttaatcgctcagttaaggtggggcaggaacaaatcacaatggtggaatgtcatcagtaaaggcaggaa

SEQ ID NO: 51492 - DNA, 1002 bp, Homo sapiens
agaaatgagaaatgtaactttgtttcactagggtatacatcggcttccagcttacttccctgttagagttaagattcattgcatttggccgggcgcggtggctcacacctgtaatcccagcgttttgggaggccgaggcaggcggatcacgaggtcaggagatccagaccatcctggctaacacggtgaaaccctgtctctactaaaaatacaaaaattagccggttgtagtggtgcgtgcctgtaatcccagctactggcgaggctgaggcaggagaatcgcttgaacctgggaggtggaggttgctgtgagctgagatcgtgccactccactccagcctggtgacaaagcgggactccgtctcaaaaaaaaaaaaaaaaagactcattgcttttttccccccttgattatttcagtgtattcctaggaaagataaaggatgcatttgatcgaaacccggaacttcagaacctcctactggacgacttctttaagtcagctgttgaaaactgccaggtatgtagcctagggctggtgccatggttactctacctccctggggccatcagttgtgatgtttggttttttgttttttttttttggttttttgtttttttgagacagagtctcgctctgtcacccaggctggagtacagtggcatgatcttggctcactgcaacctccgcctcctgggttcaagcgattctcctgccccagccttcctaagtagctgggactacaggtgtgccaacatacctggctaattttttttttttttttgtatttttagtagagatggggtttcaccatgttggctagactggtcttgaactcctgacctcgtgatccgcccacctcagccttccaaagtgctgggatgacaggcgtgagccaccgcgcctggcctaaccatcagtttttcatttacccacattgatatgaatgaaaatctatccgcgtcaccaggggcagatcactaatctctggccgtgcgttttgt

SEQ ID NO: 51493 - DNA, 1261 bp, Homo sapiens
gcagggattaacctggctggcccctcgggggcgtgcgccatggactgtcctgaccaacctactctctcgtttcctaggctcagcgggattacttcggggctcacacctatgaactcttggccaaaccagggcagtttatccacaccaactggacaggccatggtggcaccgtgtcatcctcgtcatacaatgcctgatcatgctgctcctgtcaccctccacgattccacagaccaggacattccatgtgcctcatggcactgccacctggccctttgccctattttctgttcagttttttaaaagtgttgtaagagactcctgaggaagacacacagtttatttgtaaagtagctctgtgagagccaccatgccctctgcccttgcctcttgggactgaccaggagctgctcatgtgcgtgagagtgggaaccatctccttgcggcagtggcttccgcgtgccccgtgtgctggtgcggttcccatcacgcagacaggaagggtgtttgcgcactctgatcaactggaacctctgtatcatgcggctgaattccctttttcctttactcaataaaagctacatcagactgatgctctttctccagattcttagtctcacctcggccacatggagccattatccccattggcagaaagatttttctttaaaaaaaaagactagaataacacaagaaaccacatttaggattatgcttcactcagaggaggcaggcagggaggacacaccaggggctttaatacactgggcatgttttctttctccaattgggcaatgggtacatggacgttcactgtaacgtgctttttctttcgtcttttttttttttttttttttttttgctcctggcaagctgtgcgtgacattctttatggctttttgtatgtcaaatacttcatactaaactttctagagaattaaactttaatgatgggctcagcttggtctgatttatttcctttcccacacctgtctctacttgctctaagccaggcccagggattttgaacaagctaagccggctccttaaactaggcttttcactttatcttacttactcagagaagataaaacctgccagtgatattgttgtgtggcctggggccagtgtgactgttccctgcagcggtttgacttcatgatgatttccctggagtgttaaagtcctaagagttgcctaagaggagcgagcagcgcctgtgcctcgacagctggtgtctacagtgtgacctctgacctct

SEQ ID NO: 51494 - DNA, 1373 bp, Homo sapiens
gcctcagcctcctggagcggctgccagcctcttcatctgtggtcacctttgcgcttctctcgtcaagttggatagtcagaaataatctagtcgagccctctcagtgcgttgataggaaagggacgcactgtgactaacagacgccaccaagcttttggctgaggacccatcctcgcttccctgggtttggttttgttggccgagggctccgctctagcttttcacctgcagattcagacaaatcccactccaataaggggaccataaggaccagcgttgacgcctgtgcctctgcggccgggaggcagtggatgataaggtctccgaaggggtttatagtccaaaggtggggtagggtggggtgaggagaaaagggctaagagacatcttacatttaactgcctgtgtggtgtcatgttgagcacaaattacatctattatctcgtttagtgttcactacaacctttatgaagtgcaggctactaacctccatttcacagaaatgaatactaagggtttgtgacatgccccaaatcgtgtgctctgttgagcctgtattgaacctgtgtgactccactagtcatccatacatttttgagtttagttaggattagaatgaggaagaagaaaatagtttcaacttggggcctcattcctcctctcccatctccttgaagcacctctaagagttttcagcaacttactagtatttcacttccttcagaggcagaagaccaccgcttagtgtttcttactgtcttattctgcacgtctgttacaagaattgaacttaaaggagttggtgtgttcccccataccagtttctattagcagtgtgaatgattcaggaagaagatgtcttgattgtaaaacatgggagataacaaggactgattctggccttctcactgtcaggtgttctggagtttggcaagtgtctcgagaggagggcctctcctttcttgccttaccacatttagtttgctgaaatactaaggcatcttggggtctgggtttctctgaattgttttgtgttaggaatgcccacaggctgggattgaagggtgtcctcagttcctgattcttttttctttcttaagacggagtctctctctgtcgcccatgctggagtgcattggcgcaatctcggctcactgcctcccgggttcgagcaattctcctgcctcagcctcccaagtagctgggactacgggtgcctgccaccacacctgactaatttttgtaattttagtagcgataggtttcaccatgttggccaggctggtcttaaactcctgacttcaagtgatctgcccgcctcagcctcccaaagtgctgagattatatgcgtgagccaccgtgcccggctctgt

SEQ ID NO: 51495 - DNA, 1007 bp, Homo sapiens
ggatcatttgacctctggtctctcctgaatgccctgtgaggacactccagtctggctgcttgggactcatgattcccctgagagttctaagaaatgtcagctcctagcttcttcttcactgtggagtttcaccctatgcatgcacaaattttagtattcagcagagacctgagggaacctccagacagatttctggaccactttttctgcatagctctttctttctgaagtctgtcctgcagctttcagctgccttggcctccctgaactctgatctctgtctcttcaacttaagtgggtggcgtgctctgctggggatccccgtctctctccagggcctgaaatgtgtctcctggcaggaagccagagtgattttagggcccaagtaatttgtttctctgctttcagggatcgtagtcctgcactgcctgctgtccaatgtgtacacacagtggttttatttatttggcttagttttctagttgtttacagtgggagggcaaatctgttccctatcactccatcatgacccgaagtggaagtgcattggttgactttgagcagaggagtgacatgaaataacttatcatctcctctaatcccaaatgtgaggtggtggtattattcccgttattcccatagatgaggaaactgaggctcagagaggttgagcagcgtgcccccaaatcactgagttcttaatgccaaagcttgtgtactttctgtcatgccactgcatctcaaaggatattggtgggatcgaatcttattcttcccagcagagaactacacagactggcttaggacctatctggagtcacagtcaccgggcagatgcaggatgggttctcctatctgaagtcgcagttactgggcagatgcaggatgggttctcctagacctggagctttcgccagttgctcaaatctgtgagctgcttgtgaggttgttctttgttggacagcaggtcaggatctgggaacgccttccagttggggaaggtcagc

SEQ ID NO: 51496 - DNA, 1078 bp, Homo sapiens
tgtccattgggtggcactgtgatcttatttttgtttccatttttctctgcagccaagctctactccaggaagtgaaaatgtgctgcctcgagagccgctggtaagtacccaagatatgtggtatcactttctagtaattaaaatgccacgcgagtgaaaagaaaccttctgttcctatggttctgcgtcagtagtgtccctttaaaagtagctgttacctagagactgcctctgtcagtgacctctgacttctcttctcgcgtgtggggacgagtgagatctctccttagtaaaggctggtcctttctaggactaaaagcatccaccccagatggtcctgcaccactttgtttgtggctgatcaatagtaattagtgagattcctgcgcccgtgggaggctgaggtggagtgaggtggctgggcttctagattgtttgaagtagccgccctctgctctgcccctcagggtgcgagcgcctcagtggtctttaaagaacaggtaagcgatggaattctggttttgcctggtcagtaattgtgtgattgtcattcccaacgctgtcttcttagactatggatagggaagaggcctattaagcactgcaggtaattttctctcccaagtgcttttcatttggtggccagagtcccaggctgcccaccccattttcattcttttttgcttttcagggcctgctgtaagtcctcttggctgggtagtaagactggctctgtataaaccagataagtttgatgggagagccagctctaggtttaacttttcagagctttttcttcctgcgtagcgatagcaggcgtagggctgtactgccaaggctttgtttcagcagggcctgtggtttcacctgttctgcttcactccccttctggcagtcgcgggaggagatgacgtgagggacttagcgggtatgaacacgtctgaattccagtgtgtacgaaggctttcccaggctgagggcgagttggatccagttgagctgtctgtagaaaggccgaggtgatacaagcactgctgggactgtttcaggggagcagtgttgtcattcatgtcacctg

SEQ ID NO: 51497 - DNA, 1050 bp, Homo sapiens
gtcattagggctagagattggtgaacagaccagtcttgagaaattctgcaaactccaagttgaaattctctgttgttgacaaaactccgccaaagttaaaatggctggttacttttttctctttatactctcttcactgagctttgcctgctgaggcaaggagttcggacaggcctccagagtacagacctccagcttctcccagatctgtgaaaacctgtgaatttcccacagactctggttttctagccacagttgtgtgcctgtccttaggcccacacagtctctggatccagcttcttgtgctgtcctagtaggaccaagtccctgcctggtctataagtattttagaatgggcggacaattgtccacatgtgcatggggtaattcagttcccatcttgtttggatactgaaacttgggttaaataaacttttgagctttccatttagtcatatgatttttggttatttgaagtaagcagtaaataaggtttgatttacacatctgctcacttgtttcaattcagtttctcaatgttcagcaatactatagctcatctactttaaacagtgcttatggattttggctaaactagaattttagctttttgctctttgacaccaagttctctctaatggatgagtccttggccatcgtctcttcctttaacttttaggtgtaggttctttttgttttttctttctgtcctctttcctgcatctctccaccaaaataatcccaaagaacaatttttttttttttttttttttgagatggagtcttgctctgtcacccaggctggagtgcagtggtgtgatctcggctcactgcatcctccacctcccgggttcaagcgattctcctgcctcagcctccagagtagctgggattacaggtacgcgccgccatgcccagctaatttttgtatttttagtggagacagggtttcaccatgttggccaggatggtctggatctcctgaccttgtgatctgcccaccttggcctcccaaagtgctgggattacaggtgtgagccaacgtgcctg

SEQ ID NO: 51498 - DNA, 1033 bp, Homo sapiens
ttctacatcatgtatttgatctcagtcctggggaagctcatccatcttacccctgggacacccaagattttctctttggtttacaagccaattaaccagaggctggtaatcagaaggcgtattttgatggattcagggagccagtactgtgatctctgtaagaataggcaaggcacggtgctcacgcctgtaatcccagcactgtgggaggccgaggcgggtggatcacctgaggtcaggagttcgagactagcctggctaacatggcaaaaccccgtctctacttaaaaaaaaaaaaaaattagctgggtgtagtggcaggtacctataatcctggctactcaggtggcagaggttgcagtgaaccgagatcgcgctactgccctgcagcctgggcgacagagccagattctgtctcaaaaaaaaaaaaaaaaaaaaaaaaaaaaagaaaagaaaagaatagctacagccggttgcctgtctgccaaagacctctaacatgtattcctggcacagtctcctcagcatttgtgtcttctgtgacttttgtggttagaatactttggtgtacttgtcggcaggttcactgtggataagtggttctcattttttttcccaccaaaacatttctttttttgaagcggtgtctcgctgtgtcacccaggctggagtgcagtggtgcaatctccgctcactgcaacctctgtctcccgggttcaagtgactctcttgccttagtctcctgagtatctgggactataggcgtgcaccaccacggccagctaatttttgtatttttagcaaagacggggttttgccatgttggccaggttggtctcgaactcctaggctcaagtgatcctcctgccttggcctcccaaagtgctgggattgcaggcatgagccaccacgtccggccccaccaaaacatttctgaagaatgacattaacatgtttctttgtgtgcactcatgtatgcatgtgtatgacaatacatatatattttataacatttaagcattttgtggggaaa

SEQ ID NO: 51499 - DNA, 1904 bp, Homo sapiens
gactgcaggacctcatcaacacgtgtattgccagaagagaggcttgattgtgttaacctgtttctctccagaggtgtcacatactagaatttctgctcagtcttatggcttaggtggggtgttgagtctaaatatatatattttttgagacggagtcttgctctgtcacccaggctggagtgcagtggcataatcttggctcactgcacgctccgcctcccgggtttacgccattctcctgcctcagcttcccgaataactgggactacaggcgcctgcccccacgctcggctaattttggtatttttagtagagacagggtttcaccatgttagccaggatggtctcgacctcctgacctcgtgatctgccctcctcggcctcccaaagtgctgagattacagacgtgagccaccgtgcctggcccaagtctaaatttttaaggactagagctctcagaccaggactttctggatctttttttctgatacccaacactgtggcacttgactaagtcacctgattgatgacatgagcattgctgggtgttgaaacacctggccagggaaacagagacttctgtggattcatccaaaggatggcagacagattgtggaattttaatgaaggtggggtggatccctgatgttcgcctgctttgaagcatagcagaatcccagcattaacttcaggggtgttggttggaaacctgcactggcgtcggtggttatattccacatttgtcaaatccttaaatccaactgaactaattttagaagtagctagttataatgaaaaagaacaatatattcagatgcataggatcgtttttaaatgaaatgctccctgttcttttccttctttttttttttaacttttattttttatgatggagtcttgctctgtcgccaggctggagtgcagtggcgtgatgtcggctcactgcaacctccgcctcacgggttcaagcgattccctgcctcagcctcctgagtagctgggactacaggcgtgtgccaccacgcccggctaattttttgtatttttagtagagatgaggtttcatcgtgttagctgggatggtctggatctcgtgacctcgtgatccacccaccttggtctcccagaatgctgggattacaggcgtaggccaccgtgcccggcccttttccttcttttataaaaggcctttggtctcttttggccttcagggtgagccatcctttgacttatattagaatacattttttttcctgtatgcctccaatgaaggagagtgtgagagtgttttctatgatgtgagtgggagaaaatagcgtgttttcacaatagttaacaaattgatggctgtgagttttgaaagtgagttctgtatatacactggggtaggattccacatagaatgctgtttttcacccacctggctggttgtctgattctaacatagctgctatccctgattctagaaatcagaaaaccacaggctgttcacataatactctacccttctgaggctaaggtgggaacaggatggtggcggggtttgagtcaacatggtctcagttcccaccaaagaccagtgtgttcccctgttccagccgacagcttgaacaaggattctaaagtttctggccgttttaattgaactgcagtgaggggtggcccgatagcctgcttaggacatgggtaattactcctagggcctgggagccaagtgtccctcgcaggttccctcttggttctctacctaaggatatcttccccttccctgggcagggcctctgaggaacagaaggatcatttagtgctcatggcctgctcattccttggcttctctgctgagctatccagcaggggtgccaattcttccatttagctgactattatatagcccttaaaaggga

SEQ ID NO: 51500 - DNA, 1314 bp, Homo sapiens
gtaacagttaaagaatggtaatgagtagccaaaaaagaaaaaaagaagaaagaaaagaaggaaatagaaaaaaaggaaaaaatgtataaaataatctatgcctctgtgtgtgtgtgtgtgtgtgtgtgtgtgtgtgtgtgtgtgtgtatggtgttagaaacggcagagtcaccttctaaaacagcagtgagaaacttctgtcatcctttctcccagttcaggttgatttgtacggtgctgctcagcccacgtattgtgcatctgtatgtgtgtatgtgcgagcgcctgtgtacgcacgtggtcgtcacccgccagaaagatgccatagtgaggtgtgctatactgtgttgtttgtgcacgtgtgtaacaatatacagtgtttgttcaatgtcctggcaggaaattggtctattagcgattcaccttcttggtgagtagctaataccttattttgttcaaggttccacgttcacacaggaactttgggcctaagacgcaactcaagggaaagccattggggaatgctcagttgggattgaactaataggccattgggtgtcactgtcgctctactggctataggagaaagaggggttatctgctggggaaactggatttcaaaagaaagaagtttttctgcttgagttggaggtgttgtctctttgagatgtttgtctctcatttggagattcctttaaaaaagtagttgtttgcttgtttttgctacaccaagcttctggcatttttattgttcttgaaaattgtgtactgattgcgatctgttctgctatcacctgcagtgcatctagatgagaacttctgtgtgcagaaaactgtcccccttaaaagcctgggtaacaaggagagctgatttgggcaagaacttgaaaaaggagggagaaaatctccttgggcaaatgcttgccactcccctgccgcctgcccctgtgtaggtgggaagagagcgcagagggagagccaggctgctgcctggtcacagaagagtgggctccgtcctccagcgggctctccagcagcatggatctgtgccaggcttcaccacaattcatactgtgtcagtttaataaatgcactacttaaattatgaaattacaaaagaaaaaagagaatgcacttattcagactcttaatacattaaaaataaggcattaaaactctgacttttttttttttcttccagaatcaataatgaacaggaagggttgtagacattaacagtcatggacattcaaactcttatacataaattatcttagaaaaatgcacataagacttgaataatgtaaatacatt

SEQ ID NO: 51501 - DNA, 1033 bp, Homo sapiens
ggatgacggtcagacctcggtttgttcttttcttttccagttttcagagcccaagcctgctccctctgttgcttgtccagccttgaccagtgactgtcttcagcctgcactctgcatttcaccccagcagtaggaagaagtgaggtcagaggagcacgtgaaccagggagaatcgaattctctttggattttgctggtcacacccagcaaagctgctttctcttcccttaagttccaagaactgtttgatggccttaactgcacaattggcttgtgccagattgagatgtgttgaactgggcagtggaggtgggggtgaggggcaactccctctcctattgggggcagagtgctggctgcatcaggcagtgatcagataggcactgatcgggtcggttcaccctctgatatagcccgtatgcagacttcctttgaagagagaggagtcaggctcattaattaaaggagcctggcttgagaggcctgtaattataggtgctagaaatctgaattttaagaggttgtgcagctgcattttgaaaaatgtagggaggcaccgagaagtactggttgtgggcaagaatgtggctgaaccagattttggaggttcaggttttggcagaattcccctccaaattcatatttattctttctttccattttgttcttttttttttttctaaatgggaagcagaacctgtgattttttttttttttaaatgaaggttacaccctgtgaccgagaggctagcattgtcagagtatatggggggcagaaaggagttgctgtgaactagaagatgcttagtttttgaggaaacggcacatctttgggccttagggattcagtatttgaaaaaaattaaataatttctttcttgaaatgagtgaggggagcagggagcagaagcccaatttgaatgcagtctagggaagtaagtcccaggcaaatggtggactctagaacctttgtcccaacttgacttccccagaagtgtctcttcctctgtcatgcgttacttttccatgtgaa

SEQ ID NO: 51502 - DNA, 1065 bp, Homo sapiens
gagatggtgtgaaggtcgttatgtccgttttgtcctcttggagagaaagtgagggagtgtgtttcttgccgtgtgcttgtcgtggtagtggtggagttggagaggcccccacttctgtcaaaaggagtcgagccaaactctcatcctctcttcttcaccctgtatactacacgttgtccaacagggggtgaatgatttcaaaagcggaattcagaatttcaggaagagtagcacaccaccgagtagagggcctccccctaacaccccccttttcatcattctcccctcctcagcccagccgtgacaaactgacagataattaacagatcagaccctcctattaggcgtgccctgtgctggaagctgctctggctttatgcagtcctttagcagctctgtgtgtgtgggtggtgcctcactaagtggccatagcagagggcagggagtgctttgggaaaagcaaacagaatgctctttggaagagagagtgcttaagagggagagcgggggcagtaaggtgcctggcttgaaagcacctggcgaaaagactcggactttcagggttgtgatccggaataccaccgcctgtctcagggaatggtgcgctgggttataataggatgccttattacaaaaaacattttgaaggccacttcccaggtcaggctatgcattaggtgcactcttccttcggtgtaagactgtgctggacttgcaaaattggaagtgtgcagcctgttgtgtttcagccttggcattaaatatttctacagagacactgccctatgtggctttctctcagctacctaacttttctttccctggtggaaagaagaattcattgtgagaatattcatttctacttactagtgacttttaaaaactacttttctttgtttttggacacagggacttgctgtgctgctcaggctggagtgcagtgtgcaaacacggcttactgcagccttcaccttccggccgaagtgatcctcccgcctcgacctccatgtagctgggaccatagatgtgtgccaccacacccagctcatttgaaatttttgttgt

SEQ ID NO: 51503 - DNA, 1048 bp, Homo sapiens
tttgaggttgcacacagaactgcctctagtttttgtttattcctgctgcttttttagtctttcttttcattttggcagctggggaaatcctggattgaggctcacacacatttgccctcctgccacactgagaatgacaattccgacgcttgctttcttttgcatacttgtagatttttcttctactctggtttaggatatgtcaccttttggatatgttcgtggaatgtggcttgtggttgccgctgcttccttccctccccagcctgttccctagctagaaagagagcgtgtagacttgagaaagaacagggagcccggcattgtgaatggtagatcagagaggagcctgcatgtagaaaaccagaattatgttgtcctaggaccctggatccgagagtgctctgcctggaatctcaaggaacacggcctctttagtgagatatatagcttcataattagcccgttgcattttttcacgagtgctagcatcagcgttctacgatgtgtttctctgattaacagctgctttgcaactatttccctgtgccgccgatgaccatatttgtcaaggaactcctgacagagtactgatttcttactaaaatgcagcatttctgtttgaagagggttctctcattcttggcagtgcctggctttttaagtcagtccttgttaaaactcgagttggctttggtctaacgcttgttaacaggattctgggtatctactttagtgtatgaacgtaggaacctttcacaggcaatttaatcttctgagcagcgcacgtggagcagtgcggcgctggaatggggtttcgggcccgtagattatattggtcattttcttttgccctctagttgtgatctctgtgggttaaaaggacttggctttggttgttagtgtcattaatttttgaatatttttaatattttaagatggctaatgaatgctcacatcttaggagatagatgtgtatgtagtacacaggagtgctggaattggtggcattccaaataagtgtcactggagacaatgcatcaggttt

SEQ ID NO: 51504 - DNA, 1023 bp, Homo sapiens
atacaggaagccagtgaagacagggaaacaacatcgcctttcatttaggtagattttaagtttaagaaataactggttataaatttgaccacaatagtatgcttgtctctgtggagctgggaaaaactcctaggatttttaatcttgaaattcagactattgaagtgaagtttactcctctattttctctctctcaccagattgccacggcagtgaagtttctacagaattcccgggtccgccagagcccacttgcaaccaggagagcattcctaaagaagaaaggtacaggttccacagggctgtgcagcacggcctacagggggactggggctggggcagatggaagccacggtgcaaggcaggtgctgagctgccaggacttcctagagctgcccactcatggggcagtggggctgaggcgaaccccccagtggggcatgcaggtttctttcctgacaatggagcggcaagatgacacgattcgggtaattaagcacggatgacttagtccagtccatcatggcaaaggcagcattcagtagcagagtcggcccattggatgagactgtggaggacttctggtttttggtctgctctgtgtcagtgaccctggctgcaggatgactagcttaggttaggagttcagctgcttcaatagagaatgagggagaaagaaatgaagggcgagggaaacgagatgactaacaaggtcaggttaaactcaagcttggggtcagtccgatttacagattgaagcggtaaattagtggttttatggtatttctgtaaacagggataaagtggaccctgacaaattcaatattgtctgaagagacaatctattctggttctgttggacttcagggtatttttctttttttgtaaaatgaaaactacaaagaaacctgacttttcaattttttatacatgtaattttctagaaatctaggaagtcatttacacatccttatataccatgatgggcaaaagtaagctttcttcctcccaaagcaaaactct

SEQ ID NO: 51505 - DNA, 1058 bp, Homo sapiens
gtctggaccaggaggggcctgggttctggcacccgtgctcttggactccctgcagaagccttgcagtgctgggcttggagcatgggctctgggagggctctcagctcctggagtcttggcttttcctagcaatgtcacttcagggaattgcagtggagcactgacttgaattataatcttgactttcttttttttaataaacatctctttcctgaaaaggcaaatccaattttgtttttcttttaatattatttaatatttaatatagaaattgaggtccctgtagtgcatgtcagttcagtggaaaatgaggcgcatcagctgagtttgtttcattgtgaaaccgcagctgggagcaggggctgcatcctgtccgtgttaccgactggttaagtgttgtgctctgtgacttctggtgggggtgctgggtgagggtgagtagggaatgagtggtatagggatggaagagcattggtttgcaaaggtctttcctgttactttttttttgttttttgttttgagatctctttcggatgctttaaaatctgaacatggagccattaatgagaaacgtgaagttattagaatcatttatcattttctttgaagtttgtactgccattttgtgtaatttacaacatttcttccttttatcgggaatattttggatgaaagaaaaaagcagctgctcaccttcagagtattagaataaatgtttttgttttccttccaaccacttgattctgcagatgacacatcaactgcggagtcagccacacatcaagataattggactgtgtgtggggtttaagccctcatagaaccagtctatatatagaagcagttcttgccaggcaggcatcatatctggggctttaagcaggctgcaatccaggaggttagagtaacgtaaaaacagcaatagaatcagtccagaaagttagaggcttggaaattgtcgtcaataggcttgtgttgatttgacaccctatccagccacaaaatgtaggaggcagtctgcttccaaagatgtttggcaggctgaggatgaggtgggt

SEQ ID NO: 51506 - DNA, 1057 bp, Homo sapiens
aaattaattttctccttcagctttactttataattaattctttaatgtgtcttagtgaagccagaagtcttttcacaaagcttttcttcctagagcttgggtccagcagatagcttggggggagggcacggaaatcttgccagctcccaccccttgcttgcgtgtggcccatttcctcatcctcagaaactcctgcggctgagctggaaggaatacaattggctctgtgaggggctgtctggcccttctgattttttgttaacgagacatggattgtggcatcaagatttagattcattcctctgtttgttggagtcattgaagccagtatatcctggacattttttaaagaggtccccattctgagaaaagacaggagttgaatgtcttattgattcttacctttctgttcgttatagacgaccagaggaaacaaatgcccgacacggattcgactcagtcataagtgtgaaccaaataggccgatctgggttctctcactgactgaagaggaagagaaataagagaggacagtgggcaaaatgtagggtgacaaccaagggttctggtttgcccagaattgccctgggttcaaccctgaagttcccatgttgtggacagccccgtggtcctagacaaacaggtcaccttagcggtaaaagcctttctcaggagtgagagctaccaggggagacaaaacgggtttggttttggaacctggaggaagaaggcaaaatgagaagagtccactggcagtgagtcccggagaggcccgcctgcagcagcgtggcatcttccgcacccacttcctgctctttctcccgtagccctgccctagtgtgggtccagtgcagagcctctgggggcggggccgtgccctgcaggtgagcgaggagctgctcgtgcggagcaggcagggctgtgtggcagccgcgcttgttcctgaggatgattgagcatctccatccatctgttgtgaacggaccgtcttccttccctgccagtcttgcacctgcatattcgtcacctgctgttctggcccagcctattcatcaca

SEQ ID NO: 51507 - DNA, 1015 bp, Homo sapiens
tcatttcctcaaaaagtgtaaacatgggcttatgagacatatggaagcccacccaatttgaggagcagggtctctgtcatcactgagttgaatttcagggtgtagtctgcgcctgtgctctccccttgaagaatcacattgtagaaaatgaaatctagaatgactacagaggttacttagttcgtctataccttttcatatacatttcagtaattattttgctacataggaagtgaatttaatttggagtttttcctgctgccttccatgagggctttcatcctaagccccattcttgtgtgtgagaagaggaagtcttgggcttgagtgtggctctaaagtaaatgccgttgactttgttgttctgtatggacgcttttatcaggacaataaagggtacatagggtgacctctgctcctgtggagaggtcgaatggttacattacacaatcttctagagcatcttgcagcaaatacatgggttatattaaaaattgcaatcatatcattttttatagtaaattgctgaccttctgcagcggaatcagctttattgaatttcgccaaaaatgtgtttataattctgccatacacacatgatattcatgtccttgctgtccatgtggaaatgtccctttttataatgttaaacaaattaaatcgactttctcctgagcttccgtgcctcacctttaagatccattctcaggagtcgaacctccatgaagccgagctcatctccattagcgtggatgtcattacacagcgcgctggaggctggtgcattaggcagctttatcccagcagcacggattcggcttggagattctttagaggtgactccagggcagtaaatgtatttcacgcatactgcctgaacactaacaaggccttaccataattactctgtttgttttggggaaatggtaggtatttgtttaaaaggattttgtggtgaaccaagaatatacatgtgtagttagttctcgctattcacttgtgaatgatgcattgt

SEQ ID NO: 51508 - DNA, 1362 bp, Homo sapiens
atctatccatttactaattattaaatatccatttccttcatgtgccaacatttgtgctaaacataaaaatacaaaaataagatttaatatttgtagtttagtggggttccatgatatataaacagatgtggtgtgggtgataaaatattataggtgctataataggtatctgagtggaggcctggggggagagcgatcagttttgtggtaggggaggagaactagtggcgaagaggttaaaaaggtgcctccattcatggaggaggtcccctttatccgagccctgcaagaggattagttgtttttaaggtctgaagcggattggtgacttttgtccatgcagaggatgtgatggggcatagccactaaggcgagagatcgaggagacagcttggaaaggtgggcaaaggtgggatcagggaagacctggcatgtgttacctcaagagtgtggattttgttatgtggacagtggggaaaccacggaaaagttgtatgtggaataataagtttcatgctagcgttttagaaagctctctcaaaggtagggcgggcatttaggagaggggaatgatggatgaaccagggcagttattacggggatggagaggatggattagagagtgaggaagcagaatctcctgggaattggtggctgaatggatgcaagagtgaagaagagggaagagtctgggctcactgtccaaatttttggcttagggagctggtgtggaggatagcagatgaaagagtagaccaggagtgagagacgctgtgaagagagaaggcccagagggaggtgcgggggaccctgtcacgtggttagtggttggccagaggcggatgccccacagtcaggcagtggcgctggcttctgcctttcaaagtcgcttctacagggtgaccgttaagcttgttctttgacaccgacattgttaagtggtttcactgaaatttgagactctctgaagaaagggaagatggcatttatgaagcaagtgttattttatctggaaatgatttctcaggggtaagcctgtcactctgcctctggtaaagtctgcttctccctccaagaagagaaggtcccactgatttgggtcatggtcagagtgggccgctactcccaccttccactgaaaactcagcttccagaaagctcctcttcactcctttgtcatctgtttcctcatctgctcttccctgagtttgtccttctctgttatatctgcatgtgtttccactgatctgcttgtgacagtcaacctgtttgctgatctggcctcggcaattttcagggcttccctgcacacctgtgacatgacggttagttccctgaccttgcatgcacctcggttttctg

SEQ ID NO: 51509 - DNA, 2512 bp, Homo sapiens
gttcagcctgatcttagagctctcttggcattgcagctgcagtcaggttttccttttaaatgactgcagccttcagatgcccacacagtgcagtccagatctcatgcctggggctgaaggtggacctggtttggcggtaaattatgatccacagctttgaaagcatataggctgtatgcttttttttcttttttttttaaagacagagcctcacactgtcacccaggctggaatacagtggcgcgatcttggctcactgcaacctccatctcctggggctcaagtgatcttcccatctcagcctcctgagtagctgggattactgatgcgtaccaccatacacccagctaatttttgtagttttagtagagatggggttttgccatgtttcccaggctggctgtacaccttttaaaaataaagcctatctgaaagcaagttgcttctctagaggcatcttcctcagtctgcttttgtccagccttcccgtggaaagcagccttcttcttgatctggggctgcagtaaatcacatgctggccatcgcgggaacacatcccatcccttcccaaaaccacctgcaggactgaccctaccccccaataacacaccaacctgctgtgttttttactgaccattcctgtccgggatagtcactgtagcagtctactttggtgggcttttacctctcctatctgctttttttttaatttacaaattttaaattaaaaaaatttaaatgaaaggtttggacattgagtattgttacccactcacttctggtgactcttcagacactcactcgaagagccttccttcttccctacatacagagtcggggggagagatggggaaaatgacggaggaaaacatgctaaaaatgattttcaatgtaaaataagggagggaaaaacgaatgtttgaggaaacccaaaaaaagcacctctcattacagtaattaaaccgcagcgtttaacctatcagaatgtgctgcatatgtgagagacaagccagggagctctgtgtttgaaattagagctctaatcctcagggaagagaatagttaaataatttgtttttgaggtgtgagagcagagccggcaaggtgtgagtgtgtgtgtgtgtgtgtgtgtgtgcatgcacccgtgagggtgaggggccgcagtgcctgtgtttaccaagaatatcctggaggtagatatttatcagcacctgtgtgctgtcaagaagcacacaagctgctgttgcccgttcattaggttttcagaagagtccgggcctcacctgtggccgggcgttgcatcataacagcagaacttgcttcattctggccctctgggacacacaggaatagatttgagagacaggatgagacatacagagaaagacacaagcattaggggaggaagaaagccgaatgatcctggagcatgtccttggcgcaggcactgctggacaaagcagtccatctcggtgggctggcactgcggagccagcgtggacattccaccgagcacgaggcgaaaggggcagcccagaggcctgccactgaaaccgccttctgcaggcaccgtctgccagtgctcagcgctgttagcagggctcctcctctgctgggatgaggggttgggatgacaggggttcacagtgtcctgcctgccccttcagcagcataacctttgtctttctggactcctggctggagctggtgatactgtgaacatgctgcctctctggaagctgctccatgtctccctatatccccagagcatggcagctgtgatcagaattccacagggtggggctgatgaggatccatgcacatccgtccctgtacccctcattagggacttgggttggggggtgcctatctgcacgtgttctttttcctctcacgcactttgtcggtctctgtgcagggtttctattatactaataaggagcactggggacgctggcgacagtgtgataatcgtccccttggagggccagaggcagtcggtgtgcgctgacctcatcctgggggagtgctgatgaaactctggcttggccttactgcctgagcactgcgcctgatgtggagggttagggggcagggttgccgggctgtttcttctacggcttcattgttaccagccatgcttgtctttggggcatttcatcaaaacttctttagttttgcttaagaactttaaagagctgatgagcctaatggaaacttttcagtaataactcagtacaggaacacacttcacaaataccagctaattaatcctcagagcaccctggggacaggggagagtatggtaatggcactggtgatttttatccccattttatagactgagagactgaggcacctggaagaatctgtgacttgggccagagggagggcacaaatctggaagctgaggttagagtgctttgccttttggcctctcttgggactgttgagtcttaccttaaagtcatttgagtaagtcattaagtaaagccagtcaccttagattttg

SEQ ID NO: 51510 - DNA, 1065 bp, Homo sapiens
tcaattttagtaactgccttgtgttctgctgaaaatatatgccataatttattgtaacccagtccccttgattatcttcattttacacaattatagcaactcttctttaagtatccttgggaaataggtattacttttgtgattacctttgtggggtaaaaacctcagagttaggctgggtgcaatggctcacgcctgtaatcccagcactttgggaggccgaggtgggcggatcacttgaggtcaggagtttgagaccagcctggccaacatggtgaaacctcgtctctactaaaaatacaaaaaatagccagctgtggtggcgggcgcctgtaatcccagctgctcgggaggctgaggcagaagaattgcttgaaccctggaggtggagtttgcagtgacctgagatcgtgccactgcacttcaggctgggcaacagagtgagactctgtctcaaaaacaaaaagcaaaaaacctcagagctgctaatcctaggttaaagaaaatggacttgttttcattttaatgtacattgctaacctgtgctttaaaaaggtgatttcagcttacagcctcaacaccagttggccagtgccccgagcacaagtctcaaacttccacattgtcaagttcacagtttcttcctttgtctaagcatggaaaacccttcccccactgcaagggcatagaactatttgcctacctttttttttttttttaatgattttagttttcttttatggaatttgtgttgttgctagttgcgtaacagggaatataactttattttttcctgttgaccaactggatagtctcagcaccatttatagaacgatttatttctttccccactgatttgacatgtcatctttttcatctgctaaattcttaaatatactgatgtgtgatcagggacattctattctcattcattgctgtacttgtctgttgttgtgctaatgctgcaatgtttttattattatagatttgttacacactgtatttgttagtattcgttgtactcttttgtacaaaaatataaaaattttgtatttttaatagaga

SEQ ID NO: 51511 - DNA, 1279 bp, Homo sapiens
agacaggtagatcatttgaggttaggagttcaagaccagcctgactaacatagtgaaaccccatctctctactaaaaatacaaaaattagctgggcatggtggtacacacctgtaatcccagctactcaggagcctgaggcaggagaatcacttgagcctgggaggcagagattgtggtgagctgagattgcaccactgcactccagtctgggcgacagaatgagaccctgtctcaaaaaaaaaaaaaaaaaaaagaaagaaagaaattactttggaaagaattggtgtctttgcagtatgcactctttccatccacggatgtggggtatctttcaagtaaaatatgtaatgcccctcactgatggttttgtacagttcttgcatagttcctgcacatttcctttaattctgagtacctgtatttttaatttattcttcttgctttaggatatttatttccattatattttctaattgatctttgccaatagttaggaaagctgttgatttctgtgtttttagaattattttattatttttaatagtcctaattgtttttgttggttctcttaggttttctcagtagcatatcacatgaaaataacattttccttttccaatgtcgtatgactttattattattattttgactggcccttctagaacagctttaattaaatatgagtgcacaaggaggtacattgggaggtacaatcacccccttttctttaaagcattaatttagagatgaagagcataggaatataagagacatagccatgatgattcctagacttttcaaagtccttgctttgcaggactttttcatctattttatttttagtttttcacctatttggtccagtatttattctttggccaaaaatggcttgacatgctgaaaaccaccttattttagagaagaaaatacacattatttctattttgtcaagcggaaaagctgaaaggcattggaaataactcccagtcccttggcaaacagatcagtgagtagacccctgtgtgagacaaagccactgcctggagaggatggtgcgggggctggcggtccattgccacggctgctgcagctctcaacaccacggcagcctccccccaccaccacccaacggtgtacagcctgagtggaaagggcaagtttttggccgaaagagtaaatgaaacatggacgctgtaggacatcatcagaagtgattatttattctacagaactagagacttctcttctctcagaggacaactgacagcagcttctgt

SEQ ID NO: 51512 - DNA, 1037 bp, Homo sapiens
tccttttccttggtggggtgaaccctaatttttgtttactgctgttgaacttttacaagctatttcatctcagttagacgcagaaagcctctcaatgctgttttgatttgaatttctcttttgaacttaagagccatttttatttccatatctacaaattgactattcatgtattttaccctttcttaggattaggagattaatgttttaaaatggatttataattttatattctcaactttggatcttaagctctagccttactcaatttaaaaattgtaactgagtgcaatggcttgagcctgtaatcccagctacttgggaggctgaggcaggaggattgcttgaggctaggagtttgagaccagcctgggcgacctcattgctacaaaaaaacacaaaaattagatgggtgtggtagcacatgcctgtagtcccagctacttgggaggctgaggtgggaagatctcttaagcccaggagttctgctttgtgaactccatttgtttatttatttacatgtctgtctatttacttacatctctctagtccatctgaagatggacaaaagctctgcctcagcatcttatagggtatttgctcacctttctgcagttcccttctcactgagatcttggactctcaagtcttggttgccttggcagctccccagtactttcaatcagtttgtttttcagttgttctcagcagtattgttgaacttttacaagctatttcatcttggttagatgcagaaagcctctcagtgctgttttgagttgaatttctcttttgaacttaagagccatttttatttccgtatctacaaattgactattcaggtattttaccctttcttgggattaggagattaatgttttaaaattgatttataattttatatactaaggaaaatagccccatgtctgggatttgtgttacaaatatatgctattagtttgaaatttgtcttgactttgtttatgatgcttttgtccaggcagaatttttttatttatctatcatttcttttatga

SEQ ID NO: 51513 - DNA, 1120 bp, Homo sapiens
ttttacatactgattttgaatgttgacacctagctagatacttatattgtttatggtacgttaattcatgtcagtttttccaggtgctatatgtaaataacactctcccctcttcttttccgttgcttatatctattactacttttcttgtccagttgcatcagcaaatacctccagaacagtgataaataaaactgatgattgtgaacgtatgatgtgtttctgattttaaataatatgcttttatatctttttaataaaagatgatgtcagctttggagagtgacacacatatacacaagtagatactcttcccccccccccccccactcccactaacagataatcatattcaggaagtattcttgtattcttattgtattagagtttttactaagaatggatatcgaattatatctaatgtcctttatcacttacagaaataatcatataattattgtcttttgatctaatatgataaagtatattaatagataacagtgaatcattattatattattaatatgaattccagccagttgtagtgtagtattttttaaatgtgctagattctttgtgccattattttatccagcagttagcagaatagccgtaagtatgtgttcaagccctcagagatgatgaatttgttcatgcctttgtgttcatgccctcagacatcatgaatttgaggatatttggaaaaattaaggtagagtgttttttgttttgttttgttttgtttttgagacagagtctcactctgttgccctggctggagtgcagtggcgtgatctcggctcactgcaacctccgcctcctgggttcaagtgattctcatacctcagcctcccaagtagctgggattacagatgcacgtcaccacaccttgctaatttttgtattttttgtagagatggggtttcaccacattggccaggctggtctcgaactcctgacctcaagtgatctgcccaccttggcctcccaaagtgctgggatttacaggcatgagccactgtgcctggctttgaagtagagattgatggagatctagtttattttcgtagtattggatgcattaaatataaacagtgctaatattataaatatcaaattc

SEQ ID NO: 51514 - DNA, 1004 bp, Homo sapiens
ctgctgtggtcgcagccacagtgggttaagcaagaagttagaaattgtgggtgtctttctgttataatcctagctcctagacttggcttgtatcttcttctgtcttggtttttctcttccagaaaacggggtgaaccattgtgatcttgttaaggatcaagtctggttggtttgttttccccaaatattttctttgttcttaaatttatttatttgaatcagaaatctattcacagggaacaaaattcataaggctaggcagtgaaaagtgttcctcaatctctgttccccagcaactagtcctctctataaccagtgttaccagtttcctgtcctccttttctttcaggtatacacactgtgtgtgtgtgtgtgtgtgtgtgtgtgtgtgtgtgtgtgtggacttctctgtacccttcacctagttttcccccatgctcctgatgttctctttggctttcttctttcgggggtgttaattctgagagtttgcttatttaaaatatgcagactctgtcaagtggcagagggcagtaggtatgtcaggctgcccatgctccccgccccctgcccctgcctagcacagagagccccgtgtgggaatccaattctggggctcacatgggctgtgggcaagtccatgcccctctctctgtccctttttcttgatctataaaacagaaggaaaaaagaaaaagaacaggagagaggtcagataaactccaatttttcttgcagttctgaatttctttgtttggttgtcaaaggcaagttgattcctttttttaaaccacccttcatgacctcttctgaaaacaggagcaagatttaagtatcactaaaagtgtttatcaatttgacttttccatgcatgcacaaacacacgtttggcttacttggcatttaagtagcagagattcctgattacccttcccttggtctttagggacacagtttcttccctaggacttactcagtatactgtgggaagggctgacttttct

SEQ ID NO: 51515 - DNA, 1869 bp, Homo sapiens
agtttcctcagtctttcagctagcagtgaaatacattttgcactggcttttttactcagtgatttacactgggagacgtggctgggtgatgtccagtgtccttttgtctttgtgtttatttttcttccacatttaatgtatttaaaggatatattgtctttatggttcactgggataaggagggattggtgcaagttttaatgagaggtgccccagctctctgtgttgagctgagaattatcttcttggttagatatctttctttctttccttaggtggcaggaggcagtgttttgctgctttttgaaataatgtttctgcctaacgatttctagaaggataccgagaggacattcagcttcagggcatcatcagcaactttttctcctgttgtttgaacttccctcatttaaggagaggggaaagtctcaggtcttgttcttgaatttacatatcaatattaagatgatgggaaacagccccctgccactccccatcatctgatcaattcttataaaaactcttgcattcagggtagtgacatgtggaactagttttctcagaaactgttttcactgcttgggaatagttaatcagtggaggaaaaagtgtttgacttatctgcttaatattttaaccaagtgaattagacaggttggggggctgggggaggggataagaaagtgggtgggggaggccccataaacaaggtgatatataatattttttttgttctccttttaaataaataccgatcagctttatgttcagagacaatagaagccgttggcttaaatttgcagtttactgtatttatggctgtaatatcaaggtgctgccgtcgtaatttcatgccccaatgagaagagcaaggtcgaagcaaatgcttccatcggcatctgctaacacactaactcataaacaaggcccggctggatcaggtggcacggaataatacaggctaatgaaatacagcacagctttccattactgttagtttttacagtgtcgtcattacgtgtaatttatgtttaaaaaattcaattttatacaaggcactgggaaataggggtctccaggtcatcctacgacttttagaggctctgagagtccttattgtactctactgttccaacaaaatgttcataaaataaaataaaaatacttttccccttcccctccctgaaccttttctgagagagttgatttttttcttttaatttgggaagtatttttagccagctgtcttctctgcctcatctcctcccagagtgtgccggggcagataacttagttgttctgagagaggtgaccccctctcagtgtccatgagtcccagatgaattggccaagtcctagaaatagaggggctgcagagcggggaggaagaggtcccaatgaccagcccttgactgccaccgtttgtcactggccccctggccctgttcccgtgatcccagtcagatgccacatttttataataaaactagggctgagcaggaaggcgctggcaggagttcattaccttgcttattttcaaactcttcctaacccttctgtcctggttgttgtttgacctgaaagatgaagagaacactgctgtcttctgtcatctgtctttctgcttcacctgcacagggccaagccccgtggcagtgcccagcggtcactggggacagtgctgaggttacttatcctgagaaacccttgcacggcctgtcccgcagagaaaagacagcccttccgggtccctggtttggtctgagtcgtgggaaaggaccctagggcatcacaatcgcagcctgtaccctgcagctcacagagtcaatcagtttggttttatttgcatttgaacagaaaccttgagaa

SEQ ID NO: 51516 - DNA, 1043 bp, Homo sapiens
caccactctctacaagtaggatgtggggcatcgtttctaccctccttgggcctcaggtttcttatctgttaaatgagggcagtgactgggataatggcccggctctgaatgtgattcagtgagattgttaaaacgcttacttttaaaaagaagagaaaggattcatttactgtaactaaatcaaaatcctgcctctcccagagaaccagggatatcagaatttcagccaatataaattttgagcctcaaatgataacgtctgtgaaaaacaagagcttggaaggaagtactgatgccctttcaactgtggcctcactagtgggctcggctgcgataatgcaaggaacatgttttattaggaaaataggcttcataaaagctcagggccagagggcagaactgcgggcagggcgtcctgtccctttaaccagctccggccctcagggccacagcacagtctgtaacttactgtatatttccccagtgttaaacattattgtacttgtttatatttgaaagagccaaaagggaaaatgagaatgcaactgaatgctccttttgggaaaattatcttcatttgcagccagcggctgacaaggcacacgaaccaccaggtttataaaattccgtagtgtaccagtgaccatcagcctgtgctgacatcgcagatgctgctttcttctctaatggctgattatgaactggttaaaacaatgtctttcccaccagggctccgaaaggggttccccttcctgtttagtcggagcgatcggcagtcactacacaggctggaacctgagaggcacaaactcagggcgggggtattctctgttgttgcctggcttgcctgttggtcctgtccctgttcttcttggaaggtgaaattatgggtaaagcagtccctttgcagcaagcaccccctctctagctccactctactgaccttcagcttttgtctttggaaggtggtacgtgatgcgctgtgaaccctggaagcattttcatccagcccaccaatctgttgagagcatggtgctatcagg

SEQ ID NO: 51517 - DNA, 2010 bp, Homo sapiens
gagggtaaagaggggaacagctgcagttttaaatggggatagtcctcaactcctcagcacagagaagggaaaaaagagtccagggctgtttagaaaagttcgggcattttcctttgactagctgtggtagggcatgaaaagtttgaggggtggctgcagtcaactcatatgccagtatggtgcagggcggagctgtgctttaaagcattaatgtgcaccatctattagcccctaggcatggagtatgaggcaccatccttttgaagatgctgatcctcagaacctccttgtacttcatctacccccaggggcaaatataccatgctgtgggcctctaatggagagctgccgaccagatgtggaaaagctctcggctgtagtttaaaagctctgtgttgcggctcgcttggatgttgggattcctggaacagcaagggctggccgagtggtcttttgcagactaacagtgacctcccacctgcttttcccactctcagcagctggagtgcctttgtacacacagctacttcctgagctggccccgtgtgaccgctcctttcatacttgagcgccacatttcattctgttctttgggttggatggggctctcttcctcctcccaagagtcagtgtcccaaattggctcagacccggtggaaatatcccagctgtgtccccactggaaatgcggccttcatgggttttcatttgccttttattcttctgtgggcaaatcctctccacatggcatagccactgcagatggcgccctgccacttcctgatgtcccatgtatggtgtggtttagagtgtcgggaggatttcaagaagggaaaagaaaaactagccaaaggcgatacaggcagcgtgtgataggctagaataataatcatctgaaagtttgggcctggccttgttttgatctgttttcttgttttattttcttctttacattctatatcccattcatactaatcacagtcagtcctgatttttctttttatttctgcatttgtcataaaataaagcaaattattcccgtcttcagaaacgatctagactaattagtcgtctcacccaataattagttttttgtttccctgtctgttttcgtgcattattgttagttttttcccctcttttttttttaacaccattacagattaaaatgagccacatttgcagttgatggtatctgttttcgggggaagaatggagaattgcagtaccgagcgacttcaaaagcagcaataaactcaaggataaattaaggaaattgaatgagccacatttggaagcagtgttgaggctaatattctgtcgcttaaggttaaattgcaactgagagaggttccggagaatctgaaatcggggaggcaacttactaggatgcgaggcattctgtggctgtaaaggtctttgctcagtgaagattctgttgcagctatggacactgacaaaaggtactcacctgcaatgatgtcctcttctccccagggctgacagatgaagagattgatatggccttccagcagtcgggcactgctgccgatgagccttcgtccttgggcccagccacacaggtggttcctgtccagccccctcacctcatatctcagccatacagtaagtcacccgctcaaactcctgcttaaccttgattgggattcaggactctggccaaagggcagtgttctgtatctcccagacttagcaaaccaggagaaactgggagcagcagaaagctcttgggtttttcccaaggaatgtgacacaccccagtcttctagacaaactttttaaagtatgtgacaaaggtttaagaagagacaagggatcagaataaatgattttattgttgtttcaggtattttggttacatgcagaaaacctgtacaactatttattgattctgttcccatctcctcataccagtgcttttgaatgttactgtttcactaaaaacagcgtgaccatctgactcatgggtgcattcttgtttgctcactg

SEQ ID NO: 51518 - DNA, 1049 bp, Homo sapiens
tttattattattgaattgtcagagctctttatgtattctagttacaagtgctttgtcagatatatgcttggcagatattttctcccagcctatggcttgtctcttcattttcttgacagtgccttttgaaaagcaaaagctttaaattttgatggtgtccatttgatcagttttttcctttttggttcatgcttcttatatcttaagatgtttttgtttaccccaaggttgcaaagattttcttctatgttttctgatttcttatagaagttttatagtttttgctttcttgtttaggtgtgacccattttgagttaatttttgtgtatggtataaggtgagagtcaaggttcatttttttttcctatggatatccagttgttcagcatggctgttgcaaaaattatcctttccccatagagctaccttggcctctatcaaaaatcagttgaccatgtaagcatgggtctatttctggactcttctgaattcttaacagcttaattagagctcatattttttaatctatggacaggggatatagatatgcctctcggtgtccttcctgcctaaagatgacactgctaatggcattgtagcccatgaaaagtggaaaagattgtctttcatgggatgtacgtgtaaatacaggctttgcattttccaacaggactactgttgggctactgtggtgccttttgccatccaggctgccaagtccttctgttcagagcagagacgatctgtttctgttgctgctctctgggcctgtctttctgcccactgccagccatccacagccatgtgcttcagggcccaccccgcccccaagctatagccagcccttctcagcccagccaggtccccgtctctctgcacttgtgctctccacctctgtgctgtagcaagcactgatttggtgggctggctttattccaggaccttactgggagtgagcctgtcttgtcatttaattttcagggtggcttctgagcgaagctgatgggctgatgtgagaagctagagacactgctgtatagagacatggc

SEQ ID NO: 51519 - DNA, 1626 bp, Homo sapiens
ggacccgcttggcatctatctcagctgtaggatctttgctcctgaaaggaggggtggaagggctccatcctgtcccttgcccagtgtccctgggggagcagctcaccatcgccgagcccttgcgggtcagggaaggcgtggcccttcgaaggggggcgtcctgaatgccgccaccaacctcctccccttcttctccctctaggaggcagttccctccatccccatcagccccgaagatcccctcctggcagatcccagtcaagtcaccgtcaccctccagccctgcggccgtgaaccaccacagcagcagcgacatctcacctgtcagcaacgagtccacgtcgtcctcgcctgggaaggagggccacagccccgagggctccacggtcacctaccacttgctgggcccccaggaggaaggcgagggggtggtggacgtcaagggccaggtgcggatggaggtgcaaggcgaggaggagaagagggaggacaaggaggacgaggaggatgaggaggatgatgatgtgagccatgtggacgaggaggactgcctgggggtgcagagggaggaccgccggggcggggatgggcagatcaacgagcaggtggagaagctgcggcggcccgagggcgccagcaacgagagtgagcgggactagggctgcgcctgctgcctccagccctgaggatggcatctagtgtgcccgtgcgtggccataccctgcctccctctctggccctgggagggcagcttggagcccaggtagggggcagagctgtcctcagctgcactgcggcctggtggcagtgtggggagtcacacttctgtccacctggcctcctctcgcctggccgccagccccagccccagccccagccccaggcccagctgcctttggctttgatctcaagtcaggctgaaggcagcgaagcctcggggcccaagcccctccccagccccctctcccggacagacgccttgcccagggtgtgtttgctgagtgtcttgactaccgtgacaccacgcatggccagagctagcgtccctactgcctcccgactcctcagtggaggaggagctgcggtccctctggtgtctgccatccccctccctccctgggcccggccctggacccgtcaggtgcctgtccccagccccaaccccactcatgccccgtcgtcctcccagacaaatgaaaccacgctgcgcttccgatgcccccgcttgccgtgtaatggttcagctaatcccatggcgagatgggggctcactccggaggaggagccaggcagcagggccttcctgaccaacagccagctctgtccttccccccaggaaacacatgttcatttgtgtgatcatgtatagacctcagaacggaagataggactgtatataattgtaataaataccagttgccactatttaatttctgcctgtggctccctgtctgctcatggcaccctgggcccgggggttcgtctcagcgcagcctccagctggtgaagtgtgggtgagggcccatgggcagcttccgccgctgctgagccagaagcagaggccttgttcaggtccagtggctgccggagggcgacactttgctgaccgcaggaggatcagggacc

SEQ ID NO: 51520 - DNA, 1025 bp, Homo sapiens
ctggagatgatgatgccatcgaagcccgggccagggcctgacctggcaggcacacacctggccagtggctctgaggtccccggggaccgagtcccctgcgagggcaggctgcccgaggccacacctgcccaccttccctactccaggccaccagctggtgtcagattgggccaccgggagagaacaggcctaggagggaatggaaggctggcggggaggctgtcatccagaagcctcctccccagaggtctccaggaggaacctggctcaactggggggcagtggtttacttttcccttttttcttcctttcttttgtcctctcagctgcccacagccagaaagccaggaccacccgaactggacagggagcagggagggaggagtggtcgcacggagcgtacctgattcaacaggaaatcagttattttctaaaacagcccctaccagagcctcctgaactctgtgggcaccacgtgctgctgtgagcatctgcccagacagtgacccgccacaggccccgggcgtctgtggaaggagttttgtaaaggaaaaaaaaacacacacacacaaacattttttcaatgtagcaaaatcaaacttaaaaaaaaaaaagaagaaaagaagaagatgccgacagtgcggagtctagccttttgtaaacttcatattgcacactaggactataagccattgctagctcattttgaattttaacgtgtaatttttgttttattttctttctgtggggaaacaatgcttgatccaccaatgctctttttaatgttttataactatgtatgtgtatatatataaatatcaaataatatgtatgcacatatgtgtgtgtatatatctatatgtatatacatatatagatatatagagatatatagagaggttttgagacaaaaaaaatacagaacgtgaaacccgagctgaacagcgtgtgctctgattacttgaatctggtctcctcggcacctggttattaagaactgaatatttttccacttgaatttagtg

SEQ ID NO: 51521 - DNA, 1047 bp, Homo sapiens
ctcctgcttgctaagggcctgtggcagcagcgcttcctggtggggccgagcacccatctgcagtctgtcagccacatccacggtggcgcccatgccacgccagccagggcctcacggcaccccgccagggctggcagcaccatccttattttccgatccaagaagttattacagccatccttatctataatcctgaggtgtggccatggaaactacttgtcccagcatgcaatgctctgggcaccctgcatattgcaatccctgtgcaccatgcagagctcctaaaaggaggcaggaatgcatgctgggatctgtagtctccagctgagtcatcctgttgagcaggacagcagcccaggccatccctcttggtggtaccgctggtcgtgggggagtgaactccaacacaagtgaagtcaggacaccagcagggagggcttgagaatggcaatgaccttctgggctgtggtttccttccagcgatccttgcctcgccacggactgcaagtacgccaacaagttccacttccactgtctctttgggaactgcaagtacgtctgcaaaacgtctggcaaggccgaatcccactgcctggaccacatcaaccccaacaacaacctggtgaacgtgcgagaccagtttgcatactactctctgcagtgtctctgtcccaaccaggtcagcatggcggtacacggcgcaggggcagagtagggggcagggaggtgcagggctagctcagggcacaggacagtcacctcctggcagaggctccatttctcacaccttgcttatttaaatgggcctcccggactctggaaagagcaccatctgcccctaggcccctggagacccctgggcaggggtccagattggtgctagttggtgaggtctaacccccgagtggtgactcaatgctgggcagccaccgtgcccttgacatcattcttgcctatcctggaactagctttatgccccctttttccaaagccctagaattttcgaacaggcccattgtccgtgcccacacaggaaagtcagatcag

SEQ ID NO: 51522 - DNA, 1071 bp, Homo sapiens
cttgagtgatggatcccgcggcacgggctcatgtggaggagccctgaggaggcctcgcagctcctggggtcggggcagcacagcaggctctctgttcagagagggcccagccacagccagagccaagtaggcgggccgcattctctgctggctctgagggctgggtgggtcccagcagcccagagcttcggctgttgctccccaggctgccgtgtctgtgttctaagctaccccagccccatgctcggcctctgtccctcacagatgtctcagggcaaccctggcctgggcagcctgctgaacatcaaggcggaagcggaggggagccccgctgcggagccctcgcccttcctaggcaaggccgtgaaggcgctggttcaggagaagttggcagagccctggaaggtgtacctgcgcaggtgaggggctgctggccgcgtccacccatcgtccccccgcacccgccctggagccccaggctctcctctaacgccagctcctctggctaggtttggtacaaaggacttctgtgacggccagtgtgacttcctccacaaggcccacttccactgcgtggtggaggaatgcggcgcgctcttcagcaccttggacggggccatcaagcacgcaaagtgagtagggtgctgggggccatttccacagagccccacggatcccagcctggctctggggtgggtggggctcaggctggtacagcagttcccgctgggccacagaagctgagccggcttctcggagatgctgccccagcaagggtgggcttcccatcctccttcacacatgcagccctcagccgggggctctgagcccctgtccaggcccttcctgggaccctgagcaacagctgctgctgcacccacgtccccagggcagccatcagtcccagcacgtgctccctgcagagcaggccagaggggcacagagcccagctggagagactcggctgtgacctggagcaggaaccctagctgaaggcctttccaagccacaatattacatctctaggttacctttgacctaaacataatgaaatgaatttgtaaatcccat

SEQ ID NO: 51523 - DNA, 1039 bp, Homo sapiens
agggcagtgggctgggtgggccccggctactggtcagcgcttctcccgctgacgtgatcgctcgcgacgctcgctcctgtgtggcaattcttcaagtgataattattgcaaaattatgtcaaagttgtcctggctcagggcctcctggaggagaagggcgggaggctggggagggggctggggtgggggcgggggcccttcattttctccaccaactgtcacagtcgatttgtggggctgccgcttaggcttttattaaagactctgttaatgctgagggaaagtggcagatctggactgggagggcccctctgtggtccccagcccgcggttgctggggtgacggcccccgcacggagcatgcccaggaagggcctctgctgtgtcagggcgatggggccgatggccaatcagagcggccacaccgggtgacctcgcagtcaagctatccggggcagggacacgaggccaggctgggccgagctgggtccggaagggagctgggcgggtgaggccgcaggaggccagcagagcaggggtaaaagaagttgctgacagggccatccagcgagctttcccctacaatcccccagtgacggaaatatgaatttgccccaaggtgctgtagctgacagagtgctgcttcagaaacagcaagtggcattttattaaaaaataaaacggccccctcccctgtgcttgatctttcttttgggagaaggagacttttctaatgaaaacaaagtacttgacagtctggccaccgagcccacgtggccctggagtgggccctgccccatccatcaggcacctggctggaagggcgtggccagcgaggccccacccatgcctggaccaggaggcggtccctccacgcggccaccgggcatgagcgtcctattgggcctgtgagagttttcagaccttgggacttcacattccagcagctctccaaagtcacctgcccaaggtcccaggaaaacggcccagctcccctgccaagcactggcagcctctgcaaggtgtgggcagagcccca

SEQ ID NO: 51524 - DNA, 1048 bp, Homo sapiens
gggtgctgaatgcaggcctgtggttggctgagaaggcgccaccctggctggggatgctgggtccatgctggtggccctggctcctgggctcagagcctgggccctgggggaggcaggaagcaaaggtagtgaccggggttaggtgcatacacccttacagcctgaacccatgggcaggggaacggcctgggtagtcaagtagtggatggtgtggggctgagcgagacccttccccagagctcctcctgaaccctgggggggctcccggaccccagggggctgcatgccttggagcagatcagggcggcccctgctgcctggggaaggatacacttcccctgcccagctgcctgcccccacctcgaatccctccctgttgggaggcctggtgcccctcagccagcggcctcctgatgctccctgaatgctgggtgccgagcccgggcttctgtggcttgccagcccgtgcccaagggggctgcagccccacctgcacgagatggcactgccctcccagagttgggctcgttgaacctctggccagcttctgccagggatgtcctcagtcccaccgtgggtgcctcggacactgcagagcagagcagaggggctggggcctcagggcaggggctgcccaccagatgcccctgtaacacgaggctgccccatctgctcaccggctgtgccctgtgtgtctcttgccaggaacggactgcccacagataaaccagccgtcactgaagatgtaaacatttaccagaaatatattgccaggtaggcccctggggaggagcctgccgtggagagaaggtggggggccaggactgaccgggcactctgaggccattcgtttgatatctgacctctagggccaaggtagctgcctcctcccatccccatccacttcggtccctccaccgcaccgagggctgccctgcacgcccgtttgggagcctccctccgctctgtgtagtccaggccacacattccctcagcagcctgtgcccccagttagggccggggtcccgacgcagggcctggccacagg

SEQ ID NO: 51525 - DNA, 1035 bp, Homo sapiens
aggaacgtgtggtaaggcaggacgctcccaagcggaacaagctgccaggaatgccacgctgtcccttgacagcctgaccgcatagccggctccttaacctccctgggcctcagtttccttgtgtgtcaaagggcacaccccctcccagggcccagcaagcctaggaaatgcctccaggacctgggcgccccttgtagttgaagaggcattcattcattcatttgttcatttacagactagttcttgaactacctactctgtgccaggcaccctgccaggctcagaaagtagagtgattctcaagcatggccacggagctcatagactagtgggggagatagacacatgccaggcagtctcagggcagtttgatggcactgtggtcaatgggggaggcctgcagcttgggggatgcagggctgttcgggagggtgggttgttcttggccttgcacgcctctgacctccgtgctctcctccatccctgcagctgagggcacccggtgcacggacccgcctgcaggcaagcccgccatggcgcccaaacgcaagggtggcctgaagctgaacgccatctgcgccaagctgagccgccaggtggtggtggagaagcgagctgacgccggctcccacacggagggcagcccatcgcagccccgggaccaagagcgcagtggccctgagtctggggcagcccgggccccccgcagcgaggaagacaagagacgggcagtgatcgagaagtgggtgaacggggagtacagcgaggagccggcacccacacccgtgttggggcggattgcccgcgagggcctggagctgcctcccgagggtgtctacatggtgcagccccaggggtgcagcgatgaggaagaccacgcggaggagccctccaaggacggcggtgccctggaggagaaggattcggacggggcagcctccaaggaggacagcggccccagcaccaggcaggcttcaggtgggtgcctggccttcgaagggaggctgaaggccaggacagggaggccagtgggga

SEQ ID NO: 51526 - DNA, 1021 bp, Homo sapiens
ctgacacccaagagtgtgggcccccaggagcagatgcgagttagactccaggccgagttcccagctcttagactgtgtggtcagcatcgtggtgtctcgcgataggatgaccaaccaccccagtttgcccagaactgcaaagacccatgtgtgtgaaccccctcagtcctgggcaaactgggaggcttagtcagccctgtttggaggcaggaggatgggctacttgacatggtcccaccctcagggtcctggagagcccaggcacctcctgaatggaccatgtctctgttcaggaggaggacttgcagctggctccacttaaacccccttgcgctaccaaaacttgcttccaggccgctgcgttccactaggcgcgtgtgctggggcaggcatgctcgtgtcccccgctccccgccccctccaaggcatggcagagcactgcttggaagcttgacccggcctagaaaagggcttgcagctgtgatcccacccctttaacactgagccttctccccccaaacatatcacagtccagacggggcttctggagaggatgcggacaagggaacccccacccccaagcccctcactcccccaccaccgtaagtttatcagcgccttccttccgagagagccacacctaacatatcatctctcctcatcagttcccttggaggaagacaaggagctgtcccatttcctaagtggggaagctggaggcccggagatactgctgggtttgttcccaaatgctaaatgtcagaggacttggtgcggggcgcccctgagcactgttccaaatggcagcactgagtgaggacacacaggcctccagccctaggtatctaccgtgctgcctggcccacgtccccaaacatctctggccccgatgtgtaccccacctgtagtctgcaaacacatccctgggctgcagggatgcaagataaaatgtagttgttgatgcagatgcattttgagcttctgggggaaagcctccttttctagaggcatcccggagtgc

SEQ ID NO: 51527 - DNA, 1113 bp, Homo sapiens
tccggccgggccagtttggatatttattaagaaaaagccaaagataattaacttttttgtttttgttttgtttgcgggtgcctcccctgctggcactcctggctgcctggcaaattaaacctgctcccggctccctgggtgctgggctgccagcaagacttctgccgactgtcctggatctgccagggctgccagctgcccacccaacaacctaccttggctttcagaccttgggtcactttatgcccccaccgatgccacatccccaggctctactgactctgagagcaccttttagagcagggtaagtgggatgtgggggttgggggaagaggaggggctactgtttggggttgtggccagcacttccctaaaaggaaatggggggaaagtgtgatcctctcccagggcacaagggcgttcctcctggccagttcagggccgttgacttcccaggagaggggaaggagaacggaggatgagctggaagtgcagggagaggccagatttgggccatgtcgatccccagctcttctccccgaaggctggtaccctgccaggcctcatgggcccctgagaacgccctggagcaagcagcctctgggccatggagccatgtgtgatacctgtccacccccaaccccaggctccatcttgctcccacccccaacccaggccaggccatgggtgggggagcggtgggggagctgagtggctggagagccagtgcttgggtaagagctggctgcctccggtccggtccgctgtgctggagccacacagagccctgaggccaagctgtgacctaagcctgagcccaattcatgggccaagaaggtgacactgggagttagaggcttcctggtatgagacagagctgaggacttctcaggagccaggagagcccacgagaggaaggccagtttggaggagctcgctggggttggaggtgcggcttgcccctctgttaagccagtccccctcagccctcccctgccagggaccctccttggccccttggcttcatccccagctggacaagtaggcagtgatggtgggcctcttccaggtggggagcctgcttcggagccggccacagagaagagggcattt

SEQ ID NO: 51528 - DNA, 1027 bp, Homo sapiens
gctaatccttattgagcactgactgtgtgcgggctgagtgctgtgtgacaacaactctattcaggaagtgctaatatgatcccccgtctttcccccactttttaataaccgctttattgagatatcattcatataccataaaattcacctttttaaaatgtacaattcagtggtttttaggatattcacaaggttgtaccatcatcaccactatctaattttagaacattttcattcccccaggaagaaaccctgtactcattagcagtccctctctgtcccccactatcagcagacctagggttccactaacgatgatttcctgaagatgctgggaaggtagagggtcagtgcctgggttcagggagcagagcctgtagaagatggagctgcggtgtgaacccaggtactgagactccagagctggtgctccatgagggattgcttgatgtcctggctaacccccaccccacccctgacacacatgtgcctatcatgtgtgtctgacagttcaggctcaggcgtgtacatacaccatccaaacacctagactcaggcagcagcacacgtgtcttctccccaagtacgctggcagctccacatagaaaacctcacacctcccataaggacagcgggcctcccctcctgggacccctcccttggcttctccccagccctgctcctagaagggaggcttggagcaggaaccagcagcaacagggtaactgaagtagccagagaaacctaagtggtttcagagcttaaaatgagaaatcccatatcttctgcagctgatcattgtaactgagacaaaatgccaacccaacattccagaacaggtccccgcccgggctggggccacaggctgggccaggcccacagggcaacccaactagcccaggtccctgcttcatactctgtgtgtgtgtgtgtgtgtgtgtgtgtgtgtgtgtgtctctatctctctttctctctctgtctctctttctctctctctctgtctctctctctctttctctgtctctgt

SEQ ID NO: 51529 - DNA, 1045 bp, Homo sapiens
aggatctgagtgccgtggaaggctcctcaggatgccccaagctgggaccagttcctggatattggcttcccacgccgtgccttgttctctgtcccttcctttgctctaccctctgatcacgagaaccttgcttcctctagaaacctccgcccatgaggtcctgacagggtagataactccgtccccaggcagcagggtgaagccagccattccgtgtcctgaaattcagccccaagtgcttccattctctggagcagggcttggcagagccctttgacccacagtctgcttttataaataaagttttattggaacacagccatgcctatttattcaggtattagctatggctgctttcactctatacttgcagagagagttgaatggctacaacggagactgtttggctcacaaagcctaaaaggttaatgattttctctctggccctttagggaaaaagttttccggcccccgctcgagaggttttagctcctgcactttagggggcctcggagtctgaccctatggagaagggtgggctcctgattccagggagcaccttgaaaaaaaaagccccacaggtcgtggactggcagccctgggtcttctatttctgtgtcagggccctgggaagcagcataacctctgagcgccagtttctctatttgtaaactgctgtctgcttcccaggcttgtggcaaggaggagctggggtgcctgggagaagctgtgaaggttgagttatcgggagctgctgaggggcaagcaggctgagggggtagtccaggtctgagactgggcctataggtggtgggtgggaaccaggctgcagtctggctgagaaggccctggaggttacacagtgggtgctggctctgtctaggaccagggaccaaggccgccctggcccggttctactgctgtgggccaaggtgggaatcaggctccaagcccgagaggaaaggctggaagggagtgggcaaggagacgggagctgcggccgcggccagaggtctgctgcagagtctgctgggcctcctctcgt

SEQ ID NO: 51530 - DNA, 1017 bp, Homo sapiens
gtccttcaggacagaaccgtaaaagcttcccaactttcagagggtgggcactggggcactgttgggctgtgctgaatcccctgggcccgggggttcaaggagctggggtgtttgtgagcttctgggaggctgggttgtttttttttttcttttctggacttaaaaggccttgtgcaaacctggtacccagaatagcacacatggagagttgtgaatgaagagctggatggccgatgacctggagtgggggctggggctgggctcaaacagcaggtgccttatggctctgcagcccctgcctgcaagacgccctggtctcccagcttcccacaggcctgggacggtcgcgggcctctccctacccctggccacctctcccttttccctcttccttctccaggctgtttccatgccaccctccctggtgggctgggcttgacattggcgcccatggctccccctctgccttcgtttcagtcctcctcactcacaggctgtgttctcttccagagtgggtaaagtgaaaaccttgccagtcacctctcccggtctccctcccctccgtcctggctttcgtgatagagaaactggccaggaagccccacatggtgctatttacctgacacctcagtgggtttggcaggtgctgattcattccctgaaccatttcccccaggacacggagcaggccagggaagaccccctgggcctctgaacacccccatgctagcctctccctggcctctcttcagggcctgggtgattgctgcagcaaggaccccccagggaccagagcggccttggctgggcctcatcttcatgtctcctttcctgggtgccctgggcagctcctgcaggaaaggaatgctaacgatctgctggtgtagtgagctggcaccgcacccaggcaggggccgcacagcgccagggcctagtaaagacgctggcgagggctccattccccgtgcccggtgtttcctctggccggattggcatgcagccttcagcttggcctga

SEQ ID NO: 51531 - DNA, 1046 bp, Homo sapiens
tctcatggggtggccggggagagggagaggagccacctgggcccggctgccccgcagtgccagcctgtgaatgtgtgcatgctcctggcccacagctagaagagcctggtcctcctcccccaggaagcccccctgcagccgtcttgcttcccattagcgccagcgcaggcctgtcttgggccctctggcctcccgccctgcagcggcctagtttcccattggccacctgccttcaacgccgagggcctggggggcaggagccgcaggccggccgccccctcctccccaccccttccctctcctccccactccccttcccccagctgcctcccaaccgcctcccccagcatggcagcctgtccaagacagggttttgtcccctcggtccgggcaccgtgagagtgacagaaaatagctgtccggagagtggggggggaaggcctcttgttttcacctctcaggggctggttttcccaactttcccatcccagctcctgtggaacaaagggcctgcggcccccgtgtgctgggcccggcccagcgaggggactcaccagcaactctttattgagtcttcaagcgccggccaggcactccattaaaaagccattcccctttgtgcagcccggcccccagctgtcccccctctcatgtgacggtcggtcacagttgtaaaacaacaacacacagagttggcaactaacgaggctttttttcaagccggggtctccatggcaacccccgtcaatcacccctcaggagcgctttaacctgaccaagagggggaaataaaaaataaaataataataattaaaaaaagaagccaagaaagaaagagttggaaagagagcaagaggccagtagacagctggggagagaaacaattcagaaagtttctggggtttgcgccctcgattggaacacaaatgaaaatttaaccagtgggacaggattgtcctggtgaccggaggggaaggacgttcattttcatttttagatagtttgcacattgcacctagttttacaaaagcttctgaccttttccc

SEQ ID NO: 51532 - DNA, 1056 bp, Homo sapiens
gggccagaggctcagagggtatgggggtagctggtggagtagctggagcctcctggggcaaagggtctgtgtgtgcttaccttgcgttaggggaatggcactgccaactgggtggccatcacatgccatttgtcactccatggacttctgggcgtccactcctggttagcgggggctatgaggggagaagccatggggtcatccatcttgcccacatgatctcagagctacccaaccccacatgggccctagagaaggggcagggagtgggagcctggaaaacggctcctgggagtggggaaggtgacatgtgcatcctttgctccatggcccaggagccagggcttttggcttgatgggcagactttccagtgggtcaaaggccactccagatctgagctttttcttttccctgctctctcacctccaggggtggtagaaaaagctcaccctccgctctgtccctctgccctgtggtggccccaacatgaggccagacatgggctggggtctaggacggctctaggagaaggtcccgggtccaggctggcccttggttggggtgcaaggtgctgtcttggttctgcacctgcctccagcagtaggcattgccagcctttttagcagacaaccctgatgccagacccaggcaagggggccctcatctgaagccatggggctgggaaggcagaagggatcccgcgcagactccttcctctgggagcttctcctactttcattttctttttgccactattttttcctggggtctaattaaagacttggagccgtttacagcctgtggttggctttttatttggatctttggcaattacctcctgccctaaaataagtttcgatggaacaggggtaggatttttctttttggccgagttctcagctttaattttgccgtgcatgcgtgtgtgtgcgcgcacgtgtgagtgatggagtgtaatgaggcccttccctccccgctcttccaaatcctgcctccttgtcactctcttcatctcaagtgtcctgtggccaaggcagaggcctggacagcgggaa

SEQ ID NO: 51533 - DNA, 1011 bp, Homo sapiens
gtttgagtgggtcgggctccttgcggagggaactgcttctctccgacaccgttttcaggagtgagcctgggagcaggccaggacacacactatcctttcagccctggctctgcactgaagccagctttgtgtgtttgctccctgggttctgtgctgggtctgagattgggtctaaaagttggctgagtttctcttactgtggctttgaatgtgatctgtgcgctcaagggctgagcttctgcacacctttttccacgtgccgggtcatatagagcgtcgttggtgagctgtgagggctggcagatgggtttgtctgaagcccccatatttccatggggtcagctcagcctccagccgctgctcatctgctcatcggcagggatcctaatagtgtcgccacacacaaaggtgtgaattgccccagtaccccgctcgcctgaaggccagtctcccttttcccagtgcctctgacatgaggctccactctcctgggtcctgacaccatctgtgagggccaggttggggcaggcagtcccagcatcgatgctgtgatagcagtgatccccagcgcccctggacaggccccatgccgccctgggcactgccctgtagccctggagcaagccagaggcctggttggcgagcgtgaagctgtcacagccggctgccgggctcgcgtgagcacttgcccttgctggcaacgtattcccagccatatgggccagcccagccttccaggaacactctggagacctgacctccatggaggtgacaggaagggagggccggtgatgtcttgcgggggcgagggtggggggtgcatcggggatgtcccaagtgggaagcaatgtgtggcacagcagcctggccctgtaaggaggctctggaggcctgacctccagaggcagcaacgggagagagcagaagtgcaggctggcagcggcttgcgggagtggtggggctctcccaggcctacagctggtgcctctgcctggctccgaggggcgtgtc

SEQ ID NO: 51534 - DNA, 1337 bp, Homo sapiens
agaggctgctctgctgtaagctcatatgtggtaggagctggcctggggatgatttatcaggctctcttcagtggtcctccggcccaaataggacccttcatagaggagaagctgtaggtgccttttgacccaggcttggaaatagccctttgcgtaaggcaggtcactcatgccagggaggggtagtctgtggagctggtactgtcagatatttacctgcaggtatcaaacgtggcagttcttggggtgaggggttgacacacattgggtgactcattgcatgctggtcattattcagtactttcttgagatcccaaggaaaccagtccagagggattgggtgtttgcgaagttcacgggcaaggtctaggggtggaagcagaggctgagggcctagaggatgtctggggagggcagggccgggggctgctcttcctatgtgtgccagcctggagccggtgtccctggctcacctgcctgcgctcttcctccccatggtcactctgggcaggtgtgtcctgcccctccctctggggctgggctcagcagccctggacttcgaacttgcagggaggaagcgcttgcagagacgggagccttggtgcgcactggggtttggtaggtccctgaagctgcagacctgcctgaatccaggccatgcctcctcagggaactagctctggatacagcccagagatttgcaaatcagatgcaaatgtggcctttggtcgctgtggtggggcaactgtgtggctgcgactcttcttcctggtgtgcagaaggtgatcatgctcctgaagttggtctgtcgtacttaggatgtgctgccgttgtcccctggatagcaccggggctgtttagactgtcacctggaaaaggccgtggggggagtttcgtggcgctgaagtcttctgggcttggcgttagcacctgcacctctgccaccttcccgggctattcttaacagactctgcttcctctgatgatcatgaatcctgggatgcaggctcaaatatatgcaagcctcagggtggtcttgcccagccctgccctgtgccctgcccatgaagaggctgtgagtgcctgcagagccccctcccctctgagagggtaatgtttgcctgctctgttctcagtgacgggttttttgttttcttctttgcctgggcaaaacacgcctattcgtttttccctttctgaagtttccattcgctgttgactcccaggggtcatgcaagcggggatttgtacctggtgtggggtatgggatccacaggtccgatgggacacctgtatcctagcatcggctgtcttggacttgataatgaagcttggga

SEQ ID NO: 51535 - DNA, 1027 bp, Homo sapiens
tcaggggactctttctggaaaaggctggtggagtctgcttgtttggggagctatgctgggaggatagtggtaaagtcctcggctcaaatccctagtctctccttattgggactctgactttggaatattgtgggctcttctcagcctcagctttctcacttgtaaaagagggttcacgatagcacctatcacttggggttgctgtgaggattagatgaaatgacgctggaagggctcctggcacatggtgatgaggggtagctatcgttgctactagtactgtctctactccaccctccccatctgtcatcatgaaggcagtaaggcagagggctccctgtgtttgagctccagagacccccaaggccaggctgaagcgtcatcccagaggctgtggccaccacaagtctgttggagcatgttcgccaatagcaaggcaaacgtgtccgcccagtacagagccctcgagggagcagggaaaggcttgcaatgcccagggctgagctgttggacgtgcaggtggcagtccctgggctggcctggactgcctgcccagggaggagctgactcccaagcactggcgccatcttggttctccttggcttctcctcgcagacgggagtgtggcccttgcccttccccaggagcaggtggcctttgcagcctggcacctgttcccagagggtagctgccaagaaggcacaaacccagggatctccctgcatgtcctccgagtcattgcacaaggcctgtgtgctgcctggaggggctggcctgggcctgtgctagtggagaaggtcgaaggaggagcttctctcctcccagagccccctcctcgccctccaggcaagtcacaggagagccaggaccagcatcctgaggtctgtgtcctgggggtttgttggggtggggcgagtaggggagcggggagacaggtgaaggatgtgaatgaagttggagagggggtgcaggagaagggtcttgcctctgtccctaaggggcagcaaggaagctgagttgattttac

SEQ ID NO: 51536 - DNA, 1034 bp, Homo sapiens
agccaggcactggggtctggctgcctcacacttggggtggagaatgtggcatccctcgctggcaggatggagagtcccggcccctctatgtcctggcttggttctgaggatgaaaggtccatgtgccccctggccccctccctggggagaccaggccctgtctggcgtggcctctccacctccgttccagagcacgtttcctggggctctccgggagaacggtgagaaaccagctcctctgcagccagtgtggcccgccagggcctcgccaatggctggaactcctcactggcttggccgggctcccccatgatgggctcaggtgcagccacatccccgcttgacaagcctctcagcaggaggggacttcctggagacttggcggggtcctgttcaggcctcacagttcctagaccttcagtcagggtgacagatggtcctgagaccagaagtgattcaggtcgttcaggcctcggggctggcggtgaaggagaggaggcatctgaggacacgggcagggtcagagccgggtgcgttggcaagactggacgtggccgccagggactagcctggacaccctctacaggctccgaggggagcgtggctggaggtgtggggtgtccagggatccctgcttcccctgggggaggctggggacctcgctgagcttgcaccactctggggagaatggaggcagatgtctggcctcttctcgccggtttggctgtttgcaggaatggtccaagccccttcttcaccaagagagaagtggagagagaaaaagcattagaaacaagaacacatgggctccggctgccctgagaatctcaacccaaagatgggttcgagggaccgggtgcggtggctcacgactgtaatcccaacacaataggaggccaaggcgggtggatcacttgaggccaggagttccagactggcctggccaacatggtgaaaccccatctctactaaaaatacaaaattagccaggtgtggtggcgtgggcctgtaatcccagctactcgggaagctga

SEQ ID NO: 51537 - DNA, 1066 bp, Homo sapiens
gaccggaggaactggagcccacacagagagagtggataaatggaaacagctcttcttgtgccaggcactcactcttctaagccattgattccccttatctcattcagtcctcaaaataggtactggtatgcctattttccagatgggaaaactgaggctcaacatggttaagtaactcactgaggttgtacggttggttaggaaatggatgcacccccatccgcctcccttgtcccctccctggcagactccagggccaggaaccacatcaccactcagttctcatgatactgttgttcttctgccagttccagccagtatgtctgacacctcacttaccttgtaggtgtgggatctgtcgggtccagggagtgaaacattgtcacagaagaaagaaccccagggccaaggaaagagggtttgtgtggtgtgtgcctgttaccagcagtcacaccctcatggtgcctcactcacccacacactggaagaagctctccactgtccagaggaccggggcagccatctcggcaaattccaggctcaggtctaccctatagaaagcttgtgttcccggggttcctccgacttcttggcatcgctgtggggccacaagaaattagttgcacattggctgggcgcagtggctcacgcctgtaatcccagcactttgggaggctgaggcaggcggatcatgaggtcaggagatcgagaccatctggctaacacagtgaaaccctgtctctactaaaaacacaaaaaattagctgggcgtggtggtgggcacctgtagtcccagctactcgggaggctgaggcaggagaatcgcttgaacccaggaggaggaggtttcagtgagccgagatcgcgccactgcactccagcctgggcaacagagcgagactctgtctcaaaaaaaaaaaaaagaaaagaaaagaaaagaaaagataagaaattagttgcacatggcaggggcatcccatgccctgtggctgtcccctgatggggctaccttggtaaaagcacgggcctgaggagcatacatggtgaagtccattttcagccagcg

SEQ ID NO: 51538 - DNA, 1087 bp, Homo sapiens
tacaggcgtgagccaccgcgcccggccgatgattttactttttattcaccccacatcccacccctactccacacacacataccccaacaccttccagcaaaagcaaacttctctttgtcccgagcatttctgaaacgcatagccaaggttgggactgaggagaggagaggtgggatgagacagaggggaataaggtgcccagaggagggagaaaacagaccagaatgtgatgaagttggaaaggtggacattaggggcactcctgggtcttacccggtgggcaagcagcttctaaagaataggcatggtgaccgctcaccagccatagtggcaggagctcagcagaggtgttcagcacctggggaggaaggggggtcccccctgaggtctccaaaactgctccttccagatgcagactccctccacaggggccccctctcctaccttcgaattagtctctgaactaaagccccaagtgttacaaagcccaggtcagggattatggcgccgatgcaactaggaaatattatttagctgagatatttttagcaggaagcgagctcagagcaaatgtcatgtgagccgtcttctcttacacagcaactttgggctatttaaagagacggtaattacgctcctgccgccatgatcaggacgcactgaatgcatgattgcaggagcccctcatctgcagagcggagcgctttacgctaatggggcccaattttcgaaggcgcctgcctaaatctgtccagtctcgcaggtggacatttgacttgtcactggaggggtggcaacctgctcttctaggtgctatgccccagaggcccctcacctcctggcagagcctgctgcccaccactgacctcccacctctgaagaaggccttgtctcgggctttggacggtgacagtggtggcattcatgtccacatacagtcccatcaggctggcgtcttcaagagaagccaccagctcccctcgaagggacagcagccatggagtctggagaaagaggacacgatcacaaaccatgtggccagggaggcacggtcactaggggttacggagaggggacacttgaaggg

SEQ ID NO: 51539 - DNA, 1062 bp, Homo sapiens
ggaggtgggctggcggagggaggagaagacgcactaggttgcctttcagaaaaggggtccaggccttatcctgcctcccaggtggactcggcccgggatcccgagccccgccccctccaggccccgccccgccccgccctcgctggccgagactctgtgctactctcgcgcgctttgaaagtgcgcgagctccgaccgagacctgggccggcggttggtcggccgaaaccatctgctacgttacgtggggggaggtcagctcctatacagccacacttttttcaatcttcagcttttcaggcctaggtcctggttttattttagctttcagagcttctctgtaggcttgaatttccaggaggcagcccgagtccctggggagagggtcatcgtggctctcgtcggtgccttccacctctggacaggcaaccggtgggagaggacgccggtgggcggggggaggaggcggccctagcgccattttgtgggagcgaagcggtggctgggctgcgcttgggtccgtcgctgcttcggtgtccctgtcgggcttcccagcagcggcctagcgggtgagtcgcggagccttctcactgaggacgccgtaggtgcctcggcttctgcattggggcggcccgaggcagacgcagcggcttcggaccctgccccgggaagtcagccgtgagaccgggcctagtcctgcccgagcgggctcgcgcgggagcgtcgttaggtcctggcacggggaggccggtggcgccgaaacggggggccgggcccgcggtgccgcgtagcctgaggcggaggttggccccggacccggacagtgccggagccttcggtactttgtacttcgagggacgctgccagcttgggcctggtgctcctgcgccccaccccgggccgcgccgagaaactcctccctcggctggcacgcgcgggcttctgggaggcgacggccggcaccgccaggacctgtcgccgcgggccttggggctcgggctcgcagagcccccggaagccccaaaatgaggaacagagggaaacttttctcctgttctttac

SEQ ID NO: 51540 - DNA, 1380 bp, Homo sapiens
ctggttcactgcccatattcagtcttcaggttcagctgatggatcgcttgcttaggaaaatcgactgggacctatcacgcccatgcctcagccagttaggctcctcctctgccttcaggattacttaacgactaacccgattgtcataaaatagctactgtttattgttcccttgcataccctagcttgtaaccagcaagccacgttggactcacagttacagtttcagtacctgacgcatcataagccttcagggaaagttttttgaatgaatgaactggcgaggcatcacattttgataggaaatcactacccttaccttcacctcgtcatttttcagggataaccaatgcatatacgaatccagacaagcatttttctggaagtcagaactctgacatggtttgggtattatcattataaggaaacagttattctgacatgaatgttgttcattcatatctcttttctctttaggaaaagtaaaagatgtctgaatatattcgggtaaccgaagatgagaacgatgagcccattgaaataccatcggaagacgatgggacggtgctgctctccacggttacagcccagtttccaggggcgtgtgggcttcgctacaggaatccagtgtctcagtgtatgagaggtgtccggctggtagaaggaattctgcatgccccagatgctggctggggaaatctggtgtatgttgtcaactatccaaaaggtttgttaccatttggtttttgtaatcatgctgaagtgtgttcaggtgtgtgtctcatccatggatcttagcctcttttggtggcagaatgtctcctgaaacttaagtatttccttgaacttcagtgttagacaagtttggaagaccacgagtctaaatttatggaaactggggattgtagatcattttaaaagagaaaacaatgtatttaaaaaatatctgaataaactttgccaagttgatgataaatttcaggaatcactaagaatgttttgtacataaatcattgttgtaaatagattcttctgaagtgcttcagtgtttggatttgatcattgtccttttggtgttacatcattcattcagcaaatctgagttcattttttcccttaaatgagcaaacagttggagtagccaaatcttgaattagtgcagttccaattacaatttcgaggttctggtcttatccttctctctgcctcttatcaatgatgttctaaatctaagaaaaggaagcatgaagtttaagaagtgtgccaaggaaatacctaatttcagcattttgaagtagtgtgctgttagtagtcgatctgtctgtgtgttccttttattataacttggtattgcaacaaagtccatcaaatttggtcagt

SEQ ID NO: 51541 - DNA, 1019 bp, Homo sapiens
ctctgttgcccaggcatattgcagtggctattcataggcacactgcagcctcaaactcctggactcaagtcgtccttcctcctcagcctcctgagttgctggaacttacaggcatacacaccactgtacctggttttctgttttattacaaaagttgtgtatttgttgttgaatgtttaggaaagataaaagttaaatcttcatcaggatatacaagttgctgatatttaaagtcaaagtgaagtagaattatttttgttttgataaaccttttgagagggagagattgtaatccggaaatgctacaaaaaacaaacttggaaatcactgaatttgcaccagaaaagcacctcagacactaaacttaagcctttattctgtcctctagagcaaacatcacttcttgccaagttttcagtgtcttattcttcttagagtcttctttttgcttctcatttctagatgtaggaggtagtgtttttaaagaagtgctaagtgaagatttctaaaaggtttctgctcgttttatttagataacaaaagaaaaatggatgagacagatgcttcatcagcagtgaaagtgaaaagagcagtccagaaaacatccgatttaatagtgttgggtctcccatggaaaacaaccgaacaggacctgaaagagtattttagtacctttggagaagttcttatggtgcaggtaaacttcgattgcatcaaacagtttttctttaccagtgaatgagtatctagcatttatttattggtataaatagagatggggtatcactatgttccctaggttctggcgtcaaactcctgggcccatactgtcctcctgcctcgaccccaatgtgctgagccaccatgcccagccacaatcttgttacctttcttttttttttttttttttggagaccaagtctcactttgctgcccaggctggagtgcagtggcacgatcttggctcactgcaacctccacctcccgggtttaagtgatttctcctgtctcggcctcct

SEQ ID NO: 51542 - DNA, 1076 bp, Homo sapiens
tgggactacaggtgcatgccactacacctggctaatctttgtattttttgtagagacagggttttgctgtgttgcccaggctggtcctgaactcctgtgctcaagcgatccaccctcctcagcatcccaaagcactgggaatacaggtgtgagccaccgcgcctggccccatctctcttttttaaaaaactcaaaaacatttctgttgtataagtgagttttgctctgttgttaacacagtatggattcaatattaacctccttgtttttactgttaagactaacttggtttaagttttaagccactgcatccagttgaaaccattcaaattgttttctaaggaactatgatttgggaatggagtgtgtgagtatgtgcacttttagagtaaacttgtatcatcctttctaggtcaagaaagatcttaagactggtcattcaaaggggtttggctttgttcgttttacggaatatgaaacacaagtgaaagtaatgtcacagcgacatatgatagatggacgatggtgtgactgcaaacttcctaattctaaggtacttgcgtctgtgctttgggaatttttgccaacaaacttccttagaggattgtaagataaaatgttaaacacacttagaaaagatagcggcagggtgtgttcatgaaatccttttgtcttgttgaagtctttggcccttagtgcatgctgaatattttatgcttgtttgaaatatttagtttattacttctccaaactaaacctttgttcattttgttcttccttttcgctatggatggaaaagagaaaaggttatttgtcaagttaatagtttcttacatagttatatgttaaaacataaagagaatcagaatacatacattaattgttataaagacctaactttttccaagcaaacaaataacattggcttatttggaacatcatcatctttgccaagagattgcttatttattaattttctcaaatccaaacacagtcatgtatcacatggcaaagttgatcagtcagcagcagacctcgtgtacagcagtggtcccataggattataacactgtttt

SEQ ID NO: 51543 - DNA, 1085 bp, Homo sapiens
atcttggctcactgcaacctcctcttccgggttcaagtgattctcctacctcagcctcccaagatgctgggattacaggtgcctgccaccacacccggctgatttttgtattagtagaggtggggtttcaccatgttgaccaggctggtttgaactcctgacctcaagtgatccacccgcctcggcctctcaaagtgctgggattacaggtgtcagccaccacacctggccacgatgatgaaattgtgtaatggctcatgatgtatttatatccatcattatgtgatgcatgactgtgtacttttgtaacttaaaacgttactcttcactgaagccttacaagaaaaagaaatgctgatggaaaaaattaagggtacgtctactttttaatggttcactgctatccaaggcgaatgattttgttatatcccttaccttaatgtttttttcattgttcataacatatttctgagtttttttcttccttttgatttgatcagcaaagccaagatgagcctttgagaagcagaaaagtgtttgtggggcgctgtacagaggacatgactgaggatgagctgcgggagttcttctctcagtacggggatgtgatggatgtcttcatccccaagccattcagggcctttgcctttgttacatttgcagatgatcaggtatttttctccttaacgatatgtcccggccgggcgtggtggctcatgcttacaatcccagcactttggaggccgaggcgggtggatcacgaggtcaggagatcaagaccatcctggccaacatggtgaaaccccgtctctattaaaatacaaaaaaaaaaaaaaatagctcggtgtggtggtgcacgcctgtggtcccagctactctggagcctgaggcaggggaatcgcttgaacccaggaggcggaggtggcagtgaactgagatcacaccactgcattccagcccagtgacagagtgagactctgtctcaaaaaaaaaaatatgtcccaggtaattaggtaatttctcttgaacattgcccatgcagctaattgctattcttagctaagttttctgaccttgtaagacgt

SEQ ID NO: 51544 - DNA, 3492 bp, Homo sapiens
cagcttcagcctcccaagtagctaggacagatgcatgccactacgcccagctaatgtggcttttttgtggttttttttgatagaggtggggtctccctgtgttgtctaggctgccaggctagtcttgaactattggcctcacacagtcctcccaccttggcctcccaaagcgctaggattacaggcatgagccaccatgcccagcctatgtcttttgaaaatcgactgaaatatcactgctgctgttaataaaactaaaagctgtattgggggtttaaatgaaatgagtgttcattgcttatttttcctctggctttagataaattaatgcttgtaatctaagttttgttgctactttaaatatatgaatcagtggtttaatcttctttgtttacatcccttatttcttatagattgcgcagtctctttgtggagaggacttgatcattaaaggaatcagcgttcatatatccaatgccgaacctaagcacaatagcaatagacagttagaaagaagtggaagatttggtggtaatccaggtggctttgggaatcagggtggatttggtaatagcagagggggtggagctggtttgggaaacaatcaaggtagtaatatgggtggtgggatgaactttggtgcgttcagcattaatccagccatgatggctgccgcccaggcagcactacagagcagttggggtatgatgggcatgttagccagccagcagaaccagtcaggcccatcgggtaataaccaaaaccaaggcaacatgcagagggagccaaaccaggccttcggttctggaaataactcttatagtggctctaattctggtgcagcaattggttggggatcagcatccaatgcagggtcgggcagtggttttaatggaggctttggctcaagcatggattctaagtcttctggctggggaatgtagacagtggggttgtggttggttggtatagaatggtgggaattcaaatttttctaaactcatggtaagtatattgtaaaatacatatgtactaagaattttcaaaattggtttgttcagtgtggagtatattcagcagtatttttgacatttttctttagaaaaaggaagagctaaaggaattttataagttttgttacatgaaaggttgaaatattgagtggttgaaagtgaactgctgtttgcctgattggtaaaccaacacactacaattgatatcaaaaggtttctcctgtaatattttatccctggacttgtcaagtgaattctttgcatgttcaaaacggaaaccattgattagaactacattctttaccccttgttttaatttgaaccccaccatatggatttttttccttaagaaaatctccttttaggagatcatggtgtcacagtgtttggttcttttgttttgttttttaacacttgtctcccctcatacacaaaagtacaatatgaagccttcatttaatctctgcagttcatctcatttcaaatgtttatggaagaagcacttcattgaaagtagtgctgtaaatattctgccataggaatactgtctacatgctttctcattcaagaattcgtcatcacgcatcacaggccgcgtctttgacggtgggtgtcccatttttatccgctactctttatttcatggagtcgtatcaacgctatgaacgcaaggctgtgatatggaaccagaaggctgtctgaacttttgaaaccttgtgtgggattgatggtggtgccgaggcatgaaaggctagtatgagcgagaaaaggagagagcgcgtgcagagacttggtggtgcataatggatattttttaacttggcgagatgtgtctctcaatcctgtggctttggtgagagagtgtgcagagagcaatgatagcaaataatgtacgaatgttttttgcattcaaaggacatccacatctgttggaagacttttaagtgagtttttgttcttagataacccacattagatgaatgtgttaagtgaaatgatacttgtactccccctacccctttgtcaactgctgtgaatgctgtatggtgtgtgttctcttctgttactgatatgtaagtgtggcaatgtgaactgaagctgatgggctgagaacatggactgagcttgtggtgtgctttgcaggaggacttgaagcagagttcaccagtgagctcaggtgtctcaaagaagggtggaagttctaatgtctgttagctacccataagaatgctgtttgctgcagttctgtgtcctgtgcttggatgctttttataagagttgtcattgttggaaattcttaaataaaactgatttaaataatatgtgtctttgttttgcagccctgaatgcaaagaattcatagcagttaattccccttttttgacccttttgagatggaactttcataaagtttcttggcagtagtttattttgcttcaaataaacttatttgaaaagttgtctcaagtcaaatggattcatcacctgtcatgcattgacacctgatacccagacttaattggtatttgttcttgcattggccaaagtgaaaatttttttttttcttttgaaatctagttttgaataagtctgggtgaccgcacctaaaatggtaagcagtaccctccggctttttcttagtgcctctgtgcatttgggtgatgttctatttacatggcctgtgtaaatctccattgggaagtcatgccttctaaaaagattcttatttgggggagtgggcaaaatgttgattattttctaatgctttgtagcaaagcatatcaattgaaaagggaatatcagcaccttcctagtttgggatttgaaaagtggaattaattgcagtagggataaagtagaagaaaccacaaattatcttgtgcctgaaatccattaagaggcctgatagctttaagaattagggtgggttgtctgtctggaagtgttaagtggaatgggctttgtcctccaggaggtgggggaatgtggtaacattgaatacagttgaataaaatcgcttacaaaactcacactctcacaatgcattgttaagtatgtaaaagcaataacattgattctctgttgtacttttttgtaactaattctgtgagagttgagctcattttctagttggaagaatgtgatatttgttgtgttggtagtttacctaatgcccttacctaattagattatgataaataggtttgtcattttgcaagttacataaacatttatcaatgaagtcatcctttagacttgtaatcgccacattgtttcattattcagtttcctctgtaaagggatcttgagttgttttaattttttttttctgcatctgaatctgcatgatttccaaaccctgtaccatctgaattttgcattttagcacttgcactattactcagcagcagtaacatggtaacacttaaaatggtactcggggacctccaaagactaaactgacaagccttcaaggagc

SEQ ID NO: 51545 - DNA, 3297 bp, Homo sapiens
aagttaaatcagcacttaagttgtgtccttagtaggaaaaagtaggaagttaactactccgtaatccaagagataatgtgtaacagtaagaatgattttgttgttgttgagtatgagcaaagtagcccctaagtgtgtattagggttctgtacttaactgttgtgtgatgtgtgcttttgttaggcatcactgtgcccaagtatttcatgttcattgtaaagaggaaaaatacagatttctctataatgtcaccacttatttctaatgccacttttcatcttgtggaaatgccatgttttgattcagtcttctgaatttgaacattattcaggttatttccaattgctgggaatatccttactgctaaaataaattcttagcattggaattgctaggtcaaagattatgcatgctttttaagggcttttgaaatgtattgccagtctgtggcctgccaccctccctgaacatgcctggtcttgcttaaaatgtattgccaaatagtccttgggaagtttatgttgtctttaacaatgtgaaatagtactactattcacgttccttttgtctgacaatttgataagtgaataattgtatcccaccattctgtagtattggtttttaacatggaaattttagtcaatacctgggctgaagtatcagtgtttccaacctacctacccaaaaaaaggattcaaggttattcctcaatcagtactgccataatatataaagcacttacagagatcaataagaacaagtttaaaaacaaagagcatggacaggcagtttacagaaatgccaacagccagtatgaaaagagactggctttttaaggtaatgaaatgtaatttgagcagtgacattacactgggtgggcaaagatgactgtcactctcgtggtttatgtccccttgagtcaatgggtaaggctggaattaaactggcaagtggagaaatgacagcagcctcacctggagtctgtttttttgggtggagcaacaactgccatgtccacagtaatgatgaatgcttctcgagccacgtcgctgccaaggtcttcacaggcatttctaaaaatgaagaatccttgactgcagacacgcaagttaaaaatcactaattatgttctcgatccagggaatatagttaataacttttgtgtagactccatactgacctgcttccccacaattcatggaaccccaggacactattcctcccacaaaccacctctctgtttcactatctagaaacaccagtgcccctccgctgtcacctctgcagctgtccttgcccccactttctaagccagcacaaagcatgttagcagttacacttccccttggatagggtggcttttcatatgcagcagtacatttttgatggtcaacaatcggtatgtcgacatacattagatttctagcaagaaaacccctttgggttaatccccatccagatgcagttccaatgtcatctgtcctcataaaggattcagcttcttttcttggcagacaaataggcgtgatgttgctattgattacaactttgttattcaatttaatcagtgctatgtcattgtcaaagccagcatcatgagtataaccttcatgtataaaaacagcttcagaccaggcttgtgtataatgaggtgatagtcttttcagggtgcccattcgaatgtccagggcggatgcatcatgtttttgctcatagacggcatgagcagctgttaggacccagttgtcatataaaagtgcacctgctgctgtggttccacctaatatcaggacttgccaaggaaaatcaccaggttttgccttttgccctccatatatacgccctcctgttgtgcgggctgatagtccacaaactggagaaagaagcagataggtagagagcctttgtaaaaatgtcaatcgtgtttttcttaaattatgaccgccttgaagtatatatttgatgtcaaccaaaaattatattacatgaattggtgggtgactacctatacaggcaagtgaggctattttaaaacatcacagttcaaacacctgataaaaccttttggtatttcttagctcctcagaaaatgagattagtgaaaactgacttttagaagttattttgttttgctaaaataatttggtctataagattgggaaaattggccgggtgcagtgtcacacctgtaatcccagcactttgggaggctgagatgggtggatcacctgaggtcaggagtttgagaccagcctggccaacatggtgagaccctgtctctactacatacacaaaaattagccgggcgtggtgatgggcacctgtaatcccagccacttgggaggctgaggcaggagagttgcttgaacctgggaggcggaggttgcagtaagacaagtcacaccactgcactctagcctggtaagagcaaaactccatctcaaaaaaaaaaggagattaggaaaattaacagggcaagcaggcattgtctgagcagatggactggatgatgtgcataggaattagaaggatataaccttttcattgtttctgttttcctacttgtaaaatgggtatttatgtaatcctaggaaagcaggaactaaagtcagtatcaggatttgcaaaattacttttacctttgaacatacaaatgttttagaaattagaatgttgcagttgtggctaggaccctgtggattccaaaattttatttttggtctagttgattcttccaaactaagttttattgtatctttattgcaaattaaatacgcccattaatgtagcatatatgtttgctgttgtggtagtgtacttgcattaatacctacagacgttgtgttagccaaatacaggtttaaaaaaactaatttgagccaaataacacaagggtaattaatatattactatctttctgggttttttttctttttttttttttttttttttttttgagacagagtctcgctctgtcacccaggttggagtgcagtggtacaatcttggctcactgcaagctctgcctcccaggttcatgccattctcctgcctcagcctcctgagtagctgggactacaggcacacgccaccacacctggctaattttttgtatttttaatagagatggggtttcaccgttttagccagactggtcttgatctcctgacctcacgatctgcccgcctcagcctcccaaagtgctgactttttttttctttttctctttttttttgagacagagtctcgctctgttgcccaggctggagtgcagtggcgcaatcttggctcactgc

SEQ ID NO: 51546 - DNA, 1156 bp, Homo sapiens
aggttatactcatgatgctggctttgacaatgacatagcactgattaaattgaataacaaagttgtaatcaatagcaacatcacgcctatttgtctgccaagaaaagaagctgaatcctttatgaggacagatgacattggaactgcatctggatggggattaacccaaaggggttttcttgctagaaatctaatgtatgtcgacataccgattgttgaccatcaaaaatgtactgctgcatatgaaaagccaccctatccaaggggaagtgtaactgctaacatgctttgtgctggcttagaaagtgggggcaaggacagctgcagaggtgacagcggaggggcactggtgtttctagatagtgaaacagagaggtggtttgtgggaggaatagtgtcctggggttccatgaattgtggggaagcaggtcagtatggagtctacacaaaagttattaactatattccctggatcgagaacataattagtgatttttaacttgcgtgtctgcagtcaaggattcttcatttttagaaatgcctgtgaagaccttggcagcgacgtggctcgagaagcattcatcattactgtggacatggcagttgttgctccacccaaaaaaacagactccaggtgaggctgctgtcatttctccacttgccagtttaattccagccttacccattgactcaaggggacataaaccacgagagtgacagtcatctttgcccacccagtgtaatgtcactgctcaaattacatttcattaccttaaaaagccagtctcttttcatactggctgttggcatttctgtaaactgcctgtccatgctctttgtttttaaacttgttcttattgatctctgtaagtgctttatatattatggcagtactgattgaggaataaccttgaatcctttttttgggtaggtaggttggaaacactgatacttcagcccaggtattgactaaaatttccatgttaaaaaccaatactacagaatggtgggatacaattattcacttatcaaattgtcagacaaaaggaacgtgaatagtagtactatttcacattgttaaagacaacataaacttcccaaggactatttggcaatacattttaagcaagaccaggcatgttcagggagggtggca

SEQ ID NO: 51547 - DNA, 1068 bp, Homo sapiens
acaggcatgtaccaccacacccggctaattttgtatttttattagagacggggtttctccatgctggtcaggctggcctcaggtgacccacctgcctcggcctcccaaagtgctgggattacaggcgtgagccacacctggcctaaaaatcatttaattttttatgcttgcctagttataaggtcaaagagaatcaaatgactgatgcagtcagcacctaacaacctctgtatatgggaagggggtaatgagaacatactatttggaaataataacagcctaagagccaagtgctgaagttacatttctgcctaccacagctaaagctctcctcactgtctcctacccagtcctcctttccatcaattaccagtctcttgtataaatgtatccattaccaggctcacagactgggagtgatttttctcctttggagctcgtccagaatccatcagcctcacacacatatttacctgcaaatcattggaaaagcaaaaatgtttaactgcatgtataagatggttgtcatttgcttgaatacccccttgaaaaatgttgattcttgagcatcagtgggacatagaggtgtctgaagaaccattttacatgatttcataaataggaggtctctgcattaccatgtttgcttgcaaagtggaaaccttttagatgtgtaacttgaatatgtatcaagatctcaagtgcttaatgataaggtgttgacttgttaaattaaaccatttggaatacattgtgtgtttgtagtagtcatttactagatctgttttcagatttttgcaaattgacattaaagtcactttagctataatatttcacttagcggatgggagaagtggcttttaatcttttgtctagccttagccaaaaatgttggttaaagtttattttcagaccatgggggctcaagttccaagtattgcccacccccaactttgaagaatttgcataccatcattcactttcattgtgtagaaggtctcttcacagctgtactgaatcacagctttgtaggtggtcactccaggacctgtgatgtactccactcgg

SEQ ID NO: 51548 - DNA, 1076 bp, Homo sapiens
acccccattcagggtctggcctggaggagcctgacccacagaggagacaccctgggagatattcattgaggggtaatctggtcccccgcaaatccaggggtgattcccactgccccatagggcacagccacgtggaagaaggcaggcaatgttggggctcctcacttcctagaggcctcacaactcaaatgccccccactgcagctgggggtggggtggtggtatgggatggggaccaagccttccttgagggatagagcccagcccaacaccccgcccgtggcagcagcatcagctgttccagcgaggaaggagagcaccagactcagtcatgatcactgttgccttgaacttccaggagcagcccccagggcaggggtcagacctggggaaagggggtgatgagagacccttcttccggatggttcctccaggaacccagggggctggctggtcttggctgggttcgggtaggagacccctgatgaataaacttgggaatcactggggtggctgtaagggaatttaggggagctccgaaggggcccttaggctcgaggagatgctcctctcttttcccgaattcccagggaccaaggagagtgtcccttcttcctccttcctgtgtgtccatccacccccgccccccgccccggcagagcctggtggaactcagtgctctagcccctaccctggggttgcgactctggctcaggacaccaccacgctccctgggggtgtgagtgagggcctgtgcgctccatcccgagtgctgcctgtttcagctaaagcctcaaagcaagagaaaccccctctctaagcggcccctcagccatcgggtgggtcgtttggtttctgggtaggcctcaggggctggccacctgcagggcccagcccaacccagggatgcagatgtcccagccacatccctgtcccagtttcctgctccccaaggcatccaccctgctgttggtgcgagggctgatagagggcacgccaagtcactcccctgccttccctccttccagccctgtgctccggccaggtcttcacccagaggtctggggagctcagca

SEQ ID NO: 51549 - DNA, 1082 bp, Homo sapiens
acttgggaggctgaggtgggaggattgcttgaacacaggaagtagaggctgcagtgagctatgattgcagcactgcactgaagccggggcaacagaacaagatccaaaaaaaagggaggggtgaggggcagagccaggatttgtttccaggctgttgttacctaggtccgactcctggctcccagagcagcctgtcctgcctgcctggaactctgagcaggctggagtcatggagtcgattcccagaatcccagagtcagggaggctgggggcaggggcaggtcactggacaaacagatcaaaggtgagaccagcgtagggctgcagaccaggccaggccagctggacgggcacaccatgaggtaggtgggcgcccacagcctccctgcagggtgtggggtgggagcacaggcctgggccctcaccgcccctgccctgcccataggctgctgaccctcctgggccttctgtgtggctcggtggccacccccttgggcccgaagtggcctgaacctgtgttcgggcgcctggcatcccccggctttccaggggagtatgccaatgaccaggagcggcgctggaccctgactgcaccccccggctaccgcctgcgcctctacttcacccacttcgacctggagctctcccacctctgcgagtacgacttcgtcaaggtgccgtcaggacgggagggctggggtttctcagggtcggggggtccccaaggagtagccagggttcagggacacctgggagcaggggccaggcttggccaggagggagatcaggcctgggtcttgccttcactccctgtgacacctgaccccacagctgagctcgggggccaaggtgctggccacgctgtgcgggcaggagagcacagacacggagcgggcccctggcaaggacactttctactcgctgggctccagcctggacattaccttccgctccgactactccaacgagaagccgttcacggggttcgaggccttctatgcagccgagggtgagccaagaggggtcctgcaacatctcagtctgcgcagctggctgtgggggtaactctgtcttaggccagg

SEQ ID NO: 51550 - DNA, 1077 bp, Homo sapiens
tgagctgagatgacgccactgcactccagcgtggcaacagtgagactccgtctcaaaaaaaaaaaaaaaaaagtgccccccctgatgtgcccctggcccggtccccagagcacgaacttccaggagccggtgcagccgctgacacagcagcaggtggcgcagatgcagctgaagtactacaactccgacgtgcaccgcgccgcctttgtgctgcccgagtttgcccgcaaggtgggtggcctgcggggctgggtggtgggacccagggacccagagcgccctcctgactggcctcatgtccctccaggccctgaatgatgtgagctgagcccaggcgccaccactgatgccacccaggacctcggaccttggagcctgcggggtgcctcggcccctccagccccgggccggacctcctgctggctctcgcccaccaaccaagtgttacaagccccagaatgctgcccggcctgccctgctgggcggactgtctgtgtgtctgtctctctggcgttccacctccaagcctataccagctgtgtacagcgccatctctctgccttctgttgcccctcactcaccaaacacgtgtatttatagcaaagattggagtcctgtgtctcctgaccttggctgggcccaggcagggccacattcaccattgggtgcctctggggtgagggtctgcagaggccttgctggctgacccccaagtgtctgctgcagggctgaggctgcaggcgggccatcgtggatagcctggggcacagagggtcaccgcagtcgtcacgtgggacccagagctgtcctgggaagctgacttagctgtccttttaccaagcccttcacaaggccactggtgacagccccccagggcagtggggtgggtgagatcagggtggggctgcccgggagcattctcagaaaaattggggacactcacaggtgtaagtcaggtcccatccaggtactccagggcaaatacaggaaggggtggcggggctggttaccttcggcctttttaagcacatcaggagcttaacactggcccagtgactgtgccctgactccacccgg

SEQ ID NO: 51551 - DNA, 1849 bp, Homo sapiens
ctgaggttcccaaaaggggccaggtgtggtggctcacagctgtaatcctagcacttttggaggccgaggtgggaggatcgaggagttcgaggcaacatagggagactctatctctaccaaaaatttaaaaagtagccaagtatgattgaacacacttgtcccagctactcaggaggctgatgggggaggatcacctgagccccggaggccgagggtgtagtgagccatgatcgatgccactgcactccagcctgggccacaaagtgagaccctgtctcaaaaaaaaataataaaaaaaagggaaggggttggccaaggcggcttgcctgtgaggcacttggagagtcccacgtggctgtgctggctccaggtcccccagccccttggcccagactggtccctcccatcccctccaggatgtcatccaagtctccaagaagttcctgccaggcatggccattggctactctagctcgaagctgaccctacatgtgggtgacggttttgagttcatgaaacagaatcaggatgccttcgacgtgatcatcactgactcctcagaccccatgggtaagcagtggatgggccccagggttttctggcagctgcaggtctggaggtcagcctcccccaggccttcagagtaaaggatagagcggcctcccaccccccgaactagagctgtacttttcccttctcatttgttacctgccctctgaaacatggctcaggacagtaggcaggagccaggcgactgcccagattcacaagctggtgaccaaggagagtggggatctggcattgggacactgaggaccctgtgtcctcttcagcctcccctctgctctgaagtggtcagcactggagtgggggcaggttctagtcttgaacgaaggcctaggttagaggttcctctgctgtggtgccaatgagactcccccaagaatgggattcaggtgtggatcccccacagacctgggttcagatcctggctctggccacctggtagctgtgtgggtgacagtggccctggaggtcacagccagactgttcagtgtgtctccctctgtcttccccaggccccgccgaaagtctcttcaaggagtcctattaccagctcatgaagacagccctcaaggaagatggtgtcctctgctgccagggtgagccacaggcctggagcactggggcggggcggggtggggcagggcaggccctgccggatgctgatgcttaggggcccccaggcgagtgccagtggctgcacctggacctcatcaaggagatgcggcagttctgccagtccctgttccccgtggtggcctatgcctactgcaccatccccacctaccccagcggccagatcggcttcatgctgtgcagcaagaacccggtgagatgggggtgtctgggggtgggggttggggggaaggtgggcataaatagagatccctgcccctgccgggcgcggtggctcacacctgtaatcccagcactttgggaggctgaggcgggcagatcacaaggtcaggagatcgagaccatcttggctaacacggtgaaaccccgtctctactaaaaatacaaaaaaattagccaggcatggcagcgcgcgcctgtagtcccagctgctggggaggctgaggcaggagaatggcgtgaacccgggaggcggagcttgcagtgagccgagattgcgccactacattccagcctgggtaacagaggaagattccgactcaaaaaaaaaaaaaaaccctccccaggccaggtgcggtgtctcatgcctgtaattccagcattttgggagaccaaggtgggcggatcacttgaggtcaggagtacaaga

SEQ ID NO: 51552 - DNA, 1029 bp, Homo sapiens
cagtctggctgtgacctccagggccactgtcacccacacagctaccaggtggccagagccaggatctgaacccaggtctgtgggggatccacacctgaatcccattcttgggggagtctcattggcaccacagcagaggaacctctaacctaggccttcgttcaagactagaacctgcccccactccagtgctgaccacttcagagcagaggggaggctgaagaggacacagggtcctcagtgtcccaatgccagatccccactctccttggtcaccagcttgtgaatctgggcagtcgcctggctcctgcctactgtcctgagccatgtttcagagggcaggtaacaaatgagaagggaaaagtacagctctagttcggggggtgggaggccgctctatcctttactctgaaggcctgggggaggctgacctccagacctgcagctgccagaaaaccctggggcccatccactgcttacccatggggtctgaggagtcagtgatgatcacgtcgaaggcatcctgattctgtttcatgaactcaaaaccgtcacccacatgtagggtcagcttcgagctagagtagccaatggccatgcctggcaggaacttcttggagacttggatgacatcctggaggggatgggagggaccagtctgggccaaggggctgggggacctggagccagcacagccacgtgggactctccaagtgcctcacaggcaagccgccttggccaaccccttcccttttttttattatttttttttgagacagggtctcactttgtggcccaggctggagtgcagtggcatcgatcatggctcactacaccctcggcctccggggctcaggtgatcctcccccatcagcctcctgagtagctgggacaagtgtgttcaatcatacttggctactttttaaatttttggtagagatagagtctccctatgttgcctcgaactcctcgatcctcccacctcggcctccaaaagtgctaggattacagctgtgagccaccacacct

SEQ ID NO: 51553 - DNA, 1050 bp, Homo sapiens
tccgcaggtaccgccgctgcccgcaggcgcctgccccctaggctcagcccgggccgcctgctgcccgcctcacgggcctctccacgccgggacccaagcgggctggacctcgtcctgccctggccccctcgccacccctcacaccgcctccctgggctggggctgggactgcgggctggcctcttgggtgggggagtcggagtctgcgccccgctccacgtgtcagccctcaggacacgtcagagcccgaggagaccccgggtcccaccccggcctccacccggcggcccgcctgccgttcctcgccacgtgtcaccatcgctcctcatccctgggacccctaggcgggatggggagaccctcctcacccagggcggcttggggtacgttttccccaccccagagaacccaggtccccgactgtcactccgcccgcagtaagacctatggcaacgtgctggtgttggacggtgtcatccagtgcacggagagagacgagttctcctaccaggagatgatcgccaacctgcctctctgcagccaccccaacccgcgaaaggtaccccagtgtcccctggaacagtgccggacgaggggcggccccaggtgtgctccgggctcttcccagatgctgcctgcatggttgtcagagaaagtgctagcgaggccaggggcgtcccgcggaggggtgggggccgacactgacgcggcctcggaatcctagggcagccctggaaggaacttccaggaaaggggacaccggcacgaaagcgtttccgagggtagaaaaagatgaggcccgtgggtccgaggggtcagggggtctgcttcaggggcctgggggctcccagtcctgccagggcccctgccttgactgccccctcctcccaggtgctgatcatcgggggcggagatggaggtgtcctgcgggaggtggtgaagcacccctccgtggagtccgtggtccagtgtgagatcgacgaggtgagtgccggcgtagagccaggtttgagtcctggttctcccagcggccagctgtgccctgaaatg

SEQ ID NO: 51554 - DNA, 1113 bp, Homo sapiens
ctcttaccctgatgcccaggctggagtacagtggtgcaattatagctcattgcagccttgtactcctgggttcaagtgatcctcccacctcagcctcccaagtagctaggactacaagcacgcaccaccatgcccagctacatttgtttctttttttttgtagagataggggtcttgctatgttgcccaggctggtctcagactgcctaaagcagtcctcccacctaggccgcccaaagcactggaattataggcatgagccactgcacctggcctgcttgcctttcttaaatgacctcatgtcattgtccagtgaggaatttgtttcagctgaccctgagtgttggtcccgaagttccagccacagctcctctccccaccactgactgttcttcttaccacttaggcagctgggtcccagctattgctgaggccggtggagttccctgttcccatgtgcctccctgttcctcccccacatctgttcctgatctacagctagaaaatgctgcaaagaagagagagcgagcaacaagcgacccaaggaccacagaacagaaacaagagaagaaacgactcaaaatttccaagaagccaaaggacccagagccaccagaaaaagagtttacgccttacgactacagccagtcagacttcaaggcttttgctggtgaggaagtaatggggccccatacagggacatctgtgcgcgtcagaggggaggaagccataaagagaccacaatataggggccaagtgagtcctgcacaaggcatggtgctagccaggaattgttggagtagtccagagaggccgtggcaatgtggacagtcgcctgcagcctcattaccacctcctccatgggagctcaactcatggtggcctccatggtgggttagcaagatcacctgtcacttccactgtgaccagggcgccatccttcctcactataacttgtgcccataaaccctctctctctctctcacacacacacacacacagaattttgtttgttgaaaaatctcaaagcctatgacatgaacccctatggctgcttgggctgtgagagtccgtctgctttgaaggggctacagatggcattctcgactctag

SEQ ID NO: 51555 - DNA, 1629 bp, Homo sapiens
ctctgtgtggcagcagagctcttttgttaggcaaaaccgagaggtcccccagccccgttcctgtccctgagttagcttgctatttttggaaatggggaatcaggtggggcttctgccttctctcctcttttccccccacgggttatgtcacactgaacaactgcacgtcctgtgtgttatgcccagtgtcacctccatgtgttgtaacgccataggtccgtggggtgtcataaagaaacacagcagacttgcggaagcccagccttgagtctgcttctgtcatttactgaccatgtcccttggacaagttatttactctcccggagtctgtttgctcatctctaaagagagggtgatgacagtacctttttcccagggttacagagggattgaatgagatgatggatggcccagtgcctggaggacagtagcactttgtccttaatagggattttagcaataaagccagcatgaaatttatttttcatgcccttagatttgaaaatttatgacttagaatgtgtgtacttcttaggttaacctgcccttcgtcacctcatgaaaagtaagacagacttaggtggctgactttggagggttttttttgttatatttgctttcattatagatcagcaaccgctggaagctggcccaggtacaagtacaaaaagactctaaagaagctgtcaagaagaaggcagctgagcaaacaggtaacactcacttccttgcaactcagtcggctgttaaagaatggctgttgcacacccgctgtttcagccaagtgccagatacggcgatgaatgaagcccctgtggggcttcccttctgctgagggatggtgggcaatcagtatctatcctggcagatggcagcaggtgctgtgcagagagattggtggggagtgctggaggtgctgtagctgtctcgttggtggttggagaaggcagtctaatgaatgcgacattgacgagacctgcagtgacctagagaagagttctggagccacagcacagcgagcccagaggccctggggctagttcactgggcatgctgagcagcagcaagtgggcctgcatgagcagagcgggtagagaagagcaggagatggggaaggagccagcagaggcccacgggatgacgctgccttttactctgagttcagaagccaggagggtgctgagcagacggggggaagtgactgacatgtggcactctggctgctgtgtcaacagtagactatagaggacaggatgggagtccaggaagggataggagacatggcagtggctcaggcgagaggggatggtggctttgagaccagcgtgggagcagaggaggtggtgagaagctgtcagagccttgatctgtcccatagcaaagctgacagcatttgatgatgaggtggatgtggcatgtgagaaaagggaagggaaccttggatgaaggttttgtcctgagcagctggaaagctggagttgctggcagccaaagtagctggtttgagcaggtttgtccacgatggtgatggtgacgatcctgttaaacgccctcaggtccacaggccactgagcatttaggttcacagaagaggagcaggcagggctggggaggatcagctcacgtgta

SEQ ID NO: 51556 - DNA, 2068 bp, Homo sapiens
ttttaattttttgtagagatgggtcttgctgtgtttcccagactggtcttgaacccgtgggctcaagcagtcctcccacctcagcctcccaaagtactggaattacagttgtgagccacctgccagccccacatttgcaatttttgtgttaaaaatgtctttgtaagctctgtactttgtccaagtaaagagagaccttgattactagagaagagtctttttcaagctctttggaatccttcctattgtgcttagtcatgttaaagagctttattctttcattctacaaataattattgagcaccaaataattatcatgccaggcactgtaaggagtgaagagaggaaagaaaatctctgggcttttgagaaacaggctggtgaaggaatacagtcagcgctggagactgggggttggacttgaggtgcttgggcaactttcctcaattcccttcgtttttttccttagtctgaagttgcagccggagtgaagaagagcggaccgctgcccagtgctgaggtagagtgtcggatctgttttctcccccaggagggaaaacgtcaagtcacagccagtgcaagtacacctctgacagaggcctgtgctgacagctggcagaaagctactgccggcttgcacgttttacatgccagcctgctggtgtcttttaatgcagagattggagaatgttctctttggacctcacgactgctcccatgcccctccggatggctatccaatcatcccaaccagtggtaaagtcgagagccctcctgactgtcccgaagaggttgggacacagctaccttgtctaaaattctgtaggcttggccgggcgtggtggcttatgcctgtaatgccagcatattggaaggctgaggcgggtagatcacctgaggtcaggagtttgagaccagcctggccaacatggtgaaaccccatctctactaaaaatacaaaaattagctggcatggtggtgggcacctgtaatcttagctacttaggaggcagaggcaggagaatcacttgaaccgaggaggcggaggttgcagtgagccgagattgtgccattgtactccagcctaggggactacactaaaactccatctcaaaaagaaaaaataaacaaaattctgtaggctttgaccttactatcttctgctcctctaggatctgtgccagttcagaagcaggcgagcctcttccctgatgaaaaagaagataacttgctgggtaccacatgcctgattgccacagctgtcatcacgttatttaatgtgagtagcacagaaacttcactgaggtgatgaggaccccctgggatttactggatttattcagcaggctgtctgcctggagcattgcatacactcggagactaatgctgagagcaaaacccagcagtgctgggagaggcatagagaccaatgagcaaggtggcactgaccactctggaggaggtggtctggggacgtggatgggggattctcttgagctctgtgtgaagaaatcttccaggaaaggctgacgtcctgttgttgaacagcacctagtgggaggagggcctgcgctaagagaacatacaagcagggctttccagacaagctgcagtggtggtggaggaaaaacggttcacctggatgcccagcaggggtggcatgggtgtactgtccgatgaactgtagaatgtgcgctgcccatagcttcctgcctgaccccagcaccacatatgtgtgctttcagtgaagaagagaaatgattttttttttttttgagacaatcttgttctgccaccaaggctggaatgcagtggcacaatcatggctcactgcagccttgacttctgaggctcaaacgatcctcctgcctcagcctcctgagtagctgggattacaggcatgagtcactgtgcccagctatttcactttttttgtttgtttggtttggttttttgagatggagtttcgctcttgttgcacaggctggagtgcagtggcatcatctcggctcactgcaacctccacctcccaggttcaagcgattctcctgcctcagcttccctagta

SEQ ID NO: 51557 - DNA, 1043 bp, Homo sapiens
cttgggctctgtgtctggccaggttctagttcttaggtttgctccttacattcatgaaaagagccaaacattttccagagcccagggcacaattttgattcccgttgattttgaatgttctctaatactttgtagaaattcatcaaacctatcttcacggatgagtcctaccttgaactctataggaagcagaagaagcaccttaacacacagcagttgacagcctttcagctgctgtttgcctggagggataaaacagctcgcagggaagatgaaagttacgggtaagggattagaggttcttttaatacttgtttccagactgaggagatctaataacaagtaaataatgggcttttttcttttgctatgaaagctggttatttcccctatgtgacagcatctaatggaacttactggctgaatgtaatgtgtccccaccgtgtgtgtgtgtgtgtgtgtgtgtgtgtgtgtgtgtgtgtgtttttttttttccagatatgtactgccaaaccacatgatgctgaaaatagctgaagaactgcctaagtgagtttcaaatctgattaatatgttctgactttctcagtagatctgatgttcttcaaaatcaagcttttctggttgctattacccaaggctgcttactcagagattaatgctccaagcttggaaggtagcaagttgaaggaatatagaatttctgccctcaggctgccatttaagcactaaaacttctgaactggaatcatttcaatgattatgccttagtttgagtttattttaagtctctgagccttatagcatctacttgcaagggaagaaaatgtcccagattctgtcatctgtactttcttccaaattaaagcagctcatgatcttaaacgttttgtgatcttgattgaagtataagcaagaatgaaaatccacagcccgttggttgccccctgcggaattgagaatccacagtgctatggcacttactttcagctctccctgattgtgggagtcaggctccaagagggatccacttaaagcttggt

SEQ ID NO: 51558 - DNA, 1024 bp, Homo sapiens
atccacccaccttggcccaaagtgctgggattacaggcgtgatccaccatgcccagctgcatatatctaatcttgattagaacattggcttcagccaggtgaggtggctcaggcctgtaatcccagcattttggggagctgaggcaggaggatcacttgagcccaggagattgagaccagcctggggaacatagtgaaaccccgtctctacaaaaaataccaaagtttagctgggcgtggtggcacgctgtagtcccaactacttgggaggctgaggtgggaggattgctggagcatgggaggcggaagttgcagtgagccaagatcacaccactgcactacagatgggacagcggagactaccttctaatttcagtgttctaataaactagaggcagagttaatttctgagcatgagtggcctgctaccagtgtactgcatgactttggttctgttttcaggtctttcatggtgctgattcagacatagaatggctacagaaagactttgggttgtatgtagtaaacatgtttgatactcatcaggcagcacgccttcttaacctgggcaggcactcactcgatcatctcctgaaactctactgcaacgtggactcaaacaagcaatatcagctggctgattggagaatacggtcagtttgctcttactgaggaaatgtgggtggcagaagaaagtgattattcattaacctgtcgtccagagagacctgggtttgagccctaccacgctcattgagatgaatggcatcaggcttttcgccaggcatcttcagcagcgtaaaagtggtaggaaattttttaatgctaaggtggactttatgatgggctgatgcagttacactgtgttccatggaaatagtggttgaaaaagaggtgccgcaccagtatttgcccatgctggtcttttgtttgaaactgggatctttctaccagatgattttgtgtgtgtgtaagatcttctgtagggatgattgtgtgtgtgtgtgtgtgtgcaagatgacct

SEQ ID NO: 51559 - DNA, 1087 bp, Homo sapiens
gaacagaagatccataactttagaaatacgggttttgacttaactcacaagagaactcatcataagtacttgctgatggaagaatgacctagttgctcctctcaacatgggtacagcaaactcagcacagccaagaagcctcaggtcgtggagaacatggattaggatcctagactgtaaagacacagaagatgctgacctcacccctgccacctatcccaagacctcactggtctgtggacagcagcagaaatgtttgcaagataggccaaaatgagtacaaaaggtctgtcttccatcagacccagtgatgctgcgactcacacgcttcaattcaagacctgaccgctagtagggaggtttattcagatcgctggcagcctcggctgagcagatgcacagaggggatcactgtgcagtgggaccaccctcactggccttctgcagcagggttctgggatgttttcagtggtcaaaatactctgtttagagcaagggctcagaaaacagaaatactgtcatggaggtgctgaacacagggaaggtctggtacatattggaaattatgagcagaacaaatactcaactaaatgcacaaagtataaagtgtagccatgtctagacaccatgttgtatcagaataatttttgtgccaataaatgacatcagaattttaaacatatgtatatgagtggcgttttagtcataattttgatcagttcaaaaaggaagcatttactctcttcagcactcagccttcagtaaacactctgtagtagggatgacagaggacgtaagggtgtacgtgacatggtccctttcctcagactgttcccaggccagacaggtggagacagcatgccactgaagtgaacagaacttaccccggccaagtgctgagaagaggcatgtatgggccacaggtaggagcgtgtattccaccgggtgagcctggaaagccccatagaaagggggacatttggcatgggtcttaaagaggggtgggagtctgtcagatgaaccaaggggggggcattctcagcagaaaaggaagtgtgaggcactgctgtaaaagcaaggtatccat

SEQ ID NO: 51560 - DNA, 1012 bp, Homo sapiens
agtgcgtagagaattagatgctaacaccaacagtggctttttggtgtttgaattttctgttaattgatttcttttcccatagaaattttggacggtgtggaacttggagagccagcccataagaaaacggggaccacagtgccagaatctattcattctttcagtaagttcagcctctgaggaaccgcaccagtgactagctcattaagaaaatagcagctgtgttataccctgagaggggtcaacaagatgaagcaacaaaactgcctttgagcagaaaaggttccatgaatttctcattatattctgaggacaaagacggacatagaggaaggattgcttaacacttacaaaagtgaatatttgagaaaaacagggcacccattgaacctgttgtattgctcccattcttacagttatttctacttttgtgtattccagttggagacggtttggtgaaaccagaggccctaaataagaaagctatccagattattaacagggttcgagataagctcactggtgagtgtgtcatgtgtttacttaaaagggacataaaatctgagcacactttcctctctgagtggtggtcagccccatgtccagtggtgttagtgacgagctttggcaccatgcagctgacaaagagtgtctttgaggtcatcagttaaacattgtctctgattcttctttctgatgactgataacagtacttaatgttagtttaatctcatttaactcaggaggtgaataaatttcttttgggtccaaaatcagccaaattcagagaagtgttttttaatcatgtcttttttttgtttgtttgagacagttttgctcttattgcccagtctggagttcagtggctccatcttggctcactgcaacctctgcctcccaggttcaaacaattctcctgcctcagcctcccgagtagctgggattacaggtgcacgcccagctaattttttgtgtttttagtagagatggggtttcaccatgttgggcaggc

SEQ ID NO: 51561 - DNA, 1025 bp, Homo sapiens
ctctccatgtgtggtttattatggagggattattaacccatctgttaatcacaatatttctttttttctgaccaccctgttgcctattgaagtcacagtatttctaaaatccctcagcaacttggagaggtctaaacaaatgactcaaatcagttaacccagagggtaaaggtgacaaggtccacatcctccttcatttgaggatctccagccagctaagagccaggtgtccctgttgcctctgccgtacagcgactcttacatgtgcagacttgtggctttctaaaggttatcctggctcgtctgtttgatgtttgcatacatgccatggtgacccctcggtgacctgggatgaaatgctcatttgctcagggtgactcttacggtgttcagtcaagagcactgccacccatcacagacacctgctcccatgggaggccaaacacatttgagagttactggttggagtccctgccagctctcttctcaggagccttagagatgaaaaacaggcaggcaaaaactgggaaactaaattttctgtgactttctcatttctttttcagagttctcaccttatggtttgattatggtcactggccagatgtcaatgaggccttagtggagggggtgaaagccatccagattgatacctggctacaggtgaggatacttggttacaggtgaaggtggctccaagtctctcttctgtgtgtctcctcttacaagcatgctgtgttcagtgtcacaaggcagtgtgtgttaatacagtgctaaggaagtagggctcggtcccagtgtcaagtgtccatattttctttattttcttttagaaactaaagggaagggaatgaaccatttcagagcatcaaccgaaacaagttaaaagaattgatctttgcctagaagaataactagttgtttcaagtctcatatgctacatactgtgtctttttgaataccaggttatacctcagctcattgcaagaattgatacgcccagacccttggtgggacgtctcatt

SEQ ID NO: 51562 - DNA, 1068 bp, Homo sapiens
aggttgcagtgagccaagatcacgccactgcactccatcctgggtgacaagagcgaaactctgtttcaaaaaaaaaaaaaatcagatttaagactggtcaatgtagttctcctagaaaaaaaaaaaactaaagggtggttcacacctgtaatcccagcactttgggaggccgtggtgggaggattgcttgagcccaggaatttgagaccaacctgggcaacatagcaagacctcatctctactaaaaattaaaattaaaattaactgggcatggtggtgtgtgcctgtagtttcagctactgggaggctgaggtaggaggatcacttgagcaaaagtgttcaagtctgcagggagctatcattgcaccactgcactccagcctgggtaacagagtgagagaccctgtctctaaaggaataaaaatttaagttaaaaaaattaaaattaaaggaacatttatcacttcccaagtgtgggatgctattgtagttcatttttcaaagttggtggtgagtaatggatccctgtgaagacagatgtctgagggagacaggtgtcttgttaagtgttggaacatctgtgtgcctgccctgtcctcatgcatggattagctgcttgatcaattgtttgtcatgtcattctggctctgggttaacccagtctcttcatgccaattaattccttatattgaaaagcatctgaggttggtcctggcccccaagctagggagtttcattttcttcaaggccatcatcactaacatgttttttgtttgtttgtttgtttttttgagacagggtttcgctcttgtcacccaaactggagtgcagtggtgtgatctcggctcactgcaacctctgcctccaggttcaagcaattctcctgcctcagcctcctgagtagctgggattacaggcagccaccaccacgcccagctaatttttgtatttttagtagagacggggtttcaccatattggccaggctggtctcgaactcctgacctcaggtgatccacccaccttggcctcccaaagtgctgagattacaggcgtgagccaccacacc

SEQ ID NO: 51563 - DNA, 1754 bp, Homo sapiens
taccattgatcaaaccaatgaatgtgatcacagttatatgtatttgtatctagaaagtgctgggacatagaaagggcacactttctacccctaagagaagatggactgtttggtacaaaaaagagcagatttgtaaatacacagactagaactttcacaagaccaatttgggtttttcagacctctgtctcctctcctgacatcagtttggattcaaaaggaataacatgcagggtataatgctgaaaccaggagggaaagttatcttgaagccaatgtagaattcttctgactttatgtacagacaagcccttgggaaatagatgtggctcctggtttgggggtttttttctttaaacaatctgcctggatgatgctgaggactaataaacagtaggccctggaggcaaagtcatcacctgctttggcttccccttcctccttcttaaaaggaagagggagtctcactagccttctctccccattgtgacccccacagtgaagtacctgagatgagagaggaataaaacccagccactggagcctctgctgtgggaagatctcataaaatagaagttgtgtttctgcagaaggcacacttaggagatctggggactgggtctagaaattgactaattttatacatgactgaatcagagtggctgtgaataccacccagagtgggatcagccagcctgtacccaggcacctggtctttgggatttactgcagtaccaatgacctaagtttccttcttcaaatatgcagcttggagattttatttgtttttttgttgttttgttttatttttcagtctctgtgagcctcccaggccagagcatttctgattcaaagcctgacctcctccaggcaaatgagaaaaacagaaggtgctggatctgagtatagtctggtttccctcctatgtatagcctccaagtctttgactgtcttgcctaaggcaggccgaagaagtcttttgggtaatatctcaagcaaggagtggcttctttcaacataagaccccagcccaacttctccatggaatagtctttcttagtagcccaaattctgtggaattaaaaatcaggaacctatttaaagtgctgggacttcaagcccagaactagagatgtcatatcttcatagttaaggagctacccaaggaaaactgactacttaataattgtgctactgagcaagacactcactgagccttactttcctccactgtaaacaagaatcatgctctgcctcgcctgaggcaaaggaaagtatttgtgggaaaagcagaccctgttatcctggaaggcatcaggctatgggtatatgtatcatgttttcctagacaagacacttcacagagtccagagacaggctggtccttctgtaaaatttcactgagccaaggccattgttcttgcccacaaacccacccatgcaatctagaaccagaatattgtgcctagctaaaatcctgtgggtctatgagaagccccttcttccaagtgacaggtccttcatttataagagggaaagaatcacttttcccttttttcatttcctggggatggagaaaacaaattttaaatagaaaatttccaattccttgaaaataagttgccttgtactatacagtagaaagatactggattctcttatgctggataaacgaaatattgggcttcaaatccaaacttaatacccagcctccccagctttggcagtttatattttgttcagctccttattaa

SEQ ID NO: 51564 - DNA, 1169 bp, Homo sapiens
ctgcagagctttttaaaatcctgatgcccaggctattccccaggccaattaaatttctggggagagactcaggatcagtatcttttcaggttcccccagatgattccaccagccaaagctaagaaccactgctctaactacacttggaggccacctgcaccagcttttcagatggggttgccttaggttctcattggccaactcctgctatttatagctacttaggtcagagtcatcctgtcgcctctattgagactttttttccactgcagtttccgcttgtagagaagaagctttcccaagtcctccatcagtgttttcattctcacattctgatcattttaacatgagaaactgtcactccaggtctgggagtcaggagtctaaatgttctgggaaggatggccagttatcccattccttgagtgggtaggataggaagttcatcagcaaaagaaaaaagagagaaagcctttaccactccagaaaccatttgtctccctacctatcataatccatccccgcaattataaaccatttcctctcaactagatccccacctaattgctaattccaaattctcgcttcagaccaatcgaagtttgtgcttccaggcgtctcagtaggctgcgacaaaaccttttgactccaaacacattcctgcctaggaagctcagggcacattcccctggacaggaaagagcaatgggcaaaggaacatctatgaatacagtcatttatggctctgaaatgagcacatacagttcttttacatgttttattagtaattatgaaatgcccagtgaatgttttgatggaaaattgtctcctgggcaccagaaagaattccacaaataagcatttcccacttgatttgtacacaccccaattctttgaaatgcctataataaagagtttctacagcagagatctgatgaaccttctgacagtctgacaagtgggacttgatccaaatgtagacttagaggagaggggaggcatggaatgagtcctgggaagagagatgcctgtctgactttactgggtccaggacactgccaccaccttaagccttcgtgactttcctatcttgaggcagcaagatgctttttggcttacaggaggccaaattatttcagcatctgggagaacctaactattggtgagaa

SEQ ID NO: 51565 - DNA, 1050 bp, Homo sapiens
aaccccagcatcccagctacttgggaggctgaggcaagagaatcacttgaacccgggaggtggagactgcagtgagccaagatcacaccactgcactccagcctgggtgacagagtgagactgtgtctcagaagaaaaaaaaaaggtagatccccagttatgtcctcttgagatgcaagaacccatgattcggttttacagcccacattcccatgcccttgccacctaagattttgtgtgttaccttagatagatgttaaagttttggatgccatacatttctgtcttcgatgagaaattggataatacctcctctcaagccattcagttctgggaaaatgcccttcttcagcgaatttctcttttcatccctggaatttaagtgagacagataacttctgtagctagttggggtgccctaaaataaccctaagctcccaagtccagagctcagtcccaagggttgtttctcttctagtgcattgacaaggccagggacctgctggatgctgaattaactgcgatggcaggagagagttacagtcgggcatatggggtaagtgtcaactattctgcacattgtcatttttgaggcttatttccatacttttttcagaatgggctattgagaacttacaggctgctggaaacatgcctgttttctctgatcggcagataccctgacaccagaaggaatgatttaaattaatcctgtcttttggattgttcgtgcagtaattagtttggaatgcgatttgcttccatcaggccatggtttcttgccacatgctgtccgagctggaggaggttatccagtacaaacttgtccccgagcgacgagagatcatccgccagatctggtgggagagactgcaggtgagcttggtagaaagccccagttcacccacctacccctaccccttccaggacctgggtgagtgcccccctccaccctggctcttactcaacttgcttttcctgcctcctccaccagtgtattgcttggcttgcatacaaagcagaatactcaaaggctcctcacctaaactt

SEQ ID NO: 51566 - DNA, 1050 bp, Homo sapiens
catctgggtttcatttcagactgaaaccattggtataatacttttaggagccagttctccctatagctttgagcccaaaatgaatgtccagatgcgtctcttcagattgctttctctgtaggcctgccaaagggaaagagcccagaattctttggcataggagagaagttatttaatatttatgaagggagccagatgttcaggacatttcatatcacagagttaggcatggttcctatccttgataaactcacccagaaaaattacgagcaccgggtcatagaaacaacaaatagcccattgattctctattatgtgacctagtagaatgtgcttttttattaaaggtgtccagttcctgtgtagtcctcacctaacccaaggggcaggagaggaagattggtagtttaaggagatttggattaatctgactatataattcattttcttcaggggtcaactccaccagcagtgctgtgaaaagtggaccctggttaatgatgagacccaagccaagatggcccggatggctgctgcagctgcatggggtttaggtaaagcttccctcacaggcaccctgtgaaggatggggtgagtgaggctaggggctcgcatcagaagagtaaggtgctggctctaggtggagatccaggtctatggaagggtaaaaatggtctgtatccacctacttctacaccttccatctgtcctttctacctgatgatttttattaacttgttagacatggggaaaattggatcttcgtggggaggccaaggaaaacggtgcacaaaatcaaaattgagatttagtgggtgagaaatacacacttagcacactcacacagagtactgatgccagatgcttttccccatacaccaagccattgtcagcagacaccagtggggtgtcaagtagttcatttctgaccctatctacttggaaatagcatcagatcccacaggttaagggctcgtcccaaaatatcgccccacttcagatgccaatcacaagttccaggttgtgatttgtgtttctcactgaccagct

SEQ ID NO: 51567 - DNA, 1041 bp, Homo sapiens
ggcctggtctttctggccccatcaggaaagcagctgccatccctgtcaagtagcccagtgtcagcactccagcagatcggagcgatggcacctttgaaacagctctggtgctctggtcgacgttttcttctatccctaaatgatttcccctgtcctcgtgtccgcacatcctggtgtgttctgatgacccatgtgtctgggaaggaaataatgggggaggagtatggcctgacgtctgctctcagataatcccaggatcattccatccatgtgccaaggaaccagtatttccaccttccccaagcagcactcctccagattgtctgaagttgtttttaatccaagcccagacgtaactgtgataggtgaagtgtcatgcgtacagcagcacattaggaaagagagtatgtggattaaacaatgtgatcccttcttctgtgtacctcacagcagtctttctttcccatgtaacaggagatccaggctacctggtatgagaaactgcacgagtgggaggatgcccttgtggcctatgacaagaaaatggacaccaacaaggacgacccagagctgatgctgggccgcatgcgctgcctcgaggccttgggggaatggtgagcttcctagaatgatggcatgtgtggctgcaagagacttcgtctctttgatctttggatttgaaaggaaggcttcccccacacggagttctcacttcagactcattttgttccacttgatacttctcaggaatcatctttcacttttggtgtttttctctctccattctatctcagctgctaagtaggaaggccttcacttaaactttataatgctctaggacaggacagccttgggggtgctcctgggatctacttctcctgtctactctcctgatctttactgacccagtgaagagctcatattcttacttggcaaccttgatttttaaaattagctcttgcagatgtttttaggaaagaagaacagtgactgccctcttcaggtgcttcacctatatcggatgcttactgtgtgtccagc

SEQ ID NO: 51568 - DNA, 1025 bp, Homo sapiens
tcagagctctttgtttctctctggatgtgaagaagcagaaagggggagaagaacctgcaggcatcacaagaaaaggagcagtgctcattgttgtagaataaaaagataatggccaatttgtcaagaagtgttgacaagtaagataaagttggaagtaattaactggctgacatgctgggagcggtgtgcctgccaatagctccctaaatcagccagagccttggaaatgtgacagccattcatcatttttacaacacgcctctgacaggctcctcagttgcaaacctggccagcaaaagtcgtgtgctttgacattctggggttgtgcacctctctctgccttattctgggttgtgctaaggtacctgggccctatatccaaccaggagatgcctggagacggtgagtcaaatgggccagcttgccagctcatcgctgggcagtattcctctccgaggctgggcactaggattcccagagctgactttgtaaacttctgcaggacagttcacttagcatagagagtgctgaatgggagccatcagcagcactcctggtggcctggtatctaacaagtgctgctgctaaccagccatgggatctatcagtgggaggaaacgggtatgcagccagtaaaagcaattatgaagactgaatggagtggaaaatacctgtgttagtgaaaaggcagcatacaaaattgtatctatactttcatcaccagtatgtataaaatatgcatttatgcagaatatgcgcaggtaaaagtatcttggaaaggtgattatattacaatcaacttccctcctccatttttttctttttaaaaagtggtacttccactcaccaatcttgaaaagatgagtttttttgcacacgcgcccccattcccccacgcacttcctaatctcaaaaactgttaacattctaccctctttattctaagggctcacactttctcacatacagatttagcgtgtcctctaggcattgtgacagacaaaccatttaaactgtgaccagac

SEQ ID NO: 51569 - DNA, 1126 bp, Homo sapiens
aaatattgtttgctgcctgtacctccacccctaccatggctgcaccaggctttagcccctcccagctcatctgggagggtcaggtgcctgttgggtgaagtcagcggcaacttaggccagaggaggggaggagggagatggggcgagtctttctttccttgcctgtacagtctctgggctaagacaagaggactgtgaatttgtgtgtttccagtttcgcctattagattatgcccctgccagccactggctcaactctatcagcaagcaggacagggtcagaagaatttccaaattccgttcaaaaggttatataaccatggggtgagcgtaaggtaggcgaaagagacgctactcacccagggaggcctgttaatgtaatccatgctgtttatatgaggatctggtatattttgacatcctgctgaatatgcttttatctaggctgattattcccatctctgatcattatttagtattttataaaatccttactcaacctggatctaacactatctcacatttgaaatcttccaacttagaaaagttctagaaatagaagaatagagtaaatctcttaggaagccaaaaaaagactttgtagccacagggtttggacagttgtctttttacatgctttctccttcaacaaagagagggccagtattagcatataacacttgatattttgcaaggaggtgtcagaagattacaacagagatgaaaactcagcagtgccaagcatgtctgggattggtcacccatgcttctgtcagtttctaggcaggacagagaacaggcccatccttagcccgtggttcaaaacttggaaaatatattaaaatatagagaaaagaatccctgtcacctaataaatccatatctagagtctcatttccctctttctttgctggtatggtttgcaatttgaaattattcctcctctatttgtatatgactttgtatctaaaaaacatgaatattgtaatttttcatgtactatatatgaaggacaatgctcttttgaaaagaaatgtgaaaaacatggagtttcagcaaacatccttaaaataagcttttcactaagaatctatacaaaggttcctctgtccttaaaacagtaact

SEQ ID NO: 51570 - DNA, 1036 bp, Homo sapiens
gcagatttgtagcagaaaaatatagtcagaggcctggaaaagtgctctagaaggttatttagctttgtaagcaaatataattgaaagtaaatcctcagaattccctggagattgatcttgtcctttgtttaaaacgctgttccaggccgggcggggtagttcacacctgtaatcccagcactctgggaggccaaggtgggtggatcacttgatgtcaggagttcgagaccagcctggccaacatggtgaaacacccatctctactaaaaatacaaaaattagctgggtgtggtggcgcacatctgtattcccagctccttgagaggctaaggcaggagaattgcttgaacctgggaggtggaggttgcaatgagccaagattgcgtcactgtactctagcctggatgacagcgagattctgtctcaataaaaaagtgaatgaatgagtgaatgaatgaatgctgttactggggaaagccagtgtgctcggctctttgggtgtcctcagctaagtcagctcagcttgcatttctgcctcccttctgctggtctcctgtgtcttcccatcacctttctttttttgcttccaattgcagtttttacttctgattttgtaaagctgcttttcctaagcccggttgtggtggtatactgtcgtctttactgaaggaagttttaagaaacagccttagacaaagttgctcatagcactacccctagttctgtgggtgagcctcatggaaattcttctcaggggtcttttcccactgttggttttatgtccctgagccactacttggatctggccttggagacatcgctttgcagtaagggattgaattccttcctcacagtggctgctagagagcttgaagctaaattcctggtctacctccaacaaattccagacatcttacctgtttttactactaaccctcccccaacccccacaggctttgttttatttttcctactcttattttcccttcaccaagttgtctgctttttcagagcttattttagtatatacatttga

SEQ ID NO: 51571 - DNA, 1064 bp, Homo sapiens
tcagttaaagaataccaagaatcttatcagttgcaggaaagtgctgtccttacaagaggtaagagttaatgcttcaggcacatcatcgcagatgtttggaaaggagaagtaggtagatagtagcataaaatagctcgcccaaaatgaggaaaaaatgagcttgaaaatctgaaacaaccttcaaatctcaacacattagagtcacgtgaagtcctttataatgtatgttaatctggatgaacaatcactgagactcggtttagaggagacatgagaaatactttcacattatggtgcttcccagctctctcacatgtcagacttagacttcatatggagaaaagtttgagaatttacattccagagaaatcttggattcataaagcctagaaggaatttctttatgactgagatggtctcttgggtgaattttacttatataaaagaaaggtttctagtagagtctaatctgcattcattttctcataacttctttctctaggcattaattttgaaactgaaagatccagaccctgatccaaacccaggtgtgatcaataatgtcctggcaacaataggagaattggcacaggtaaaggggcagctactttttccatagcggagatagggtggaaaagaaactaacctctaaggaagtcaaaatactatttttttttttaaatgaaaggtctcacatatttattgcggaacccagccaacaatgcattcataacagattcagagagaaataatatattctcaataaaacatgtccaactctccagatagtggtgacattttcagcttgatatggtaatatcattgtgaccttcagacagcataaatgtgtgtgccatctcatgtgcaattccttatagaccctgcttggttcttctccagtgtctttttttggagttgtacctggttttattaccagttttcatccgaatccactggggaatgggacgattttacttttgtttcttggccaggaattgcttaattctgaaagtcttgtgagaagaatggcaagaatcagagtcaggcacacaccatgatggtgg

SEQ ID NO: 51572 - DNA, 1049 bp, Homo sapiens
acagcactttgggaggctgagatgggtggatcacttgaggtcaggagtttgagaccagcctggttaacatggtgaagccctgtctctactaaaaatacaaaaattagccaggcgtggtagtgtgtgcctgtaatctcagctactcagggggctgaggcaggagaatcacttgaacccaggaggtggaggttgtggagagccgagattgcgccactgcactccagcctgggcaatagagcaagactccatctcaaaaaaaaaaaattgaagctgaattaaataaaagagattgatcagttagttttgttgatgactggcactaggcactgagcaggcgtggtagcacctcagaacccccagtgtagatgggatgggcctgtattctttctgggtttgtactctgtctctaatgaaggcaccctgtctctctacatagcacacatttgaagaagcagagaagggatttgatgagaccttggccaaagagaagggcatgaatcgggatgatcggatccatggagccttgttgatccttaacgagctggtccgaatcagcagcatggagggagaggtgagaagccacggcagaggggagtccaggctccccgtgtaccattctgtgagcgaggcaaggcgagatccatgtcctcatggagctgacattttgtggcaggaaacataataaataagtaaataagataatttcagatagcagcaagttctatgaagaaagtcaaaccagaatagaatagagagtgatggggagggggtgagtggagggtcaaggaaggccctccctgaggtggtgttatttgacgggggtccacatgacacgaaggagctaccttgcagcaggccgggggactgtgttccaggctgaggctttgaggtggaagagtgtgagacattgatgaaacagaagaaagggaagtatggctggtgtaccgggagcaagggagagggaaggaggggccaaattaataggcccacggttcacagtaaacacgagctttcacaggggtaaacattggaagtatgcacacaggcga

SEQ ID NO: 51573 - DNA, 1021 bp, Homo sapiens
ctcctgggtgacacatgccaccacgcccagctaatttttgtatttttcatagagatgggttttcaccatgttgggcaggctggtctcaaattcctgacctcaggtggtcctccaggctcagcctcccaaactgctcaaggtatataacccaaggattcaaacccaagtaggctaggccgatagcccacaatttaacctccctactacactgcctcttttaaacatcagtcattgtttaatgaatctaggctttctaaatgttcctcaatcagatctctcaacctttttagaatcccctgcctgacaagggctagggggagatctgtgttgggtgaccagggccataagtaaatttatcatcatactttcttatccagaatattaaaggaaacttctctctaaagaacctcagggcaagatgcttggaaccggacctgccgccgccaccaccgctgccaccacatctagcaatgtgagcgtcctgcagcagtttgccagtggcctaaagagccggaatgaggaaaccagggccaaagccgccaaggagctccagcactatgtcaccatggaactccgagaggtgcttctgggatctggggccagtcattgtgggatgtgtgggctaaatgtaccatcactggtttacatttttttttgtacagctaagtgaggatttggaaaacagagattattttataaaggcacccaacctgtcacatccataaaacatgcaggttcttttgcagcagttgcacatttttgtagcatttttcttgtttgtggtcacattttaggggccagaatagacttagctgtttcttttaactttttattttttccttaccacataccacaccctcaaatgctttctgtctgataacagtgattgggatgggtttggagagttgagagctaggggctttctaaatagagaccagacttgaggtcagagacagtatcttgtttctccttttatccctggtactagaaagaacctaggacaggacattttctgccacag

SEQ ID NO: 51574 - DNA, 1037 bp, Homo sapiens
ttgttaggagatttaatagacattaagatgtccaaagttggccaggcgcagtggctcatgcctgtaatcccagcactttggtaggccaaggtgggtggatcacctgaggtcaggagtttgagaccagtctggacaacatggtgaaacaccgtctctgctaaaaatacaaaattagccaggcatggtggcagacgcctgtaatcccagctacttgggaggctgagaatcacttgaacccgggaggcagaggctgcagtgagccgagatcatgccactgcactccagcctgggagacggagtgagactctgtctcaaaacaaacaaaaaacaaaacaaaaaaccacgaagtcaattgcttgcttttcccccaaaacttgttctatccccagccttgcccttctcacatgatgacatcactccagatggtatcttccagttctcaggtcaaaacctttgagttatgcttatgcagctattgataggcaatggtatgattaactggggccttaaagatgatgaagatatgacatttacaaggtggacaggcatgattattgggccaccaaggacaaattatgaaaagagaatataggccgggcatggcagttcacacctataatcccagaactttgggaggccaaggagggcagatcacgaggtcaggagtttgagactagtctgcccaacatagtgaaacctcatctctactaaaaatacaaaaaattagctgggtgtggtggtgtgcacctgtaatcccagctactcgggaagctgaggcaggagaatcacatgaacctaggaagcagaggttgcagtgagccgagatcacgccactgcgctcccgtgtgggccacagcgcgagcctctgtctcaaaaataaaaaaaaagaatatatagcctgaaaatagaaagtggacccaaatacccagaagctcccccatcagttagatttgtaacaagaattaatatgaatggaataaataactccagtgggatggtggatgaccgcagcacaccagtgttagcaaaatgacaaa

SEQ ID NO: 51575 - DNA, 1068 bp, Homo sapiens
atccttcctgggctctcccattgaactaagagtatagtgggtgcctagtgtgctatgttgcagagctctgttgggggacagtaggaagggaaacttgggtatgaacctgggaagagggacttgaggcctcactgggcattctctctgcacctgtggcattggagaagaaatcagaatttgctctgtggggttaagggatgaaatgagtgcccacctgcacagtctaaggatttaccattttcagccggaagtggcctgcctcttcactggtgaacagtccctaaatttccagccttggtctcacaccaactctctggattttctggccgcaggaattggattcaagtacgtggctctgggagacctcatcatcctcatcacttttggcccgctggctgtgatgttcgcctacgccatccaggtggggtccctggccatcttcccactggtctatgccatccccctcgccctcagcaccgaggccattctccattccaacaacaccagggacatggagtccgaccgggaggctggtatcgtcacgctggccatcctcatcggccccacgttctcctacattctctacaacacactgctcttcctgccctacctggtcttcagcatcctggccacacactgcaccatcagcctggcactccccctgcttaccattcccatggccttctcccttgagagacagtttcgaagccaggccttcaacaaactgccccagaggactgccaagctcaacctcctgctgggacttttctatgtctttggcatcattctggcaccagcaggcagtctgcccaaaatttaaggggacaagtagctccccccacgacatgtctccctttcttagaatatattaaagtcagagtctctgaggaaggaatgtgatttggcagtcagggtactaagcatgggtgggaactcctgccttataaaaattgtttttgtgttcttaaagataatatgttgtttttctgttttttgttttttccattttatggggaatttaaaaaccattcttgtatcagaaggtgaattaggcgcatggtctttgtt

SEQ ID NO: 51576 - DNA, 1045 bp, Homo sapiens
gggcacctggtctttggtgatgagtttgggtagggtttgaccagattcgacaggcctttagaaaaggcagcagggactgggcatggtggctcacgcttgtaatcacagtaatttgtgaggccaaggtgagaggattgcttgagcccaggagtttgagaccagcctaagtaacgtagtaagaccccatctctacaaaaaaaattttaaaaagttagctgggcgtggtggtgcatgcctgtagtctcagctactcaggaggctgaggtggaaggatcgcttgaacctagcaggtcgaggctgcagtgaggtatgatcacgccactgcacatccgcctgggcgacagagcgagacactgtctcaaaaaaaaaaacaaaacaaaaaacgttgagggctgcatgtagctacagtggatttgccaagagccagtcagcagtcaggccagattaacctcgtttcatttttctttttcttgatagggtcactgtgctgctagatggagaacatgaggtagattgagtacatgtgggtttcagctaggcattggacaatatatcctatgaacaaggcagagagacgtgggatggataacagtggagttagataaattcctgagagactgagcaggcggtgggagagagctaactgatcagcatgtcagtggcagctgggaaggagcccttagtagcagttggagccctgtcctctgccctttgctccgctggattcaacacctgttattaatgacgcggatgaggcagccaaaatgaaaggtttcatgaaccttggaggaagagcttacaaaatgacaattaggagcctcataaatcaaaaggctgctttgatgggtcaaaagaaaaatgtagtgtgaataaatacaaagcaatacactaaggtcccaaaatcaacagcataaacatcagagagggggagagccatgatgtgacagccatggagataggggggtatgagttttctcagtgactggaatctgacatcacttgtctttatttatttatttattattttttttgagactatgtctca

SEQ ID NO: 51577 - DNA, 1140 bp, Homo sapiens
atcctatgttgtcttactaacgcttccgttactcctgtattaaaaccaccaggccaggtgtggtggcttacgcctgtaatcccagcactttgggagaccgagatgggtggatcacttgaggtcaggaattcaagaccagcctggccaacatggtgaaaccctgtctttacaaagaaatacaaaaattagcacctgtaatcccagctacttgggaggctgaggtggcagaatctcttgaacccaggaagcggaggttgcagtgagccgagatcacgccactgcactccagcctggacaacagagcaagactgtgtctcctaaataaacaaataaataaaataaccaacacctgagcctttgacctgggccaaagcttagtctgagtcagtaatgagctccaacttccatgcagattaatatgatctgagctagaatttaatatgatctgagctagaattaacaggagaattagcgtccagaataaggaaggcagaaattctgcccatccctgtcattcttctcatgctgggctggggccagtcctgggcactttcttgccttctttcttttctctagatattaatagaatcagtgtggtgagagatcaagaacatgctgtggatataatatacttggatttcagcaaggcatttgacaacatgctatgaaatatggaatggggccaatcacggtggctcatgcctgttatcccagcactttgggaggtcaaggtgggtggatcacttgagttcaggagttctaggccagcctggccaatatggcaaaaccctgtctctacaaaaatacaaaaattagctgggcgtggtggtgcacaactgtaatcccagcgactcgggaggctgaggcaggagaactacctgaacccgggaggcagagattgcagtcagctaagatcgtgccactgcactccagcctgggtgacagagcgagacttcatctcaaaaaaaaaaaaaaaaaaagaaatatggaatggatgaaaagacaattacaggagcttgctttctatatgcatgtgtgtgcacgcgtgtgtgtttgcattggtaacggctgcagtagagatttccatttctcagtgtaagaaccacactttgaagatgttatcaacaaagtggatcttgt

SEQ ID NO: 51578 - DNA, 1048 bp, Homo sapiens
ttttttctttttttttttgagacggagtttcgctcttgtcgcccaggctggagtgcaatggtgcaatctcagctcgctgcaacctctgcctccagggttcaagcgattctcctgcctcagcctcctgagtagctgggattaacaggtgtgtgccaccatgtccagctaatttttgtgtttttagtatagatggggtttcaccatgttggccaggctggttttgaactcctgacctcaggtgatccacctgcctcggcctcccaaagtactgggattacaggcttgagccaccacacctggccagatcaggaaggtttcttagccattagaggaatcagcgagggggatgttcagaatgtctcagttgggggtgagttccttgtgactagaggcattcaagcgaaaagatgattcctcgtcaggaacatgggtgtgaagagtcgcatcagagaggcgttggatgagaagacctctaagggtcttccaatcctgtgattcagttgttctgttattacgggatagtctttcagacctgccccacgggttgggaggacagagtacaagagccgtgttgacatttcttcttgatgtcagactgttgactgtctggccatcttaacaggaacagctgtgattgatattctttttttaaaagattttatgtatacacacacacacacacacacacacacacacacacacacacacactcacagagttgatttcacctcgaaagcccttgaagtgagagggatgacagctcctctctgagccctgcggaccactctgctgctaatggactgtcagcctctttcattatgggctccagactgtgcaggctggtgtaaaaggaatgcctctggcaagaacctggcacttgggttccagccagttgacatttgtgacctgcccttcttcaaactgggacagccctcccactgtgagtgactaagctaggatggcaaatggtggtataaaccaagttgggttcctgcctgaggagggggcaaaggctgagtctgggctcatcaggaggcttgcaaacggc

SEQ ID NO: 51579 - DNA, 1046 bp, Homo sapiens
aggaggcagagggacctggggccgggagggcacagagcggcctgagtcacaatctccatcctggccaagagccctgaggaaaccgggtggcacggtggctgggacattgatcagaggctggagtttgggtcctctcctgtcgggggcatctggccacgttctctgatctggactttggccacctaaaaagtaacagtcatgaccatgatggcagctgccagttaccagcccctcctaggtgcctaggctccgggctgagggcctgacctgtgttctcttcaactccaaacaaggccggtagggtaggtcctgttatgaccccattttacagactgggagtcggagtctcagagaggtcaagggctcaccccagcagcacagcttgctgcgaccgcccacacagcagcgcactgaggccctgtcctcccttgcaggggtgcagagcgccctgtgcggcctggtgctatccctgctcatctgcgtggccgcggtggccgtgttcaccacccacatcctgctcctgctgcccgtgctcctcagcatcttgggtacgtgggcgaggggctggcaggcaccctgctggtagggacgggaacagacagtctccccggtggccccaggtagcctccaggcctctgaacctttcactgtcacatctcagcggaggctcataggactgtctctcctgcatgtctgtgctcctgagcagagccggggtacccaggtagtagccctcagctcagtgatgtgttactgcacctgtcccctccctcaggggtcccctcggtgtgccttgtttctcctgtcacctgagggtgggggctggactccagacctccctgttcctctgaggcctccagggcgggggatccgagctgccccccctgctgtctccttgcaggcatcgtgtgcctggtggtgaccatcatgtactggagcggctgggagatgggggctgtggaagccatctccctgtccatcctcgttggctcctccgtggattactgcgtccacctggtcgagggctacctgctggctggagagaa

SEQ ID NO: 51580 - DNA, 1050 bp, Homo sapiens
tgactcattctccttccagccacgacccagaggccacaagtctgctccagcccctggtggcttggtgaggacatgttcacatactcagtgccaaaaccggctctgggcctagtaacgatttttttctttagtttggaattgcgttggtgtgaaaacattcacaaatgtgtaaagatcaactcagttacacaggacctactgtgcagaccctcgcgtcctgttgccatagcaacacctacctggttcctaccctcccaaccctgggaggccacttgcagctctcatcccagtaacagagcaggaacctggcgtggggtgggggtgcgtgattccccaggtgctggccagaggggtcccgcaggcaggctgggctcccagctctcctcttgcccccaggacgcccgaacgcagcgccagtggcgtacgctggaggccgtgcggcacgtgggcgtggccatcgtctccagtgccctcaccacggtcatcgccacagtgcccctcttcttctgcatcatcgccccatttgccaagttcggcaagattgtggcactcaacacgggcgtgtccatcctctacacgctgaccgtcagcaccgccctgctgggcatcatggcgcccagctctttcactcggacccggacttccttcctcaaggccctgggtgccgtgctgctggcaggggccctggggctgggtgcctgcctcgtgctcctgcagagcggctataagattcccctgcccgcaggggcctccctatagcccgggacgggctctggacacttgcacctttggtcccatgggtgggggacaggagctgcttcccagctcgacttcagctagctgtgtccccaggcctgggcccagggcgccctgcgggccagcgtggaggctgacacccacacagatggtgtggaccatgctgccttgtggagctgggagttggagacagccgccaccccacaggccgggctactggcagccacactcggctttttgcccagtggcagaagagaccagccctcctcccatgcccggtcaccatgggggtca

SEQ ID NO: 51581 - DNA, 1072 bp, Homo sapiens
gcatgttcccctgggcccctcagaaagtcgagcttggaggccagcctggatctgtctctcccttcccctcctgggaccattctacctgtgttctttgaccctcggagcagggacaggcaagacaactggcaagcttgcagctgccctgatggtgcaggtgcagggaggtgaccatgtaactctgaccaatctgggaagtggagggtgggctcatgggccgtgctctgcccctgtctgctgctcccagtctctcgctctgcctgcctgctcagaagaggtggctttggcccagaggctcaggccgggactgagatggacagacccagggtggggtggggtccaggtcgggtgtggactgtcctcactgtcagtggagccccagaagctagatgggtaccaggtggggttaggttcccagaggactgagggaatcctgtacaggatgtcccagggtagatggggagcaggattgggacctgctctgacagctggacacatgagccctggatgagtatggtagggggtttgaagaatcccctgtccacctcccaaatccaggcccggccccctctggcttggagagcattccaagcccccaccccacccctagaactgccattcccaagacctctgtctcccagccaaccacccttggaacttgcctcttgtcctgctggaaagatagcagtgttctcctgacttcgccctactgcatgcagccaaataaaaggtgtgcccagtctaacctgtgccctgtggtttctggaaggaaaggcagactttaggtggtcctgcctggacctgcagatggtacaatggcatggcttctgtctaaggtacagaggggttggcatttcaggaaccaggccatcacagaaacaggttcatgggcagacccctcagtgagctgcaggtatctcacctggcagccgtccagtactgctggcttcctctggaggcccagccacaggctggggttggggtgtgtggacatctctgggcagctcttgagtccaccttgtgccagatcagcagtgccacccaggctctgcctcctggtgttactctttgc

SEQ ID NO: 51582 - DNA, 1061 bp, Homo sapiens
catcacgtttctagagcctgcgcccagacccagacccatctcatctcaccttgatgacctggatcttctccatgttgcgagtggcggcttctctcgtgtgcaccaggactgtgaaggtacagcctggagaggcaagaggttggtggaggctcccccaccgccctggtgccagccactgggcccagcctcttcccacttcccttgctggctcagcagcacccccagagcagatggcaaagcaagtgctaagaaaagccccagtcaatagggagatggaagccaggtagaatcaatcagggaagcttcccagaggaggtggactctcagggttaggaagagatgagtctcagaacagccaaacatggacctgggaacacagaccaacccgagataaccatggaaatgccaagggaagagagggtggggagtggacacacctggggggttgtggtccaggacggcatcgcacacgctgatcttcaggatgaaggcccggagcagctgctccacatgagacaacagcgagtctgagctgggagtgagaggaggtcttcccatcacactggcgccctcccctccaccacaggcatcaagcctggatgcagacctggggtacaagaccccctccagtgcctgtgagagtgctgcatgcctaggacccagctccctatccggtccacacaattaaaccagcaagggagtttaaaagaaatgcccagccccaccccagataaagtcagaattcggcggggggtaggggacaggggaggtaggggcagcctgaggaggcctccctaggtggttttaatgtgcagccaggacccagaaccaggacaccaagccaggaggggaaagggcttgcctaaggccacacaggccgtggggacaggttggtgccagattccagtgccctgacctcaccattggaagcatgcagttgaccaactaacgcatgtgccagaggtcaacttcgagttgactggacacttgcctggggagtcagaaaactgcttctgtgtcctgggctctgcccccacccaggtgaccctgggtagctcatg

SEQ ID NO: 51583 - DNA, 1071 bp, Homo sapiens
ctggtttaacaacagtcccaataacgttttctttaacaacagcagttagctcatttaatcctcataaggatcatatgaggtaggtagcctaaatagcccatttacacagggaagtgggaaggagagagggtgcccccaaggatgagacacaagctgttgccacatcagcactttgcgcctggacggtcccccagttgtcctggctgcaggcagtccgaacagtccgcttcctggaatattagccaggcaggatacgccctgggcgacagaaactccaactttcgccagcggcccccaagtactgcctgggcggtggcgggagtctggagcttggctgaaggcgcgagctgccgacgccgtctcctagcaaccaagcggcggtcacgtgacccgctccagcccgtttcacgtggtcttgagctgcgctggggttggagtggccgcaacgggcggggcggggcggggccgggcaagtttgttccccgagttcggagcctaggagccccccgcggctgcggcgcaggtgccctcggcctgagtcgggatggagctgcctgctgtgaacctgaaggtggcgacgggctggggggagggtcccctttgcgggaggaagtgggacatttgcattttcccggaaggtgggaggaaggaccggagttttggggaaagagggatggtagggaggaagggaaggtacagaccccacgcaagaaggagatgggcaggcaggccacagcagggagagtgatccaggcacaggccagcagggcgacactgaggggccgtgggaggtggcagcggagggcaagggccgccccctcccggactcagaccctcccagcgggcagcgccggtcccagcattgctgttgcctgcacgcccagaattcccctggaggaggaggaaggtgcgcgggaggggcttgtaggcggctcacctcccccgcgcggggtcagggactgggcttgccccccgggtcccagcaccgtttcaggagcctccttgtttgctaagtcgggttaaggaaatcagatgttcccaagcagttggttttataaagtttacacatcc

SEQ ID NO: 51584 - DNA, 2017 bp, Homo sapiens
tcccttcttaatcatacttgcttcagcaaaccttcctgaagcttccagtcaaaggtggtggggagacatggctggagcaagggaatgggcttggatggaacgttcagctgggaagaaatttacgtgacagcagccgaggcttgttggtatcaatatgcactctattccaggcaatgtggggttaacaccaactgccttttctctgatgagggatttgcttaaaataattgctgacagaggatcaggtgagggcagtgggagggacagagctctaatttatgggcttctgtggtgtgccaggttatttaatcaaggcagccttatgagaaagctgatatggtcatctttttacagatgagcaaacttcagcttagactgggtaaattgccaaggtcccacggggagtaagtggcaatatcaggatttgaacccatagggatcagactccagggccaggtcctttctggggtaccagcttagggctgactttaacgttggctgtttctgtcctttgggagggcttagtctctttggggctttttttgagcaactttttgggcctgacaggctaagagcatccacaggtatgagctatgctggctttcggtacccaggatgaaaaggctggtcctccccttgacttggcaaacgagaccccagtctccaagggtgttagccgctaccagtcagagacaacaaagtgctggaaggccctgaggggtcagggttgtcaggtcgtgtacaggagatccaggtgaatttgaatttcagatcaacaacgaacagttttttagtatgagtaagtctcaggcaatatgtgggacatattaacaaattattcatgatctgatattggaaattaactgggtgttctgtatttttgtttgctggatctggccaccctgtggagggcagctgttgactccttgcttataggcacttaggggatgttctgagttcagagcccttcaggaggtggggaactgctccctgtggcctgcactccctccccactccctcgttttgtatattccttgggcaagggctgagtgcctgcttctgcccagctcagccagagtgggcagtggtgccaggtgagaagaaacaactgccccaggccctttgcacaaagggcagctcctgaccaagccctgtccatgtctcttgaagccaggtcctgagctgcaagaatgacattgtgatgagcttagaaaggactggactagggtacagaggtcttgtgggaagaagaccttgggaggaggatctggtggtctaggaggtagtcgtgtagcatttgggttaaaaactcagtaatgaggactgctgggatggagggctgaattcctcacaggcactgtgtggagcgcttcccacacctctccacctccctgtaccactggatccacacaacaacactgaatcaggcagtattgcccttctttgcagaagagccaacagctgttctgagaggtcaggtgacttgcctaaggtcactaggttctaaagtcatggagccaggatcagatccacctgtttgcctccagtacccacgaagttaaccgctgcacaactctgcctcccatccttggcagccctgactggtgtccctgggccccggccaccctgggggatctcactagcacgtgtaacaggccaccaagtgtttgcacaggactggtaggagtttattccatttctgggaagtcctaccccgccatgggtcctctagtggcaaacaaagggtttaagtcttggtctgcatgccctgctggtttctcttcagcctttccttctccaggttagacttcctcatttccatctgccctctacggctcttcgagatcctgacggtgtagcacagtggacagagcacaggctttgggggcaggcaggtctgcattcaaggtcttgagtaggtttctgtgtgaccttgagtaggtttctgaactctctcagtatctatttcttcattgtaaaaagaagttaaatacagtccctacctcctaggatgatg

SEQ ID NO: 51585 - DNA, 2727 bp, Homo sapiens
tgaggacaaccagaggttactctcgtggccatcttgatttgggtgggttttagccggcttctttactgtaacccgttttgtcagcaaggtctttatgacctgtaccttgtgctgacctcctgtctcatcctgtgacttagaatgccttaaccatctgggaatgcagcccactaggtttcagccttattttacccagctcctattcaagatggaattgctctggttcatacgcctctgacgcttggaaggggtgtgggtgtcagctgccccatgggaggggtgaaggcatgaagcggcccctccctggcctggcctgctttcttcctcctccttcactcctgggccacctgcagttgctggtgtgccttttcaacagacattactgaggccctcagaggtgccaggcgcaggggcgtcctgtgttttctgcacccgacgctttcctgcccctgtggtggtcatgttcacagacctcttctctcccccttgttgtgccacaggtgattctcctaggtcactggctgctgacaacctggtaagtgactctgtgggtatcttgtgtgtctcctgcggtctcagggtctgtgtcagccgggtcaggtcctggttctgccgtgttttaaccaggtcactttgggccagacagctctgcctctccgggtcttgatttccgtctgtacaataggcataaggattgcacaccctgcaggagctgggagggagacgtggaagtgctcatcagagctccccagggcctgccccacagtgaggcctcagcactgcagcttgattttcacctttaccatctcttttaatctgttgagcttctggagacatttctctgccaaaccaagactggaaaccattgagctcacctgtgcactttgcaaacttcgaagtgcagcgcacagggcaacagctgtgagtaatgtgaactgtaaccatcatgattcacgaccttgagaagcagggccaaaatacagatttcttagtcacacttccccaagattctgagttggtgattctgggctgggacccaggcacctgctttcttaaaagcaaaagataagatggtttattcaaagacctattgaaccgaatggcactccacacctgccttgcacatgtcttctgcatgttacactttagtgaatgtcctataaatctaggaagcgcccgctgcatgcaggggaaggcaaggcccagtgggtttggtaataaatgaggtagactcagtccctgtccccctgagtcttccttgcagcacagcagggtgagcaagagcatggcctctccagccagactccaaatcccagccccactgctcagcaactgtgtgaccttgggcgagttacttaacctcattgtgtctcagtttcctcatctctaaagtgagggtaacaataatacttccttcctatggttattaacataaatgtacatgaatgagttaatttaaaacagaaccatgctaggtactagcaagtgatcggtgttcactatgattttgattggattgacaagtaagtcaacaatgtcagtatcagtaccctaaaaatagaatagggcgggccttgtgttaggaaagtgacgaacttgtacttagcaccggtgggcaagggaaggagtctcagggtgaacattcgagtctcagggtgaatgacaaaaggagggccaggtgtcagggtagagggcgcccgccgcacagggcagtggctgggaggtcagtagggcgaggctgtgtccgggatcccacaggccccttaggccctggtgaagagtctgcattttattccaaatgggacagaaaactgttggaggatttttagcagaggagtgacagcatctgactacgttaccggttgctgtttagagaacagagtggcagtcaggacgctggcacagggtggctgcggctgtcatctgccaggagagggaggtgctttggatctacagggacacagccagatccagggtctgggtgggaggcggagcccatgggatttgctggcacacagccgggtggcctcgaagactatggcatgttctgggaggaggccctgagacgccggagcaggagggaggtgacctgcggggtggtggcctcctgacgggactgagctacctcttcctacaggggctgcattgtattctcaggctcctatgcctgggccaacttcaccatcctggccttgggcgtgtgggctgtggctcagcgggactccatcgacgccataagcatggtgagccagggtgggggagaggcggcaaggcggggagccgcagcacagggcaagacatagcctggctctgctaccccgtcccatcccaatcttccccctcttccttgggccaccacttcccattgtctaaagcctgttcatcagcctcctgggctccggcccatgcctgtgttcaggagcccagcctgctgctcttcttgtctggcttagagaaccccaagtctgccattatctccctgaggaaagccatggggtgggtcccaccagtgcctcggattagccacttcgcaagagcagtggaacatcccctgtaacctccctctgcggctctcttttaggggaggggatatggctgggagacccggccaagagggcatttcactactttaggaagtagaggtgaccctgccccaccgaaacctcccacagggggagcttctcagcacccacggagccccgtggggcagtgagcactcccgcacgg

SEQ ID NO: 51586 - DNA, 1036 bp, Homo sapiens
gagccacggagcgtggtgggggtgttgtgctcatcagtgtggtgtgtcttgcagtttctgggtggcttgctggccaccatcttcctggacatcgtgcacatcagcatcttctacccgcgggtcagcctcacggacacgggccgctttggcgtgggcatggccatcctcagcttgctgctcaagccgctctcctgctgcttcgtctaccacatgtaccgggagcgcgggggtgagctcctggtccacactggtgaggccaccacctccagccagctcctcaccgctcccttctctcccttgcctggcctccagcctctccctcagtgagccagccttgccccatggggccagggctcaaggtgcagggagagcgtggcatgggcgctctgtactaggctggacaggtccaagctcctagtctctgctgcaggagcccaggggtcccctggttgtcctggtctgccgtgaccttcttctgctgtgaagctgaggctgggcccttctctcagcccagaacacaggcacagctgggggtaccatttagttcccaggggcagccctgggctgtctccatcctgagggccacgggcacctacaggtctcctctctgttctcaccggggcccatcactggaaccccatttcctgccacatggggtcttccctctcctgctgcagagactgctaggtggccagggcagagcccgtgccagtgtaggctgtgggagcctcagtgaagacagccctgaacagggggcactttccctgcccaccggcccctccccactcacccagccttacacctgccctctcccacgccctctctgaactcctgtactccttctcctggtggccgagccatttgcctgctctctgacacctctctctctcttcctttctctctctctttgagaggagtggagggaggtggtagggtgtggccttctgcctttcactcctgagatgagatgccccacgtggcctgtgactgccaccagctggttgagggtgggaatggcctggggctgcccacagtg

SEQ ID NO: 51587 - DNA, 1621 bp, Homo sapiens
gcccccaggtgaggggtgccagaatgtttctcccattggacagatgaggaaactgaggcccacatcctttgggacttgttcagggtcccgggatgaatgtacagagtaggggatgggagtgaggcatgtggcgtactcggagccctacggccctgccttggacccagccccagcctccgaggccatctggatatggtaatgtggtgtccttgtacctgggaggggagctggagaggagtgcgtgggcccggggctgatgtccctctgcccaggttcctaagcacgtgctgcctggggaagcccatggcacaggggccaggagcctggctttggactcggctgcctaggcgtgggtcccagcatcatcagctttgagctgtgtgatctcgggcaagtcacttcatccctttgacccacagtctcctcatctgtaaagtggggacaataaaaatacccgtcgcacagggatacggcaggattgaatgaataatacacgctaaaggtttagggcctggggctgctgcctctgtctctgtgcatggtgtcaggatgcccagcccgagggtggcgggggtggatcttgggttggactcagctgaacatcccgagttctcacccttcatttttctttcccaccatgtcccctgtcacctaggtttccttgggtcttctcaggaccgtagtgcctaccagacgattgactcagcagaggcgcccgcagatccctttgcagtcccagagggcaggagtcaagatgcccgagggtactgaagccagccacgctgcgcccggccctgccccgggccttcctcgtgcctgggaggtcgttctagggatgctcctgacctccgtctcttggacctaagatggaatgtgtccccagctcagggattgcctgaaccaagaggccaggagcccccatgggccgcccagtaccatgcacactcctgtcccgaactccctgaggcctcccctcccttcagggcacccactggttcccaggctggaaccagggtctctctttacctcctaccccatggtggcaccacagaggccctcagccgagtcctgcctgagtgttgcaagctcaggcctttaaggactgctgatgccccctcaggcctcccccaagtttgctgggctttggtggaagccctgagagcttcaggtcctgctcagcccgaggagcagtctggcatgggagtgaggccccgtccttctcactgcctggtcacatggtgcctagggatgcagggctggaggccagaggtgtcagcaacactgtgtcccaccacaacctccagcctcccttttcagagcacagcattaaagtttggggaattctgtagatgggctgtgttttgaaccaccttcaatctcctggctgggctggggcctggccttgttcctgggaagatgtctcctgccagttcccaggtggagcctgtgctgtgctgccccattctgtcatggcaggaggaaacaggcatgtgcgttggctgagctgggcttgagcctggctctggcctagcagaggccacaggagagagagacactggtgggtgtggtgcgtgggcatccgtttctctgaaccagatgacccaggcactctttggaatcc

SEQ ID NO: 51588 - DNA, 1026 bp, Homo sapiens
catgcgccaccacgcccagctaattttgtatttttagtagagatggggtttctccatgttggtcaggatggtcttgatctcctgaccttgtgatccacctgcctcggcctcccaaagtgctgggattacaggcgtgagccactgcgcctggcgttttgttttgttttgttttgttttgagacagagtttcgctcttgttgcccaggctggcgtgcaatggtgcaatcttggctcactgcagctgggttcaagcgattctcctgcctcagccttccaaatagctgggataacaggtgcctaccaacatgcccagctaatttttgtatttttagtagagatggggttcaccatgttggccaggctgctcttggactcctagcctcaagtgatctgcccaccttggcttcccaaagtgctgggattacaggcataagccactgcacctggcttgcattctaaaaggaccatgttggtggcttggatgggggcagtggtgggggtggtgacaagtggtcaactcttggacactctctgaaggcaaagcagcaggacctgtgatgggctggatagaggatgcagagacaagcccgggactgtgaggtgtgggcctgactggaaggctggagctgccgctagccaggagggaggacgtgggagggcaggtccaggatgagggcaggtccaggataagcccaggacttcagccatggacgggctgcactgtgctaacgaggctttccaactggacattctcaccactgtgcaacttttaaaaggcccatgtctgtagggacttggaagtagggcaccctgcaggtttatatagtgtctgacattcttgaggctgtcaaccacaggaagcaaattcctcttgcctctggtctcctgctggagagggcttgtatcagtctgttctcatgctgctgataaagacatacaagacggggtaatttataaaggaaagaggtttaatggactcaaagttccacatggctgggaaggcctcaccattatggtggaaggtga

SEQ ID NO: 51589 - DNA, 1086 bp, Homo sapiens
aggaaacttagacctcccctagcccagtggttttaaaaatattttatttcaaggccaggcgcagtggctcatgcctgtaatcccagcactttgggaggctgagttgggaggatcacctggggtcaggagttcgagaacagcctggtcaacatggcgaaaccacgtctttactaaaagtacaaagactagccaggcgtggtggctcgtgcctgtggtcctagctacttgggaggctgaggtgggagaatcacttgaacatgagaggcagaggttgcagtgagctgagactgcgtcactgcactccagcctgggcgacagagtgagactgtctcaaaaaaaaattatttcaaatcccttgtttaaaagaaatattcaatatataagaggcagcaggtctgatcaagtaccctctcatcagtaccagggaacccagggatccccagagcacaacgtgaaagctgatctcctagttcctaaatctcctagacacaggcccagaagggacagccttggacaagggcacacggagacttgatttcagagctggaatgtggcaatgcagagatcaggattgccagtggagttttaaaagaatgaaacagaagtataaatgaaaaacacatgattgaaatcagaaactcaatgcctaggttaattcatagaatagatttatctgaagagagaaatggtagcctgggagatagatttgaagaaatcacccagaatgcagtagaaagagacagaaaatacaaaaaagaagttaagacacaggttgggcatggtggctcatgcctgtaatcccagcactttgggaggcccaggtgagcagatcacgaggttagaagttcgagaccagcctggccaaaatggtgaaaccccgtctctactaaaaatacagaaattagctgggcatggtggcagatgcctgtaatcccagctactcgggaggctgaggcagaagaattgcttgaacccgggaggtggaggttgcagtgagctgagatcacaccactgcactccagcctgggtgatagagcaagattccatctcgggggggaaaaaaagaagacacaaaggatagagtga

SEQ ID NO: 51590 - DNA, 1015 bp, Homo sapiens
gtgctcaacttccctgaacccactttcctcacgtggggctcactgtgcccagcctcccgtattatcagcattctagcaaatgagtttgagtaaacccagcttaatccctgataggcactggttctagaggagatgtcaatgtcattgtcagcttgcactggggaggatggaatgtgtggggcctctctcccatgactcggcctgtcaaaccagttgctgctgttcagaaatggcttcttcgtggagtcttccctgactgattgggagaggggtggctgatagccctcagacctgtccagactgagaaactcacgtccccactcccctcaccctttgcttatggacgtgccaacgccacagttcattattccgcccacatggctgccagtagtcctgataccttaggtgtctgcgaaagggcgtctggcagggctggggttggtgacaggcacctgtctctcccacaggcctacttagagtttttcacttcccgcgagacagcggaagcacttctgcaagtgctgaagaagtacgagctccgggttaattaccaccttgtcaatgtgaaggtaggccaggccccagggttcccacagagtaccaggcccttcgttgagcaaacacccagcacctagcctgggctaggcattgtgcaagacagagagatacaggcagaactggggccctgctcttaaggagctcccagcctagagtgagggaggcagatcaatgtgtgaccaccagccagtgtaagtgggaaaatcaagttcaggagaggatgctgtcgggtccagaggagggatatctcacctgggaggccagggaaggcttctcagagggtcatctgtgggaatcactgaggacaaagaggagttggccaacaggagagaagggtattcctgggacagggcagaggacaggcagaggcagtgagctgcaccatctggggaaacggggaacatgagcaggaggaggcgggagtgttaagcaggggccaggcccgcagagatcatgg

SEQ ID NO: 51591 - DNA, 1727 bp, Homo sapiens
aagaaaacatcactttcttcagttcttccttgtgtaacttggtttttagcttttcactatcttggacccctgagtaatttcagtgttacattaaaaacaatgtttaatccggtgcctagagaaaagtcaagcttactaccccagatgctgcccagccagtgctaactgtagcattttctcttttctatggccaccaagtgcaggcctgatttgcttggctgctcaaggcaggacagtgtgggagtttggagcaatccacccccactcttggaactgggctctgagccacctcccctgagagtcatctctggggtcagaagcatatcagtcatgagcccagccactcactgttttagttcaggctgtgctgtgctgttggaaggtgcaagatcagagcccccaaagcagaggactctctctgcccagtccctgtggtctcttcatccctcgccttgaacaggtggaggccagcctctcctgactgtcatccctattggcaggttaccccaaaggccaccccgaagcagggagctttgaggctgacctgaagcacttgaaggagaaggtgtctgcgggagccgatttcatcatcacgcagcttttctttgaggctgacacattcttccgctttgtgaaggcatgcaccgacatgggcatcacttgccccatcgtccccgggatctttcccatccaggtgaggggcccaggagagcccataagctccctccaccccactctcaccgcaccgtcctcgcacaggctgggggctctgggtggagtgctgagttcgctgagttcttcccagatctcctctcaggtccagaacttgcacagcgttgcttggccaccccattttggttacctctaattttccccccaaaacccagcaacagtgtctgttgaggggtttgttgtactttggccaacaagcatcaccaaaagggattctaattctcattacaaatcctgcttaaatcagtgtttcccaaaggtggctgtcatcagaaccacttgataagctttttcaaaaagtggatctccaggtcccacccctggaggttctcactcagtaaatctgagggaggtcctcggaatgtgtgttttacttcttgagcttggcaggtgattcggatgatcagtgcagcatgggaacagctgggttagatgacaccatgttaccaacagacacatctagggctaaaaggctggctcaacccaaggctggaatgcttagggcagctgctctactctgtaaaaagtgggaaagctgggcatagtggcacgtgcctgtagtcccggctacttgagaagctgaggcaggaggatggcttgagccctggcgtttgagagcagtgagactcagtctctaaaaacagaaaaaagaggagaaaacggcaggccaagcccaggtgtgctcctagaatatgatcggactttcgtgggtccctctgcctgacactgtggttggcatggatgatggaagggggagaagtatttagggtgggagacgggctggccagcagccgccacagcccctcatgtcttggacagggctaccactcccttcggcagcttgtgaagctgtccaagctggaggtgccacaggagatcaaggacgtgattgagccaatcaaagacaacgatgctgccatccgcaactatggcatcgagctggccgtgagcctgtgccaggagcttctggccagtggcttggtgccaggcctcca

SEQ ID NO: 51592 - DNA, 1027 bp, Homo sapiens
ggatcctatggcctcgtgctccctaccacaagaccccttcacttgagatgagtagaaaattctcccaggaggcaggagccccaaggccgtgggatgggagagggtggcaggcatgcccaggtagaagtagggaagggctctccaatcctccaggcacggtgagaagcagcggtggtctcctattctccaccgccagcacagggtcagcatgcagtgaatattgaactggtgggctgcttttttccctcctgctgtcttaccaagtgctagaaagagacgaaccaaacctaaataatatgaagtttctgccttccagggactcgcagtcctgggtgtcggggctaggtagagggaacagaaagggtctctggaggttgggtgagacccagtgactatgacctccaccaaccctgcagacccaataggtgaccagtgggaagaggaggagggaggcttcaactacgcagtggacctggtgaagcacatccgaagtgagtttggtgactactttgacatctgtgtggcaggtgagtggctggatcatcctggtggcggggatggagctagggaggctgagatgcccagagagcctgtcggtgttcggttcaggacacagtgatcaggggcactcatgggtccatgctggatgaaggacatgcagaggtgaactgcaccatgtccttgctccttttgtatcacccactcccctcctgggcctgccaccatcgacccctagctttttgttcctctgcctggctgtgcccttagcctgcttggccttattcttttctttaaaacgaaagaggggtctgggcgcggtggctcacacctgtaaccccaacactttgggaggccgaggcaggcagatcacctgaggtcaggagtttgagacctgcctggccaacatagcgaaaccccgtctctactaaaaatacaaaaattagccaggtgtggtggtgcacggctgtagtcccagctactcaggaggctgagccaggagaatctcttggacccaagaggcggaggt

SEQ ID NO: 51593 - DNA, 1034 bp, Homo sapiens
ccatgtttccttttatttccatctgaaaagagtttggaatgaaacaagcgttttcagaatgagcttcctcacaggactttgtgcttatcatgctgctgttttagcttctccagtcctttctcactctatccctcaccctttctgggtcactgacagtccagcttccccctgcaaagcatcctgggaaaacttgagttgtgttcccagagttgacaagtcctttctgatttcagatacgtcacactgtcaaatggaacctgcatttttaccccccttttcagctggcgttggacatctttgaggtgtcctgaagaggagggtggttatttggagactatcagtggaaatgaagagctcagctgatggctgtagatcctcacccacatggtccctcacccctgaaaggttttttttgagggctggttcctatttgataatggctccagatgatttagaagctagccactgatttcagtaaatacttctgcctccttccactcctaaccactaaaaaaggctccctctgcggatctgtttttctagaccatccttggagaaacacaggaggaggaggatgagattcttccaaggaaagactatgaggtgagctcctttgatactgcttgggcaactaaagtagtgagtggcctggtcacttcaggccgaagcattatgattccaaccagagatgctctttgaccttctgtcccagggagtgagtgggtaagagaacttccttctaggaaagagactgtttagcaagcccttttctcaccttaaccccaaaacaaggtctggtgtttttacacgtttataaatctgtggcaccttaacctggatagagtatgtatttgccattaaactgtttgcttttacagcttacagagagacttagagtgaaaggcactggcaggcagtatgtgcccctaacaggtgtgtgcttataaactgttaaggaggccttgcttctcttctaggagagcttgcttttcagatattttcttgctcaagcagcttctctctgacatgttctt

SEQ ID NO: 51594 - DNA, 1826 bp, Homo sapiens
ttgtttttgaaacggagtctcgctgtgtcacccaggctggagtgcagtggtgcgatctcggctcaccacaacctccacctcccaggttccagtgattctcctgcctcagcctccaaagtagctgggactacaggtgcgcgccaccatgcctggctaattttgtatttttagtagagacagggtttcaccatgttggctagactggtcttgaactcctgacctcaggtgatccacctgccttgacctcccaaagtgctgggattataggcatgagccaccgcacccagccagattctgcattttgaaccagctcctcctgggtgctgcaggtaccactgctctgcccatccacacgttgagtagcaggaacccagaggtttgtccctttgcaggtcttctcacctgacatgaccttttgactcaactttgcctcttttcagagtttggattatgatcgctgtatcaatgacccttacctggaagttttggagaccatggataataaggtgggtcttacaattcttcatctctggggatcaaatcagtcttaacatggcattttttttctcttctaaaggccccagtaaacatctttacaccttgttttttgaaccttttcatgcgatacaggcagacctcactttatgcgctttgctttatttcacctcgcaggtactgcaggttttacaaactggaggttggtggcaaccctgtgttgagcaaggtgccatttttccaatagcatgcattttgtttgcattttttagccataaagtattttttaattaaggtaggtacatttttgtaggcataatgctattacacactttatagacctcagtatagtgtaaacatcacttttatatgcactgggtaaccaaaacactcgtgtgactcactttattgtgatatttgctttattgtggtggtctagaaccaaacccatgctatctgcaaggtaggcctatgttggcatttattccctaggcctttatcctgccaaccagagttccccctgtcagtgcaccttgcccagcctcttaagagtccatcatttttgcactgtaaagcacctgaaatcccaacatcatctttactgtgcctgctctccacgtggaatttagcttaaaactggttggccaagatgtatttcttcccctctgccaccataaccctgtaaactgaatcattcttttcctgtgtgaacagaaaggtcgaagatatgaggcggtgaagtggatggtggtgtttgccattggagtctgcactggcctggtgaggaggcagggcctggagggatggtgggccatagggctggaggggcttacagggaaagccctggcctggtgaataacattgtcatttgtcattataacatttataacattataatgcaataacacttgtcattataatcaagagtgccttttcttttttcccttttttttttttaaatgaataatcctggcacagtttttcacacttcccctgcttttgctttgtgaaatgaaagcgagacacatgacaatggtgctcttgaagcgctcaaaggtttgggcaggactttatcttttatgatatgattatggatcataatctctaatctacctagtaaactagatgtctccctaatgggtagataatgcattgggtagagtaaataatggaagttaaagttacttttttttttcttttaatttaaatagagacagggtctcgctttgtcaccctggctggagcacagtggcgtaatcacagttcactgcagcctcgaccttctgggcttgggtgatcctcctacctcagcctcccgagtggttaggact

SEQ ID NO: 51595 - DNA, 1027 bp, Homo sapiens
caggagggagctggtggtctgggctcacaggctctcatttgctgacacacaatttagaatgtagagtgttttctcttctagcaagacttgaaatggagcttatttggtgggaatttggctctttctcttataaagtcttaggatcatctctgttcagttgtcacgaggaaggtttttgtagccaaggtctcctgacccaggggcgtttctgcactgactgttggtctttcctttttcaccctgcccagggctcttcgtggagaaggaaggccccatgatccacagtggttcggtggtgggagctggcctccctcaggtaagatgggctgagagggtgtgggcctctgggcaggcctagtgggaggtctggttacactgggccaaatccattgggacaccctgacatcacattggaacctggtgccattctggcttcacgtgtaaaccatgtgtctatctctcaggaaagggcataacttatacttggaagttttaatgatgccctaccgagccctaggagcaaaaatgagacatagagaaaaactgtgacgtggcggatgaaagtcactgggtgcttccatagccatcaccaggcgcctctatatagggtggctgggtggatcatctcagtgctgccagatccaagaggctcgaagcatcgactgacatggttttaggcacagttccgtgctgattctagttggcgtggtacagtcataataactgctgctaattatggtctgtgtgccagacgccatgtatactaactgctttctccttatagccaccttcaatgattcgttgttattattacccccatcctcagatggggaaactgaggcttagagaggttgaggtactagctcgagacctcaaagctcccattcttgggggctactccagatccctggctgctgttggagaagtctcagttccctgtgaactgtcactcttagtcatttccctctccagtcctgagaagagggagttattgtggttgggagtctctgaggtgaaggagggaaga

SEQ ID NO: 51596 - DNA, 1389 bp, Homo sapiens
agccaccacgcctggccttgttatcctttcttgatgaaccacctgacatgaaaatgtgaaactggctgttgtcataaagcaggaagtgatggggcttggactggagccggtcttctccctcagagcaggctgtccttccctttgcattgatccttccttttggtgcaaggtctggtctgtaaaggctgtaaataggctctcatagtagagtaggctgctggaacggaaacttcttaaagcccaatctagagttggtcatacctggggtgtatctactgtaagggtgactagatctctgtacccggatgtagattccggaggtctctgcgtagagcagtgggtaccaggaggaagggttgggagagagtaggacatgccactcctgaaccttcttgtcttttgtcacctctcccctagctcttttgttccatgtctgccaccttcaccctcaacttcttccgttctgggattcagtttggaagctggggttccttccagctccctggattgctgaactttggcgagtttaaggtatgttttgtcctttccccaaggatttttaatttgacccatgaaaatttcctctcaagtgaaggaccagagagaaatgagcagagggctaggtacaacttccagggacacatctcacccattagcctctgccgtgcgggaaagcagccccactcttgcttctgtcttctcttctgtctcttccggttctcatggctgctatggtttttctctccctctccctttccccttctctcagtgctctgactctgataaaaaatgtcatctctggacagctatggatttgggtttcttcgtcgtgatgggggtcattgggggcctcctgggagccacattcaactgtctgaacaagaggcttgcaaagtaccgtatgcgaaacgtgcacccgaaacctaagctcgtcaggtatctgcacagtcgcctcccccccgagcctgctgcggctccctgagcttggtgtgggccgcgccatctctcccgaggagcggaccctgcctccacggctttgatttctcatctaagactgagaatctaaacacggccatgcatcttccctacttgacaggccaaagggctgagccagcttaattgatgtcagagttgctggttgactccctgcctgtcctgacttggccactcggacacatgacaaggttagaagggtcaccgtggccctgccgagcagcttgctctcaggaggcttctcgccccaggacttattataatggaaagccattcattccttggagagagatgatgtggacgtagcagcccactttaactgtccactttttacaaacaaattgctggaatacagcaaatcacggatcaattctgcacacatgttgactgaccagg

SEQ ID NO: 51597 - DNA, 1683 bp, Homo sapiens
gcccacccagacaaaagattggtttctgcctcctgtgttggaaggggaactggtatggggtgtggtcgggcccggtaggtctactgggccttggcaggcatccggtagtgggactcaggttggctcttcccttgcaggtactttcagccccgtcactctggccttgttcttcgttctctatttcttgcttgcatgttggacttacggcatttctgttccaagtggcctttttgtgccttctctgctgtgtggagctgcttttggacgtttagttgccaatgtcctaaaaaggtactctgtgtgtgtgcgtgtgtgtgcgcatgtgcatgtgtgtgcacgtgtgcgtgtgtatgcatgtgtgtgcgtgtgcgtgcgttgatgtgtctgtgcccatgcatgcacatatgtgcataggcacaagagtatgagctgtaggtcctccccacagcctatcagtgtggttcaaagccatgttctcggtgttttccttcactagctacattggattgggccacatctattcggggacctttgccctgattggtgcagcggctttcttgggcggggtggtccgcatgaccatcagcctcacggtcatcctgatcgagtccaccaatgagatcacctacgggctccccatcatggtcacactgatggtgagcacactccctccaggcccctgtcaggctcagggccacgtccgccccacaggacctatttttaggtctttgctttgtgtttcaggtggccaaatggacaggggactttttcaataagggcatttatgatatccacgtgggcctgcgaggcgtgccgcttctggaatgggagacagaggtggaaatggacaagtaaggccatgattttgctcatgtcctagtttcagaatgtataagctctgaggcctaaggaatgttgttattagggtaggaaacagtaactcacttttcttgggctgaaagaagcaacacacccattcctgagcatgtgtgagaatgtggagcagcccatgggctgggggctgcgggggcagggcaggggacacgggcactgtgggactgcagtgggcagggcctcttcgtggtggtttgactcccatggcattctggttagatatgaggtgaggtctctggatcaagttcgtgatgtgattgaatgtttaagggtatgccaagccccaggagtgagaatagcctgtttcacatgtgcccaccagaatgccctactgccagccgggattgttctgggcataatcacctcataacccacctgctaatccacaggtacctgggcttcctgtgtctagatagcaggcaaggcccttacgggctaacacgggggccagcaagccgtttctgtggagggccagacaggagtttattttcaactttccgggctgtatggtctctgtcacgactactcgactctgtcattgcagcaggaaagcagtaagcgtgacggacttgatcagtgggctacagtttgctgtgccctgatctaaagggggacccaagtgctgtgtttattttattattattgtttttcttttttgggacaggatctcactctgtcgcctaggctggagtagggtggcatgattatagctcactgcaacctatgcctcccaggctcaagcgatcctccacctcagcctcctgagtagctgggatcacaggcgcgtgc

SEQ ID NO: 51598 - DNA, 1040 bp, Homo sapiens
atttggggcccgccctaatccagcatgggttcatctgaactcggtcacatctgtagagaccttgtttccagaaaggtcgcattcataggtactagggcttaggacttggccatatcttttggtggggggacacattcaccccccagccactttacttagtgctttctcacttaaacttcctaataagccatttgcatctcatgaatcaggaagaaagggagtgcagacagatcaggggacttgcccagggtgccacagctaggacttggccaaggacttggtttgactggagagctctcactctggagcgcttgctgctgctgcaccacctgcctcagcagcctggagctgggcatattcaggcatcaaggggaggggctctaaggtgaccctgctggccactgctgcctgagcacggacagtgtctgggttggaattgcagagcgccagccagccgcgcctctcctatgccgagatggccgaggactacccgcggtaccccgacatccacgacctggacctgacgctgctcaacccgcgcatgatcgtggtgagaagggctgccccggcctgtcccatgcggagctgcctcttcatgccgttggcgtctcaggcagtcagtgacacgtggtctctttgcaggatgtcaccccatacatgaacccttcgcctttcaccgtctcgcccaacacccacgtctcccaagtcttcaacctgttcagaacgatgggcctgcgccacctgcccgtggtgaacgctgtgggagaggtgagcgaggccccggccctgcccccacctttgagagaggatcccctagccaggtgctgtttgtgcacccaggcttctcaccagaaacgtaggcatcccaccaggaggggagagtgtggcccaacactagctttgaaccctgctcggcttccgtgcactcgggaccctttcccctgcctgccagcagatggcaccagcgtcccactggccgtcctttccagccagagccgcgcctctaccaggctgtgtcttcctcctgaaatgttgctctt

SEQ ID NO: 51599 - DNA, 3537 bp, Homo sapiens
gtgcgtacttacacaggttttgttgcagtaggttaacttatgtcccttgaaatgtaattgccaactacactgacagagtcctaacatagtttatgacgtggctttggagttcccaacaacagtgacacgtgggaaccactgtaacgacctgtaacaaatgactcccataggtcactttgcaaggtggtgagtatgaggcatggcaggggtcataatctcaggagacttcaagggccccaccgcttgcacatctgtgaagcaggctggtcatgatgggagctgagcgctgagcatgtgccctgtggaaggacattttagttcagatgccagctggcccaagccctttttggagctaaccttgtccccttggcctccagtgtgtgagccctcgttagctgtttatcccaatcaagctgtgtctggctgtgcactatccaggcctccacattctgtgacaaactaacagggccggctcctgtcactcctgttctcgccagcgggttttaccctgaaggtgactcaggccttctctttgccctagatcgtggggatcatcacacggcacaacctcacctatgaatttctgcaggcccggctgaggcagcactaccagaccatctgacagcccagcccaccctctcctggtgctgcctggggaggcaaatcatgctcactccggcgggcacagctggctggggctgttccggggcatggaagattcccagtcacccactcactcagaaagccgggagtcatcggacaccttgctggtcagaggtcctgggggtggttttgaaccatcagagcttggacttttctgacttccccagcaaggatcttcccacttcctgctccctgtgttcccaccctccagtgttggcacaggcccacccctggctccaccagagccagaagcagaggtagaatcaggcgggccccgggctgcactccgagcagtgttcctggccatctttgctactttcctagagaacccggctgttgccttaaatgtgtgagagggacttggccaaggcaaaagctggggagatgccagtgacaacatacagttcatgactaggtttaggaattgggcactgagaaaattctcaatatttcagagagtccttcccttatttgggactcttaacacggtatcctcgctagttggttttaagggaaacactctgctcctgggtgtgagcagaggctctggtcttgccctgtggtttgactctccttagaaccaccgcccaccagaaacataaaggattaaaatcacactaataacccctggatggtcaatctgataataggatcagatttacgtctaccctaattcttaacattgcagctttctctccatctgcagattattcccagtctcccagtaacacgtttctacccagatcctttttcatttccttaagttttgatctccgtcttcctgatgaagcaggcagagctcagaggatcttggcatcacccaccaaagttagctgaaagcagggcactcctggataaagcagcttcactcaactctggggaatgctaccattttttttccaaagtagaaaggaagcacttctgagccagtgaccactgaaaggtatgtgctatgataaagcagatggcctatttgaggaagagggtgtctgcccttcacaaacacctctctctcccctgcactagctgtcccaagcttacatacagaggcccttcaggagggcctcctgtgccgcagggagggtgcgtggggaagatgcttcctgccagcacgtgcctgaaggtttcacatgaagcatgggaagcgcaccctgtcgttcagtgacgtcattcttctccaggctggcccgccccctctgactaggcacccaaagtgagcatctgggcattgggcattcatgcttatcttcccccaccttctacatggtattagtcccagcaggcatccctggggcagacgtgctttggctcaagatggccttcatttacgtttagttttttttaaaaccgtggaggttgcccacgggcctcggcacctggccctggcagcacagctctcaggcccagccctgggcgacctccttggccaagtctgcctttcaccctggggtgagcatcagtcctggctctgctggtccagatcttgcgctcagcacactctagggaataattccactccagagatggggctgcttcaaggtcttttctagctgattgtggcccctccattttccccattttcttatctccctgaccaaaattgctttgacttctaaatgtttctgcttcccagaatgcacctgacttatgaaatggggataatactcccaggaaatagcgcaggacatcacaaggaccaaaaaggcaattcttatttaaatgttactatttggccagctgctgctgtgttttatggcagtgttcagagcttgatcacgttatttcttccttttattaagaaggaagccaattgtccaagtcaggagaatggtgtgatcacctgtcacagacactttgtcccctctccccgccccttcctggagctggcagagctaacgccctgcaggaggaccccggcctctcgagggctggatcagcagccgcctgccctgaggctgccccggtgaatgttattggaattcatccctcgtgcacatcctgttgtgtttaagtcaccagatattttgttcccatcagtttagcccagagatagacagtagaatgcaaatacctccctcccctaaactgactggacggctgccaaggaggccccaaacccaggccccatgcaaaggcacgtggtttccttttctcctctctctgcatctgcgctttccagataagcccaaagacagcaacttctccactcatgacaaatcaactgtgaccctcgctccttccatttctgtccattagaaaccagccttttcagcatctcacccattagcagccccatcacccagtgatcagtcgcctcagtaaagcagatctgtggatggggagcctacgggtggtaagaagtggtgttttgtgtttcatctccagcttggtgttccatggcccctaggcgaggtgatcagggagtggggccaatgggcccccggccctggctttgggaccttgtgctgagggatgatttgctcctgaccttgattaacttaacagttcccagctggaagggacactttcaggacccagtccactgtatggcatttgtgatgcagaattatgcactgacatgaccctgggtgacaggaaagcctttcgagaggcccaaggtggcctcgccagccctgcagtattgatgtgcagtattgcaccacagctctgcggaccttggccattgccgcagtcgcagcttccttttttctgtttgcactgtttgtttgtatgatgttagctaattccactgtgtatataaattgtattttttttaatttgtaaaatgctatttttatttgaacctttggaacttgggagttctcattgtaaccctaacatgtgagaataaaatgtcttctgtctcctctgtct

SEQ ID NO: 51600 - DNA, 1069 bp, Homo sapiens
gctgtagaacctaactctctcgaaatgtaccagagaaaatctaattaatactctcattttctgaatgttcccccctaaaaacaacaaaaaccccactaggagtggaatttgaggcctccccaaccacctaccaaaaaaggagggtgaaatgaaaggaagaagaaaaactcagcattctttcctctgacaaagagtaaaacgacaaggaatatcggcctgaattctcttcccaagaagaaagaaagcacaccaacgcaggcatttgtcttctgtccatggtgctgaagtttattcactttcaaaccactttcagtaacaggtgaggttctaccttaaaatttaatgcatggggtgggagaggcgaggaagtcaccatcaaaccactttatctacagttagcataagatgtgagaagtgttgacaggaagctgcagcttagatgggatgatcacaactccatggcaacaagatgacacaaatgcagcagagaccccaggggacaggagcctcttgcagtctgtccctaggcccagccctgcttgtcctccctggctgttatcttcagtactgcaaagagaacacagacatatctggcttggtgacctggctgtcctggaaaagtcagcttcatgtatgagtgtgcccatcctctgaacttgattactgaccacctgcttcccaccggcccccaccccagcctgatgaccctctgagcttcatgaattgataagcaagttactcatcagagtaaatttcacttaagcccttcaggatcttgcaattctggggaggaatatgaactgctaatcagccatgcaaagataacttggctctatgaatattttaatttcccagtgctagtggcagttgctttttttttttttttttttgagacggagtcttgctctgtcgcccaggctggagtgcagtggtgccatctctgctcactgcaagctccgcctcccgggttcacgccattctcctgcctcagcctccggagtagctaggacttacaggcgcctgccaccacgcctggctaattttttgtatttttagtagagacggggtt

SEQ ID NO: 51601 - DNA, 1052 bp, Homo sapiens
agcattgtccttgcttacaagggaacagaactgagcccgagaggctatgccacttgcccaaggccactaggtgcctaagtggcggaaccaggactggatccccaggtctgacgctgatgtctgtatcctagcctatttcacgtagagagctgccaccttacctcttagctgcattccccaattaaacccccattccccatctttcagatgccccaagggagctccttcaccttccccatgcccctggggctgtagcttttttgtgcacttaccaagtctgtgtgtgttggctgctctcctgatctatttctacaccgaatgtgttttaatccactccttagaagctcagaaaatgtgtgttgagtgaccagctctgtcctggctggccagatctgtccccaggtgtgctgacctcatgactgaccaggtgaacaggacgttgtgcagccataaggttggaaatcagggcagcaagtgactagaggtcacaagaggtatccagggtgatattattctaagataagataaaagggaccctctttggcaagccttggggtttgtctgtaggtggggatctaatatttcatggggtggttagaagcagcctgtaggagtgagagagaagaaaagtaacaggcacagaaagccaggcccacctccatccccacctcttccacggctgaaaaatcaaaagccttttatttccttatcactggaaagaagtcatcttagtcatacaacgggtggagcactgcaaacgggtgggagaatccagaatccgggtgttgccagattccagcccagagtttggcttcacgattctctgggggtatgccttgggctgctgcagggagccccagagtgtgcagtgtcacccgcgtgcagagctggcacgaaatccccaacacattcgtggcatgattctgcgggacccagatggtctaaagcagaagccccagttgggaaaaattggttcatacttagggatgatcgttgctgactttgaaaatgatgttttgtttctttggtttaatatggaggtcactaagggc

SEQ ID NO: 51602 - DNA, 1374 bp, Homo sapiens
ccatgccagagtggagccagtgaacactcagctccagaagggcccaggccactgagtccgtggtaattctgcaaggctgggtcagagccagggtgtggtgccactagggttgtctccgtagcctatttctatagctggccactggggttggcagtgaacagtaatcacacttgttttgtgaattgaacaggaagatcccagtgtctgagtgaactaacagtcctgctttcagccaccatttgcacaagacacccagcactgaaagtcccgctgccaggagcaagggatcctttggaagcacccgccctttgtgccttgttgggggaaaccggtgacgcagaagtgagtgtggatacaccagagtttgcattggaaggaatgagtgtcacgtggggagggaaggggccagtggaccttttgtaagctttccactcaataaaatgaacctgtatggcaaatacttgaaatggaactcactccttccactttccccctttcttctgtcccaggaaatagatcatcttttgaaaagactcttgtctaggaaaagttgtgtccttttcctaatttaacgtgttctttcttaatgaagttttaatttatttttgttgagattttgctagatggcttttgcatcccctgtagatggtgagtgttggcggtgatgtccatctcggcgttcggaggccccacggtcccgaggctgggccggggccccccagggtggctgtgctgctgcctgtaggagggtgcgggttgtgctgtcatcctcgggtttgcacgcccttttttaggagcctgtggacatctgtggttttgtactttggggcttcaggggaggtgtttaactttctagtgattgatgattgtcaggttttgaaataccaaagcttttttgttctgtttttaaataaatatctttcaaactttcacgaccggtttgtgtgtggttgaaacctggagacatgcaccacgtctgccctcagcactagatctgtcagaagcaggacacccacccggccctgctgtcacaatgctattcctttctggtatgttctacctctcttcaaaggagtctgcccagaagatgtgttgtttgccacctttctgctcgccagggggttgctgagtggccctgctgagtgggttgcttctggcattaccctagctccttccctgctaagatgccctctcccccacctgccctaaagagccagggttctcctgccctgggttttgctggctataggacgtcagcaagacaaaccctgagtggttcttctccaggttgtctgctgaagccaccatcagatgcctcccctctgtggggaggagaagggtccactctggggaccaaaaaggggccgagccggg

SEQ ID NO: 51603 - DNA, 1827 bp, Homo sapiens
acgggagaatcacttgaacccgggaggcggaggctgtagtaacctgagatcgttccactgcactcaagcctgggcaacacagtgagactctgtctcaataaacaaataaatacatacatacataaagctacaagactggagagagaaaggacagagaggagaagtggcctgagactggcctcagcactggtgactgatctggcgcaggatgtctgaccatagggttggtgccaagtcctggctaagtctgtgttcctctgggctctggcaccaggccccgctgctttttaacaggattctagatttcaggcccacaggctcaagttggtcgtgtaaacaagacaggctgactttcttctatactttagggagatgggcaccactgtctttatcattaaggcacaacacctcactcttctgctgcccttggtctttatttcgtatgctctgcctcccagctgtccttcccccttaacatgccgctttcatggtgttgcaggagtggaaatgaagaagatcactgacacccacacgccgtctggcctcaccgtgaacctgacgctctattacatgctctcctgctcgccagccccactgctcagcccctccctgagccacagggagcgagaccagatggagtcgacgctcaactatgaagatcactgcttcagcgggcacgccaccatgcacgccgagaacctgtggccggggcggctgtcctccgtccagcagatcctgcagctctctgacctgtggaggctgaccctccagaagcgtggctgcaaggggctggtgaaggtgggtgccccaggcatcctgcaggggatggtgctcagctttggggggctgcagttcacagagaaccacctccagttccaggccgaccccgacgtgctgcacaacagctatgcattgcatggcatccgctacaagaacgaccatatcaacctggccgtgctggcggatgccgagggcaagccctacctacacgtgtccgtggagtcccgtggccagcctgtcaagatctatgcctgcaaggcaggctgcctggacgagccagtggagctgacctcggcgcccacgggccacaccttctcggtcatggtgacacagcccatcacgccactgctctacatctccaccgacctcacacacctgcaggacctgcggcacacgctgcacctcaaggccatcctggcccatgatgagcacatggcccagcaggaccccgggctgcccttcctcttctggttcagcgtggcctccctaatcaccctcttccacctcttcctcttcaagctcatctacaacgagtactgtgggcctggagccaagcccctcttcaggagtaaggtaggaagccgccatctggtcgaaacccgaggccttggccttgctctcagccctgtgtctcggaaggggctagcctggcgagggggggtgaggcctgggcaggaatgggtgtcctgatgccctcagcccttgacaccagagagcgcgcacaagtgttttgagaggagacgacgaggaagggaaagctggaaatccaggtgtgaattgatggtcttctggctttccagggcagccctcccctcctcccgcatcataaatctcagcatttaaaaataactgcaagctgggtgtggtggcttgtgcctgtagtcccagctacttgggaggctgagatgggagaatcccttgagcccaggagtttgaggctgcagtgaactatgattgtgtcattgcactctagctggggcaacagagcaagaccctgtctcaaaaaagcaaaaaacaaaaaagcaaataaaagtaaaaaaaaaaaaa

SEQ ID NO: 51604 - DNA, 1024 bp, Homo sapiens
gcccgcctccgtctctggccttgccgcggggtccggccgcgactgcgtgctgctgcaagaggactttctggcgcacaggggccgaccccacgtctacctgcagcgcatccagctcaacaaccccacggagcgcgtggccgcgctgcagactgtggggcccactgccggcccagcccccaaggccttcaccagtaccctggagaaggtcggagaccatcagttcctcctctactcaggccggtccccgcctacgcccactgggttggtgcacctggtggtggtggccgccaagaagctggtgaaccgcctccaagtggctcccaagacgcagctggatgagacggtgctgtgggtggtgcacgtctctggccccattaacccccaggtgctcaaaagcaaagcagccaaggagctcaaggcgctgcaggacttggcacggaaggaaatgctggagctcttggacatgccagcggcggagctgcttcaagaccaccagctcctctgggctcagctcttcagcccaggtgagtcctggccagcgcttggtccaccctagatatgtccctcccaagtctgcagaggtgacactgaaggtgatggtggggtggttgaaacttgggcttggcgtttcaccagtggttgaatctgctcaactgcttagtgtctgtgcgacctttggattcgtcgcctaatctctctgggcctgtatttaataacaataacgcctacctcagaaggtttttatgagactgtagtggacaattgagtgtaaaggtcaattctttctgttacttgttttggtagatggggcctgatgtgagcagagtgaagtgttttagagtcagtttgcagaggtgaaaccagcaggtggatcccctgattctttgctcagcaccgcagtcggcctggtgacagacgtgggcttcttgacataacccctgctaggctgaggtgcgtcctggcagttgtggctgcaactggttcacagggaggttggagaatcccttttagcaggttgagatgc

SEQ ID NO: 51605 - DNA, 1023 bp, Homo sapiens
cttcccttccttccttccttcctctctctctctctctctctttctttctctctctctttctctttctctgtctctttttctttcttttctttcgcacttgtcacccaggctggagtgcagtggcgcaatcttggctcactacaatctccgcctcccagattcaagcgattctccggcctcagcctcccaagtagctgcgattacagacgcccaccaccatgtctggctaattttttgtaatttcagtagagatggggtttcaccatgttggccaggctggtctcaaactcctgacctcaggtgatccgcccaccttggcctcccaaagtgctggaattacaggcgtgagtaccatgtccggcctccttccctttcatttcttctcttccctttcatttcttctcttcccttttcctcccttcctccctccctcccttcctttcttccttcccctctgttctcttccttccctccctctctcccctctgtccatacatttttgttgagaaccttttctgtgccaggtagttgcaggcactcgagcatagagccccatgtagacctggcccctgtaagctgacctgcagcaggccagaccaggccccatgtgtgcaccctcctctcctggcctttgtgtcctccttaactaacacgggctctcttgtccccctgccttggtacaggcccagtttgacctggcctttgtcgtccgctacaagcctgatgagcagccctcactgatgccacaccatgatgcctccaccttcaccatcaacatcgccctgaaccgagtcggggtggattacgaggtgagcaggagccagccggggtcaaggggccggcaatggggatgaggagggctagctgaggagaggcttcagggtggttgaggcagaggggccccaggtaaccagtgccagagaaccagaaaaaaaaggatgtgggtctgtgggagggcttcctggaagggttcacagtctagcaggaggaggggccaggctcttaagctactattttaagaga

SEQ ID NO: 51606 - DNA, 1109 bp, Homo sapiens
tttggcttgaaacctgattagacatgttttgtacaccagtgttttttttttttggacaccggatccatctcccttttcttttctaataagtcaggactggtggagtcaacacagtcaatcaatagccaacctcaacctgagacaggacagaagagaactcagaatctttttgtcttttggacttcagccatgtccatgatgcctaccctgtgaagatctctcaccatccaaaaaagtaagtagtagctgtgacttctggcaccctggatttgagctgagtggacaggggtgtgctctcctggacctctggtggcaagtctcttgaatggcatcctctttgtatagagccacagctttctaacttgtgttgaaaaactaccgtatcttttacttccgtgaaggatttcgctggttgcttagagagcctgtttaaaagttgacagttcagaagtggctgggatctcttgggctccctgaagagttagtctctgtctccctcatttggtctctgctgtgctggctcttccccatctcggcccagcacaggttggctccttgtcactgctcttttaagactctgctctgtcccctttaccctgtatactctttttgtttcgatttctcagcttctcctcttttccagttgtgccagcagacgatccgtggatccattttattttccctgctaggagttgctgtacataacactgggtaaggaggtggtgtggattcagggactgtgcttgggatccaaacacaccttgcagtgaattttgctactgctgtctctacacccaagatacctaatactcctcaacgaatagcctaggttgaggcaaagctgttgaccaccttggagggctaatagcagtttccatttagaactgggttcatttctggtcttaggttaatatttattaatactgtgccctggcactttttaggggtaggggcaggagagtaccagaaagagtgggcttttccctaaagtgtgatcctcgggattttaaaagctattacacagaagggttttttcattgattatatttgtgaaatgctgaattcaacacagttaaactagtgtctttacaacaaggcttccttcccaa

SEQ ID NO: 51607 - DNA, 1101 bp, Homo sapiens
aaactcagagtgtcggtccctgactgataggtcagagacacacagcaaatgcaggaattcctctctggcaatatcccaaggaagaacacagcacatactgtcttccttaattagtgaagagaggtcagtggccactcagagctgtatgaggaacagcagggtcctcattcttggtgatccacgtttctgaaaaccacctccgccagcccccaaaagctcttacatccttcaaaaagttcatctaaaatagggtctcccattcacctccacagggtggtgctgccccctccctagaggtgaggtcagccgtgtcacaacggaggacttgctcccccagcaggcacagggctgacagccagcctggcaccctcaccttggcactcctcttttcctctgagccctcggtaaggagaaaggcctcatggccatctgtgccctctacccgcaggaagcaattggtggtgtggccaatcccagagggcagaactttgtcccagagcatggcattgatcacggtgctcttcccattgctcgtcctagaaggaagtaacagctgtcagcaaagccaccagtatctgacctgaattactttcacaacgcagataccagcctggaaggccaaagccctattcagtgcaatgttgccagtgcccagacagtgctgagagacaaagagtaggcactgtttattaaaatgaataaacacccccaggcccaaacctctgacatgcccctggttcatcatttcagatcaatctacaagaggctcactgcgtgctgtctgccccttgaatcacacagccaccctcagcaacacttatagagactgtctgtctgtctccaaagtttaattcaggcctacctgaaacaccgactaacccccagagtgtcttcctcagtctaaatgaccccagtgtttcctacacagggcatgtttcgctgcttttctcccatcacgctcctccttacacatgaagctccaccttgtgagtcccagctgacaactgccaggctaaagggaaggttactttctcattctttttttttttattgttatttgagacagagtctcactctgtcgcccaggctggagtgcagtgg

SEQ ID NO: 51608 - DNA, 1102 bp, Homo sapiens
acaagtaattctgtttttataaaagcaatagatatatgtgtttaaaaacactcatttctgccaggcacggtggctcatgcctgtaatcctagcactttgggaagctgaggcgggcagatcaggaggtcaagagatcgagaccagcctgaccaacatggtgaaaccctgtctctactaaaaatacaaaaaaattagctgggcatggtggtgcgtgcctgtagtgccagctacttgggaggctgaggcaggaggatcgcttgaacctgggaggcggaggttgcagtgagccgagatcgtgccattgcactccagcccgggcgacagagcaagactctatatccaaaaacaaaacaaaacaaaacaaaacactcatttccaggcaatctggaaggataggaaatgggaagtaaaatccgttaatgagggccaggcctgatttctctcccgtccctggctttctcctccatgacctgcctgcctcacaagtcccaggtctgttctcagcaggaagaatagggctcctgctctgcctgatgatttggtttacccctgtcacctttagccctggtattgatgtcaccacagagctggacagctggattgacaagttttgtctggatgctgatgtgtttgtgctggtggccaactcagagtccaccctgatgcagacggtaactcctcctctgccttctcccaagctcccagcaccccctgggcaggcagctgatggggccttggctgtcaagctcctgctccaccgaggtcttaccctttatctaggaaaagcacttcttccacaaggtgagtgagcgtctctcccggccaaacatcttcatcctgaacaaccgctgggatgcatctgcctcagagcccgagtacatggaggaggttcgtgcttctgtttggcagtttggggaatgcaaccccgagggagcactgcctgccactggggccacttcctgcacccctggatctagtgacttccctgaattaattttattgccaaagaattctccaaatactcttctgtggtatcttctggtggtctttcccctctcccatccactttgctggatgcaccccctcttcaagccactctccc

SEQ ID NO: 51609 - DNA, 1055 bp, Homo sapiens
cggctgatgagcagcagagtcaggatctcttgtgcccaaaccagggtgcacagctctgtgctgttgcttctcaggccgtggtgatgctgagtgtgtttggttgttatgattattcagtctcagcagggtgtaggagattctgccaaaccaggcctggctcagggcagagctgctggcagggatatagacaggcccagctgctccctactgtgggtgggctaagccaccagtggcatcttgctccacacaccccaactgggtcccttctctctcctccccagggaactgtctgggacctttgctcatctgtgtcagcaagttgacgtcacccgggagaacctggagcaggaaattgccgccatgaacaagaaaattgaggttcttgactcacttcagagcaaagcaaagctgctcaggtgaggctggcccgtgtggccaaaggttagggctccagggtgcagcccaggcacactggggctcagctgctgggcttgcgtcttgggtgtggacacaaatttttctggtggggatttagctcattcgtgttagatgtgtaccatgggctgggcacggtggctgacgcctataatcccagcactttgggaggctgaggcaggtagatcacctgaggtcaggagtttgagactagcctgaccaacatggtgaaaccccgtctctactaaaaatacaaagattagctggtcgtggtggtgtgtgcttgtaatcccagccactcgacaggctgaggcaggagaatggcttgaacccagaaggcggaggttgcagtgagccgagattatgccattgcactccagcctgggcgacaagagcaaaactctgtctcaaaaagaaaaaaaaaatggatgtgtaccacgtacctcatggatgccagatggtgctggaggctcaacaagacacagcgtcgctgccttcaaggcacttgcagttgaaggcatgatggcatcacagtactgcgagactgcagttcacagcgccctgtgctgaaccgcagggcctacagcgcttaacatgtgctatttcactcagtcttccct

SEQ ID NO: 51610 - DNA, 1022 bp, Homo sapiens
gggcacctcaagcctgagggacccagagccctcagggaggctgggtgatccaggaccccaggaggcacagaccccgaggtccatcctggctcaacagagcaagctgtccaaggtaacgtgggagagcgggacatctgctgatgggaggagcttccttgggcctcagtttccctatctgacacatgtgcttgtgggtagcctcccttgcagaataagaggctcctgggagatactgtgagttgggtcttgctcagcctaaatgctcgctaggtggtagctgtgagtatctcatacagtgctttgagaagaggccaggatttgttcacagccacacataaagtggggccaaacgtttcccttcttgctcttgtgcccttggctgagccctgggctgcaagtcagggtgtaagttaagacacagtctctctgtccctcgaattgcggcttcctctgggccaggcctcttggcttagtccttgtccctctgtgcttccttcctcagcccagggtgaccttctctgaggagtctgcagttcctaagaggagctggcgcctcaggccatacctgggctatgactggattgcaggtaaggcgtgctgttgccctgcacacactttgcctgggagtgggaggtggaggcctgggatcctccatgctcctgtctgagcctccacccggtgctgttgcttgtttctctgaccgtgccatcctccgtggggagcaccctcttttttttttttttttttttttgagacggagtctcactctgtcccccaggctggagtgcagtagtgtgatgttggctcacagcaacctccacctcccaggttcaagtgattctcatcccttggcctcccgagtagctgggattacaggcgagcaccaccacgcccggctaatttttgtattttaagtagagatggggtttccctgtattggccaggctggtctcaagctactgagctcaagatatccacctaccttggtctcccaaagtgctaggattacgggagtgagccac

SEQ ID NO: 51611 - DNA, 1157 bp, Homo sapiens
agtctttcctgtctccataaatggcaactccaaatactaaataggtcaggccataaacttgctggatttaccatccagctacatcctgatacacccaacataagttgaaaatactgtttaggccgggtgcggtggctcacgcctgtaatcccagcactttgggaggccgaggcaggtggatcaggccaggagtttgagaacagcctggccaagatggtgaaaccccgtctctactaaaaatacaaaaattagctgggtgtggtggcgcacgcctgtaattccagctctgtaggtggctgagacatgagaatcgcttgaacctgggaggcagaggttgcagtgagccgaggtcgctccactgcactgcaccctgggcaacacggtgagattctgtctcaaaaaataaaaaaagaaacatcctaagtcgaatcatggtaagttgggggctgcccctacctctccccagctgaatcctaaccgatgcctctgcttcccctcaacttgaagcagccagaggaggagttctgtaaaaatatgtggctgatgtggttgtgtccctcccattccccagaccctccctgggcttcttaacctcatctcctccaccctcgctgccttcctgccactttcccctcctggctgttcctcagctgaaccatgcacatgcccaccccggggcctttgcgcttgctctttcatctccctgcgatgtccttcctgggaggtctctgtggcttctccatgtctctgctcagggtcatctcactcggagaggccttccctggtatggctgcccggccatactaggctctgacgctgctctcttgctttctggcaggtatcagcattcagtcttgtatcacgggtttttttttttttggtggctagttcatctcttgccaccttacagtgtaagcctcattaaggccaggggctttgtctgtctagttcctggcacatgaaacagcatctagccctgtcataagggctctgtcgatattttttccatggatggttggctatgcatcagggtagacagacactgaaaccaaccaacagtcccagtgactggaggggccctcctggcctgtttgaggcacagtagggatgaagcaggtggcctggggtgccagggctgatcgtctctccaagccttg

SEQ ID NO: 51612 - DNA, 1033 bp, Homo sapiens
ctgcgtgagagcagtggcagcggcgtggaggaagaccatgaatgtgagtgcgggccctcggctaggccgctgagtagtccagcctcgcgctgccctggcctcccctgccccagagcagtcccatttgaggtttggggcctggggaggcccctgagatgttgagactcatggagggaggcctgcagtctggacagggtggccaagccctggtaggggtggagtgagctaaggcctggccaccgaattaggggctgccctgtgtggcaccatcccaccctccccagcagtgcccctgtgctggtgggactccatcccagctcctgagggccccaggaggatgtccctccccaccccttagggcgtgggccccaggttctgggaggaaaggggttaggaggaaatgggccgaagggcttcccagagggattggcagcttgtgtggttgggggccgctgagggcagcacggagcctggggacctgggttcctggctcagggagagctgtggcttctcatgggcctcgcaggcgtgtactgttaccgtgtcaaccggcgcctgttcccggtgcctgtggatcccggtaccccctgccgcctgtgcaggacaccgcgagaccagcagggccctgggaccctggcgcagccagcgcacgtcaggtgagtgaccagagtattgggacaccttgggggacagagcctgaaccactggttttaagaaaagatgggcctgggcgtgggcccccaaccgctgggaggctcctcaggggtcccccactgcccccctgcgcagggtgagcatcccgctgtcgatcctggagcccccgcaccggtaccacatccaccggcgaaagagctttgacgcctctgacacactggccctgccccgggtgagcagccacgtggggctggatggtgatgagggcggggctggctcagactggcccagatccccagggagggtcacagagcgagactgggctcgacaagggtgagcgcccaagtctctggagcacagcctgggcctcttccatcac

SEQ ID NO: 51613 - DNA, 1034 bp, Homo sapiens
gcaggcgcctcgggtcccagatgtctgcagccctcagcagctgcagaccgcccctcaccaacccagagaacctgctttactttgcccagggacttcctccccatgtgaacatggggaacttcgggccctgcctggagtccttgaccgctctctgtgggccccacccactctgtcctgggaaatgaagaagcatcttccttaggtctgccctgcttgcaaatccactagcaccgaccccaccacctggttccggctctgcacgctttggggtgtggatgtcgagaggcaccacggcctcacccaggcatctgctttactctggaccataggaaacaagaccgtttggaggtttcatcaggattttgggtttttcacatttcacgctaaggagtagtggccctgacttccggtcggctggccagctgactccctagggccttcagacgtgtatgcaaatgagtgatggataaggatgagtcttggagttgcgggcagcctggagactcgtggacttaccgcctggaggcaggcccgggaaggctgctgtttactcatcgggcagccacgtgctctctggaggaagtgatagtttctgaaaccgctcagatgttttggggaaagttggagaagccgtggccttgcgagaggtggttacaccagaacctggacattggccagaagaagcttaagtgggcagacactgtttgcccagtgtttgtgcaaggatggagtgggtgtctctgcatcacccacagccgcagctgtaaggcacgctggaaggcacacgcctgccaggcagggcagtctggcgcccatgatgggagggattgacatgtttcaacaaaataatgcacttccttacctagtggcccttcacacaacttttgaatctctaaaaatccataaaatccttaaagaactgtaaggctgaggacatgatcatcgaaattgagagtatgttattaatagaacccctgagcagaagtggctttgggagtctcccagcagggcaggaattcccactgaacccccag

SEQ ID NO: 51614 - DNA, 1088 bp, Homo sapiens
ataaccccatttttgttttactgtctccatggtttggtaagataagataaaccattttttagagaaggaaaactgaggctcagagaacttgtatttcatggaagggtctggggggaactcttcctccaaagggggcctctcctgccttcggcccctgtgccctgaggctgcggggaaggtgggcgttcatccttcctcagagccgcccctgatggacacatggcccatctgcccccatctgacatcttgaccgaggaggaaggtgggaggtggcactggcttctgtggtgacataaggtgacttgttgatctgaggccagagagtccagttcttgtgggtggaagatgggggctgtcagactagaattgactcaccgacagtgggtgtcaggagtgggtcctggagaactgccccagagtaagtcctgggtggcctttgggtcaggagagtccccactctagggccgagtgtgaatggggacgaccgtggtccccagcttgactttggggtcatgccatatactctggcctcagagggggtcttcctgccgctgagcttgggcctgcctgggtgaactctggggtcatgtgagcccctggatgggagaggggtgtcaggcacagggctcagcaggacaccaggctgcagtcctggagtagctggaggaggttccctcccacttccttcccttcctgaccagctcctgcggcagctcatattccctcctccctcatccctgctccccacgaccccacccggactattgccgcagccttgtagctggtctcccggccctgccccctctcccgctgatccttggcagagagacccttctcaagcatgaggcacctctctgtttgcctggggagcctcctgtggctcccaatggttgaggcagaaactcccctggagatcccaggccagagtaaggtacctgaactcttcctcgcgcctccctgcacatgtgctcccccgcctctgtagaactgatgatggtcatcgtgtgtgtcattgtgcaaaaagcattgtccgtgccatcccctctccaagggacacttcttacccctatccttcaaggccttctgca

SEQ ID NO: 51615 - DNA, 1010 bp, Homo sapiens
ctctctctctctatgtatatatgtatagctatctattgatattttctatcatccatctatttatcttgtatctactttctattatctctatcatctatttatctaatctatcatctatctagctatctttctattttatctatctatctatctgtttgtctgtctgttttatctatctagctattttatctattttatctatctatctatctatctatctatctatctatctatctatctatctatctattctatctacctatctatctatctatctatctatctatctagctagctagctagctagctatctattctatctacctacctatctatctatctagctatctatctattctatctacctatctatctatctatctatctatctacctacctacctacctacatatctatccatcctctccgattccctcaccactgggtctcagattccctgcctgttaaataaatggtcagttaaccctcaacagtgattttcaatttttcacttgaggcccccatattttggaagattgtagtttgctgaacacgctgactgaatcaagtactatccaacttatttcctcattttaacatgtcaaagatcccctgtggggtgagtggggtgtgaattggagcctccccaatccaaggcacaggaactggaagcttctgtagccctgcatttcctagagaatgcttgccatgttttggggacctcctggggggcccctgtactgaccagaggccggctcccagggctgtggtttgggcccagccccctgctcctggggactgctgctgtggagggagtgaccttttgttctgctttgccaaggggctttctgttcctcattgtttagccatgacaaggctgtggatttttttttttttttctgtccaagagaataaacaggcctgagattgctcaagggagccgaccccctctgccagctactgggggctggaggctcacagagccagggaggaagtcctaccccctctgc

SEQ ID NO: 51616 - DNA, 1042 bp, Homo sapiens
ggaggccatgaggagagccatgagggaggaaggtggggactctgggcctgagtgactccttcagggtggggtgcgggcagggagccttcaggagggagggtactgcctgagcagggctcttaagggacacgtggaatttgttacaggaagcaccaggccattccaggcatagaaatcagctggggtgcaaaggcctgggggtcagaagagtggcagattgctccatggcaggaagccccagctcctctgggtcgttcccgctgagggattccagctgttggcaccgaggggtgcagccagggcagggtggtgctgcctgccaggctgaggtgggagacagctgggtttctagccctgcttgtcactcgctataggtgcagccaaacgctcagcaggcccaaactctgggcagtcctgactcccaggcagtgctgtgaggaaggggaggaggaggcacactgaacccacctgctacgttggctggtggaaatttggccaggtctgcactggcccagcggtgctgggtgtcgtgactggtgtctgctctgactggcttgctgacagctgaagtccaggataggtccatggccacgttgtgctggtttgttaaatatttttagtatctcccctgctcctatatgttaggtactggagtccagagaggttaaggcacttgcctaaggccacacagccgctaagtggtggagtgaggatttgaaaccagttctttctgactccctgtatccttatctatggagaggccccatgactcgttcactaaaggttatggatctcgatcttgtactggccacatgactgcagctggcagtacagtggggagtgcgccagccctggctctgacctcctagaactgccctttgttcatttccaggtgacgcatctgtgggggcccctgaaggacttggggtgtgtgtgtacaccctctttgcttgtacagatgtgttcacacccatgtttgcctacatgtgaatgtctccattctgagcttgctctcagcctggtagaggtggctaattaatgc

SEQ ID NO: 51617 - DNA, 1057 bp, Homo sapiens
tctcccatggttttactgagagcccacggggggctggaccctgtgccctgtcctgggatacaggtggcagtgagactgctttctccccacacctggtgctatcattcaaaatccctaagtgcgtgggctggatgcagtggctcaagcctgtaatcccagtgctttgggaggccaaggaggctggaggattgcttgaggctaagagtttgaggtcagtctgggtaacacagcgagactccatctctataaaaaaattaaaaaattatttgggtgggatggtgcctattgtcccagctactcaggaggctgaggtgggaggatcacatgagcccaggaatttgaggctgcattgagctctgatcgtgccactgcactccagcctgggcaatgagtgaggtcctatctcaaaaacaaaacaaaaccaaacaaaacccctggataggggagaggtggggtcagcaattcacctgaatatgcagatggtctccttgctgctgtttctgatgagcccattaggctaagaagacagcgggctgggccaggtcacctccaggggcttccattctggggtagaactgcatcaggccagaggtctcaaactagtggcccttaggctgaatgaggcacacagacatgattgctttgtaattggatttgagaatctccggcctagactcgcccctcatttgcaatgacccgaagcaccttgggtccctggcttgcctggctggcccctggtacatttgagtttgttttctgtagctgtctgagcttctcttttctttctaggactgattgtgggtgtgacagccttgggtctactaataataggagtggtgaactgtgtcatcatgacccaggtgaaaagtaagagtccatccttccttccttcatccacttgttcaggaagcttttgtggggtgcctcctgtgagtccagcactgggcacagccttaggggtcagacagagctggatatgggggtccttgttctgtaggagcttaaggcctggggtgaaggtacctctgctaacttaattactaaaaggcaagaggtg

SEQ ID NO: 51618 - DNA, 1049 bp, Homo sapiens
tccaggcatgtaccaccataggtccggctatttgttttattttttgtagagatggggttttaccatgttgccaaggctggtcttgaattcttgggctcaagcaatcctcctgccttggcctcccaaagttctgggattataggcgtgagccactgcgcccagccttaagtggattttagcaggatttccataggtggcactgggcaggtccccacattcgaggtggaatgcaccctgtgagcagaggctgaaaacttgcagggtgtttttgaaatggtttggggccagaaggtagaggctgccagtgccatgtcaaggaatctgaacttcagcctgggggcctatcgtatatttgtaacccaaaacatccatttcccctcctttttgtttttataagctccgaaccttaggttgactctttaaataacctggagcagcgggaagagagttcagtagccattagaaattactgagaaatgacctacctctaaattactcccagtttagtgagtagatttcttgctagcctgagatgaggagtttttggatgagacatccgtgagtaagtctgtaatgtctgcctggagtgagtgacccgcattatcatttataaagcactcagtacattggggtctgtctggagtgagtgacctgcattatcatttataaagcactcagtactttgggtgtttttctgcttggctctttggagggacctttccctgcagggccagtgggtgcatatttgagtgggtggggactaggaaaccttcagtcttaaactacggccatgctgttttgccagattcatttgcttttggcttggtgtaggctgttgtttcttctcattttttcctttacattctctctctcctttctagatctcctcctttgccctcttatgcttcagctttaatttttcgtggtgcgagttgcctgcaattccctttactttcccaaggttgtacagctgccagggaagcccagagctcacctgcctttgtgacagatttgggtattgaaaaataaggtggttcgggctgggtgcg

SEQ ID NO: 51619 - DNA, 1002 bp, Homo sapiens
gttttatagtgtttttggattttgatataatacactattgattagataacataccaacatgtaacttgatcctaaaaacatttgctgttggccaggcacagtgactcatgcctgtaatctcagcactttgggaggtgggaggatcacttgagccttggggttcaagaccagacagggcaatatagtgagatcctgtccctatataaaaagaataaaaatgaataaaaacaaaacagacaaaaatatttgccgctgtgacacagcctatggctgagctccactgtttgtcataaaaccccaacattgtaaaagagtgactaccagaaggaaagccattcggagcagagcaggtgttcttgtgacacacaggaggccatggccaggagcatggagagtcgcagccatcactacgtcctggagcctgtgtttgcatctgctcttttgaagagaaactgctccaagaagcccctgcggtctcggcacagtccccgtattgattgtgatattcagctggagaccattcccttgaaactctctcaggtatgccctttcttctcagtggcatctacttactgtcaaactggtgactgcagtgaaagtcttgatattaacgtatcctcagcaggaaagaaagttcatgtgagaccatttccctccagactaaagttgtgttaggtataaaactcaccgtctgttacatagttaaattgggttgatctcaggttagttttttttttttttttttttaattagttggtggtatggattggaaaggaggctagttttgttttggtatttttaagagctgaacaaaaaatacaagagatacggcaatgtataggcttaactgtcagggttcagagaaacatgtcacttgatgctgatattttggtctttcagtttgcactgggtttcaattcagtggatcaactaatgtgaattgttcttgttagatataggtcttaactgagtaaaagaaacaaacctattctaacctagtat

SEQ ID NO: 51620 - DNA, 1173 bp, Homo sapiens
gttgagggactgtcagcagagcaacaggagcagtggattcctgaagagatcctgggtacggtgggagctggccttcacttgattcaaacaaattcgtctgttatttgtgcaacagcttgtggtatttttcaaatttaacaaaagtagatatttggagaacagtttatgttcatagaggctgagagaagaagtattttgggagatactccatttgtaactctgtgactaaatgtgcgtattaatgcagtttcagaaagagctgagaggcagagcgtgtaaaagaactaaatttgagcaagttcaacaattttaaactctgaagtttgaataccagtctagagcctctcttaaacctgcagtgtccgatatctagccataggcacaaatggctaactaaaatttaattcgaattgaatacaagtaaaaatttagtttcttaattgcactagcacattagccacgtgtgctcccagtgctcagtagccacatgtggttagtggccactgtactggatatcgcagatgcggaccatttcaccatgctgggcagcactgctttataccatcccttatcatgaatcttatcctccctggtttgataataagttgataagatcccttaaaaaacaattagggttgttttacattaggaaatattataaaatagtcacccatgactttggagttctttcttaacaaagggaaaaatagttaaataacatcatcataactgtgatcagtctgcttgctggtgcttttttattcttccacgttttttcttacagtcttttctcccttaccatttaggcactgaggagttttttgaccccactgcagatgcctcgtgtatgaacacgtatacaaagcgagatcatgtctttgccaaactgaatttgcagttgcagcgaggtacagtgactctgttacacaaggagcaaggaactcctcaaatgaatgaaagtgctttcatgcagctcgagttttcaggtacactgcccccaagaaactacctgccactgttgtctctctgtgggccaatgtccaggcgattctcattatttgctgtggggatagtctagaaagtcagtgcgaaaactgtattagctaatgtggaaccattgctcttaggggaaatactgggttaggttcatgtgaacctctggtcataacattc

SEQ ID NO: 51621 - DNA, 1043 bp, Homo sapiens
catcatgtaggcaaggccttccatcagcaaaaagattacaacttgctgaagattcacaggattgttagcactttctagcaataaaatattttaaaattaaggtatctatattgtagtttcaggcataatgctattgcacactcagtacactactgtatagtgtcaacatcacttttctatgcactgggaaaccaaaacatttgtgtgacttgctttattgtgatcctcactttattgcagtggtctggaaccaaacccgcaatatctccaatatgtgcctgtagatagatagggtttttttgtttgtttgtttaatttcaaggaaaaatagttcatctataataatcttctgtaaaatagaatatctaatattttcaaaaacacattaggctctcataagcattgtatcaactattttatttatcttttatagatgtaaaacttctagcagagtctcttcctcgaagaaattcctcgttgctttcagtccggttgggtggactgtttcttcgagacctggctacagaaggaactatgtttcctcttctagtcttccctaatccagtatgtacaacagttggatagttaatgtatctaaggtgttggtaaattgtagtctgttttaggcaaatgataactgattcattctgacatttgatcatcttgagactgatgggctgggattagaaaagtttcttgaaattgttaaagagcaaatgttggtgacattaatggctatgccttcttgcactcctgtattgtagccaccatggtatattttgctctgatttggaagaaaatgctataagaccactattttctgcatttcaaggtcaatgtttgggtttcctctgtatctgacagtcattttcatgccttctgacccttagttactgacatgaaatctcgtctcgccagggtcccaaaacagaaacatctcaagttttctatatatatgtaatttttaaaatataatatacgttattaacgataagatctttgatcttaagttggcaacaagctgtctaaatggctgagtagtt

SEQ ID NO: 51622 - DNA, 2256 bp, Homo sapiens
gctcatgtcagggggcctccagcttttttcgtgtccatacttttttatatttgtgttttgatttccaaatttataggtaaattcacacttagaaaatggtaaacaaagatattatgcttaagagttttcctcagttttcttaaacaaactggggttggttgattctctacctttcataattattacattaagggaaagaggagggaaatagcagacatatatttgaatcttcttttttttatcttcagataactccaggaggaaaagtagggatgggtcagcatctgaagagacccagtttagtgatgatgaatataagacccccctggccacacctcctaacaccccacctcccgagtcaagcagcagcaacggagagaaaacacctcccttttctggagttgagttcagtgaagaacagcttcaagcacatttaatgagcacaaagatgtatgagaggtactcgctgtcatttatggacctccagatcatggttggacgagtgaaagacaattggaagcatgtccaggatattgacgtgggaccaacacatgtggtagagaagttcaacgttcacctacagttagagcgtcgattgatttatacttcagatcccaaatatccaggagccgtgctctcaggcaacttaccagacttaaaaatccacattaatgaagataaaatatctgcactaaagaattgctttgctctcctcaccaccccagaaatgaaaacttctgacactcagattaaagaaaagatttttccccaggaggagcagcggggaagtttgcaagactccgtaatgaatttaacccagagcattgtgttgttggagcagcatacccgcgaggttctggtggagtcgcagctcctcctggcggaatttaaagtgaactgtatgcagcttggtgttgagagcaatggccggtacatttctgtgctcaaggtgtttggtaccaatgctcactttgtgaagaggccttatgatgctgaagtctccctaactgttcatggtttgctcctggtggataccatgcagacatatggtgctgattttgaccttttgatggcttcacataagaacttgagctttgatattccaacgggaagccttcgggatagcagggcccagtctcctgtctctggaccgaatgtggcccacttaactgatggagctacactgaacgaccgatcagctactagtgtttcacttgacaaaattcttaccaaagagcaagagtcccttattaagttggaatatcagtttgtgagttcagagtgcccatcgatgaatttagacagtactcttcaggtgatttccctacaggtgaataatttagatattatcctcaatccagagacgattgtggagctaattggttttcttcaaaaatcctttcccaaggaaaaagatgatttaagtcctcaacctttaatgactgattttgaaagaagcttcagagaacaaggaacttaccagtctacatatgaacaaaacactgaggttgcagtggaaatccataggctgaacttactgcttcttcggacagtgggcatggcaaatagagagaaatatggcagaaaaattgcaactgcaagtataggtggcaccaaagttaatgtctcaatgggtagcacgtttgacatgaatggttctcttggctgtttacagcttatggatttgacacaagataacgttaaaaaccagtatgttgtcagcattgggaattctgtaggctatgaaaatatcatcagtgatattggctactttgaatctgtgtttgtcagaatggaagatgcagccctcactgaagctttgagtttcacgtttgttgagagatctaaacaggagtgttttctcaacctgaagatggcttctttacattataaccactctgctaagtttttgaaggagttgacgttatccatggatgaactggaagaaaattttcgaggtatgctgaaaagcgcagccaccaaagtcaccacagtactagctaccaagactgccgagtatagcgagatggtatcgctctttgaaactccaaggaagactcgggaaccctttatcttagaggaaaatgaaatatatgggtttgacctagcttcgtctcatttggacactgtaaagctaatcttgaacataaacattgaatcaccagttgtttctatccctcggaagccggggagtcctgagttgttggtgggacacttgggacagatattcatccagaattttgtggcgggagatga

SEQ ID NO: 51623 - DNA, 1078 bp, Homo sapiens
aaaagatagctttctctgcttggataaaagttgtttacttagaacttgtattgtcctagattctgatttaggcctaataagagggatacatctgtatctgaaagctaggtaaggatgaataattcggtttggaaaatgccagcttgggtggctcagagaagcataatgtagtctctggactggaataatgttcaccacatcgtgctttgaagctaccaagtggagcatgtgatgaaaatattgtttctttttttgtgtaaatgtatcttgtacctcagcttgctatgagttttggcctcaggatagctgtcaaggtttgctctcaatcatagaccccgggtgccaggctaacctgccctcctggtctaagtgtaactcatgggctgtattttgtatattctacgtttaatcagcagtaatgaagtaaatattaaggtttatggtctatcatttcatctcttttatgccagcttttcacatcctgaacaacaccaccattcagtttaaactggagaagatccctatagagagagaatctgaattgactttttctcttagcccagatgacctgggaacttctagcatcatgaagattgaaggaaaatttgtcaatccagttcaggtaaattcatgtcagggcagttgaagtcatatgtttatattagtactctataaatatgatatatatttatgtatattacatgttggaaggaatatatattttcaaagatatatcacccatgcataataccattgttgaaaccttgttccaataattgtggaatccttttgtcatggggaatccgtcttgtcagcctttttcatatggaggaggggtgggttatctagaggaagacggcagattcttaattccattgacattcagaaatggggaaatgattgcttacaaagtcagagtctcctttcccaggaggatatcattcttgtcacacttagacatacttaacacagccagtgaaacattgtgatcatctgagctgtggacagatcctttcaacagagaattagtcctgccctctctgaaatgaaatgggccaggatagggatttcttttttt

SEQ ID NO: 51624 - DNA, 1215 bp, Homo sapiens
gcctcctgggtagctgtgattacaggcattcgccaccacactggctaatttttgtatttttagtagagacggggtttcaccacattggccaggctggtcttgaactccttgcttcaagtgatcctcctgccttggcccccgaaagtgctgggattacaggtgtgtgccaccatgcccggcctatgttgacttatttttatggttaccattgacttaactgttgttttgatgaaaatcttaaaaacgttattgtagataattctttctttaaaaataattaagataattatttgaattctttaataattgattagtaattaatttaataatttaattttttaaaaagttgattatgaaagaatgtaagcctatacaaaagtggaatagtctaatgagctttatgtgcccatcactctgattccacttatgaagattttgccacatttgttttatctattttttttttttttggtgaaatattttaaggtaaatcccagatgtcatgccattatcacccctatgtatttagagtgtatttccaaaaactaggtgcttcttcttacataaccacagtggtatttcatgccttacaaaattaatgagcattctttgatactatctagtcgattttcagatttcagaaatattttggatcatttcaaaaatgtctttgttttgggtttgttggaatcaggatacagacaattggaagcattgcatttgggtgatacattgtgtaggtctctgttcatctagtttccctctcttttttgtccccccatgtcgtattttgttgtggaactaagtcagttgtcctgtggaatgtcccactttctggatttggctgttcgtgtgccacttaatttgttctcccacatatttcctgtaaaatctatagaacaggtttagttctataggtttgactggattcgggtttcttttttggcaggggagttgggaggtagacttcaggtaggtggtgctgtatacttcatattactttatatcaggaggcacataatcaggtcttttttctctcttattgatgttaaagtggataattgtatttaggtggcaagagccttgatttctccattgcaaaattccctgtcagtcattcacataatggtttattccactaatgaacttcgatggcacacattatttaattaggggttacaaaatggtcactttttctaattccatcattatttc

SEQ ID NO: 51625 - DNA, 2032 bp, Homo sapiens
ctcaatcctgtggtgtatccacgccagacttttgtcaacactcttcagtttctgcattcatttttgtggggtcagaaaaagtgactttgttgattcaggcataatccgcagtacttattgaactcttattgtatgtagattattgtgtagggtgctgagggagggccttgtgaacagaagtgggtcataaagaggtaaggacaaaataaatgaaaagagatagtctttgctatcaggtaacttacagcctcatgtaggaatcatgtggcaactgtagacatttatgggcattacatctacgtgcatttaataataagagtaactgaatttttctcttttcaatacaggtggtgttagcaaagcatgtatatgagcaggttttacaaaccctggacaatctcgtgtacagtgaagatctgaataagtatccagccagtgctacctcctccccttgccctgattctcctctgcctcccctcagtacctgtggagaatcttctgttgaaaggaaggagaatggattgttcagccactccagcctttctaacacctctcagaagtcattgtcagtgaaggaagtcaaatcctttactcagattcaagccaccttttgtatatcagagcttcaggttcagctaagtggagatctgactttgggggcccaaggtcttgtgagcttaaagtttcaggactttgaggtggaattcagtaaagaccatccccagactttatctattcagattgccctgcattctctgctgatggaggacttattggagaagaatccagattctaaatataagaacctgatggtgtctcgaggagcccctaagccatctagtttagcacaaaaagaatacctttctcagtcttgcccctcagtgtccaatgtggaatatcctgatatgcctcggtctctcccttcccacatggaagaagctcctaatgtcttccagttgtatcaaaggcccacctctgcgtcccggaaaaagcaaaaggaagtccaagacaaggactatcccttgaccccacctccttctccaacagtggatgagcccaagatacttgttggaaagagtaaatttgatgattccttagtccacatcaacatattcttggtagataagaaacatccagaattctcttccagttacaatcgagttaaccggagcattgatgttgattttaattgcttggatgtgctgatcacactgcaaacctgggttgtgatattagacttttttggaatcggctccactgcagacaaccacgcaatgaggctgcctcctgagggcattctgcacaacgtgaagttggagccacatgcctccatggagtctggacttcaggatccagtgaacaccaaactggatctcaaggtatcctcagttccctttggctcccttaagctctaaaaatggatttgggcttgttgatttaaatacaagcactttacatttactttggaaaatatctcttgttggcaggggagctatctagtcttctaggtgtttgctacgaaaggtagacatgaatattttgggaaaggttttactgtaaatcccatctggaggcagggaaaataagtggtttaagaatcttacctttcctttgagctctataattcagtggagttactttgcttctctgaaccgtagtttcctcatcttccatcatctaagatgactaaatgaggtgatgtgtggaaggcacctagcaaagtgtgtaatctgtaatagcaactttaaagtgtggcttttgtttctgtctccccattctctcagaacattatttgcttgcattgagggcaacagcgtaactgttaagaatggtctcaaaagttggactccgtgagtttgagtcctggtactttcactgtacccatatagctatgtgacctggggcaaaccacttggcctcttttgcccttaatgttttcatgagtaaactgaggatgttcagtggtgcccccatcatagggttgttgtaaggccctccacacagtgtgtggcacacaataaggatttaatga

SEQ ID NO: 51626 - DNA, 1719 bp, Homo sapiens
gacactaagattcgtgggaagagctggttcaagtggtggtggtggtggttggattcctccaaacaaagcatttttagacccagtgtacatgttcttttggtaaaattaaatgactagaggttttcattatttttattttatctttttgagacagggtcttgccctatcacccaggctgtagtgcagtggtgcgatcttggcccactgcaacctctacctcctgggttcaagccattcttgtgcttctgccttccaaatagctggaattacagacacctgccaccatgcccagctagtttttctgtttttagtagagacggggtttcatcatgttggccaggctggtcttgaactcctgacctcaagtgatcatcctgcctctgcctcccaaagtgctgggattacaggtgtgagccactgcatccagctgactagaggtttttaatttccccatgatgatctcgccttgagattccttctgtgcctgggtcagtgtcagaaatcatactgcaagggaactggagttccccccacaaagtcattgctccagctatagtaacccattgctttttctctgtcttcttctgtaaatgattttttttcttcctttccttctattacattccttttttcttttcccatctttttatcctcctgattattcatgcaccagacatttcttgagtacctactttgtggcaggcactgaagacaaaggggtgaaggcatggtccttgctgttaaggagtggagggtgtgaattgaagattaaatctgctctcagtcttttcctcactccttccttctcttccatcagtgttttgtcccctgtgatgttactcaaagcaaaaaaggttgttgggaactgactcaacaaatcctagacatataagatctttttaatagttacaattacaatattgcattatgaaatttatttgttacaaagaatgctacttccaagacaggggattttttcttctatttgtagttgtccctaggaaagaaaatctttgattatggcttttaggtgaagtctcagttggttaatggtgggcttctattaaatatttgttcagaggcagtaaatgggattctaaatcatatttatcattttgttttgaaaaatttatcaaaatgagatttaatggatctgtttgagttactatagaattgtataatattaatgatgaatgccaaaatgagaaaaattatttttataatgtaaagcatctcatgaacagaaaatagacaaggcaagcatagagaaggcaccacagaaactgaaatttagactgtccagtctccgccctgtcctcaggtcgtggtttctctggcttaagaaagctgaagtgaaattggcattgttaaaagcattaccttcaagtttcccaagcctttttgcattttccttgattgctctgccgttttcctgaaagataccttttctccccagtaatattggccttgctttatcttgtctgttcctaggttcattcactttctctagtgctgaataagaccaccagtgagcttgccaaagcaaatgtgtccaaattagtagcacacctggaaatgattggtaagtggtggggggtggagggaagcaaacttgcaaaatctggtcagcatttgaacattgtgatcacaaattgattgtcctcacgtgctgagtaaggtgtggcagtggcttgattgtggttattagtctggccagga

SEQ ID NO: 51627 - DNA, 1165 bp, Homo sapiens
tgcatgccaccatgcccaactaatttttgtatttttggtagagacagtgtttcactgtgttggccaggctattctcgaactcctgacctcaagtcatcctcctgcctctgcctcccaaagtgctgggattacaggtgtgagccacagcacctggccagcattctctctaatgggactttgtaagttaaaattcttagttgaatacaagtgatcaactacatcaggttctaaatagtaggattttaaaaaaataatattttaacttatttttttaaactatagagacagggtttcgccatgttggccagactggtttcaaactcctggactcaaaccatccatccactttggcctcccaaagtgctgggattacaggcgtgagccaccgtacccagcctttagtagagatttatgaaatgtgaagtaaaacatttttcctttcctaattatcaaagattacaaagctcatgttgatgctgtagtaaaaacaagaatgtcttttggggaaggaatgaactgaggctgaggtttcatgccttgtgcaattattttagaaaagcttcttagaggagattggcttttttttttttttccttcttacagcgtattcctgttaatggcctttaagattggtaaaagcttggttatttttgttagaagacattaggtatctaaaataagtatgtggctgggcacggtggctcacgcctgtaatcctagcactttgggaggctgaggtcaggagtttgagacaagcctgggcaacatagtgagacctcatctctacaaaaatagtaaaaattaaccagttgtgatggccagtgcctgtagtcccagcgactcaggaggctgaggtggttggattgcttgagcctggaaggtcaaggctgcagtgagccatgattgtgccactgcactgtagcctgggcgacagagtgagaccctgtctcaaaaaataaaaaaaaaaattgtgttttcaattcattgggagctgaactagcatgccaaatataccttagtaattgttttatcacgataattatgataataaattttgttttacagaggcaacggttcagaatattcctttttagtatccatacagtgttaataatgactcattatagattcacattctagtcgtacatgtttcagtcacgtcttc

SEQ ID NO: 51628 - DNA, 1164 bp, Homo sapiens
caaatatttggggattttccattatcttcttgttactgacttccagtttaactccatggtggtcatagaatatgctctgtatgattttaattgttttataaactcacgaaacttttgggaacctgaggttatttggtggtaaaattagggaattaattatcctctgagtcagttttccttcctctttcaggtgagagatcaagcccagcgctgttcacgggttctcctggatattgaggctggtgctcccgttctcttgatcccagaaagttccagatcaaataatctgattgtagcaaatttggggaagttgaaagtcaaaaataagtttctgtttgctggttttcctggcaccttttccctacaagataaggtgagcaatcagtatccatttccttttccgttcagctagtatttgatcactaattgaaaaatttgtatgctgctgtaagatgatccataattgctattacttttgtagggtatgtggcttgaagaattttttttggcattttattgatatttcagttaaccttatgaattgaggtagtgtaaattataactcttagtaaatgtaggtagtagaattttttttgacattttattgatatttcaattaaccttatgaattgaggtagtgtaaattataactcttagtaaatgtaggtagtaacttgttttagcaaacaaaccaatggaatcaaccttccatctttttataatgctttctttatataaaagcattccttctataatataaacgttttagactctgtggcttttttcagaggacgtgattggcccgtggtttacttgaagccatttaaaaatgtcttaataataacatctgtacagtatattgctttacagttttaaattactgtggcacctttttttttttttcaacttttgttttagatacagggggtacatgtgcaggtttcttagatgggtatattgcacccagatagcatagtacccaataggtagttttccgacccattccccccaaccccccgactccgctctagtagttgatgttaaacaagtaaacgtgtttccctgagttttgtgagctctcttagcaaattatagaaccttaggagggtatctgttgttctcatatttatgaccatccatggatactcaatgtttagctcccac

SEQ ID NO: 51629 - DNA, 1325 bp, Homo sapiens
gggttcctattttttaagtcaaataatagcacagagtttgtagtgttttaatgaaaaaaatttccctgtatttgtttttgaggatttgattttaagtggcagtgcatacaaggagcgctttttcttcaaggtataatgtgctttttttgcaacctgactattctgaaaaaccttatgggattcagcagtcaatccacattcacatgctttaaaaagaaaattaaaaccaaccctttaaaatatctcattacttgagaaagcctgcttattaacttttttttttaagtgtttgaattactttcatactatgtaaagatgttgttcttaaggcccattgaaaagaattcctttttttttttttttttttagccttcactagtacgttcttggtgatcttattttatatccttaaatcttagaaaaactatcttactgggtaccagtgattgttctgtagaattccataagggctgtttggagtgtgttgcttgttcaagtatttgtaagcagataaacacatctgtgaagttcacctccccatgcatacagttaaatataattgattacagtctatatgaaatgaataattaccttcttcaccagccatcattttgtatttgcatttgcctttgaatacatttgcatgtgtgaggtttgtctaatatgcattccagtggttaaagaacaggaaataatcctgaaatcaaagcttggagacgggttatttgcccttgagttccaggactcctgtgtgtttggaattgttttacataaatccatgtcttaatgagtacaagattgagtttttttgcatatgcttttatttcacttttctcaaccatagcttatgcttaaaccacaatttctaagtcaaaatctttgaaaagctttgggttaatcttctcaagccactgatttatttaaaccaactacagagaggatgtagagatgaatcaaatgaaagggcaacaaacactttacagagtttaaataaactaagtgagagggaaaggttttaatgttgaaatacttaaataatgacatttacctagtaatctgccttgcaaaaaaataaaaaaattgcagaaagcaagaactagtttcttttacttgtaattactacttgagagaactgtgaaagggagcagtgtttttgtattcttttccaaagctgagaggagtcaacataaaggcagccctagagggagagccatccttcctctcttcccagattcggttgagaatggcaagatgggaaccatgatgctacgggagctgtgcagacatgtagctccgaggcctccatgaagaagccctgggaagct

SEQ ID NO: 51630 - DNA, 1056 bp, Homo sapiens
ctgaggaaaacgacaagcacggaggagcccaggggaacccattcccaggggcagttcacgatgcctcttgctggaatgagcctaggaagcctgaagagtgagtttgtgcccagtacctccaccaagcagcaagggccgcaacccacactgtctgttggccaagagtccagtagtccaggtaaaagaggagaaaagcaacataatactgaaggtggggaaattcacaggactgttgaggaaactgaggggggtgggcattgtgttcaagcaaatgttaacgaagagatagcatttctttaacgatgatgagattctgattttgctttacaaggtttaagagttttgggtgtagatttatcattggatgacttgtaaagtagggttaaattagcacgatatagtgtaattaaagagatttttagatagcctattaggacttttttcttataggtgaaaatagttgccaccagatagtgatagtataagtagaaagagtcctgcattctgcaagccactacccagacactgtccttgcaaaccactaagtctaaaaaatataaaagaacacattaaaaaatattagcgtaaattaggcaacaacagaaatgctgtagcacagagtttaaaagacatgaaccatctggttattggtgttcttctctccaatataagaattagtcattccaaatgagaacattattttggaggcttttctggttttatgtattttttttttcccctcaagacagggtctctcactgtctcccaggctagagtgcagtgttgtgatgatggcttactgcagcactgacctcctgagctcactcgatcctcccacctcagcctcctgagtagctgggactacaggcatgtgtcatcacgctcagctaatttttgtgtgtgtgtgtttgtgtgttttgtagagatggggttttgctatgttgctcaggctgggtcttaaactcccgagctcaagtgatcctcctgcctcagcctcccgaagtgctggggttacaggcatgagcccccgggcctggcctcttttctgttgttaaa

SEQ ID NO: 51631 - DNA, 1319 bp, Homo sapiens
ggatttgggggagttttacagaaataattttgtttcttttttgttttgagatggagtcttgttctgcccaggctggagtgcagtggcgtgatcttggctcactgcaacctctgcctcccgagttcaagccattctcctgcctcagcctcctgagtagcttggatttgggcgcccaacaccacccctggctaatttttatatttttagtagagactggtttcaccatgttggccaggctggtcttgaactcctgacctcaggtgatccacctgcctcagcctcccaaagtgctgggattacaggtgtgagccaccgctcccggcttacagaaagaattttggattaaccgtagccagtaagtgtataaaataagtgaatgttatggactgtttatttttttaaggattactcaggtatttggtggggagagtggttttgtgagggctagaatggaattatgtaggcctaatggaggagagttctttttggtctaggcaagaatgaaggtggtttggatctggtcagtggaaatggacgtggttacatgtggcagtatttgtttgaaaaaataattttagtgctggagaaagtttgtaaaccttttggtagcattgtgcgtggggagggattgcctatggagtcagatttcgtcatcaatcccccagcctcagttgttgtcacagcatgggcatgagacaccgtagaactgtgacgcggtctgtgcttggagtggaggcgggtgggcagggtgtgtcgagcacatggagctttgcataaggaggtctggctgccatagtggagactcctggacagccagttttctgagtagtggacagtgtggggaagcaggcagctgtaaacattttcaaagacagaatgagctttgcattttttatttgtttagtgcaacccctttttgggtccccttttcttcattacctctctttccttgggtccttgtagaagaccatgtctgcctgctggattgcgttgtcgtggatctccaggacatggacatctttgctgcagagagacatccgagagaatactcgaaggcaccagaggatagtagtggagatctgatcttcccttcctattttgtgcgacagacaggaggaagcctcttaaccgagccttgtaggctgaaattgcaggtggaaaggaatttggacaagtgagtgtttttttttttttttgagatggagtctcgctctgttcaccaggcagggtggagtgcagtggcgcaatcttggctcactgcaacctccacctctgaggttcaagtgattctcctcagcctcagcctcccaagtagctgg

SEQ ID NO: 51632 - DNA, 1454 bp, Homo sapiens
tggaactaaaatatggtcccacacagggtgatggagtcagaaagtcctgtcttgctgtgtgtctgagtagttacggggtgggagatgcagaaccacttgatgtgcagcattgatgccttgctggccaacattttcaaagttaggggctaggcgcagtggctcaggcctgtagtcccagcactttaggaagccaaggaaggaggattgcttgaggccaggaattccagactggcctgggcaacatagtgagagaccctgtctctacaaaaaattaaaaaactagctgcgcatggtggtgcatgcctgtagtcccagctactcaaggcgttaaggtgagagaatcacttgaaccaggagattgaggctgcagtgagccatgatcacaccactgcactccagcctaggtgacagctgaaacctggtccctcccgccccaaaaagttgcaggattttatataaaaggtttgtatttagcttcttttgaaaaactggaagctttggcaatactaggtccatgttctcacttggaagcatctggaagcggagtagcaattgctcccttgaaatggggcatatgcttacctagtccttcgcttatttctgtcacttccttagtcagtgtaaatgtatgaattcgtgattactggtgtggaactttaaaaagtgcatttcacacttaataaccttttcatgttgatctcttatcagtcctgtaagctgggcgtacatcactcttttccagatagagtttctgactagcttaaggtcgtatgactgggaaagtggtttggcatttgaaaacaggacttcaaggccagtgattccctgctgaagcactctgtcttctagttagtctttctgttgaaagtccgccacggtctgtacctaactcagctggtgagagcgttgcatactgaaactgtggtcccacattggtggtcttgtgagctagcaattttattctttccttttttttttttttttttttttttttaagacagaatctctctctgttgcccaggcgggactgcagtggtgccatctcggctcactgcaacctccacatccctggctcaagtgatcctcccacctcagccccaccgagtagctgggactacaggcatgagccacgtcacccagcgattttctgtgatgattggctgtgcccttagtttttctcaatatggaataattctgtatgtattgtcataatggtaccgagtaattatgaattcctcattgcagctttctcggttatgaaaaaacgatggttccaaatgcatttcctgttggtagattagttgaattattctccatgtgaagagtattatttgttcccagtacactacagcagtttcacataaacagttggacagaccctggagagtgaaacatccaggcaagctagaagctgacagatgaaggcccagagggacccttgacatcctttgggg

SEQ ID NO: 51633 - DNA, 1614 bp, Homo sapiens
gaggtaagaagtctatgtgttgatcacagcactgcgtgttggctcacgagcaaagcatctggaagagaattttccctcttaaactttcatgaggggaaggaattaatgaaattggaagacccttgccctcttttcctctttgttttctccccaaatctacctggctattctaatgcatggattcagtctcccagtgttagtctataaatatgcagaggacatttgcctctttctcttacaccctttcttcctcaagaagttcaaggagacttttccagtccccactgccctgtcaggcaccttgttgtgccctctcgttctgcagacctcgtccatgaaggtgaggccgtgggtctcatttcccctgcatccctctcctcacctggagtgcagccctgtgaagagctagggctttgggaagggaaacctatttatacagagtgctaaggatcttatatgttatcctttcaggaatacctgatccataaaagggcagctctgcagagtcctgcctggctgaaaggagcgcatggataatagtggtgctttaggctctcatgtcatctcatgaagaagataatttgtgttggagtggcctttgtagctcggaaatgtcattatgcaatattaggccaaaagtgctttgtctcttgttaagccatggggtgtggagacagaaggggaatcgtggcaggttcttgtttctatcagatgtttgtacttgactcatctcagctcacattccccatgccacactgttaggatatttggtcggggttccttttgctttacgatcggccttttcatgcccctttctttccagtggtattgctcaaagtttgaaggaataaaacttattttcactgttaggagtatatggtttatggttttgagacaaacatagtggaataaagcctgtagggactctacttcttgaccacttgtttctgtcttgtaaagaaacctccgtttgagaggaaggatttgcatgctggtgtgatgtgagttgatcatgaaattgcaattcatctgccttccaagccaccacaatactagctttgaatggagaatcttgctgattgattaatgaactgtcaggtacaattgggttttgtgtagcagaaacccctgaaggaaaaaggaaaatgaaactgttctgctctgaagtcttaggacaactacatggcaaaatatttgagatcgctggaaactcctttcagtcctgcctttgaggcagcacaattggatctgaattttaagaccagcttgataaatcatcaggggagaatttataaagtatgaattttgaatatggcaaaggaccttgctgtcacatgtttttcacagcactaggataggtcccaaaaaggtggtggagggggtgaagagggtaagaaggacccaaatgattggtcttttctttccgctgtgctcttcctgagcatgcaaaataatttggtcctagaactggagtcctttctctctctctcccttctttctctctcccaatgaatgtatttattttttaaccttttattatagaacatttcaaacatatacaaagtaaacagaataatataatgaactccatatatacctatcacccagttttaa

SEQ ID NO: 51634 - DNA, 1078 bp, Homo sapiens
gttggccagactggtctcgaactcctgacttcaagtgatctgcccgctttggcctcccaaaatgccgggatgacaggcagcagtctttagtagtggataagaatttgggttctgaggccaggtgcggtggctcatgcctataatcccaacactctgggagcagaggcagatggatcgcctgaggtcaggagttcaagaccagcctgaccaacatggcgaaaccgcatctctactaaaaatacaaaattagctggcgtggtggctcatgcctgtaatccagctactcaggaggctgaggcaggagaatcgattgaacctgggaggcggaggttgcagtgagccaagatcatgcccctgcactacagcctaggcaacagagcgagactctgtctcaaaaaaaaaggggctctggagctggctgactgggttcagatccttactgtctgccactacctattaatgactttgggaagtggctttaacctctgtgaaccagtgcttccttatctgtagaaagaagataagaggctgtctccctcagagatttgatgtaagtaaatgactatatgcaaagcactaagaaagtgctagcacacagcaagtgctctataaatgttaaccactgttactagtggttgtgctaatggcggtgatattgataattatgaccatttattgaagtcctgtatgcctatctttgtgttttctttttgcatcctcttcacagcccttggaggcagacattattattcccacttgaaatgaggaaaccagctcagattggttaggtaaaacttcttaagtaaacttggtggaggtcacatcttagtcccctacgatggacttaaagccaggtctacctgcctcctaaatctgtgttctttctactccatctcacttcctttccatctccatgtttccctttctcttcaaaaagagaagtacagcacaggctgcatttccttccatcttttttttcccccttttttaaaagacagggtgtcactctgttgcccaggctggaatgcaatcatagctgtggcgcaatcatagctcactgcagcctccaactcctggg

SEQ ID NO: 51635 - DNA, 1470 bp, Homo sapiens
atagccaagcgagggcttgctttattttcctgttttaagaacttccttgtacatcaattttttttttaatgagtgggagttgaattgggggtattccatgtcgtgagtactttagtaataggaaagaacatttccaactgatgaacagagtggtgcatattatcagctgattcttatattgtttcccttccatctcccttaactttggtggaaatggaataaactccacagtgtatgatgcagaaatatgttaatacaatgtcagttagaggtgatttctcatattgaagagcaagtggattgaggagcaccatgcttcatcaagcagtggtgccacaagtcttaagtttataaaatacccactgaaaattctcatgggaaggcatggggctctgcaacaggcactataataatagggatagcggaaaaaaaattctcagtaaataattgcttagacacaaaccttaatttctttggatgtcagtttttgtgtttaggagataaaaaagaaaattttctttatttctatctctgatctttgaaagtttcttgagaaattcactggtaagtgaatgtggtagaaaacaccataatcattgaggaattggagtcccaagatgttcagtttttgttttagggagtgcagtttaatctgaatgatttatgtgtgtacatggcaaattccagattattcgtcatgatttttttaaatagaaagagaccacaggaactccctctaccaggaatatagaacagggatgttaatactcagggtacattgccctgggttttttttttctggacaattttaccagggtggatgtttgagggagggctcacaaagaaagcccagagctgaatcttaatttatttgtgtattcctgcttctaagctttctatatgttacttaatctttcaggcttagccaagcattattcctatttagctgataaggacagtgaggttcagagacactaggtgatttgcctttattcacttgacctcctagtagcaaacctagtattttaatctgcttcttatgatttacaaaccaggtcctttctgatggactgagctgcttacatagcatgacaacctacactgtttataatggcaaaattactgtgtgaaacaagtccgaaggggtagaaatttccttagctggagctgtttgaagctgaacttggatacgggtagctttagactctctctcagcccatgaagaaattgggtttggtcactaggggcagattttctgaggccattagggaataatgttctctttgatggacttgggaacttttgtctctggtgctgtgccaaaggcaagtacatagtttatttggaccctggtgcagaagatgtcagatttgttgcctgatgttgggcttggatttgcgtgcatgctgtgtatttttatcctcagagaaatgggttattgaagcctgtgccattatgtctcatcaatgc

SEQ ID NO: 51636 - DNA, 1039 bp, Homo sapiens
gaaagcctgctttgggtttcttacaatgtttatagtcaggtcaccgctctttagaatttggttacttacagttttgtattgattgttgtttctttccacattccctgattagaagctttttgtgcaatgaagccatattttatgttccttttatggcttccatggtacccaccttataatagatggtggtggtatctatgtttaaaaaatgggctaacaattttgtttgaaaagctttgagatggtctacttctgcctttccagggagacaaaaacaactattagtataaaagaataggaaagaatgtttttattttattttgttacaaaatgcatactatgactgtagggtaacttatgtaaagggagacttccttaaggtaaaggctttttggacaaagtttaaataagtacatatgatatatcttgctacattttaggttacccacttagaatatagttcttggcagcactggggaggtccatttttatttctttcgtgattcccaccaagttaggtcctgatgccttcttctgagagataaggcctgtaagagttgtggaagaattgggggctgggaatagtcaggcagggaccaaattctcccatagcagccagcaaatacgtggagcttccatttgtcctgttccttctttcttgcttccaccttcagcccctttgcacaagagacaaatttgggcactgtctccaggttgggggagggtctctgccatgcagataggggcgtctgctcatagccttcttctgtttgtcgtagcagaggtgaaaacccccaagcgccggcagccatttgtcccctttgctctgaggaaccacacggggtgcactttgtggtttgccaccctgaccaccacacccaccaggtaagcagtcagtttatattaccccgagtcatctctgccaccaaagccttcttgtgccagcccagtagagcaaggtgggccccctcttgaggctcttgggatgatatttgaatgaataacttgctgtcttgctgagatttatgatggaggttct

SEQ ID NO: 51637 - DNA, 1050 bp, Homo sapiens
ctgtctgtagtcacgtagggctggagccaaacaactgcatgtggttctgagcgaattaggatttcaacaaaggaaccaagaataattttttatgcatttccaagagtatggttatatgattaaatcgctactgcatttttaccaccccagtgacatcattatataggttggggtgagggttggtgggggaaagaccttggctcgtgtttaggttttgcgtggtttgtacaatggaggataaatgccactcttactcagtcaagctttacagatcttgcagtttgtgttgtaagtgtaaaacccagttaaactgtgctcctgatttcccttgcattaggtaatctccaaaaggtttagccaactgggtttttacatcatatgtactaaatcagatttgtgtctttgcttctacttttcatcccttctggagattgtgcctaatatctttttctttgttctgcctgacagacacacccatgacctccggattcatcaactgcaagtgagagtaaatggctgggagcaagtgagcccagtgtctgtggacaaagtcgggaccttttttcgatatgcagcaccagataaaaattcatcttcctctacggtgtgtgacattcaggaagtcagatggttaagcgactgtcaggaagtcagatggttaagcctgtaataagcttactctaatgaaactttcttgttctttctttcccctaattctaggactgactgggtcagtcataggcattggtaatcaatatgtagataagccagccaatggttagtttcagtagaaaaacaagatttaaaatcagcagtaacacatttcctcacctctgtagatccatttcatgctagctggcctgactggcagtttactagtctgctgaacctgagtcttgtttttatttcacatattgttatgctgtccatatacactgtgtttttaatatttcttataatgcagcaccttgatccttttactctgtgtctccaaatctttctctgtggcacaaagagagatgtccactgtcgtttattttctgatcacac

SEQ ID NO: 51638 - DNA, 1827 bp, Homo sapiens
acagaaggtaaatcatttaatgttttgcaaagtcctacctcattatttctaattttaattgtgttggatgttctttatttaattccctgccagtagagtagaagacaagcctttttcagtttcgttgtaaggaactcaggggctttatgaatcaaggataatttccagcagatactttcttaccaaattacaggaagtttggaaaattggataggttattatcacagtctcaggtgaatgtttttaataatgtttctagaggcttaggactgatttttcttagtgacacactttgtgatatcacatctgagtggattatctgtttttgtagaactttttagaatttttttttttaacagtgtataggatgtttactccctttaaagttgaatggctttagggttttatgactgatttcactgaagaactatagtagtaataagacacttttaaggtagacattctgatcgatattattgtattttatatgttttttcagaaacataactattttgtctttatcgctctttcacagttctcttcactcccaccagtgcgggtggtctttgcagtgactatggaaggcagtgcacggaaagtcatcactgtccggtcagccctcattgtgaggaacagacttgagacaccaatggaactaagactggatagcccatcagctccagacagtatgttttgattgtctagcatatagtaaatgctgataaatacttcttgactgttgtcaagtctctttttccccagtggtatcttccccagcagtcagtatatatggtctgtcttcttttgtcctgagatggtcaatctttggggtggaggaccattgcctgaaagtgttaacccttatttctgtggcagagccagtggtgcttcctgctatcatgccaggggattcgtttgctgtgcctttacacctcacttcttggcggctacaggcccggcccaaaggattgggtgtatttttctgtaaggctcccattcattggaccaatgtagtgaagactgcagaaattagtagcagtaaacgagagtgccactctatggacacagaaaaaagccgatttttcaggtatgtagcaccactgcagtgacatgtcacttttgccttttttttttcttttggaatgactattaccattctttctctaaagacccttagagattcagttatctttatttaaactctaaagttcttattccttgagttttagttagagttcatgagaactcaagtgctaacggttggtggggtctggggaggctttattacatgggagagacagccaacacacatgctatttacacatacaagattagaagtttgtgttgtacaacagcataaagagaggacatatagagacgggaaggaaaacaaacagaaaataacgagttctcattccaaaattggaaagcaaaatcctggggtttggagttttttgaatgagagatttcaaaataatttgaaggtttatgtacctcatactgactttcttgagaactttgacaaaattgcctaaccatttaaactcctgttttcccattatacgggagtatgttactagattcagtgttggaaataatactggattgctatgttacaccctaacaaatttagactttcaacttatttaatgaggattagctttagtttcttttatagtgaagacaggcattcatttagtctaaacttagagaaaagatacaagaatagtgtaaagaatttcattatactctttacccagatctgcaaattgttaacagactaaaggaagaaatacatcaaatacatagctggagttggtgatttta

SEQ ID NO: 51639 - DNA, 1019 bp, Homo sapiens
catgagggaactttctggggtgagggaaatagcctataatttattttggatggtgtttatagaggtgtgtataattgtcagagctcatcaaactgaacatttaaaatctatacatattattgtgcatttatatcttaataaatgtatttggattgaaaactgcaaataattttactcattgaaccatcttaatgttattctttctcatacttagctaaggagaaaaaatttaagttcttcattaagtctgatgatttttacaccattttatcttcataggttttgtgtggctataaagaaagagaattatccagattatatgccctcaaacatattttctgacagtgcaaaacagattttcagacagcctgggcataccatatatctcctgccaactgtggtaatctgcaacttgctaccctgtgaacttgatttttatgttaaaggaatgccaattaatgggacgctgaaacctggcaaggaggcagctctccatacagctgatacatcccagaacattgagctgggtaagaatgtagtcagatgatcatttgtcataatcctatgaaaatatcaatgagtattttgtgattatttatttggtaagcatcttggagaaattggggcacatataatatctcaataagccagctcaaaggaatcagtgcagttaaaaaaaaataacctttagctagaggtggcggcagtacatgcctgtagtcccagcttctcaggaggctgaggcgggaagattacttgagtctagaagttcgaggcttcagtgagctatgttcacgctactgcccaccagcctgagcaacaaagtaagaccctgtctcttaaaaaaaaagaacttatagaaaaggatgagaaaaaacttatcaagccgaaaggtttacagaggaggcactcaacagagccttttttcttacattgctacatgatgtatgattgtaggaagtcatttcatctttttaaactatgcttttcccaagcaaaatcttatgcctcttctcttt

SEQ ID NO: 51640 - DNA, 1035 bp, Homo sapiens
tatttcataagagctagaagagaggatttttagtattctaattagaaacgatgaatgtttgagatgatgaaaatgctaaataccctaatttgatcatttcacaatgtgtatatgtattgagacatctcactgtacccccaaaatatgtacagttattattatgtgtcgattaaaaatttaatttttttttgagatggagtctcactctgtcacccagggttagaatatcaaaatatctaatttatatctaatcatatgggttaggatatctaacccatatgattatgcaatttaggctctctagtgtgattccaggccttctggtttgcttatattgatccctaccctagctagagagaaagagccattctaatgaagatttttgcagttagatacttagttattggtttttccaaaaggaatccaatttacttttgctgtgagctattttgacaaatagtgagaactctgaaagttaatagtttgtatcttctttaggggtatcactggagaatttccccctctgtaaagaattgctcattccacctggaacccaaaactatatggtgagaatgcgactctatgacgtcaaccgtcggcagctgaacctcaccatccggattgtgtgtcgagcagaaggatccttaaagatcttcatttctgctccatattggctgattaacaaaacaggtacatacaggggctgctcaagtaggtctttggcgttagtcatgggaattcagatttatttgcttagctaactaaatggagccaatgcaaatagattacttcaacagtctgagctgctgaaacattcctgcttccatcataaatgcttaatcatgctcaaaactgtctttttaggcaagaaactgagcccactaaatagattcagttttcactcttttcccgcttgatggttttattcattcaccatttgcatctctttcagatagactgggtggtattgatgtaaacttttctctccttcctaaagggttgccactgatcttcagacaggacaatgccaagaca

SEQ ID NO: 51641 - DNA, 1088 bp, Homo sapiens
ctcctggggatctgaggagccacctaaacactgcccttttgaggtctgtggctctgtttaatttcagactcacctgtgtcaggaaagtatcagtttggcttgaatccttgtttttcgggggaataataggaacacttagcatgcctttcatcctccaagtattcccacgcattcattaaaatttgcaagccctaagagggtaagaagcattgttctccttgaaactgaaggagagaggttaagtgacctgcctagatgcaaaggggaagtctgggtcagaagtaggatcaggattgggggatacaaataaaatgcacttggtggttgtagtaattaaagcaatctccagactcactttgcttatggagatgggaagggtggaaaggggaggggaggatactgtacccatatgcctcatagccacttgagaacgctcaaaagattctctaaagggttaagataatttgattgaaatatgaatcagggtgaaaattgtagcagcgcatcctttcagtatataatttcccagcctctcaaagcaatgtttagttttgaacattggaacaccatctatgactgcatggtcctgtagaactttctgtgatgatggagatgttctattttgcactatctagtagtagccactagccacatgtggctgctgagccctggagagcacattagtgagaagtaaggcaagtatggctgaggaattgaatttttatttaattttaatgaatttagctttaaatagccacatatggctactggcaccgtattggacagtatgcacatagtgtcatagttccttcctagagcaaggaaaaactgatgtgatatcatttacatatttatcctgagtcccatggagaatcaaagatatgtttaaatgtctgaggatttattaataaaagaatcttccaagtatagtttcctctttggatttttaatcataggtttgtattcattctcccttgacatgtgaactgtcttcttaaagttgacattaagatttttaaaagaaagaaacttgatttgatcttgcagcacaggatagttatcttaacttgttctcactttcgtttgct

SEQ ID NO: 51642 - DNA, 1100 bp, Homo sapiens
tttaacgggcagtcctaaactactgcgaacagacctatgccatctatttcatttactttcctcaccttttcatttggaaacaatttaaactataggaaagttacaaaagtagtaaatgaatatccctatatcttgtacctagatttaaccagttttcagcatcttgctacatgttgcttctctcttcacatacatgaacacacattttcctttctgaactatttgaaagtaaattaaagtcatcatgatacttaagccataaaaacctcacttatcacccaaaaatagggacatttttctaattaaatataatactattgtcacatactgatgaaatttaaccttgatatgttttctaataaatagttttcatagactgaatgaatgactagaatgtccttcatagcaactcccttcccattgatctaggatccagtcaaggatcatttattttagttgccacgtgtattctcttgtcttctttaatctagagtagtcccgctttgcccattttgtctttagtgacattgacatttttgaagactccaagcaagtttcttgtagaatgtcctattttctgcatttgggcagtgatttcctgtctgtagatttgggtcaaatattttcgatagctatactttctatgtgatgctgtgtgtttcccaccatgtcacatcaggatgcctgtgatgtctgttggtctcattattgttggtgataagttgttcttcacctggttaaggtggtatccagcaggcctcttttttgtgaagtttcctttgttctttgtaaataagaataatcccattgagggaataatttaagacaaagtgaatattctgtttcccaaaaacctttcattcaatggtttaatggttcttgaatcacttattacattggtggttgcgatgaaatttatttatttatttatttatttatttatttatttttggaaacagagtctcgctcagtcgcccaggctggagtgcagtggcacaatctcggctccctggagtgcagtggcgcgatctcggagcttctcgggaagctccgcctcccaggttcacaccattctcctgcttcagcctcctgagtagctg

SEQ ID NO: 51643 - DNA, 1015 bp, Homo sapiens
gctagaaagatgccattggaaggatggaattgctccccttagatatttgacttggcaaagcgtttaaagcctttcattcaataggatatatgtatatatgtgtgtgtgtatctgtgtgtgtgtgtgtgtgtgtgtgtagcacatgtcttttaattggtgagtttttttggaatgtgcaagatgattagaaacattcgaaaggtgagatgatgaatttcactggggcttatttcctgtgtaagattcatttaggaaggatttggaacttaaacctacaaagcactgactcacttttcagtaaccccactctgaatgaaagtcctctttgtcctctctgccatcactctaggtcccggttgtctttactcagcatggcgtagctgaacccaggctccggactgaagtgaagcccatgacttcattggattatgcctgggacgaacccaccttgccaccttttatcactctgactgttaaaggggcagggtcctctgagatcaactgcaacatgaatgatttccaggataatcggcagctttattatgaaaatttcatttacattgctgctacatatacattctctgggtaattcttgattaaattactgttcctataaagcagaaggttctaattattaacaggttttaaatgttaagcagtttcttaggagaccaaagtacaaaggaagattctttcattctttaccaaaccctgggctcagtgtctatcttaagaggtcatgtaatttaaactcttgacttttggctagattaaaatttatccaaagagtcaagacccttcttgtgttaaagatctctcccaagaattcattctagtatttaaattttctttttgctatttattagtctgttttgcctgtttcctcttttgaaactgactaatcttcatcataattattcaagtcatcattctgactctcctcccaccatcccattgagaatactggttaagcagacacctaagggtctgtcttaatattcacctaaagccaaat

SEQ ID NO: 51644 - DNA, 1019 bp, Homo sapiens
ttaatagagacgggattttgccgtgttggtcaggctggtttcgaactcctggcttcagcagatccacctgccttggcctcccaaagtgctgggattacaggcaggagccaccgtgcctggccaaattttttgcctttttttttggtgggggggcctctaaagatatatggttatacttttgcatctgaattttaagtcactaaaattatgaagagaagaaaaatgtcagagtatgtcttctgagagatgaatcttggaactgtgtagggaaaaaaatgcaaccctgatctttctgctcttgcatcagactttttcttctatcctttaaaaaattttctttttaataaaagttttgggcatttgcttattaatacttgaatacatgtgtgagtatgtgtgtgtatacctgtatatatatttttatgtaatatatatattttttaaattctagcttgcaggagggaacaggcaggcctgtggcttccaacaaggccattacctgtgcggagctcgttttggatgtctcacccaagacacaaagagtcattttaaaaaagaaggtaagagagcttacaatcagagtttagaatacaaggtttttagcactggacgggactcaggatcacccagtgcagagtccttatttcatgatgaggccatagggacttgtgtggaacccaggcctcttggcatttccaggtcagtgttagggcggatgagtaccagctcaggagtaagatgacttctggagtgggatgtgatcaccaggtgtgatcagcagaacgtgaataataaatatatgtggaattactaagggctgggtgactgttaagcagacaagaacaaatttctaagattaagtagcaataattgtaacattttatataacattttataacttatagaacattttcagttattatttcacttgataaggatgacagctagtaaataggtaataaaagagttacattgacattgaaaattaggttaaagtgtatgaactggcatgaagaaat

SEQ ID NO: 51645 - DNA, 1017 bp, Homo sapiens
aaacccctccccaacctcccaacttggcttcagcccctgctctgggctgccccatcgcttaggtggatgcctttcttgttccacatgcgctttaacaattccacactgggccaccccaacccccatccccaccacacacacaagccccatggagttctgccttccacagtcccatctaaagattttagaactaaattattagggaagggaggaagggaactggaaggagaatggtgcatctcagattttcaagtggaaattttggtagtttccaaattatgatgagcctggacaaatgggcaggcagtagaggaatcccagtatggaaacttgatctcacctgggtatgtctgtgttgattcccagtctgcagcatctacaggataaccgagatgcttttcctgttgtttctggtgctgtgcagagatgctttctgtttctgtgaacagagaagcaagcatgtgggaattggagatgggaagcacagcttagcttcatctctttttgcagacagaggaggcagtagcacacagcagagacagcatgatgtgtttttaggtttgagttctggctttgccacttaaagatatatagtatctggtatttcccatttctctcagtttcatttttcaactgacctcccagatttgctggaaggattagctaagataatgtacataaagtgctctgtaaagagatgtaatgataataacacaacaaacatttattgaggctctaccctgtgccaggcatgtactaataagcgtgttacatttattacacttatcacaaaaaccatgaggcaatttttctcgttgacagatcaggaaacggaggctctaagagattaagtaacttgtccaaggtcattcagcttgtaaattgtgtagctggatctcagatcctggcattttgactccaatgttcatgctactttgttagtttttaccttgtagaatgtgataaaaagctatctgtccggccaggggtagcatgtaaatgagtttgtggtaccct

SEQ ID NO: 51646 - DNA, 1085 bp, Homo sapiens
aggccaggagcctttaaacggtttcatgaggtggcctacagcagtcctttttccatttagagcattggggtattacaaaagaagggctttaattgagcaatctagtttggaagaaaacccacattttaatggtcagagtgagagggtgggggttagggggagtttcgaacaaagacactatttaaaaagcctaaaactgtcttctcaaaggcttgaaataatttgttgggaaacttcagaccctttacttttttcctcccctccctaaataaaaaccagatttgttaaaaggaaaaaagatccagtattgttaattgtatttcagaaagtgccagagagggaaatatctctgtagttttaaacattgtcccaagagggaaataggcaaataccctgcttcacataaacagtctctatgtaccataaataaacctttaaagaatgaattccagacagttttgtttagtgcaggataaactaagaaaggaaaggacatggccgagggaatagcttgggatctgagaccttatggtatatagacaggtatttcttctttcaactctatgaagtttctggaagacttcagcagttttcgcgtggggaggtagaaatagacagtttcctatttttattaggagcttatgaacacaagattgccttctccaaaatccattttataacaggaaactgtctgctgcttgagtaaataagcatcaactttgtatactactgtatttgattagtcatttagttactacaagaataagccctgtttggctcgttccctcatctcgactttgactgtccagattaacctgaaggtggcagaataattcataccactgggctgtatctcagctttttcaaatgtggagtcccaaaagcagtaaatgactaggtaaggataacttttacttaagggccagaatatttcctcgattcagaccaagcaccttagtcattcggaaaggtaatagtgtctatgatgaaggttttgacatttcagtagaggtttcaaagtctttgctactttgtgtggttcttctttaatatttggttgcaaggacaaagttggggtataaaag

SEQ ID NO: 51647 - DNA, 1042 bp, Homo sapiens
gagggagggagggagggagagaaagaaaacattaactactgtatcattatctattattgtgtaacaaatgacgccaaattgcagtggtttaaaacaaccaccatcttatttgtttacaattctgtgggttaataatttggactagacctagctgggtgtttcttctgctggtctcaccagtggttgttcatatggctgcactcacctggcagttaaacgcgattaaatggtatgagatgacctcagtctcatgtccagcggattggtgctggctgtcagcagaacccctttccacatggtctcccatcttcaaggaagctactcccagcttcttcacgtggtggaagcatcaaaacaggcagtgcagaagctccaagctctcttgaggctcaggctcaaaggtcacacattattatatctctcgcatcctattggctgaagcaaatcacaaggctagtgaagattcaggtggagggaacatagacttcaccacttgacagaagatgcaaagaatatgtggtcattttaaatctaccacagtatctaagaataaacccaaccaaagacgtataagacctctacacagaaaacaattaaacattattgtgaaaaattaaagacccacatagatgaagggacataccatgtcgataagttggaagattcggtaaagttgtcgttgctcctcaaattgatctgtagattcagtacagtcctgatgaaaattccagcagtttttttggaagcaaattgacaagctgattctaaaatttctctgcagttgaaaagcgcaaagagcagctaaggtaaccctggagaaaaagtacaaagttggggagagcttacactattcgatttcagaaattattacaagactacagtaattaagacagtgtggcattagtagaaagcagagcaaagtgaaacagaagagagaatccagaaatggatgtataataccatcacgtgacttttgacagcatttatgccatactgcggtagtggaacggatgaccttttcagtaaatattacttagttcaa

SEQ ID NO: 51648 - DNA, 1073 bp, Homo sapiens
actttgataacttttaggaaaactgtctgaagataaatataagcaagttgagaccgagaaaacgagaaattcagacagttcagatagttcagtagaaaatctagctaggactttaaataccattttgttccatttctttggtttctgtttgggacagcagtgtggaggagctgcttcttttcgaagcaaacctttcaccagccctttgtcccaggacaccagatttggtgcctagccatgatccagtggaaactgactttcctgtccctgcacagagactctcagccagcccctgccatcagccagccttctatcatatatactatgaccttgttgaggagagaggggcccatctgccttttgtttaagaaacagcattttttgttgttgtttactttgcagtcactgtatttataaggctcagacaaaactaagagcaatgtttattcaaggtgaaaattttatctttgcacaaaagaatgcactgagtgagtccctgcatggattctgaaggcgaaaaggcaatttatgacttgtatctgtttttgtcattatgtatgactgctccattttatagttgagctgattatccccataatagcttttccatgtacctataagcaagtaataggtgaatgccttctcataagcattggggttttagtgtatttaagttggcacaaaacttcagggtaaatgaaattcacttcagacagtgatctttcccttagagaatgtaaggctttctattttcaaaaagactttgatcctaaataagtcacccgagggatttcttttccagtcaagaggaggtaccttcgagttgttgtacatagggaaatgactcaaatttttggcatcagaatttttgttttattttcctctgataattttgagtactaaaatcattcccttagtctgagctctttttggttagaagcaaattttagatgctgaatgactcaccctaacttgggcaactgtcaaccatcttgggggatctaataaaagtgtatttgtgggggccggggtagagtggtgtcatgagaactgcaagtgaccaaaattcacag

SEQ ID NO: 51649 - DNA, 1065 bp, Homo sapiens
gaattaaaataatatttatgggaaatatttgctttattccaggaaaatgtttgaagtaaacatttcctgcaagctgttgaatttatataataaaacattggtttggaaaccttaattgttttcactgaagtgaaaattaagcagaacatgcttcccaaacagccccttgtctcagttttgttgccattgtaatgttcaaagcaggatattgtggccattgaggtaattttctctttattggtaacttggaaatgagcaaggatcatgccaaagttagttataaaagaggaggcactcatggctccttgtagttttatagcaattcaacctttgtagcgtcctcctgttactatttgatcttcacaaacttatgcattaaagagtcaagtttatccccatttgacggataaagaaattgagtcacagtgaaggtaattaacttctggagggtcaaacagggagtttgtggaagaggaccaggctctttacagccccaagctcttttcaaagaccatactgctgctctagaaagcactctttcctccttcaggaattaaagcactttcacgtctgtgagataatttaaccttgcaacatcccagtggggccagcaggttaggtatgattatcatttcccttccagtgatgggaaattaagttacacaggttaaatggttttgccaagaccgtgcagtcagtgttggaaccaggggatggtgcccaggcttcacaaacactgagcccactcttttcctaccacactaagccttctcagaggagagccagaggagcttctgatgccttgaagacagctgtgaaacatcttgcttccaagagggccttgctttcctagcacccacgccagattgtgtgaatgcttggttctatagtctcagcgggtcatgcaaatctccagtcctacgatcactaagaaacaaagcaaaagggggcaaagccagatagattttaccagcctgtttggattttgtgtccagtagaattagcaagtgaaagttgtaggattgctacagaagagttgcttagaaatcaattaacgtgacaaac

SEQ ID NO: 51650 - DNA, 1026 bp, Homo sapiens
cacacaggacatgggcacgcgtcacttaactgtggttctcacagcgtctggggcaccagagagacacgtttttgtctggaacctgaagaacgctggcagcctacataattctaaacatagcaggcactcttattgattctttccaaaacaaaggtcacatttcctttctgtgtagtttgtgtcctgggttcctgctgactgttttgtgtatacgattgttaccttctcaaagagactgtcagttcttgagggcagggttcaaggctgctgtttgtttgtgttcttcagcagtacctaaatctgtcctgggctcagaggaagtatttagtaaagacattctaccttgggttgtaggtcacacagtgccagagctggaaaggattttggaaatcgtagagtccaacactctaattttgtaagtggtaccactccaaaaacttacttgggaggctggtgtttatctgctggaaagagaggattttattatgttaaactatagtgcaaatgaccataattctaaacctttgacaggcttccctcaaacgctgcaggcatgttcctccttggactagtagcagagtaataagaacagtaagaatgctaactagataccaggcccccgagccattgtcatgaatgcttccagccacatgacaaagtaggtactctggctattctccagatgcagaggaggctcagaggtaggtgacctcgctcagggtcatgtagttaccagaatggtcgagggaggactgaagtttggtcagatgccccagcttgtggcccttctcctatactgtggtaactctcagatggggtctctgactgaagccactccttagtgattcacggtgctagctttgcagcgtcgtgtggtgtttccagttgtcctaaaggaagttattaattttcattaactttaattctctcattagacaggcagtgatatggaaggcaaggcagaaagcaaacaaataatgataggggttacatctccagaaaggtcaggaatcactgccctaggtt

SEQ ID NO: 51651 - DNA, 1165 bp, Homo sapiens
gctgtttgcttgaatggcctattttagcctcccttttccagagtgactaattggggattcttatcaacaaagggtataatgaatgttaagggcccagccaagctagactcgacttaagcccagaaggattttgctgctgcttggataatagattttccctgagtgaattagtacgcccttttagaatgcctagggcctggcccacatccacaccctatcactccctcaaataggatgtgaagtgaaattgtccccaattgaagtgaatccatttgtctgtcaccaggaaaacttactgaagacacattactgcagtaggggaaatgctccgattgtggactggggccatgcagtgtgctgtgccagaatgccttccatctggaagcagctgagtaaactctgtatggtttactttagttaagttacattctattctcagatacaaaactaaaacaatccttgagtatattttgaagcatttatgaagttgtggggaggggcaggcagtgaggaggcttcgaaagtatttccagttagtttttccatctctgctcgaagcccaagaagtccacctccagtatttgttaagataataagacttaatgaagtgtaaagctgaagacgcctaagagttcccaaagaagcatgtgtattcttaaaatgtcaaaatagccaagggattggttgattaaaaagggttcaaggtatatgtgataaattttttaaagatgattttgtgctgtgaagttttaataatgttgacgagaaagaaacggcttgaattttatacattgtcagcttgcaagtcttcatgggggtttttcattctttttaggagcacaagtaatgtagccacagtcactgcagaaagaatgtctttgagagggacattcttgtcatttttattagttgttcaacattgccacagaagtttgattttctgtcagccagtacatagctgccatttattcattgcctgtcagtaaatagtgattgaaaatttcctatgaactcagggttgggaatagcagaaaccaaaactgtctctggtctcaaagagcttataatcaagcagggcagcaaacataaaaaattatataaacacttatttgctgaaattgtgacaaatgacatcgaggacacttagagggtgccgtgagactat

SEQ ID NO: 51652 - DNA, 1048 bp, Homo sapiens
acaaggaaagagaacacttgatctggaaaacaacaggccagagtcccagccaccttacttattagctttgggccctgggtcaagtcaagacatctatgtaagactcagttttagttttttcatctataaagtggggataaatttatctctctgtttattctgcttctcaggggtttgaagcccaaccagagttattttaatgtggaagctataaagaactataaaaatgctgggtgatattattttaaagtcctattaaaggagcgcagagatccttgcaggtggagaaatgtttcagtgccagtttgttctgatgacactgtatctcttaggaacatactggctctaacactatcaccgagggataaatcaccctggtttcttggaagtgagttataaccatctccaaccatcccggttgattgaacaggatccaggggtgttactcagggtttttccccactgtttagacaacagggactaacaaatgatttgaagggattagaagtgagattctgaccgagggttgacctgagcccagggaccaagccaggaatagaacccaagagtccaagagttctgcctctgagcctgcaattggaatgagactttctgcttcctttgtaatatttcatccaagtaaaggcttagatcttagcatctatgttttaaaagacccaaattttaagcagatgataggaaagtaagccataaaactgtgaaagagtactccttccagtaatccatctgaaaagtggccttacaggaaacattggctcttttttgtgtttatttgaacatgattttatttatagggaaccccccctccttatgttcttttagattaaaatacttccaagttcctctccttgttggagtgcgctggcattccaagcgacagccacctaactttcctctgaaatttccaggcaacccaatagttctcaggaaggcaggtgggggtggggagagaagagggcggaggactgcagagcctttggcctcaacatgagtgttgtggaccaatatcccccactgcatttgttca

SEQ ID NO: 51653 - DNA, 1085 bp, Homo sapiens
tctgcaaagagaacttaggaaatgcttccattaactttttcatcctagctgggtaatactgcttttaattactctgctctgagagcagccatttcttatacttggtattacacataggacatcaaacagaattggcttgaattgagcctttagggaacttccaaaggtaaagattgagtaaagattcaaatgtttattaggatataccagtgttcatttttttcccactaatattccattcaaggcaggagactaggctgatatcccatgtatctagagtggatcaagtccaatatttctttcagagttcctgttccttaaaactgtaaatgggttttatattttattccatgtttggcttaataagaaaatatttttaattgctacctggtaaaattaacatttcagaaagatctgatatgttatcctgtggctcctgcctcatacttatctaggaagttccagcacgctccttccagatgagtccggtacgctgtagtagcatccatatagaggcatgtatatggtagaggtgaaaagctggaacttgtacctgtttgaccctaaggctctggttctaatctttgggcatatctgtcttttggcttggtgtaacatctgctgcttgggacagccattgtgttagttaacatgtcagtttcatcacgaaaaaggcattacatttcagtgaaactgaaaaattattgctatatccagctgaagggaagggactgtcaaatatctcctctgttgtccaaacatggcacagtagatatagtgacagtccctttatcttctactcacccttgcgtatatatttgtgaggtgagagccatatattctcacttcctgatcttgccaaaccaggtccttccagagaatgcttgaaggtagatgggtcattttctcattcctccctctacgtgagcaaccccagaagaacactaagacctgtgttgatgacattggatgtctcacttggctctgaaattaagctgatgaaattataggatcggatattttattttattttttttcaagacagagtcttgctctgtcgcccaggctggaatgcagtggcacaa

SEQ ID NO: 51654 - DNA, 1016 bp, Homo sapiens
aaagttgctggagtaggataaacccacagtatttggataagctcctttgaactccttgtagaaagcagtttttatgaggcagttgttctgtgttaacaccagagacaattcctagcagatttccccaaacatacttcaaacatcgataatggcaggggtgacccaaactgtatcataaaatcccagggactgcaggagacttcaaaggggagacagagcaaaacctcacttctcgttatgaggagtatgggtcacaggaatcctggctagaatccatggtaacctcgcggagtaatgccaggatggacagaggccagggctcatcagttccctagactttactaattgaccccagcagcacagttagagtggtaataactggcacctgcccacctcctgaggtgttagaggccaaattaccacatgtgaagtgcttttctatcctttagtgagaagatgcaaaccttgaagtgtgtttctatttttgtttgaactatcgagggcccagttaattcagttgagccaattctgaccttgggatattcagatccatcacttagtatgtacaggcaaattgacagtagaaatttattgagtcttgaactcctactatatttcaggcatttaataagtattaaatactgggaatatttaaataattgaggacaaactgctctgaagaatcaccaagctgtttggtttgtgtgttaatattcttaagccactcttacgtgttcattaaagcaagtttccctatagttttcttgaagaactcattttttagtgatttgacttactctttattcttgaaaacaacaaaattgcatttgtgcatatggtatgtgttgaggggggtaattacaggcattttttccctcattaccgggtccgttacagctccttgaaaacaaatagttatagttttactaattgtttataaaattagctaatgatcctttgattttttagtttttttataccttagctgtatttaataaatatttagtatcttctgt

SEQ ID NO: 51655 - DNA, 2483 bp, Homo sapiens
gccttgagcctttgaaaatgaacattttctagattataaatgttccctttgtaattcatttcaaacttcatcctcccatttgtcctaattcccgaaatttaactgttgccttttgagcctcctaggaaattctgggtatcctttaggcaagggaggtagctcttgggggaatagcattcaggccacaggcaattcatttgcgacttgggctcttcttagaacatatgataagtacaacgcactgtagtgacagattttttaaaaaccctattaaagcccaatatactaatgcagattttttttttttaagttttagagagattcatgggattttattctttttcccaaaggcagtggtggagctgacagagtagcatggagcctcgtcctgatgtattgtgcggaagtggcagcagttcacattcattcagtttgtcagcataggatcagttccttcttgactcaactctctgtgatcaaaataagctattggatgttccctttgggtactggaagcagcttggccccttggcaagagaacaggattgcaaatcacaagagcagagccctgactccagctctgatgctactgtgctttgtgaccttgtgcagacagctttatatccccatctcaggtcattctcccccatacaaagggggagagggtcatccttgccctggtcatgtctgcatggctgaggtgaataactagttgtgtaacttcctggaggagtggcacagaggaagctcccttcctagggctggctctgccatcagggaggaagctggatattagaatgaagaaaaagcccatgcagaatatatggcagcccgataatggattctaaaaataaaaaagcactaggttaatctgcagctgtagtgtacctaaagtattctttggcaggttgtggccctagcctaatccccagctggacttagcaccatttaagtgagttacatctcatccccgcaagggattgagtctgtagccaatttggccttgtcaccacttcagccctccctctgatttcacctttgggaaaactacaaagtggccccagacatacatagcaggcttgatcacatgggtggagtctgtcaggacagcatacatcaaataaaatgtccagggaacctgttgtaaataaaccacttcccgcatgctcagtcatcgtggaggtacttgaatgtttagtttcttttagctgatggccaagaaatcaatgtttaaaaaaaaaaaaacaaaaaacaaaaaaacaccttgacagaggcattttgtacaagaatggtgtgtgggtgtgaaaaagtaaattccaaaacatatttccttttagttcccaaacccatattagatgagtacttcttagccttggccacagtgctagagtaaatagcagtgtcacatagctcgtggaacaggcaaaccacagaatgtacaagagagaagcgtgcacaccagtgagtctgctatggcagctctctttgtcctggtttctacatctcatttgtaagcaacttgtgttcctgcattttcagagtttggccagtttatttacttagaattgcatgttcctggaatattgtcataaaagtgatcctgagatagaaaaagtcaacaggaagcaggggcattgagtttataagttctcagtctgtcttggcccatattaaagtctcattctcaggggtaggtccagctttccaaattttaatatatcagagactcctgatgcatctgggctcatgatgggccaaagtaggccttcaggagtcctcgtgttacacactcaacgcctaatggagactggattcatttacgtgtattaatgtaacctgcgtgatcatgtgagtgcaagtgctttgtagattgtcctgggagatgtggcatattatgactaaagacttaattgaaccctgaacatgtatatgaataactggagacagattgactggattacacatttttcttgaaaatttcctaaatttagcctacctctttgttgccttttatttcccagcttaagtggttctctataacactatattttaaacaaaccagaacaaatagtatacaaaagcatagacaagagggatataacaagagatggttttctgtgatccgtggcacctcctctctaccctgcctccaccaccaaaaggggctttaaattaagattcggaatggcaaattcacttaccagctccaaacacagtagacaaggaaaccttgtgaggaaaatccgagagtatatttacagtttctgttcagaaatacatagcttaacttcgaaggaggaagcgtgacttttcacctgcagatagaactagggtctgatttgaaacagaccactggcttcactgaaccccatcaaagaagtctgcttctgcccggaattggaaagtgccagtgggcatgtagttgctagtatgggatttctgtttttatttttaacaagcttgggcccaactcttagtatcaa

SEQ ID NO: 51656 - DNA, 1109 bp, Homo sapiens
agccagtttgtcatccatgtaagtacatatctttcttccagatattaacaaagtttatatcagtctcttggtgaattccgttcctgtaagttagaatctgcatcatgactttataaaagaccatcactgtgcctacagttctttaggaatcgctttggcattaagaatgaggcttcagccaggcacggtggctcacgcctgtaatcccagcactttgggaggccgaggtgggcggatcacgaggtcaggagttcgagaccagcctgaccaacatggtgaaaccccgtctctactaaaaatacaaaaattacctgggtgtggtggcgcacccctgtaatcccagctactcaggaggctgaggcaggagaatcacttgaacccgggatgtggaggttgcagtgagccgagatggtgccactgcactccagctgggcaacagagtgggactccctctcaaaaaaaaaaaaataaaaataagaatgaggcttcagccagatgtttttggattatatgtggcgtggcctattacatggtttttatttttgtttcctcctatttcttagtatttctttccaccagttcctgttgtaaaacgtgaccagttggtactgatgctgtacatccttgtattagtaaaaatcctgctgtgcctggaggcagggacctgcttgggccaggccttcccaggaagcccgtcctaccctctgtagcatatagtgccggaccaccccagcgctcccacttacctccttcactctttcattgttgatacatgggctaggtttcctacagagtcacttcaaggatgtagatcttatcctcccaattggattgtgagtttgttgttattgccttttttggtattcctcaaggatgttcagaatacctcacatagtgatggactcagagtacctattaaagagattttcattaaaatcacaccattcagtaagttgaccaagtacatcaagagagtcagaaagacccaagatctagtttggctttgccaggcatagcttcctcatccataaaatgaaatactagtaagatacttccttatgtgaatcttgggaggctcggagtgtccagtacacattcagcactcagtc

SEQ ID NO: 51657 - DNA, 1062 bp, Homo sapiens
aagctggttgaggaggtgttgatagcacagagtgtttttacggagtgtcctcggagggttacatgctcctttttgttgaatccgaatctttttttttttctaatatggagcctcataatcattcaaggactcagtgtgatgccacaggtttcaaacttgccagttcgtctcttatgttctgccaattttttaaaagtgggaatatgagtgcatgtgcacgtgtacacacacgtgtgtgtgtgtgtgtctttgtgtatgtaaaatgcttgggataaaaaaagatggatcaaattttgtctggcatggcatagcaactctcacctctagtatcctctaaacatttaaccaaatggactttaactggtttacttcaattctatttttattttcgtagtcatttaaatgtatggggagccaactctttcaaatgagacattttgtcattaaaacatgttatttagtttaaccgcatgggcccggcttcagcaacattgaggactgtgaagagggttctgagcggctgttctctcctgacctgaccgcagcagtgacccaccagcttgcaatgcacgcaaactgaaacaggcaggatggccagcccagggttgtctgcacggtggtcttggcatctgtaccttaggttgccagctcctggccctccttgcctgcatttggtggcccttggccctgccgtgtcatatggcacaagagcccttctggcccgcatcaccctgtgtactgattaggcaggaatcagcaaatccgttgagtgcatgtttaatgtgacacagatgtgggacatactacagatctttctgctttacaaattttcagctttttgcatttcatcagtgttgcttattatttacagaatgtaacttgagacatcagaacagattgtaatttttaaaaaggttgttgggggggtgggcccgcaggggatctgggagaaaaaatccagtagtgtggaatgttgtttgctgtccagaccaaacaaaccagtttgccaagggttgatggactatgacaatcagtccaattcatgttaacactgggggcact

SEQ ID NO: 51658 - DNA, 1171 bp, Homo sapiens
gagattataaattattgcatgttttcttttcactttcctccccaactcacctctattcaagtcgaactatctctggtcactgtgaaatttgtttgcaatagaagaaattgcgtggtacagccaacataggactgctcccagtgagatacacacattgaaaaacagagccagagagagctaaaaactggaatcgaaatgaaatcagtaaaatagctttcatgaaactcatgaaattcatatgaactaggaagagatattggcatgaatgaattttgactttaaagatgaaaaccatgtgtctccacccaagttgtgggttaaatcttgccaatgaatgctgaaggaggcacgtgaccacggccttcccaagtgtacaaggaagaagccatcagggagtgtgtcgcatgttcctctgaagtgtcctcagttgtcagcctgggtcttcgcggtggagtgaacattacactcatcactctgcaagaaaggagttttcaggaaaagcccacgagcgccaaattatacctctgacttttatcctagatttgtaattaaaaacatgtttaaagacctaattatttgcgtatttcccttcagagttaacccctttaaaggatctttaataccttgctctactgttctgactaaatgtttccacatttttttccagttaggctcactgtttcacttctggaaaatattgtgtaattatttcccgatggagtgaaaaccccacgaagtccccagtgccttggtgacttcaactttattctcccagatcgagttgcatttaattttgtcattctatttaattaattaatattaaaaagatagttaccaacgtatgatttctggtctggccagctgaaaagtcttcactttcaaattaatcatatattcctctgataagttgcacaattgtcattgcttcccatctttctcagttttggttttgaaacaggatctggattaagatgatgttaaagtaaaatttgtcctatatggtgaaattaatttttctttctaactcatgtctcatttgtagccagaaactcattttcttttttttaaggtacctattttatttctaatactgcatcacctataacggtgcacaccaggctggtgagcagtagggtggctcctgccttttaaaaaatgctcatgagcaacc

SEQ ID NO: 51659 - DNA, 1056 bp, Homo sapiens
taagaaagcgttttctgactctttgagttttctgaacatgaagtggatgggggggtgccctgtccctggaggtgctgagcttagagagggaggaagcggatggggaggtgcaggtgttttaacgccaggctgtctcttcatggcgtgccatttggtgaacctgtttaattctgcttttcccccctcagctttcagcgcccccagctgcgtcttctcgccccttcatgtttccctctcctctgccaggcagtgaactttctcagctgctccttcagtttcacattgaaaggcatcgtgttttctgttttgtccaatagagtattgttacagttttctgtaagctttaagctatccaaaaatgctcacagaaaaacaacaaacacccacaagatagaatttcaggatttagaagtatttcccggcaagggggccgggattcgcactcaggccctggggccacagagcccgcagtgggcctccccctgatgctgggcgaagccccaggtgtcactcctgtgttcccgtctcgctttgcagcttcatcgctgtggagaacattgacagctactgcgtgctcatctcctccaaagctgtttacttcctgaaaagtggagactacgtggatcgagaagccattttcctagaagtcaaatacgatgacctctaccactgccttgtctccaaagaccatgggaaggtgtatgtgcaggtgaccaagaaagccgtgagcacgagcagtggagtgtccatccccggcccctcccaccagaagcccatggtgagtgcctggctgttctcaggctcctgaggggcggggccagggcctcgatgcctctgccctgcttccccgtcctcagcaggaactcatttaggaggttgaggctgggcccttcccaggagtgctgcctctcagtcctgaacatgggaggggcccagggtatgttcacggggcgatgctgccctcccagctggcccatgggtgaccctgggaacattaactgcctcacaacgtttgtgcctcagttacccgtagatgtagtgagggtaacaatactt

SEQ ID NO: 51660 - DNA, 1049 bp, Homo sapiens
tggatctgattcctggatttccccatcctggggacaggtgacccatcctgttctcctccttaggtccatgtgaaatctgaggtccttgctgtcaagttgtcacaagaaataaactacgcaaagagcctctactatgaacagcagcttatgttaagactcagcgaaaaccgagagcagctggagctggactcctgaagccccgctgctgagatgggcgctcccgacacagcgcagacccaccaggaggaaagaggcccagctctcagctgacgatggaggcagaaccggagtcgggtttggggaagttgtcaaggaatgagggaaagtaaatcctcatgaggaaaagtacaaatggaaatcgtattaatttgtgaggcagggagttattttagattatgggaaataatttttaaaggtattggttaaataacgtttaaaaacatgtactgagatgaatctaatttttagattgccctgtattttgttaacatgtatatatgtacaacagtgtgtttgtaaatatataggaacgtttctgaacagggtctgtgctatgtgtaaaggtttgttaactgtaaagtaatataaagttatattggatcttctattgcactaattctagatgtctaattcaggatactgtctatagaaaggcattcttaaaagttaaagaatgttacgtcttagttttggagactaaagtattcccagtaaagtgggttgaggtgagggctgtggtcctgaaagggacgcctttgacatcgtggctgtccagttgggctgtgagctgtggcacccaggactggcgctggcccttcagaaggatctaggagaggggcttgggagcccacttttaatttctcacccccattttacaaagagtgcttagattcttacaaattatgatgtaagttatccatttggctttttcctaactagtcttaccaaacttagggggaaacctgtgctccattaccacatgggtgcaagtcagcattgtaagttttctcaggttattattattagagaggttggaaacattggtaaac

SEQ ID NO: 51661 - DNA, 1070 bp, Homo sapiens
tctgatgttggagggatgtgatgctctctgaggaccacggaaaatcactttctgtggggctggtgcttgggaaaattcccgcctcaactggccctttgggccaagggcctggcttttctcccagcatcctggtctttgcagggtgtgctggcctggccatttcccattgaatgtcccgcttcctctgaatcccctggccctctgggcccagagccacagcctgatagcatgagaccagtcagccggaagggttaactccaaggcagttgaccttcgtcctagcagagattaaaccgattcctaattaatagcctgtaggatagctaccttggcacagcttgcaagtaatttaaggcttgtccttagaggctggtccataaattacgtttaattagctgaaggtctccctgggacacatcagcctggtgtgtgattgagcctaccagctcagtgacctctgaatttcatgttggagtatgagggagatgctgagatactccagtaaaatgtttatttccttttccaaaacaagagctgaattctttcttctgctagcagctctgaggggtaccgccaaccggtttgggggtctctgctcagctagttcctggctttgctcttgactaattacttatatttccagggtctcagtgccttgtctctaaaaagaagccgagttcaagtctacagacccttatctgaaacccttaaggctagctgtgtctcataggtctgatgttttggactttagaaatgcaatccagcagataggccatatacctagtgatgcccacagcaaggtctagggcagccacccgtaatcacagtgatagttaccacagtgggataaagagaccagaactagcctcatgatggttccaattagggcttgctctaaacgcgtgtgtcaaaaataaatgtaggattttagagctttttggattctagaacggaggataaggggccgtaaacctcactgttgaactcagagaagctcctaaataaatgctaattatgatgagtactgttgttattttttttgttttattttacttgccgagacagagtct

SEQ ID NO: 51662 - DNA, 1049 bp, Homo sapiens
ctagctggcgcctcgtattttccttggcaacccgctacccagccccaacctgggcggctgcagctctgaagacacgagagagggtacttggtttgggtttgaaaagggaagagcggtcttgtatgcagtagtctggccggaccgacactgagaggcccaggtgtttggaaagcaggaaagaggaggccagggtaagcagctactgataaagagcccttgttctcaccttcaaccctgtcccctcccccccagtacaccccccagggatccctccccatttagctggaaggtggtgctgcaaggagggtcctgcccaccaaacacggcctttaactttttggtggtcctggcaccccttgctccaggttttggagacctggtgccagagtggggagagtgggcaggctgtcacccaactcccagcccaggccaggctgactcacgcggtgaccagagccatcaggagagggaggcaggccaggctgtctccagccagccctgtgaagaggaagagcgaaaacagggaattagtttgaaacttaaactgttgtgaactaggggggtgaaagggccgcaaagccagctgatctgacatggagccgcataccttggggattaagtaaatatgtactgtagaaaaccaaacctgcatgtaattccaggttgcttttgttttgttaaatactgccctgagatttacaattcctccggggtggctctgactgggactgaactttggagcctgaactatcagccaaagccgatccgattaactcttccctagccgggctggccggagcctgtggtggccaagctagcaggggtctggctgtccaggactccctcttctccttgggtggtttggacagccgcttgaccttgcatttggagggggagttgggaagcgtttttaacccttggacacaacgaataaggggaagtcagagttgttctcagcagtttcatttccttgaggcgatgccccataaaagggctcctgaagctctttgtgaaggggactgaaaagggcagatgagggtgtcctttgg

SEQ ID NO: 51663 - DNA, 1054 bp, Homo sapiens
cacgcgcgctccacacccggaccctctccaagttggaaaggacaaaaagaaggcaataaatgctaaaaagggagagaaggggagctggatcgagcggcaactcccagcctctgctggaacagagagggagggagggagccggagcgagcgagcgcgcgcgagggcgagcgctgcacgtaaagaaactgacacccggaccccccacttctcctgcacgttgctggcaatcagatcgcgtttaagcaatttcctgagcccaagaatagcaatgagtcgggagactttcgcgggctgaaattgggagctccaagcactttttccccccacttttttttttttttttttttctggagacggggtgggggtgggggcgctacaatttggaatcagcttttttttttttttttttttttttttaatcttgcactttgaaaccgcgggaccgaggcagggtgcgcgcgtgtggttggtgcctttttttttttttcttcccctccctaaactcctctgtcagtctgtaaacattacctgagaattccccagccgaaacggctgctggggcaagaaacttcttgttagaactttccacctccggcttccccctccacctcttttaccgtcccaaccttaggagacgctttttctcccccagaggagaatttatctttttttttttttttttttttctttttctcacccggtgctttgcatttgggaagaggtgatttcaagagtggccaggtgggacgcctctctcctccttattcggtttactatttattgttcggggtgttttttaattcctgtattgctcggcccggggagtttcgccccctgcccggctccgcggcgcggaggatggtgtggaaacggctgggcgcgctggtgatgttccctctacagatgatctatctggtggtgaaagcagccgtcggactggtgctgcccgccaagctgcgggacctgtcgcgggagaacgtcctcatcaccggcggcgggagaggcatcgggcgtcagctcgcccgcgagttcgcggagcgcggcgccagaaagg

SEQ ID NO: 51664 - DNA, 1050 bp, Homo sapiens
aggctctagaacactgtcatgctgtttttacaatttcttgttacaatttttcaaaataaaaaataatggcgctgattccaaggagtccctttagtcttctgcaagcatgtcaattgtgggaactgagaatgtaggctgtgtggggccacaggacattctcgttcccattgttttagggtggtaagtgacaagaaatattttctcaaaaaggtggagcttagctttcaggatcctcagcaacgcttcccagtgttactgagatttagtgcagcaatggttgaaaatgaatgggccagtggttaccttgccctctcctcattgtttggaagacattctttatggtaccagcaagggcagaattacagatttgtgtccagaaagtgcagagtggaattggggtgaactaattacctttccacctctaccagagcaatgacattggcactaggagatgatgaagtgatgtgatttgccgtaagaatgatgtttttttctctagattcatcaggatgagcctccaggccccacctagactcctggagctggctgagcagagtctgctgagagaccgggccttggccatccccaccctggaggagctgcccagggagctctttcccccactgttcatggaggcctttaccaggagatgctgcgagaccctgacaactatggtgcaggcctggcccttcacctgccttcctctagggtccctgatgaagtcatgtaatctagagatctttcgagctgtgctggaggggcttgatgcactgcttgcccagaaggttcgccccaggtgaggtgacccagctaaccaggtggggagggctcaggcatccagggtagggttagctgggtcagaaggagtgggaggcccaagggtggcccagagacttctgatggggctggggaggaagctcagagaggccttggccattgtccagctcctctgggaaaggactgctcaccatgcagggtccactgaaggatcaggaacctgcctcctgccagtggcaattgaagacactagcagtggggaccaggcaggtt

SEQ ID NO: 51665 - DNA, 1027 bp, Homo sapiens
gacccagtcacccgagtgatggtgaaggactgagcctcgattgggtctgccctgaatgagcagagtctccattcccacaccccaggtgctgattatcctcagataagcagaacagccttgggttgtgaaaagtgtcatctctcaccttgaggtcttccccaccactctcctctaactccttcttgttctctcccaggtgtctccaggcccccttggagacagtcgtaatgaccgaatgcctgctgtcagagtcggacctgaagcatctctcttggtgcccgagcatccgtcagctaaaagagctagacctgaggggcatcacactgacccatttcagtcctgagcccctctcagttctgctggagcaagctgaggccaccctgcagaccctggacttagaggactgtgggatcgtggattcccaactcagcgccatcctgcctgccctgagccgctgctcccagctcagcaccttcagcttctgtgggaacctcatctccatggccgccctggagaacctgctgcgccacaccgtcgggctgagcaagctaagcctggagctgtatcctgcccctctggagagttatgatgcccagggtgctctctgctggggaagattttctcaacttggggctgagctgatgaagacactgagggacttaaggcagcccaagattattgtgttcagcactgtcccctgccctcgctgtggcatcagggcctcctatgacctggagcccagtcactgtctgttgaatgcctgctgtcagggtggatttatttaaagctttcttctggtcatttggcaactgaatcctaggccatgagtgtatgtcaaagggagcacagacccatcgtttcatatgcctgctcaatgtgaacgggaaaggaaaggggatgcaggaagggagggactgggggaaaagttgagttggagtcaataggagctttagagacctgtgtcccagagaatcagaaatgggaatctgaattgctagaatgagaatcaggtaggagagacacatga

SEQ ID NO: 51666 - DNA, 1054 bp, Homo sapiens
cggggagtaaggctctcacgtactcctgcctgctaaggtctcatcagcagcccttcttttatttatttatttatttgttttttttttgagacagagttgcgctcttgttgcccaggctggagtgcagtgaacctcccgggttcaagcaattctcctacctcagcctcccgagtagctgggattacaggcatgcaccaccacgcccggctaattttgtatttttagtagagatggggtttctccatgttgaggctggtctcaaactcctgacctcaggtgatccacccacctcggcctcccaaagtgctgggattacaggcatgagccactgcgcctggccagcagcccttcttttaatcatggaggcagcatctacagaagtatatgggaatgagaagaaggtctattctgaaaatgaagtggtttcctggctcatgcttttgccttttggaaactaatgatttatttgcaggatgttcctcttttccattttaagtttattcttgggacctggaaaaagaactgtggggattagcttctgtctagaacttgctatggtccaacaattttacttgcttagattttctttccttttttaagtcaatggttttttttaaatgaatctatttcaacaaatatttactgaacagcctctctggcatggagtttaagagcgtggcagtggagtcagactggctggtaccagatcccacctctgccacctgctaacttgtggccattggcacattaacttctctaatgctgacttatcctttcaatggggatagtattggtacctgccacataagagaaagtgatgatgatcgaatgagatcattcctgtggaggaattagtacactgcttagcacatgctaggcactcaatgatggaagagggggaggaggaagatggcacatgtcatgccccatgataggttctggggacacccacatcaatgagaaacagtccttgcccacaggggtccataaaacatccatcagatgtagcagtccttgttggaacagagagtggattgggccagggatggtggag

SEQ ID NO: 51667 - DNA, 1028 bp, Homo sapiens
ttatctttcatattttccatctgcttgtctctgttttgccttctggataatttcttcagatctatctcttagtttactcatctttctcttatttgatgcttaacaaatatattgagtttcaatgattatagttttcgattctaaaatttctatgtggtttctttccaatctgcctgatcaatttttatggtctcttggtctttgttcagtttttagttacatatttttttctgtaaacacttcatactttatattttgtatctgacagttccagcatcagaaatttatatgactctaaatctgtatttagttaattctgttgatctcactcagcgaagcttgtttcctggcaagtttggtaatgttttttattgtgaaatttttattgtgtgtgtgttttttttattggttgaacataatctgtagggatcctgggagcatttattggtgatgctttattccggagagaatttgtgtttgcttttctcaagagccagaggctgttaccacactggatacatttaagctcccttgaaagaatcagggcttaaggcaagagtctcagatttagcttccctatctcacagagagctcaaggcttagtgtgcggattccagggctggtactcacactgtctcctccggttacatttgctgactgttcccaatctactgtcaatttagtattctcctcccatctccccaccaaccttagagagcctttattttcatacaagcctagcagcgcataaaactatgtttattgtaattttcctgagacctagttatattacagaggaggagccttcagaggaactgatatgccgtacttctcgaagaggaattcagttcatttttaatctttgaatcatatcaaggagaaagtctgaatcatgtgttcttatgtgaattatgtgttgtgtcttaaacacctcttcaacacctgttaagggatactgcaccagcaacagtatccagctagaatttaatacaattgttttgtttgcattatctttatcctatggttac

SEQ ID NO: 51668 - DNA, 1950 bp, Homo sapiens
gccaactttttttgtttttaagccatcaaattcaatatttacaggaaaaaccccatgcttggttctaaaactactggccactcaagaaacagtttacttctcacttctgcccataacaagaaaaacatagacttgtgccttactcttaaaaaaataataataataaatataggttttttaaaatttatatataatttttaaaaccccgtttgttgcatgtggtccctttccctcctgttgttgagcagaataaaagcccattttgccagggcccgcagtcctggcggcccccgcagctgcggccctgtaactttaaacctggcctgagatcatcgttttggcgccggccaaacagagcccgagggcgggcctagcgcgcccggacggagaccaccttgcggccgaccccgctcccccgcctcctcgggagagataaatgctgactccgctcggaaagttctcaactgcaaagtttgctgtccggctgcctagggtctgggaagctcgggcaccctccctctccggggctcctgctcccacccctccggcccccccaccgtcgcgctcctccaggctgggcctgtggccgcggtgctttttaattttcccccagctcagaatcttgctgctcggcccccaggagagcaacaactcaacgggaacgatgtggaaggtgtcagctctgctcttcgttttgggaagcgcgtcgctctgggtcctggcagaaggaggtaagacccagcgcaagtggcttcctgccgtcgctgatggggacgagcgagcagagacttgctggaatgcccgggcctggtattcgaggttgtccaggggagcgcgggggagctgagggtgtgtgcgtgtcaggcggctgagcgccggaggaggagaggcagcggcttagtcggtgccaggtcccaaagacgcagctgcgcgggtgtgccgggaggagccccggaatccacaggctgcgaggtgggcagcacagggggcctccctccgagtcggcagcaccagagagatcgggtggaaggttcacagtaggcagccccgcttgctggcagcagtggctggggtttccttcccatagagcggtgtgttggaggaatacgcacgcctcgggagaagctggcctcgtagaatcaggagggacgttcaggagggcttgggccaaggggagggttccccgccctgcggtggccctggtcccccttgggactacctagtctggcgccctgcctgttggacacactcagcaccccgtcactggactggaagaggcctcctttatcctctttagagaggatagtgtgtgtggaaaggatccaagtggaggcttccgaggagtgtgagtgcatgaggattgttacgcgttacgaacattgaggtttaagtgggtttgagccacgtgttcatcttgggcaacaacatcagtggctgaatgtctgttggtgactccttaggctttaaatattttgtatcccatgttggggtgggggcgtccacagcttccattaccctttgtcctctcctggagccttacctcttcccgctgggttgctgtgttggtggtctccattgacatctgtcaacattttgttttcttttcttgggtttttatttttatatttcctcaatagaacatatgttctgcaggacgcagctacatccagccatgattccccacggccaaaacaatgcctggcacatagtagttgctcactaaatgttggttgaaggaattgtaacctaactcgtgatctttggggctggaggttgctgagttatgctgtgaaaagtaaacattttccaaaaattgaggatcaaggtaggcctaggccctgaggaatacttcttggagagggagcggtttgcaggaggggtgcgcctaacctggcctcctacaatggtccacacagacaaaaatacccaatctcagggaaatgacagagt

SEQ ID NO: 51669 - DNA, 1042 bp, Homo sapiens
gcagaacatatgttctattgaggaaatataaaaataaaaacccaagaaaagaaaacaaaatgttgacagatgtcaatggagaccaccaacacagcaacccagcgggaagaggtaaggctccaggagaggacaaagggtaatggaagctgtggacgcccccaccccaacatgggatacaaaatatttaaagcctaaggagtcaccaacagacattcagccactgatgttgttgcccaagatgaacacgtggctcaaacccacttaaacctcaatgttcgtaacgcgtaacaatcctcatgcactcacactcctcggaagcctccacttggatcctttccacacacactatcctctctaaagaggataaaggaggcctcttccagtccagtgacggggtgctgagtgtgtccaacaggcagggcgccagactaggtagtcccaagggggaccagggccaccgcagggcggggaaccctccccttggcccaagccctcctgaacgtccctcctgattctacgaggccagcttctcccgaggcgtgcgtattcctccaacacaccgctctatgggaaggaaaccccagccactgctgccagcaagcggggctgcctactgtgaaccttccacccgatctctctggtgctgccgactcggagggaggccccctgtgctgcccacctcgcagcctgtggattccggggctcctcccggcacacccgcgcagctgcgtctttgggacctggcaccgactaagccgctgcctctcctcctccggcgctcagccgcctgacacgcacacaccctcagctcccccgcgctcccctggacaacctcgaataccaggcccgggcattccagcaagtctctgctcgctcgtccccatcagcgacggcaggaagccacttgcgctgggtcttacctccttctgccaggacccagagcgacgcgcttcccaaaacgaagagcagagctgacaccttccacatcgttcccgttgagttgttgctctcctgggggccgagcagcaagattctgagctgg

SEQ ID NO: 51670 - DNA, 1837 bp, Homo sapiens
ttatctcggaatataccagaactgggtttgaaaaatatgtctaacttcaaacctgaagatctttttactacactactctgccattaaaaaaaaaaaaaaaaaaaagaggctgggcatggtggctcacgcctgtgaggggccgaggcgggcggatcatgaagtcaggagttcgagaccagcctggccaatatggtgaaaccccgtctctactaaaaatacaaaaattagttgggcatggtggtgcgcgcctgtagtcctagttacttggaggctgaggcggaagaatcgcttgaactcgtgaggcggcagttgcagtgaaccaagatcacaccacagcactccagcctggcaacagagcgagactccgtctcaaaaatatatataaaaacaaagtaaagaggttgaacttgaaattaaaggttaacctcactttaagcctcttaaacgtagaaacaaaattttctaaagatacgagaattcctttacattaaatgctccccataatgttcttttaagaatgaaattgtcataatacattaaaataggatttattaattcattctgcaaatagttattaagcatttcctgagttcttggtgtgttactagatgcagaatttgaactgtatgcacttttgagagaggcacacctcacatgctaaagtgtgccctgcagtcctcaccagcaaagcaatgaacatgcactttcaaattccatcggcttatctgaatatttgtcatatttctggctttggaaaggaggcaggccaggttataacttgtggaaatacgacgggggaggaggaggaggagggagagagaactcaactactcaggattaccctggtgaaatttatttgacgaatctgaatcagatgctgtagggcttttccaggaagccttgccactcttggtgccccaaaacttctcagggaagtacccagtgtgcacgttttattgaagagaatcaactgatggagggtgctggacacttccaagtggacagttactgtgatgagtcttaggattctcatttgctgggcaagagatacagctccgtgattaggcattttatctggggctgtgagctagagccccggtagggaataactggaattctgccaattccatccaaggcaggaaaacaaggtgactgtttccttcccacatgtctaaccccagcccctgtccaccggcctgttggcagccagtcagatgatggcaagctcccctgagtgtcagccgaaagaggtaggagggctcaccctcctttttgtctggctgagtgtctttgccttgagaattgctcagagatggatttgtcctttgaagtgaatcaagctaagtccagggggaagtacgcaggtatggccaactcgttcatgtagttttttgaggagctgaaagctgacattgtgaggcaatgctaaatttcatgaacccgcccccccaaacacacatacacacacacacacacccctggagaaagatgtgatgggctcttgacccccatccagagaggccaggccacaaagtgccgtaggcaatagagggagaccaaccctgagccactggggtaacaatcaccattgttaatgtttgcagcatgtacaaatgccagatacacagagtgtaaatgggaagcaggaaaggggcatgctagaatatttttaacatattattgatgagaacagggcacttcccacaattcatcagggtgtctccatccgggagaacagaacacaactcatttaaaaagctgtgatacagcgaatattgtcctgccccaaagagaagggaatcagtttgcctagaagaggagaagaatgagaatttgt

SEQ ID NO: 51671 - DNA, 1054 bp, Homo sapiens
agtaggaaaggtgtcatatgtggtgactggggatattctgatctcaatcaaggtggttctgtgatgaatcagatgtctttgttttgtcacagtctggaaatttattccacccgacagctccaccctttgcttttgttgtaaatacaaaaaatagcatcttgtggggtatctcacccctgagaagggcatgccttggacagcaaatatgcatacaaagcgttggaaaacagtttcctgttctaaataaactatttggttttctggcctcttgtgagcttggctaatgggaaacagtttgttctgagccaaatctccccataagattaaatgtgaatctgtaaagctacaggatctagattctgaatggctggtgttaatagcgctaacaatataataacagctagcgtttactgagtgcttagcgtgtgtgaacccctttctaagccctgtttctttcagtcctcacaacagactactcggctggagcttcttgtattttatagaggaattaagagactcagtgaggttcagtagcccacacacagacacggagcttgtaaatggcagcagtgagactgaacccaggctgctcaaccctagagcccacacccctaaccacttagctacacaatcagctatgcttggaatagcttgaatccgtgccactgaggacacccagaaaagcgagaggttgattccttcaagtacttcttaccttacggcagcaaaccacttgtattgattgattgattgattgatcgattgagatggagtcttgctctgtcgcccaggctggagtgcagtggtgcgatcccagctcaccgcaacctccgacccccaggttccaaccattctcctgcctcagcctccctagtagctgggattacaggcatgtgccaccacgcctggctaatttttctacgtttggtagagatggggtttcaccatgttggccaggctgttcttgaactcctgacctcaagtgatccacccgcctcagccctcccaagtgctggaattacaggcgtaagccaccgctccctgccaccatttg

SEQ ID NO: 51672 - DNA, 1098 bp, Homo sapiens
attacaggcgtgagccaccgcgcctggccaaaaagatgattctttcttcgctgaagaatcttggcacctctgtcaaaaatcaattacccataaatgtataggtttaattctggattaaattgatctatatgtctatcctcctaccagtagcaccgtcttgattactgcagctttgtagtaagttttgaaatggaagtatgagtctactttgtttttaccaagattgctttggtgattctcctgtctgtattttaattatttgtgtacataacttgtctcttagagaagagagcacttaaaagagcacgaggtaggtacatagtaaacatttggcaggaagaagagggaggaaacacgatagacacataggaatgacagaaagcagataataaaagcataaaaatcaggtaggagggatgagagattaggaaccaacttggtaaggaaaaggtatttatacgcccggctttagatatgatgagtttgaggtaaatagtaagacacccaatttgatgatctgatgagtacctgggaagacagtcatctaaaagagtgccagagctaagcactggagatgaagtttgctgcttgaatttcccctacattagaacaaagggagaaaaatggcaagggaagaacagaagagatcctcttagccaaaaacaactattttctaaaaatctaccaaagcacacttcgaggtccgaaaccaggcttgagattgaggccaagggacgctagtggaaacggccacattctgcacattcctgcaggcctcatcctcctgggctcacagctgggctgtctgagctgcgtggggtggacggtgaggtcagatgcaaaggggcttcttttctccctcttgcaaaatcagggcatgctcagctgacagccatgagtgaatcagctcagatttccattcagtttccgagcagacggcaagtgcttcccaaacacaccccattgagaagctctgctccaggacagcacttctaaagcaggtttttgtcatttggtactaagtggccctccctagaaggggaatgttcgtgacaccagccctagctgagttccagaaaagtttattacagagctgtg

SEQ ID NO: 51673 - DNA, 1023 bp, Homo sapiens
tgcttgatgagtgtgttgattcactcccatgaactctgaaaactgtgaatgtcattcatccattcattcaggcagcagagactgtgctagtggctgggccataaacttacagcagaatggggccttaccctcaaggaacttgtagatgctggtggggaggaggtagtaaatgccaaaatgttatcaaattctatactagtttagaggagattactttctcctggcaacttggaagagcgctgaagggaaggggattttacctgggcaatgaaggagaggtggggtttggaagggcactgattgagctaaaaggtgaacctgcaggtgcccttggcagcccctcctcaataatctacagaagccaccatctagggcagctcagtctactccagacctttctttagaagtagagaggaatataacagggagctggtcaagagtattcagtgcctgtgaagacacagtggttgggagcatgggtttgagagtctgaatagatggcaatgtctaatccatgcactggcacttgctcatttcatgggcagttgacttaacctcttagcctcaccattgtcagctaaaaaatgaggatgatactagtttgcaagacttctgtaaagaacaagagagctgctgggtacggtggcttacgcctctaatcccagcactttgggaggccgaggtgggcggatcaccaggtcaggagatcgagaccaccctggctaacacggtgaaatcccgtctctactaaaaatacaaaaaaaaaaaaaaattagccgggtgtggtggcgggcacctgtagtcccagctactcgggaggctgaggcgggagaatggcgtgaacctgggaggcagagcttgcagtgagctgagattgcgccactgcactccagcctgggcgacagagcgagactccttctcaaaaaaaaaaaaaagaaagaaagaaaaaaaaaacgagagcatgcacctgacgccacagtttgcacattctcccataaatccagcaaatagcacttgttatta

SEQ ID NO: 51674 - DNA, 1051 bp, Homo sapiens
agtaagttttttaataaggactacttgtctggcaaagggatatttcccattgagctcaataaatacacagtaagcgtttgcctacaccacaagtcatacatttttgtaggagccaatcaccaaccctcacctctacccctactccagcaaaaggccacatggagaggcaaaccatttgcatgcatggaaatattcggttattgctaactggtaaacccctcgctgtacacccccagattaaaaaaatgtgtaggtagctcatccaaagccatctctactggattaggactctagaataaaagagcaggctcatagaacaagtgaactaacttcagaggcttcctctaggcatcaaagaagctataatcaaatatttattagctgtgcctctggctgggctgtctaagcagtggggagaataaggtatcttaaggcaaggaatggattgctgatataagtgctgtctaagcagtggggagaataaggtatcttaaggcaaggaatggattgctaatgtaagtgctgcctagagacaaacaaacatctgctctttcattacacaaagaaatttccaagcacctccctccccctcgctcctgggatgtgtatgcttgtttattttgcaactgtatttagtcatggaatttccagaaccactggagtttagggaagaagcccatggccagtgagtcacatttttaatgcacaaagagggttgtttggtgatttttggagatgataattgagcatggtcatgactagtttgggtcactgcaacagaagttgaagaagaggatactgctgttatctgctctatctctcattgtagaattcagcctggtagtccactccaattccctgctccagcagaaacctttttttttctttgagacggagtcctgctctgtcaccaggttggagtgcagtggtgtgatcttggctcactgcaacccccacctcccatgttcaagcgattctcctgcctcagcctcccaagtagctgggactacaggcatgcaaccccatgcccagctaatttttgtatttttag

SEQ ID NO: 51675 - DNA, 1115 bp, Homo sapiens
actgcgactttaaggaaaatgacatgcagcaggtcctcacataatgttggttctttctaagtcattttgcttcaagtcacagtttccaagaacctatcaacaacattaagtgaggacttattcttctttgttgagccacgtaactattccttggtatggtggctcatgctgattttatagatagatatatttttatataaagtaaattaatatacatcatagccttgcatgtgatcacatgcctacggaaaaaattcctctcttcccaggacactgaccagagttgtcaagccagacttatagcggtcttcgctggttcctggagtcaccacatcatcttcggcacctggcatggcaacgccgccttccaaacctgtagtctcagtgtcatcttctggctggcctgtgctggctgaagaagaaagattgagtcagagcttaaggtggaaattgcataagcagacccaacttgtcggctacattcggattattttcttttccatttcttttggaaatttttgttttatttttggtcctttttgtggcttactgtggtgccagaaaccaaaccattctccttgcagcacttctgacacatcaacaccctggttatctccgttgcaaagcaaaggaaaatgaaaacattaaaaggtagagcagccagcccctccctggggccccatcgaggtggcctggacaggggacgtacatctttccttttcaataaggaaccagattcttcctggtgtcatttcatatgatgaattaatatattcatctggacctaaaaactctaaattagagtcaacaggaaagatttctaaacacacccctttgcagacccgatgcaaaagcggggtctccatctttttatttttttatttttttctctaccttttcaaattaatttttcttaagagacaggctctccctctgttgctgaggctagagtacagaggcacaatcatagctcactataacctcaaactcctgggctcaagcgatcctcccgtctcagtctccaaagtagcggggactacaagtgctcaccaccacacccaacttccatctttttaaaagcaaactctctctccatttaattttaagactgctgt

SEQ ID NO: 51676 - DNA, 1191 bp, Homo sapiens
agtttgaggttatagtgagctatgattgtgcctctgtactctagcctcagcaacagagggagagcctgtctcttaagaaaaattaatttgaaaaggtagagaaaaaaataaaaaaataaaaagatggagaccccgcttttgcatcgggtctgcaaaggggtgtgtttagaaatctttcctgttgactctaatttagagtttttaggtccagatgaatatattaattcatcatatgaaatgacaccaggaagaatctggttccttattgaaaaggaaagatgtacgtcccctgtccaggccacctcgatggggccccagggaggggctggctgctctaccttttaatgttttcattttcctttgctttgcaacggagataaccagggtgttgatgtgtcagaagtgctgcaaggagaatggtttggtttctggcaccacagtaagccacaaaaaggaccaaaaataaaacaaaaatttccaaaagaaatggaaaagaaaataatccgaatgtagccgacaagttgggtctgcttatgcaatttccaccttaagctctgactcaatctttcttcttcagccagcacaggccagccagaagatgacactgagactacaggtttggaaggcggcgttgccatgccaggtgccgaagatgatgtggtgactccaggaaccagcgaagaccgctataagtctggcttgacaactctggtcagtgtcctgggaagagaggaattttttccgtaggcatgtgatcacatgcaaggctatgatgtatattaatttactttatataaaaatatatctatctataaaatcagcatgagccaccataccaaggaatagttacgtggctcaacaaagaagaataagtcctcacttaatgttgttgataggttcttggaaactgtgacttgaagcaaaatgacttagaaagaaccaacattatgtgaggacctgctgcatgtcattttccttaaagtcgcagtttccaagaatctatcaacaacgttaagtgaggagttactgtctttcccaatttcgtccacttagctggtgtgctgatcacaggtggttggagagtagaagccagagcttctcaaattggtaaaaggagccaggattttacatttccaatctgttacagcccaactttcaatacaatgaaagttttcttgggtgttgtggcaa

SEQ ID NO: 51677 - DNA, 1958 bp, Homo sapiens
aggactcgttatataaagaggtcaagaagaaaagacatttttatttttaaataggttattgcataaaattattcaaaagaaactcacaatgacaaatactcaccttgtaactattagactgggtttgactgcagatagagaccctaaaataacagtggcacaaacacaaagggtatatttgctcatgaaacttagctgggcctattgttgccttgtaaaaatttggattttgctaccaaagaagtagcaggaaatagatattgagactaaccacaatcttggtcacatcttcccaaactaaagtattaatctcaaagtgagtaatacctcttcacagtctgtcccttctctgtgatcttgacattggactaagaatccacagctctggattcttctgctaccttaacctctgatactccttgatcatttatttaagatctttgtggctcagtttcctttactctgctttctaaactataaaattaatacgtagaaaagtgctatgaacccattggtgtgaataagggttcataaattagataataatagttacaaagacagtgccacatcggggcttgtttaaaaatccctggatccaatttatttaagaagccatcctcttggtttatgttttgctgctttccacttgggtaaattcatcttttgccagttgttaaattatagttattaaaccctaataattctacattattatatctttctattcacagagaaagtggatggagacacacagacaacagttgagaaaggtaggctagattttggcatcaaaatactcttactggggttttttaaaaatttctttgaagctaattgttgagacgaattgcgttcttttctggattgcagtcaatgagagcagaatagaaaacattccgagaacagatttcaagctttttttttttttttttttttaaagagagaaaagggaatttcttgtatttgaaactaagcaaacctcagatgagtctattcccttaatgtcagatatggggaatggtgtcatatcacagttcatcattactaaggatgaaaataggggccaacttaatagtcatacgtaaacactacccaaaaattaacacttaagccaatgtgaatgttacgttgatagatcctcagacccagaaatcttcccatttgtaaaataggattagactagcccaaattttctccttttggaagaaatgctccatgctcaaacaacatagagcaatatttgctatgtgcagtagggcagtggctttgtttatatgttacatattttatcaccgatgtattttttcctctggggctcatgctttttttctctctcttgttcagatggtttgtcaacagtgaccctggttggaatcatagttggggtcttactagccatcggcttcattggtgcaatcatcgttgtggttatgcgaaaaatgtcgggaaggtactcgtaagtaaatagcttacacccatgtgataggcaaatgaaagccatcgtgtctagaactcaaatctttgaactaatagaaatctctgatataagctgggtgtggtggctcgtgcctgtagtctcagctgctgggcacctgcagaccagcctgggcaacatagtaagaccctgtctcaaaaaaataatctctggtacaatggtcatgttccaaagttccttacttgggcctcttgagtgcagtggctcacacctggaatcccagtgctttgagaggctgaggcaggaggttcacttgtgcccaggaatttgaggctgcagtgagctatgattgtgccactgcactccagcctgggtgacagagcaagactgtgtctcttaaaaataagaaagagcctcttcatcttcaaaaggactacatctgaagtttccccagaaggacaaatgtctacttagaccttataaatttccaaaataagagagtcagagccagaggtggcttgta

SEQ ID NO: 51678 - DNA, 2788 bp, Homo sapiens
agaggacaagtgataaacacctggagggttgagggatacaggggacaacacagctgtggacttagcgtgtttggaaaagccaggcagtttgaccctgctgtgtgaggacgaaggcatggaggaggaatgtcaggaacaagagatgatcaccaggtgtcagaacttggaagatttagagcaaaggacaataggaaaaaggactcacggagttactattcacaatgccagtaagagacacgaccgtcacccttctctattttcacaggccctaaagagctgaagggttacgccctgctgccaacgtgcttaaaaaaagaccgtttctgactctgtgccctgtccctgagctcgtgggagaagatgacccgtggaacacttgcctggcccactcagaatccacggtgacctctccgcttgccaaaataaccgaaggaaagaccgttcaccagacttggctcctctaaacatttgctgttcaaacatgtttttgaatatacattctataaaagattatttgaaagacaaaattcatagaaaatggagcaaaactgtataaactgatttgtaactaacactggaccattggatcgatattatatgctgtaaccatgtgtctccgtctgaccattcttgttattgttaaaatgcagaggaatctggaaatatttatatccacggagtccttggatccagtgctacgtcagtaaatagcaccagcattttgcaattgctgatctgctgaaatgtacacattctggtctagtttggtctatcttttaaagcctgatctggtgtgaataatcaactaggaaatctaaacttggataacacgtggtgaacaactgcctttagctggtccagattaatcatttcaaagacatccattttagatcacaagcaggaagtcgatagtctcaaaggcactttgtttctcccaagtaggccaccaggcagcctctagagttgctttacccaaatccttctccagccatgacttggtgactctaagcttgctcccacctgccccctccacttccctcagatgatgaggagccagggctaagggggcagccttctctcttcccagtgatgcacatccttcacattggctgctttgttctggaatatggatatctcagcctggatgccgaggaagctgctggatgcttaatggtgctagaggctcaagtgtgtttgaaaccaagagccagttgtcccccatgcagaaagaaatcctgtgtgagcctctggtatgagaaataaaatctgccagttttataacattcactttctgcctctgaggaaagatacagggaacaaaaatcaatttgtacagtcttaatattaaaagcagcttgactaaatacctgatttaaaaatagaagacatccccagtcctcatgacataccgcaaatatctgtggggtcctgttgaaaagaacaaaataaaggagcccaaggggtcattctgtctcagcaccatccagcctggcacttctcttcccatatatccattggatttttttttttttttcctaaacaaagtttttacactgagcagatgctctgtcatgatggcggttgtgcaattctggtatcctctaaatttgtaagcattcataaaacaggaaaaagtaaactatcattcggaagcacagcccattcctcccattttttgcaatgatgtctggatgttattttaaacagtgtgtctgtgtgttcccaaatccagctggccccaccagctcagattccattttttttgtgtgtgtgtgtgaaacgtagtctgcaactctgcctcccggcaattatacatgtgtcaggatgtcaaaaagcaattctcctgcctcagcctcctgagtagctgggactacaggttcctaccaccacacccggccaatttttgtatttttagtagagatggggtttcaccgtatcggcgaggatgatctctatctcttgacctcgtgatctgcccgcctcggcctcccaaagtgctgggattacaggcgtgtgccactgcgctcggcctcagattccatatttgaacaccagctgattgagagaaggggaatgagaagagctggatgagtttaaataactcattgttcagattcctgaacaggagttgggataatggccatcttttctttcctatcctttcttcccccctcactgtgaaaaataacagtccaccccaagtcatacactggacccagtgcctgcggggacaggactgtgggtttcttggtcacacctgtgttggtgctcaatgcagtgtagacatgttttcaaataaaacaaatgattgtgtacaacaatgagtcagacttttgttggaaaacacaagtctgggccacacttgggaacatctccagataagattacaacttaggtaaatgcctgcctgttgccttgcttgagagtggattatagatggccaggggaatgaattccacaggaggaaaacacacctacacctttcagctaggtctgccaaagtagagaggtcaagtagaagcatgggcatgggagacacgtggcacctgggggctctctccctctctggtcccaaagggttaatgaggttttccctgattttttctgttttgttttgagatggagtctcgctctgtcgcccaggctggagtgcagtggcgcgatctcggctcactgcagcctccacttcctgggcccaagcaattctgtctcagcctcccaagtagctgggactataggcgtgcaccaccacacccacctaatttttgtatttttagtagagacgggg

SEQ ID NO: 51679 - DNA, 1089 bp, Homo sapiens
ctctgtctggagattgccctggccagctcctgggtgggtgctgcagatctcctcctcccgaccccaccgcaccactccatgtggatttatcctcctgatgcgggtcccttccctgccagcgtaaggatcaggtgctaggagcgggagagcagttagccccatgacttcctcgaaataaatattcaatattgttaaattaggactgttgaatttgtccgttgtcagtaatcctgggtgcccatttgagttccaaacaaggaaccatattgtatgcctgtagttccagctgtttgggaggctgaggtgggaggatcgtttaagccaggagttcaaggccagcctgggcaacaaagtgagagccccatctcttaaaaaatggaccagggttctagtcctgttctgctcctccacacctgtaacccttcagggaagtcatttaacttctttgggctgcagtttcttctaagaactttcatgagatgtcagaaagcatcccttttctagcaggaaactaaccacgtctacctagtccaacagattgaaagagaacggaccctcaactatgttacatgtaaatttacattccattacatgccacccccaggagatgactggaaactgggggagctgccagggttctgaaagtttagggaaacagctctatcagagacatctgggagcagggggtgctgaggttagctctttgcatgatataaaggccttgtttttaacccctactttttcccctcaacctgggaaaaccagttgaaaaaccagggcttagttctgcttcatgggccaccttcaaggcttggctttcatgaataggaaagagcaaggaactgttaatccctttgctgtctctatttttattttaattcagatttatttagtattcagggcatggggcagtttgtgacatgcttcgattggggaatggtgcacgttttgatattaaaacttttgccaattaaaagtccattggaagtggaaaaagaatcctccccaaaatatagctgcatgttaacacatgcactaaaaatagagtcatccccttgtgtgcgctggaggacttgttccctgaaacat

SEQ ID NO: 51680 - DNA, 2912 bp, Homo sapiens
tttgatcagttgtgtccaagtattagaaaaatgtaggccttttaaaaaaaaacatgataggaaatttacatatattaaggaggaggaactgagacacactgtcatacgttcttttttagtagggttctgtgtttttgagatggtccaaactgccccatcactcttgaggcttccggactaacacttattggccaaatttttacatgtagaatcttagtttagccttgagatgacctttaaagatcatttttattaaaccccctcatttcgagctatggaaacaaatcaaaattcacagtggaactaaaactcatttacattttctgtgattccagggctctttttactcaacacatctgttttggtttgattgaaataagttaatacattttaagtgcttagaaaagtgccagaacatgataatactgctcagtaaatgtttgcttttgttgattctgaaggtggtttctttaattgaaaggttggtatgttcaggtttgttttttccttattttgtggacagggcctgaaacagtacagtttaaatctgtaagaatgtattaattttgtaagtacaaaacataacaaaagattctcactgtagaaaattggaaagtagagaaaagcacaaagaagaaacagaaattgggcataaccttcccctcttcagataaccattgttaacgtttggcagatcttcctgtctctcttggtgtggatatgcgtatttctttccttattttacagttcattcacatatatatatatttatttacattttatacaggattgataatatagtgtgtatattgtttgcaacctgtcttgccttatgatacggtgagcatgtatccatgccactaactagtcaatattatgtttaatggctatttaatatgtggatgggccgtaagttatcaatcaagtccatattgatctgtaaggtttctcaagcctgagttttcttttcattaagatttgtttgaaagtttttttaaaatcgtgggttttaaagttctgtaatcttttgagattacagtgaaaaatataaattctgctttttagcatctaaataagcatttttcttgcgggtgcagtcataagaagtaacactcaatttcagcttcctttcttccgttcttggctgtggctgtgcagttatgtacatatatctgcgcctattcttttgatgattattttacgttagatgtttatttattcatgagactgtttctttaagcagcctgtttcttttcaagttccaaacctgatttacaaaccctttttaagtcctgttaaatcatagactttccaggatggaaagcaccttaggttatttactattttcatgtcttctgagtagcttttcatgttatttttaatactcatgcagaaaaaaaaccaaaacagcggacttctactagaaaactccataatggggagtggaagaggaggaggttgatggttgggggaaaatcgtcaaacttgcatgacgatgggtagctaagggagtttccagatgatgagggacatcacctgactgtccttaccacagataactgccgccctgtgtctagggcttcacgctttgtgcgctgagcaccagctatgctgtcacctatggttacaacatttggttagaggcctggggtggtggtccatctctctctttttgaagctacaagtttctagttagagctataaaaaccacctttatggagtgtctgaaagctgtggactccattactgaaaacaatacttagcttccattaaagcagagtttctcaacctctgcacttactgacatttgggtgagagaattctctgttgtggaggacgatcctgtacactgtaggatgttcagcagcatccctgtcctctatcagggagatgccagtagcacctccttccagtgtgacagccagtaaaatctccagacatttccaaatagcacttgaaccgctgcagtgaaggaaggctcatctaactgtatggttgaattattgaaacagattattgaatctctttaagaactgtaaggatagactagatggtttacaccttgaagccaagaagtggacttcaggtctgtccacgttcctttccacctttggttttgtgactttattgaatggtcagtttcagcacttttgcttcggcatcagttttgtggcatgaggtaaaacaatgtgaggtatcctggagatcataaaggagttttcatgacgtggaatcagcattcttagtatgcagattaaattatgaaatttgaataaatttgcatagagttgatgcgtggtaaataatttaagcatatagaccattatgctgaacagcgcagaaacaactgtcttctagaaaagcaacttggtccagcaaccccttgaagattgatggtagaggctatgctgtagtttttccgaaacctgtttttttgaaaacaaccaatttgaggttatgcacagaaatggtgagtttgccctgaggcaataaggcttacttttgaagtgcttacctaactttaacttaatacattataatttaaagatagttcattgatctttgtggaaaacatgcagcattaatgcagctttcctctagggggaaaagtataagttgccaaatccttatttgtaatctttctaagtgtagatagtattgattgaatttttattgtggcatacgtaatctttagtcggaatgtattgataaataaaacgtgaaaagagatgtgcttttggagctacatttggtaggggtggttttctgaattacagaacatctgtataatttcactggaatgaatgcatgtgtcgtttaaatattctttcttaaagagaatgcctttcattccccacccccaccttcctgaggcatgaattagagttattgtatgtagtaaatctggctca

SEQ ID NO: 51681 - DNA, 1223 bp, Homo sapiens
ggagattttactgaatacttattattttccagccattttggtgaaaagaatattttgtagctcttgcaataaatcatactctgggttttgctttgaaagagctgaattacttcttggcacagcttgtctgaaatatgtaaagctaagtgcaagtgttagtttgattatagggggcagtctgtctggaaattggtaaaacccacacattttatatgtgcttatatgtagttctattaagacctatgttaaactctggtgggataattccgtggcactttcacataatttaaattatgccatgtaagagtcactaaacccttatatacttcagtatgaatcctgtacattgcccaagaccttgttaagagaatgtaaattaaatataaattggagtatcagtgtaaaagtgacattctaaatgttcctcactctgcgaggcttattttttagggactttgctataattctgaaagacttagttttacagtacatctgaaagtaggagttttcagaagtatggctcttgggataaatttagattcttaattgtgaagctctgttaccacttgttagaaggcaggtcagctcacctgcttggggaggtaaatatatgaatgcactctcgagtaatttaatggagccctacctcaatgtacagaatgacagtatcacagatcaagaatggagtacgagtgattttcggctatggtgggggtaggtaggtcacttgtcccctgttgtctcttactatttgtaaagtgaagactatgattagtctttttgatcgggatggtttgagatgaataaagaataggcaggcaatttggatactttaggcttttcaagaacattagtaacattttttcttagatatttctcctaatacaatgagtgttgtgaaataacatggcagttattgttgagagaaaagccttcccagttatgtattgagtccttaggcgttttgaccttccctccactcttacagaacttggtggaaggggccactatgttttctacctccttccgtgcctttcacaaagccacatcctgcaccgtctacccttctctgtggatatttttccgcttggcaatttcctttcctgaggcacccacttgggacatctgaatctccatctccatgttgatggcccgtttgtgcttggacgtgttcttccacttgagactgaggtacttttcccgggaaggtcgggcatctcctt

SEQ ID NO: 51682 - DNA, 1096 bp, Homo sapiens
ttgcaaacagtaggcattgccattatttttaaatgtttgtgagaagtagtaacatatttagagaataaatcccaaatctcaaattatttaaaatagaagagtcactttctaccaaaactaaaaaaaaaaaaacttaataaaatcttcggagaagacctatagaatcttgtagtaatataagtgtgcctgacaccgtagcaaaagagtttaagttgtcattttatctattatgacttccagttttgctttaggttgttcacctgtgaattcaggaagcctccccaccatttatgtgcaggttgtatggaaaatgaaaagagcttcgagcagctccttgtaagatgcctctgttgctcagagagtcttcatgtgagacatgaagactttggtgccaggaccactaccctgcccgtgctgctgtagtgttcttccgcttttcaggaaattcacaaatcttttgcaggattcctagacatctcttaattttaaaagtaacatctgcattggcaactccagtggaaaaatagtacacaggggtcaactgaggattcattttgttttgggaattgtgaaatgagctatcatatggcatcttgctttagaaattttgtctgagttagaagcttggcatttgagccttagtcaagaattgatttaattttccttttataagttaaagtttttatacatctaatgtagggaaaatgtcagaaaagaatctttcatggaaacttctgttactttaatactgttttgcaggaggtaataatggccttgaatctgaagcatagttctcatcagagagcaagcactgattggaaaactcttgtattctgacctgcccccagatttttacatttgtatttcttggcaattagtcttaaaaataaggaaaggaaattaacattttaattcaagagtcctttgattggatggagttacttcatgcaggaaaattgacaataattctttttttttttttttgtactgttggaggggaggaatatcctatagtgagagctaagataatatgttttaatttctttagagaaactgggtagttttaataagggggttgcagggaattattgtagga

SEQ ID NO: 51683 - DNA, 1101 bp, Homo sapiens
tcctcctaatgagtccgctttcagttgtagagtacagtgaagccctagcaaagagtagtaagaaatctattttactggagataataaatctgacaaggaagctctcagcatagattgaagttgatttggcatagagttgctttataaatagccctttcagcaaactctacagttctgtatgtggttttaaatccctgtaaatttgtaggcaggtacatattacaattgtctgtttttctttttagggttcatgtaatcaaagaagtttctttgttgtgtgtatctttacagaacacaacaggaattgaaaatgaatcaggtgagtttaaaaatcagaatttatacaaatacatgacctagatgttagaccagctcttgatttttacaagatagtagcacacacattcatttctcctggattctcatttttgtttcttaataccattaattagttcattgtgttcataccgtgcatttgttcgtgcagtggaatgtgcattgtttgggcgtgggttggcgtttctgtggttccctgaggagaggactcattcttagggattttcattaagactttctttttgacctctcccttgccacactctagtgtgagttttttgtgtgtgtttgttttgaagcttattaagctttcatttttagcgttttttattttgtgattatttgttggttaaaagacacatgcacacgtatgtttattgcggcattattcacaatagcaaagacttggaaccaacccaaatgtccaacaatgatagaactggattaagaaaatgtggcacatatacaccatggaatactatgcagccataaaaaatgatgagttcatgtcctttgtagggacatggatgaaattggaaatcatcattctcagtaaactatcgcaagaacaaaaaaccaaacaccgcatattcttattcataggtgggaattgaacaatgagatcacatggacacaggaaggggaacatcacactctggggactgttgtggggtggagggaggggggagggatagcattgggagatatacctaatgctagatgacgagttagtgggtgcagcacaccagcatggcacatgtatac

SEQ ID NO: 51684 - DNA, 1062 bp, Homo sapiens
tttattttcctattttaagattgattcttattacgaacctggtcacccaaaggagctcggttctctgcagtctaggaactgttttgttggaggagtcttgatcctgcgttagaatggttgtgagttcttccaaagtggaatctaaatgttaatattgttcttgttgcatcgctgttcagaaatcatttatttgatatgtctacatctttaaccttaggattaattatgccttaattcttgtacagtattagacttgtaatatttctagtgaattagacttgacacttcaaacttttgctttatatttccattatatcaaacttgtgtttaaaaaagtctgcttgccagtcaaaaagtggtagcaataactactactttttttttttttggctcttttataatttcgttttgcttttgacaagttttaatatcagatctgcagaagaccgcctttgatcccaaatgccaagtatcagtggaaaagtgtcctcttatgtttctaatggttaacacatttctgatttgggtgtaatttaaatggtctggtagtaatgaagcttttatttggattataaaaattgcccactttttatgagtaaaatttttagcatcttttgttatattttcattactagaagaatattagttatatgctgtttagacccaattgttatggcataaaatctatcagtgtttttcaacaatcaccccagtcattcttcagggttaagacttatttcaggataatttacagttttcccttctcgtatttattgctgtcattttcagacagtgaaaatgagcagtaaatgcttgaaaaactgaaaaataaccacacaacaaaattcagatataaaaaagtttgaacttgaagaagattgacttataaataaaatcccgatggttattttagggttaggttattctccccaggaatggatcagcattgctttgatgggttttaattgtcagttctgtttcttatgatgggtatggtctcaaagacaatagcatagaataatttgttgatatatgcctgacagttgagtttcagggactgca

SEQ ID NO: 51685 - DNA, 1126 bp, Homo sapiens
atacaaagatgggttcgtagaattttagcgattttaatatggtatgattctaagctgttttttgcttgtaacagttactttggtgattattattagtctattgtagcaataatatatattttagtatgaatatactatgaattgttcttaatattaaggaaaattggtctaatctattccgtcatgtattgctgccactttccagttagttttgatcaagtcaatatttgaaactaggtgctttaattaaatagattaaactgatataatacttgctgataattctctgggcaaagcatgtaaaaggagttacttatataaatttaaatgagacgctaataaaatttgcttattcttatatacttttaaaaataaaaacattagtatgtgttgaccatgtaagatggtacatgcagctttatgtaacagcagccaatgccaatgttatgctgtagagcagagttaccttgctgattacagtcaatgtttgtctaaagagtatggagagaagggctgggtagggagagtggaggaggttggttctgtggttcatgtacctggagcagacctgaggagggtggagtaaatggtcaaagaagtgtgggctcagctctggggtcgccagaaggacagagtagactttgccagtgaggtggggaacctttggagggttttgaggagagggctgttagagttgagttaaaaaattcttaataaatacaaataatgaaactattctacagggcagaatcaggacttggttactggttgaaaataataataataaaaaatagtaacttaccgtgtttcatatatgtcaggcactagcctaagtgctttccgttcagtaagtcatttactattgattgcaaccacatggggtgggcaccattactatccctatttaacagataagaaagtgaatacaatcggaaatattttcttggtgcattaaagtttcattttaacatgatttaaagatgagaatttaggatttattgacctgtttagttatttgactttaaaaatcaactttgaggtataagctgcatacagtaaaaggtaactgttttaactgtatagtacaagtttcacacccgtgtaactatcactgctgtcgagtcat

SEQ ID NO: 51686 - DNA, 1057 bp, Homo sapiens
ttgctatctgttttgacttaaacctcaactaataaatgtgtagtttaggaaattagcatgttgaatgaatagtggtagcccttgaaatctcattttgaatcatgtattctactagataaattagcaaattttagaaaatctgggaccttgtctttctgaatgaaaatattatttgtgaaattcaaaaaaaaattaacaacctgaatagcatttccttaagtcagtggaatgagcttgtggcaagaagcctttcctcttatgttaggatagtaacacttcggcagagaaaaaagctgtgggactgtttttctctgcctctcctttgatgccctctaactcactctccttggtcagttctggcaatgtcattccagctgtgtgaccttgggcaagtcctcggcttatttgtgttcactttcttatctgttaaatggggacagtaatggtgcctaccccgtgtggttgcagtcaatagtaaatgagtttatagatgtaaagcccttaggctagtgcctgacataggaaacaccgtaaattattatttattactgttatttttcagccggtaaccatgtcctgattctgtcctgtaaaatagtttaattactattactgcttgaattcagacccaaacatcccttctctgggctattacagaaagctcctgattgatttcctcgccaacgttttcctccctatgggaccattctccataggccttacagaacatgcagctcaccatctgggaaatcagaaaagccagcggtcgttgcgagttgttgggaatgttttcgtggaggagctgggatttgaacttgacctggaaggatgtggaggatattgatcgtcagaagaattgagggccaggtgaaagtctaaattgagaaaggcccagagtagcaaggggacctaatgtggtgagggtaggaggggccagagggtgtgccaggaacccagatgcctgtaggggccagggatgacctgtaagagtaaaatggggatttttctgtgatttcttccaatagaatttttttttttaaatccatgggtagaccga

SEQ ID NO: 51687 - DNA, 1702 bp, Homo sapiens
ggctctgttattgcttgtgagtgcctttatttcttatgtatctttgtgcctccagtaccagatactttgtggaccctcagtagatacttgaatgaatgacatgctgtgagtgtatctaaattcttctggctgggatttctccttgaacacaaaccaggcgcgtgtgtgtttggtttttatgtggcctaatctttagacagaagctaaggaagtaaattgtaaaactttagtcaaaatacagtcttggaatatatcatatttatatccctgtttcttttttttagatgtacttccgatatcccaatttatatgtacatatgtatgaaaaaattttaatacatgcttttaaaaattctcattggaaacttattcattgagcagtttgaacatattgttcaaatgaaagtggttgattttatagctcaactgattgttgacttacatagcggacttacagagaagtggaatttgtacatcctagcaggataggactggcccagcctttaccccccattctgtatatgaggaaactgaagccaaaaggtgagggaaccgatctaaagtgatgctgttgactgctgggccagactcctgccattttactgtctgcttgctcattatatcgctttccgttatggtcagtgcatagtaaatagaaacaaccctaagaatactgtggatgaacagctattttggctgttagaaactctgaaaagtgagccgttccagtagctaagttttcaggaagcttagttaggcaggaaagggttttctactttaaagcaaatgaacttcaaaactatttattcataaaactatatttctaaccctttataagaacaagtcatgttcattagagacaatttgaactttataaacaagcagacagaggagttcaaaaatcagttgtagtttcactccattccaatattttttctcttcagttgttgtgactgtgttattcaagtatttgtgatcctactgtacgggtagtgttacatgtaaaacattttaaaagtatataaaacatttttttctaatcgtaaaacaatataggttctttatagaacagaagagtataaagaagaaaaataaaaatccccattgaggacttgacttaatttaacttgatctcaggctattttaacattagcttgatttaggcagtctagccttttaactgttttgtgaaacttaagcgattttaatggtttcaatctttaaaataaccatgatacattataaaaatactgattttattttctaggtgtctgggccactaaaccaattttaaaaggcaaaaaatttgggccatttgttggtgataagaaaaaaagatctcaggttaagaataatgtatacatgtgggaggtaagaagtaattctgattctttgtttttcagagttttatgaaataattattctgttctctcagaatttgacattttgaatttaaaacaatcattttaatgtgttctttaaagtcaagaatatttttattaaagagaaaatgtgtttccctggatacagactgctatttatatatgcttttgtattttgaaactgcttggctgtcctcaacaataaatgtcaaatccatgttttacattgccgtgtccagggtgttttgctttgcaactaagaccgtgacttcctgtttgatggtttgtcacttcacaggccgccacataaaccccataaa

SEQ ID NO: 51688 - DNA, 1017 bp, Homo sapiens
atgtctactacttatttacgttattgtttgtttcttttctttttttttttttttttgagacaaggtcttgctctgtcacccaggctgaaatgcagtggcatgttcacagctcatcctctgcctcctgggcccaagtgatcttcctgcctcagcctcccgagtagctgggacaggcctgtgccactatgccactatgtccagctaatttttgtatttttggtagagatggggtttcaccatgttgcccaggctggtcttgaactcaggggctcatgggctcaagcgatctgcccgtctcagccttccaaagtgctggggttacaggtgcgagccactgcacctggcttatttacatcattattcctatgcctacccacaatttcattgtataccattcatgatttatttaactaagccttatgttggacatttaaattgttttaatgtttttatgattataaataatttttcaaagtataaaactcattgtatataaatatgtgttgacttgtctgattatttccttaagatgaatttctagaagtataaatgttgtcaaaaagttatatacattttaactttttataaattttgccaaacattttctctccagaaggactgtactattaattatttatacaaccaccaagagtatatgtttcttgccagccttttaaaatccagtattgttaatctttttaatattaaattgttaaaaatatctatttttgtagaggaaaaccagtggtcactgcttctattaatatttacattttattcattcaggcaacaaattttgaggtcaggagaatagagggaagaagtagaattgcatgtcagttaaaattgatagagaaattgtctctgtataatgagaagactttaatgtaatttttaaaagatatataaacttttttatcagtcagcgctgctatgattaaatattaacaggtgagttttatagtcttcgctatctcagttcttctgatttcaaattatttgtaagttaaaattgca

SEQ ID NO: 51689 - DNA, 1157 bp, Homo sapiens
agccatttactataaaactttaaaggtaacagcattagaattaatttactgttagttacgctgcttgtgttttcctttttctttttttgagacggtctcattctgtctctcaggctggagtgcaggggctccatcacggctcactgcagcctaagcctccccagccttgggcgatcctcggacctcaacctcccgagtagccaggactatgggcacatgccaccacacccggctgagttttgaattttttgtagagacagagctttgctatgttacccaggctggtctcaaactgctgggctcaagcgatctacctgcctcagcctcccaaagtgctgggattaccggcacaagccacaatgcctgggcctgcttatatttttctaatgctgtccttagttgtgactgacaatgactttgcagacctgggagggattatattgggaagtgctttatccacactcttaaggttctgtgttttaatatatggttacctgtgtgtgtcatggagctaaagcatgaagatcgtgttaagtaattacacactgcatcttgaaagatactgatgagttaagcatgtggcagctgcttcccttctcctatgacacagaggcattaggaactgtctggcagatttatcctactgtaagaaactatcagtaggtatggtgggtctgtgttaactgaatacacactgttagtctctgatattaatgcagccttggattagcttttcttttccctaaattttactcagaatacaaattgaacagaacatgtttcttcctttctgccaaatttttctttggagatattaattgttgaaaagaagaagaaagtcatgttttaggattggtaatgaggttatggagcacattcagggacatgagtgtgaggaagcgtggagtgttgctgcatttctttgttgagcaaaggccatatctccctcattttcatgggtcacattctttaagaagacagatccggacgggcgcagtggctcacgcctgtaatcccagcgctttgggaggccaaggcgggcggatcatgaggtcaggagattgagaccatcctggctaacatggtgaaaccccgtctctactaaaaaatacaaaaaataagccaggcatggtggcgggcacctgtagtcccagcta

SEQ ID NO: 51690 - DNA, 1596 bp, Homo sapiens
tgggggaggcagagacagtgagagacagagacaggaggcggcggggagggcagggagactgcgggtgcggtgggcttccgaaaggatgcccagggggatgtggaagttagagagcgtgttgttttgtcgttttgactcaattctcatagttttacgacttctgatgatttcgaacaaaaggtaaagtgtagtcacacttaaaaagggaggggataatttctgggtaggaaaatagtttggttggctgtatcatatttccagtgggcatactgacacgttggggcttttttttttaatgaagaattttaatgtgaattggggaatagttcatagatcccagtttgaaaatatgccaaggcacagtatggttagtttcttattgatacaaatacaggtttgtgttttttgtttttttgtttttttgttttttttttgctctccttaggtcttaagtagatttctttttagtcatctgaacgaacgagtccatcctttatccagaacattgcaaagtgagttgtggaagtcatactgtaaataaaatcatatcgtaaactcgatttgggaaaatgttaaaatcggcattaaggaatgtaggcaagaagtctgttctgatttttcaagtatgtattctttgtatgtcaccacaaaatggaaatagaattaattcccccgtgaaacagttagtaggcctattactgaatatgcattgtctatttattgaatgtgatgtagtcactgcttcagagcattaaatgcttttgatcctgaatcagacgatcagagtctagaaaattcccagttttttttttttttaacttttaactgagttctgggattttattgctattaggcttagtgcttaactgtttgtagtgaaaactttttatgtaattcaacttgtttctttatttagtattcattttgtttataactaatgttaccagccttccgggtaagttatttgtagggggctggagatggggaggacagtaccctctttactgtgccactaatcataactaactcctgtacttaaatagatttgtagtttaatagcaaccttactttaacgcttttctctgtttggcatactttagtgtgcatgtttagaacatatgtcattactcttttgcttttttgtttatctgtttatttttctcttggttggatttggggaaaaacttgaacatatactttttgttttattagtgatatatgaacttaatagctgcatttttatacctgcgtagactgttggtgtttcgtattaaatagttcatatttcttattatcctattattttgtactactctgggcagcctataacccagaatcctaggttttaattaattaaaagacttatgtttatgcagagctctctgttggaacttacagtctgtttttaacagcttactggttaaagagacctatttgctctttaagacttaaactttggagagtttaagtaatgagtcaaaccttttttacttttaaattaaatactcagttaaaaccaatttatagcttgcaaagacctgaaatggagtctttttttttttttttaattaactcagttctgtttaggtcttatgt

SEQ ID NO: 51691 - DNA, 1109 bp, Homo sapiens
actctgcaaaagggtgagattctagatagtagtgtcttaaggctgggacgaggaattctaagaatgaaagaaataccaagttgtcaaatgtgaaggagaaacttggggcaaataaagcctgaagaactgttgggttttgtaattatggtattagtgatagccatgggaattggatgcctgtagagtagagagggtggaaattcagttgcaaggatgaaggactgatggagggcagaggaactggaggcagcaggcacaacccaccttggtgagttggtatcagccctgttgggaagcccgtgtcctcgatgaccattcatggtacagctgtggaaatctcccagttggagtcttgtctgctttggaaccaactgtgaagctccccaagtgaagatcggatggacctaacttctgtgcacagatatttaattctgattttatccttcagagttggatagctccccagtgaggaggcagcacatctagagttacatatagttttaaatttaattcatttaaatcaccaaatgcatgagccttcactgttgtgatgaatttttaatgtaacttgagcaaggctcccagaattttgcattctctctactgcctgaacattttaaggtgaaacattattctctagaatttcctactgtgtctgtccaatttattaggctagtagaacatagtccagacctaggttaaatttttcatgtgacgctttaggcaattttaattttgtaactcatatcccaggcatcagtggtataatgctatacatagtcttagaaaatagtcattatggctgttgaatgtctttgtatggtaactatttcactacaaaatccagttttattgatattactcagtggtgaatcatacttgttcagatcagggttctgtgctgttgacttgtttctggcacaggataaaatagaaataaaaaaaagcattccaatttgattgttgcttttttttttttaaactataaatgcagtttaagtctttgttttgtttttgagacagtctgtcgcccaggctggagtgcagtggcacgatcatggctcactgcagccatgaccttctgaggtcgagtgatcctcccacctcag

SEQ ID NO: 51692 - DNA, 1389 bp, Homo sapiens
cgcactagccaggatggtctcgatctcctgacctcgtgatctgcccaccttagcctcccaaagtgctgggattacaggcgtgagccaccgcgcccggccttctttttttttttaagatggagttttgcccttgtcattcaggctggaatgcagtggcacgatctcggctcactgcagtctccacctcccgggttcaagtgattctcctgcctcagcctcccaagtagctgggattacaggtgccctccaccatggctggctaatttttgtatttttagtagagatggggtttcacccaccatgttggccaggctggtctcgaactcctaacctcaggtgatccacctgcctcggcctcccaaagtgctgggattacaggtgtgacccactgctcctggcccttgagttttcattctggctttacagctactgtagtcgtgtgtcattgggcaagttatttcacatctctgccctttgggtgtctaccttgtaaagtgatttatgcgttgggactttgggggcttctagcaaaattgatccattaagtggcaggggcatcagttttacaataagggcgcacagtacaggcccaagaatgaatatactacattggtcttattctcagcaactaagtacacagttaaacattatttttggcatgtgagcaccttgatgcagtagataactgctgttttccttctgttgtattcaatttctcatcttgatgtattcatttcttttcctcatgcacatagtgttgtcctgtccctctgctgttccttgtcatcatttccatttcacttcccttgtgtttcattcctctttcttgtctagaccaagcggagcagccagctggcagtagcgccctgtaggacccccaggacccgatggtaagtgcacttgtgtgcttgccaggcctcccagcggctcctgctcctctgcctcacagagagaagctcacaaatgccatctcccctctgtaaatgtccttatgggtttggttttttcttttaatttgatgacatataggacagaaatcaggtgtcagaagaaatcagtactggtttaaggaaatgtagcaggttccaccgcctgttgctgcaatatttggcggttgtgagggacaccaagcctgtgtatgtgtgggcaggacccctggttctgctttctgttctgccataggctaattacttcccctctggcgctggccttcactttctcccacaaaattgaaggcaggacaggtgatttcaatagccccttcatctctagtccaaggccctcacgatgagacgtaacttaactgatggttctcatgaagattgagaacattgttccaggtgtcagataatctcaattccatggatgaatgatatagacttgtgatag

SEQ ID NO: 51693 - DNA, 1043 bp, Homo sapiens
ctgaagaattaggtatgtaggccgggcacggtggctcatgcctgtaatcccagcactctgggaggccgaggcaggcggatcatgaggtcaggagatcgagaccatcctggctaagatggtgaaaccccgtctctactaaaatacgaaaaattagccgggcgtgttggcgggcgcctgtagtcccagctactcgggaggctgaggcaggagaatggcatgaacccgggaggcggagcttgcagtgagccaagattgtgccactgcactccagcctgggcgacagagtgagactccatctcaaaaacaaagaaaaaaaaaggtgtttaaaatggtattttagaatttacgttttaagactaacaagcaaaatgactgttaaggttatgtctcaaatttttgtcaaaatctggtggtgttttttaggatttgtttttgctttgtattgtatttgatgtttctacttttaatctagatgttttcaatgatgctattttatgtctctgacctcatttttgtctgtttacatttttagctaattatgcttcccggtagtgattctctgttatggagtatgtaactttacgtgtatatagcagctttaagtcgtttttagtttgattttactaatgcagagataaaaggtgtcagaggcttgtagttctggaagctggtggaggtttgtctgggggagagcagcggagaaaaaggaggattgttacggaagaatggggatctgtctggatctgaagactgaaacaccagcttccagaaaaatagaaatctggtaattaaaaaatgtaaaagaaaggttgcaaattctggttaaatcctaaagaaactgggcttctgacttcttcagtattattactcctatagataattgtttcttatcttcatgactttagttccgttgttccaacttatgagaacgatgttgcaatttaatcttaccttgtaaacgtatggtatcacttggaatgcagtcagtgtttctgaattccatcctctgaattgttaatgaaatattgacctggactggacct

SEQ ID NO: 51694 - DNA, 2255 bp, Homo sapiens
tgaaattccgcagaatctctgcttctcttgttttgcttccaacaattatggataatcatgtcttagctaaaagggccccaagttataacatactgtttttctctaatatgcttcttacaaatagccaatccctattagctgtgtggcattgaaattcaatgctattactaattttcctttgacatcaatagtaacgttacctcataatttgatagtcattatagctatgaagggaactaatgcccaagattctcaaaaatgcaagattgatgtgtttctttcttttcccctctgtcataatttacctatataacagagtatttacagtcatcattcattcctttctttaggaatccaaagtggtaattgcccaggaatatacagtgttcttgattggattaataattatcttcagtaattcagaataacacatgagggaatgaatgaatgaataaataaaaaaaaaatgaatgaataaattaaaaaaaattgtgtttcagggaagaaaaaatcccaggaaaataaaaacaaaggaaacaaaatccaagacatacaactgaagacaagtgagccagatttcacctctgcaaatatgagagattctgcagaaggtaagcttgtgatattggcttggtctgaattgggtgtgtatgtacccagtgaatttaactttgtatctctttatattgtccttctgagaatcatttaggatctttacgaggttaaacagcaaaaaagctgcctaaatttaatgtggtaagctgagccttctatatgctaccttcccttcaaacaattgtgaaagacttttcttcttaaaaatgaacttgttcctttgttaaaataaaatgagaccaggtgtggtggctcacacctgtaatcccagcactttgggaggctgagccagaaggatctctggaggccaggagtttgaggccagcccgggcaacatagtgagaccctgtttctacaaaagaaaataagaaaattcactaagatgatggcatgtgcctgtagttctagctacttgacaggctgaggtgggaggatcactggtgcccaggagttagaggctacattgagctgtgatccccccactgtactccagcctgggtgacagggcgagactgtctctaaaaaaataaaaataatgataataaaatgaaacatatgattgcatttaaaaatagcatgaagttcaaaaccatcaaaaaatagtgatagcaaggacatgaggaggcacctggggtgctcgctgttttctattattcatctgtggaatggtcacatgggtatatatatttagtgaaaattttatcttgctatatactcaactatttgtacactttaatacatgtacgttttatacttcaaattaagcatttacttacaatgtcagagactttgatttttgtataacagaacaaaaagtatacagaatgaagtgtgtttctgttttttgttggaatttaaattcttattttgtctcttcgtgtttgtccccttaaaattttctcctttatagtccctctggtgataatattctaggcctgccacgacgtaagaatccaaccaagaggcatggattgaaagttaatcagaaagacagcttgccctctgctcattgcagttgggccaccatattgagactattgatacagaagggaaggaggtgtgtcttaatttgccatgggcaaatttttgcagattgcagcttacttgagttgtttatagtgagccaagtaggcaaatttcagaagacaggtttgtgactcttttaagaaatatttgtagaggaaaataaccagaatattttggatgcctttcataaccatttttaagcactgtttgtgatgataacattcataaaagatataattttctgtgaaacaagaatagtcaagttcatttcccagagtcttaagactaagttctgcctcctcattgcaggtgtgccgagagttttttttgaacaacaaaaattactaaggaacctcactacctttggcggtagaattagaaaacagattcagcagtcacctactccccttcagtaattcgagacaattatttttctcctgacacaacatcaggtcccatgaaaaatgacacttgctggcctggcgcggtggctcacgcctgtaatcccagcactttgggaggccgaggcgggtggatcacaaggtcaggagatcgagactatcctggctaacatggtgaaaccccgtctctactaaaaatacaaaaaaattagc

SEQ ID NO: 51695 - DNA, 2723 bp, Homo sapiens
aaatacggtgtgatgagaagccagaagatttattagaggaaccaaaaacaacttcagaagaaactcttgaagactgctcagaggtaacacctgccatgcaaatccccagaactaaagaagaggccaatggtgatgtatttgaaacgtttatgtttccgtgtcaacattgtgaaaggaagtttacaaccaaacaggggcttgagcgtcacatgcatatccatatatccaccgtcaatcatgctttcaaatgcaagtactgtgggaaagcctttggcacacagattaaccggcggcgacatgagcggcgccatgaagcagggttaaagcggaaacccagccaaacactacagccgtcagaggatctggctgatggcaaagcatctggagaaaacgttgcttcaaaagatgattcgagtcctcccagtcttgggccagactgtctgatcatgaattcagagaaggcttcccaagacacaataaattcttctgtcgtagaagagaatggggaagttaaagaacttcatccgtgcaaatattgtaaaaaggtttttggaactcatactaatatgagacggcatcagcgtagagttcacgaacgtcatctgattcccaaaggtgtacggcgaaaaggaggccttgaagagccccagcctccagcagaacaggcccaggccacccagaacgtgtatgtaccaagcacagagccggaggaggaaggggaagcagatgatgtgtacatcatggacatttctagcaatatctctgaaaacttaaattactatattgatggtaaaattcaaactaataacaacactagtaactgtgatgtgattgagatggagtctgcttcggcagatttgtatggtataaattgtctgctcactccagttacagtggaaattactcaaaatataaagaccacacaggtccctgtaacagaagatcttcctaaagagcctttgggcagcacaaatagtgaggccaagaagcggagaactgcgagcccacctgcactgcccaaaattaaggccgaaacagactctgaccccatggtcccctcttgctctttaagtcttcctcttagcatatcaacaacagaggcagtgtctttccacaaagagaaaagtgtttatttgtcatcaaagctcaaacaacttcttcaaacccaagataaactaactcctgcagggatttcagcaactgaaatagctaaattaggtcctgtttgtgtgtctgctcctgcatcaatgttgcctgtgacctcaagtaggtttaagaggcggaccagctctcctcccagttctccacagcacagtcctgcccttcgagactttggaaagccaagtgatgggaaagcagcatggaccgatgccgggctgacttccaaaaaatccaaattagaaagtcacagcgactcaccagcatggagtttgtctgggagagatgagagagaaactgtgagccctccatgctttgatgaatataaaatgtctaaagagtggacagctagttctgcttttagcagtgtgtgcaaccagcagccactggatttatccagcggtgtcaaacagaaggctgagggtacaggcaagactccagtccagtgggaatctgtcttagatctcagtgtgcataaaaagcattgtagtgactctgaaggcaaggaattcaaagaaagtcattcagtgcagcctacgtgtagtgctgtaaagaaaaggaaaccaaccacctgcatgctgcagaaggttcttctcaatgaatataatggcatcgatttacctgtagaaaaccctgcagatgggaccaggagcccaagtccttgtaaatccctagaagctcagccagatcctgacctcggtccgggctctggtttccctgcccctactgttgagtccacacctgatgtttgtccttcatcacctgccctgcagacaccctccctttcatccggtcagctgcctcctctcttgatccccacagatccctcttcccctccaccctgtcccccggtattaactgttgccactccgccccctcccctccttcctaccgtacctcttccagccccctcttccagtgcatctccacacccatgcccctctccactctcaaatgccaccgcacagtccccacttccaattctgtccccaacagtgtccccctctccctctcccattcctcccgtggagcccctgatgtctgccgcctcacccgggcctccaacactttcttcttcctcctcttcatcttcctcctcctcttcgttttcttcttcatcttcctcctcttctccttctccacctcctctctccgcaatatcatctgttgtttcctctggtgataatctggaggcttctctccccatgatatctttcaaacaggaggaattagagaatgaaggtctgaaacccagggaagagccccagtctgctgctgaacaggatgttgttgttcaggaaacattcaacaaaaactttgtttgcaacgtctgtgaatcaccttttctttccattaaagatctaaccaaacatttatctattcatgctgaagaatggcccttcaaatgtgaattttgtgtgcagctttttaaggataaaacggacttgtcagaacatcgctttttgcttcatggagttgggaatatctttgtgtgttctgtttgtaaaaaagaatttgcttttttgtgcaatttgcagcagcaccagcgagatctccacccagat

SEQ ID NO: 51696 - DNA, 1668 bp, Homo sapiens
accgtaaccccatggggattggtgtgacagccacaaatttcactacacacaatattccacagactttcactaccgccattcgctgcacaaagtgtggaaaaggtgtcgacaatatgccggagttgcacaaacatatcctggcttgtgcttctgcaagtgacaagaagaggtacacgcctaagaaaaacccagtaccattaaaacaaactgtgcaacccaaaaatggcgtggtggttttagataactctgggaaaaatgccttccgacgaatgggacagcccaaaaggcttaactttagtgttgagctcagcaaaatgtcgtcgaataagctcaaattaaatgcattgaagaaaaaaaatcagctagtacagaaagcaattcttcagaaaaacaaatctgcaaagcagaaggccgacttgaaaaatgcttgtgagtcatcctctcacatctgcccttactgtaatcgagagttcacttacattggaagcctgaataaacacgccgccttcagctgtcccaaaaaacccctttctcctcccaaaaaaaaagtttctcattcatctaagaaaggtggacactcatcacctgcaagtagtgacaaaaacagtaacagcaaccaccgcagacggacagcggatgcggagattaaaatgcaaagcatgcagactccgttgggcaagaccagagcccgcagctcaggccccacccaagtcccacttccctcctcatccttcaggtccaagcagaacgtcaagtttgcagcttcggtgaaatccaaaaaaccaagctcctcctctttaaggaactccagcccgataagaatggccaaaataactcatgttgaggggaaaaaacctaaagctgtggccaagaatcattctgctcagctttccagcaaaacatcacggagcctgcacgtgagggtacagaaaagcaaagctgttttacaaagcaaatccaccttggcgagtaagaaaagaacagaccggttcaatataaaatctagagagcggagtggggggccagtcacccggagccttcagctggcagctgctgctgacttgagtgagaacaagagagaggacggcagcgccaagcaggagctgaaggacttcaggtaagctcaggagctggtgggagggaaagaccgggaaggcgacagtatccttgcctacgggtgttttttggtttcttgttgcttttttttttttttttccccacttaaaggaaatagctgttgtataagttaaaggcatgaagggtcattgctttggctgcttttagagatgaataaatagttctaatttcagacttaggactcacaaagcagtgccacttctttaatgtggccagatgtaaattgaatttaaaactatagaaaagctctcaaaagtactctaagaaaagatgcaatcctctcaaacttcctttatgtcttgggtaatagctcagtgtcatgtgtcttattttccgatcatagaacatttcttaggttaagacgggtcactaagttcattagtaaaccatgttacaatcttgtttaatatttctgtgacttcagcatagatctagtacctgacactttctttcagaattgccaatgcttaaattttaataattgattgcatcggtcaaaacaaaacatagtcctttaaaaaggtcttatgc

SEQ ID NO: 51697 - DNA, 1044 bp, Homo sapiens
aaagggccttaaaaatcatgtctcttctttgccccagttcattttcattattttgctttgtttgatagttaacagagggttaccttgctggagtgaaattttgcctaaaaggaagcacagaagaatcagataagaaaacactggtattgtcctaaccgtagatggtaatgacaggcattggtggcagctcttcctcctctgtgtgaggtgctggaactgtgctgcggacacatctgtaggtcaggaatgtgatccaggggtccacttaccaagtcaccataaacctgtgatgtgttcttgggaattagaaaacagatgttcatcaagatagattttgactatctggacacaaaagtgggcatttctttaaagtgtttgttttggtcttagtactttgtagtgagtttagcacaaaactgggattcctaaacttagacctgggtaatatgatgattgtcattaacgtgttgcccagggctcgtagagaggaggcctcagcctcagtgcatatttgttgcattacactaataaggagttgtttgaactacagtcgtctttctgtttaagtatagttctacttgtaaatttcgtgtagggatgattcctgacacaaggaatcatcacatctattacatgtcgaggaatactcactttcactctgtttgcagcttgctttacttaccctgttgggtacacagggatttcttacagaacaggcagcacatccttgtcctgtgttatttctttacaacaagctgtgattaagagctagttttccatactcagatattttacatgtgaatgccactttcggattccacagtttttcaagtacatgcttgcaatcagccatatgatttttccatgagttttctacttaacactgagggtcatttcctggaacacaagccatggtgccagacaaggtgtcaaaaagccatgtgctccaaatatttttcttaggagaaaacacaggaaagcaggcatgccacagtcattcaggttctcctgctgcagctcttactacagtgacccaccccccac

SEQ ID NO: 51698 - DNA, 1035 bp, Homo sapiens
tacggcaaaggatacgaaatctaccaagcttgcaagaccagttgaagctgactcaaaaatcctaacattcagctgattgccggcaggcttagagtcaggcatctgctgcttcggtgggggcccaacgcgcatgctgggcgcccgggtgattgagatccaaagagaagggcactgtaagacaggccagatgaactggctcctcgtcatgggactggtacctcagatctgagcatggcccttgtttttggcacgtagcagagaaaggattgatttgaacttaaccttgcaaagcaagttgcctgttttagcagtagtttgttgtaggtttcagggatgacagatttggatgcactcatttaaaacgttttggtcacatatcagctcttgatgcctttcttttaaattaattatagacagagagaggcatttagctgatctcttacccctggtatttcttttttttgttgttttcgtttttttaaatcacaagtagattgccagcgtaatggagaggaaaccagattggatatggactcttttttatgcctattctggtgttgcgtttgtatatccaaatggacgttatcctctcagattcttatctggcactaatttataactattatattatcagagactatgtagcaatatatcagtgcacaggcgcatcccaggcctgtacagatgtatgtctacacgtaagtataaatgaatttgcataccaggttttacacttgcatctctaatagagattaaaaacaacaaattggcctcttcctaagtatattaatatcatttatccttacattttatgcctccccctaaattaatgactgagttggtggaaagcggctaggttttattcatactgttttttgttctcaacttcaaaagtaatctacctctgaaaaatttgtagtttaatatttgtttggtgaatttgtgccactttaatccttccactatcattcccattttgttacatttctgttatggggactttatgttgaaatattgtataaagcatttgtagca

SEQ ID NO: 51699 - DNA, 1024 bp, Homo sapiens
tagttttctagattaagaattgaggaaaccatcatcactctacattaaattacttgcagttgcaaaaattgcatttaattgtgagtcattaaaaggtacccagaaatacttttattaaaataaacttgtcgacctgttgcgggtaataggatttgcacatgcctgcatttctgccttccttatgtcagctggatttcttttcaactcttttttaaaatagaaattcaggtggacattctggagaccataaacattttacggaagactggtgcctaaatgtgccttcccatgtccagctaataaaccatggcaggaagtcaacagaacaagccatgtttctgaacaccctttcataggtgccacctgagttactcagtgaggggagaaagaactggagtgtcatttcagcaaccacagaaagctacaggtgaattttaaagcccaggtttgtgttctgattcagaacatatttaagctaagaatatttccttattcatgtttaaacaggagcctatgatacaatctggaatcctacatctactgagtcttagcattaaatctaaatgtacatttaaaataggactcactttaaaaaacctggaatttgtggcacaggtaagttaacaaaagggcatttaggccttaggagacagttatgggtattttaattttttaacttaaaaacaatttcagtgtacagcagttgaatttgtcgtagcatttaatcattggcccaaaatatactttaattttttttattggaatgaagttatttaaaactcatggattcaattttccttgcggtaacattctcttctcacttgctttttataatcgcatccaatccttgccaacccagctagagtttagaacattttcagatggcttctatttccaggctattattggacttgtgaattcaggcacattctcctgttgtgattcagtcagccagccattcagaaaacatctttcaacagccaatctgaatcatcaaagtgtcaggctgtagatctgaaggact

SEQ ID NO: 51700 - DNA, 1964 bp, Homo sapiens
agggatcttcttaaactgcaaattctgacttggagtgggtgggagctgagagtctgcattaccaacaagctccggggggggaaatgatgccgctggtctggggaccacattttgagtacaaggatctagaccagtggcctgcaaagacaccttttaaaattcccaatgcctgggctgtacctgaaaccaacgaaatcagaacttgttgggatagaaagcaggcatcaggatcggtttagtatccccaggggattgcagtgaacacccgagtttgagattctctgttccagtgccctctgagcaaaggtgggtccagcccaaaacagactgccagagtcttgagtggtcaatgcagctgctctatgggcaaaggctcacccccacctggctttgggatattggaaacaactcttcaatcctcactactatggggactgtgtcagggagtggggcatgggctttggtgtcaaatggtcctggattcaaatcttggctgcttctctacttggccgagggaacttgagtgtccagcttctttatttctctgagcctcagaaccctcctctgtaaaaccaggaccatcacaggcccagccttacaggactgctgggaatttgaggagctcccaaaaactacccaaagtagctcctggtgtatagaaagtgctcagtggatgatgcgatgatgtttttttcccccttgcctgacatcctcattttacaggcaagacttctatggctcagcgaggtagaggcattttccagcggctacacagcaagtccgtaatggagctaggattccagctctgggctctggaatccccaccccatcctcctttgggttcctgccctgcttctttcttctctgtcttctcagcccttcccccaggctgggggcttcatttgaatgggcaggggcttcctgaagcacgtgggccttcccacttggggaaggtgggtcctgcagtggatgtcgactgttcctggaggtggctgagggccgatggctcccacagctcccacctgtgggccctcacccagcccccagggaatatcagcatcatcacaggcttgtcttacctttgcaccatctccccaccctctgcctttcccctaccttcagcaaaagtgcagaatatcagacactgacttcaaatgaattgcactctgagaatttagagagttgtgtaagacttctgcggccagcgatgtggcctaaccagctttctgtatggctgtcccaggagatccctcctgaagactgtgagaaaaaggtgcaaggagggaccagggcaggcagagatcccagcccaggatgcccatggcggtctggcagggagcttggaagagcaccgtggccacgtggggaccctggagccctggagagcccatgtcctctgaaagccggcagctccttccctcccaaactcctttccctccacccttcttgaagcgtcctctgggttcctgcctccagtgtctcttctccccttctctcttgaactcactttcagggttttggctcttcttgaggagccatcaaaccaaggttatcagcagcccccaggatgctcaatgcagtggttggtttccagtcccatctcccttggcccatctgcggcagtggacgctgttaatccttctcttccttgaaatactctccacctggacaccgccctctcccagtctctgcacattaccagctgctcccccgcatcccgcctccatccctgggctctgtcccccgcatcccgcctccatccctgggctctgtcccctcgctccgtctccgctcccccttggtgatctcatccagtcacatgcgttaaataccacctggatgctgaccaatcccgggtttccaccctcatcagaatctccattcagccgcccacctgacatctcccttgggtgtctagattcaaatttaatctttccaaaatgaaactgtctctccatgaagcc

SEQ ID NO: 51701 - DNA, 1078 bp, Homo sapiens
gggcagatcatacctgacgattcatagcagctaagagttctgctgacccctgtcaccactctccagttcccctgccaccaccctccaaatcccctgccaggcccatctcagttgtggagaagctggaagaagatcagggaaaggaacgccttcttcctccccgtgtggttgcacgacaccagaacattcttgcttgtttgatgcaaccttgatccaagtggtggaggcgaggttgtgctctgtgggcactcctgctacccccttggagtcctaggctgctggaaacatgaaagaagctgaacatagttttaatgagtttggcaagaacaactgtttgagcaggtggctgctgtgtggtacaagatcattggggctaaatttattctgcgggctttgttggctgggtcatgtcagacccttgggtcaggcttctgaaaggtccctgcccctttactttctgatgaattgagacctcagcacaggagctcagatggagcttggaacaggcagtcctgcaagcaaagagccccagggcctctgcccacttctccagtcaggctggagaggggagagaagttggggagaggaggtgtcctgcccagctcccttctcctctgtcctcttccaccacagcaagcgctatgttacctttgtggggatgtaaaggccttccattcccaatattacctctgctctacagattgtgtgaagtaatgagtcattaagaacagagcgccccttttaaagaagctgatattctccactcatctttgcatacctcactattattattctcagaacttaccttttgggcatgccacaagacgctggggattctgggaccatcttgaagcctgtagtttctttctctttggtcaaggtgaatagtttaatgtagcagtaaatgagaactggtttcattgctttggtcaaactttttaataaataataatatgcacttacaatatatcaacttccctggcaagcgcttaacatgcattattgaatcctgaggccagcgaggtgacaactatagctggcccccacccagcacagtaaaaaatctgtctataacttt

SEQ ID NO: 51702 - DNA, 1035 bp, Homo sapiens
gattcctagtgtttttaatgaagagagaaagaaaattttggctcctacattttagtagtcatatttttgctatctgttggagaaaatacataaatgcaaaagattacaatgaattcagtagctttgtcaaatggttacagcttcggtattgcatatatttgaaaactaatggtacatacatgcaagaaaaataattcattgtgcccataggcagcaggttggagatgtgtggattttggacttctcgtcaccttctctggccacccagagtctctgcggcccacaggttgggcccggatcagtgcagtgctgaacaatgtcaggtgcagtgaggtgcttgacaagtgccttggaaaactatggcctctgccctgggactttgagtcttctgccgattttaagggattcctctgttcttcaaacccaactctgcctccctgtgacacaactgattaacctgtaatttgggcccctggctttcagaaaactctgcaaaatttctgcagagtgacttcctggtatgaataccagaaagcaccagttatggtcagaataacagaactggccccatgctagatttccgggaatacgatgcaattggccaactgccatcactaactagtgtcaccctgcctcatctccagcaatgtcctaaaacccctcaagcatgtgatccgtcatatcattttctcatttatgccaacactggataatggcctaatctctccagcagcattcagatttattagagaagatggcatttacaaaaccatttccctgttcctctgcaaacaccctaagctgtcttataataaaccactctctttatagtaagccttccttttaacagtggtttattccctgcaattaaaatcacctggaagagtccagaaactggttttcatttctcttccttcgtgtttggttcatctttggctggagggctctgcaggacttgggagtgaacattagagagaggcagaggccaaactttgctaaggatgagagctctgcagcaggacatggtcagtatga

SEQ ID NO: 51703 - DNA, 1034 bp, Homo sapiens
gaagggaagtggtgtgatctgaggcatgtggacagccacctctgatgtctgggacaccctgagacaccaccatcagaatcccatgggttaagatctcctccagatcatcaatttacaaacgcagttacctttacctgggaaggttacctttaacttcccataatgccttcatgagaacaagtgagtagataatctggctcttttctagcagagtcctgaagggatgggacactggacgggttagttttgatatgcggatgagggtcttacatgtcgggagcattcgttcattccctcatttgatattcactgagcatctcccaggagggggcctactcaggctgagggctttggggacaggaggacgccaggaatctggtagacgggattgtagggagggcttcccaaggcaaaccttgtctgccttactgcttaaaactagagccatcccagagtcagggaagaacacatgtgattaagtcactgtccaataaagtctgtttccacagaccaaatccatccattccggtcagctgatgtgcaagaccctcctcacttttccagacctgcttccctctgcttccccacatgccccactgtccaggcaaatggaaacacctgtgtatgttccagtggctgaacctttgctcctctggtgcctctcacctgaaccagccttgggaagcatttccatctatcgggacacccaccagtcgggacccttccaggttcatctctgattctacattctccatgtctcctttcctgtttcctgtgatcagatgggacctggtccccctttgggcctccttaaaacaaaactttagcacctccctcctgcctatggtgtgttctgtcctgtcctcaagtcatctgtcctcttatctgagtccccattcttactctgaaggcaaggactctaagctcctcattaccaaaaaaaaaaaaaaaaaaaaaaaaaaaaaaaaaaaaatccctagagcctagacagtatctggcacacagttaatatgtttgctgaattaaagcttatg

SEQ ID NO: 51704 - DNA, 1055 bp, Homo sapiens
atgtccccatcctgcattcagaccagcctgtgacaaccacatctccaccaccccgccttcacatgagctccatggctccacagaccttgtcctgcccagctctgattcccagtctctagaacaaagcctggcacatggtaggtgtgcgctacagactagggaaactgacaattcttcagacagtctggaatcgctggagagctccaggatgcgtttctgttacaaaaagggtatagacgtgcatggttcggctcagctctatgtatcgccgtattttggaagatcactgtctcttcatttgtaagcatggcaccagggaagactctccattgggtgtttcctcaaagtactgcctttggcataacacgagagtcctcgcccccatcacctgaaggagtgggaaaggaaggggtgagtttaagaaagacacaaacttgactgaaaggagaaagagtctcgaacagatggcacaacctgcccgtttctccacagcatgactgtgacaaagagaaggaagacctgagtccactcagtggtgagggcagctcccaggtaccccatgtaaggaaaatggtgaagacggcctgatggacttggaagcagtgggttaagctatgttgatgtatcatttggtggccacttaggtaacacacatggaggtagaaagggcagaaaggtggtgctgggtttttttgttttttggtttttgtttttcagatggagttttgctctcgttgcccaggttggagtgcagtggcatgatctcggctcactgcagcctccgcctcctgggttcaagtgattctcctgcctcagcctcccaagtagctgggcttacaggcgtgcaccaccacccctggctaatttttgtatttttagtagagacggggtttcaccatgttggccaggctggtcttgaactcctgacctcaggtgatccgcctgcctctgcctcccaaagtgctgggattacaggcatgagccaccatccctggcctatggtgctgtttttaatttaactatgttttgtccaagaagcgctaactggagactct

SEQ ID NO: 51705 - DNA, 1048 bp, Homo sapiens
aagaagccctgcaataaagaagcctgttgaatctagcatttcccaaatgtatttgactatggagctttttgtcttagcatgattccaaggactagagtttgagatcaagcgatctaggtataacccaagtgttcctaggccacaagagagaacaaaaaaaggaagggaaccataacagagaggaggcagggggaatggctctacacagaggcagaaccagcacaaatcatgtcactggttgctttcaacagaccgtgagatattaaaaaacaaaaacaaaaacaaaaaaacctagatatggaatctaggtattattggccaaggctgacacaagaacacatatttattttagttgacttaataatcaggcctgccatgtacacagtgcactacagtttacaaagctcttttctatctgtcatctcccttgaatatcaccatgaccttgagaatcaggggggagttatcatcctcattttgcagctgacaataacacttaccacagtgatcataactgttgaatttcctgagtgccttctacctgccaggcagtaacttaagcatttccacctttattaactatagtcttcttatataggaaggtgactgtggttcagagaggttaagggactgatttgaggccacacagccagcaagcagcagacccacacgtgaacccgggtctggctgacaccacagcccctggcagggagcgaggggcagcaggaacatgcagccccctctaaatgggttttttacaacctgctctaagtcacagcgagaagtaggctcagggaatgtaaagtgggtagtgatttttttctcccctattcttttactgcttttgtttattgaaggacaaatcattgctgttttcgtttgtgtttctagcacaataaaaataaaagatatgccggcaatctttttaaaagcttatacaattccagaatttgagctgtcggatttatgccgcacactgatctcatagacatcacagtgccatctgcctgggcccgccaagggcttccgaagttgtcgttatcaatca

SEQ ID NO: 51706 - DNA, 1052 bp, Homo sapiens
agccgccggggccgggcgcgcgagggcgctcggagccgggatcgggaagccgctggtggcaaagttctcgcagcgcgcggagccccgagccccgggcgggtgcagcgggaggcgtgcgggacgcagagtgagttcctcggcgtggggaccggggctcgggggctgcaccggggggccaggaccgcgcttgccggagccaggcgatcccgcggcgcctggagacccagctccgggctggaccccgcgtctgctgggggaagcgtgggaaaggggccagccctgcgcgaagttggttcggccccctgggaccgcacctgtgagccatgtggcggcccccgcggagtgccgaggggagcccccttcaccgccgcccctccgaggcgaaattgatgcctcgcatttgctaggagcggagagattgctgcgtttctcatacacttgaactccgagtaatgcagaaagagaaattgcagaggtggagacacaaacgcagtgatctaattgcgtttggttggcgaatccgccccaagtggagaacagcgttttactgttaaagtgttcccagcgggtgtgcccgttccatcccactcaggcctgcgctatctcccttccccctgccccttccccccaagttagggcatggggatgggagacaggaacccctgcgtcatcttgactggagtaggaagaaaccttagaagacgaagggcttttctgagaaggggctgccatcaccaggtccaagttctgaatactttttccgggaaaaacgggagggggaggcacaacataattattccttattcatcgaacacctattgtgttctagtaattcacatgcaacacatccttaaaatcttatcacaaccctgggagtgaggctgtgttatctccatgcagatgaggacagaaaagcccggaggttaagcgacttgcccaagttcccagagtcctaaatcatggtgttggaattcccagttttgtccgtggaaatccaaagtcttagcaccataatacctctcccaggcagcaagctcactagctggggagca

SEQ ID NO: 51707 - DNA, 2386 bp, Homo sapiens
caaccacaaggccccctattcttgtttttgcctatggtagcctccccaggagatggaatgccgcctctgggtgtcagggcagagtagtcctctctcctgtgttggagttttccttttcccaccttctccccagttacacacggcagagtccaagacgggttgaggtaaaacagcatcgatgcgaaaaggaagcagatgggagagtttggtcaagttgcttcatctttttgagactcaatttacccatctgtacagtggaaataataatagtaccaactaaagatctgtcattccaaagatggtgtctgtaaaacaccttgcctcattcaccataaatgcttaatgcatgttagtcctcagctccttctggcattacatgcttgccagatgacctgtcagtgctcccactgactcagtttcccattagattgtggcgctctctgctccatctccaccctcatgaactatgtcaagatgacttttgtcttgtctgtaaaatactaaagtgatctgaggctgagtgttgtgtcagtgggagttgttttcatgtaaacatgtacaggagatggctaggtggagatagggctgtttactttgtgtctctatagactccatttgtgtgttcatcataatatcctaatgacacggtatagcccaggaatgcctgtttcctaggtctaggggtggttgttattcctgcagccctcatggtatgtccgttttaaaagacagcacattggaaaactcttttcccagtttacagatgacatcactggcatgaaacaagatcagaccagcagctaaaccagaaagttttgagttttctctaccctactgcccttcaccctttctggtctctggttcttaaagaccaaatcgagtttctgagaacttccatgatggctaggcattgaggacagcctgccgtggaaatggttctgaaaccatcggctgttacaaggggctttcctctaggagggcgatgggaactctggctcaaagctgcaagctgaacttgttgctgaaataaacatttcagccaggctgtgcggtggctcttcctcgaatctcagcacttgatcccaagtcaaatgtggtgctcagtttaaggagctgaaagaggtgccctgttggatgggagagtctgtgaattggcactttcagagatgtggggaagggaaaagatagagggggatgctggcttggtgggatggaggcccgaacaccttgaattgctcagggagaatgtcctgagatcggcaggtgatggccctgtgatggtgacagctctgacctccagggtgcgtgacccagggactagagcaggaggtgcagacagtggatgtttgcacaatccgcacctgcttctgcctcgattgcgttttactctgagatgttccacaactcactttccctgttggcaccaagggaataactccttctgaaggacggatcattccagagccccctcagagtgaaccaggtgctcactggaggttcttaaactgggaacaggaatccggttctttgatctttcattgtccattcattcggtcacatttcttgagcatctgctccgggccaggcactgttgtagctgccagggatatggcagcaaaggagatgactgcagccctggtttccatggagcttatagtctgtgggaggagatttccagtaggcaaataggcacaggatatgtccagagatggtgtaagtgctatgcagaaaaataaagccggggaggggttagaatgatgggagcaggtgctgcttagtttttaggtagggtggacagaggagcacgttctagaatgaagtgaggtgtgtgggtgctgagtttctaaggcaagagggtgttgccgatcagctaaaggaactaagccatttttaaaaggtggtgggaaattagtatctttgtagacgaggcactctacaggtctgtaactgaagcatctgcactctaacccttttgctccatttggcatttctcttaaccccgagctcagaaagccacgtggccttattctgcctcttcacatcctctacctttttaaaattctgtattattttattacgatgatcatttgggttcttatcacttcttgcccctcccctttacatgaaacccgcggttgaggggactggggcgcttgtgtgtctttgtctttgtgtaccggctcccagcactgtacccttctggggaccagttgtgtcgtgaacgaaacaggatgccttgtcttcatgggtcctcccagcaacccaatggggaagtgcagttgctaatcccatccacagatggggaaactggtccttagaacagttcagtaactgcccaaagccacacagccagtggatgtcccaaccgggaatttatcccagaccg

SEQ ID NO: 51708 - DNA, 1058 bp, Homo sapiens
cttatgttgcgggtgccagatgagtgcctttcaagggagagggaaggtcaggcttgcctcctgttcacaaggacaacctctgtctcccttgtggcggcttctatgaaggtggggactccaggctttctctcgtctgctttttggatgccttcaagagaggccagttagaggatatcaattgtggcaattccccagagccctcatcagatggcattagcccgtcatgtgctgcagtggcacccagtttggaggaaattcggaaccagaagagtgtgacaggtacgtgagtgctggccgctgtcccagccctgaactggctgacactgagtctggcctaagcagcggggagctggtgggctctgggtggggcccgtcctcagtctacgtgctggacactggggactgttttgggaaacaccctccacctggcaccaggtgggtaatctgccggtgcccgtggtctcgtcttttgttgcttcttggattcggaggctggctcaggctcccagctagtttgggctgtaactttatcacaggcattcactgtgttcactaccttttaattgtacagaagtttcagaaaagctctcctggggaattggagagaagtaaaaacaacagctgctatttcccggatgctttattccctcccctcacagcacagcctcagcagcatgttcctgactttgaagttctatgtgcccaggctgggaagaatgtggattttcgctcagtcgggtcccattagtgtggaaggatcattgactgagggccgagcaggaaccaagcaccttgttacatgtgttccttttgatccccctcttcctgtcaggcagctgccattctccccatcttacgggtgagaccactgaagcttgggagaggttacaccggctgtggaaagtagctgttccaggctgccatgctgccctcctgggacccttcctcctgcagtttccttgtcagctgacgattccccgggctaccaggccacagagcggaggctgagctgccgagagtcacaggacttttcttcctggcaccttcggctcactggc

SEQ ID NO: 51709 - DNA, 1043 bp, Homo sapiens
gtgcgtcttggctcactgcaacctccgcctcccaggttcaaacaattctctgcttcagcctcccgagtagctgggattacaggcgcctgccaccacgcccggctaatttttgtatttttagtagagacggggtttcaccatcttggccagactggtcttgaactcctgaccttgtgatccacctgcctttgcctcccaaagtgctgggattacaggcgtgagccactgcgcccggccctcctttttcatagcatatttgtgactgctaagccccaggaccactccttgccctggggttttgaacagaagggcacctgctgcttagacgctgtagtgtagggagacaacctttccttcagtatgagacagattttctgttcagcaacgggacaggctgccctgggaggcagtgggttccccagcactggaggcatcaggcagggactgggtgtgccccatcagggtaccagagtggtcatttgggggctgatgctggccagtatccatctaaatactcaattgcccatcctggcctccagtcgccccctccatctctcctttcagagaagggtggggaggttgggccagccaggtctgtggccctgcagccaccttcacaccatgagcgttccctgctgcccaacagcttcaaacatcccaggctgagggtcatcgctgatctggggtagcccttcttctagcgccgggggcctctgtggcattcccgtaaacctccctggctggggaggagttgctggacttgcatttccacagtgccagccctcagccttcctgtgctccttccaggccctcctgggtgcaccagcggctgaccaaggggcaaacctgcatccctggttttccctctgcagggacagaggctaccccttgggttctggagcagtcacggatgcctcccctgccagtctggcctgacttctccctcccaccagggtacagtggttctttcttttttctttctttctttttgagacagagtttcactcttgttgacaaggctggagtgcggtggcgcaatcttg

SEQ ID NO: 51710 - DNA, 1019 bp, Homo sapiens
tagttttctcctctgctctccttagaggcggcatgcagagtggaaacagcgtttgacctttgtgaattgtgggcagagctagccagacagacggggaaacatttggtgggaagtcagaggccactcagagcaagaattaaagttccgtctctacctttttcagtccagaaaccagagaaagccagaggggacagcagcagaatagtgcccaagcctccagattaggattgcaggatcacttcctcagcagtcaccccccgccagctgctggagagcctactccggagacctctcagcaaagaatgttctacctgaggatttacatcagagattccagaagtctctggggacccaggacaatgcttcctggcaagggctggtctcacaacgagaaggcagtgtggttcttgagggaggagcaggagggaaaataataaccaaaatgtatgtagtacttgccgtgtgcccagcaatgttcttttatggtatagacccccaattaatccctacagcaatcactcccattttacagatgagagaactgagtcacggagaggtgaggtgacctgctcaagatcacttggttagtaagtggctgggatgccttgcttggagatgtgtttctagctgcttagacggcatcgcctctcaggcgaggtgctcagtgagtgtcaaaaccaaaagttgagccgggcacagtggctcacgcctgtaatcccaccactttgggaggctgaggcgggcggatcacctgaggtcaggagtttgagaccagcctgaccaacatggtgaaaccctgtctctactaaaaatacaaactaattagccgggcgtggtggcgcatgcctgtaatcccagctacttgggagactgaggcaggagaatcgcttgaacccgggaggcggaggttgtactgagctgagatctcactactgcactccagcctgggtgacagaaagagactctgtctcaaaaaaaaacaaaaacaaaaaaacacacactggatatgcagcttctat

SEQ ID NO: 51711 - DNA, 1050 bp, Homo sapiens
tttctaatcagctgtgttcatttctagtcctgaaaggttgtggcctgatgccggggagacacagctgtgggggcccccgttggtgtcctacttggtttcagaagccatgcctgccacggcccctggagatgggatggaccattctggaattgcaggtctctctcgccttcgaataggcaggggtcctagggggacacgaatgaactgccccagagaggcggtctccagtgtggactgcctggtgtctgtgcatgggagatgggccaggggcaaggggcaggtggggaactgggcttgggcctccccataccccagactcctatgtgacccagctgagtcatggtgctgttcccggggccttggggttggctggcctttatttaggacaataaaacccaccattgtaatcttcccaggcagctgggatgataaacagagaagtgagcacttggaaggagggaaaagtgctttattcagcactttgtcaatatcagcaatatcagcccgcagcaaggccttctgcggatggcggcaccatcctgttctgggcagggcaggaggcctcttgcccgcctgccagctgatctgcattctgggcttccttccgagttacattcgttgggttttggggtcgcagtggccctgccacacattcagaacagcatcctgggacaaagtaccgcaggggacagcaccaggctgcacggaggctcatggcccacagctccctagctttctgttcttgggcaggctccttatcccttttgccttagtttccccatctgtcaagtaggactgaaactacccctgaggtctctgggaggttgcaggggatgtgtgcccagcatcaggagcacccctgcaggcctcgcagctatagatggtggaagtccagtgctggaggctgagttgggtctcctgtgaggcagtcccccgtggcccagtcctggtctttctcagcccaaggtaatttttcaattaactcaattggctggaaaccggggcgccctggagtgtgggaaaacgtcccaggccggaagggccctcccc

SEQ ID NO: 51712 - DNA, 1464 bp, Homo sapiens
ttttatttcttcctggagcagctgctcaggcaggctggagagtaatcgggagtgagttatatggatttgtgagctgccccgcagcactttcaagctccacggcctcgagagcctcccaccaaagggcaagtgtccgctccggcccggaagacttgggcagcctgagcccaagacttgctctcctttcctgtcgcctccatggagtcaggcatgccctgtgatggcatcagcagctgtctgccagtgttgacggagggctcatgggtgccaggccgcttgctggggctttttatctgtcctcaggcattggcacagcagccctgggagatgaatactattgtgatcttcattctccacacaaggacagggaagtgacgtgccagggtcaaacaactacccaaggacagagccaggatttgaaccaggccatccagttccagaaccactgctcttcactgtcattgtggccattttacaggtgaggaagtggagggacgtagaggtgatgtgattgccggaaacgcccactaggtgtgtaccttcagaagctgcatgggagacagtgagtccccaggtttgccatttgctcagaccccagtctggacttcttttaaattctctctctcttttttttttttaattctctctttttttttttttgagatggagtctcgctctgttgcccaggctggagtgcagtggcacaatctcagctcactacaacctctgcctcccgggttcacgccattctcctgcctcagcctcccgagtcactggggctacaggcgcctgccaccacgcttggctaattttttgtatttatagtagagacagggtttcaccgtgttagccaggatggtctcaatctggtttaaattctttagaaagcacgcgtctgttcactatggagatctgaagatgtgtgaactgcaggctcaccacccttgtgtgatggcgacgtctaggagagccttcagctgagcccccgttcacctacttctcctcttagcagaattatttacatctgcagggactgtcagcatgccttactcattttgctgcatttaacccgagttgaaatctgatactggcttagcatgtagtgtgtttccagtttgttctccagctcatggtatagccagtggccgcgcggttgaggttgtggattccagactttcctctaggctttggtttgattgtctataatatggaaatagaaatgcctgttctttcccctagtcttctcagaaagttagctctcccgcccggagctagacacgggagaacctgctctgtgaggtgtggggcaagcagcttccatctttccgtgggttctgggaatgggtggagaaggaaactgagacactgggtgttatgctgctgagtcacactcagggtgggaaagaaagcagggctgggctctcccggccgttgtaaggccgtgctcaagttgcttcctcccga

SEQ ID NO: 51713 - DNA, 1039 bp, Homo sapiens
ctttgaggcagaacttgaaaggtttgtgacatccagtgtttcagtccagaaggactggtcactgggaacaaagagaagctagaattgaagtctaaagagtgataagtgctcactgcttggaagaactaagttcccttgtccatttttgctcatccagtttttgaagaaagaataaggtagccttcaagtttgtagggaagctaagtgcccagaaaactgtctctgacaaaaacagtgtatcaggattctttttcaagtacaagggataaaaaagatgcaactcaaactggcttaaatgaaaaagggaataattggcttatgtaactgaaaagttcagggataggatctggcttcaggtgtggtgtgatccaggactcaactattcggatattatctgaatcctgtcctggtctcattggctcctcccctcccaatggcaagacagctgccagcaactccaggctccatcctcacagcctgagcccattggtaaagagagcacctggatcctggtgcagagatttacctctgattggactgacttgggtcatgtgccttctcctgaaccagtcacagtggtcagggtgattcagtaatctcattagccagactgggtcatattttcatccctgaaccacaggtgttgacagtgggggctcctgaaagggaaatggaggtgccatgttgaaaagaagggtcatagatgtcagccagacagaaacgtctgctgcccagtccagcgggggctaatagagaaatttggaaagaaaaggctggatgaggtggcctctcagagaaagcagtagcatggaggctcagcttgatggctgtgctaggagtcttccttgtaccaataggatggcccagtaagctcccatcccaagtcagcccacctgacttgtgatgaactggcaacaacttgctgcttctaatccctcagtggaaaatgtgctcattaggccagtcatggtggctcatgcctgtaatcccagcactttgggaggctgaggcgagcagatcacttgaggtcatgagtttg

SEQ ID NO: 51714 - DNA, 1658 bp, Homo sapiens
tgcactgcgtgcctcccaagaacacggcacagagcatggtgtcgggtgttgggtgtgagcagaacagagtccctgccctcatggaatggacaggctgactccatggccacacccttctccaggggctgtgtggggagtgtccccagtggagggccagaaccaccatgcgctgagtggctgactcactcataccctgctgaggggcatgcccccctctgctggcatccaccaagccaagcctggttgccacctgggccctgctggttcaggaagcccttgtgtcacccacagaccttgctcctctccttttggaaggtggtagtgtgggagttgaggctggaggtgctggaaccagaccatctgtgtccaaaccctggctctgctcttcaccctgtgtgaccttggccaagccatttaactcctctgtgattcaacttccccatctataaactgtggatgataaaataggatctgcttcatggagctactgtgagaattaaactagttaagtaggtaaaatacagcaaagcttagaacatatagtatgtgctcaataagtgttaagaaagatgtaattgttattataataaataataatcataatattattgttacttagacctttggcttggggaggctggatttacaaacctacgattcaccaagagtcttagcagtctgagaggtcgccttctgttaaaaggtggctgctgtagctctagccattgagtccacttcccagaagtggagaaagtggagaaaggtggagaaagaggtaaagccttatttttgtaagagtcattcctcctaaaggacttttttctgcacctcactgcccagaagtgtgtcacatggacaaccctagctgcaagggaagctgaaaatagcatttttagaaagtgggactcattgcttttgcaaactaaaggagatgggctgcagaagggcaagggtctgccccagctccctttgccacctggtatggacctttcctctgagtgggtacaccacaccccctttcccttggggaggaggcccctggggacctgctgcatggcctgccagctggtatcattatcccccctgagggcagcaccattggtaacagttggctccctggggcaggagggccaccgtttcccagacaatgtttacttcctgctaccatggccaagagaactctgctaagtctatgggttttgggcccctctacttagaggcctgagggcactgtggttccccagcgtcagcagaaaggtacccaatcagtctttgggcaaaggccaggagagttttttgtccttgggcaaaggccaagaaagttttctccagtaaggatgactccttcctcagtagctgtcttgcctttggcaaatggctttctcctgtcattgggtcatcagcctgagctgtaccagatgcttaacaaataccatcttcatctcacaccctctagcccagtgccaacaggagagcttcgtgcagtcatggcagcggtctggatctgcactgtccggtaccctagctcctagccacgtgggtgcacgtgaaatgtggctagagaaactgagtttttcattttaattaatttatacgtaagatagtcacctgtggccaggcccagtggctcacacctgtaatcccagcactttgggaga

SEQ ID NO: 51715 - DNA, 1050 bp, Homo sapiens
ggagtacactggtgcaatctcagctcactgcaacctctgcctcccgggctcaaatgagcctccagagaagctggaactacaggcacacaccaccatgcccggctaatttttgtatttttttgtagagacggaggcttgccatgttgctcaggctggtctggaactcctgggctcaagcagtctgcccgggtcggctttccaaagtgctgagattacaagcatgagccaccaagcccagctcatcaatggtatcatcttatgtataaactgcatgagccctgcccagcacatgtggtaagcgtgtagcctgggggacccctttggggtgtctgttgatttcctcaggcctcctcaatttcatgatttctccgcgaatcaaggcagcacagaaacaatgatagtgaaaatttgcttcattcctttttaaatctcttaacagcatgtcaggtgttttgagcgtgttcccacaacaataaatactctttgaaaacataatttttaatgactacataatgttctgccaaatggagataccataatttatttagccgtttccctattattagacacttaagttgtttccactttttttctctctctgtcttttgtttgtttgtttgccattatataacactgtcttaaagatctgtgtatgtaaatctgtttattttcataagacagcatttcttaagctctttggcctgaggaccactttatatctttacaaaactgaagaccccaaagggcttttgctcatatggtttagatctattagtattaatgttttcaaaattaaaactagaaaaaatatgtaaatctttagtaatttattttaaaatcatcataataaatgcattatatgttaacataagtacagttatctttttctttcctttccttttctttttttttttttttttgagatagtttcactgtgtcacccaggcttgagtgcaggggcgtgacctcggctcactgcaacctccgcctcctgggttcaagtgattctcgtgcctcagcctcccaagtagctgggattacaggcacgcg

SEQ ID NO: 51716 - DNA, 1076 bp, Homo sapiens
gaaacgcctgcagggcacagcagccagcacggggcgggtggagttagctagcactgactgagcatggagcagaagaaaggatccggagtttcctctccttactggaaggactaaggcctgtgggagccttttccctgccacagagtgagtcacctgccttacactgaaagaaacacaactttattatttaatttgctcattcaccaaatgttccctgaaagcttccctaccccaaagcttgtgccgatgcctgtggttcagagcattccaggccctgctcagagtctagggacatgcctgaaacctacgacacactcagtgtaccttacttgaatcctatttttccaagtggccaaccaggcctgtagatgagagtctatcccataggcattcctgcttcaaggagttctaggctgcagagactgtcttaagtccagcggggtcggtggggctggaagactaaagctcccagcaggtgcagccatgccctggctgcctttgcagatgtcaccaggcctgcagacagtggggtagtaggtggcctgagaggctgttgaatagaacgatgtgtcatctgtgctggggcggccatgcccacttgctttcttagacacacatccttgtcaccacagcactgtgtgggtttgaaaagctacttgatgtttcctgtgtcccttcccacatccgcactccattcttagtctcattccctccatcaaagacgtgttcatcttctatgcagttcatcacctggggttgaatgtgtatgttcctctttagtaaattcatacgcttgaagctactgctgtttctttagcctggtggctctcggggctgctgcagggggcccaccctgagccagcccctcggtcccacagccctgacgtagaagactctttgctggtaaatctcggaactcactggaagcttccacaaagtttaactctacagacagaatgtcttccttacatactaccggctgcttttaaatattgttaacagatcccccttaaaggcttcttagactccacattttgatccagttgataataattgatggtcaggtggaagaattg

SEQ ID NO: 51717 - DNA, 1416 bp, Homo sapiens
tttgccaggcactctcttcattcctttgcctgcgtgagtcatcagtcctcccaacaacccatgttcgatgggtagtgttagcctcagtttccccatctataaaatggggatgagagaggttaagaaattcttctggccggatgcaatggctcatgcttttgtaataccatcactttgagaggccaaggcgggcgaatcatgaggtcaggagtttgagaccagcctgaccaacatggtgaaacactgtccttactaaaaatacgaaaattagccaggcatggtggcgcgtgcctgtaatcccagctactcaggaggctgaggcaggagaattgcttgaatccgggaggcagaggttgcggtgggctgagattgcgccgcggcacgccagcctgggcgacagagcgagactgtctcaaacaaaaaaagaaaagaaaaagaaaatcttctacggccttctagctagtaggttttggagccaaagcttgatccctaatgagtctgttttccaaactgattttcttcatagatatttggcaggtacttctttgattctgaggttctcaggggtgatcacagcagaaaagaggaaaagagtgaaatagggaagagaggagaaagaggagaggatctggaagtgggtgtctttcagaggcccccttccctggaggcaccaggagttgtttttttttttttctttttcttttttttttttttttttgagacggactctcgctctgttgcccaggctggaatgcagtggcgcgatctctgctcactgcaagctccgcctcccgggttcacaccattcggcaccaggagttttaatgcattctccgtcttcgctctgaaaatggtccccgggaagaaaggctgcaaggttgctctcttggccacaccagacagaagtttttcttcccacctcctcccagtctcgtcctccttcccctgcagggcattgagcatgctccagcccccggaaatgccagtggtctcggctgcagcagaggctgtctttacggtaggggcagaggctgcacacgctgatcctcagcttttaattaatccacccctccctggccccttcccaggaaaggtcagagatggattctgcagaatgaggacaggactcggtgtgcgtcaagccaggctctccaaatgcctttcagaagaccttgcccaagaccccattaaattttgcttggagcatggcctccatcactgtgcaggtcttcatgcctacctggccatgacagggtcaggacatgaccttgaaagtgtggcaagaaaacgaaagccacgctggcctccatcccaggagaagacctttggtgtgagcaggggagggtcatcttcagagttggcctcagaggcagtgcagggcactcttgctctgcggtgcctgagcttggctcagtt

SEQ ID NO: 51718 - DNA, 1041 bp, Homo sapiens
tataggatatgattccatttaaggagactagaaaatgcatgctaatctacagggacagaaagctcctgtaggaacgtgggcttattgcagagggtaggcagaaactgggtgatgggtattttcactgtcttgattgtggtgatagttttgcaggtgtgtacatatatcagagaatgtcaaatggcacatgttaaatatgtacagttcattgtattttatttaaaaccaataaagctgtttttagaaggaagtaaggtggatttggagtcctgcggatagagcattgtagggcaaggagcattttagaaccctgtaagtcacatcagtggggtggcctctggctttgccttctttccctgtgtgctggcctcagcaggtcacagaggggacccggccccagatgggcagagtcctcgaagacaggcagactgtgccagccagctcctgggtgagggaaagagcagagagtctgcagagctccaatacccagggctcctgggctcgcattccaggaacaggcagagaccagcaaggtccaaagctggatgtgctgtggcttgagctcccgcccaactttttaaataggtctgaccacctggcccagctagaggctgagacataagctcctgatagccaggcaggctggacaggccttcatgcctggagcctgatgttggagcagaaggagaggcatttttcttggcacccagctaaaaattcagaccagcttagagaggaacgttctaatttcagcttagggcctggtgctatggctgggaaaagaccaaggttaaaattcaatgtctccatgaatataatatttttaaaaataatctttagatttaaggtatatataattaataaagtttttatatatttatggaatattggtatagtccaggcatgcatggaatataaattccacagatttcctcccagcagccctgtgagttgtttttcccattttgcacatgaaaagattgaggcccagagacctgacctactgggaggtggaaattaaagcaaagaaggtggccgggc

SEQ ID NO: 51719 - DNA, 2588 bp, Homo sapiens
ggcgcagtctcggcgcactgcaacctccacctcctggattcaagcaattctcctgtctcagcctcctgagtagctaggactacagttgcaagccaccacacctggctaatttttgtatttttagtagagatggggtttcaccatattggtctggctggtctcaaactcctgacctcaggtgatctgcccacctccacctcccaaagtgctgggattacaggcatgagccactgtgcctggccataagtacctatttattaaagaccagctgtttactgtaaatattttactaagcttagagtggccgtatcatttgttgtttaaactgggagagttttgcaagagaagagggctctattaaaagttgtgttgggagagtgggagtcaacagggatttcccgagacagacaggatctgtagccttgcccagtgctcaggatctgagtaggcaggcaggtgtgtcaggcaggcatcccaggtcaggggatggcataggcaaaagtgtgcaggctggacgttcgtgctacgcgcaggtgaccatgaggcagccttggggcccacctgcccccctggacaggaataggaacatctgtccatctgcaccccgactccttgacccagaaacacatcctcgactctgctccaggctcatctgcatagtccaagaccgtctgcctgttcagcatcgtgatttgcgaggacacaacaggccccattctgttttttatggacctgaaaaagacatgatctttaccatgacagagaggcagggggtgtctcggaaaccattccgatgccatgatagacggcaggaagccgaggcagagaaggaagtggttaaatcgtggagcacatcctcagttgacaccaaaggaacaatgctttcagatcgaggcctcaggaggaaaaatgagggaggcaggagggggaggtggggtggctggaggaggctggtggctcctagactgcgtgtcttcagtgtgagcccctgcaagagcatgtgacgccctgacaaggcggcgtaaccaggcaaccgtcattactcatccccatggccactgggtcttccagtggagcaccgtgctcctgggggtcagggctccccagagggacagggcagcctcctctgcagaacagcggggcctgagagatgccaggaaaacgtgcttgctccaagaagggaggggagagtagttaggagctggaggcccagccttgccgggaaagtggtgtgccacagcatagctgggagctggggcctagctcccaaccctgaatgcttagtggggtttctcgctttttgctgtctctgttcctaaaacggatttttaaatttcaagtgcgtgcttgacccagtagcacagttctgtgcattaaagaccttagcccatgaagcatagaccagtcttgtgtgttttgtaaatccatgttttttaggtattaacagaactcccactagcttatatggagtttttatgcaaattggaaaaaggtacccactctgtgtagacagataaggaaaaggtgctcttctatcattgaacacagtcctatgcaaccccatagcctggtgatcaggcagtggtatctgcatgcaaccccatctctggggggttatagccctgtggcaggtttgctgcggaagcagagagatgcctcctcctccaggttgccggagccctgcgctaagctgcacaatatgacaaacacaatactggctgcatttcagcttccacctaactcacctatcaggcacttttgggcagtacacaagctgtgcgactgtccatggcagccctgggtataagtcacggccatccttgctggttgtggttggcataaggagcaataccctctggatttcatcttaaaagaatttaaggaagagaaaggggatgcagtgccttttcaacataccctgagtttgttcaaactaaagacatgaccatgccccaggtatagcgtgccatccagggcacctttctcacttggagaaagtgagaggtgaagcacctgttaggagggacttaccctggcctgtcagctgtgatctaaatgaggctgtcccctgcatggagttaacgtttgcctggagagcctgtgtgccaggctgtctgcatacgtggtcccatttgatcctcacagcagaccggtgagatgggtcctgttatcatgccgactttacagttgaggtcactgaggctcagggctggaaggaacttgcagcagacacacggctggcaagtggaggagccgggtcagcactccggccgttccagcccgcgatccacacgcctgaccactgtaccttaaagaccaaacccctgtctgttgacacctgaagtttctctgagcctttaaaacgtggcctttgggtggatgtgggcgggcttgggcatgggacagggcatgggacagtggttccccacatgttccctctgaactggggccgctgttctcagcacctgagattttttttttttttttttttttttttttttgagatggagtgacactctgtcacccagtctggagtgcagtggtgcaatctcagctcactgcaacctctgcctcccaggttcaggcaa

SEQ ID NO: 51720 - DNA, 1021 bp, Homo sapiens
ttaatattaaggcagcaaatcccagaaagtgctgacctgctgcttttcttggttggtgctttccaagcagttccgcagtcctgcttggtgccagcctgagccagggctgtgaaaggagtgtgtgggccactgagtacggctggtatgggtctctagcatgacgcccccaaccctccttgatgaggctcaaaagaaccaaaagggaataacctgtcaccttaatttgaggtcacttcaagaaagtgaggctcaattccaaatctaagtcaaagggtcagttgtttgttggggtggagggactctgttggagctctgactggctgccttccctgaggttgacatgggggccattggacaccaatcactgtgcctgccctcacccacataatcagtaggttcccaataagcagtgaatggtcactgctatttttctctatccaatttaatcaaattcacggtagcaggcactctgccaggtgtcaggaacacagatagtcattccagaaatatcaattgacctccgatgcatgccaggccagggctgggcactgagggtatcgagtcctggtgggcagagcaaactgggcagtctcctccagcccaggcagcgtagaggagaagcaaggaataaataggtgaatagacagtaaaaagatgagatggtaatacatactatgaaggattcaaatgggaaggcgcagaagagagtgtagggctgctttgcacacgattgccaaagaagttctctctgggccgggcacggtggctcacgcttgtaatcccagcactttgggaggccaaggtgggcagatcatgaggtcaggagttcgagaccagcctggccaacatggtgaaaccccgtctctactaaagatactaaaaattagccgagcatggtggcgagcacctgtaatcccagctactcaggaggctgaggcaggagaatcgcttgaacccaggaggtggaggtggcagtgagccgagattgtgccactgcactccagcctaggtgacagggcaa

SEQ ID NO: 51721 - DNA, 1085 bp, Homo sapiens
aaggaggcccccggagctcaggggaggaacctgccaggcagggagaaggctgaggacaggaatgagcttcgcgtatgttggggacccagaagccattgtagctggaaagtgaaggatggagagggagcaggagatgaggggaggggcactttcatgcggggctctgcggtcctgggtaaggagtttggattttgtgatccacgtggaaggatgcggggaagccacttgatcggatttcattttgaagcagtcctctagctgctgcattgagaatagatcaggggtgtagggatacggggcccaggccgttggactcttctagcaggacatatgatagacactcaggccaggctgcagaagccacaggacatgctggcaggttagatggaaacagaagagaggagaaaatagcaggagttgggcttgagcaccaggtgcaagtgaggccagctctggcctgagggtactagggagccatggtgggctttagacagggagtgatgggatcaaactggggctttggaagctggcctggggtgcagggtggaagcagggaaaccagtagtgagcaggaagtcctgagccaagaaaggaggaatataaagacaggagtgaggctctcccttgagaggaagaaggagctgcaggcagggcctgcttcctgctcccatttggtctcatgcccctaccccagccctgtctgcaccatcagccccatctcttcctcctcccggggcttcctccgtcacagaacgcgcccctcccctgcgggcagctggccgcattctcaggcagacacggagcccccaggggcatctctgttttctctccccaccctgctggctcagcctgagcaggactaggactcacttaaggaatgagggccgcctggcagctccacccggcccagccctgctggagggaatcgtgatgaagaacagggcagctgcactgagggtgatggcgtgctgccctcagaattgcttttctcggctctaattttcctgatgcgagaaaagccagtaaccccggggtacatccaatagtcaggacatggtgctgattggacttgaaaagtccgtcca

SEQ ID NO: 51722 - DNA, 1049 bp, Homo sapiens
gtggattctcagtaaatccatgcggaaagcctgtgtggggaagtggacagccccctgagggtggaggagcaggggctgggctgggagttggcagcagggttcagagcctcatggctgatcaggacctgggcacctggggtccactggggcctcacagagcaacagcatcaggtgggcatgatcagatcccacctcagctccgctacttagttgctgtgtggctttgggcaagttgcttaacctctctcagctccagcttccatctgtgaaatggatgtagaactttccaactcatgtatgtgaggaacttgggacagaccacccagacaggctaagcactcaacgagtcactgtcgttattgagcctggttttaatcgtgtttggttttgtcatgaggcaggcaggaagtcgaactgtgggtctgtgcccaggagcagggcaggcctcggacactctccagtggatgggaactgccccagaagctcctcagctggcacagacggcgggggggaggggcagcgcggggggtgctcccctgctgttacttcactgattccctgatggttttcatggttttgtggctaaaagatgctccaaagattagcctgtgtgaaggtttgggaatccgctgcaatatgggagcctgggccttctctgcgtcttctgtctgcatcaactcaaatataggtaaggatgttgctctcagaagacagccagagaaagcccacctgaggcagagaggagaggctgtgtgtatgtggcggggggactttgggggttagaccttgagggttcctctgggtgcagcactgttgcagcccaaacactctacctgaattaactcattcaccctcataataccctatgatggaggtgcttttattgactccacttcatttattttttatttttttattttttgagatggaatctcactctgctgcccaggctggagtgcagtggtgccatctcagctcacggcaacctctgcctcccgtgttcaagccattctcctgcctcaacctcccgagtagctgggattacaggc

SEQ ID NO: 51723 - DNA, 1054 bp, Homo sapiens
ttgaggcctgctgaggctcctggaggccttgtttgtcttgaactcgtggcctgcggaagtgggtagctgctccccctggaagctcagcccgaagcttatctccatgagcccagcgcttgggccacacctcacccatccagacggcaccacctcggagtccaggcctcggctgtaagtctgaagcccaggctgccagagtcgtggaggaaagagttttcccaagtggatgagtggccagaagtggcaggtgttacagtggatcctgctggactctgcaggtctcaggcgagcctgagagtagtcggccttgctgctcactggcaggctgaccaaggcaagtcatttaacccctctgagccttactttctcattcatcagatgggaacactggtactcagtaggttgtgtgaggtgagtgagacagctatgatgaggaccgggaatgccctgccgggtttccagagcacttcactgtttgcagagctcttcgcagaggtcatttcatgtgaccctttaaacccctctggaacaggcaggttcaaaggccagaggttatgtgacctgcacaggtgccacagggcttctagccctggtatctggctctaagtctaaggctctttctagcttgtcccgtctgccttccaagttcaaggtctgtgtaaggcactgttactatcctgagagtcagcccaggtttctcaatggtccctgtgggcccaggagccctgggcagaggcggcaaagtcataagaggagcggcaaggctgaggtcccattcccctgccagccacagtcctcaaggcctctcctgcatcctcatcacttagtgctgtttgtttgggctgtaagtagctcagttcctgttattcccccctggacaatcaggcaggaaattcttcactttggtttccttaagaggtcacatacttttctctcttgcagaagtaaataaagcccgtgtgctgagttggcagttttgcacacgagcccgcccgctggggtgagccagcagcccccttccctccagccttagctagccctacccagggggccc

SEQ ID NO: 51724 - DNA, 1079 bp, Homo sapiens
ggccattctcctgatcaagggtgtctggggagtttctagtttggagcttttacaaatagggccgctgtgaactttttcgtgcaggtgaacgcacagatgcaggcctttcagacatatacccaggtaggaactcttttcattccttttacagatggcaaaaacgctggcatgatgtgacttgccccaggtccccccacatcactctaaggagcggcagagctggatgtgaacccagattgtctggctccgggttctcactcgtgagctctgctctctgcagcctctctcctctcttgtaaacttttctgggaaaaggctgctgcctgcatctgccttcaacaaccctgctgtgtctctgttacgcagcaggggtgagaccagtccatatcactaggcacccagggcagcttcccgatggacagtcttgagtaggacaccaaaacccagagagggtgcctgagttcccaaggccacacagcatgcgggtttgcaccccagtgtcctgcctccctgtccaccggccattccctgctccatgctgcctcttcctcctttctcaagaccgagcccaggccattatcttgcctgcatacgacctcacacacccacacaagcctttaaaaatagtcctcgttgtgtggggcatggggcctgaggctgatattgcatttccagaaatctccatttccccctcccgcttcaacctagggaatgtccgtgttccgggcccattccctgccactatttttagtggtgattgggaggaaggaggacatttcctggactccccttcagaggctggaaaacaaacaccacccgctcccagtcccggcccctcccatttccctcctgctggtataccttggcctcctgtctccctcggggaggagcaggcagtgggggcctgcttcccggggccctccgccctcctggcttccaggtgacctctgagctcttccaggggcagtcctgagccggggtggtggcagggacagtgtgccctgcgtgcagttagcaccctgaagcctgcagagggcccctgtggctccctgcagtccctcttatgacggacactctgt

SEQ ID NO: 51725 - DNA, 1024 bp, Homo sapiens
ttcccaccacagagccagagctcctggccacatgtcatggggcctccccacttcttttttttttttttttttttttttttttgagacagagtctcgctctgtcgcccaggctggagtgcagtggtgcgatctcggctcactgcaagctccacctcccaggttctgccattctcctgcctcagcctcccgagtagctgggactacaggtgcccgccaccatgcctggctaatttttttgtgtttttagtagagacggggtttcaccatgttagccaggatggtctcaatctcctgacctcgtgaccccacttctttttccatctaggagttaggccccctctaggcatccctgggccaggaggagcctggctgtaacacccacggtgctctctccctctcccacccacaggagagcgaggatgcggtcaaagcgctggccaaggagaaggacctgctggagcgtgagaagtgggagctgcggcgccaagccaaggaggccacagaccacgccacggcactgcgctcccagctggacctcaaggacaaccggatgaaggagctggaggccgagctggccatggtgagaaccctccccacccaggtgggcctggcatctgctagcagtgccgtgctgggagccgggacgtctggcaccgactcacatcggagacctagggtggggtgggtggggcagagcagaacacaagcagggggcagggcccgccgcgggagggggctttctgcaatgcatcataagtttccctccaagaccatgcccccagagactgggccagccttttatccacctgccttgggcccagggagtgtggagacgctgggaaaccactcactcctccacacaccccagcctactattaggaaaaaaaggcctagtgcagtggctcatgcctgtaatcccagcagtttaggagaccagggcaggtggatcgtatttgagcccagcagcttgagaccagcctgggcaacatggcaaaaccctatctctaccaaaaaattagccagg

SEQ ID NO: 51726 - DNA, 1070 bp, Homo sapiens
ggcactcggcagggaagtctggcctgtggacagcatctgcacctactgcccatggaacaggctccaaacttctcgctgtcctgttgcacgtctgcaggccaccttgctctgttctctgtcccttctgcaagtagttgcccttatgtgatagatgcaagttgggaacaggcatccagcagcagccaatgcaccagaggtaagagctggtcactgtgaaggctgcaggctgggctggctgttggagctgcaggagatgagtcagacacagccctgacctacaagggcctggcaggctgatcagggagatgccagcaggccctgctattgcctgtcaagggtacagatgggggagtgtaggtgagtcattgggacgaaggggcataggccctggattcagactgctgggttcaactctggccctgctgcttactagaggcatgacccatgacctaggccagggtcctcagtttcctcatgtgtaaaaggggcattaggctcttagcacacaacgtacgttaaagacgtttgctgagacttcctttacctacttcatggagctgtcgtgaagatgaaatgtgtaaaactgcgggaatggggctgggatcatggtcagagctgggtaaatattagctgctattctcattatcatcgtcatcatcaccattgttgtcatcattgataggtgacacaggggactttgagaacccagacagtaagcaaattcagagtcttcccttcccattgagtgggatagcagccctcccttcactgtctgacccaaggtggtgtgacttttttggggtaagcgtgggcagctctggccttcaaagcctcaactcagaggtggaagagcttataataaaactgctcggggccagcatcctcgtcaggcagggaaactgagacccagagagggccaccacttgttcagagtctcacagcccagccatgcagccagctgtcctggctttgggtccagccccagggcagcaggagggcagaggtgcaatttgaaggcagacagggcttgggcagtttctgaatcacgtgggggcagcagactcctggtc

SEQ ID NO: 51727 - DNA, 1088 bp, Homo sapiens
ttttttggagagatggagtcttgctgtgttgcccaggctggtttcgaagtcctgggctcaagcagtcctccctcttccgcctcccgaagtgctgagactacaggcatgagccaccatgcccagccaaaagcaagcactttgataagaaccaacaagacagggtagggagagctgattactggggaaggcctcctgggacaggctgagacctggaggatgacagtgcccctgatgggcaacaggaatggcagagaccaaggcagggggacatggcctgtctcaggcagtcagaaggctgatgtggctctagccgaggctgctggggtaggcagggccgtggcacatcaggccacctcggaggccaggaggaagagagatgagatgctggctggtggcccatgctctggtgtgtagagtggagtcagcgcgacccaccgggaggcctcatggtcttccaggcgagagtcagtggtggcaatgcagtgggagagaagcaggcagatttggggcaatgttttggagctgctgctgccgattggatgtgggatatgggggaaagagagaaagtggtggtggcctttaggtttctcatttgggaaaccgatttggggcagtggttaggattgcaccaggtctaggaatgtccaggtggtgggagcatgtgagtagagtcacagagtactcacgtattaatgcatcacggtgctgcttagaaatgaatttataaacatcaagcactttcctgtattggacttggaaacgaggagacttgaatttggaatgagaagacttgaaaacttccatgtcttctcctcgttcacgctggtggaggagggttcattggatccagaggctatgggaggttcttcccagcagctgctctatgggaacgtgtggagctgtggagtagggggttggagaaccaggcaagtctcttcccttctctacacctcagtgttcccatctgtagaacgggggtgttgggtggaataaccgccaaggcagcacaggcgaggacgttctctccatccctcactcaccagctgtccctgctttccagcggtcagggtgagcccctgccactcccg

SEQ ID NO: 51728 - DNA, 1046 bp, Homo sapiens
tttccctttagagccagctctctatcctgacccaggagtcttggcatgaattgcctctggagaggcttgtgaatatggtctaagtttgtttcctttgtttatttcatcaaacactttttgattgcatactgggcaccagctcccaggaggcaaaggccctagctgcctagctcttgatgactagtggggcagacagatgggctctgcaacagtgtgggagtaaattgaaggtgggttgagcttctgaggacagttggaagccatgtcgaggctctaacatgaaatattggggtctgggtgtggggaccaccttgaatttttgttttatcacacagttggtaatgcagaggctcccctctgccatatcctgaagacagacatcatagggttagatcctcaaatgcacgagacggctttttccaaaactcagttaatgtcactttattaaccagcgaaatagataataaaaaagaaatgaggtgaacacattggacaaaaccattacttgccagtgacatgattctctacctggagaactcaagagaataacttgaaaagctattagaatgaataataagcatgtacataacagtgttgcttggaaatcagtgtgtaaaaatcaatcactttcctatagatgagtcgtaattatggaaccatttttttcaatccacaataatgaaaagtgcttataaaaatagctaagagtaaacttcagagaagctgcctcagtctgctcaggtgggcggcagagattgctggcccggggactttagatggcctcctcagagtaggaaggtcatttgcagcctggggccctgctcaggcctgggattctcttttttattgttttattttatttatttgtatgtgtgtgtgatggagtttcactcttgtcacccaggatggagtgcagtgacgcagtctcagctcactgcaaccaacaccttccaggctcaaacaattctcctgcctcagcctcccgagcagctggcattacagatgcctgccatcacacccggctaatttttgtatttttagtagag

SEQ ID NO: 51729 - DNA, 2095 bp, Homo sapiens
ccacccgcctgggcttcccaaagtgctgggattacaggtgtgagccaccgtgcctggcctgttctcagggtctttatcctctctttagcaacatcctcgtggcaatcttggaagggtcttactgttgtccctgagaggttctgtgactggtccctgtttgctcagtgaatgaggggctgaccttggcattccagccctggaggtggcttctcagccatcccagcccgtccctgaccccactggcttaaagctcagagaggccttccccaccccggatcccatccactgcagtctgcaccccagctaagcttggctttcttcttctcccccaccctcttccacgtggctcctgactcctcagtcactagaggatcttgaagaccaaaaacggaaaaagaagaaagagaagatgggattcggctccatctcccgcgtcttcgccagagggaagcagcggaagtccctcgaccccggcctctttgatggtaccgcccctgattattacatagaggaggacgcggactggtgatacgcgctcccctgcgcctgctgcccgcaggcgtgtctgtgcgtgtgggcgtgtgtgcaagcgagcgtgggtgcgcgtgtggccgtgcgtggggtgcgtgtgcacgtgtgcgctggcacacatgggtgctgggtgtggccgagcgcctctaacaagtgaaaacacgagtgtgaacctctctcccctgcgtcgccacctctgtaattgatgtacataccgcaaaccgtgtgtgaacctgtcaactctctgtcgtctttggagcgatacagttgtgttgttaatctggtttattatttttcttcagtgtttggtttttctttttctttttgtttggttcgtcggtttgtttttgtttttgtttttttccccctttctcctcccctcctcctttttatgaaacttgaaaacttgaaggactgctgtgtatttgtaaataacaaaactattgtgcactctgtgcttgtaaatgtccctcgtccaaaccgctactcctggagcccgtctggcagaggatgtggtctgtttttgatgtcccccctcccgcccccctggtgtgaacgtgtgggaccagaccctgtcctgggggtgcgcccaagtcactttaaccacaaaacgccatcgtcgtcagggtaagctctgctctctacaaagactcgcgagccgggccaaggggccttgtcttggctgggtttgtcagaggtcaaaccggctcttttaaacggcctaccagtttttaaattgcattgccgtttctttctttatgaaaaaaaagaaaaaaagaaaattgtttcatttaatttatttgcacaaatgctgaaaacttattctatctaaattattacataaatattggaatgtctatttttccatggggtgggcgggaggtgggtgtctctgttgacttgtctgttctgttaccatgctgctacccaactgtgcaaagtagtttagggtggccagaacccagggaccattggatttcaaagcttgctttttctgttggttcttctctctccttctctctctgtctctcccattctcctgcccatgcatgaaaggatcctccaccttcttcccacccagagctccctccaggcctttctctatatatttatttatctgacatacagaacacgactttagtgagcagagtgctgacagtcatggtccccttctttgggtctgtcttttgagagaggttgagttcagggcaagacagcctgccacacatccaagggtacgaccagtgggaccctggcctgagtctgttctccgaggggcctccagcagcttctgttcctccctgcagctgtgtctttcttgtcctgggtttaggatgcaggtgggccaggcaggtgttgttaggggaggcacccacttcaaaaggagggccacagtggggacacagagtccagcacctgagccctccaccctccccattctggttggttccatcagccacacttagaatctcccaggatcccttggactccgtcccccaacttgtcacagcagcctgagcctacccaccccaggagacaagagctggcaggaacatctgcctat

SEQ ID NO: 51730 - DNA, 1001 bp, Homo sapiens
cactcctcatgggtgtcccccggcttccctgctcacccctcctccctatcagtgaggggcagtatgagaccctccttaaccctggtagaacaggaaataggaaaatggggcccctggctccccttctggaagtctataagacaaggccaaggccatgaatgtcccccacgaaccacaggacaactgcattgagcaacgcctccccaggtcacagcgatttacagttcacgacactctttcacggggagatgggggtcagggttaagagattacatcctgggcaaactccctgggtttcaacctcagtcctgacgcttgttacctggtaaccttaggcaaaggacttcacctgctgtgccttcgtttcttcatggggacaataggggtgaaaagatactaggtcagagtgtggctgcagggatgaaacaggccaatatgtatacaaggcttagcacagggcgcaataaaccttagccaccatgatgatgaccgtgatgatgacaatggcaatggtgatctcatttcagcctctcgccggccctgtgaggtaggcaggacagggccctttgtacagatgagaagactgaggcccaggtaagttcagcaattagcccaagctgcaggggccagcccagaataggaccagagggagcaagagtttgggagctgagaggggtgtcagtggtctctagtccactcccctcatattgcagatgggagggtgcttgaccacagcccagcagggcatcagtgtctgaactggttctggaacccagggctcctgccttcctggccagtgctttgagctgcctccaaccataagactcaactagggggaaaaaaatccctgggtcagtaagttttggaaacactgcatcatatctccaccccttatagatcagcacaaccctttcacttattaaggctctgacaagttctgcaatgaaagaaaatcttctacctttacccatctagtgtttcccaaacttacgtgaccacag

SEQ ID NO: 51731 - DNA, 1012 bp, Homo sapiens
tagtcgttaaattgtggacacaagatgaaggaccttttgtcacaattcaatactgttggcttatttttttttttagtgaaacccaacataatttcagatattttactaaacaatgtgaaagtggggttggggcacagctgatttcctgaaacccacagccatccatcgcccccagctttgcctccaagagctgtacagatgcacacgtgcccggcctctgcatgggtgcgtggagaaggatggtcttcttgccctggccacctgtgtcaagatccccccctcacttctcatgggatccacctttcagggctgcccactggcagagaagcctgccgggaaaacatgtcagaaaagaggagtcagtgtgggacttgcccaaggaggccagcagctggagaaagatgggcttcggctgcacttgcaattgagactataagaaggacttcccaaatgtgggtgctgctgcagcagtggaacaggttagcaaggaagaaagaggaaagcttttgatgtatagatatatatgtaaaagcataaagtcattgtcattggataactatgtgtttgtcttccctggacctcttagcagcttcctcctaagtgcataaacttagagaatacttgtcaagtacctgcctaggaactgagtgcagagcagtggggaccctggccaaccccaggatctcaattccctggccctttggaaaattttcagagtgtggcaggagggactgaaggaggaggatgtcctccgaggttgggagaagggtggctggtcatgggaaaaagcacaagtctaggcctttgcaagacggtggcaccaaaatgagggggcgcccatgtgattttttaaaagtataaagcagttattgttggtaaaagcagcactctgctggacttttctatttactttatgatgtcgtaaatagggacacgttggggtgggaggtaccaccactgttttagcccagggcctcccaagggtgagcctggccctggggtcaggggtggt

SEQ ID NO: 51732 - DNA, 1093 bp, Homo sapiens
ctggggttcgggggattcttagccgagggaacgcagtggtggagagggcgcactgccctctcagggaccgggttggggacgcaggaagcgcggcctgggagcgccggcgtgcgggagggagggaccgcgggaggcggagggcggtgccggccaggagcggcctccagcccggagaagcaccgcccaccggccgaccctccctcccggccctcggcaccacccccgggcccgaggcgagggatcgcagctgagcgaggcgggcacccactccccagcgtatgccgctggagcgcgctgagcgtgtgccgggggctgggcctaagttctccccaacccttgccagccgagttggataagagggggtcgggagaaaatagagccctgatcccccctcctccctagggcccagagaatcggtgtgcatgcgtgtgtgcgcgcacgcgcgtgtgtgtgacgggtggtggtcggggaatgtctcaagctagaagtcccaggttttaggggtttaagtggagctgggagacccgctttcctcccacaccaggcgcagacgccgaggcacagctccgccagccgccccgcctttacctggcgggatactcacctctcctccttcctggggaggccaccgcctccctctcccccttctgccctgggctggttcccagcgaggtgagtgaccggcacaagtagggaaggaggaagcgagtttttaaaaactgagtcagctcacgccctcggccagggtccccacccgatgcgtggtccccagggcgccctcgggatcgcacgcccgagtcccggcccaggtggggcccattccgggttcttgcgcgcgggcaatggatgggggcgcgctgcaccgggagcctgccctgctgagggctcatccccagctttgccgagaactttcccggcgaggcaccggctggcgttttcccagcctgcgagtggcaggcgggcagccagtctctgctcggatccacggaggcccggagccgccacggagttctggctccggggagtgcaaacccgaagtcggcgcggaagcctctcacccgcggctctgcctccgccccttggagatctgccc

SEQ ID NO: 51733 - DNA, 1044 bp, Homo sapiens
accacccgtcacacacacgcgcgtgcgcgcacacacgcatgcacaccgattctctgggccctagggaggaggggggatcagggctctattttctcccgaccccctcttatccaactcggctggcaagggttggggagaacttaggcccagcccccggcacacgctcagcgcgctccagcggcatacgctggggagtgggtgcccgcctcgctcagctgcgatccctcgcctcgggcccgggggtggtgccgagggccgggagggagggtcggccggtgggcggtgcttctccgggctggaggccgctcctggccggcaccgccctccgcctcccgcggtccctccctcccgcacgccggcgctcccaggccgcgcttcctgcgtccccaacccggtccctgagagggcagtgcgccctctccaccactgcgttccctcggctaagaatcccccgaaccccagccccgcgatcgcggcgcccaccgaggaggccgcccgggtggggcgcgggggtcgcgaagcccgcagtcccggaccgcccagccgagacggagccggacccgccgcctcccgggtgagtctcagccgccgcgccttgcgcccgctgcttcccgcggcgcgctgtcggttccccacagggccgtgtaagggggccgaggcccgtttgggtctcctgtccgtccgtctgtccgccgagcgcttcccgcctggggtcgaccaccgggaggactccgcaccccgcaccctctgcggccgcgccccgccggcgcgggacgctcccgcctcccgggcaccgcgcctggccagctggcctcggctggggaaggcagctggccttgggggccccctgttggcgggaacaggtgctatccgcccggcgggcttcgaacccttggcttcgccagaagcgctttcagcgcgtggttaggagcagaacttcccagtaggtcccaggaaaccaccttggcgctttgctcgcgcatcccttactgtatggaagtcggggccttttagggatttagattcgtgtgtgtgtatgtgtgt

SEQ ID NO: 51734 - DNA, 1031 bp, Homo sapiens
ctttagtgtggattctcttcccccagccccaaattaaggtgggagtcatgcaaaagagaagcattgtctccctcggtgctgggaaagtttcagaagctcaggtgtcttctgacttgggatgtggtatgggggctgctgacttttgctttcacttttgtttctgctctgaagctgggaggaatcctcctcttgcagcgaaagctgtgagaatatccttctccatgcttcaagtctccctttgcttggagggaaaaggaaggtcctagaatgtctcaggtggaggggaccttcaggtcatcagagacatcattctcatttgacaaacaaaactcagagaggggatgggacttacccaaggacacacaacagttcagcagcagaactgggactggaacccagccctcctgactcccttctagggccctttactttaacccaggagacctggccacattcgggaccaagactgttttgggccccaggtttctcaacctctcagtctttcaagcggcttcatagagttgagctcctccccagcctggacaggtggtgcagcctcccctgccaatgttttattctcccttcctctggattgagccctcgctgccatggccacccctcctgggagctcttgctcctgagaaagaaaacaggccgtttgtttggaagaaacaagccacctgtttggtttcccaataccaggccacacagccctgtccctcccagacagccccaagatgctgaccagagatagccctctgagggtctctgctgagctcccctgaccctcgactcctcccctcagctcccgtctcaagactgctggttggtcctcaccttctgtctgtggtgtttacttgggcggagcaacctaaagtctccacattctctcttgccctggatttatcagacttagcagcccttaaacctgaatgcgtagcttcagatcttagaatatcggggccagagggatcttagccatcagaaaatccactctgcttatttgacaactggggagaccaagacccagg

SEQ ID NO: 51735 - DNA, 2183 bp, Homo sapiens
ttgtttttaatctgtccagagatggtcctagccacgaccctttaaataaatttttgtttaattttggaataattttagatttatagaaaagttgcaaaggtaatatggggcatttttgtctacccttcacccaacttcccctaatgttggctttttttggggggggggaggggggaggggacaaagtctcactctgttacccaggctggagtacagtggcgtggtctcggctcacagcaacctccacctcctggggtcaagtgattctcctgcctcagcctcccgagtagctgggatttacaggcatgcaccaccatgcctggctaatttttgtatttttagtagagacagggtttcaccatgttggccaggctggtcttgaactcctgacctcaggtgatccgcccacctcggcctcccaaagtgctgggattacaggcgtgagccaccatgcccggcctaatgttggcatcttacataatcgtattatacttatcaaagctaagaaattgacatcacaactaactaaactacagactttattttgatttcgctggatttcccactgcatttttattcaccaggatccaattcaagatgccacattgcatttggtcatcttgtctccttagtatcttctgaactgtgacactttctcagtcttttcttaaatttcatgaccttgagaactttgaagagtactggttagtgttttgtagaacttccctgaatttcggtttgcctgatgtcttctcgtgactggactgggcctttgggttttgggaaagaatcctacaaaggtgaagtgtgcttctcactgaatcatgttaggatggagataatatcaatgtaacttcttattgatgacatcagccttggtcacttggttaaggtggtgtctgccacatttctccactgtaaagttactacagcccctttttggaagggtattctttaacatgagagcgaaaggcaacattataaaagagattattgaaacgatttttagattaggcacctaaaatttaaaaactttgatatatcaaatgataaactggggacaatatttgcaacacagaacagacaaagagttgtgttctgaatccatgcgggagctttgctttttttttttttttccttttttttttttttgagacggagtctcgctctgtcgccaggccagagtgcagtggcacaatctcggctcactgcaacctctgcctcccgagttcaagcaattcttctgcctcagcctcccgagtagctgggactacaggtgcgcgccaccacacccagctaatttttgtatttgtagtagagacgaggtttcaccatgttggccaggatggtctccacctcttgaccttgtgatccgcccacctcgacctcccaaagtgctgggattacaggcatgagccaccaagcccagcctgcttttctagttagtaaggaaaagctgaatgccctagttgagaaatgggctaaagaagaaatgctgaggccaggcacagtggctgacacctgcaatcccaacgttttgggaggctgaggtgggaggattacatgagcccaggaggtagaggctacagtgagccgtgactatgccactgcagtccagtctgggtgaccctgtctcaaaaaaaagaagaagaaatgctggtggccaattagtacatgggaaaaaaaagaatcagtattcagcctcattgtattaaaggaaatgccaattaaaacaatgccgtctttcacacaggaaatctaaaatgttttaaaagttttaaaattttaatttaaataatgctaactgggaggtagtgctttcaggagctcagcatagaagtgtaaactggagaacagtctgaaaacacaggcccaaacctttaaagcacttagctttaaaacacttttaattccaagattttaaccttgttattaatatcttcaataccaagattttatcccgaggtaacaatttatggttgtatacggagttaatttcaacagtattttttataatagcaataaaactaaaaatcaaatatatttgcagcaacagggaattggtgacataaattgcagctctttcatatactgaagtggtcctcaaccactaaaaattccagtattgatgaatactgatgatacgaaagattgttcattgtacatcaaatttttcaaaatta

SEQ ID NO: 51736 - DNA, 1040 bp, Homo sapiens
catttgagatttccccatactgcatttattccatggtatgaatgtgcaggacgacagtttacttatcccttcacctgttaaaaggatatttggattgtgtctactttttggtgattacgattaaagctgctataaacattcagaggttttagtatcaacatatgatttcatttctcttggggaaatacctaggagtggaattattgggtttgtatgtgagtgtatgtttatctttatatgaaatgactaaacttaggaggttagggccagttcctccagccagcaccagggctatgcagggacctaatgaaacattgataatatcctcccctcccatttggaacttcagtgacctatgttgaagacccggtgaaaccatctgtcttttctggagtgatgctttcactttgccagctgatgtgggtttcaccctgctggtaggaggttgaccacctccccattgatgactctccctttcccatatcacaggcatggaaatgacaatgagtagtgatcgttcttaacttaaataactttttcattaactctttttctttaattaggaaactaatatatgcacatggtataaaaaaatcaaatggtgtaaaaggatgtccaatgaaaaaatatacatctccctctcattccaggctcccagtcccttatacgagcgtagccaccatctgctatttcttgtatatacttctagaaattgtctctgcatataatgatgcttttagatgctgcttttagatgtttgcctggtcatcaaagcaataaagtattatagtggtcaggatcattatgaaattgttgggtaatttcaaacttgtaataactcctatgagggtcctcaatcacctttaaggacccactaaccacctgaaatggtctgtcaagcattctctgtcaagtattctatctctgcatttttctgtggcaggtcagtagctttcatcagattctcaaaggggtctgtgcaccaaaagaaagaaggggaatggggaagaaaagaaggaaggaaggactgtagaggcaat

SEQ ID NO: 51737 - DNA, 1032 bp, Homo sapiens
aactcagaatgtataagttccaattttatgtattattgccccttggttttatgattggaagctggtagaaccactgatttaacagcataggctgttttgtcttgggctaagaggaactgtgcctggctgagccaagagagacgaaggccatagagttcttcaaccttgcctgtgtgtttgtactgactcactgcatctgaggaagtctgttggtagcttagaacacgcgtactgtctctcccagggtgagccagtgactgggaacgtctcacagaaaggagcagacaaacttgcttcccacaagagggcttcaggctgaaaaatattcaagaagagtttaggggaattcctgggagtcagagccatatccggctcatgataaaagttacagatatttggggactacccttattagagtcaatatctggagttggagtggggagcaactaagctttcccatcactcttaagtcatttgatgctcaaaacagttctatgttagggaaaccgaggcaggagtatgctagctacatacagtgcaaactaccccacatctgaaggacttaaggcactccagttacattttcatatattgggtgggaaggtggggtcttggctccacacagtcattcagagacccaggcttctatctttagcacttcttctccaagagtttagtgagctaataacagggcccacagctagaaagtgagggagtcgggatttgaacccagccagtctcattctgaactatgatgctatggtgagaaacaatagtactggcatctaactagatctacctggcatgtaacttcagaactgggaagtgggagataacttgggattctgaggaacatttgttccttgttgccaaggaatcaagctcttctttttaaggagtgagatgggtaaatctgagagactttttttttttactttgtcttcagttgagaattttcagattcaacacataaaaatgagagccttttccctccaaaagtttgcccctgaaataaatgtgcgtgagactatg

SEQ ID NO: 51738 - DNA, 1048 bp, Homo sapiens
gttggtcacagactgaaggggggggcctgtccctgtggttaattggtgatgggcgtgcagtgtctctctgggaccttgtctatgcttctcttaagcatttgattgttttagatttgggggatttttaaatttgattgattgattgattgattaagattgcatgatttgcacccttgtatgaagcaactgtaagaacaccggtgttaaacctcagagaatgggttgcagaatatttcccaggttatcagtggtcaccaaccccatccccatccctaaagaggaagcgagataagcccagcgctgtagcataacaaccgcgcatagcatgcctaacgtcacgcgaagtcttctaacccatacgcgctgatgaatcctggcaactccgttagggagacacgacttatcaaacccttttcatggcccagctgaaatgacacactgacgttcacccagccaggaaggaagtaacacagctgggagtcgaacctagaaccagaacctttgaccctggctcaataatgcctgccttgcacaggcatttagcacttagctgagttgacccatcaggccacatgaggtccttgtggctggagacctgtgtggccaggctggagtcttgctaggtgagcaggggtggaagagggattccctggggcagagccaggagacagtcctggtggaggagtagagcggtcccttcggttgcccatggtggctcttccaagccttaactcccttcctggtcctcccaccccacctgtctctatatccttgagctcagccgattcctcagagtcctcttgggtccacaccccaggatgaggactctgaggctttagtgagcatcaggatcacttggctaattaaaagcagatgccgggccttacctcgcattctgattctgtaagtccttcatctggcccaagaatctgcatgtttagcagaccgcaaggtagtgcttccggggtcttcagataacggccgggtctcaaactgctgctccctttgcttcctgacccccatctgctgctcacctaccatctccttt

SEQ ID NO: 51739 - DNA, 2233 bp, Homo sapiens
agcgagactttgtctcagaaaaattaaagaaaaaagaaaaagcagctgtagcacagagaacccccaacatacaccatccagccctgaccccctcacccccatgcccccgcaggtccaggccatcaacgtgtccagccgcttcgaggaggagatcaaggcagagcaggaggaaaggaagaagcaggcggaggagatgaagcagcggaaagcggccttcaaggagctgcagtccacctttaagtagcgggggctgcagccgaccgccctgctccggccccagtgtggtgggcgagggtggcgcatgggaggccgagcctgaatccttgcctgtgtctgacgggaccactactaaaaacctaaaaatatctgtgaatggagcaagttcaggggtcttatggaggtggcccggcccctccccgctcccttccactctgcacgaggccgccacaccggcgctggctccctgcccggcccggccctccctggcaatccctgggctctcttgcacccctaactgccccctgcctgctccggcactgccccaggcccagctcctggccctaggtccctcccagccccatgtgcctgccgcctgccctccacacatccctgtccccccaacccgggaacccctgccctcctccagcaggccgcaccgcccctggggccccctgccagccccttcccaggctgggagacggcagaagagatagaatcagggctgcccccacagagtgggacccaaggggctaattggaggcacgaggggacccctccccagggccttttcctcctctgcgtcttccatctactgaaatgggagagggggtggggagcttctgttctggtgaagggacccgggcaggcccccagcaccccatgctgacttggagaaccccagatctctggggcccagccaggcagggtgtgggggcagctgtgccaatctacctcacaggcccaccccctgccgggcatgccgtgggatcatgggcagggaaggctctgggggtcggagacaccgctgcttagcacccccagccagaacaccctgagggtctcggggctctggagagagtggggcgggaggaagaattggcaccttcctagggaaggagacgagcgcttcgccttgattctccgagaagcctccgagaagtgctttaagtgtgtttgcatgcgccaggcggtgggcagcgggggcctgtccagccctctcccgccatccttccccaagtgacgtccactgccttgtcaccagcgacctgcctgtcatgcccaccccctgaggaagcatggggaccctaacaccctggtgccctgcaccagacaggccgtggtcaggcccaggccaccggccgggttctgccacagcttcccacgtgcttgctgacatgcgtgtgcctgtgtgtggtgtctgttgctgtgtcgtgaaactgtgaccatcactcagtccaaacaagtgagtggccctcgaggccacagttatgcaactttcagtgtgtgtcataacgacgtcactgctttttaaactcgataactctttattttagtaaaatgcccaggagtcctggaagctacgcggacttgcagaggttttattttttggccttagaatctgcagaaattaggaggcaccgagcccagcgcagcagcctcggacccggattgcgtttgccttagcggatatgtttatacagatgaatataaaatgtttttttctttgggctttttgcttcttttttcccccccttctcaccttcccttctccccgaccccaccccccaaaaaagctacttcttcattccgtggtacgattattttttttaactaaaggaagataaaattctatattcttatgtgtgtatggttcttgatggtgagtgggcagggaaatgacaaggtcacctgggtgtggggacagtggtgtcagagcctgggagggaaggggacctgccctagtggaggaggttggtgttttatgcccagatgctgtcaccaggcatgagtctaggtgctttgtgcctattaactcatttaaatccttgcaaccagcccatgcaagggatgatatttttattcctcttttgcagataagaacagggaggcggctgggcgtggtggctcacacctgtaatcccagcacttcggtcggccgaggcgggtggatcacctgaggtcaggagttcgagaccagcctggccaacatggtggaacctcgtctctaccaaaa

SEQ ID NO: 51740 - DNA, 1037 bp, Homo sapiens
acaagtgctgaacagtggaggaagagggacagatgaatgccgtggattgcacgtggcctcttgagcagtggctggtccagggctagtgacttgtgtcccatgatccctgtgttgtctctagagcagggattaacctctgcactactgacatgtggggccaggtcaccctttgctgtgaggctgtcctgtacattgtgggatgttcagcactgtcccttgcctcaatgccagtaacgcgtcttcctgagtggtgccaaacaaaaaggttctcaggtgttgccaaatatgtcctggggtataaaactttcctcgcctgacaaccactggtctgtagggatttttggctacacacaaaccagtatcgctcatagatcagcaaaccggggcctactagagtctgaacagctgtaatctatgaattctaagtgaaattttaaaaattgttaatttttcctatattgcattaattttaaaaaataaatctgaggcaaatatggactctcttttgcctatttcttccctcattttgctccaactctttcttcttccttacaaaagagacttttgcttttttcgaaacatttccccatgtttttctggggtctcgctatgttgcccaggctggtctcaaactcctgggctcaagtgaccctcccaagtagctcttactacaggcgtgcaccattgcacccagccccatttattcatgtcttatttcacttgatccttatcccatcccaggaaggcaacaagggtgagaaccctgtgctcagggaggttaggtctcttgtccaagggaaaacgattatccagagaagagacctggccagaacctgggtcccctgagtcctagccatgcttcccatgtgccttacttgctgaagcacccccggactgcagtgtgaacgtgctgtgcaatagtgacacgctgggcttccccacaaggctccaccctgaggtcttttaagctgtccttatgccagcctatttcttgttttttgggcctttttttttggagatagggtctcactctgtcg

SEQ ID NO: 51741 - DNA, 1049 bp, Homo sapiens
tgctctgtctcaatcagcctcgtgcccctggctttgaccttccaaatccttggctcccacaaaacctctgaacaggctgttggattcctactccaacttcttggttttgtaaccagggttcttggtcttctaggccagccacctgcagttcccaggggctgtctacggcacagatggatgccctgtgtcggtcgagaagattgtgaacatcttcaatgggaccagctgccccagcctgggagggaagcccaagctctttttcatccaggcctgtggtgggggtaagcagctcctcagcctccctctgggtgggtctggtggggagggagccgccacctgcttctttctccagcctgcccctcacagggcccatgaggtctctccaggcagtcagagggtaccacacatggtccctttttggcagcacctctgtctggctggagcaggccctgctctgtctgctttgtagaggtcagagtcttctgtttcatggcacagtggcatcatgggctcaagtaactttggcagcttcaattccaaagacttggcaaaaagaaagcagaagagagaggagaaacctctttttatttttcttgtcaccattctcctgacctccatcaactagaccccgtttccactatcccagagaaagggtggccacagctaaactgcatggagaaaccaaagaatttaaatattggaattttcaaaagtgtagttgtgggggttcgaggaacatttaaagattacttgggctgggtgcagtgtctcatgcccaacactttgggaggccgaggcaggaggattgcttgagccaggagttcgagaccagcctgggcaacacagcgagaccctgtctctatttttgttttgttttttaaatgtattacttggattctttgtagttttgctgtatgctctaattttaaacttaactcctattacagtgttatctgattttcttataaaaaaagagggaagagagacaaacatggggttcctagtttgtgggtcatgacaggaatatcagggagcgctagaaattctgt

SEQ ID NO: 51742 - DNA, 1129 bp, Homo sapiens
acaactatctcattttgtagttttgtacatggtaaatcttacagtttcatgagtttgtttaacatgtactcaatgaagtattcttaaaccatttattttatttattcttatcagaataaatgaaatcatgtatttgagaggtagtcgtcctgattatcctatttaggttttctctcatttatgtattatttctgcatcccattcattttcattcatttctaaagcttttctagtcaaagtgttctggagagttgctattcttattactcatcttttcatctgtaatagttctcatttgtgatattcaaaagcagtagcgagatttttattttaagatacagttcaacagcttgacacttttcctgcaaaataccttttgttggttttgtttttcatctatatatcttatacctttacctaaaaagcaagactgtccaggtttctgccactgaaactcattgcctcttcaatcatttcagctctggaaaggaagagaaatggaagtgagaaagttgagcatttcctggcagttcttgatagttctggttctgatcctgcaaattctgtctgcgttggattttgacccatacagagtcctaggggtcagccgaacagccagtcaggctgatattaaaaaggcttataagaagctcgcccgggaatggtaggtgaaacaaagaaatagaggtttaacataagctaaacagtcttagcagggatgaagtctaaattatgactagcttttatttgtctctgtttctatgttcaatatatatatctgtctaaaatattttacgcaggagagctaatgttcatgttctataattgttagcgataagatccaaagcctatgtttactctgaaactcccttttaggaatactttggcttaaagaattgccttagatactgttagcatatttaatgttaaagtaacaagttttaattttaaaaaaatgtatatatagtcaataatggatatgctacccttcccatgatacattattcataaagtaactttatgagtgtaattgctaaacaggaacactatacaaccctattctctaaattattaatttctacactttgaaaaaaagttaagagtaatagccttttgcctccaaaaaaaa

SEQ ID NO: 51743 - DNA, 1118 bp, Homo sapiens
ggcaacagagtgagaccctgtctcaaaaaaaacaaaaaaacaaaaaaaacagtggccttgaaatctttatccaggtaaaaagcaatcgtaataataacgaaaaatgttctaatttgaaagtcaggcacaagtgcagtttgaaacctgattgttactaaatgaatttagtctatcctaaaagctatttctcatgtctacctgtgttatcagaagaaacaacagcattctagcatcctgatatcattctagcattgggatgaaacgttgccatcctaggagaagacatgggttcttatggataaacgacttagccttcagccagctttagcagtgtttgggagcagtgtacagacatgcaccatttcccaccttcctctgtgaaatgctgcagtattatatggtgctttgaaaacatgccctgctggagtgctttgggaaaaaatagcctgtttcaaagtttcatttattatagtcatgtaaaacaactgattgcctctatcatttattttaagaaactttcctaacaaaatagccctccgtctgcctctgtagtgaactctgtggacaaggacattaaatgactgtgcattaaaagttacatcctttctcaccgcctgcctgtttgtgtttcaggcatcctgacaaaaacaaagatcctggagcagaagacaagttcattcaaatcagtaaggcttacgaggtatcgtgtccagctttgtgatgcatccattagctcttacaaaatatgccttaggaggtgatgagttttgtaaagttgtcagaaaggtcatgttccccatgcccttgatgcagtttctagattataatagagagaacaggctggatgcggtggctcatgcctgtaatcccagcactttgggaggccgaggtgggtggatcacgaggtcaggagttcgagaccagcctgaccaacatgctgaaaccctgtctttactaaaaatacaaaaaaaattcgccgggcgtggtggcacgtgcctgtaatcccagctactcaggaggcttaggcaggagaattgcttgaacccgggagtgggaggttgcagtgagcagagatcgaggcctgggtaacagagggagaccgtctcaaaaaataaaat

SEQ ID NO: 51744 - DNA, 1036 bp, Homo sapiens
tgttaagaattaggctaaaagcaactttaatattgtgctttataataagaaatatatgtatattttggtgtttgttcccagttcctggcacagatctcctaacacccttgagattgcctgatcaataggggtgctaagataatcttttgctctcgtatttgatctttgactctgattcctgagatggagcacctaatccttggaatttcctgcaggatgggagcatcttttgttctattgaggcgactcttagtgggcccctgtgtgggagctggtcaccagaaaaaacaaaccatgattagaagtttgaaagtttcaccctcatcctccagaaagaggagaggggctggagattgagttaataattgatcacgcctgtatgatgaagccttcataaaaatccctgaactctggctcggtttcctggggggtgggctcagtctacaccacctcccctcagccaagcctacagtagagggcccaggcatcctcccgtatgggagaggcgtttgagtaaggagcctcacctggggtgtcctagcctcacatttactggcaaaaaaaatgaacatatatatatatttaatccctgaactactgggtttgagagttcccaggtggctgaacacatggaggtgcctggagggtggtgagccctgggagggcaggatgctcccacccttccatataccttaccatgtacctctcttccttctggctgatcatctgtctcctttgtaatatcccttatacctaatgagtaaccataaggaatgttcccctgagttctgtgagcagctcgagcaagttagttgaacccaaggagggtcatgggaccctttgatttatagccagttggttggaagtacaggacacaacctgggacttctggcgtctgaagtgggagcagtcttacgggactgaacccttcacctgcaggacctgatgcttcctctgggtagatagtgtcagaactgagttgatacccaattggtgtctgctggaggatttatggggaacccccacccccacagcg

SEQ ID NO: 51745 - DNA, 1046 bp, Homo sapiens
atataacccacccaagttctcactacagcatggtgagcgcgattcccactgacttcagacctgccctgtgaatgattcccccactacactcccagcctacctacactccccactacctctcatgtcactgtgacatgagacggagaggaaggtgttatcagtggcatggtcactgccatcttacctaattacggtacaggtaatccccaaactcatgcctcctgaccagtacagatttcaagaagatcgttattttgctttagctatgaaaaagaagagagttgtttgtatttactttgttggtacagtttttgcacatggaacaccatagaatggaagtatacaaggatacggaagacctagtggagctgtgtaagctggcatgtacctctctgctcagtgatgtgaaaaagccctacttgatttgtcatttacatctttgctgtagttttattttcttcctctctattatgccctaacagttgactgcctttgcatacaaagattatttatcatttggatatgtatatgtgggtttgagagggacggaagagatgacaaggcggtacaacatcaatatctacgcccctaccctcttggtctttaaagaacatataaacaggcctgccgatgttatccaggtacgtgagggtcaccttggttaagattttcttcacattttatcccaagattttatgtaaataaacagcaaaattgaacaaagtggctgaaggaaaggatcttccttcagatgcacaaaattttttaatgaatttttttatctaacttggtaccgtttgctttaaaatttttaatttaaaacgtttaaaaattttagcacctttaaagggctcctgttggaaaaccaacaatctttttccaaaatgaatttaaaagttaaatgtaaaacagtaataaaaaggaataagaagaagccacaaactaactgagagaatgtacagatgaatatttatctgatcttaaggtaggaaagggttaaaaagcattggggaaaaatcttggaaaatcttgataacttgactcta

SEQ ID NO: 51746 - DNA, 2868 bp, Homo sapiens
gtgttcaggccccatccaacacaaagcgttttcctattattttaagtctcactggggtatttattttctcagcaattaaatgtgtcaggaaatgccctgagtcctcaattctcttcttcctacaggagcagctgcctacacttctccttcctgagtctagataaacacagagaatggctagaatacttactagaatttgctcaagatgcagctccaatcccaaaccaatatgataagcatttcatggagcgtgactacactggttatgtactggctctgaatggccacaagaaatacttctgcctcttcaagccccaaaagacagtcgaagaggaggaagccatagggtcgtgcagtgatgttgactcttccctctacctgggtgaatctcgagggaaaccttcctgtggccttggatccaggcccatcaaaggaaagttgagcaagctctctttatggatggaacgcctgctggagggctccttacagaggttttatatcccatcatggcctgaactagactgagaggattttccaaagagatttgaactcttcagactttttaacatgcccctgtgaacaggtattttcaggactcaaactaccacaatgaacagagtatagattttagattgctcttctagaaccatggctagaagaatctttcctttgtcctgttctaacctaggaatgaaaaacaccaccagtttgaatcgcctagatgaaaatcttttcctctgggtgttatttttccccactgaatgccacaccattgaaaatagactgctcatcccctcttcctttcttgtccttgtcccatgctcaccccaccctcctgtcctgtgtcttggagaagcacagggctccaccctgcaagcggcatctggcggaccctcatgagcctgtcgtgcaggccaggtcattggccccttccccaatcccggccctgctgtgctgctgccatggcgcatgctcctaactctgaacaacccacggcagcttctagccccgcatctggaaaaaggcccctttccaagcaatctcacgtttactggttgttctgggagtaagtggctaaatgtatattttgggggtatcccccaacaacagtttgttggccacaggttgaaaaggaaaggaataaacgggagttctgcatgtgagttctcaagaaaaggaaagggaggctgagcagtggctgaagcgatgcagccttgagacacgctgtgagcatcccatccgccgccccagcgctgctggtagccaggggaggggtctgcacagcgagaagtactgtgatgactttgagccgttgacatgtatgtcttcagatgcctttctgcctctgtcgattttagggtatggatattaggagccataacttgtaatcttgttctctgaacgtagagataagctgctataaagccagtagatgttaaactgaagagaaattattcccacctgctatgagtcaggcttaaggaatctcttcaatagtgtctctttagtaaaataccaaacatgtctttgtatcaaggaacttaaaatttctcaacaattgtattttgaacactgttaccctaaaagtgctgtctcttcaagtcatcttttgcaggaagtgagccaagatttgttctagactcccattttgcaaaaggcttactttccacttctgggctgtattttgatgtctcatcttcattgttttcactcttaacttagagctgcttcaccagtattggggtcagactggccatcagcacctgagcgtgctgagctccaggtatagtggaccccagggtgcctcataccagccagttagagagcataccttttatttttcagggcagaatgaccagtggttctgagtttgagtttggacagcttcaaagagtggtccgttcaaatgtcaaagcaaggtgcctttggtggctttgtgaagggtgaaaatcagtgatgggacatttactaagtatttctttttttttttttttttttagttgttgagacagagtttcactcttgttgcccaggctggagtgaaatggtgcgatctcggttcaccgcaacctccacatcccaggttcaagtgattctcctgcctcagcctcctgagtagctaggattacaggcatgtgccaccatgtaattagcccggctaattttgtatttttagtagagacgggatttctccatgttgatcaggctggtcatgaactcctgacctcaggtgatctgcctgcctcagcctcccaaagtgctgctgggattacaggcgtgagccaccactcccggctaagttagtatttctttaatcttaatgctttaaactaagccacttggatcctgaataatttaaatcttgagctacattggtaagtaataaattatttaaggccaggaattcctgtagttttcatggagtctgtagctttattaaaaaataaatcactgccaggcttcattcttccatatgatcctctaaaaatggacacttcctctgaatgctgtatctcatggcacctggtccaactagaaatggtcaaggaattcatttggctccttgatacatcagtcctcaatattactttctaggtattttatggccagattgcttatatgagtggtcttttggtttggtagtaggtttttatttttaatttctgtactaatgaaattcctgactttaatttctgaaaaccaaaaactctccaagtgtatttatttatattttttttaatagagacgaggtcttgctatgttgcccaggctggtcccaaactcctggcctcaagcagtccttccaccttggcctcccaaagtgctgggattatcaatatgagccaccatgccagatttgttcatttt

SEQ ID NO: 51747 - DNA, 1040 bp, Homo sapiens
tagctgggactacaggcgcccaccaccgcgcccgactcattttttgtatttttagtagagaaggggtttcaccatgttagccaggatggtctcgatctcctgacctcgtggtctgcccgcctcggccttccaaagtgctgtgagccaccgcacccggcccgatagtggctttttcaattgttttttcctctagctgttatattaccctggttatgatcaccggctggtagggaaaataagaaattaaaatgtaaattgattttgttgttagggcttgggaaaagacagaggttgaggttgtttccattcctgcactttttgtgatggctgaaacaagaaatttaagtcaaagggatacctgacaccccctttaattgacttaaatttcttgttacagccatcataaaagacgatttattgtgtggtcagccagacattgccctctgccagttggtaaagttaggaataccttagtaattgaacataggctaactccaaattatttcttgttcattatgtcaatgtttcggcatttacttccttcccaagccaaattagcatatagaaacttgggctccaactggtgttaagcctgtattagatagccataaacagctcctgtttttccagtctgttctgttggctccattgtaacctgacaacacagtatctattttaaggtgtctggtggtcggttgtctttcacttgcttgcttgcccatcaggcaggaacaggatccaccctagacacttgagtcatttcctttcatcaaatcataatagtaaacatcactatagtttttacccataaatatatcatgtttacttacttgagtgtccccccccattacctcccagggttctctcatattactcatcttcccttcctttcctagactgtttaactcctcctcttgtttacattctccattcccattccttcacctctcatttctgattccatttcttcaaggaaatatatatatttttatgttctggctattttttcctgccactatgtgtccacaccactggtgtcc

SEQ ID NO: 51748 - DNA, 1027 bp, Homo sapiens
tgtgttacttctcagtgctttatactgttgtatatcttttcttgttgtagatcgtctatgcggaaagacctctcacagacaaccacagatcattggcttcttatggcttgaaagatggggacgttgtgattttacgacagaaggagaatgcagaccctcgacctccagtgcagttcccaagtaagacatctggtggttgagcatcccccagcagaaccatcagcaggtagcagagcatagcacctcagagttttggattcgctttggattcagactacagaatacagatcctgactctgccttttccctgccgtgtaaccttgaacaagtattttaatgtctctaaattggtttcctcttctataagttaggtgccataattaaccccaactcctaaagctgacgtgaggctaatgcatgtaaaatcttagcacacagcaagccctcaataaatgttagcttctgttatcagtgataattatacaataatctttatccttgggaaggacttgaaagaatacataagcctatgattttgctactttgtgtctgtccttcagtggccagcctttctggagcattttatagccagccaggcacttggagctgcatttcacatgatctcataacttggttgtggggggatttacatactaatttgcataataatttataattatgaagctcagattttaaatggtgtctttaaagttacatagctattaagtgagggcacaggaattaaaatttgatgctttttccattatgctgaacttgataaacattaagcagcttgaccaccaagttgtggttctttcctaccagctgtgttaatcacatacaaagaaacgtttatctatctttgatgctgcttttataatagatgtttatagtctgaactctgtgcattgggatttagtaggttctatgtcactgaaataatatgcagaattgtgtggatgtgaatgtgtgtgtgcactggatagagagagggtcatagctttgttcagatacttgaagtggctca

SEQ ID NO: 51749 - DNA, 1035 bp, Homo sapiens
gtgtggtgcgatcacagctcactgcatcctcgacctcctgggctcaggccatccccccacccttgaacccccatccaacagtagctgggactacaggcatgcaccaccacgcccaactaatttttatattttttgtagagacaaggtcttgctatgttgcccaggctggtctcgaactcctaggctcaaacggtcctcccacctcagcctcccaaagtgtcgagattataggcatgagctaccacacccagccacaaatactttctttacactgaatttaaatgatgaaatagccttgactcagagaacagaaagtaaatgtaattgctcattttaaataagctttaggcatcctctctgcatctcttacagatgtagtttgataaattgtttggtgtggaaaagtactgataaacgttgaaaatatagtgatatttaagatttttctcccttatttttgtagagaaattttctagagtcctggtggagcagcagcaggaccgagcccggagagagcaagaaaggattcgtctgttttctgctgatccctttgaccttgaagctcaggcaaagatagaagaagatataaggtaaagacctgttcatctaaagaacaaaacttagagactccagatttcccagactgcaggttatctgacattggttgggcatctgcttggaggtagcttctctgttttgcagttgagatagtaacctcagtcttttaggttagtctctcctctttcattttctatgcatttcgatttgacatgacaaagatataggtgcttagtttaatgactttctttctaaaattttaaggaggactccctgactagcagacagagcatcataacacagctttagataaatgacccccggactgagcagaagccaccatctggtgagaccacaaggctggttgcatattacatgggctgatttgactctctttctttagacatattgtataagtcctgattaaatccagggcttaaacatgattggattagagagggctctgcgccgatggaa

SEQ ID NO: 51750 - DNA, 1063 bp, Homo sapiens
acaaaaaaaaaaacattagctggacatgatggcgcaagcctgtcaatcccaggtactcaggaggctgacgcaggagaatcgtttgaagccaggaggcgacggcttagagatactcggtaagaagtgcaaagtactgctaatttagcattgccatctgtagacgcaggacatcactgctttctactggtaaagtcttaaaatgtcatttaattattgcatcgctacagaatattcttccctcaatgtcaaattgtacatcatgtttcagattacagagtagaactgaaagttgaattaggcaggcagggcacttgctaggtagaaatgagtttatagagaccaaagccttggggtgtgcttggttttcgctttgttattatttagtgctatattttgagtcttctcacaaagtggattttgtttttattgtctgatgtttctctactcctccaggtgcccagatgactatcatgagccaagcttgtgcagaaaggtgtaacataatgagactggtggaccgtcggtgggcagggattgccaaaggagtgggcacccagaagattattggaagggtacatctaggtgagcaaaaggcactggggcttgctgtctttctgtaggctatttgtaggtagggtagtcgattttcaagtttttagagggtcttttgttgttattttgttgttgttgttttaaatttcttttgtgtgggtatgtctgagctagcaagcctaatttctagaagttttaaatcctgtgttccgtcaaagttatgtgtttctgctggttgcaaacaagtagtctcctctacgtttctatttcctgaaaatataatccctttccgtcattttagctgatttatttttatacttacctccatatttctaaataacatgtttattttgctgtttactcatatgactgtgtttgagagctgagctatctaattgaatgtgattgcttttctttcatggctagtattattttctcttagaattaataattgtcctgtttttcttacttggtttcttgcgtagtattcatcccagacatttcctaatta

SEQ ID NO: 51751 - DNA, 1038 bp, Homo sapiens
ttgtaatcccatctacttggaaggtttaggcagagaatcagagaacacaggaggcagaggttgcagtgagccgagatcacgccactgcactccagcctgggcaacagagcaagactctgtctcaaaaaataataatgaaaagaacttttcagctggacacggtggctcatacctgtaatcccagcactttgggaggccaaggtgggcagataacctgaggccaagagtttgagaccagcctgaccgacatggcaaaaccccgtctctactaaaaataccaaaattagccaggcgtggtggcacatgcctgtaatcccagctacttgggaggctgaggcaagagaatcacttaaacccgggaggcagaggttgccatcagccaggattatgccattgcactccagcctgggcaacaagagcgaaactccgtctctgttttgaagtacgtaacaataaccttttctcttcatgtgctttttagctcaggttcagattgaaggagattttttgccatgttccttctctatacttgaggaacagcccatggacatgcttctgggactggacatgcttaaacggcaccaggtaattaagagcttcacttattttttttgcatctgctttttgtaatatggtcattatcacattatttttattggttacatatactggaaaactaagaaataacgacttttcaaacctggaaatgtccttaaattatgttgctatacagaggttgaaatgatgtgtcgatatagatagaatctgtttttgtgaaatctctctgtgaatctgttaaatcttgccaaatgttttgagattgtaaaggacagtttggttcccttgtataattttcagattctggttagatcctgattagtagttttttgatgacctgactaaaaagtgtgagtcaagtaagtctttagcattctctgatgctgatcaaacagtacttgggaagaagaccttcaaggttaaggaaggtatatgttgggagtgaaagtgtttatttagtacagggtgcataattaatat

SEQ ID NO: 51752 - DNA, 1057 bp, Homo sapiens
actgcaatccagcctgggtgacagagtgagatcctgtgtccaaaaaaaaaaaaaaaacaacagaattgactcccatcactttttggctcaagtttttatattaactacagttttggttgtaacttaagtattttgtaggaagggaggaattttgaacaaccagacagagactaacttaatagttttaatcttacctgcaaggtaagcttgaatgaatttgacatagctccttacaaggttttgcatttggggtgtaatttatcatcttagtcgtgatgctgtgtgttaatatgaggatatattatcattttatgaaatgtcttttttttttttttccttttaacctccacagtcttggtgccattatttaagaaacattagctgataatagcagtgttttctaacctactaataacagttatccttttttggtaattaccttattttagtaaaagtttggaagattaaaacagatacacatatgtttccaggcttagtgaaggggatgtaccaacttcaaagaattaaaaagaaatggctttttacctaaataaccttttgttgctggtagtatagcttgtgctaatttttgtaatgtttaagtaatgaaataattctacatatcaggtcctttttatttagaacatcgacttcctaatatcatccgaataaatactctggacatagtaggtgaaagtattttgttaacaacttctttctggccaagcatggtggctcatgcctgtggtcccaacactttgggaggctgaggtggggagatcacttgaacctatggatttgagaccagcctgggcagcatggcaaaacacttgtttctaaaaaaaaaaaccacggctgggcgcagtgactcacgcctgtaatcccaacactttgggaggctgaggaagggtggatcacctgaggtcagaaatttgagaccagcctggccaacatggtgaaacctcatctctactaaaaatacaaaaattagccaggcatggttgtgggcgcctgtaatcccagctactcgggaggctgaggcaggagaattgcttga

SEQ ID NO: 51753 - DNA, 1073 bp, Homo sapiens
aaagaaaaaaaattagccaggcatggtggcatgcacctgtggtccagctacttgggaggatgaggtggaaagatcacttgatcctggggagatcaaggctacagtgagttgtggttgcaccactgcactccaacttaggcaacagtgagacactgtctcaaaaaaacaacaaaaaaaagagcttattttttaaatactttatactctattataaactctatattaaaatgttttaaaaaaaaaacatgtttttgatagtagggatggtgtctcactatgttgccccagctgattttgaactcctgacctcaagggattctccctcctggacctcccaaagtgttgggactgcaggccagagtcactgtgttcagcttgatgtattatttaaaaactgatgaaaagataagctaggatagaatttaattaagtggtttgttttcctctaaaattgaatctcagctgagaaagaaatttggaaagggactgttagatatgttcactcacctttactccataagatttttttaatcacctaattcgatcaggtggatctactttcttcacctgtctcacatttgcccgtgaattctctatgtgtagaaacaaaattaatttctttacaagatctattaaaaatctgttgaaattaacagattgctgtgtgtattgtgagagaatggaagcaaccaacaaatattttggatgtccaaactacagaaacatccctcaacttggaatctaccagttcctgattttaaagatggcaaaagaacggaaactataaccctgcatgctgtgtggtttgcattgttaacccaagtttgcttgtctgtttcctaattcacacagagcgtcagaagccatgatgcatgtagtgtgtgtgtactgcagctggagtgggccccagaccaggtatttatagacaccatgttaagccttccatccagttgtcatctgtgatctgacagtctgtatccgcagcagtttgggaagttagcatttgtcattcaccatttcaccttgttcaatctggttacaactagcctatatgcatttgtattttggcatgc

SEQ ID NO: 51754 - DNA, 1019 bp, Homo sapiens
gcatattaatggatacttaatcacattgaattacagtatgcagattttattaagaacatgtctacctcttattctgatgctgtgaatgtctaccacaatgagaaagtaattttaaaatcatttctatttgtgtaagagaaacccgagtttgaggaccttattttattctacgctgtttagatttgtatcctctggtaatttagtggcattagtcacctgctaattaatctttttcctttcccctgtgttccatatagagaaaagtggtaaagaatctacctcactgggaatgtcatcattaccaacttcagatgggtttaaccatcccgcccgttcttcaggacagagtcctgatgttggtaatcctatgagtcttgctcgctctgtctctgcttcagtctgccctatcaagcccagtgactcagatcgcattgaacctaaagctgtgaaggctttgaaggcttcagctgaattccagctaaactctgaaaagaaagaacatctttctttacaagatctttctgatcatgcttcctcagcagaccatgctccaacagaccagagtccagctatgcctatgcagaattcatccgaagaaataactgttgcaggtaatctggagaaatctgctgaaagaagcacccagggcctcaaatttcatctccatacaagacaggaagctagtttatctgtcacatctactaggatgcatgaaccacagatgtttctaggtgaaaaggattggcatccagaaaatcagaacctgagtcaagtgagtgaccctcagcagcacgaagaaccagggaatgaacagtatgaggttgcacaacaaaaagcttcacatgaccaagaatatctttgtaacataggggaccttgagcttcctgaagaaaggcaacagaatcaacacaaaattgttgatttggaagctacgatgaaaggaaatgggctcccacagaatgtggatcctccaagtgcgaagaaaagtattccatcttcagaatgcagtggctgctcaa

SEQ ID NO: 51755 - DNA, 1032 bp, Homo sapiens
aaaggagacttgtggacactgttcattctgggtaagatgctcattttgggtccatctttcagaaaggtctttaatactggtttggccctcagctatggtttctgattgacagattacttcttcagatgtattttctgaagctggtttactgctaacaaccaaaagttcatgaagttctttcaaggctgccgttatagacgggcaagattcttctgctgactccacagaaggctgacaactgccacagagacttggagaggagtaatggccatattctttatttgttccaggtatttcaacattagtttctgggggctgtaaatcctgagtggaaatggaatcattcaaaatttcagatgaagggttacattttgatgtttctacttccatcaagggattatctaaagtgagatccaatgcaccaatgttcttgacattggcattctgcctgcctgttgaattaagcaaagtaactagggactgttgagctgtatcgatttccataaatgtttctgaatttgagcagccactgcattctgaagatggaatacttttcttcgcacttggaggatccacattctgtgggagcccatttcctttcatcgtagcttccaaatcaacaattttgtgttgattctgttgcctttcttcaggaagctcaaggtcccctatgttacaaagatattcttggtcatgtgaagctttttgttgtgcaacctcatactgttcattccctggttcttcgtgctgctgagggtcactcacttgactcaggttctgattttctggatgccaatccttttcacctagaaacatctgtggttcatgcatcctagtagatgtgacagataaactagcttcctgtcttgtatggagatgaaatttgaggccctgggtgcttctttcagcagatttctccagattacctgcaacagttatttcttcggatgaattctgcataggcatagctggactctggtctgttggagcatggtctgctgaggaagcatgatcagaaagatcttgtaaaga

SEQ ID NO: 51756 - DNA, 1035 bp, Homo sapiens
aagcagaatgttgagccagattttttttaaagatttttttcggccaaagtaatttatgatcttttgtctgatgaatttgtctatcctacttgttaaaatttaggcctttttaaatgtattggcagtatgtgcatacagaagctttttattctcattaagatgtatcctggaataaaatggatggttttgtgtgtagcatactgttttagaatgagagtaaatgctttgaaaagcagaagccatgagaaatcccactacccatccagctaaaaacagatgaactctccacactgtgactgtgtgtctgtgctgatggcaaggtatggtttgctggctcagttgtcaatttagaaacttttgaccacataatttggtgtttggaattctacccagtgctctgtgtatcatgattcattaattataacaggaaattggagaataattgaatatcttatcgtagagtggtatgtttttatttgtgtgcttaggatttgacattttaatagggcgagcaggagggtttaaatcttgggctactttgtgcatcacaggctgctgcatggattgccatgaatccttattacattggatgggatattgtgggggagttacaatgcaagtgaaacgtggtgctacccagattcttaaaagaacagaacaaccataattccatttgcagatgtcaagaactgtgagggaaaaataatggcctaaacactggaatttgctagagtttgggtttgctagcatctcactgataacacctcaacccttaatgactaatggtggaattaagttcaggaatggattcattgccagcagcttatttcctttctagactcttctgccaggaagttcttcaaacgctcagtgtgagctgtgatctgagtgaaatactaagtgtgataaccttgtcactggttaatcttggtgcttggaacggtcagtctatttggagagtgtcctttgtggcagtggaaatagtaattacagtttctgacttaagtggccttggtagagttttccatccttttc

SEQ ID NO: 51757 - DNA, 1825 bp, Homo sapiens
tagttgtacatgaattcctgttaggaatactctgaatgagcttaacccacttgccaaatatccttgtcccttccatcattttatttttgagatggggtcttgcagtgttgcccaggctggactcaaactctggggcttaatcatccttctgagtagctgggactacataaaggccaaagtataattgcttttgatttttaaaatcttcttgcccatcatttttataaaaataaagctgtttgtccaacacggtgaaacctcatctctactaaaaatacaaaaaattagctgggcatggtggcacacgcctgtaatcccagctacttgggagactgaggcaggagaattgcttgaacctgggagatgggggttgcagtgagcctagatcacgccactgcactccagtgtgggcggcagagtgagactctgtctcacccaaaaaaaaaaaaaaaaagctattgacactgttaatattttggatgacttaaatttagcagctctagaatgcaaagggtatattaaggagcattacaatagtgaaccttcatcgtcagcttttattcaattaagagctccagaaatgcagaaattatgggttaacttctaagaataccatcaaatccctgtgaattctggttgccaacagtaataaccagtaatgggcacctttaccggacagctcctttaccataaccagtagtgggcagttctgcggtcagcacttaactacaagggcggtctctgtttcttcaccagagagagaagattttcctgtgtaatttgtgccatttccctgaagttggttcttgagcggaaagatgtgcttggtaaccagacagcagctttacataggttatagattttgctcattgatgctgttaagaattatttccactcatacctgttcagggctccagacagccaatagccttcatcccacagtttgggcttcagctattaacacataaagataaccagttgcagctaggctcggtggctcacacctgtaatcccagcactttgggaggccaaggcgggtggatcacctgagggcaggagtttgagacaggcctggccaacatggtgaaactccatctctactaaaaatacaaaaattagccgggtgtggtggcccatgcctgtaattccagctactcgggaggctgaggcaggagaatcacttaaacctgggaggcggaggttgtggtgagcagagatcacgccattgcactccagcctgggcaacaagagcaaaactctgtctcaaaaaaaaaaaaaaaaaaggtaaccagttgcttggcaaaggaagctggagagatggcgagtgcatgtgttaaaactcttctgccttgcagcccacatcttctagagctccctgtcttcatatgtactaaagggagacacaaccctatgtgttttttcccaaagcatgtctctagcaagagggtacatagaaatggaacatgaggctttttgtcactgattttatgataaccagttaatgtggaatctgctggttgtcttactacagctttctatctccggtgaaagccataaaaatttaggttaacttttaagctcatgtctatatatatgtgtgtaagctagcatatacatatggtgattgacaagtatagttaattttatatggatttaaaagcaagcaatttttatatctacagacgtactcttcacttatggtggcttttatcccgccacatatataaatatatatatatatagcaaacagccttgcaaatcatcggccagaaaagctgcagggcgttgcaatggccttttcctacctgtttgccacctgtggtga

SEQ ID NO: 51758 - DNA, 1026 bp, Homo sapiens
gtgagccgagccacgtcattgcactccagccagggcaacagagtgagactctgtctcaaaaaaaaaaataaataaatagagagagagagagatagcgggggcatcaaagggtgtagctgagttctgacagctctgtcttccatcagcctgaagtccacagctttaaaagccaacactattcacattgctcttcttagcagcttttctttgaatttactaccttaagccattgatttcccaaagaggcacatctgtgtctcccaggcctggatcctgctgtctgcagaaggccgctgcacgaggcctcccaccaaacgggcctcctctactctctcctcaggatgccccttacctagacctggccccctacatgcccgactactacaaacctcagtacctgctggactttgaagaccgccttcccagctcggtccacggctcagacagtctgtccctcaactctttcaactccgtcacctccaccaacctggagtgggatgacagtgcgattgccccatctagtgagggtgagtggccccagggcagaaaagctaagcccctgttgtgaaacagacttgaactgcttaagcctggctgggtgatgtcttccttggctagttttggtctggtggctgaaatttgcaattaaacagggctggccatttcccagatcttcatctcctcagagtccctgtggtggctaaaaagtggattctgggcacaaaaagctgaaattatatatatatatatatatataaaatatatattttttaaggttagacccttttccagaaggttctagtcacatgcctgtggcagttttctaagcaaggaaggtttagcagtgggacctggaaaccttgtcgcagggttgagtgttgcctgttctggggagcttgtctgaccccacattctttgcagaaggaggttaagcaacccctagaagaagagagaaccaggcaggtctgaagcgcagggaaaccttgccactgtgtcctgtgtgtccgtccgatttctctgagttcc

SEQ ID NO: 51759 - DNA, 1348 bp, Homo sapiens
aaaaaaaaagaaagaaatggagttctcagcaccacccttgcaggggcacctggtcctgcccccgaggagtgtgtagggtcaggggtgctggggagaagcagcctggggggcggcctctcggacccctgtctttgccccttcgcaccttgctctcattgccctgctctgtcatcttgtctctactctgtgctctgggcatttccctctgccccatggttcccaccccttgggctcccatcctgtctcctagcctctgcccccactctgcacccctcactttctctgctgtcttcctccattcttctccctttgtgttccttttacctctgcaagggacccttcagaggactttgggcacctctcagccctacaagtggggtatggggctaacggggctgctgggtacccctgtagcgtcctggcaggaaggctctgagggtaacctaagaggcgtgcagcctggctcctctctagggctcccagccacccatggaggcctcgaagtcaccattcctatgggacttaagcctggagcttgagcctggaggctgcttcaccgcgggggcccttaacacaaactcagccaaattgttgtgagctccggaggccccaggggtggtggagatggtgttccttccaagttgctcctaaagtacaaaaccccatgtcctgttaggttgtggcttctactcgaaatggggccacccctgtcaggtttccctgggaggaactggccagcctgcctccctcctgggctaacgcatgctctgggggtcggggaccccggggggtgcctgacagggtgtctcctgcttccttgtcctcccagatggagacctcacagacacggtcagtggtccccgctccacagcctccgacctgaccagcagcaaggcctccaccaggagccccacccagcgccagaaccccttcaacgaggagccggcagagactgtgtcctcctctgacaccacccccgtgcacaccacctctcaggagaaggaggaggcccaggccctggacccgccggatgcctgcacggagctcgaggtcatcaggtcagcagggaggggcccagaaaggagctgaggtcctggggtccaacctgtccactcccagcatcagctgttcatccagggcagaccgggacaccccctgagggcagttgcatgccttcctggaaacccttcccacctctaggaggttctttgagcaagaggaagtggaggcctgtcctagtcagctcggctgctggaacaaagcaccgcagacaggcggcttccacaacagacattctttctcacagctctggagcctacagtccgaggtcagggtgccggtgtggcca

SEQ ID NO: 51760 - DNA, 1014 bp, Homo sapiens
tggtggcacacgcctgtaatcccagctacctgggaggcaggagaatcgcttgaacccgggaagcagaggttgcagtgagccaagatcgtgccactgcactccagcctgggcgacagagcaagactgtctcaaaataaataaatgataaaaacaaattttaaaaaataataaaggagctattaagactcttctagccccaactttccctgaaccctcaggggacttccccaggtgtccttagttctcctgacggtgaatgtctgtcctcaccggcgcctccacgtggattaaagcctccatgtgtgtctgtgtctcatcttcccttatggagacctggcccgggtgttgggagggcagcagtgagcagcctccttcctcccacttaggaagggcatccactcatgcagttggtttattcggcagatgccaagtgagtccctcccctgtgcaggcagcgcccaggcccagggcgggtcagcatgtgtctttgtctccccaggactgcaggatcctcctgtctgtcgagcccacggaccaaggctgctaccccctgaacaaccatctcttctgcaagccatgccatgtgaagcggagtgctgcggggtgctgctgagagtgcccgctgggcagtgaacagaccactagccccggctggggcccttccctgacttggtttcccttcctaacctgctcttgcacactttccttctgagcctccatggagaccagcctgcaagccggcccagcctgtccaggatacagtggggctgagcacccccaggccttccactcctctaccctctgggcaccagaaggctcctggaccatgagcttcacccccagaattccctgctgaccctgccccacttccagggaaaagctgggggaggttggacccctctcactgactagctgtctggtaggggtgctaggaccagcctcgcctgtggggttgagctgtttgaggacaaactccaaggtcccttaaaaagtgccttttagaggctgggcatg

SEQ ID NO: 51761 - DNA, 1040 bp, Homo sapiens
actcatgacacaaaacccaagagggcccttagtggatgtcaggatcagtcactgtccccatgacccttgcacccctcttttctcctctctataaaataagggtgataatatttctgtctcccggggctgttggcagcatcagtagtaggtccttgctcgggggcagctactggggttagttcctctggtgctcagtccaagagttccctggtgtcttggtgtccgcggagtcccaccctgcggtcatttattttgttccgctggttgggcaggcctgggctctctgccagatctgatcatcctcccagagacaggagggaacggaatgtggcaccaggcagtaagacgcatggctgagctcagcaggagagggaagcttccaacttcctgcagcgaatgtcctaggtgataggtcaagtctgaccccgccagtgaggccaacatggaaacttactagggcctcgaaaaggtgtgtgtgggagttcagagaggagtggagacagccggcctcccaatctggacccacagggcagggcagggagaggagatggccccgcctccaggaatccaggctgcacctccctccagggaactcagatcaaagccaggaggaaggaggagtgtgaactttgcacccagtgactcactgcatccccctagggcaagtgctctcacccgtgcagaatcctgccctccttgccactgacgggaccatccgcactgggtcagcctatgagcaacactgacctgattcacctgcacgccttcattcccccaccttcatcctcctcctcgcagaggtgatcagatgtttgcaggtgcctgcctgtgtttacaagtaggtcttggaagataagagaggcggtgggaggggtgggaaagccctgttctggcagtcaggacacccagggcttggccactaaccagctgtgtgagctcggccggtctcacaccctctctgggcccggccaccacctctgtggttatgggcagttggactctatggcaagttcatctgccctaccggcttggggttctac

SEQ ID NO: 51762 - DNA, 1080 bp, Homo sapiens
cttccaaagtgctgagattacaggtgtgagccgccacgcccggcctttaaaaaaaaaaaaaaaatcaaaatggttttaaaaggtgtcattttcattggaacggggtggggctcctagtgcccgccacagtcctccactcaggccggcggggcgggccctggcctcggcctcggtgcgtgggtgcagagggcctaggccgcagctgcttctccctctgccgaattgagctgggcggtggtaaccatagtggaccgcacttcctcttcgttcagtgcctcccctcattcttgtcctttaggggtgtggtggaaattattaccagggttatgggttcttcaaaatacaaaaagccaaaccaaaacgaaaaaaaaccctcttgtgtaatgaacttcccccgcgtgcaaaattcggggaacccgggcggcttgcctctgcctcccgcctgcgcggtctccctagacgaattgcctcccgcctagccgcctccctagacgtattgtcttgtgacgcacccccgagtccctgtaggtgcaaggctttaaaaagggagctttttcgagaagaaagcacatcgggggctcttagaggccagcgtggacgccgcaatcgcggggtgagccgcgcgacgaccctatggctctcggaaggtgctgacttggggcgggtgcgcgtgcaccactgaccgcgccagcccggggtcgggccggggcagcgcgctgggcggagccgctccgtggcccctaacaaagggcgagctcattgcccggtgggaactgtgagttggtgtcagagtcctcctaggaactcagtatatgaaacttatctagagggtgttgaagtaccagcaagcaatagaattctgacaaggctgtaatttgaggcttggaaatgaccaggttaactgtctcttgaattcgtagaatttgttatagattctgtcttaacataatttatgcttaatagagtctttaaaatcggcgttcctacggtaatgataccactgactactaaataagaggaagaaaatttgtggcgtgtatgttttataatttgaaataggcatatcaaagttcttttgtg

SEQ ID NO: 51763 - DNA, 1052 bp, Homo sapiens
gactctcccggtgtttactacgtcgtgcctgagaaaccaggcgggggcggggggaggcagggagcaaaaattcacctctgtgccctaggatgaaggggagaccacgggctggattgggaagcagatgggaactttctcttcctggcgctgctccaccccttacccgccccccacctcctggcttctcctcgagtatcgtcagtgttttgatggaaaaatcatttaggtgtacattattggagtggaaaaaccacttagatgtgctcactttaatcccctgtggactttctctgtaggtctctgcctgggaaattcgtatgcaccgatgtacaagcacgtgcattgcagcattcgctcgctcctcagtgttatgtgcctagacgtgtcatttctcattatgcagattccagagacattgcatgcttatggctgggagtttggcccctctgcaagatgagggggcagagagaagaaagaggaaatcgtcccaggcagctttggaagggttcttagtggacggtgctgcggtctggcttgtgtgaatgactttctaaaatggcggccaggacccactttatgtgggaatcagcagagccgatctcagaatgcacagagggaggagggggcggaggattcgagctgccttggaaagcggcagtctggaggaacattactgtattaaaaacggcttagctggcagtttgctcacgactgcattcaaaggagtatcttacctattgcagagtaaaagcagatgctactgataaaagcaggttattttaaaactaagcagatcatgtgtccctgaaattcttttattttaaaggtttttttttttcatttttaaacaaatctatttagttgtttaaatagacagtacatttttatgggttcaaagcatgtgaaaggtatacagagaaaaatctccacccctgaccctggaattcccagttgccacacttcctcccctcaccccccaaaatccaggtaatgtctatttctggtttcttgtttatctttctgcatgtacaagaaatgttcctgctgatcca

SEQ ID NO: 51764 - DNA, 1003 bp, Homo sapiens
catgcaatacctatattaaaactgaactttaagtgcctactcttatccttttccctagctgattacattaataactgttttacaggattaagaggtgtacactgggaatacattatataaaacgttttcaagatgaatgttctcttaacagtgattaggcttttgtagtaagtgtttgcattttacaaaaagattaaaccagacagctttggggacagcttagagacattttaacagaaaaaagaggtcagtcagttctttaaaaatttttatatttatttttaaatttacattctgattagttttgtttgtttgtttgtttttaaatggacagtagattgaggggtggatggcgatttggctttttcctccccagtgccaaagaaagaccaaatccttaaaacataatcagaacatttacaaaaattggcttttcttttcttgcaataataataaatctgttgttatttttacagttttcagtttgcggatttaaaaaaattaaatgagaactatttctgaatcgggttttagttaacaaagattcattacagggacacaatagagaaagtcctttcctttgtatgttagctgggttgaagggggaagggaggagttatacaattggttcctgtcttttagttatgagagggagagaggtgtctgcaaaggcgactccttgaattagaatgagcaaatgaataaaacccttaaaatatttaacatctttatcttttcagattttaagtaagttgcgaatttagttcttcccatccatctccagttttagagactaggttaaagattatgcggaggtaaactgaggtagcccctcgtgtaaaaatattgttaaagaggctgggtgcggtggctcacgcttataatcccagcactttgggaggccgaggcgggcgggtcacgaagtcaagagttcaagaccagcttggtgaacatggtaaaaccccgtctctactaaaatacaaaaaattagccaggtgtggtg

SEQ ID NO: 51765 - DNA, 4867 bp, Homo sapiens
aaaaagaaatgagagtaatgtaataatgcgatacagatattttccccagagagaaaaacgttaagtgtaaaagagagccatttaaaaagtcattttgcaggtcgtccctcctacatacataacgcaaattgtccaaaaaaaatctaaaaactcattttggaaaattattgatatgcagcaataacgttgactttattttttccagatatggccgcgtggaaagtgtcaaaattcttcccaagaggggatctgaaggaggagtggctgcctttgtggattttgtggacatcaaaagtgcacagaaagctcacaactcggtcaacaaaatgggtgacagagacctacgcacggattataatgaaccaggcaccatcccgagtgctgctcggggattggatgatacagtttccatagcatctcgtagtagagaggtttctgggttcagaggaggtggtggagggcctgcttatggtcccccaccgtcacttcatgcacgagaaggacgttatgagcggagacttgatgggtaagttccaaggtttctgtaggcaggtattttgtatttgatatggtgagaaacagaaactcatatttaggggccccagatggatttaaagttttgggcattctcaatgtttcctattttgggttggaaacggaagtgatttatatcccaatggctggtatcttatggaatcgtagaggatatttcctgcagctgattggatatctgttcctgagatataatgtgatggaagatttcctatggaagcttcatttttggagttacctgtcttctagaattacttattccttctcttggataatgttaagtccttccttggatatatcccttctacctgatggagctatttggcttttgtgttcatactatatggaatatttctggaatattagagcctacagattcttttagaagttgatatctgcctctccattttcactacataaagtgtacaaacaaattggattgtaacaaaaaatctggcagaccataatgattcaaccacttggattctacaaacaatactttaacatggaaatgtgtacttggatgaagaagagagaaggcaatgcctgatttttccattttggatctacacaatttctgtattgttggaattacactctttgatggaatggggaaaaattaaaatgatggatgtttcctaaatcctggaatatagccattcttttctaattgctgggatatatgggatgtcttgctgtcaagattccactagcccagggaaagaggattactatatcatttcttaagcaagttgctgtccaatcaaaggtactttagctttgaacacatggtgatgatcagttgtggatacagcaatcaaaattgactgggctggatggctacaaaagtgaactattggcgagcaactgtgccttcctcattcgttggaattgtagaggatatttcctcttctgccagctacctgattcatacttagggctggaaatatttatgaatgtggataaatttctaattgtctgctatctcaagaaagaagtctgggggtttgagagttacagtttgtctgggactacttgcttccagtggaattattttgtctggtcactaagattttttttttcttgtggttcatctaaatatcatttgacacccttgcccattaagaaggtggattacccccataagaggggccaaaattggggaagttatgttcacaattctctccctagatttaattgggattataggtcgtgtttccacacttggaaaaggttggtatgtcctgacctgtgtatattagcccctctcctaacccaagtcaaactctctttttttccccactaactctagaagtatttagtactaatagtgaatcagagaatagccattagatttcagctctgctagctcttgtgcctgccttctgtatcttcttaatggataagaactttgcatatttataaaatagcagctgtagcagtaatcgtcctagaacttttttgcctgttgcttctgttaaatcattaataatggctttcactgattaacatttgatagggtgctaaagtaattatttatggcattttaagtctcaaaggaaaccctcttatttgttagacattgaaatataaaaatctcagaactgtagtaaataaaagagaaactcatttaatacatttaagtaggaaagatatagaatgtttatcatgccagttgtttttcacaatagcagcaaaaaaagctaaactaagcctaggaaggtggggttgctactaagtgaaatgatgggtgaaaagaatattagtggagagacctggaatctaagcatgtactggggatctggtattaattgttataagattttgccagatattcttcattggagagattctaattctttatgtttcatgattccttaatcccttttgatagaagatagatccagagatgggttgaagagaaactccagtgaaatggtcttttaggaactcaggagctgagttctagttctctacaaaagtagagaacttacgatttctttataggattataactagtttttaatattaacacataattgcatgtgtgtaatcgtacatgcaacgtgttttgtactttttaggttgacaggtattcacatcctactaaatgattgtttaagttaagctattttgctaatagcgaccttagaatatcttatagttcctaatgttacctaatttcatcacaggcaatttgagtatagctaaaagccaaaagaacatatttcctacaaccattgagtttatacattaagaaattgaatcatggaataggcatttttaaagtcatttggaatttgatagcacaggagtaaataatttttatttttatttaaattcacatagagtagcatgtggtaacccaatattttgatacttgaagtggtttttttttgagattctatttttattattaaatgtaattgggtaccgctgtgcagtctatgtagtctagtttatgtagtccagtaattttttataactatccaagcagtcaaaacttaatgaaaaaaagttaaacttagaaaattttttctggacttcttgaaagtccttcctattgttgagacatgcgctgcagcagggctttcatgtctaagttaaaacatagcatggaaatgtggcctaaaagaaatttgtgagtaaataaaatttggtatatactttaatcagatgaaagtgtaaaaactttcatattattaaaatagtctcttgttccgttaacatgaaaaggagattgtatatttatgtatgcaagtcagaaaatctctaataaagtaagcaagtgagctgcagaacactagtcatgaaagcccaatatacaatgaaaacaatgattgctcagctgtgaaaataatttttggagtcaagtaaaatgttaagcttgttagcgtttgcttattaagtaggttaatgctgtttagaaaatgaccagttgcaaagacaaagacaatgctgaagtgaatgtttgcatgacttgcttttagttttgcttgctcctttctgattaaatatttttccccctcctaaatgcagggcttcagataacagggagcgtgcttatgaacatagtgcctatggacaccatgaacgggggacgggaggatttgatcggacaagacattacgatcaggattactatagagatcctcgagagcggactttacaacatgggctctattacgcttctcggagtcgaagtccaaatcgctttgatgctcatgacccccgatatgaacctagggctcgcgagcagtttacactgcccagtgtggtacacagggatatctacagggatgatattacccgggaggtacgaggcagaaggccagagcggaattaccagcacagcaggagtcggtcaccacattcatcccagtctagaaatcagtctcctcagagactggctagccaagcatctagacccacaaggtcccctagcggcagcggctctagaagtagatcctccagtagtgattcaatcagcagcagcagtagtaccagcagtgacaggtaggttaacagccttttgttataacagatgagctagctttaaacaaattctcaacaatcagtgggaatggtttcagcatagtattattttttaaagtaatcttggatcatatatgtatgtaatcagtaaagaaactggcatgtggccattgaattaactgttctaagtactcgaagttaagtgatgatttgcaaagttctgtttcatcctccagatgcacagtattaaaattaaatgatcaaagtggaagggaggtggtgactctagctgtgcaaggcaaatcttgtgacactgaaaatatggtatctctttaacatttttaattttgtaggtgtataataccaatttatttctattattttgattgaagatttgtaaaagctgtttggttaaatatgtattggtgaaatataatattgttgacacatttattatcaatgactagatcaacttatgaacaaattttagctaattttaacatcagggtggtagccaatttataaactcaagtagaaaagcttcctttgaatgcaggttgtaactttactgttctgtaaactgatctcactagttgagaatttctttctacaaatatatatatatattttaaagacagtctcactgtgtcaccaaggctggagtgcagtggtgtagccttggctcacggcaacctctgccttctgggttccagcagtcctcctgcctcagcctcccaagtagctgggattacaaacgtgcgcaaccacgcctggctaattttgtatttagtaaagatgaggttttgccatgttggccagg

SEQ ID NO: 51766 - DNA, 1524 bp, Homo sapiens
gagtgcccagccaaaaagttttatttgaaaagcgaaaatagtaagttgagggtaatcttaataagaaacttagcttcaaacctagttatatggattttgaaatcacagatctgggtatgtggtatagattatcctttaagtaatctaggataagttatttatgttcttcaggtctcagctttccctttttttttttttttttttttttgagatggagtctcgctcttgtcacctaggctggagtgcaatggcgtgatcttggctcacagcaccctccacctcctgggttcaagtgagtcttctgcctcagcttcccatgtagctgagattacaggcacccatcaccatgccaggccaatttttgtatttttagtagaaacggggttttaccgtgttggccaggctggtctctaactcctgacctcaggtgattcacctgccttggcctcccagagtgttgggattaccagtgtgagctactgcgcctggccaagctttctcatttttaataaggaccttaataaagttattgtgaaaattaaaatgaacacttaatgtaaaatgcttactttgatacctagtatatgttaaaaaaaatgctgctattcaatttgttaatcccacatgtcctgcttttcaatttaggtggtatatatttaaaatttacagtcaaattctttgacctgattaaaaggctcagattacttttcttttgcctgcttaaaattaatttaagcaaatggtcatgtagttgaatgtctgtttttaggcttcctgaattttcttattcaaaataatacatgaaaacattttgtttatccctctgcctatctagatataattcaaacattctggaagatttgcatattaaaatgaaacaagcacctagtttagaaagtcatgaaagttacgttctatgcccagctttcaagccgtgtgacatggatgaaaactcttaacttcttttgattttatttggtgtgctgtctagataaatgattgatgaaattcatttgaaccctataaactaattataaaatcttgttccacttttttttctgcatagaattgtctaaaatgctcaagttttagtcattttccataaacctacctcattaaaaagctgcatctgcattccactggatcaaaacttattgaaaaggtgttgaggcactgggcgtgtggctcactcacgcctgtaatcccagcactttgggaggctgaggcaggtggatcacctgaggcaaggagttcgagaccagcctggccaacatggtgaaaccctgtctctactaaaaatacaaaaattagccaggcatggtggcacatgcctgtaatcgcagttactcaggaggctgagacaggagaattgcttgaattcgggaggtggaggttgcagtgagcaagccactgcactccagcctgggtgacagatgatgagactctgtctcaaaaaaaaaaaaaaaaaaaagaaaagaaaagaaaaaaaagaaaaagtgctgaggctgggcaaagtggctcaca

SEQ ID NO: 51767 - DNA, 1031 bp, Homo sapiens
ggttatagagcatttacttaggttattggtttcatttcatatatagtcatattttctagagctaacagatttcaaccctatatttacatgttgcttttagtgagttacttgaacctcattcattaacttattgattccttctagtttcactgatgtgacaaattttatgtaattatagcttttttttttttttttttttttgagacagggtctcactctcgcccaggctggagtgcggtggcgcaatcttggctcactgcaacctctgcctctcgggttcaagcgattctcttgactcagcctcctgaggagctgggattacaggcactgccaccatgcccggctaatttttgtattttttagtagagacaggggtttcactacattggctaggctggtctcgaactcctgacctcaagtgatccacccacctcagcctcccagagtgctgggattacaggcatgagccactgtgcccggccaatgatagcttttgtatctatacataaaaagaacagtgagataaatcttttgactgctgggaagacctgataggtagcatttggttaggctatgaaggatatgcaggacttcaacaagaagagaggaggtttaggctagacagggaacactgtgggcagaaggaacaacctgaggtggaaggatgttttgagcatagcagataatttagaatgatttaactgtggtaatgattttttttttattttgaagagacagaatcctgctctgttgcccaggctgctggagtgcagtggtcatagctcctgggctcaaaccatcctcctgtttcagtctcctgagtagctgggattataggtgcacatcacttacaccttgctaatttttaaatttttcgtagagacaaagtctcactttgttgtccaggctggtcttgagctcctggcttcaagcgatcttccctcctctgcctcccaagtgctaggattacaggtgtgagccatcacgcccaacttttgggttttattctgtatgcagagagggccattaaa

SEQ ID NO: 51768 - DNA, 1001 bp, Homo sapiens
ttcatttagtttcattatgttggctgatagtcctgtgttccatgtggtaactttaggcataaaattatgataggaaacccatttcaaaggtgttaagtgatttgtccacggacatgtgctatatgtctgatccaagatttgaatctagacctctgaatcccaaacccatatacgcactattattattattacactaagtgaattgaattcactagtcttacttcatttgaaaaaaaaaagttcaagttattaatagaatgcaacacttgcattggtggtatgtggtggtaaatgaagattatacttttgtgctcctgcatatttattgtcttctgccacctctgaaggtagagtacgagatagatgtgtagaatgcagggcctccagaaattccagtctgaaaatttagacctattagttattttaagaagttttctaatgctgctcattttctgtttgtcttttcactaaagtttgttgttgttgcctttttgcagcagtgattccagcagtagttcaagtgatgattctccagctcgatcagttcagtctgcagcagtccctgcacccacttcccagttgctttcatctctggaaaaagatgagccccgtaaaagttttggcatcaaggtccagaatcttccagtacgctctacaggtaaaattttgtgtgaatgtcctttcctctgtgctactactgaggaatgaggtatgatactgcattacattgaaataactttgggcataaaattataatggaaaacccatttcgaaatattaacgttttaaatgaggaaagccatgaataatggaaaagtctgcttaagctattctgtggtctctactggtaatatttttaattgacagctgaccgtaatatactgttactcctacattggtcatgttgagcatgtaaacaagttaaaactattagtagatagtcatgccaacaaagaccaaattaagtattttttagctaagtgtatttcagtgattgctta

SEQ ID NO: 51769 - DNA, 1052 bp, Homo sapiens
attacaggcatgagccacccttcccagctaatttagcagatttaaatcagtttatttttaattttaaaggttaaacaaagtgttactttagccttaatttttttttgaaacgtttatttagcctttgtattccttttttgctttagagttaataaggggtggctatttctgaaggtgtttatgatatttcagtttatgtgagtattcaagcccattatttcagacattttgttttttaaatgtagatttttccatgatatataaatatgcattaaaatactgtcttctctttttactcggcccccattccacttacagaaacagaaagtgaaaatgaatttcgccccttggatgaaaggatagatgaatttcaccccaaagcaacaagaactctctttattggcaaccttgaaaaaaccactacttaccatgaccttcgcaacatcttccagcgctttggagaaattgtggtatgttgcttttactatgtaaacaattttaggtctttgtcataacacataaagcatagtacagattatatttggaaaggtgatatttaatggtgtaatgaatgaacattgttgtgtgcttttagctcttgctaaaagataatccagagaatcccattgggtatggttctatatacgtgtgtaaaaatgtaatatatgtcctttgtttacacatatatattttcttacctcttttttttttttttttttgagacagagtatcactctgtctccgagcctggagtgcagtgtcatgatcacgactcactgcagcctcaacctcctgggctcaagtgatcctcccatctctcagtctcctgagtagctgggactgcagacatgtcccaccacgcccagctaactcttgtgttttttgtagaggtggtgttttgccatgttgcccaggctggctcttacccatttttatctttctttgttcattgggttctgttttaatgccatctctagtcctgtggattgaaaggaaaatctggaagagaaaaatgtttgtaaaaatgaagcagcaggctgagcatggtggct

SEQ ID NO: 51770 - DNA, 2301 bp, Homo sapiens
ttgctgttgttggttttgcttttttgttttgagccaaaacaagacgaatactttactgaaatacaatatagtggtcagtaaacatggaaaacaaagtaaaatacagaagaacaaaataaaggcataatatctcaagccataatgtctatgattctaaacagtccctgcacattttcattttattgtgttcactacagtgtgcatcacacttttttttttaatagaataaaatatataaaaatatattttttctcatccgtgtccttgtggcttaggattttgttgggactgacactaagtccagtggatgaggctcttacttgttttttgtttgtttgttttacaggtggtgtttgaccgcttaaaaggcatggccctggttctctacaatgaaattgaatatgcacaagcagctgtaaaagagaccaaagggaggaaaatcggtgggaataaaattaaggtgtgcagaatgactttaaacagaagcaaaacaaagtcctattcaaatctcaccctcttgggctgggcgtggtggctcacgcctgtaatcccagcactttgggaggccaaggcaggtggatcacctgaggtcaggagttcgagaccagcctgatgaacatggtgaaaccacgtctctactaaaaatacaagaaaaattagccgggcttggtggcgcgtgcctgttaatcccagctacttgggaggctgaggcaggagaattgcttgaacccaggaggcggaggttgcagtgtgctgagatcatgccgttgcactccagcctgggtgacagagtaagactccatctccaaaaaaaagaaatcaccccgttaataactagcattttgtaggctgccagccaggggagtggtttacaagacacgtatgctgtatcattagtgtttaaggggaatattacaattttatgctcagctacttgtgggcacagcatctttaaaccattagccacagatccttccctaaaaatcttctcattcaaagaagtgtgcttctcagtgttcgggtgctgatgctcacacagacactctcatcgcaggcttgaccacagttatgggtatctgacacccagggcctcatagtatcagtccagcatcctgaatgatatgtctttctttcctttcctactctcctgaagagtgggtagccacttaaagcataactttatgtccagtgtatgtttttaaaaacttgtattcatggtagtttgaaggaatttatgcacttaactatgaaataactatgattgttaggttgaaaaaagtattttaaaaataagatgataagctatttgatagctgatgagcatcatatgctttagtaactttgaggcccagctgtgaataaagtttaaaatgttcatccatattttgttttatattctaactgtagttttggcaacagagattgctggatttagttgatctgattacttaattgccatttcagttttccattttgcttttttcactccttcacaattgggtttgaaactttataaatttcattcttttatcacggtttatacagaatttgagagatttcaggttaatatagtttcagtgatgaggactgttttacttgagatacattgctgtttcctgaaattttctcagaagggctatgttgtgaagaatttacaaatctgataacatttttccatcattaaaatttgaaacttgcatcaaacacctctttttttttttaaaggtggattttgcaaatcgggaaagtcagctggctttttatcactgcatggagaaatctggtcaagacatcagagacttttatgaaatgttagccgaaagaaggtatgtattttaaacttaccagtgtagcttgagttttaatagttttaatacagaaacttaagatggcattaaattttatttttcactctttacccctactttcatcttctagaatagagaatgcttctcttttatcacttcatatggaaacacaggtttatttttttgaatctagtttccaggtaattcctatgggtttggagcaacctgtctggatttctcactgaatgctcctagaacttgaaagagttactgttttgccaggtgataactttatgtacttttttttttgagacagggtctcactctgtcacccagactggagtgcagtggcatgatcatggctcactgcagtctctgccttataggctcaagtgatcctcacacatcatcttcttgattagctgggactacagacacttgccaccacgctggagtaatttttgtaaagatgggttttctccatgttgtctag

SEQ ID NO: 51771 - DNA, 4561 bp, Homo sapiens
atatctaaaacgttgtttcaacatataatcagtctaaattgttgtttttctataaactaggtctacaaaattggctgtgtattttacacatctcaatttagctagatttcaagtgcctagtagctacttgaagctatagtggatagctactacaaactaatcatttcacaaatgattaaataatgtcaaaagattttttagaagcaggaatttctgatttcatatgtatgattttatgcataagtgatgaggaaacaaaagaactaatatctttgttattttttggcagagaggaacgaagggcatcctacgactataaccaagatcgtacatattatgagagtgttcgaactccaggcacttatcctgaggattccaggcgggactatccagctcgagggagagagttttattcagaatgggaaacttaccaaggagactactatgaatcacgatactacgatgatcctcgggaatacagggattacaggaatgatccttatgaacaagatattagggaatatagttacaggcaaagggaacgagaaagagaacgtgaaagatttgagtctgaccgggacagagaccatgagaggaggccgattgaacgaagtcaaagtcctgttcacttgcgacgtccacagagtcctggagcgtctccctctcaggcagagaggttgccgagtgattctgagaggaggctttacagccgatcctcagaccggagtggaagctgtagctcactctcccctccaagatatgagaaactggacaagtctcgtttggagcgctatacaaaaaatgaaaagacagataaagaacgaacttttgatccggagagagtggagagagagagacgcttaatacggaaggaaaaagtggaaaaggacaaaactgacaagcagaaacgcaaaggaaaggttcactcccctagttctcagtcttcagaaacggaccaagaaaatgagcgagagcaaagccctgaaaagcccaggagttgtaataaactgagcagagagaaagctgacaaagagggaatagcgaaaaaccgcctggaactcatgccttgcgtggttttgactcgagtgaaagagaaagagggaaaggtcattgaccacactcctgtggaaaagttgaaagccaagcttgataatgacactgtcaaatcttctgccctggaccagaaacttcaggtctctcagacggagcctgcaaaatctgacttgtctaaactggaatcagttagaatgaaagtaccaaaggaaaaggggctttcaagccatgttgaagtggtggagaaggaaggcaggcttaaagccaggaagcacctcaagcctgagcagcctgcagatggggtaagtgctgtggatctggagaagctggaagccaggaaaaggcgctttgcagattccaatttaaaagcagaaaagcaaaaaccagaggtcaagaaaagcagtccagagatggaggatgctcgcgtgctttcaaaaaagcagcctgacgtgtcctctagagaggtcattctgctgagggaaggagaggctgaaagaaagcctgtgaggaaagaaattcttaaaagagaatctaaaaaaatcaaactggacagacttaatactgttgccagccccaaagactgtcaggagcttgccagtatttctgttgggtctggctcaaggcccagctcagacctacaagcaagactgggagaactagcaggtgaatctgtggaaaatcaagaagtccaatcaaaaaagcccattccctcaaaaccacagctcaaacagctgcaggtattagatgatcaaggaccagagagagaagacgttaggaaaaactattgcagtcttcgtgatgaaacacctgaacgtaaatcaggccaagagaaatcacattcagtaaatactgaagaaaaaattggcattgacatcgatcacacgcagagttaccgaaaacaaatggaacagagtcgtaggaaacagcagatggaaatggaaatagccaagtctgagaagtttggcagtcctaaaaaagatgtagatgaatatgaaagacgtagcctcgttcacgaggtaggcaaaccccctcaagatgtcactgatgactctcctcctagcaaaaagaaaaggatggatcatgtcgattttgatatctgcaccaagcgagaacggaattacagaagttcacgccaaatcagcgaagattctgaaaggactggtggttctcccagtgtccgacatggttccttccatgaagatgaggatcccataggctcccctaggctactgtcagtaaaagggtctcctaaagtagatgaaaaagtcctcccctattctaacataacagtcagggaagagtctttaaaatttaatccttatgattctagcaggagagaacagatggcagatatggccaaaataaaactatctgtcttgaattctgaagatgaactaaatcgttgggactctcagatgaaacaggatgctggcagatttgatgtgagtttcccaaacagcataattaagagagatagccttcgaaaaaggtctgtacgagatctggaacctggtgaggtgccttctgattctgacgaagatggtgaacacaaatcccactcacccagagcctctgcattatatgaaagttctcgattgtcttttttattgagggacagagaagacaagctacgtgagcgagatgaaagactctctagttctttagaaaggaacaaattttactcttttgcattggataagacaatcacaccagacactaaagctttgcttgaaagagctaaatccctctcttcatctcgtgaagaaaattggtcttttcttgattgggactcccgatttgcaaattttcgaaacaacaaagataaagaaaaggttgactctgctccaagacctattccatcctggtacatgaaaaagaagaaaattaggactgattcagaagggaaaatggatgataagaaagaggaccataaagaagaagagcaagagaggcaggaattgtttgcttctcgttttttacacagctcaatctttgaacaagattccaagcgattgcagcatctagagagaaaagaggaagattctgacttcatttctggtaggatctatgggaagcagacatctgagggagcaaacagcacaactgattccattcaagaaccagtagttctgttccatagcagatttatggagctcacacggatgcaacagaaagaaaaagaaaaagaccagaaacccaaagaggttgagaaacaggaagatacagagaatcatcccaagaccccagaatctgctcctgagaataaagattcagaactgaaaactccaccttccgttgggcctccaagtgtcacagtcgtaactctagaatcagccccatcagcactagagaagaccactggtgacaaaacggtagaggcgcctttggtaacagaagagaagactgtggagccagctaccgtctcagaagaagcaaagcctgcatctgaacctgctcctgcccctgtggaacagctggaacaagtagacctgcccccaggagcagaccccgataaagaagctgccatgatgcctgcgggtgttgaggaaggttcatcaggtgaccagccgccttatctggatgccaagcctccaactcccggggcctcgttttcccaggcagagagcaacgtagatccagagcctgacagtacccagccactttcaaaaccagctcagaagtctgaggaagccaatgagccaaaggccgaaaagccagacgccactgcagatgctgagcctgatgcaaaccagaaagccgaagctgctcctgagtctcagcccccagcttctgaagatttagaggttgatcctccagttgctgcaaaggataaaaagccaaacaaaagcaagcgttcaaagacccctgttcaggcagctgcagtgagtatcgtggagaagcccgtcacaaggaagagtgagaggatagaccgggaaaaactcaagcggtccaattctcctcggggagaagcacagaagcttttggaattgaagatggaggcagagaagattacaaggactgcttctaaaaactctgctgcagaccttgaacatcccgaaccaagtttgcctctcagccgaacaaggcgccggaatgtaaggagcgtctatgcaaccatgggtgaccatgaaaaccgctctcctgtcaaagagcccgttgagcaaccaagagtgaccagaaagagattggagcgagagcttcaggaggctgcagcggttcccaccacccctcggaggggaaggcctccaaagacacgccggcgagccgatgaagaggaggagaacgaggccaaggaacctgcagaaacactcaagccacctgagggatggcggtcgccaaggtcccagaaaactgcagctggtggtggaccccaagggaaaaagggaaaaaatgaaccgaaggtggatgctacacgtcctgaggccaccactgaggtgggcccccaaataggcgtgaaagagagctccatggaacccaaggctgctgaggaggaggcagggagtgaaca

SEQ ID NO: 51772 - DNA, 1037 bp, Homo sapiens
gttgaaaagtgatccagttgatccagacaaggaaccagagaaagaagacgtgtctgcctctgggccgtccccagaagccacccagttagccaagcagatggagctggagcaggccgtggaacacatcgcaaagctcgctgaggcctctgcctctgctgcctataaggcagatgcaccagagggccttgccccagaggacagggacaagcctgcacaccaagcaagtgaaacagagctggctgcggccatcggctccatcatcaatgacatttctggggagccagaaaacttcccagcacctccaccttatcctggagaatcccagacagatctgcaaccccccgcaggtgcacaggcgctgcagccttctgaggaaggaatggagacagatgaggctgtatctggcatcctggaaactgaggctgctacagaatcttctaggcctccagtcaatgctcctgacccctcagccggcccaacagataccaaggaagccagaggaaatagcagtgaaacctcacactcagtgccagaagccaaagggtctaaagaagtggaagtcactcttgttcggaaagacaaagggcgccagaaaacaacccgatcacgccgcaagcgaaacacaaacaagaaagtggtggctcctgtagagagccatgtccctgaatccaaccaagctcaaggtgagagtcctgctgcaaatgaggggacaacagtacagcaccccgaagccccacaggaagaaaagcagagtgagaaaccccattccactcctcctcagtcatgtacttctgacctaagcaagattccctccacagagaattcgtcccaagaaatcagtgttgaggaaaggactccaaccaaagcatctgtgcccccagaccttcccccacctccccagccagcaccggtggatgaggagcctcaagccaggttcagggtgcattccatcattgaaagtgacccggtgaccccacccagcgatccaagcatccccatacccacactgccttctgtaactgcagcaaagctctcac

SEQ ID NO: 51773 - DNA, 1679 bp, Homo sapiens
gttattagccggatgcctgtcagcattgacctggaaaattcacagaagataaccttggcaaaaccagctcctcaaaccctcactggtctggtgagcgcactcactggcctggtgaacgtctccctggtcccggtgaatgccctgaaaggccccgtgaagggctcagtgaccacactgaaaagtttggtgagcacccctgctgggcccgtgaacgtcctgaaagggcctgtgaatgttcttacggggccagtgaatgttctcaccactccagtgaacgccacggtgggcacagtgaatgccgccccaggcacagtcaatgccgctgcgagtgcagtgaatgccacagcaagtgcagtgaccgtcacagcgggtgcggttactgctgcatctggtggtgtaacggccacaacaggcacggtgacaatggcaggggcagtgattgcgccgtcaacaaagtgcaaacagagagcgagtgctaatgaaaacagtcggttccacccagggtccatgcctgtgatcgacgatcgtccggcagacgcgggctcaggggcggggctgcgtgtgaacacttctgaaggggttgtgctcctgagttactcagggcagaagaccgaaggcccacagcggatcagcgccaagatcagccagatccccccggccagtgcaatggacattgaatttcagcagtcagtgtccaagtcccaggtcaaacctgattctgtcacagcatcgcagcctccatccaaaggccctcaagctcctgcaggctatgcgaacgtggccacccattccacgttggtactgaccgcccagacatataatgcctctcctgtgatttcgtctgtgaaggccgataggccatccttggagaagcccgagcccattcacctctcggtgtccacgcctgtcacccagggaggcacagtgaaggttctcacccaggggatcaacacaccccctgtgctggttcacaaccagctggtcctcaccccaagcattgtcaccacaaacaagaagcttgctgaccccgtcacccttaaaatcgagaccaaggtccttcagccggccaacctggggtccacgctcacgccccaccaccctcctgctctgcccagcaaactgcctacagaagtcaaccatgtcccctcggggcccagcatcccagcagatcgaactgtctcccatttggcagctgcaaagctagatgctcattctcctcgaccaagtggacccgggccatcctcattcccaagggcaagccaccccagcagtactgcatctacggcgctctccaccaacgccacagtcatgctggctgcaggcatcccagtgccccagttcatctccagcatccacccagagcagtctgtcatcatgccaccccacagcatcacccagactgtgtccctgagccacctctcccagggcgaggtgagaatgaacactcccacgctgcccagtatcacctacagcatccggccagaagcgcttcactctcctcgggctccgctgcagccccagcaaatagaggtcagggccccacagcgtgccagcaccccgcagccagccccagctggtgtgcctgcactggcctcccagcaccctcccgaggaggaagtgcattatcaccttcctgtcgctcgagccacagcccctgtgcagtcagaggtactagtcat

SEQ ID NO: 51774 - DNA, 1364 bp, Homo sapiens
cagactgactctgtccctttgccttccttccctacaccagggccctcctcctgaaggtgagcccctgcagcctcctcagcctgtgcagtccacacagcctgcccagcctgcaccaccctgcccgccctcccagctcggtcagcccggccagccaccaagcagcaagatgcctcaagtgtcccaggaggcaaaggggacccagacgggagtagagcagcctcgcctcccagctggacctgcaaacaggccacctgagcctcacacccaggttcagagggcacaagcagaaacaggcccgacttccttcccctcccctgtgtctgtctccatgaagcctgaccttccagtctctcttcccactcagactgccccaaaacagccgttgtttgtcccaacaacctctggccccagcaccccaccaggactggttctgccacacactgaattccagccagcccccaaacaagattcctctccacacctgacttcccagagacccgtggatatggttcaacttctgaaggtaagcatgagcaggggctgcccttcctggcccccaagttttatgccatgtcaaatgtcctaagattccctagttaacagacccacaagctacagcctctggctgtgtccagcatggctcagcgaggggccatgagctcacttcctgtttgtttccctgtgagcagaagtaccccatcgtgtggcagggcctgctggccctcaagaatgacacagctgctgtgcagctccacttcgtctctggcaacaacgtcctggcccatcggtccctgcccctttctgaaggagggcccccactaaggatcgcccagaggatgcggctggaggcaacgcagctggaaggggttgcccgaaggatgacggtaagactctcaggcccaggtgagcaactgccccacctacagggaggaagacgtaggtagtccctgccagcccatctccctggcctgtcatggaagcattaactgtattcttgttgttgttgaaacagtctctgtcgcctgggctggagtgcagcggtgcgatctctgttcattatagcctctgcctcccgggttcaagccattctcttgcctcagcctcctgagtagctgggattataggcacgcaccaccatggcaccaccatgcccagctaattttttgtatttttagtagagatggggtttcaccatgttggccaggccagccttgaactcctgacctcaagtgatctggctgccttggcctcccaaagtgctgggattacaggcctgagccactgtgcctggccagtaacggtattcttgaagtgagcaatgaagggtccactatgcttctacttggtggggggatgtaaagtac

SEQ ID NO: 51775 - DNA, 1861 bp, Homo sapiens
tacacccacaggtggggctgatcagggtaggtgggcctactcatctggtgcccactagatctggccccagaggtgggcaaaggggcattttggacagaagtcagtagagcacatggggcggggcgccatcacccatcctgaagagaacccagggaaccgctgagaacacaggttttccatgagtttaaagatagggccccagggggttcctgtttatagttttctgacacctgctaggtcttccagtagacatagtcctggcacatttgctggttggggactgatttggcctggctcttagcattgggcctcttcagggctccccaatggaagtggagttgtgggggtgaagacagacggtcccactttgctctctatcctgtctccagcctgcctacgtgctgcagatcttcccgccctgtgagttctctgagagtcacctgtcccgcctggcccctgacctccttgccagcatctccaacatctctccccacctcatgattgtcattgcctccgtgtgagccactgagtggttatcacctcagtgaatcttcccagggctctgcagtaaaaacaaaggacaacccagccaagcagaggaagaagctgccgaaggggacagactccactgccagacggccagccgtttgctgtcctgccgcccggctcagtcggccagacttcctctaggagtggtgctgctaccttgtatgtttacataatgctttagcccaaggacacatcaccaacccatggactcgcagacaccggggctgggtttctctttcctctttttggagaaaaggaacagggcagtggaatgaaaattttttgtttgtttgtttttaagaaacaagaaaacagaactgcctttgcactaaattagtgacttggacttttgcccagtgaagacaggctgtgacactctggatgtcttggtgtgtgtagacacacattgcagactcttaacgcaggaaggacttcaaacttctgctgagaccttggggtcaaggaacatttcattggttttttttgtccacccccatctcccttgctcatttggatgcgtcaccttaattctcctgctgccaccgtctttgattcaccgggatgtacagtttacagttgaagagcaaacagaaaggttttctcttggtgggatatgcagaacttgggatgtgtgtatatataaatatataatatatataaatatatataatactgacttaaaaaatcaaatcccccgacatacgttttttttaatctgtgccaaaaatgtgttttcagaggaaatcttattttcatattcagactttgtattgcccactcatttgtataagtgcgcttcggtacagcacgggtcctgctcccgcgatgtggaagtgtcacacggcacctgtacaaaaagactggctaacccctcttcctattaccttgatctcttcccccaacttcctaacacttattaatttatgaaactgtttttctcagcgcagttttgttttgtgtgtccattggattacaaactttattaaaaaatataaaacacaccaagtgtgagtgtgattgtcacttgggtgggaggacgaaccatgggtccttggcttatgggaacagtcagccctcatcccgcttttgatccccatgccaagtctgtacatgggaactgtttcccttctgcctcctagtcagtcagtcctcctccccaaggataattttatcttgtacaaaggagatttttgtcacggacactgaacttaaccatttctcactcttgtggtgtcttcagagtcctaactggttcttaggtaatgtggaaggaaggcacttccaattttgatacagaatataaccacacccc

SEQ ID NO: 51776 - DNA, 1038 bp, Homo sapiens
agcagatctgggggagggcagatatgtttagttttgaacatgttggagttggatgcctgtaaaacattcaagtgcacctgttcagctagtagttatcaccatcaaaggtcactgaagtcatgggaggggatgagctcacctagggtagggtatgcaatgagaaacaaagtgtccaggatatcccagagcagtgccaatgctgcagtaatgcttggatacaaaccttgtcgtttttccttcttaacattgtgtcctgtctcttattgagctggagttcttgagagcagggcctgaggctgagtctgtgcatctttgtgtcccagtgtcagcatgctatctggcacagagcaggccatttattcagcacttccttgggccaggctctgtgctaagcactctgtatttgtctatgtttgatggatgcatgaaaaggcagctctgagggagcaggtaccctttaggttctcatcagattttccacttgtgtgtcattgattcaggtaatgagccggacgaggggagccaagctggagtttacacaggcaaactgtcagaaaagagtagcctgggctgtctggaaatctgaggtatgtctgtaatactcaaggatgaaacaaatcagatcagtttgtcctttttctctaggttcaacatgattcaaatgattctttcctgatagccttttcttcaaaattatatagtaatgacaaaatcccagttacagtttggttgggaaattgttgatcttactattattgttttacctgcagagagaggccagagtggatgatcactgggcaatgctcacgcctttagttaggtgaaatctacagtggtggaaacagaagtttattccttgctccttaacattctggaagtacacagtccagagctggtagcacagcttgctgtgttctgtgagatcatctgggagcaggattcctttgataatgtggcttttcttgctcaaacttaggcttccatctcatggtccaagctggctgctgtagctcctgccatcatgtatgatctccctag

SEQ ID NO: 51777 - DNA, 1024 bp, Homo sapiens
aaaacacaactgggatctgcagctttgaagccacaagtagattcatatctccggtccaccacttacaagatatgtgaccatggacattgatttacactttttgagtctgttttcccttttttaaaattaggagaataatactatcttataattggtgtgaggatttaaagagataatgcatgtaaagcgcttaacacagtgcctggcacacagtaagagctgaacacatgatgttactgttatatttggaagagaaaccaaggcaggggtacaatgaggacaactctgagcgccgaagtactgtaaggtggaacttttggatagctaggcgcatgcgtctgtctatgggcgctctcctagcgaggacgctgcgcatgcgccggaagttgcagccgggaagcctgcgaggtcggttccgcccgactctaacatggcggcgccctttgtctgctctggagtgccgtccccggccttctcgcggccgtgatgcacctccctctgcggtggggtccgggacatggcaggtgagtgtcaacaatcgcccggggccggggaagtcccgggagccggggcggaggcggcggaggatggggcgcggtgggacgccggtgacggttgtgtgggggaggggagggaagtggaatgggacgccaaccggggctgaggggacaccgctgggcgggagattgtggggtggcggggcggggggcgtcgccgggcgtgctggcggggagtgggcggccaggcgaccgcccgggcgagggggcgcgtgtcacctcccgggctggatgacaccccagctggtagcatctccgcccccgccgcacggctgtcaccgccccttgaccccgcgcgctgtcgagggtgggcgttctgcggccgcgagggagcgcagtgccggggcagctcctgtcggccggccggggcgggagggagcggggctgcccgggcctaggaggagctgacagaggaggccgacgctgtccctgtataaaagcatttcattcattcattcgtactgcgg

SEQ ID NO: 51778 - DNA, 1080 bp, Homo sapiens
ggcaagaagctggggtccaacctcgaggacccaaagccccatccatgccctggcttccatctctgttaggtgatcctgtctgcatgggagcagccccaagaacacaggcctgtgggagggagaaggaccagccccacccccaaccccacttggccttgcctggaggccccagcaggcgcaggacggcaggagtttcatgcagtttatcacgaaccagctgtattggaaaaaccccatctatatacagatgtggcatggctctgccctggcacagccagctggctgggggcacggggtgggcaggcagcctgctcgctggcgtggggcttggaggctggtagaggggaagtttaccgtcacggctgtctcctcttggccttgctgagccctcgggcaattagttccacttagataggcacccttgcctgtgaccttccctctgtccctcccactccccttggccaagagggttccaggtccctggtccccttgccctgcagagacttcatagatcagagggtttgtctgtctgtctgtcctgcagagcttgcccatatgtcctgctggtcccattcccctgacccacagtgggttctttagatcttccttccctgaccccagcccctgtactctggattaagtgacggaggccaaatctgaaatctgggcatcatgtgtcaggccagggagtccctggcctgccctggatagagtggagggccctagtttgggaggatggtccacctggggtctggggtgcgtgggggctagaacctgggctgagatgtcctggagctgttgtaatggggttagcgaggctttgctggcaggcgtggggcggggggacagggaaagggaagggagaggcactcagattttgatctccgtccggaaggtctgctggacgtgttctgtatgcgggtgacgccgtgcccggatagtgaggctgccgtcctcccgcagagccgaggtcaccgacgtcgggtccacgtcctccggcagctggcacttgtgagcgaaggtgttcatgacagtgccgtcagccgccagctggggaaggggtgacccgtcaggcaggct

SEQ ID NO: 51779 - DNA, 1005 bp, Homo sapiens
actgagtcctccagtgaaccccctacccctcatgggggtctgtccctcctgagccccaccattccccggggcccatcacttcctcgtggctcctgtccccagccctgcggcctcccttatccctctcctctcaccaagcccaggccttggggcacttcccacagtgcccaggctgtggcctcttacaattcccaccctagcccccggcagcagccaggctagttattccctcacatcaggctggcccctgcctcctggcctgagccgacctgtgtggctctgccccggcaggggctgcagccttctcaggggctgtgacccacaccatctccacggcgctgctggcctttgagctgaccggccagatagtgcatgcactgcccgtgctgatggcggtgctggcagccaacgccattgcacagagctgccagccctccttctatgatggcaccatcattgtcaagaagctgccatacctgccacggattctgggccgcaacatcgggtgagtggtgcccacctcaggctgactgaagggggtcacagtgtttgggcttggctgggggtggagggcacctccaaaaagaaacaccaccgcagctgacctccgacatgggggctgggaggggctgacacacagctgtgctctcatctccactctccccagtgccctgggtgaccttgggcaagtccttggccttgaggcctcagtgtctgtctaggggtcagctgggcttcacagcaggaggatgagtattgccccgtgtacagattgaggaaaccagagctcagagaggtgccgtgtcttgctccaggtgacacagagagtcagcaccagatccgagaggtctcctcccctctccccactcctgctgtccttgctgggactttgggagcaggaggtggaacgagaatggaaatgggctttgaagtcctcactcaaccagataggaccagagcagcttctggcgccagaaaagcagaccaaagaggctctgagagtcc

SEQ ID NO: 51780 - DNA, 1025 bp, Homo sapiens
ctgccttgctctgaacctgtttccccatcgggaaaatggggctgtttataccagtgattttcaaccttccaagtttttccttgggggtgacatacacttttataatcaaatggaattatccagggaaggctgctgggtctgtactccaatctcattattcattaatggatggccagtcactgaccacctggcagatactggttttccgtcatctcacactcagctctgtccaaggtgggacaagacccaagtgaagctggtctgggggacatgggggaccagggggttggggatttggaactgggccatcagtaatgtggtccccaggtttcctcccactgtgggttctaggagtccctcattccaggaacctctccagccctgctcacactccagagccgtgggtccctggttcaagcaaagctcccctcagatccccttgctggcctgggtctgacatccccgactccgggacctgatgggagcccctctgcctgcagctcccaccatgtgagggtggagcacttcatgaaccacagcatcaccacactggccaaggacacgccgctggaggaggtggtcaaggttgtgacctccacagacgtgaccgagtatcccctggtggagagcacaggtgcccagctggaagggaggaggaagtcgggggtaggggatgccctctgcctccttcttgaacctgtcaggcagacaggatctgcatccaggctctgtgacttagcaaccaaccgtgtgaccttgagcaagtcacttcacctgagcctcagtttcctcatcagcaaaatggaaatcatggctaccctcccttggggtggttgacatgtctaaagagagtcggctgggtgcttgtaaggcagtccctgggcagctgctggggtaggagcatggggacaccaccaaggtcttccggaagcttggccctcaggcctgtttcttcataatgcacctccctccctctccctctctacttgccagagtcccagatcctggtaggcatcgtgcagagg

SEQ ID NO: 51781 - DNA, 1042 bp, Homo sapiens
catgttggccaagatggtgttgatcacttgaccttgtgatctgcccacctctgcctccaaaagtgctgggattacaggcgtgagccactgcgcccagcaccagagttctaatttcaaacctgagccttctccactctaccgggttgcagccctgcatgtcagaggtcgttcatagtgggggttaggaaggtgtcaaacacaggtcaccaggaacgtaaccagggagcagagatgatctgaggcccaggaggaagacttcctggaggaggtggtcccagagctgagacctcagggactactaggaattaaccagcgaagccaagggagggtgatgcagagtgaggcgcgggggcgtgaaaccacatggttgtgcaagggaaccacaagcaatttggtgttattaaggcatgacgtgaggtgctggagaagtctctagggccttgtaaagcaggcccaggagtggggatttcaagttgagggcaataaggagtcattgaaggtttcaagcagggagtggcatgattgttgtcactggtagaggcaggtctgcaacccagagctcctgactcagcctggagctttggggagatacaggagaggcgctggcaaaagtcgagagggtgttcggcctgccctggggtctcaaagctggcatgctctgccctggcccctgctgctgcaggagagctgccaccctctgggtcctggcccactgggcatccatgagacacctgactgtgtcaggtgcggctggggttggtgagctatgggagtgcagggagcacctggctgggccttcctcccattagtgttgggccacctgagtgtgctgggcatgatggctgagtcaggccttcctggtgcctgaccctggcctggcctgacccaggtggccactgtagctctgtggctgggctatggctactgttgctaccactgacaaagctgttggcccagcagggaataagcctgcagcttgcaaatccacaaaaatctgggctatgagggcacatcaagaccaggcctgagtcccattcccaaa

SEQ ID NO: 51782 - DNA, 1083 bp, Homo sapiens
cagtttggggcagtcttctccaagatgccctgactgctgcccaggagagagaacccctggcctaccccgggcacctctctccacttggttggctctcagcctgcagtcccacctggtgagaagtgccacttactctctgctggccctgggtttgcccctttgtcaagctgccccttggcagctcttctccccttcccaactccagcattgagacttttcccggcatggccttggcacagacacctcctcctgtcccaggaagggggagaccctatcctcttagccttttgtgcctctaaaaatagtggccagtttcaacaacccagcttgtgcatggtcaaagatcatggcgggaacagaccgggaggctgggaggttttgggaaccgtatggaggggatgacctgggcctcccatggttctaggtcacagaagttctgggatttgagcctgttcatgaacattctctagggcctttggaaattgctcagctgggctcccaacctgctggccaaggccatagcctccctcaggggacagtcggtgatgggaagcaggcaggaacagagccgaccagaggggaggcggggacacgtagggaggggagatggatcacaggatgtcttttgctgcccgccagcccagcagggccacaggcttgggctctgcacacatacctgggttcaagtcccgcatctgccacttcctagcgggtgaccttgatcaagtttgatgggattgcatgggtgcagcgcagatgacacgactggtatacagtgggtgctaaatcctcattgctctcctcttttcctccactcccttgctttcctcccctagcactgtgcaaatgccccctccttttctcctttttcctgggaacatccaccagaccctttgctcctccaggggctcccaccaaggacaacacagcctctcttctggggaccagagctgagggcacggagaagtgcttatgggaaacacatgttcttagaagcttccctaaatagcccagggtgctcctcgccaattcctttcccacgagcagggacggggcagtcttggatggatggaggctgtgtgt

SEQ ID NO: 51783 - DNA, 1037 bp, Homo sapiens
gcctgtagtctcagctactcaggaggcggaggtgggaggatcacctgagcacaggaggttgaggctgccgtgaggtgtgatagcgccactgcactctagcctgggtgacagactgagaccctgtctcagtcaaaaaaaaaaaagtcccttccagtgaactctggacacagacccttaggcatttgccctttgggcagctctgaaggttgggtggcagctcaagaaaggcccttcctgtctgtttctgggatgttcctgttcccctcccctcccctgcccacctccataggctggaggctgcagagggtttcagtggctttctgcaacagcgcccctgaccttcgtgccccgccaggtgatgaaagccatcaatgatggcttccggctccccacacccatggactgcccctccgccatctaccagctcatgatgcagtgctggcagcaggagcgtgcccgccgccccaagttcgctgacatcgtcagcatcctggacaagctcattcgtgcccctgactccctcaagaccctggctgactttgacccccggtgagttctatgccctctgcccatgatgacctcaattttccttctgcagactcttgaaccacttcggtagagtggccacccaggtgaagctggtagggggggtgctgggggctaagaggttatgtgtggacttgacttagactggacacgatggcccaggaaatcctaatagaagcaaccagcttatgtgtctgtgtgcagggcactgcgtgagcacttaatatgttttcattcatttaaacaacctacgagatgagtcctccagtgatcctcattttgtagaagaagaaactgagacacagggcgattgaatatcttacatggctggaagtggtcaggctgggattgtgacctcaggatctggaatctctgctcgtagcattttatgatgtggtagttattggtggtggtcctgttagtaggagtggaggggcagcagtagttacagatgctgagcgctcccaacgtgccaggaggtctcattgaac

SEQ ID NO: 51784 - DNA, 1900 bp, Homo sapiens
ggggcagccagggtgttcccagggcactggggtggggccacaggcttccgtgggcagctctgaggggtccgtcccccacagcctggtccaagtctctgaagatcacgtgaccttctcctctgactccagagcaccccccatggggcccctcctgagctgcctgtgaccccaccccttctccttccagaacaactgaagcccctgaagacatacgtggacccccacacatatgaggaccccaaccaggctgtgttgaagttcactaccgagatccatccatcctgtgtcactcggcagaaggtgatcggagcaggtgaggttggccccctgccaaggggccctgaggaggcagcggtggtgacacagtgtgggagccctcatgccggggctgaccagggcactcccctgaccctgtctgcccacaggagagtttggggaggtgtacaagggcatgctgaagacatcctcggggaagaaggaggtgccggtggccatcaagacgctgaaagccggctacacagagaagcagcgagtggacttcctcggcgaggccggcatcatgggccagttcagccaccacaacatcatccgcctagagggcgtcatctccaaatgtgaggcttggggcctgcccacactgggtggagaggggccacttagcaggggctctgtctgtgactgtgcccacctcccctatacctgtgcccaccttccccccacacctgcacccacctcctctacaactgtgcccacttctccccaatacctgtacccacctcctaacacctgtgcccaccttccccccatacctgcacccacctccttacacccgtgcccacctctccccatacttgtacccacctcctctacacctgtgcccacctctccccgatacctgtacccacctccttacacctgtgcccaccttccccccatacctgcacccacctccttacacccgtgcccacctctccccatacttgtacccacctcctctacacctgtgcccacctctccccgatacctgtacccacctccttacacccgtgcccacctctccccatacttgtacccacctcctctacacctgtgcccacctgtcctcaatacctgtgccctcctccccaatacctgaacccacctctccccatacctctgcccactcctccgcctgtgcccagctttccccacacctctccccatacctgtacccaccctccccacacctgttccacctctccccacacctgtgcccacctctcctacacctgtgcccaccttcccccatatctgtgcccacctctcccacatgcctgggcccacttacctctcacctgtgcccacccccctacagacaagcccatgatgatcatcactgagtacatggagaatggggccctggacaagttccttcgggtaaggatgtgggttgtagggggcggggatgcctggccattgagcccggggctggcctggcgggttcagggctggcctgcagctgagcgcctgtgctccggcaggagaaggatggcgagttcagcgtgctgcagctggtgggcatgctgcggggcatcgcagctggcatgaagtacctggccaacatgaactatgtgcaccgtgacctggctgcccgcaacatcctcgtcaacagcaacctggtctgcaaggtgtctgactttggcctgtcccgcgtgctggaggacgaccccgaggccacctacaccaccagtgtaagttggggaaggggacctcaagggagaagcggccttcgccctgcatggtgtcctctcacctgcacacctgggcagtgcttcaggaggcagaacacctgtaggagtccagggaggggtcgtggggcttggctgcaatggtcctggggccagccagagggcacagtggt

SEQ ID NO: 51785 - DNA, 1059 bp, Homo sapiens
tgcacgaattccagacgctgtgtgagttgggggaccctgggcatggaccaggccagggcccagaaccaagcaattgagacatcttgggaaaggaagtgaatcaaataacttagaaatgcccctttctcggtcaccggcggcctgggacagcccttcggggactgcccccaagcctggggagggggaagcatggaaggctgaggggtggaggagccgggatgtggattcacgacagtggtgtgaggaagttcaaatccgcatctcagaaaaagccagagctttgagccccacatacctgcaatacctcccgtgagaccttcgggaaggcctccgcttgaccgtctatgaaatgggactaagtaccctctggagccttcccaagtgcaagcacccagcacacagtaggggcccaggtgtcttgggtgcagcgcgggtgttgctgtaatttgtgggggaactcccttgtcatcagctgatttcttccaccagccccggagggatctggcaacttggcggtgattggcggcgtggctgtcggtgtggtcctgcttctggtgctggcaggagttggcttctttatccaccgcaggttcgtcagagcccataccctggctccacatgggcttgggtgggaaaatggggcaggaacctccatttcctcatctgaacgatggggcccacaggatgctagtcgagtctaatccctgcctccggatggtgcgaggatatacgagttagagtgtgtagcgaagtgcctggcacgcggcggggccgggacacgggggtcattacctctgctcttgttgttattaatgatgtgtccacacttcctctggacacgcaggcaggaatccccgagtagctctaatgggaatgccttcgtcacgactgcttaaggggccattctggggcctagatcctggagagggagtcctggctcgctcacttcctccctgttcctccacccgccttctccgcaccctcggccctgagagtggagcttgggcagcaaaagcggggactgggccgcattctgagcaccccaggtcctcctaggac

SEQ ID NO: 51786 - DNA, 1073 bp, Homo sapiens
tgggcaacaaagacacaccccgtctctaaaaaataaaataggccggacgcggtggctcacgcctgtaatcccagcactttgggaggccgagacgggtggatcacttgaggccaggagttcgagaccaggctgcatctctactaaaaatacaaaagttagccaggcttgatggccggtgcctgtagttccagctactcaggaggctgaggcaggagaattgcttgaacccaggaggcggaggttgcagtgagctgagatcccaccacttcactccagcctgggcaacagagcgagactccatctcaaaaacaaaataaataaataatgaaaaaggagtgggagaggagagaggctgaaaatcaggcatcctaagtttgagttctggtttccttcttgggagcttggtgaccttggacaagcttttttgtctctcctcacctccaaagtggaaccagcgctaatagtgcctgtatatagcaggtctattgcgaggactaaatgagggtacagtgcttagcccgagccctgcgcatagtaggtactgtcattgggactccaggctctgtgcagagcaggagtcgggtcccgggcctcctctgtcctgctgcatgacctgggacaagcccccttccctgccctatgtgcctgagctcttgcagggccaatgctgagggtctgcagaagcaggatggaccaagggggtgagagcggctgtttgtgtggtccctgggccagggttgggaggggacagggatgcagcctggctctgagagcagagtcatcagcaggaggtcactatctggcaccttacagagctgggtgtcctttgagtcctgttcccctgactcctggtccccctctgcacctctgctcacacaggggactggatgacgagagtcttcgctccagattctgtccctgagagttagcaggtttgcttgggtcagggcacttgaaattgcttccctggagggggttgtccttaggccattaggggccaggttgtccccagggtcttggacaaaagctgcctccaggcacagatttttcctgacggcaggggtctgacttct

SEQ ID NO: 51787 - DNA, 1058 bp, Homo sapiens
tcttgctcccattgtacagatgaggaaattgcggcttagagagcataacccacctgaggtcacatggagtcccggactccacctgcaggctcacaacctaatagagaggtttggcttccagacatgtgccagaaagaccaggggccagattccagctcagccacttatggatgcagcccccacccgcctcaggcctcagtttccttcaccgtagaacccggagagcacgaactggaaagcatcttcctagtgccctactctgccacctgggcctcagtttccccaggcacctgcccacactaacctgtatcttccccccacagtgggacctgatgcagaacatcatgaatgacatgccgatctacatgtactccgtgtgcaacgtgatgtctggcgaccaggacaactggctccgcaccaactgggtgtaccgaggagaggctgagcgtatcttcattgagctcaagtttactgtacgtgactgcaacagcttccctggtggcgccagctcctgcaaggagactttcaacctctactatgccgagtcggacctggactacggcaccaacttccagaagcgcctgttcaccaagattgacaccattgcgcccgatgagatcaccgtcagcagcgacttcgaggcacgccacgtgaagctgaacgtggaggagcgctccgtggggccgctcacccgcaaaggcttctacctggccttccaggatatcggtgcctgtgtggcgctgctctccgtccgtgtctactacaagaagtgccccgagctgctgcagggcctggcccacttccctgagaccatcgccggctctgatgcaccttccctggccactgtggccggcacctgtgtggaccatgccgtggtgccaccggggggtgaagagccccgtatgcactgtgcagtggatggcgagtggctggtgcccattgggcagtgcctgtgccaggcaggctacgagaaggtggaggatgcctgccagggtgagtgacggttctgggttgcagggaagggggttctgcattcccaggttctggtctttagcttt

SEQ ID NO: 51788 - DNA, 1006 bp, Homo sapiens
aggcatgagccaccacccccggcctgtttccttctttttctgcctcccaaactgggtttggaggttttgctgttctgtgttgggaggaaaagaggccggatctggagccgttgggcagtggcaggtgttgggggtggcatcctgtctcagtctctggagtgacagggcccgggttggggtctcaaccgggacttctggttgcaggagctcatggcaaggatttctgccaccctcaatatccgccccaccaacgtttggtcctcccccttcctgggggactgtggttggagagaaggggagagacagctggaatcactataggcctttctcctcggctgcccatgggggggtgggggattaggcgggtgctttgctgctgcagtccccaagctggcctggaagcctggagctgccttgtccttgtcccctgtgtccacctctccccagcctgtgtgattaaaccccacccccacaccccatgggatgcagggggaaaggcttgtgtattgcactggggtgggggtacatttttgcttcgactctgagtccccgtgaaagagtccctagagaagtgtgcctaggtgggggtgggcatgatggcctagctggcagctgctggtttcagttcctgggaatcaggctgtatgtggtgggtctgcctgggggtggcttagggggcaggcaggaggacacaggtgcctttttcacctacccccaggctgcttcagacttctttcttgccccctcacccctaggctatacttggttgcccacgtggctcctgttaggtcatcaacagccactgaatctgccctcatttttacaaatggggaaactgagggaggcccgagcccttgccaaccagggccttctggacagaggaccagacctgagcatcccgcttcttggctgccagagccaaggccctgcctgctttgtggttggtgtcatggtagattttcctgggaagcaggcatagctgggcaggggcctgggcgggtggcag

SEQ ID NO: 51789 - DNA, 1057 bp, Homo sapiens
acgcccagctaatttttttgtatttttagtagagacggggtttcaccatgttggccaggcatgtctggagctcctgacctcaaatgatctgcctgcctcggcctcccaaagtgctggaattacaggcctgagccaccctgcccagtcacatacaacacttatgtccatacacacactcacacacagtcatacatacatcaacactctcatgtctatacacacgaatgcacattcaacaaaatctcacaccctcatacacatgcacttattctcacaggcacttgcacactcacaggctctcagaggaccaaggctctcctcccatcctcttggtcaaaggctttaattatccccaacgcctgtaattaacccttcctctcttcctgcaggagagatgtctggacccgcttcccaagagtaggcaccaaggcgagaggccaagatgtccacatccggcagagaagacccacgtacctgggtagcaggtcccgggcatcaaagcgaggatggggtcagagaggaagaggtaggcaaagggagtctggggcctcccaggaaatcaggcctgccacagttgctcttcctggactggtcaaatggtgattggccaacaggcagccgtgggtggctgggcaggcgggccagagcaaatttcccgtttgtttcactcacactagccgcttctgtcaggaagggagatgagctcatgtctgaggaagttttgtgaagaggccttatcaaggggcaggtggtaggcaggtgtcctccaaactgtcaaaacctatcaacccatgccagggtcgggggccaggggtgccccttgcccccttccccaaaaagaagcagtggttcaagcagagaccaccaggattcaaatcctgcttctactacccgtgagctgtgcaccctttgggcatgttgtttctgctcttggagcctcagtctcctcttctgtaacatggggatgatgacccctgcctcccagatgagaattattaataaataagatagtgcatgtctgatccattcccagaggaaatgaacctattctcagatc

SEQ ID NO: 51790 - DNA, 1050 bp, Homo sapiens
gagtacctgccaggtgtcacccccttcctgagtcctgacagtttggctgcaggcctgcgtggaggcttggaaggaagaagggaggaaaggaggaaaggaggaaaggaggaaggggtcagggaagcccctctgtttgttttctgtctctgagaacttcccagtctgactctagccccttcccctccctgcaggcactaacacacaagtcccccattcaccagaaatctgtcccaggctccctggctgccatgctccctggataaacccaccaggatgccctcagcccctgagggaagaggagagagcttacactcctccgggcccctatttccacgcccatcaccaggcctgggccctcacaaggctacacacacaccaggaagtgccaggaacacagccacgccagagctctcacagatgcctgtgcacacacacacacacacacacacacctttccaggcaaacttgcatacactttcctaatggccaggtctcaggggctctgtagggaccacctcgggacaggacatggtcttccctcccccattcccattccccttcctgccctgtttccctctgtctgtccatccatcttcatcaaccagtcccagtgggcccctgctcactccctccgttccccctccatccgtccgtccacacatgggtccatctgtctgtcgcctgcctgtagctagccctgcagtgagcagtctatccctacccagccctgcccatcacttctgccacaacacccctgcaagatcctgtccctgtcctcagcagggtctctcatcatttctctagaacccacccatctatccccccaccccttcagctgtgtccttcatctgtcaatctgtccatccatccagccatccatccatccatccatccatccatccatccatccagccatccatccatccatccagccatccatccatccatccagccatccatccttccttccttccttcttccttccttcccaccttggcccagcccctctcagccccctctgcatcccatccatcacttctcagacaggcc

SEQ ID NO: 51791 - DNA, 1356 bp, Homo sapiens
atagtctttgggagatcatgaggcagcgggtaggggtggactccgtgagacgacctatgtcaagtgtgttgcttataaagtgcctaggaaatagtaagtgctcactaaatgctgcttggattgacttgggaaggcaggacctctctggagtgtggaagaaaacagatagttaccaggtgtcttcaacaaatttgttatgtcccagggcctgagctgagtactggtcctcagatcaaaaacaaagcaaaagcaaaccaaggcctgctccatcccttccctgaagatgcttgcccaatactggaaacttgtcaacaaccagtttcaagtcagcgtgaaatatgttgggagacacagaaaggcaggagggcacgggtcaaagaatagggttgccactcgtcagggggtaatcttgtcaagtgactttccttctttaagcctcggtttccctctccatgtaatgggcgtgaaataaccacctccctgcactgttgttcacattcacgaggttttgggcacatggcccggcatagtggctcatgcttgaaatcccagcactttgggaggccgaggcgggcagatcatttggggtcaggagttcgagaccagcctggccaaaatggcgaaaactcatctctactaaaaatacaaaaatcagctgggcatggtggcgcatgcctgtaatctcagctactcaggaggctgaggcaggagaatcacttgaacccaggagatgaaggttgcagtgggctgagatcatgccactgcacgctagcctgggcgacagagtgacactctgtctcaaaaaaaaaggttttgggcacatagccaagatcactaaatagaagggatgatgattgtggtgttgctgccctggaagttgtctctgggcccatttctcctcttctgagcctgtgctggaacgggtctgaaggtctgggatgaggctttctttttatggcagagctggaggtttccccaccaagaacccagtcctgtagacctcagatctcaggatcaggacaagggactggggcaccttggggtgtgcttgtgcttggagagacatggtcagccttcagcctggatttgggcatttctagtgaccacagacctaggggagtgacagaggtgtcctaacccttagcagtgtcccgtctgacaggagaggcacagcccctcacccccaggagcatccagtcagaggagggagacagcacaaggagtcaccctctcaataagctaagacttcagaatggcagagctggaagaccccttagagatgtctcttgagtcactaggagcttggtctggagagattcacttagggtcccaagggtggggatgcactgggggaca

SEQ ID NO: 51792 - DNA, 1307 bp, Homo sapiens
tggcgcgactgtccgcgcggaaggttggctctaggacctgactacacgaggccgtctggaagcgaggacagcaagccgctgagcgagaggcgaggggagccgggcttgggtgcgggtagggggcggagccagcgggacgaaacctaggataggacagggccggatgaggagcggaaccattggaagagcaaacgcctggtgggcgcggaacaaggcggggccaggatcaggggcgggacctggggggtgggcggggctctgggaagaacgcgtcggggcggggcttaggagaggggcgggatcgaggacaggaaaggcttgcacaatttcccgcggcgggacgtgggtcgccgggcccgcccggcgccagattaggagtggggctagagaaggggcgaggacgcgaggtgtggcgtcctggggtctggggatgtgaggccagggcctccgaggtgaactggtcctgccctttcgaccccgtgtgtgccctccctcaggccaagtttgagctgatcacctccgaggcctcctacatccacagcctgtcggtggctgtgggccacttcttaggctctgccgagctgagcgagtgtctgggggcgcaggacaagcagtggctgttttccaaactgcccgaggtcaagagcaccagcgagaggtgaagaagtggtctggcctggcccggggtggggacggagccagtggttggccagctcccagatctggggtctccatcctggctctgactcctcaggttcctgcaggacctggagcagcggctggaggcagatgtgctgcgcttcagcgtgtgcgacgtggtgctggaccactgcccggccttccgcagagtctacctgccctatgtcaccaaccaggcctaccaggagcgcacctaccagcgcctgctgtagggctgggggctctgaaaggggcgggggcgtggagggagtctcaggcaggtgtaggcactgagggctgggtgacgtaaggtgactctgggaggggaggggtccctgaaaaggtctctgtgaccaggataaggtgagatgcaaccccaaagggcagtaaggatgtgctgagaagccccctgaggaccccgtggatggccagggttgtggatcccaggaattcaggcctacctgtgattccagagtcctccccattttccagcctggagaaccccaggttccctggcatcctggctcgcctggaggagtctcctgtgtgccagcgtctgccccttacctccttccttatcctgcccttccagaggatcacccgcctcaagatgttggtggaggtacctc

SEQ ID NO: 51793 - DNA, 1050 bp, Homo sapiens
tagtaccacagggttgttgtgtggttgccactagaggtggtggtggtggtaacatgcctagcatcaagctacgctcaaggtaaatgctcaggaaatgctaatcttgctttgttgtttctcaccactggatgctgattgttccaccatgttgaaacatctcccagcgtcctgggccctttgggtctccctggacatacaaacgaaacttgctttgccatagctagggctgcatcttcctggtgtaccagagtctcctccagggccagtttctgtttctcccatcagactgagaattatcccgggtcaaggactgtgcctccctcatcaaactagggacccatcagggcagggatgtatctcttcttcctattccttcctggtcccctattcctcccatctccacctctcccatggtgagtggctgaccctggctccccctcaggcatccagaccaccgtggtattttggccagccaagctgcaggccagcagccgtgtcgtcatgtttcgttttgagttctgggactgtggagagtctgcactcaaaaagttcgatcatatgctgctggtgagcaggcatgtgggcctgggtgggttctgccaggggccgattgggtattaatgagctcaaggcactgctcagagacctgagctggcactggagacagtcccagcccatgcttgtcctaggaccagccgctccttgctctgggcctcagtttcccaatctgtgaaaggagggattattcctgattcttctgagggccctgcagctgatggggggtgacatggttatatgcctctccatcaccaggcttgcatggagaacacagatgccttcctcttcctcttctccttcactgaccgtgcctcctttgaagacctccctggacagctggcccgcatagcaggtgaggcccctggtgtcgtcaggatggtcatcggctccaagtatcctttggatatccttggcaagtcacggagccagggggtcaggggcccagcctctgcccaggcatggaattcagcacctgggcttttacttaaaggg

SEQ ID NO: 51794 - DNA, 1669 bp, Homo sapiens
gcgtttctcaggcacaaagcctgctgcagctggccctgggtcctggctttcagccagcatctggcagcctaagtgtactgataagtgtgttttctcctgttacatcatgctgaatcctttcccttagccattagcttttatgatgtggtcttcgtaggaaagccaccctggtgccaagcctagcttgtggggaggggtatgtgttccagaaactgctctttgtgttcccttcaatgaggaaacaacatgtgtctacttatgtggcatccaactgcttggagctccacacttccctttcgcgactcaggctctggtgctgttgccaatccttgcttggcaaagactgttcgatcatgtggggtccttatttacaagggaaagctgggccagaaggctagcaattcaggtgttaccgctattgctgtaccttgtgttaggacattgtgtttgtgcatggactgtgcctccaaactcagtagttcctatctaaatataaagtatattagaaacctgaaagtacagaatctcaaccttacagtctttcccttagtcctgtggccttcctaagccagctgttaacgtgttgattccttccacttcccccaagtaggcaggcaacagatatgttgattgtcttagaaagtaatctggttcctctgaactccattgaattccagtttgacgcatactgcctggaaccagactgtttgcttacagctttttaagaaaaatctgccttgtctgcccccattatggttggtcttggtagctcctgggcactgtgggcgtgtaccatgggaaagtgattcaacacagtgaaggtgattgtctcctcaggcctcctgaagccacctgtgcggtgggacttcacgtgtctcggccaaggcgagcatttccacaatgccgtggatgctgcagtcaggccagattgaaccatgaccccatttttcacatgataccaattttgtcttaaaattcactgagaaaaatgagactaaattttttttaaccctcaggagcacctgaagcaaatatttatccgtatttattgaaaattcattttgtttctacttgaagctttaaccccttccattcctgcaagtgtgccttttgagagctcccatggcctagtgacttcactggtcaccttgtccatcttacttaagaattttagtctctccctaccctcttggacagagcttcctgttctcttatttcacaggttatacagcagagcgggttttgtgttttcattcctatttccacccttcatttggttggtggactccacaacctcaccctaccctacactttgggagcacaaatttggtgttgaaacaagcttaaatttcattttagggcatactgggcttactctcctcccagctgtctgtggattgatttgattttaatgttcgagttttacagcaacagctgaaaaccatgaactattctaggaactgtgttggaactctttaaaataaagaaaagaggaggaggaggaggaagaaagaaaaccaacttaagaagccttgactttggaggacagaaagccaccagccaatggagaacaaagagatgtttccctttcctttctttcaccttgtcattctgggtttccttctgcttcactctttccttcccccttaaaagtggtattcctggttgg

SEQ ID NO: 51795 - DNA, 1856 bp, Homo sapiens
tctgcttttacttcagttaatagatggttaaaaaaataatctcattaggcactagtgtctggccgcagacgtggctcagatgaggcctcgtggaaagagcagagggagggtctcaggatgacttctagggaaagtaggggaagaaagatacagcctaagtgctaagtaggagcataacactttgctgcgcatctttataaaggtcccttcattttatatcagctcctcagacagtagtaacagtattttcattttagagataaagtcagagttagagaaaattaagtgacttgttcaggctacagagctgggattcagcaacatggtctctttctggttcagaagcccctgaactctgagtagggcatctctaaaacctgctccagcccacacagtctgtgaaagtgaaaatggtgcaagtttgccagatgggccacaggcatgtggaactccccagccaccattatggtccctgggagctcctaactacctttatccttctgtccttaattcacaggagcaatgatgtctgggtccttgaccttgagcagtgggcgtggtccaagccgaacatctctggccccagtcctcatcctcgaggtggccaatctcaggtgctcaggaattaaaataactattcagcaaacactgtagcgtctttcagttaggacgggagagggaggagggagtcaggtaagatgccaatatgcactaagccaaagaaaatgtatcattcttttttactggtatttatttttcaacttctaatgggtcatattatttatagtggttttatattatgctcctccccaaagcatttactttgctgtgtcatttctcaagagaatcctgcattttatgtggttgacattcatgttaatatttgatcaacaaagaatgtatcctttcaggtgaattatcagtaatttattcacagggatcagaattgatatgtttttaggagaatggagaggttatggtaactagaatattcccatttgggagctaggtaggctattctcatataccagtgaagcatagaaagtcagaaacctgtgtctttgtaggtttattttcaatgtcttcccctcctcagattgtcatagatgatgcaactatcttaatcctcggagggtgtggcggtcccaatgctgtgagtattgcttctgtggcattcccatgtgcatgctactaagtgttcaaaacctgtttcccctgtcttcttttctaggagtatacaagactatttccatggcattttaatttaaggaatgctttttgggtatagcctttgtattttctggcctttgtttctgcttttttttagggttgtggggggatccttttaatcatagatatttgtctcttgaatattcatatctatattcttcccattcctatttcctttttaggctataaagtttactgctatcatattttcaaaggggagagggcagtggaacaaaaaagcaggttgataactgtcagagttcacacagtatttaagaaagcagattcagaaagttgtggatatgtattatttatcctctccttcaatccccaatacatacacataaaattatgggcaagtgtcaaaaccactcagttgattcatgggtcacaagcacaattccatgtgctaagccagtggtaatatatgaatgaatgaaagcgtaagtggatgcatgcacaactgaataattaactgaggattttgctatccttctgaagagtccacatcctttcaagaccagacaggagagctttgagactgcaactctgtgtgtgtgtgttttggaacgcatatcacacctgagtcttgttattggttttttctcttacagctattcaaggat

SEQ ID NO: 51796 - DNA, 1071 bp, Homo sapiens
tctccaagacttactctgaattgtttttcaaacatatatctcttaatgacagcaaccgccgtttcttgtaatggaagacttagtacgtggcgcttgttagctgttactgatcaggaccatagggaaaggtagcaggtggcaggtggtgctttgtcagcaaaccaggccaaagaagccatgatcttgtctcttgtcatcgttttctcatctctctccctccagaccgtttacattcagaacttgaaagaagataactttaagcaaacttgtaggaaaggcataaatacattatgccatcctctacttattatcccaacaaatctctgctgaaagtgataggattatcattttaaatggatgcctacttactatttttacataaagtgtgtggtgctgacttcttgacttcctcctgtctttttacattaggtggaactgcattgtgacaacccatgggccacctcccatggctggccactcctcctgtgtgatagatgataaaatgattgtctttggtggctctttaggatcccggcaaatgtaagtacatttggtttgctccatatgagcctgaaggtaaatactcctgggaataacaggtttaaaagtgaattagggaccaggtgcctaattcacacctgtaatcccagcattttgggaggccaaggtgggtggatcacctgaggtcaggagtttgtgaccagcatggcgaacatggcgaagccccatctctactaaaaatacaaaaattagccgggcatggtggcacacacctgtagtcccagttacttgggagactaaggcaggagaatcgcttgaacctgggaagtggcgattgcagtgagccaagatcaccccattgcattccagcctgggcaacagatcgagactcttaaggaaaaaaaaaaaaaaagtaagttagggtcagtattcctgagcatggctctaattaatccaattagttatctcatcctagcattctgttctttaatcccttaatcacagaccaataaattgaaaaatttgctctataaaatcatagttatatagaatctctttgacatatggttc

SEQ ID NO: 51797 - DNA, 1080 bp, Homo sapiens
aactcagaagctatttctcattcccccttgaggagatgaactcttgaactatggctttttatttttattcttccttttctgtttttgggtaagagacagggtctagctttttgtccctgagtggaatacagtggcatcatcatagctcactgcagcctcaaattcctgggctcaagcgatcctcctgcttcagcctcccaagtagcaaggactacaggcatgaaccactatgcccagctattttattttattatttgtagagacagcgtctcactgtaatgcccagactggtcttgcactcctagcctcaagtgatccccctgccttggcctctcgaagtaccgagattacagacatgagccatcgcacctgatgtactatgcattaattgattctacttttcaaataaattgtgcccctgataatttcctcttttctgtagttctctctagaagtgatgatgggttgtgggttttatatttgatttgttggcttttatgttgtgtcccttttttgtcttctctcccattttagtaagctttctgaaatcccactgctgaatctcagaatgtttcttgctattgaatttacatatgtgagttacagggtagttgcattttatgtgatgaatgggttcttaaagacctcatataatgaattttaattctaataatggattgctgatatttctgcttactggctaaagtagttggtggtaccatgtgacaccagtatgaacatggtttacagtttactgccagcttttacattagcgattctttttttaaaaacaatattattctattaagacataatttgatagctgggcatggtggctcacgcctgtaatcccagcactgtgggaggctgaggcgggcagattacgagatcaggagatcgagagaatcctggccaacgtgatgaaaccctgtctctactgaaatacaaaaaattagctgggcatggtggtgggtgcctgtagtcccagctacttgcgaggctgaggcaggagaatcgtttgaacccaggaggcggaggttgcagtgagccaagttcacgccactgcactctagcctggca

SEQ ID NO: 51798 - DNA, 1881 bp, Homo sapiens
tattgatttgtgcttcaggtttaatttgaaaacaaaaacaataggagaattggaggaaaggaatgggaggacagagtacatgtgttggcatacctttgcttagctctagaggataatgatgcagatttagatcaattatgtagctgtgctgaaatttccctcatttgagcacctttaatgtgaattattatgtgttcttgctggacttacactgttacatcattgtcaacttgcttagtgtgctcagaaataaaattttcatagctttcctctggaccttgttttaaagggtaatatattgatccacttggagacaagaggctggtaatagaaatttggtacttggtaacaaaattgctgaatgtgtgaaataagctttgaaaaatatatgttatggttaaaatgttggaagggcctcagaattttcacagcagttatttgtgtattttctttctaggtgcatgctattatgatgctaatcagtctatgtatgtgtttggaggctgtacccagagcagctgcaatgctgctttcaatgacctctggagacttgacctaaacagcaaagagtggatccgacctttggcttcaggtaagagatgaaatgctgatctttgcctccttaccaggtgactcccttggcatggaaactctacctgatcatttttggtgttggtctcaaggatgggttactgggactcaggtccttaagtttaatgtgccatgtaaatgataatagtaatatgcttgtgtaagtctttgttttttgttaaattatactttatcattagtaatggtgccctgccaaaattgctgtactgctgtgtgaattcatttgcatggttttctcaagtatactcatacaggtgtgatacatcatttggtaggaggttgaagtaagaacagaaacacagagtcgtgagaactgtagttgactgacagaagctattgtcctagggctaaggtctctgaatatctgttgttgttgccagctcagatatttggggagtgtatgggacgtgcctctgctagttactcttaacaacccaggggtgtgggaagattctacagtaggtacattcctacccagtcccactatgccagaaatctggcagaaagaaactagattattttcttatttttgacctaacctctcctgggggaaaaaataaaaacaatggtttttgcactcatgaggcagggcaatttgaggaggcatagattggaggggttggtgtgatggagaaatagtgtccactgagtataaagtattctgctagattttttggcaagcttttcccaaaacattcatttggctttttagtattaggactcagtcttaggactaaggacatttgggtttccattgggcaagttccttatttatttaggccttgccttactactttgattaccagataggaggcatcattgtatattagaaagggcactggactaagagtgaggggacatgagtttcatttcctggcatagtcaccaattctccatgtaactataaataagttattgcacttctctgggagaaatgtggagtagtactaaatgactatttttaaatgggctaaaaaggctagtttatgtttccctttctataaccgctactgtgaatgtctaggccagggacttaaacctgtttatgagaagaagctgcattttgcttccctaaaacttaagttcctgttctttccacctacattaggcaaatataggaggagcctactgagtggataccatgggtggagctgggctttgtgtagatgaagttctttattaaaattattggcatttggagggtaggagggtggtggtccagtctgcagatggccacaccaggaggaggagctattatatccccttctc

SEQ ID NO: 51799 - DNA, 2266 bp, Homo sapiens
tagtatctttcctatggaaaagtctgggacaaaaaagtcaggtgaagtaaaaaggccaattctagggccaggtgcagaggctcacccctgtaatcccaacactttgggaggccaaggcaggtggatcacttcaggccaggagttggagaccagcctggccaacatcgtgaaaccctatctccactaaacatacaaaaattagctgggcgtggtgggcgcacgcctgtaatccagctactcgggaggctgaggcaggagaatcgcttgaacctgggaggcagaggttgcagtgagccaagattatgccactgcactctagcctgggtgacagaacaacactctgtctcaaaaaaaaaaaaaaaaaaaaaaaggccaattctagctttttggtgaatgtgtgcatagctaatcatgcaagctttaattaatgtagaatgtccttttcagattgatgtagggggtctcctgagtccccaacatcatgcattgaaaaatgtttcagtgttgtaggtgtcacatatagtcaggtagtttcatacacaatgctcatcatgctcctgcaggagccagcaggcccagactggataaccgcccttgcttcttcatagttacgtaattagagaccttatcaaatatgttctggcttgtaggtgtgagacacatgacagcatagtctctttaagcatgggataaatgcctcaggatctttccctggagacaggtgaagaaacaaaagagaatttgacgtctgaaaatgcaaaagcatatcattcatttagtgagcatttattgaatgctccatacaccatggaaaagatgaaactactggaagatcttgcacttgagatgattatagaatagtggagaagtattcagaactgtgaagaactgtttgcttgctctgtgtgtaattaaattgtgactatttgacttgtattttaatagggatgattagtatgtgtcgtaaactaagcccatttcagaaaacttgaagagatttaccagttggaatagacactctcagtattatttgttagcccagtattcatactgtactgtgagctgtaactgtatagcacattctagtggtctagatgttctgaaaggaaaattttctatttaggttgagaacttgtgaaaagggaaattactactggagcactgggagttgctcaaattctttttcctaaaaggttcatttgaacttgttgggtcttcctccctgcccctgcccctctcagatcaatctataggtgtcttaaataaaaaataggcaataagtaaagttcagtaggctagggtgcttaaaatagttgagtgtggccgggcatggtggctcacgcctgtaatcccagcactttgggaggccaaggcaggtgaatcacgagatcaagagattgagaccatcctggccaacatggtgaaactccatctctaccaaaaatacaaatattagctgggcatggtagcgcgtgcctgtggtccaaactactcgggaggctgaggcaggaaaatcgcttgaacccaggaggcggaggttgcagtgagccgagatcgtgccactgcactccagcctgggtgacagagcgagactccatctcaaaaaaataataataataataattaagcgtattattgatagttattttctcattccattatatctgagttctaaatatagctgcctaaactgactcccttcctctcccaactttgttgataattgactgctggtcactgaaaatacagtagtgtgtgaaacttgccattttagtgccattagctttgcatactttgggctgtgccttcctcttccagaaacctttgtttgctcaagagaagcaggaaaatgccaattgccctattttagtgtgggattaaaatacatgtggtaaggacctcagggccccgctgttggctgggttttcagtccaaatagagaagaaaaatgtgggctgggtgcggtggctcgtgcctgtaatcccagcactttgggaggccgaggcgggcggatcacgaggtcaggagatcgagaccagcctggccaacatggtgaaaccccgtctctactaaaaatacaaaaaattagccaggcatggtggcacatgcctgtaatcccagctactcgggaggctgaggaggagaattgcttgaacctaggaggcagaggttgcagtgagccaagattgtaccatttcactccagcctgggtgacagagcaagactctgtctcgaggaaaaaaaattaaaaaggaaaaatgtttgt

SEQ ID NO: 51800 - DNA, 1028 bp, Homo sapiens
aacagagcgagactctgtctcaaaaagaaaaaaaaagaaaacaaactttcctgagttatgtatttcataatccattttagccaggcatggtggtgtttgcctgtagtgcctgctacccaggaggcagaggtaggagtattgcttgagcctgggaggcagagattgcagtgagctaaagtcatgcatgccactgcagcctgggtagcagagcgagaccctgtctaaagaaaaaaataaataaacaaaacataatcaattgtaaactaattattatctccatatttaagacagagaatgctttattatagtttccaactatagatatttactgaacacctgttatgttctagacattgttttatcatactctttcataaggctaaattatcccccaacacctttgctttggagtaaataatatcaatgatcttgatatgttgccttatgagataaaataaaagggactagagttacagtgtgagctaattttgtaatttttaatgtcacctaacctccatgaactttgataaaatggaaggattgcctttcagttttaaaattgtatttcctttctttgaatgaaaatcagataaatttggaattcctcaaagaaacttgtcttataggctgggcgcggtggctcatgcctgtaatctcagcactttggaaggccgaggcaggtggatcacgaggtcaggagttcaagaccagcctggccaagatggtgaaaccccatctctactaaaaataaaattagctgggcatggtggcaggtacctgtaatcccagctactcgggaggctgaagcaggagaatcacttgaacccaggaggcagaggttgcagtggccgagatcgtgccactgcactccaacctgggcgacagagtgagactccatctcaaaaaaagaaaaaaaaaagaaacttgtataaaaatgataaaaacaggtaatagacacagttttaataatttgatggataagttaagtgtctggactgaagggtttgctctttctgtcttaggtgtag

SEQ ID NO: 51801 - DNA, 1007 bp, Homo sapiens
tttagtagagacggggtttctccatgtttgtcaggctggtctcaaactcccaacttcaggtgatctgcccgcctcggtctcccaaagtgctgggattacaggtttgagccaccatgcctggtcgaaaaacggttatttcttaacccatattctcagaatgttattactttttgcaagacccagagttagtttttccttcaaaatttgaggtcttagatcattgttactggccaaggaggctagttgctcttccctttgctgtcggtcagtcagatccttgagttagaagaattgttggagaacaagttttctggtttacgattataccagaacttggctgccactctggttttcagtgaagagaaaaaatgtaatcaaaagcctttggggatgggcttggtatttgagctgtacctgtcgaattaaggtggctcacaagtggtattggaaagtgctgaagagcagatttcacactgagagtggaaacgaaattacaaagagcttggatgtacatgcctgaattgtttttgagctgctttcagtggaatactgatatttatgttttacctattacagctgttgagtggaatgtcatggccagctcctcggacagtgaagatgacagtttcatggctgtggaccaggaagaaactgtgctggaagggacaatggatcaagatgaggagccccacccagtattggaggctgaggagactagacataataggtccatgtcggagctgccagaagaggttttggagtatatcctgtcctttctctcaccgtatcaggaacacaaaactgcggcccttgtctgcaaacagtggtatcgacttatcaaaggtactgtggataggagaaaggtttatttattgatttcaaatttcactgatttatttttagactccaaatttagtttttttcctcccttaaatgtattatggttataaaatctagcattagacgatactacccggttttctttcttaccctggttagtttaatga

SEQ ID NO: 51802 - DNA, 1026 bp, Homo sapiens
accagagatttgtattaattctgaccaataaaatattttgacaacatctagtaacatataaaggtaggatctaccattttctggatatactaatgatgtaattttttttacatgtcccaggtagctgggattacaggcgcctgccaccacgcctgactaatttttggtgtttttagtagagacagggtttcgccatgttggctaggctggtcttgagctcccgtcctcaggtgatccacccacctcggactcccaaattgctgggattacaggcgtgagccaccacgcctggcctaatgatgtaatttctattataaaataactactgggcacagtgacttatacctgtattcccagcactttggaacattgggacaggaggatcacttgagcctaggagttcaaggctgcagtgaactataattgtgccactgcactctagcctgggcgacagagcagaaccctatctttaaaaaaaaaaaaaaaacccttgcgagctcagcacaaaggtgttctgagtagacatgtcaataaaccttacactcatttgaatgcctagtactaagaagacaaagatgcctaggccaatggtcctgcctccagggagttcagattccagtacattcattcagtcacgttggggaagctgagaaggtgtaacacaaatgtgaagggtgagaaggacttcttttaaacagtttcatgaaaattacattcattgagttagtatgcttacgtgtgaaaagtttgtagggcttcttttggcatgaaaacaagaaaaactcagagtttcaaaatgcctctatatccttgggggaatatgagtgatgattttattacctaatcatggaagtgaaaaagaagggctatgcaaattggtgttgggcatgtaattacagaggaattgcatctgagctcacccatgtgtgttctccttggcatctgtggctagggccaagttagcaaacatgccctcaaaggtatggggtttgatgtttttgtggagggtgtaacagttgaatggtg

SEQ ID NO: 51803 - DNA, 1021 bp, Homo sapiens
ccagaagccatttgattaaataaagcccttcccacgattgttaatgtggatcagaaaagatagtgttcgtgaaagtgctttgtaaaatgtaaaataaaaggtaaatgtaaaattgattattcctatttatgaaccacctactgagggccctccatatggcgggtgttttgggaagtaggtactaatttaagacagcttttggtctgaagttgcatatagtatggctggggagccagacaaggaaacccgttaagtgctatgtagtgttaagaagtgcactgaatccaaccaagagagtcaaggaaggcttcttggagcagggatggcttttccccaacctttcctattattctgcagagtctgcctttagtgagtgacttgctttttataaaaacttgaaaaaaaattctgtcatgggttcttttccccttttattcattcactgtcatgacagttcccacacagtatgccccagttatggcttctgcattctcaaaaatccagcagtcttgggaaaacctttctatatgagtcatatacacaggcaacaaacacaaacattgcagctgcaattaaaatatctcagattactaagtggtgacaactttagagtgatgatgcttttttgtttttgttttgtaaactagtacaagaggcactgtgtttttaatttgatgacaattaatacagtaaatatttaattgttattccttacaatgttgattataggtggttattagtactgtctcctttttcccaacaataaataaaatgagaagatcttaattcctttttgattgaagctgaccgcttaagtgagaattacactaaactttctttttcttttttatttttttgagaccaagtcttgctctatcgcctaggctggagtgcagtggcgcaatctctgctcactgtaacctctacctcccgggttccagcgattctcctgcctcagcctcccgagtagctgggagtacaggcacccgccccacgcccggctaatttttgtagttttttt

SEQ ID NO: 51804 - DNA, 1140 bp, Homo sapiens
ggcttctcttggcgagaattgtgtgtgcaaagggaacggtggagggtgggaacgaatttgtaagcgaagagaaaacgattgtgagatcttgatggtcgctgcagagtaacttcagcgctgagttcgtttgaaaccttcggtttgttaagattcagaataaccaattgctttgtctgttaaatctcccgatttctgttaggaaaataaaagcctcatttcttaattgccagagtctggatttttctgtggtgggattctgatcgatctagatgaagattctgacacattaccagttttacttgctggcagttgctggccccgacgttgaaactatgttgttcctttttgagaacaacttttattgctgtttaaatgctaattgggagacttcgattgtgtttctgtcatgtagggaagtcggtttgaagccttgtggtctctttcttgaggaatgatggcttcactgaacttgtgctatgcagaattgttgaggcgattgcttttgcttggacacaccaaaatatcttttgtaacaaattggctttacttctgcttaagaatgatgacatcatggatttaaagaggcaaggaaaatttgggggaagtaccatcatttagaattgaatatttagaattaagtctgtatatcttatggccattagtgatgctgtgttaaattgctaactttgagtgtattcacgtgtgtaatctgattgggtgtcttttctattgtatgttgtcattttatacccagtaactgtttgcttttgacaagccagtataaatagatgattcaatctacattgatccataggcatgttgcgtatcttaaaaagcttttcattgttaaaatgacaactgtttaggttattatttgaccattttctttctttctttctttctttctttctttctttctttttttttttttttttgcagtttctcactctgtcatccaggctggagtgcagtagcacagtctcggctctctgcaatctccatcccctgggtttaagcgattctcctgcctcagcttcctgagtagctgggattacaggtgtgcgccaccacgcccgctaatttttttttttttttttttttttttgtaattttagtagagacggggtttcaccgatgttg

SEQ ID NO: 51805 - DNA, 1030 bp, Homo sapiens
aggcgtggtggctcacgcctgtaatcccaacactttgggaggctgaggcgggcagatcacctgaggtcacgagttcaagaccagcgtggccaacatggtgaaaccccgtctctattaaaaatacaaaaatgagcttggcatggtggcaggtgcctgtaatcccagctactccggaggctgaggcaggagaatctcttgaacctgggaggcagaggttgcagtgagcagagatcgcaccactgcattccagcctgggtgacagagtgagactctgtctcaaaaaaaaagagttcatagtgttggtaatgagctaacccagctaggggaaggcagcagatgatataaaaatgtaattggaccagtggttattataaagcactgacaacctctctgatttccctgtatcttgcaagtttccttttattctttttctccaggtcaaggcatgcagctagtgggaagaaaatgcatcttgaataagttaaaggatgactggtgttctggattaagaattgaaatttatgtttactttctacccccatgagccagttatccaaacattgccccatcagtgatgctggatggtgtatgagtccataggaaggtgtcattaaacattaaataactattgcataccaggcatggaggccctgtttagtgggggagtcagacaggtccggcagcaccttcaggaagaggcataagtggggtaccatggctggatcagagaaagtcttgtaaagaagacgatgcctaagttaagatttgaaagatcagttgaattaagcagtggtaagtctgggagaggcaggtagagtgtagggccaaagcaggcatggatgaggaggccgagagacaaatacacagcattgggagggctacaagtatttccttctggctgaaggggagagggttggcagggttgagtggaaagagatgagaccacagaggtatgtaggggccagattgggaaaggcttccttgtacttggttctggaagcttgaactttgtcctgaaagtgcaaggagc

SEQ ID NO: 51806 - DNA, 1133 bp, Homo sapiens
atttttttctttttttttcttttctttctttctttttttcctttttttttttttttagacagagtcttgctctgttgcccaggctggagtgcagtggtgcaatctcagctcactgcaacctctgcctcctgggttcaagcgattctcctgcctcagcctcctgagtagctgggattacaggcatgcgccaccacgcctggctaatttttgtatttttagtagagatagggtttcaccatgttggccaggctggtctggaactcctgacctcgtgatccgcccgcctgggcctctcaaagtgctgggattacaggcgtgagccaccgcggctggccagttttaatatttttaatttaactcagtatgtccaaaatagtataattgtaacatgattattattttaaaatacgtgaattgtttaaaaatatgtgaagcatccctgtaaaatcaaacctggggtgataggacttggggtgtgtccctctctgggattagtcaggggaagtagaataattacaggagcattggaggtggccagtcctagtcataccaggccaggacactgtcactgctatgctactgatggaaacaaggcagagacgaaacagaattaaatcaacatggaggttgtttggagaagtccatggattgtacatctgaacttgaaatggccagtggccaggcacagtggctcacacataatcccagtactttgggagagtgaggtgggaggatcacttgagcccacagttcaagagcagcctggagaacatagcaagaccccgtctccaccaaaaaaaaaaaaaaaagggaaaaagaaatggctaatgatgcgggagacatttttatctgatagttttagaccagattttgctgttgtagattgcttctacctgtgaattctttgactgtattcccaagtgaaattgggaattctgattcccaaggaatcagaatcccatccatatttgtggtatgggaaacaagaccccttgcaggggagactggtccaccaggagaccctgtagcccagggacctgggcgccagtgtccctcccaaggcctgaagacataaggctagcatgggccgtggctggctgtgtgggagttcagggccggaacaggttggaagg

SEQ ID NO: 51807 - DNA, 1048 bp, Homo sapiens
tcatcttctgaaatgaaaactaacagagaaaggcaaatcatttgggaaaagttacttaaatggtaaccttgttgccaataaaagagtattttctaattcaaagtccaaagcaagggtccctcttagatctctgttcaatataagattgctctatttcttgggagtcgtgttggtgacactggagaccagaggattccggttctcagagagagggatgctgtgatggagtaggacagtacagtcttttggcttgtatactgaggcacagagtggggaggcctgctgtccttggggagtgggtagcagcagatcaggcaccagaaagggtgagacaccccctctgacccttgtagtgtaacaggtgtgagtttgttcactttgtctcttgtgagcttggctagttcgaatcagtcccccagggcatcatcaccccaggctgttgtgtaaacattcgtacctgagaaggtacaactgtaatggtgcttatacttgctgtgctttacactaagacccagaatagcctatttcttcctctcctctgcctttctcacctttcttttttccttgtcatcgacctcttaacgttacaggagtaaacctaccactgtaatctgcttcaccttacagacacatccctatcttttgtcacctttgttccttttgtagcttgtgacagtaacaaactgggttgtttgaggtgaccccttccctgctctcctccttgggaatgatcttatccgcattgtactcctaggtcccataccctaacttttcagccagaggcacatttatagcaaggttaagggcatcagcagccagtgaagctgagcttcctcctctggtgagttaaaattgcaaatgttgacatctgatcccattcaccttgtggttgtggctctcctttacctcccataaaggaccagccctgtcgagaaccaccttcctccccactgtgcttcttcatgatttcctgcctccgctctttccttctggctttgcttgttctctgagaccgagaagcttgtgtcccatttctgtagatgtgtag

SEQ ID NO: 51808 - DNA, 1020 bp, Homo sapiens
ttactctaagcctttcggtaggtgccagtcacagagagttcaagtccgtaacagtaaaaaatacattattaaaatattagatatgaccataaaggaatgtaaaagggagagtttattctgaggaccaggtgatgcaccatgctggtgggatcagaggagactttataaaggagaggtagacatccaggctgggttgtgcaggatcaatgggagtttgcaaggggaggggacattgcaggcaggtggaacagcatgctgagttctgggggctagtgatagcaaaacagagacagaaggtaaaagaaggtatgggtgaggcatgctcagaagctttgactaggtctgcaagcagttgaagggtttaaagtagggaagtgacatgatcagatttatgtttaattttttttccaactctttatttcataaaatagagtaagtgttcctaagtttaggtttagaagttgatatgagtggctctgtgaaagacagattacaggtcagaaaactggttggaggctatgcaaagaacccagctgaacaatgaggtttagaactgtcatggcggccatggggctagaagggagatggacctgcagagggtatcaggtccccaaaccccaaaatctagtccacatttgttatgttgaaggacacagtcatgtccctggctagagaaaggacactgcccttagctccaaaaataaagactaagtttttatttgagagagattttttcctctttttatatacatttttttcctctaggaaatagacagacggttggaaaaaaaactgaagatcacacaaaaagagaggtaaggctgctgtctggtctgagggctcatgctctctgtggtttgagagccgggcagtcagtggtgttctccagctggccattaggattagcaggtcctagcaggtcaggctctggggcagcaaacccttccctccaaattggagaccaggacgtggtggcttgaggctttagggttgaggctggggtgttgcacctgcctctga

SEQ ID NO: 51809 - DNA, 1049 bp, Homo sapiens
gctgcgtgtagagtagtgagaagcaagcagagtcagggtaggaaccatgcagctccacttgctgatcccagcctgctggcactagttcactgtgccgcattggctggagagggctctgaaagccttgccagggaggaggtggcagtttgctggcatgctccctctgcggttggtagtcaccgggggcactgttgtgtagagagtgaaggcacagatgagcttgtgtcaaaatctgcctcttacctcttctttagaacgacttgacctctctgggccttagttttctcatctgaaaaaatgggataataatagtaccaaccttatcaaggtgttgtgcaattcagtgagtaaatgagcataggatgtggagagcctgggctggcagagtggaaagtaccccagataagtgctttgatgatattttctgggtctccagtatgcccactgtgatgtttttgtgaattttctaaattcctttttactcttaacatttttttctctgcagtattaaaggttgcatcatataagtttatcactttcgaatcaaacagtattcattaagatggcctccttctaactttgaggggctgctatggtttggtattctgggacttgaagaaaaaatctgcgtaccttctttctagctcttcataattttgaagagatacctgttctttttgttgtttctcctctaagtcttcacctttccagggtggaaaaatagtcatatgagtcaaccgttaaccgcagagtttggagaggagtgggagggaagaattggggggcgggggatgtgtccctctgctgagctcttgattccagttctttactttggcctaacactctggagattccaaatggttctgcggagcatgtgctatccatggtcactgcctctgggcagagtgggccctcaagcactccccctgcctacaagtgcatgatggcagctgagcagggggaaaggatgctgtagctgctagaggtgaatgtgcaccaccgaccctgcctgctcacaggggcctctcaacttggaggtgccctgagtc

SEQ ID NO: 51810 - DNA, 1028 bp, Homo sapiens
cttcccccagctcctccctgaccccatgggccaggcctcagaccttccagctaaccgcttcccatgagccactactctgatgtcagcctataaccaaaggagctggggggtccaggcctggtgaccaacctttctcagcccactcaatcagggtgctccccacctgcaggcaggaggcaacaccctatctgctaccatcagccccttccagagcccatctgccccgcccagccctgccctgcccagccataccctgctctgccccatctgggggtgccctgctcagggatgggctggcagggctgtacccagcctccctggtaagcagagactcaagaaacctctggggtcctgttttctggtcgtgtgatcccaggggtgcacatgggccccttgggtgtctgaacagaagggcatgggagggagggctgcacccctgcagtcttactctgctggtgtagcgggcagctgcccactcccaccccaccctgcaccgcgggctcctgagtcggcagattaagcattttataaattgtattttaaatacatgttttaaacttgtcagatctttgtcctcatttcagtccctgccctctacctcttgctgtggccgcttatttaaccctgggggatttccctctgcccagtcccagggaaagactgtctttggtaaaacacgaggccgggtggtatgtgggttgaggggaaaggacccacccctcttggggctcccagagaatgagagccctgggtcctggggctctgtcgggggagcatgcagaggccacctcctgctcttccacagggcctgtcttagagccagtggagagagagaatggctgcttttgtggggctcccagtccagagggggatgtgctcacctgaggagaggcctagccctgtgctttgagaaggcacagaaggtcaagactgcacgcaggggcacctgtagcagaaatcccaaccccgcgcagggctttgaggtggaaccctgcactctgagagcccagtggtggctgggtgacaac

SEQ ID NO: 51811 - DNA, 1005 bp, Homo sapiens
agctaatttttgtatttttagtagagacgggatttcaccatgttggccatgtaggtctcgaactcctgacctcaggtgatccacgcacctcggcctcccaaagtgctgggattacaggtctgagcactttcagcttgtactttcctgtgtgccccatgttttctgcattgagtatgcactgcttgataatcagacccagacagtgacttctaataaccacgcctgggctgcaaggcatggacctgctccgaaggtccctgcccaccctactcctctggcctccacaggagatggtcgtgtggacttcaaagacttcttggctgtgatgacagacaccaggcgcttcttctgctctgtgggtgagcagggatgagcccagcgtagtcagaactggaggaggggctgggaggttggttgcggggagagaagagggcattcaggactgcccagtggtaacggcagccactatcccatgtctccagaacagaacgccctgtcggacatggctccccacaacccccacactctactctttgagatcctgtccctgctggtagagatgctggccttaccagaggcagtcttagaggaaatcacaaagtgagtggggccggttgttgggggtgaagggttgtggacacagaggtggcatctagcattttggcactgagaacttttggtagttacgacttttagtcacaagtgaaagaaactggaggctgaggcacgagaatcgcttgaacccaggaggtggaggttgcagtgagctgagattgagccactgcactccagcctgggtgacagagtgagactctgtctcaaaaaaaaaaaaaagaaaaaaaagaaaaaaactagaataaaactagcttaagcaaaaggggaatgtatggctcaaatcactggttgggtcctcaggtctagtgggatcccagagaccaaatgataccagtaaggctttctctctccacctatccatgtctgtgcgcactggctttgagctcagct

SEQ ID NO: 51812 - DNA, 2290 bp, Homo sapiens
gaggctgcgtataagtttgaatttctacaattagtttgtggcacactgctaataataataataataataataataataataataatataaagttctagccaactgattattatagaaatactaaggcctacttagagaccacatgaggttttggaaacatgcaaaccgtaagttaaaaataattttgttttgcattataaaaggactacaaccatagggccacccaccacattgaaaaccagaagagcattttgctgccgccgagcgtggacgcaggcggatctccgaagagctgggtcgccagcctctcccgcgcacgttgcctggcctccagcacctacttggtcccgcgcgctccctcgtgtcgcccctcggagcagcagccgccgcggtcgccgctacccggaaagaagtcagagacgccgcgaggtcgccgccaccgccatgcccaagaataaaggtaaaggaggtaaaaatagacgcaggggtaagaatgagaatgaatctgaaaaaagagaactggtattcaaagaggatggtcaggagtatgctcaggtaatcaaaatgttgggaaatggacggctagaagcaatgtgtttcgatggtgtaaagaggttatgtcacatcagaggaaaattgagaaaaaaggtttggataaatacctcggacattattttggttggtctccgagactaccaggataacaaagctgatgtaattttaaaatacaatgcagacgaagctagaagtctgcaggcatacggcgagcttccagagcatgctaaaatcaatgaaactgatacatttggtcctggagatgatgatgaaattcagtttgatgacattggagatgatgatgaagatattgatgacatctaaattgaactcaacattttacattccatcttttctgaagattgtcctacaatttggattttgatcatgacaaagaagattaaaatttcattagcatgaatgcaatttgttaaagcagactgatttgtttctaagatatttttggtttttttaaaactgataataatgctgaattatcttaagtgagatgttaagcccactttgttcttttaatgtaatggagcttatgggtagaagaccatgtctactaattacaaaaaaaaaaaaaaaaaaaaccatgcattgctgcttttcctaccacttccagtaagaaaatgggtgttttgaagaaatcatttgccttgtcctcacggaatctgattaagccctggcctcttgattgtatagagtcattgtgtatattccagttacctagatattcccttgagattttgatacaatttgagggaggcagaagtctgcatttgaagaaaaaaaataagtctgtttgtcatatttaagtagcctgtggctatttttatactgattttgatatcatgttcttttcatagtcgtattttgccaccgtaaacataaaaaaaaaaaaaaaagatttccaaaatgccgttttcagaacctgggttttaatagcagtattgaatttgtaagcttagtagttgcagaaattgaacactaggtggcactcagttatcttaacaggggaagtactgatataattgttgacttttcttttactatgtgtaagaaataccccaaacatgaaaagattgttttgatcatatgcatgtatgtagaatatttttgcagagcagaaagattatgttagaagtgtgatttttattttcagaagtcatatacatgtaagctacaattttgagtgctttataaacacttaagatatatatataaattttaatttcatagcaacttgtaaaaaataaaatacttgttgaaaagcctttttcaacatatccctaagctaagggaagaggaaggaataacaactcagtgaaaagatggtctccaatttctgaatgaaaaagctacagctgagaaataaaataaaatgtcatgctgcagaatatgttatacccttattttgtgttaaggatatattttattatgcgaatggttttgtttttgttttttgtttttgttttttgcttgtattgggaattagctttactggtaacttccttatttagtttttagtggtcaactctaataaaatgaaactagggctgagctagttagccctcactagccaaactgaaactgtatgcaacattaaaagaagagatccatcatgtagcttgtgacacttttattttattagtcaccggggaacttttcagtgatgaaaatacacagggtaataaaccttcacatggcttcaaaaggaaaacaagcaaat

SEQ ID NO: 51813 - DNA, 1054 bp, Homo sapiens
gggggctctcgggccagcggaccccgtccccaccgcggcgctcctcgcccggccgaggccgttcaccccgccgaggcccctccccggcctgctcagactcctccacgctcgccctgatccactccgccctgcacaagcgccagctgcaggtccaggtaggaaggggcttgagcgttctgggcgcagccagaggcctgggggaggggctcgcgccctccgggtgggggcgggggcgggggcaggtccggggccagggtccgagggaggagtctgagcgccctggggtgcagccagagccctgagaaatagtttctgagggtgtcaggacccccaaggaggtggccgagagctctgcggtgaagccgagcccagaagtgggggtgcttgggcagctgggggtgggtgcttgggcagctggtggagggaggaggctgcggcagtgttagggtcctggtagagagggagacaggtccctggtcatacagagccaggaccctgggaaaaggtctagcaaggggaatcagagcttgggaactaggggcagagccagggtagggaggagtctgagagtggaaccaggatgcaagggggaggagcctaggagccctgggggtgggatcagaacccaggagacgagtgtgcctgggggtttgtctggcatccggggggctttgataggagttgtccgggaccccagggaggtgagggctcagagggtggcgagggcacataggaggggagcggaagcctggctctcaggcctaggcccctatcctgccccaggccaggtccaggccctggaccccgcctagcgtaggctagtgtgtatccctggaaccagaagagagtaggtggctctggaggcctctcaggcccccccagactctgtgaccccccacaccccaggacatgcgtgggcgctatgaggcaagccaggacctactgggcaccctgcggaagcagcttagcgacagcgagagcgagcggcgggccctagaggaacagctgcagcgcctgcgggacaagaccgacggcgccatgcaggcccacgagg

SEQ ID NO: 51814 - DNA, 2278 bp, Homo sapiens
aggccctccaggatcgggtggattccctgcagagacaggtgggcccctccccaaatcacagccacagtgttcacatgccctgtgccaagagctttgtaggcactacgcagtcccccaacaaccctgtgaggcaagtattacccacatccccatttcacagatggacaaatggaggctgagaggtgatgtcattgtctaagatcccatagctagtaagaggcagagccaaaattagaattcaggactatttgatgacagcatctgcatacataggagtcatctgggacaagttagagatgtaggtttcactcatttccctttttgccttgactgctaggaagctcagctctaactggaatgttaaataatacggctagccttgcctgaacacccaacaaggtcaaaaataaaaaaattttagggtcgtggtggtttccctttctcttccacagcagagaggagagaggagtgaggacagggaggagaccagggagtctgagacaactaggttgatggcactctgggcactagtagttagccagcaatgggatggggcccaggtggcagtaggctgagccagcaggagtgcttaggaacactgggtctcaatgatggaggcccagagagaagtgggaagggtgtggattgggcatgccaggtggaggtcacagtgggagcagaggtatagaggccagatgggaacagccccgattgttctggctgtcctcctgccaggtggccgacagcgaggtgaaggcagggaccctgcagctgaccgtggagcggctgaatggggccctggctaaggtggaggaaagcgagggggccctgcgggacaaggtgcggggcctgacagaggccctggcccagagcagtgccagcctcaacagcacccgggacaagaacctgcatctgcagaaggctctgaccgcctgtgaacatgaccgccaagtactccaggtctcgggcccagggtctggctggggtgggcccagtgagagagtcagccagtaagagcaggcttggaggggggccctggtagagagccagccaatggggcagtcagttggagccaatgagagcaggctttgaagggagggcgtgggcccagtagaccatcagccaaggagaagaggctctgggtatgtcccgtaagaagacaaggctactggtatagacttggggggacccaggggcagggtttattggggagagttggggtctgagtgggtcccaccttatgcaggtcagtggataggccgtggatgggtttggtgtgcaccccaccctccaggtgagatgactgcctgttttatgctctgtggacctgtccagaggtacagaatagagaggactccttagggctcccaggccagccaggcaccatcagcccctgtcccccaggaacggctggatgccgcccggcaggcattatctgaggcacggaagcagagcagctccctgggcgagcaggtgcagacgttgcgaggcgaggtggctgacctggaactgcagcgggtggaggccgagggccagctacaacagctacgggaggtgagggccagggtgtgccccctctgtccccaagactgtgaggccctaggatagggtggggacgttcccacccatctcaacctcatcccaaaccctggtgcagcctccagtaaggaaacatggttcattcagagcatagtcctgttatacagatggagaaacagactgagagagacaggtttggcttcaggtgacaattctctgatgtgggcctcaccgtcgcctgctctgtgagtgggccagcctcattgtccccaagcttcagataagtatgctcaggcccagagggattcggggcctgcctggcttctgttgcaggtgctgcggcagcggcaggagggtgaggctgcagccctgaacaccgtccagaagctgcaagacgagcggcggctgctgcaggagcgcctgggaagcctgcagcgcgccctggctcagctggaagctgagaagcgggaggtggagcgctcagccctgcggctggagaaggaccgtgtagccctcaggaggacgctggacaaggtaggctgctccccaggctctcccctcacttcctctggggcctaaccgtggtggatcccactgcacatccccagggtctgctacctctggtggggttaggttattccatcagggttcaggaacctgagccccctcagtaagctcctcctggcaccctgatctcctgtggctctcctgcctaggtggagcgggagaagcttcgtag

SEQ ID NO: 51815 - DNA, 1044 bp, Homo sapiens
aatttagcctccagccaggcacactggggacaggtgggacctcctggagctgcctggggggcctggtgatgccagcctacggcagtcatactgcccacactgccaagagcccacatgggcaagggccaaagacctccagcccaccagcaccaccccctactccaccccaacttcagggcgtgcctccatttttccagctgtcaagaaagcccttaccaagaggcccaggctctgtgggctccagctctgcatttcctggttctggtgtggagacagaggtaggcagacatcactgggaggggtctcctcagggcaaggggagtcacctctcccagccctggcagacccccactcccagggttgacagggtggggaggggtgaggcaggagctgagacgggtgggagcagggtctggggcctacctggggttggggctgggatgacttcctgttggacttgctgctgggactggaactggaactgttcctcggagggccgaggagtcacctctgcagccaggggaggataagggggtctgctccctctacccctcccagggggtctccccaccccagctgccggcccgtcctatcctacccctagcccgttaccttgataatcatagtagtctgggttgtctgcaaacaaagatgaaagtggaattggtgggagtaaggctaatcccccagcccctggggcaaacaagttccctcctgagccagggaccaacccccagagttcccatcagcgtgtccagtgcggtccctggctgagccaggcacatctgagcagccaggcctcggtgacccggcaaggcccttaccgatctggtcgctatagtgggtgtactggacgtggtcagggaacggcggcagcgggtccaggtcatactggccctgagccagcaagcctgctgtggggaggcaaagcatgtagggtaccccatcgggaggggcaacgggggcccgaggcgcttctggagagtggaggcgggggtcacaaggtcaggcccataagagcctaggaccccacaagcagattcc

SEQ ID NO: 51816 - DNA, 1602 bp, Homo sapiens
gaggcctggtctcatttcctcttccccaagccctagcaagcaagctcaaatgttgcttcacggatgctgaggctgggagatttggagtgacgtattccaggtcacccaacagcttgtaagtagcaaagctagagtttgaatttgagtccaccgggctccaaagcccacattcttaacccaccattcagtctcccatgaaggaagtcttccctgagtctagctcaaatctctctgtgagccaaagcccccagacaccaaacttccctgcctgcctgccaggtcctggaggaagagccggctgcagactcagcatttgggacccaggtcttggcagtgatgagacccccactttgggagccccagctgcaggcaatggtgagctgaggggggcctgttgggtgcagggcagaggggtgggctccccagccagcacctcagctgcctctccaaccctgcaggaggagcccccggtgccagtcagcgtcctccaccgcttccccttctcttcggctctgcagcgcatgagtgtggtggtggcgtggccaggggccactcagcccgaggcctacgtcaaaggctccccggagctggtggcagggctctgcaaccccgagacaggtgcagggggaagcccctgagtccccctggttgggcattggcacagaatggggtgggtacccagcctctgtccctgccatcccctccttgtgacacctgcctctccctggcagtgcccaccgacttcgcccagatgctgcagagctatacagctgctggctaccgtgtcgtggccctggccagcaagccactgcccactgtgcccagcctggaggcagcccagcaactgacgaggtgggcctgtctcctgtcccacccactctgaggactaggcagagggaggctctcacgcaggcagagcccaaggaagatgccctgcctggtggctgggagaggggccctggccactgcatgacctctgatccaggtctgcccaccctccagggacactgtggaaggagacctgagcctcctggggctgctggtcatgaggaacctactgaagccgcagacaacgccagttatccaggctctgcgaaggacccgcatccgcgccgtcatggtgacaggtacaatggcatgtaggggcccgggctagcagggcagaatccgccccttcctggcagagaagaggggcaccagggattcctttttggggcatctttttgggcccttgcttcaggccaggtcctttttaaacatttcgtgaatcttcacaatatcccccccgcaagtggtaattgtcacccctgtttgacagatgaggaaactgagactcagaggagtggagtgacttccaaggaacccatgtgcgctgtcagacagcctgggttccaggtggcacctctgagaaatggggataatgatgtcagcctcagaggctgtgacaagctcaaggagcaggaagagaaagattctggccgggcacggtacttcatgcctgtaatcccagcactttgggaggccaaaggagaaggatgtcttgaaccctggagttcaagaccaacctgggcaacatggcaaaactccgtctctacaaagaat

SEQ ID NO: 51817 - DNA, 1141 bp, Homo sapiens
tgagactgagtccatacctctgtgttccaggatagttcctggcagctcttcactgtccaggtgcagactgaggccatcggcgagggcaggtgaggcagccccattgccccttcccagaagcccctgctaccctggcctccccaacttccccaaccctcggcccccccataaaggctgactctggcgcctcccatcctagggagggaagatggctctgtgagcacagggaggtgccagggcagctcccagagctcgagagtaaccctcacctgcttccccagcctggagccgtccccacagtcccaggcagaggatggccggagccaggcggcagttggggcggtaccagagggtgcctggaaggatacggcccagctccacaagagcgaggaggcggtgagtgtcggacaggtgggttctgaaaaagtccttgcccctctctcggcctcggtttcatgatctgtgcaatgggagagtcagacttcatgttctcccaccaccttttagttctgttgtcccaaacatccaggatgctgtctgagcacgtttacactttcaggcctctccccacctctctgtctggtgacaccagtccctgccccctacccccatccctcggctcccagcataagcacactgcttctggggccggggccagcttccaacccatcctctcctctctcccacccagaagcgggtgctgcggtattacctcttccagggccagcgctatatctggatcgagacccagcaagccttctaccaggtcaggtaggagtcagggcctgtgtggctcatgtcacctcccagagtggcactggtttgggcacagacggtggcatggcatggcctgggctcccctctcagctctgatgcttttgctgtctgaaaccttgggcaggttactgagcccctccaggcctgggatctctgtctataaatagggcatgaagataacttctgcctcctaggattgttttgatggtgaaatagataataatttatgtagagcttggcaccgaatgtgatctgaggttgtgacaccactgtgaatcagactatcagctctgtactcagactgtctgcttggggtttagtcactgctctgccacctacaaaaggcttaagaaacatgagctca

SEQ ID NO: 51818 - DNA, 1333 bp, Homo sapiens
gtttttaatccatttctgttgtttccaaactcagaaagtccggtttgtgtttgggacttgttgggcagattgacccagtgtggcaggtgtgaaagtgcaggaagccagagccagctgccggggccacatcctggttctgctgcctatagtggcacgtccctgggcacatggcctaactcactctcctcgccttggttccttacctgtaagtggaacttgctggagtcacctcacaggattactgtgatgatcagttaaggaaagcgtgtaaggcgcagggcctccgtcaggattggcagtggcagtcactggggatgatgttgatgttcccagtgaaaacctgagggcccttctgctgagcccagggcagaagcagctacagactcttgctgcttcagcccctaggcttttgaatctctcccgtcttgacctcattccaggaagctggaatttatgggagttgtttttgtgttcttgttttctatttcttttttagacaagtgagaggttcttgtttattaaagggaaagtgcactatacgtggatttaagaaccctgggcagatgtttacatttcacttgcaagatctttattaatctgctaaatatctgcaaatcaccccttggattttgctaagaaaattcacatgcaagtaggcactttgttcatgcactgaccccaaaggtaacatttaatcagctgaagacatagcagagtctctcccgtcacaagctcctgcctctcttttctccccatacaggacgggctctacgagtgcattctctgtgcctgctgtagcaccagctgccccagctactggtggaacggagacaaatatctggggcctgcagttcttatgcaggtgaggtgctccttaattgctttaagagaaattgaaactcaagcatccagaagtccaagaggacaatagattgctgtaagccagccattctgaggggcctggtttccttcattgccatccagtccaaacagggtaattggttgcattgtattcacttgctttcggtaaatctggggccttgtctgcaaattgcctttgtttcagtgcagtgagggtcaccccaaaggggtgcaaaccatgccttgcagatgtttaaaatgtatttccgtttgcctggtggtcagaggctccccctctccctctcataggatttgtaacataagacttgtagcgagcaagcaggggagaaagcagtgtctttgaagggcagctgcccagctatgagattggaagctgtttcccagctaatgaaagcctggatttaggggttgcttagaaagaaaatagtattgatgttcactgcaaagaaag

SEQ ID NO: 51819 - DNA, 1733 bp, Homo sapiens
tgggaggatcacttgagctcaggcattgaggactgcagtgagctgtgattgcaccactgcactccagcctgggtgacagagtgagaccctttctttaaaaaaaaaaaaaaaaaaaaaaaaaaaaacaggctgatttttcttcaaaacacgtgacacatggagctagaactgctgtggaaactccatggtgccagcagcgcccaggcctctggcctcctccagtgccatacttggcatgtggcttctaacctcaaggttgccacatggtcatagagtagtttttggaactcaagccattagaaccacattcgaggcaggaagaaggaaggaagggagaaaagccaacaggcacctctgtcagaggaatgttgcatgtcagtgctgcccctgatggcacagcaaggaggatccagaagaaagtatttggggcaggactgattccggatatgggtgaggatgtgttaaatgtgtgtctctttcaggcatctgtggctcttgtgcaatgaacatcaatggaggcaacactctagcttgcacccgaaggattgacaccaacctcaataaggtctcaaaaatctaccctcttccacacatgtatgtgataaaggatcttgttcccgtgagtttctgcatctctctggttttgtttttatttgcatggggggcagtgctatgtgtgttacgctattagtttttcagggcaggatttgtttgagtatttaaggctcctcttctagtcagatagtaaatagatgggactgtttcctatattatggcaggaggaggaccacagtgtcactgagagattaggaaaatctccagatctgagacagtgtggccagagtttaattaaagaatttgaatggcagaagataaacgcctagaaaatcctccagcagctcatttggtgaggtttgtttgagaataatggggcacagaattttagaattggaacattcccagaaatgaataatttggccataactacaaagaaatcatgtggaaaatgccagttgggaaagcaacagctgtttatgagtcccactttaatttctacctccctatatttgaacacctttgctgacgtggtgttttcaagggcagaaaggactgtgggattggcaggtttcccaagtaggtgagggagaggtttcctaaccatgcttaacattgtgaccatttttccttttgtaatctttgcatatattcatgacaaaggaaaagagtctggcttctgcctggcatagagtggacgagtagtcagtgtccaagaaatggggtaaataaagctgaggtgatgatggaatctgatccttttcttcttcttcttcttcttcttcctcttaaccacaggatttgagcaacttctatgcacagtacaaatccattgagccttatttgaagaagaaggatgaatctcaggaaggcaagcagcagtatctgcagtccatagaagagcgtgagaaactggtcattagtccctatttattgtttcaatctgaagaatttattgcaaagatgattgccaggagtgtggcttggcagggaacataagctgatgcaagccatttagtgtattctggagaggaactggcacaagggtggggcactcatcctcttagggccgggtgagtagtgtgaacccgtgaatggcccagagtggaccaaggagctagagccctgtgccccgcctgcaggggcgggtggttgctgtgtggctactccatcttttt

SEQ ID NO: 51820 - DNA, 1099 bp, Homo sapiens
attaactcacctccagcaatcctgtgggatgcaggtgctgctctctgcactcagtggattaaatgcctaggcagaaattaaatcatttgcctgcaagctggtaagtggctcagccatggtgcagaccagtctcttggctgccaggccggcactccaggtcccacgcccagggatgctccgcttagtaccatgtcactgcccttgtatgttctaggaggctcacagtgatttgactgggggactgtgagtgattgggtgtcttttattctctgtactatgtcttctcttatggttatgtattattaattactatttaaaactattgtctacatcctaaaaatcaaactaaaatttgaaataaattatttggaaaaactttgcagggagcttcagaagtaaaaaacaaaaactcggccactgtatggaagttgtgtcatacttgtctactactactttagctttccatttcctagaaatgtgtttgcactgtgatcatcaaaatagaactgtgcagtacttaaaatgtaagaatctgcaaaaacaaaactacagaacaaattccgaaggtgacctgagaagaccaaatggataagctaatacatccaggtgtctccgattatattatgataaagtgtagggaggttgaacgttacataaataccactggatatttttctttgttagatgtggccccatggtattggatgctttaatcaagattaagaatgaagttgactctactttgaccttccgaagatcatgcagagaaggtgagcatttcattcctgttgggctccagatacttgtggtcttccaaagaggcttgggctggccaaagctgatagagacatctggaaaacagctgcagctctctgctgggtgaacttgctgtgcaacctaattccttttcttgggtaaatgcatccaaaattctaaccatggtgcaagttctggtttctgagtttactttccttcaggagcattctatcctgtggttactgcatctggcggtccctgtgagctgctccacgcttcaaggcctagctaggacctgctggctggcaccttccatgctgctgagctcttttattaagggagc

SEQ ID NO: 51821 - DNA, 1022 bp, Homo sapiens
atagcaagaccctgactccacaaaaaaaaatttaaaaattagcctggcatggtagtgcacacctgtagtcgtagctactcagaggctgaggcaggaggaccgcttgagcccaggagtttgaggctgcagtgggccataatcatggcactgcactccagcctgggcaacagagtgagaccctgtctcaaaaaaaaaaaaatggggctgatatcggtaagaaacctgcctgtgatgtgcagagactgcctatggacacctgtgctgccatcatcagtgtgaggggaggaggatgggggaccagggaatggggaacaagacagacgttcttcttcctttgtgctcttgtgtttctcgagttttctgcccatgtgcacaaattgtcccctggattcgtctaacagttctccttggtgtccctgcaggatgaaattgagtttggctacatcgaggccccccataaaggcttccccgtggtgctggactctccccgagatggaaacctaaaggacttccctgtgaaggagctcctggtaagatgctgagggccacttgcgggtggagcatgatcctggagattctcataagacagagtggtcaggagaccctgggccgccttgacacattcatctgctgcccagagcctctgtttctcctctgcaaaatgagtccacttgggatagctgcctctgaggtcctttcctgctctgataactgatgtttttccaaaacatagagagttttctagtgggaaatgggaactaagggaaatagagttaagacctagttccagaggccctggcccctgctgctgcccttcccctccaaattgcagcaaaatgagttaagtttcaaagaggaaaaaaacatagttatgcaattgtcaaaagtcatggttccaacttccaagttcatcagcactttgaggctatggtttttggtgcgtgtgtatgtgtgtgtttgtttttgttttctgagacaagagtcttgctctgtcgcccaggctgaaatgcagtggctcactg

SEQ ID NO: 51822 - DNA, 1068 bp, Homo sapiens
gctcagggtcgggtggctgtcctggatgacctgtgggactctcttcctctccaagccacgctttcctcaactgtcccttccttgtgggatgcaagaggccacggcgagcgaaggcatgtgccaagagctgccactcaatgtgagtcagcgtgctggtcctccctccttttctccagggggcctaggacttttggggggagcctgaggacatgcttcgctgatgtcactgtgtggagtgtacaaatggccaccctgctgctcgttggttctatatgggcatccaggctggagagcagggggtggggagatggagatgccaccagcaggggactggttcctagaagagagggcgagtttgggtggtcccagaggtgttcttcccagaaaagagagcaggaggcaggaggtgggcatggagaatgtggaggggggcattgacagtgttctccaccacccatcagataagacctggagcctcattaccaaagacttaatgagattcgctttgttttcttatgagccaggcaaggtgccaggggaagcggcttccagccccaggctctgcagctggctgctgtgtgacccagagccaggcaccacacctctctgggccttagactccttatccatgagcttcctgcctgcaccctaacattcagtgtcattggccgagttacccaatggctcccagcctcagtttcttcatctgcacattagggataagtacagccatccacctgggaggtgtcaagggggtgtggccgcagcacccagcccatgcacaagttcagtgatcattacctgtctcccccagccctgcctgagtgccaggatcagcaggcttgggaagggggagcccccagggatgtggaaagtggagagggagcacatgggctctggggcctcggggctcctgggctctgttctgcctgtctgggagctgtctcctgctctcccttgcagtgtctctgtctctcttcgttctgttcctccctctgtccttcagtttttccctctccatctcagtctctggttgtctcagtctctctttgcacctcactgtctctg

SEQ ID NO: 51823 - DNA, 1064 bp, Homo sapiens
tacatagacacagaggccagacacagaggccagagcactgattagacacctcagtgcgccaggcctcacgctgtgtgcatcacacgtgttatctcatttgatctcacgagagatcaaatgggatgactctcacccacctttattcccaagaatgtgaggctcagagaggggatgtcactggcccagaggcctcagcaagattgcagtggagctgggactggaccccagcttcctgccttaaactggggtgaagcgggcgttagacctgcagatgggtcaggggagccctctcctttcccttggtcaaggcttgaggccctgtgcgagccctgggcttgggtttgaatcacaagcccccacatatcctacctgtgtgacctttggcaagtcttctgacctctctgagcctcagttttctcatctgtaaagtggggatcataatgcataccttgtgggggtcaccgtgagggttaaatgagatgctgaacctgggcactcccctcggggcctgctcatggtaagcgcttactaagtagcagccatgaggattgtgtgccattgactctagcctccgcttccctgtccagtctcatctgcatgggcacaccatcaggctgagaaaatctggacccctgggaggtccccatttcacgcagtcaccccctgaagggcaggattggggctggatggtgtctgaatcccaggactggctggttcgctgctcagtgaacctataaaacctgactgatggtgggtgggtgggcagcaactgacccagctccccgctaagccaaagcaagaggattcctcatccagtgccctcgggcagttgtacatttccagtgacaggcgttaccacttccagtgaactcaaataaaggtctcagttcattccactgtggcaaccagaccctcccactccttataccccaagatgtgcacagtggccaaggcaagctcagacaggtggaacccacccaaggcctgggaaagtcagaggctgctgactcggcaagaccattagctgtgaacttggctcctgcctgtctgcttccctaagcagg

SEQ ID NO: 51824 - DNA, 1149 bp, Homo sapiens
tcagtagtccaggggagaagcttctgctacttcagagctttgctaaactaacctaatttgtccaaatcaccccaaaaccaccatctctgacgtaagcttccatgcgacagcctgatccgtttccctggacaggtctctttcctggaatgcagcccaggcacctgtgctcctggcacccttgaggtctctcctttgagccgtggtcaccgagagggttgaggacgcagcacccgaggtcccagcctttgcaggagcctccctgggcttagctggacttagatcttcggtggcctcatgtaaacgtggcagccagcctcttctagaaccctagcccagggactggagcaggaaagggaccttcaaagtgaagactgccttgtcccgcagctccttctggcttagattgaaaaatgggcttcctaatgggttaaatcctttaaaacaaggagttgtgggggaagggtgtcgtgcactcctagagaaaggtacacagttgcccggttgggaatgtgcttggcgctgaccctgcgggcatctgactggtcttccagctcaggaaaaagaatttgaaagaggcttagcgtgaaggggaatcaaagaggaggttgtgatttggtcgaaggtgcctggtttagtgctgtaattgtcttattattttttttatatatatatttcttggagtaaacattttaaataaacaacaacattgtctactgtcttggattttgcatttctttttcggttggaacggagctctgtttttcttaactccttatatgtgtacctcctaagccctggcacccacagaaggtggtgccaggagacatgtggccccaggggagcttccaggtttaaactgcactggttgaagtgagtggatcccccaactctgccccatgaaatgctaggggagtgggacagagtcagtacctcagttgtccaattcagaagtggagttctttgcattttcactggggctttgagaggaaaaaaataagtcatgggaggcatccagcgcggtgactgcatgtgcacccactccccagacttcagcagggggctctggtcaggccccggctgtggcttcaggccagtgctgctctgtgcaggcattgtggccaactgcccaccagagggcaccaggaggct

SEQ ID NO: 51825 - DNA, 1536 bp, Homo sapiens
ttgtccccccaggtcgccatgggctactcacactccttggtgatagcaagagatgaaagtgagactgagaaagagaagatcaagaaactgccagaatacaacccccgaaccctctgatgctcccggagactcctccgactccacacctctcgcggcagctgtcatttccatgtgcactgggacgggaagtcaaacgaggaatttaaaaaagcaaaagttgaccgaaggtgcatttttgtttagactccctgaggttccgttttacacatgatccaacgttaactacctttttttctgtatgctttccaaagtccttttttttcccttaatgttgaattaaaatacttgctcatagttgatttaccattcctacaaaagaggcagaaactttgagcaatctaggttttttttttttttaagttttttctttcttcctctcctgaatacactccccaaaacacccctttccagttacaattagcatcgtgatccaagcagatgccacatggaagaggaatcgccatttactcagaaaaaatgtcccttacaggaaccggcagcagctaggcagtcaccggcccgcctccatccaaaatcacgctcgcgtgcttcggaagcatccgggtcactccttctccgctttttcttgcagatgggcctaggccggtgtcggttctgtttctccccttggctgcctgtacgcccacagccttctggctgcgacattatagaatcggccgtgtcccccctggtgggggattggggatctgtgtttagccatttatatctactttagctgttaaagaggtccaaatgaaaatcaggtgattgtggaaccatggggacttgggggtggggcagaggtgggaacatttgtatcagttgagtcagcttggtggctccctgtggagccagggctgagccttgtcacgcgcactcgccaattaagagatggaccagccagcagtcaagtgcattctccagtccttgcaagaaggatcagccctttctgtgccagcctcgatcgccttgtgctttggtctctttttctcccccccgcctggatcctgcctcgcgcgggccgtcctgttgctgagactcggggtaccgttctgctgacccagctccctttagtcacgtttgcttggctctggtaccaaatagttgggattaccgaagagtccccttccttgcgtgtcagcacggatgctgtgactgccacctgcgtcctcgtcaagtgcccgagctcgccgccgtgtgtgctgcgctgagtgagttatgaggtgcctttcccggaaccctcctctcgcctggacccaagagaggcgacagctgtggctggggctcttggtttccagagggtctggactggtttgggtgctttaaaatagatatttagttcagtggtgcttatgggggagatgggactagaacttaagtgtgagacttgggtggatgggaaagttaaatattggtctcttcaagttttttttttcttttgctttgttaccacttgtcactgtctccatgttaaaa

SEQ ID NO: 51826 - DNA, 1784 bp, Homo sapiens
attgcccaactctcaggagacatagccctgttgcttctgattaaggaaagggttaagacttgtaacttaaataaataaacagaacaaaaaaggattggaaaatggagtccctggcagagaaaatagcaaactgggcttattgaatgcatgccattttgctacacttgctcctgttgcctcctcccccactgctggaggcgggaggtagaggatctttctgctggaggcaggcaaaggatatttctttggtttttggagacagggtttcaccatgttggccaggctggtctcaaactcctgacctcaagtgatccacccaccttggcctcccaaagtgttgggattagatgtgaaccaccgtgcccggctggtaggggatcttgaatgttgctgttcctttgcccttagcatttgcaccaggttgtctgcacagaaacgatgacccctcttgttgcctgttggaagtctgtttgttccaaccctgtgttttctttccttgcagctggtcctggactcccagaagcgagtcttctcctggggctttggtggctatggccggctgggccacgcagagcagaaggatgagatggtcccccgcctggtgaagctgtttgacttccctgggcgtggggcttcccagatctatgctggttacacctgctcctttgctgtcagtgaagtgggttagtgatttctgccccctggcttatcagtgctctggtgcggaaccgtgtagccattgtcctgtccctagaccacgaaccccaattctctttacctcccagtgttctttatttttttgagacaggaactcgttgtgttgtccaggccggtgtcgaactcctgggctcaagcagtcctaccaccacagcgtcctgagtagctaggactgcacaggcacgccaccacgcctggctccagttatcttttagacagaacacttgtttgccatcccgtcctcttttcaccctgataatactgaagatgagactcagctctcgatgtctggtcacgctgggaacatgttttgtcttcccttaggtggtctgtttttctggggggccaccaacacctcccgtgaatctaccatgtacccaaaagcagtgcaggacctctgcggctggagaatccggagcctggcttgtgggtaggtggcagcatctcctgtgggtatgaggtctcttcctttcatgggggtgtcagacacacccatggggtgcccctccctgatggggctctgtttctgctgcctgttgggctgtcctcagcaggccatctgacacactgaatcccagagtccgggggtacaggaggggagagggcccatttgctgctagaacagatggctgttccctgtcttgtgggaagaaagtcattttgaaggtttctgttcaaagaaataaacaagcagagcttgatgtattcctacgctgcaggttgaaaattatacgtagttggaaacgtagcaggacttgagttgctgtgacactgggaagacgacattgtcttggcagcagtggtttgtagttcatttcaggacacctgttgagttagctagcacttcttgctgaggagttggatttatcagctggcaggtgtgggtggaacagtatgaggggcctctgtcggcgtggctttaatctgttgaaggctctagccctgcccaaatcattatgcatgaaggctgctccctctggaacaggctttcactttatcctgatctggtctcctcttcccaaagcgacctcccactgagagagagctgtgcaggatgcacagcaagg

SEQ ID NO: 51827 - DNA, 1100 bp, Homo sapiens
tcttggtcttttaggggctccttgtggtccctccagtggggtagagatcttacttgatagaccattccttgatcagcagcttcaacttttttgactgcaacccattgtaagaaataagttttcttttgcaacccaatctgaacgtataataccttacctggaattgttgtaacatggtgccattattatgtgtagagtattctttgtcattctgttctattcgtttttaaaaaataactggtcttagctcacaaaattgatttcactgacccactcactgtgctgtgcctaagattggaaatgctgcctttgttgaccaacgtgtgctggtctaaggcccagaagggccagattggggtgctgccggggctcactacagagtccgtgtgagcacactgacacgtcccttgtgcttgtgctgctgctgatggccggctctgtggtctctacaggacacaactcagatgggaagttcatcgcccgggcacagcggatagagtacgactgtgaactagttccccggcgagtggccatcttcattgagaagacgaaagatggacagattctgcctgtaccaaacgtggttgtacgagacgtggcctgtggcgctaaccacacggtgaggctcggcttttctcacttcctgagagtcgcaccaggatggaaggggtgtttatgctcaagtttcctgacgcttggctttggctaggaactgatcccaggtagacatctgcttgcttcttcaagagggctttgcaccttggccaaagggtccttggtcccagggcagggttccctgtcactgcctcctatgttaacttctcccgtgatttaaatagacacatcttaaacacgtagatgttttgccgccctcacctgcaccttaaggtaagcactttctgcttttggcttttatctaacataacatcacagacatctttccaggtcagtagatggtgccccatactggggatgtgagtcgtttttaatcagtaggttgtcccccccgcccccccccccttttttttttggagacagtttcactcttgttgcccaggctggagtgcaatggcgtgatctcggctcaccacagcttccac

SEQ ID NO: 51828 - DNA, 1074 bp, Homo sapiens
tctttacatatcttctaagctttgtgttctagaaatgccttcagcttttgccttcagaattactgagtttattaaacttccgtttgtaacctagtaattgtttcccaccaacatgcagagaggtagaggctttttatcagtctttaaaaaaaatgaaagtctcctttcttgtcttttcagataatgtacaacggccagccaattaccaaaatggcctgtggggctgaattcagtatgataatggactgcaaaggaaacctctattcctttgggtgccctgaatatggtcagctgggtatggaagtacattttttaaaagctctgtaatctaactgtatatattcagaactagagatcagtgtggggctgcacacacgtgttagaaatgtgggtaattgatctcagataatagcctttgtccgttaagtggatctcacgttcagcagaacagcgcgtcctcattcacaggattatggagtattgcaacactgcctcaatggaaaagttgggactggagtcctacaaaagatttctttttttctgatttgggaattcatttatataaagggatttcaaagttaaaaaaaaatcagaccaccttcattcaatttcacatttaaagattatgcctttattgaaaatgagaaaattacggaaaatgaacgttgttctggaaaccctggcctgggcgattatttcgggttgccacgtgaggagccctggtggaccccctccccgtgcgtcatccctagccagaatctagttgtccagaaacttgtttcttcgatctcattggtggaaaaggagaattcaggcatcagttctcagttagtggggggagtgtcttccgacctgatggtctccattctccttcccatcggaccctaagtgcggttccctgaagtgcgcttcccggttgtggctctgcctccactccagcccctctggggaggcctccgcgaggtgtggcgcgggcgccctctgctggccgcgcgcgctcctgcagccgcagcgcctggcagatggaaaaggtaaaaatagcgccgagcccgctggccttagcctcggggaaca

SEQ ID NO: 51829 - DNA, 1054 bp, Homo sapiens
atacttcagtttgcttttttggagttgttcggctttcccttctgtttttcctcacctgggcactcgggatgggttccagttcttctgttagcctctgtccacggcactgtcctctgcagccggccggcccattcctgcccgtgtcctcttccagatcattccaatcatagggtatgggctaaggctcattttatccccagcccttttggtgactcccggcctctgcctccagcggggcatattggcgtttgtccccaccctttgtcgctggtcctctggctagcttttagtccatatgactgcatttttattttgggctgtttgaaccgttttttgtgatttcatgagctgctgtaccaaagtccaaatatattaacatctgttgtcttccctgcacatggctaattttgtaattctgttgaaaaaagctaaagtgtgtctggcccaaatttatactttatagtctcttgatgacatgctgacattgccacagtttttgttttctcccggttggcatagatgtgtgtcccttcccccagagcacccctcctactttgtgttccaacactgaacacagccttttatgtcagtgttccaaacttaaaatacctcagttctgatctctcgctgagcttcacttgcgtggtggctctgaaagcgccctcagttctgaccctgtgggcagggacaatgtatgtcccgccatcaagacgtgtgatccccgagcagacagtgcagttggtgaggacagggttggaaggtgtcacaggcccactgctcgccactctagaaggcagggggcggcgtctggtgtgagtagagtaccacgggagggtggctgacgcattgctcatgtggggtctccatctgtggcccgctcaccctgtcctgccgcatctcagtccactgagacttgcacttgttgctctgtattcacatgcctttcacatgaacttgggcagctcccattggaagctggtgtatctgcctctcctgctcgagtgccagtgctggcccttcagcccgccgttctttaattagagcgagtcagagg

SEQ ID NO: 51830 - DNA, 1955 bp, Homo sapiens
tgaagtatgctggctgctgtgacagcttgttccttgagagccgggcccctgggaggtcctgtttcactcaccattggctcccgggctcatggacagcggcatgagggtgccatcaaaggccgcctgattcagacccctgcatacccaccaaagctgtgttctgcctggtctcccttcagtggagaaatcgaaccttgttctctactgttttcttcctgagtccccatggaaaggctctcggcagagtgggcagcagaagtgatgtgaggctcctaaggtttgaggtcgcaggccgtgcttgccatgtgaaatagagacttggccctaggatgagctggatttaacgcccctgagtgtccggcaggcttcctgcaaatacctctgtacatcagtttgcgaaggaggcatgtatttgggttttttttttagtgttttgcaaaagctattttaaagggaagtcaaaggataaaaatgagcctgggcttagcaagtgagcggctgtgggcaggtttggggttgcccgcattgccacttgccgatgagggaggggagtgtggggagactctgttcgtgtggaggtcacaggtgacataagggctaactgaatgattttctttcgtttcgtgctgtcattggacagccttggaaagctaggtgcagacttacacactaattcttttttcctttctctgtctctgcagaaacttgaagggtcaaagtgcaaagggcagcttttgatttttggggcaaccaactgggacttgattggtcgaaaagaagtgcctaaacagcaaggtatgagaatggtgcctcaaaaacccattgagtgcttcttaagtgctaggttctgttgaccacctgcctggtaggtattcccttcatttacaaatgcattttcacagaggccaagtgacttgcctgaggccacacagccactgtagtgatgagctggatttgaaccctaatcttagtcttttaaaggcacaattttgaagtgactcactaattccgttaagattaatcaggaaaatacaagtagtatcctcaaatgaacattgccaccttttccatcttccctctcacctcacttgttttcattaaaatgaagagaccaggtctgtgagatggtgtcagaatgtcctagacatttgtcaaatgtcaggtgtcaaaatttcaggcattgcagaagagtccacgtttctttgcaagctgccaaattgttgcaggaactggtttgacagaacagtctggagcgggggaaagcagagaggtccttaagaagtaatgttttgtccccagttacctttggaaaactggtgtcttaagggaaaaggcccatccaggagaaggaaggctggcatgtagccaacttttatggcttcttgatttcatctggaaagactcccaaagtgctttccagcattgctttgccccatgaacaaatatttgcacgctggctcgtcttggcaccttaaaacaggggcgttggaaatcaccttgttccatgaaaacacctgggggccagctgaattagaaatgggtttaagttgcaggtagcagcagcgcgttgtttggaaaatgcccagccttcaggcccaagccagagggggccacgtccacatggtggcttttgtcccagggaagcacctcctggtctacagtaacgtaagcccaggtgctgatggcgccttgttgccagtcctgtgcccgtgttgcatcatttctcaaagccgttcttcaactgagcagcccagttgacattgaagatacagaagcccagggaagggcagtaaataccaaaggaagcgagtggcagggccagggttggagtcccactctctagttaactctgttgcctcccgcgcatgtatgttgctgtagatctggtgaaaaccagcagcctggatgtcttggtttttgcaagatagcaccacagcaagccacacagtagctct

SEQ ID NO: 51831 - DNA, 1175 bp, Homo sapiens
gggcactgtgtttccgtgccctctgcagaccacccacctggtacatgttcagctctccacaagctctgtgacctggtccttacaggtttttaacggaggcttcattatgtaggcatggtagattaagccattgatcatcactttaaccttcagtcatctccctcctgaggttggaggatggggctgaaagtccctaggctcccactgccccatccggaagctgcctgggggctgccagtgtcagtcattagcatacaaaaagacattgctttggagattccaaggatttgggaagttgcatgccaggaactccaaatattgatggcagtgtcacactagggtagattcagtcctaattctttgcgcacttcataacctcctaaagcaagtaaaggcagcagccttggccagatcctacaaaacaggtgagtgttgcaagctgcccaggtctttgtagtttttccagtcttgggttgccaaggttttgtggaccctgagacagatgtgttgaatctgaaaggagcaaataaataaaactgaaagccaacccggaagtctgtttcagttgatggcccttaggtaattggtcgatgccggcattgttcccgggggtcttacctccccggagcagcggtcttctacatggacctatgttaaaaggttgactctgggccccgtaaacgcgcaccttgcatttggatcataattcaaaaattgctttagactagaaatcccattttgttgattgaagaagctcagtgccttttctgtccatttctgtgtgtctctgcccaggttatgtgaccaagttgctggaggcagccaggtgaaatgacatgaaaatcactcatctcattgggcagactgtttgccaggctgtctgctgcgtggcctttatacacaagcagggtcgcagacactgagttcgtccaaaaaaacaatccgtaggcccatcagggaaggctggattccgcctgggagggcacactgagcttcagacacccacacacccactggcacccccgccctgccccgccgccccgggtggagcccgcaagcgcgggagtctctcccacgattggctgtttctggtctctgaggaagaggagcaccccttaagtgagaaggggtgctgggagttctctgttactctatttaaatgttaattccacata

SEQ ID NO: 51832 - DNA, 1676 bp, Homo sapiens
tcagagcaaaagatccttaccccatgctgagattgacccaaggaggtagagacagggagtgtgtgagggacactggctctccctggcccacctctgtctccagctgtgctgcttgaagctgctttgtcaatggaaatggcacatttgttagtcttttttttttgaggcagagtctccctctatggccaggctggagtgcagtggcacgatctcagctcactgcaacctccgcctctcaggttcaagtgatttttgtgtgctgatcagcctctcgagcagctgggattacaagtgtgttccaccacacccgaataatttttgtactttttgtagaggctgggttttaccatgttggccaggctggtctcaaactgctggcctcaagtgatctgcctgcctcagcctccttccaaagtgctgggatgacaggcgcgagccctgtgttgggttgcatgtttgtaagtcttaatgtgagtaaacagcagtccattgcagcttttaagttcctgtttatacacataaatacgttattattttacatatgtgtataagcaggactctaaaagctacatcttcctttctctatccacttaaaaccaacaggggcccatgatgcccatcctttgggctgtcggtgctgttctagaatcagagcacctgggaggctgagggttcagcatatgatgcccctttatgcctcatggaaagtgcacaccctacatttaagttttgcttttttttttttttttttgagctggagtttagctgttgttgcccaggttggagtgcaatgttgcgatctcagctcactgcaatctccgcctcccgggttcaagcaattcttctgcctcagcctcccgagtagctgggattatagacgcccaccaccacacctggctaattttttgtatttttagtagagacggggtttcaccacgttggccaggctggtctcgaactcctgatctcaggtggtccacccaccttggcctcccaaagtgccccacgtttaagttttgttagcatctactgagtttggtccatgttcggggctgggtccatgcagccccattgcctttccataggcctagggcagccctctgccccttgtcctgggttggcctcctgcccagtctccctggccccaggtttctggtctctgtttctctgttgagcagtcctagggaccctgtgtgctgccacaggcagacagcagtccttgttgcagaaagaaccttttttactgagcattttgcatgccttgccccgctcagggttgctaggaggaggtctgtgtgaaagcagccgcccaggaaatgtccaaaaccatattgccttcagtgaccccaaagctgcaggtgtcgggcttgtagaagatgagccaaatacttacattgttgaggggcagaattgccttgagtaaaagatgtgcattttatagaacattcttatggcagatgagcgttgtcattgcctaggtgttaagaaaaaattcaaattcttttttcctccgctctcacggccacactcaacaaccaacaccagacttcttccgcaccccccaccccagatggagtcttgctctgtctcccaggctggagtgcagtggtgtgatctcagctcactgcagcctccacctcctgggttcaagcaactctcctgcctcagcctcctga

SEQ ID NO: 51833 - DNA, 2022 bp, Homo sapiens
gagaggagagcaagtgacggtgagatcgtaatggaagtggggtggagaggtggagggtggagaccggtaggaagcaagcaaggcttttttcacccgtcccaggacacgcgaacgagatcaagcctcactgcggttcactagggtctatgcaggccctcgcacccctgcctacctcctcagaacccagcctcttggctcttctcaccccagccccaccagacagcttccctcccaggaggtgtctctcaagatctcgaaatgtggagcgtcccgttcactccacctggcctggaatacttttcctgccccctttcatcgggtcttattcatcctttaagttgttcagcataactttccacctgaatgccttccctggccctggactaggataaatcccctcgccataatgttcctacacaggcatcactttgtaaagcttaccactgttgtaattacttgtttactgatctgtctttccgttaggctgtgcgttccactggggtggaaaccttgttcactggctctgcagccccgggcactgtgggtcttgcatgtaccgggggctcagtaaatatttggcaaaaaatgaaaaagttcccctcaaagccagcttccagtgcctccacggccctcaaattaattatgaattaattcactaatacagcaaacctttatgtgattcttccgtgtcacagcaccttgttacatactgaggacacatccacaggcaaataaaactcagcttctctctgcacaggaaaaaattattcaaattgtattcatctttcattccaatcactcaattagggcacgtcccttgttggctgctgcgtgagcgaagtaactattttccagcgagtgtcctcatgtgacctgtctagacgtgcccaggaaaaacaatccaacatcctcctaagccgcaaagaagtccctgacgcgcaggccgcactgcgtggaaggcccaaagcgcgctcgcgggcccgcgaaaggcgcaggagcagcggagccgaggcgggcggcgaggcgcgcggcgcgcggcgcaggctcgggtgggcagggcagggccaggccgggcggggcgggggcgccggcaacgggtccgccggccggcagggggcgcgcgcgccccgcgccccgcgcctcccgccccgccgcgcgctcgcttgccgcgcggccgcacatgtgtttctgttttgtgttgtagcatttgttctggaagctcgtatttacattttaagtgtatctggtgagtgggctggagccctcgtctgggccggaaaaaaaaaagccctccgatccgtcttttagttgcttctcttccttttttctctccggtttctcatcactccaaccaggtagggtctgaaaatcgacagtgatcagtttgtggggtctgggaaagtttttttttttttcctttttttaaagagaaaaggttaaaaaaaaacctgggggaggggggctgggtgattgaaggaataaaaagaggaaggaaggcggatccacgtggtttaatcggagacagacagagatcccattgttcaaaatcaattaaaaaaaaaaaaaaaagcagacaggggagagcgcagggacgccggggagctggcggcggccctggacactttgcagtcgaatcggagaccggccgggccgcacggccggcaagggggctgggagagagttgggcaccattaaagtttttatttttcgtgtctgtgcgagcaggtgtttggggctggggtccagctttcttcgggctcttcccccgtcgccgggggcagtccgccgtagggattcggctaactagagcccgaggtcggcacccctgagctggggccgaacgggggtccagggctgatgcggggtgggggagagcgttgcattaaatgccatgagtgggtttggggggagactgcggagacaaaagcagcaggtggggtagccggggagcaggggctcccttaccacccaggtgccaagggggaatcctggaagtgtcccgaagccttctttaatgaaaat

SEQ ID NO: 51834 - DNA, 1027 bp, Homo sapiens
actgtttcccttggcagtgcccctccgtgagctccagctctttcctgccattcttccgtctgtacacctgctgggttgcagggacgcacatggacctccctttccctgcctgcctcatcctcctggggggctttgggtaggtcccttcccatctgagcctcagcttccctgtgtctaaaaaggaggtgaggaaacccacctctcaggctgcctgcagcctaaacacactctcatgctaagtggcgagggcccagcagcgaggacgcccagcagctgggaggcgggcatccctgttgtaggtggggaagctgaggctctgatgggcgagttgatggcacacagtatgtgtcatgccagctgctgtcccctctctggcttccaggtgggagccacggtgccccatcacagggacacccctgatgtggggctgagggtctggggttctctggagaagaggggggtcagttcagctgatggcaggtggcttcctccggcacttcagcttcttcactccttctgctgggctggatcgccggggacaaaggggttaatgtgtctgggggctgggagggaaggaggaagagcaggaggaggaggtagaggaggggggctggagatagagtctggggccgcccccctcccacgctgtccagccacttctccaggctggctctggtttcccaggcaacagcccccaggggtcccctctggcctggcctcagggtcggctccttcccacagagacctactcccagggccccctccccagtgctccccactcttcctgcctgcagatcctcaccaggggctccctaggaggtcagtgcgggagggtgggtgccaccgactctgggctcaggacagagtctccattgtctgaggctccagccattgaccaaacttggcccctgccccagtgaggcaggcccccttctcagagctcccctccccctccctggtgaagaggaaaggaagttggagccgcccccacctcgggaagccctttgagtgtccatcaggtcggtga

SEQ ID NO: 51835 - DNA, 1039 bp, Homo sapiens
attcctggaaggttgggggctgagcatgatcctggactctggggccagatttcacctgtaagccagaggggatgaggacggacacccagcaggtccctgcaggtcccttggcactggcaacaggaaggtctgtggctgcagggttttctgggaagaaggatttgggctgcacagctgctgatgtttctatgggttaatgatttatgaaggctggaggctggggcctttctggggctgccctgtgctctgagagccactgggctgaagcacaggttgtgagccagtgacttgtctcagtagctgaaactgcagccctgactccagctaatgcgatttctggtcttctttccacaggtgtgtagctgggacggtgctggtctgagctggaccttgtctgatggcttcctccaaccctcctccacagcctgccataggtaccgtacccagggcttcctgtccctctcatcctttcttagaagggggccgctgggggccggcggagggccttgctctggagcagcatggcgccgggtgggaagtctgctctgctggctgctggccctgcctgggccgcatcctctatctcacgttccttgtctacaaaatagaagtaactttctgctcacggaggaggctctgagcaagggtcaatccttttcctgtctccctgagatccgccggagaggtgaacacacgggggtctcaggctgaagcttataaatcaggggtgaggaactgaggttggaggagagggttgcgccatagggtcaggccgttgaacagtggtagcattgccgcatttagtgaaaaaaagagaaagtaaaagaaaaatacagccaggcatggtgtctcatgcctgtaatcccagcactttgggaggccgaggcgggcagatcacttgaggtcacgagttcgggaccagcctggccaacatggtgaaatcccatctctacaaaaatacaaaaattagctgggtatggtgtggcacttgtaatctcagctacttgagaggctgaggcaggagaattgcttgaacctg

SEQ ID NO: 51836 - DNA, 1050 bp, Homo sapiens
ctcatgtccaccctgagctctcgctgggggagtcgtggttgaaagagcagccctgagtacccagcagtgcctgggaaacgtgagcgccacagatcgctggcttcctgtgtttttcctggactcaggcctgcacccctcacctctgagtgcaatagccccatggactctggccccctctggagttgtttgcttttcctgtttagttttgcctttatccccctgtgacctcagcacttttctgtgggtcagggttttggctcctggccctggtcgcagggattctcatgggctccctgaaggtacctggcctaccccttcctgggcttttctggataagatggttgtactgcctgttggctagtgtctctcattggggcctggagccaggggaagtgatggggcagccgtattctgggagaggacagggagactcatcttccctggatgtatcaggggctgagaggatcagggcaagaggagaccaggctcagcaaagcagtattggcacaggatggaaacagggcgctggtggcctgtggcttctgagactgctaggtgtgggggacataggggctcatgggaagggcaggtcagcaaggccggagtgggtccgcagcgtctggaggaaatcttcaagatttcccagattgccgcagacctagtctggagttgtttggaatcctgggcttctccttacatgtgctgtttcccaaatccggaacatttgagcctcctgcgtcctgtcccgcagggtccatgcgggacgtgaggcatggcagataccggctctccgcccatggagtcccccatgggagggttatggggaccaggtctttctttccattaaaaatctttctttaaaggtcccttgccaaatccataaattggacaagctggtttttgtgttttctttccttcttttccttctccgagggtagaaacaagggctcccagtttccaatcagagccaggacctttggatcccaggccctttgaggacccccacagcctcttcattgaagaaggcacttgcagggtacctggttggca

SEQ ID NO: 51837 - DNA, 1046 bp, Homo sapiens
tagtcccggctacctgggaagctgagataggaggatctcttgagcccaggagtttgaggccacagtgagctatgattgtaccactgcactccagcctgggcgagacaatgagaccctgtctctaaaacaaaattgccaaggaggctcacaatgagcgctgagaccatacaaaagcagtgctgggagcaaaaggaagtgagcgggcttgtgcacgtctgacccatttcttgggttttccccattttctcaggccctccttgccctacgagggggaaaatgtattatcatcttcgtttcatggttgaggaggtagagctggagccccagggcccccatgttctccctgaccccccctcgccccacctgggttcagaaattgggtctgaggctggaagtctggtaggcttggcctcagggcctgggctcaccggctgccgcttggccagcaggggcagagaggaacctgctctacgaggatgcgcaccgggctggggcccctcggcaggcggaggacctaggctggagctccagtgagttcgagagctacagcgaggactcgggggaggaggccaagccggaggtcgaggtcgagcccgccaagcaccgagtgtccttccagcccaaggtgaggggaccgggggtgtcgctcacctcagtcagggcacggagaccccttcagggagggagggagggagggagctgggtagtgagggccaggcctaggactcacgtctgggtcccagggattcccgggtatgtgtggtgagaggggagccagaagcccaggtcatcccgaaacaggaggtgactcgtagacattgctgttggcagccctaagcccgggatgggcatggctggtacctggcacaggtgctccccccacccccttgctatggcagacctggtcaattgatcctgatgctcacgggctcagactgggcttcagagtcctctcaacgccgcactccaggtagcccagccacttgcttagaggtggagcctggatcagatccacttgctctccccgccttctgggactgatgctc

SEQ ID NO: 51838 - DNA, 1995 bp, Homo sapiens
caaacttacagagaagctcctatgttacaagccctgtgctgggccacagggccggggagaagacacagttcttgccctcagagcattttcccttttccctaagacaggagacctggatttactcccctcccgcctctccgccccagcagcccagattccctgctgcagagacccggcccccagctgcctggcatggtggggttggacacagctggagcagattccgggcaggatctggctggactgctgcctgggacctggggtgccgcatcccgcctgcccgagctgtccgtccgcactttacctgagtctcctttctcccctgttgtctgtgttttgtctccttcctgtcccgcctgctcctctcacctgctttccttctgcctggccgcttggggctccagctttctccagacctgactaggctaaaggagagatacgccaggactaagagagacatcttggctttgagagttggggggagagacatgcaggagctgaagcacaagtacgattgtaaggtattgtctgtctgtcccctcaagccctggatgggggctgtttccagctgcagctacctccaagggttttcctgctgccctggtaccacgaagcctaccaggcccacccttgagtcccagggctgtcctgagacctggaccctggccacccttgcatctgtgctggaactggcagatgccttaagccacatgttcccttccatgttctcacccctatctttctccccacctgcaagtgaaaccctgatagtccacaagaattcccaggagggttttcaaactttaggacccttgcaatcacctggggtgctgtgttaaaaatgcaggttcctgagttccagccccaagggtgccacttacgtaggtctgggacgaggctcaggaatctgcacatttcataatctgcacagttggggttacacattgaaaaacgtgagtgttgctgacattggatgttcctatctctccacactattcagaggaatccaggataaggaagtctgtaggagaaatcacagtacttgcttaaacttttggatgatgatatcgacaacagtagcttccattaactgagcacctgctctgtgtcttggctaaaggcatggactttcgaggtctgtgggcctggtttgaatcccaatctcaccacttcctcatggtgtgatcctgagcaggccccttggcctctctgagcctcggtttccctgcctttgaaatgggggcattcacagtaccagcccccagggtggctttgaaggtcaacgatcaggcctcttgggtgtacggtgctgtgctgggtctagaagctcagtggacagtggctgttgttatctacatgcctgaccgccctgtccttgtggcactctgggcagtagctgcctttctgcatcttttagtgtcaagtacccggctagtggccacagcagtggttcacgacagagctgggattccaacttgggtctgcagtgtgccagagctcaaacgtcctccatcctgcagtgctgcccgctttattggaatgtgaagccttccaggaggaggagagcagaccctttacagttacgagacctttcacagatacccgcgagaggcctgcaacccagggtaggggcggggctaacctctcaggaagccaaggcttagagaggtgcccagagctagagaagggcagagtctaagactgggcctttcccccgcttcggccacacactgtgggaatgggtggattcggcaggtgtactcggggacaccttctagggtgttggcctgttcttttttgcccaggaaaatgccaagagaagggcctcagatgatcccttgaaagaccactttgggggctcgcaggacagcaccactgatggctttctgccaggacaggaactggattctggaacagaggtttcagatctctgagggtgtgaccccctcctcccaccccccaacaagaagaagatgagcgtctatgccatccctt

SEQ ID NO: 51839 - DNA, 1072 bp, Homo sapiens
catgttcaacattcgtggagtgcatttttctgctcagggagctttcccagacccggaatgtttggtgctcacagaccctggcaaggatcggtattgctgttcctcagttttgcctggggaaatggaggctcagtgacgttcagtgacgtgcccagagtcatgccattggcgggtggcccagggctccaggtctccagcacccctcggccccctcctcaccaggtcacatcatctcctggattagaaatctgctcacatagtctgtcctgaaaggaaaaaaatcggttacagcctcctgttgcccctaaagagggagatccccgggcatgaacgcaccttctcacccccactgtcgtccttggcctttgctcacggacctgggagggaagggtctgggtggttctgatctctgcaggccgaggcctggggaggcgggtggccctcggtagcaggcatcccaggccgtcccttccctgatgagcctctctacctttgctcagatgacccagctcatgaaggccgccaagagcgggaccaaggatgggctggagaagacacggatggccgtgatgcgcaaagtctccttcctgcacaggaaggacgtcctcggtgaggcgctgcccgagcgggagggtctggtgcccagctctgactgggggtcggggagggtgggattttgctttacaccccagaggtcatgctgggtgggtaccacttggcgtatggttcctctggtggtgggggttgggggctgagtcccaaatatcctggtaggtcccagtgtgcctccccctcctctggcaggcgtggcctgtcccttctgggagagctgggcctcttctttcagcgtccctgctcctgcttttgtcacggccgtcttggcctcctgccccctgcgctgtctggctcacctgtcctcatcttttttgttcctgttccctccttcctttatccatccacccatctctccaaccagctgacatttacggaatcctactaagcgccacagcctgtgctgcatgcagggacccacgatgcatgtatcagcagtgcctctggggccagctgttgg

SEQ ID NO: 51840 - DNA, 1054 bp, Homo sapiens
caaggagacaaggaatcccagtacagtgggctcacagctgatggaattctgggatgccagttctctttggaaggaaggaggctttgtctgctgcctgccctcggcacatggcctgatgcagcagaaggaacacaggcctcgagccaggcaggactttgagagcctgtgtcatcctagaaaattctgtaatctccctgtgcctcagtttcctcatccgtacagtggggtggctgtctgtcttgtagggctgtggtgaggatgtcctaggtagtatgaggagagagagagccccatgtagcagacgttattcttggtgggcggtcagtccctaagtggaggcgtttggtgccaggacggcctcgtgctggcctgttcagaccctggctctgcggctttctggctgtgtcgccttgcactttttcccctcttggggcggcagaccataaatgggttttcatctgtaacatgggttgagccccacccgtgcacttggtgcggtgctcagccagagtgggtgtgcacaggcctggcacaggctgggtgctcagtgaatgtccatgttccctctgcattttggggagcactgacccccgatgatggagggagcaggccaagtggccattctaaactcattgagatggtccgaagacaggataacgtggccaggccagctggctgggaactcttcctgggtcaccctcccaaccccaggctggctagggctctcctcagccctccccaccccgcccacaagcccagcgccttcctgaagtgaccctccctgcagaggcgatattaatagccgtggcagggctcgaatcacaggccaagaatgttacccagcagctcgtgggggaagaggaagctgcgaggcaggctggggtgggtgcggagtgatgcccggggcgtgatgtgggcccggcaggagggtctgcaccacccccacccccacgccgtcatccgctgtccctcctcctcctcctcctctgtctcctgctcaggtaagggcctattggggtgtctctaccccctcccacccttggggttgctgccg

SEQ ID NO: 51841 - DNA, 2795 bp, Homo sapiens
ttccagatcgccctgtcctcccgcgtggctgagtgggattccaccgagaagatcggggacctcttcgtggcctcggtaagtgtccccaaactttttccccagcccaccaaggtaaaaccacaaccagtctgaccccggggccatgcagtccagcctcctgcctctgcctgcttgccttgttcaagtcagtgggattagagggtggcagggtcttctgggcctgatctaggggtgagtgtgacaccttgaagtggccaggatgtccttggatatacctggcaggccatggtgctgatgaagccaggtggctgtcctggctcctcccaggtggcagcaccccctggcctcccagtcactgtgggcagccacctggccggtcacaagctctcttaccgagcacttgaggggtttcaagccagtgtgaaatgctgtgaaagaccacaactttggcccggagaggatgtgccgcagtgctggggaaagggcactggctcacgatccgggggacctggttctggtcccagctcagttctgcaacctagggcaggtccagggcccactctgagcccaggcttgccatctgtggaatgaggggtgcactggatttctggcttttctagctgaagtctgcggaccccagatgttcatggggtgagggaaggtcaagttggtagcactctactttgatgtgttttaggtaactaggttttgctaaaagaaaaaaacttttttttgaaagccacagcgctcgatagagtcactgaataggtctgatgttctgggtgtatatcaaggggctctggagagagagttgattgactccaggccgaccatccctcccttggtaactcaactctgggcacgctgcccggtgagaggccaggagcactttccttaaaggtggagggcaaggggcattcgatttcctgaacgtgaatgcagtagaaggggtgttccccctgcccttctcctccctccacctgtgggcttgggctgctgcactggggatggagacctgggaggcgaaggtcccctgggctctcctgtggcaccaccccatcccacctgtgacctcaggccagcctctctacctctctgagctccatgtccacaccccagtgggggtgatggatttgcacagctcgaggtcccaagggagtgtggggtgagtgcaggcgcccttctgctccctgccttgaggcggcctccctggcccacacctgcctcgtttccttctgctccctgcattgaggcggtctccctggcccacacctgccttgtttcagttttccaagtccatggtgctagatgtgtacagtgactacgtgaacaacttcaccagtgccatgtccatcatcaagaaggcctgcctcaccaagcctgccttcctcgagttcctcaaggtgggcctccatggtggtaccgtgcctggtcagggtgggcagggagattgctcaggaggaagggagcattttggccccagctttgggtatgacatcatagctttggcctggacagctcccctctttcttttggggcagcccagtcccatgggaagaaaatcgttccctcctgcccctgggaggagcgtagccaagtgtctgtaagcaactgggatcctggagctttggcagggtggagggaagacctgtgtcatcttgctgaccctttgcctcctgtgccctggtgagtgggtgggtctgcctggctggccctgtggtgggctgtggctcccgggttgctaagctggttccttttcctcatttataaaagggtgaggaaattccttataggggtatcttgggcattgcttgggagagtaaaggttaaaggcttcgaaaagcttctgagttctcatgtgcccagcctctgctgatttctttgggagtgtagtctggtgagtcagagcccctgcctgtagggagcctgctggctggcagaggatgcaactgggctaggtgccaggacacgcacacatgtgccggcagcacaggttagatgccacggcctcagtggaggaacccactgtccccatcaaagagaacaggggatcaggaggagccaccatctgacatgggccctggcgggggatggtgggattgtgccaaataaagacagaggagagcctatatcaggtgtaaggatagtggagcaaaggttagaggcaggaggagagggatgggcaggtctgtttggattctgggagcactgatgcctgttggggagtcccaggagagaaggcctgagtgtgcacactaagaggcggctgagttcagttgggtggttctagacctccaggcccagggcctaggatgtaatatttcaggtaatggggagccattgaaggattttgagctagggtagatggaagtggaggcaggtggagaaactgtgggattgcagcatatgggggccaggaccaggtaacaggtgtgtggatggagtgggggatggatgcaagagacaggacagaaggtccccctgtgccccgccccttaccctagcccaaatctgtctgcatttagtttaagtggagggaatggttgccttggccacttctagaagtctgacatcttgaataaattgctgagtttcccagttatgcctttagttcagagaccttaagatgactgctttagtctcctgagggtgcgcggccatgcaggggcactggtgggagagggatccctggctgcagaaccacggacctctctcagctcttcttgcaagcccagggataggcagggtcttagggcctggggagaggagcccagaatggggacagtgtctggact

SEQ ID NO: 51842 - DNA, 1081 bp, Homo sapiens
ctttatgggtgattgatcggttgatgtctctcctctcagcctggctgcagctctgtccaggagcctagggtacggtgggcattaataagtgttccttgaatgcatgcaggatgctaaattgcagcagaaaggaaccctggtgcccgaggcatcttctgtgggtgagaaaggcactggggtttcacttccccctctgtctgctgtctgacccaggaggctgcctcatgggccacccacaattctggaaattctgagggagtgattgcaccacctactcttgccgtctgggtgctggtccgtgacagctgtgcccacttccagatgctgtctctttcctcagctctgctgggtaggaagagtcctctgccccacgtgccttcctcggaggcaccttctgccctggctcaactgcactccctccccgccgcttggggcacagggttcctttctgctggtcatgcggtctagcatccttcatgcactccagggacgcttaggggatccctccttcggtgacaatgatgtgtctgtggccgcattcctcaaaccagagtcacgtactgccagaccccttcgaaaggggaaagaagttcttgtggaacccttcattatattgttattcaaatatatacaaacgcaaaactccctgtaatcaactccttctgcttatagcccttgaagaaccataaaaccaacaccaaatcacaaattgaataaaaataaagctacaaaaccataacattcaaattaacagcattaatgtaatgtgatggatgatgttgttttgctgaaaccaatttgttcacagtgtggatgtggctcaggccctggtagagcaggttcctctgcgctttcgtgcctgtgccacagggtgccctgtggggatctgcatttcccatgagctccccagtttgggtcactgcagagcccctctgatgtgagcacattgtccacatcccaagctcgccatgctctttgcttgttaccaggtgaccattcaggtgccatagtccatggaagccttgatatcaggcagcagagtgtggctttaaactcattccacacaggtgactcagataat

SEQ ID NO: 51843 - DNA, 1017 bp, Homo sapiens
ccaggcttctggggcctgcagtggctccctggggcttggagggctcctcatggcccagttggtccttggactctgaccagctctacccacctccttcctcttgctgtaggggaggagaaccagccaggctggctatgcccggatgaggacaagaagagcaaagccccattctggtgcccgatcctggcctgctgcatccctgccttctcctcccgggcactcagcctgcaggtgagtggagcggatcttgctgagccgacctcgaaggtggctgcggctccccctcgcctgggagaaccagagtttccagggagcgcccacagcagggaaggctcaggttccagctgtggcttctaaattcttactgacagatttggtcaagcctttttgttgcttcgggaatcagctttcccaccacaaaaatggaggcgaacgaccactgtgggtcaagtgaatggaaaattccattattttgagataataaacagcaatgatctcatctgttgatggcatggctccagatcatgccgaagcggctgtgccagccactgtgggttgggtgctttgtggttcgccaggcgggagccggctttggcgcagggattgccctcatcatggaatgctccagcgccatcaggcctcccgtgtattgagcacctgctgtgccccctggttctttcctgctattctcttattttaatatctataagaaccttgcgagtagatgtttctctatccatttcacagataaggaaactaaggctaagacaggtgctatgattttccaaaaaggacatagctagtaagaatttgaaccttgccctgcctgatcacaacacccagggtcttaaccatgaggatgttcagccttcacgggttacctgcccttataccctgtcctagctcgccctccatctagagcaattactgcctcccctttcccagggagatgaggtcatctcagctccagggataggagcaccagttggggacccaggcccagattggtgagcccca

SEQ ID NO: 51844 - DNA, 1072 bp, Homo sapiens
tagggagagcggcacctgggagggggtgctggagacagcagctgcctgcctcatctcatgcagcttcatccaccaaggtcttcctgggcacctctggtgccaggcactgcatttggagttgggaggtgcaacctcatctggggcaacagaaaaccagggagctaaaaagagagtgtgccttttgcaaatggtgacagggctgagaaggaagtgaaagggggagctgtgcagaggacctgggtctcaggatcttcacccctggagtcaggaggcagggctggctagtgccctactcatgcagacattccagcccacctttctatccttgggcttcctggcaaagcctcccttgattcaagtgaggtaccctccactatgttccttgtgctgcaaattgtgccctgtcattgctgcttcccttctgagagtgatttgttcctcatcatttcccatgatctagcacatggtatatccatccatccatcatccatccatctatccacccacctatccatctatccatccacccacccacctacctatccatttatccatccaacaagaatatatatttaatccatccatttatttatctgtccatccatccacccacccacccatccattcattcaccgatacatccttccatctatctgtctatcatctgtccatccatccatccatccatccatccatccatccatccatctatccatccatccatccaacaagaatatattgagtatgtatctatcatatgctagacacagaggtaaaacaatggtcaacacagagaagggcattttaaagggatggagtagatgtttactttatattggttgaaatgcaccctgcagaggaggaaatagaaagctgactgagtatttagtccaccttagctccttacctgatttcctgtgggccctgaagcttatttgttgccatggcagctggggataaatgacctttgtgaaggcaggatgtgtgtgggcaggagaagggatgcttctctcaggggatggggtccttgggaaagcaggggctgaggtcctcctctgctccctcctgtggt

SEQ ID NO: 51845 - DNA, 1544 bp, Homo sapiens
cagcttccagccacgaacactactcacctctggccactggggggcgctcaaagccttgcattttcttggctccagcctcctgctgtggaccagcatccctggcggagccctggccgccttcgggtcactcgcccctcctggacaccaggcccagctgcagaggccttcagaaacctgagagggcagtggggttggagaagcaggccaggcccagagtcagacagagccgagttcaaaacccgtctggcctgtcaccccttgggtgtctttgtgcaaggccttagctccatgggtcgccgttgtcacgttggttaagtgaagtcaacacttgcttccacacactgttgtgttgtggcaaatggcatcaaacagtaagagccacggacacagactcctctgtagctgagtgaattggggtagttatttaaactcgctgtgtctcggttgtctccgttatgaacagggataataatagtatctaccacacatgcttgttgggagttaaggaaataattcaaggaaggagggcctggtgtgcggacacagaacgctgcgtaacaaccgctgtcaagaccctgactgtgtgcccagataaatattcttgcatattgtattgactccctgcaacatccggagaagggcaggcgtggttatcatgcccagtgtgcagataagggaaactgaggtccagagaggcgaagcccccgtccaagttcacacagaagttctgaggccgaggactgccctgctctgcctgcttcccttggtgctcacgctggctggccgggcagagcgctctgtgtgcctggaggtcgaggggagtccctgttcccctgcttctttgcggagcttggattctgcccattttaagtagggcataagggcagaaggggaacctgttttatagatgggaaagaggtggggagggagggaaaactgggcctggcagagcatggggtaggccagggtatggtagggaaggatggggagggggtgggagtctagtttggctcttgtgaccacaccccagcagtggcttccatcacgtaccctggggcccttccggctttggagacagctgtgccccatcgtgccaccaagcagctggctcagaggggaagggtctgcctgtgatgggctgctctgtactcttaccagggacccagtggagggcaggtggggtagcagggctctgacaagctcacagctagctgtgtcctgccttctagtcccccgccactgctgcctgtctctccagagcatgccatggcccaggctgctccaggctgggacccagcttcctcttcaacccccctttcccacctggcaccctgacaagacagggcagccaccggggttctgtgtggcatcaggtgtgacttctgagaagaaacaatcttggcgcgcgccgcttggatgccggagaaaatggttcttgggtgcgctgatcatcccaggggaggggaggaccttgcttgggccaggctcctaggtctgtttggttttcagggatggccgactggggattcattgcctctcagaac

SEQ ID NO: 51846 - DNA, 1054 bp, Homo sapiens
atgaacagacatcgtggagaggacatatgggacgggaggtgaggaaggggagctggcacggcaggggcagtcctgtccttgtgagccaccccccagtcttagctggtagcagccagcccccgatcctcgcctcccctccactctgtgtgtctcttccacatccccctcccctctgagcccggcagcagggagagggggagggcagatgcccaaggggcagctgcccagtccttttggaacttggcaaggaacaaatagagccatggacatggatccgctgaatgtcagctgctaggctgagggcttaatgcagtggaggtcaggccctgggtgtaattagggaggctccctccctgggtggttgggaagaatgaatgaggtcacatgtgcagagggtgtaggctagtgcctaatgcacactcaggcagagtggccgctacgcaatggtcctctgtgagcctggcagcggggtagcagggaaggtccacaggaggcaacctctgcaggaggcattcccggctgcccctgcatgccttgtctgagtgggcttggatggtggtcagtgtgggctcaggggctgggttggctggccttcccactgatggcctcagtttccttcctgtaaaatgggggataattatagaacctgccccaggactaagcagctccgtgtacatgcaggtcccagggctgtgcctggtgggaggaagcaccacgtgtcagttgttgtgtcattgtggtcacaggacttgctcagggtgactgggaccacacactcgttggtggagccaggatctcagggtgcctctgattctgaagcccccacctggtctgccgtcctctgccccatcagccccgtgttccattgggtcttgtgggtgcgtatgtccgcaccatcctccctccagatggcaaaatatctgtgagcagggccagtgtcttatcctctctgtattgtcctgcagtgcaagtacaggcattgacttggcttctctctctcctttgctttctttctccccaaaatctccccttttttcccacgccagctcttccc

SEQ ID NO: 51847 - DNA, 1029 bp, Homo sapiens
gcagtggatgggaagcttgatcatttgtatcttcttttttaaaaaagtttttatttgttttaagatcaaaatggtacatatacttgcaagaaaaaaaaaaaaagcatggagtggtttatcctgaaaggctcgtccacactccacatctcagtcctgctttttggaagagaatgcttttcacctgttctttttttaatccacctggcactttcctcaggacccaaacttgttcactctgctgcttcttgatgtatcaattttgggacatcacctgttgtctccttgctgtgaatgatgaggatttggcccatattacccccgttccttccccggtcattctctcggttgcctttgtcactttaaatcatttacataaaccacaacttctttcatgattttcggctccatctttcccttccgtaaggtaaagctctgaggggccactgggaccatgcctggtcctgtctgctcgtgagtgagcgtgtgcatgtctttcctgctcctcactcggtgatatcatgctggtagtttgcaactggccacgttagaatgtttacaccatggaaattggcaaacgctgcaaaccaggattccctgccagttgttaaactttggccaacacagcacagctgggcttctaagattccagttgttaaactttggccaacctcatagctgggcttctaatgttccctgagtagcttgagcttttgaagaatgtgagaatggctggcccaggggtgggggcttgtagggaggctcagctggcaggcccagccagtatcgacactcctccctttgtgccacagcaaagcttcgaggcgcaccaggacgaggcagtgagcgtgacacacatggtgaaggcgggcagcggcgtctggatggccttctcctccggcacctccatccgcctcttccacactgagaccctggagcatctgcaagagatcaacatcgccaccaggaccaccttcctcctgccaggtgaggctgcctcgggcacgggggagcggacagtcacagagcacc

SEQ ID NO: 51848 - DNA, 1094 bp, Homo sapiens
cgcaaggagatttgctctgtggccatcatctccggcgggcagggctaccgcaactttggcagcgctctgggcagcagtgggaggcaggccccgtgtggggagacggacagcaccctcctcatctggcaggtgcccttgatgctatagcgcctcccctctcccctcagagggcacagctgcaggcctgaccaaggccacgcccggctctcgtgctctaggacctgcacgggacttgtggatgggcctggactctccagaaactacttgggcagagcaaaggaaaacctcttgttttaaaaaaatttttttcagagtgttttggggaggagttttagggcttggggagagggaggacacatctggaggaaatggccttctttttaaaagcaaaaaacacaaaacctcacaactgcctggcaagcccagtatcacttgtttgggccctagcgggactccaaggcagccacacgcccctcctggaagggtgtgtgcgtgtgagtgtgtgcgagtgtgtgggctggtgtgtgaatatctataaataagtatatatggtgtatattatatgtgtataaataaagtctgtacatattggagctctgggagatgctggaataaaagacaagagttacatctggacttggattgaggttttgttgtggttttttaaagcatgatgggaaagagatagagagagcagctattggtagagagggtttattcgggacccaggagccactcttaggcttggtgggagggtggagctgctacgggaatcagctctagaacttcacagtccaatctggtcaccattagccacaggtggctaattaattttcaaattaatgaaaaatcaaacattcaatctctcagtcaccgtagccacatttcagatgtggcttgagtggtgagtggtgaaggatgagacggcacagatatgaccatttctgctatagaagaaagctcacttctgctccagaaggggctctgggagcttcttttgtgaatatgttttggaaaaaagactggttcaccccaggtctggagtagcatgggggcagaaggccttggtgtctaacagtgcaagccagaagcga

SEQ ID NO: 51849 - DNA, 1033 bp, Homo sapiens
tcctaaaactggttgtggtgatggctgcacaactctataaatttattaaaaccactggcggggggaaagacctcacagctgcccctgcatagctcttgcactttcttgaccatttgttgcccactgctgtgtcacttgcaaccctgtggaaaggtccaagtcatgaagaagtgaagcctccacaaagccaggaggaaatgaggctgcctggaatagccatgtgagtgcgccacattggaagcagctcccctgggtccaggcaagcctttgatgactacaaggcctgctgacgtcttgactgaaaaaaccttcaagagactctgagccagaatcacccagctgagatgctcccagtaccccaccctcagaaactgtgaaagaatatatgtttgctgttttaagatgctaatcttggggtcatgtgttacacagccatagataactaacatgcactatctcatggtgaccctcatagcctaaattttaagtagatatctgtatccacattacagaggtacagagactgaggcccaggggttggtccaagataatacagcttagcaagagatagcgctggggcttaaaccagcctgaccccagagctgtggtctttccaccacacttctctaagcatcccggaccaggccccttgggagatcccaagaaaggaggaaaagttgggatctctgccctgcaggacctcccaggctgatagggcaggcaggggagcaaagcagagggtcctctcagtcacgctgaatgacggtcccccacctgcggctccctgtggctcccgttcagcaccacagctgccaaacccatttcattcaattctgcaaagagctcagaacaccctgagtgggggttcctgcctctccctcgaagcagagagcagcgaaattggacagtaatgtgttgtcgttcaaatatttcagctggagctggggtgaattatgatgccatcccactttattcagtgtagcatctttcataagagccgtgtctcagaaacactttggagaaggaaataata

SEQ ID NO: 51850 - DNA, 1119 bp, Homo sapiens
agcctcccacaccttcacccacactgtgcatggctcactgtggactggcacgtgctcagaggaagcctgggcaggaccccacgtggggcaggaacagggccatgaagaaggtgtggccagcgtggctgggggatgtcaggacgtgggcagggatatcccctgggctggcactggagcccatgtcagtaggctctggagatgagggacaaattccagaaaagagcccccaggctcagggaatggggtatgggctctgagagagagcagggggctgggagaggggaggagggacccttgggtggacagtccgtccctgcagggggtcagattgctctcagaaagatcatttttgaagaacaattaaatctctcctaaagcaggcttaatagttcttcttctggggctgggtttggggtgtgtctccctcccaaccccctcccaacaccctcccctgtcaaatatctgatctccaggtttccattcctcgctccgaccgctcctgcttcatttctccacccagtagtcttcggcttatcagaacaccaccacccaccccagaccccagacctgacccacacgcacctgggacctggaaatcccggattctagtcccagcaatgcccctgcctgttctacccctgcctcagtttcctcacctgcacattgagggtgttgggagagtgtccctgggcccaggcgactctggaagtctgcgacttgaagtgacttgaagccgaagtctgtgctctcctgtgccccctcccccctgcagctggcgcctggctcagtaggaaagaggccaaggagccgccaggattgcacgctgcctctgccatcagtcactctgggtggactctgaaaagcccatttggtttattaacacaaacactcttggcataagcccgggaatggcaaattggatgggagttcacggaagtcaggggatgtgtttatcacctcctgctccatcacctgtcgctgctcctggcagttggggaatggccaggcctggtcgcggggagaagcaggggtcaataaaatcacctcagaaagccacttgtgcttggccgcaggctgctatctgcccagtagccaggggcccgctctctgatcttggtt

SEQ ID NO: 51851 - DNA, 1037 bp, Homo sapiens
taagcaccatggtggcagagacagcctctgccttgttctccaacgtatcgatgcactaacccaaagcctggcacagagtggacattcagtaaacacctggtgagtgcatgctctctttatttactttcctgcctgggttatctgaatcacacttcacctccaggctaagctttgatggctcgactatcatgcccagccaggtggcgaaactgaatgcaaaaattccttgtagaaagctgggaaatccagctttcaattcctcccatttctttggcttgattttaatgactgatgttttttaggtctttttttttttaaggtaggggagggttaggcggtggcagcttcattttaatcagaagctaaaaggctcattggtttttctgatatcctttgaatggactccttctccacagacagctcctcacagctgttaggacttcaaattcctcatgcattgatgggggcagagaaaagatatgaaaggcttttcggctgacacaaaagaggggaaaaatgtggaataaaaacgacaatgtggttaatacataaaatggtgaaatttctggcactcgctgtatcattaatctgtctaaagtggctttgatctcctctgctttaattaacttgtaattataacgcgatgatttctgcagcgggcagaatctgggagctgggccctgaaagagacttcagcctccgagaggcagcctaacgcagtatgtgtggcatccgcctgtcagaaagaatgcttcccacatctgcccttgcacacgtgcacacacatgcaccttcagaacccaggcttccccatcacatgctgtcatgggatagtagctatgtgttcaaccagctgctcagatcctacatctgagttgggggttactgggcagcatgtcacaggttaagttggtagagaagcaggagatatcatctctgaatgccatttcattctcatgacaactttggcaggtggctatgattagtcctacttcctggatgaggacactgaggcacagtttagttctcttgtgtaa

SEQ ID NO: 51852 - DNA, 1032 bp, Homo sapiens
ttgcagtgagtcgagatcgtgccactggcctccagcctgggcaacagacaaaaaaaaaaaataaataaataaataaaaattaaaattaaagaaaatgacatcatgatatatgtcatgaatcttcaggatagaaggactgggcagggagagcagtgaggcagcagattgcaaaactaaggctctgagtggtgaagccctgggtgtggaggcctctgccgtctgagactttcccagagctcgtgggagccaagctcacatgtgagggagataaggagattgcctttccaagaaggaagccaacagaagagaaatccagctgaagagggaggagagagaaatccagcttagaaagacacagtctgagtccctggatcaggctgtgcctgaagtccatcctgtcctagacttacgagttgattgagcaaataaaatccccctggcctaggccagtctgggaatgggtttttcatccccagatgaggggatgaggtttcactgcctctaggctccctggcaaacaaatgcatgtttctccagaagaggttaaaattaaaagggaataattcaaatagtgatttttttctagtaatttcttcttggggtcacttctgatcatatgtttaaaaataaggtgggctcagggctgagaggatcctgtggtctgtattctcttatccaaccctcattggcctctttgatactctctgcttgcagtgctctgggccatgaatcaggaaccagagaccaacgttctgctgttgaaacgctgtgtgaccttgaaaaagtcacttaccctttctggagttcaggctaattggtgcttgtggcttcaaaaggggtctcaggtcccttccagctcccaggccccttgcctccaagcctgcagcagtacatctcgcctctgagcccctgcagatggttctctctctgcctgaaacaccatttctccccagctagctggaatcatctttccaaattcagcacagctcactttcctcagggaagccttgctgacttggctcctgccccaac

SEQ ID NO: 51853 - DNA, 1065 bp, Homo sapiens
gcgtgccatggagcgtgtggttatcgtgtgcagggaggtatggacgcttccggggctggggagttgtgagcagctcagtgtgtgtgtgtgtgtgtgtgtgtgtgtgtcccgccgtgtggacttgctcccgggttaggctaagacagctagaaggaggttgaagccgagcgggttctccggagccagtgagaggtggctccgcagccccagggtccgcggccggcctcccacccagtgccgccgcgtagtgggtcttaaatggagctgaaccctttcgcgcagtgagcagagagccaacgtgaggctaaaagccaggagggagggaggcgggaccagcgaagagccgcaggcaccgagactacaggctccgcgtccgggatcctcctcggagcctggtgccaacctcagcctggctggagtcagagcctggctccgcctcggaggggagcgggacgcgaggtgccaaaaagtcgtctttatgatcaataaggtctcgaccccgagccccactggatgatagaggtgggcatcacctctgtcctatgccatagccttgtcccagcaggaggtgcctacctaggctctgagagtgcctgccaggaaggggtgcccccttaaaaataaccccaactccttctaccccgaagtccttggggagtgctgggtctgctgatgggagaagctgcagaatttgagcccggaaggtggtcctgacagcgaggggggaggggttggtgtaacccagaaggaatgcaaaccctgtactttgttcccctacccttggaacaagagactttcctaagtggatcaaaatgtcccccctcaactttgggaggagggctctagagggaaaggttacatgggggaggtcctcgttccagcgccgccgagagggcactggggtttgttgaaaggcactggagccctcacctggacattgcagggggcgggggttggaggctggggacctaaggtaagcacccctttccctgggaatgcgcagaacagagagacgcggcagggtgaaggagaggactgatgagaagggcttgttgggaaaccctg

SEQ ID NO: 51854 - DNA, 1053 bp, Homo sapiens
gtgagtggagaagatgatgaatttggatctcctagggggtggatgaagaggcgctgagattggtgagtttatctgaaggggcaggggtgggatgcaaaggtgggcacgatggggcgagtttcttactttttttctagctctcattggccagtgcttaagccatcacatagatttcaatcagctgtaacagatataaccttgaagtgtgaggttgtcaggaaaaagaagaaaggaaggcggggaagtggggagagagagagagaaagagggagcaggctggaaaagagagaaagggagtgtcagacactgtgacaacagcgtcattccctccatcgtgtcctgttgacctgccgcaggccagccccaaaatgcatacagccaggtcttgcccaatcagatattctcgttatccccttaattattctttacaattaagctgtatgttctccatttacagaagaggaagtgaaaccataaagaggtcccttggccaccgaaagggagactcgggtttcagccgaatgtctttcttcctgagttgaaatccctgatccacctcttaccataataaccatgtgatattgaacgagttatctaacttcatgttgcctcagtttctgcatctgtgaagtggggataatactgcagaactattagggttgtataagccttaaatgagttaatgtacataaaatgcatagaacagtgccaggtgcatattaaatcctgtataagtgttagctattattctattgttattattctacgagcatagattgttcagttaaaaatcttgtccctccctctttctcccagtgccccttcctgccagcttctccttccttttaagagttaagccctggggtcggcttctccggccagcaagtgatgtcatccccccttccccttccccctaccccaccccagggtctggcctcccagaggacgggtctgtgcctgttttccagacccccaggcaggcagcagttcggggagcgagcgcagggatgcttattctccgcccttcctctctttgagaatctaagggcataa

SEQ ID NO: 51855 - DNA, 1075 bp, Homo sapiens
acttattgaactgattataatttcttgccttattccattgtctaaaatttccagaatgcttgtaaaaaagggtttccctgtcttattcctagttttcataggaatgcatttataattttaacattgcatatgatacttcctgctggcttctgataaatattcttttttgttatgaataggaaggttacttctattccaatttcacctagaatttttataaagaaaaattaattaaatgctccttaaaaatctattgaaataatcatatggtttttctcctttaatttactaatgtaatgaattatgttgatgtttttcctaatattgagcctccattgggtttttgtaatttctttaaacaaatagcttgtgtagcaaattaaaagagctctcaagtatttgtttttttattattataaatgggatctttttcattggattttctgtgggtctctgggatgtaagaatgcaattgattttttgtggctttatcttgcatcctacaaattagatgaattcattttttttctctttaataagcatgtagtgctttctctgagttgtctaggcatccagtctccccagctgatatttttgtttccttctttcctgtatttttagatctattgcatttagcaatgagcaagcatgtgttgagtgcctactatgtgccaggcactgggctaggatctgtttcctctgctgctgttgctgctgcttggcagggtgggtggttggagtaccctcttcagctggaatattgagagcaggggccttatgagggaatgaatcccaggaggtcccaaaccacttagagtcagatcaggattcaaacacattaaccctcaggtcaggctgcctcctgaccgatgactctccccttcaaggggcaggggtaattaaccttgacaaagaaggggaaaccaaagcttgggaatgcagcagtcatttctggcctggaggtgaagatagatgcccttaccctgcaacctggccttgaatggtccagctctctgaccttctttttgttcttgcatctgggacttgctgctattaaacaggagtgaaagtccca

SEQ ID NO: 51856 - DNA, 1044 bp, Homo sapiens
gccttggtcaggccgggtgcagtggctcatgtctgtaatcccagcactttgggaggccgaggtgggtggatcgcgaggtcaggagatcgagaccatcctgataacacggtgaaaccccatttctactaaaaatacaaaaaattagccgggcatggtggcaggcgcctgtagtcccagctacttgggaggctgaggcaggagaatggcatggacccaggaggcggagcttgcagtgagccgagattgcaccactgcactccagccggggtgacagagggagactccatctcaaaaaaaaaaaaaaaaaaaaaaacgccttggtcagaaagtgttccagcctattgaccttgtgaaatcagagaaaacccatttggcaaatatgacttcatcttgtaaagaaagattaaggtgttttaattataaaggatattaaaataagagctattgtgtagtgggggcctactgcttagccatagtaccaagtgttgtatgaatgttacatgtgtccacttccctgcatcctcattgccacttctcacatgcaggccaccatcatccctcatcaggaagactaggagagcctcttagctctcctagtcaggaagattgggagagcctccatatacacacttctgtccttagcagaaacagctgtatgatccccaaatcttgtttcattatcctcttcctgggcatccagtaaaactacactttctcagcctccctcacagttgcatccgtgtggatggacacaatgagtggaaatgacttaagccacctccagactggcccataagagcaatccacatgactctcttggttttgtgccccctttggatggtaactgtgcatattgagaggatggaactacaagacaaaatgagcctggatccctgagtcacttcatggaagagagtagctctggagatttgccagactcatatccaactttccgtgaataagaaataaacctttgttgtaacaaaccattgagatttgaggattattttgttagtggggcacaacgcaggctctcctgactag

SEQ ID NO: 51857 - DNA, 1051 bp, Homo sapiens
ttctttatccgcctagttcacagagtacagggctcagaacaaccccaacatagttcttaataaacaactgtttaatagttaattaattaatgcttttctaggttgttgagaagattaagtaaggcagtgcatacaaagtgcttatagtgacaggcagaggaaatattcaggaaatataagctactgttattattcatcatagtatccccaacagtgaccgggaatagtgaccaccacaaattaggtgtacaataaagaattagatggatagagcaaatgaagaaatggatgggtaagcaaattggtaggtttatgggtaggcacttggatggattgttggatgtttgaatagatgaatgaataaaatgaatgcttggatggatggaaggatggatggatggatggatggatggatggatggatggatgttttgatggatggatggatatttggatggatgtttggagggatggatgaatgggtggatgtttggatggatggatagatggatggatggatggatggatgtttggatgggtggatggagggatggatggatgagtgtttagatgggtggatggagggatggatggatgagtgtttagatggatgaatggatggatggatgaatggatgtttggatagatgtttggagggatggatgaatagatggatgtttggaaggatggatatttggatggatggatggatggatggatggatggatggatggatgggtggatggatggatggatggatggatgagtgggtgaatgggtgagtgattgtcttagaaagcatccagaattcctaggggaaacttagaggagcttttccttgagattccacagtactatccttgcatcaggatgctcaggacaggtaaggaaggcaacttatatgtccaggatctttttcattccctgagcagatagacatcactttacatttcacattgcagtcttatctccctcctccattgtcattttcagagtatttcctcaagcagggtggtagcctattctccccatttacaagttagaaaactgaa

SEQ ID NO: 51858 - DNA, 1037 bp, Homo sapiens
caggcactgggtcttgttcaccaccatatcctcagctctgctccaaatggctggctccataattactgttgagtgagtgagtgagtgaatgaatgaatctgggggaaagagtgctggcgagaaggtcaggaaacatggttaactggctctgtgagtgaccttggataagcctctacattatccgtggagctctgtttgtcagctgaaatgaagggaacagacccaatgatcccgagtggctcctccatccctgatattctcaggtgtcgttcagaggatagccatgcctttgggcatcttggctttcaagctcagagatacaaagggactgaataagaggtgatacaagaaagtgaggaagagaggcagggaggctgtgcacaaggaaggaggtggtctttcttcccacaccatgtccacccctacccagaggttctagaaaaatcccactgggaagattaacctgttagaaagagcactgactcaggagtaggagacccgcaccttgatcttggctctcctcaaggtgtgacctttggcaaatcacttcatgaccctctgaggcccagttaactcaactggacaatggggctgatgacaccagaaacgcacctcccaagggggtagcgtgggtgggagttgggggtacctcaagtctggctgctggtgcaggctgctccccctcagcagcctagtagcacgtgccccaggtacgtttccctccctgaccccactgtccactgggcctctctgatcttgtccctcatggcactggcttgtacttgtctgttgtttgtctttcttccccactgatgtgtgaaccccccaagagcaggaatcatgtcctatatacacccttgactccccaggtcctagagagcatctgattcattgcatgggcttagggaatatgtctgaatgaatgcagctgtgaatgagtgaatgaatgaatgagcacactgagcttctcacagaagcagctgatcccaaggatgttgattgctagactagaactttctcttccatgtaccctgtcc

SEQ ID NO: 51859 - DNA, 1036 bp, Homo sapiens
agggtggttgggagcatcaacggatgtctcagtgcaggccctttatactgtcctccctgggcatcccccaacctgctctagcctgagcaccaccccagggggcccagacgctgctcccaggcctgccacaccccctccctacatggagccaatctcacagttcacaatggaggctcccactcttggtcctcactgcaccatcctcatggcctctaggaaatctgaccgtagcccagcaagcctagtggtaggggaggagatcatggacagttaggtggccaggtggcagagctgggcttcgaacccagtttgtcctgatgctgaaatccagcgtctttgttggggacctggaggctctgctgttctggaacggggttgggtctgcaggctctgaccctttccctgattcctggcacaggttccattggccccactggtgcccggctcaccttggtgctcgccctgacagtgattctggagctgacgtgaaggcacccgccccggccactccatcaggcactgacatctccacgaccggttttcatttcttttctaaactatttccagtcttgttcttagtctctttccatctgtgtcttggcttcttcagtcggtttaattaaaacaaacagaacaattttccccacctcggtttgtggctctgcattctttatctgttcagtagcagcaactgggcccctcctcctggcattcagcattgggacaggcactgagaggggaatggcaagggaaatggaaggcatgctcttcccaaatgaacagtggacatggagctcactatctcactcaagtcctagcatccaggcgtggaatgtggccagagacgagaaatccaaattcctcagggctgagtataatagtcagctattgatacaataatgctgcataacaaaccaacccaaacctcagtggcatgcaacaacaagcacttgtaactatgttcatgttcaggctgaagtggttcagctgatctaatctgggctcagctgggcagttctgcttcaggcagcaggtc

SEQ ID NO: 51860 - DNA, 1030 bp, Homo sapiens
tgtggctgcctgcactaattgggggcagaggagggggcttttcctccagcccttccctcccagcttgggcccagagtctctgtggggtgagttggggtctgtgctgggctccctttggggagggctggagaatgtggccaagaggagctctgagctattcctggagaagccagggcagcaggggtggagctggaaggggagtgacaggaggagaagggagtggaaagagaggatggaaaagagaagaatggagtagggggtggtgggggaggaggaagctgctctggctggctttgtccaagcaagaggagaacaaaccctcctttctcgcctcctaggccccttcccttttgatcccctcccctgctgcccccatgctgactttggggttaattttatttccgaattgagcaggcgcccctggagcagggcaccgagcttgggtgtgactaacgcctgccccaggccggggctgccgctgccgctggggtcactctaaaatatttatcaagagcatgtgtgtcctgctgcatgcccaggaacacgggctgggtcaggaggtcaccctgggaccctctggaaattctcccatgcacatgcgtgcaccctgctctcaaatatacatgcagacccccacgtacacattcacacacacacacacacagttatacacacagacacagtgtatgtctacacccagatgtacatccatacacatgtacacacagccacacctatgacatactcaaacatacactcatacactcacccctatttacacactgcacacagaatatgtgtccacacacaggtacttccaaacacacaatcacagacacactcaagcatgtgtgcatgcctcaatgcatggctatacacatgtacatacagtcacatgtttgcacactcatatacatctatacacacgcatacatattcattatacctatctacatattgacatatgcatacctatgccaaacatggaggcacacataaagacacgctcaaccatatgtacagacttgaa

SEQ ID NO: 51861 - DNA, 1046 bp, Homo sapiens
aatggcatgaggcacccaccatcgctgtggccctgctggccgccctgggcttcctcagcaccctggccatcctggtgatattctggaggcacttccagacacccatagttcgctcggctgggggccccatgtgcttcctgatgctgacactgctgctggtggcatacatggtggtcccggtgtacgtggggccgcccaaggtctccacctgcctctgccgccaggccctctttcccctctgcttcacaatctgcatctcctgtatcgccgtgcgttctttccagatcgtctgcgccttcaagatggccagccgcttcccacgcgcctacagctactgggtccgctaccaggggccctacgtctctatggcatttatcacggtactcaaaatggtcattgtggtaattggcatgctggccacgggcctcagtcccaccacccgtactgaccccgatgaccccaagatcacaattgtctcctgtaaccccaactaccgcaacagcctgctgttcaacaccagcctggacctgctgctctcagtggtgggtttcagcttcgcctacatgggcaaagagctgcccaccaactacaacgaggccaagttcatcaccctcagcatgaccttctatttcacctcatccgtctccctctgcaccttcatgtctgcctacagcggggtgctggtcaccatcgtggacctcttggtcactgtgctcaacctcctggccatcagcctgggctacttcggccccaagtgctacatgatcctcttctacccggagcgcaacacgcccgcctacttcaacagcatgatccagggctacaccatgaggagggactagtgccatccggtggcgtctgggagggagggagggccacagagttgggaggcggaagccaggggtcttccctggctggttcaactccagatggaagcagggaagccatccccaattactcccaccttgccctggttaataatttagcattccttggaggtcctttgcatctgggccatttttacccacttagtgttgggtgtctta

SEQ ID NO: 51862 - DNA, 1020 bp, Homo sapiens
aggataagtgagtggccaggccgcagccctggtgctgtgctccgggtgtcctgtccgtgtccccatccccacctcctggacgtggttcccagtaataatgctgcccctaccttctctctgtcccctcccctcagcccagacaggcagccagggctcgccacatgggcccacagcagcaggctctttgttgccggtactggtggtgccggtgccagggtgccactggggaccagtggatctgaacctctaggggcagggctaggaattggtgtcttcgactggctctgcgggatctggtgttgccccactgagtgaggtgattgtcccatgctacaaagcagggcaggccaggggctgcagaggcaggattcgaacctgggtcacatgaggctaaacttgaggcttcgcctcttctttcctccgtggcactggttgcccccatgtctgcctctatgagaaagtggaggtgagcttggagagggaggaagggtgtgggcctgggagctggagtttccgctgctcctgagggacaggaacattggaccaggacaggccactcccttcaacttcgcagtagccctgtaacgaggcgtgccaagcccctccccagaggaggaagctgggctcagagactgggtaacctgaccgaaggcccacagccaacagctggcagcatccctcatccctgactcggcctcctgttgaacctggaaagccagtgtgggctggagcaggggtgttgaggctggagctggggctggaggggagatgagctggttgctctgtcaccactgctctgctttgtagggacgtcgtgcaggaggccacaaaggtgctgaggaatgctgccggcaacttctacatcaacgacaagtccactggctcgatagtgggccagcagccctttgggggggcccgagcctctggtgagtgggtcccccttcccacaggggagctgagttcctggtgggagaccctagatgttacgtctcgaggggcttcagagtaataggaaggata

SEQ ID NO: 51863 - DNA, 1077 bp, Homo sapiens
gggagagggttgggaggcagcagagcatgggtgacagtgggagcacacgacttccttggagcctgggcctttgcgggtcccaggtggtcaggcagctggagcagaagtggaaatggcttaagatgctcatagcccagccccggctgtgtctactccaggccaagcctgggctgcagtccttgctatgttccccccagggccctggggggagggatcagggtgctgggggtttcctaggacaggggtcttcccccttgagacaccaagctctggctctagaagagctctctcctggagtggggagtctggaggggactgggtgggtgcaggtaaagccagattctctctggaagggaattttctatgaatggatgatttccaggctcagggtgggctgtgtgttagttctgagcaaatccctcaccaagacccttccctcccaagccctcaaagaaatgaggcaaagcccttccctgcaagaccccttgtggatgtttttgcatctacctgatttttagccccacccagggagactttataccccatgatcctgccccaccgttgctgttgtctgccagctgggtctagcatcacagggaagggggggatttatactcatggaaagactactgatcctaccggaaaccaacctgtttactgtactgttgtaaatatcatgccctttatatcctgtatattggcttcttttaaataaagtgaaatgtcttagaactgatggtgcttttttttgtttttgtttttaaacagaagatgaatctggtgttgggggaggggtaggaggacggaaggccacagaaaccctcaaactcattagttaattagccataaaataggggatttcatatcacctgttacatttgtagctcacaataaaagctttggaagatgacaaagcaggaatcattacacacattttactgaaggggaagagaggacatgagacatcacaggctcagtaactggcttggcctggtttggaactgatgtccttttaaccacaaagcccccatttttccaggctctccaacgtgcccacaggaggtcaccttcccaggc

SEQ ID NO: 51864 - DNA, 1050 bp, Homo sapiens
cagaaacattcggcattctagcctatttctgctacatgctagctgtgtggctttagacagttgagttatcctttctgagccaccatttcttcatctgtaaaataggtataataccaacctttccaaattgcagagaagatgatattatattgaacatctcactcaaactagaggctcaagaaatagctgttaaatgaatgaggaaaattgcaagattggacttggaggaaaatatctttagtcccaattaattaaagcctgacattaaaaaaaaaatacacatttttaattgtacaagcaatacataaatacattctgcattttaaaagagttaaactccttttggataaggcgaatgtcccctttggcttactacccctgtctttcctgaggacagccttgaagctgtgtacctgctgggcagctgcccctttctgtcccctgtatgggtccctggagcctgccttctgttcagtcatgccctctggtgtcacccccacaggcgggagacctttgactttgacgacgactgtgacagcctgacgtgggaagagaatgaagacacgctgctgctctgggaggatttcaccaactgcaatccgaccatcgacctgcagggcgaggtaagcccagcgcctggcttcccaaaggccaggactaggggtctgggggacaccgcctttcaatggtccctcatccctgttatttttctacagcccccaccacacagctaaactgtcccctttgggccaggcgcagtggctcatgcctgtaatcccagcactttgggaggccgaggtgggcggatcacctgaggttgggagttcgagaccagcctggccaatatggcgaaatctcatctctactaaaaatataaaaattagccaggcctggtggtgggcacctgtaatcccagctattcgggaggctgaggcaggagaatcgcttgaattcaggaggcagaggttgtagtgagccgagatcatacctctgcactccagcctgggtgacagagcgagactccgtctcaagaataaataaataaataaa

SEQ ID NO: 51865 - DNA, 1733 bp, Homo sapiens
gggagaccgaggcccagagggtgatgtgctgtgctcacggaaggaagtggcagaaatcagtctcctgcccctccagggcttggttcaccagcccacactgtacccattgtcccgcttcctgccccttcctctgggtgccagaactgggcatcatccccacggttggggaaccctggccaggttatggggagaagtgggggagctggcctgagctctggtagaggggcctcagagttcagaagaggagctgttggcctttgactatttttcattccaccccaaagaggctctcgatacccccccgacctaacgtgcaagtgtgggtgcccccgagagacggcgatcaggttagcgccagtgaggctgtcttccagagagggcttggggggccagtccagccgaatgaggcacatgtcattctccgaaggctgcttcttgagtttcgggttgtggtttggcttttgcttgagcccagggcaatacggtgtgttgtcgctctgtgtgtgtgactttgacgtcgctgggccagatctgggcctccctggggccctctctccacctccatgccttcttgctgtccctctgccgggaagcaggggaggccaacgcagccttcgtttgctcgtggcttgtctgcttggagtggaagctttcggtgaaccttgggccgtctgtcctttgcctttgcatgtgagcaggagggctctggtcagcatggggccgtatagcctttgtcaggggttctccatctctctggctggctctgagatatcccaggcaactctgtgtcccggtctggcctgctcctctccccaaactgtggggctgcttctgtggtaaaagggcgagccgagccggcgcacccaccaggccgcccagggcagggaagagtccaggccgtctgtgtccccctgcatgtctcccacctcgcgcttcctgctaacgccgcctgcttcttagaggacctgcacctttcctggcactggccggccccagtcacgctcatcatcctgtgagatgccggctcccttcccagttcacccctaccttccatcctagccgagccccccagttaccttgattgcttcctttccggttcaggtggtccccaaaaagaaagagcgtaaggtggcttccgatgatgacatctctgagcaggacggggaggtgaaccggttctcggacgatgaggtcggctccatgaacatcaccgatgagatgaagcgcatgtttaaccagctgtgagtatccccgtggcccgcacactctccgtttccccggattgcttgcacaggggcggtgaatgggaggcttgggctgagagtagcctgcagcactggaagaatttgaattcatttcctttttttttttgagacagggtctcactttgtcacccaggctggaggctggagtgcggcggcatggtcacagctcactgcagcctcaacctcttgggtttagggatcctttcatctcagcctcccaagtagttgggagcacaggcatgtgccaccatgcccagctaatttttaaatttttttgtagagacagggtctcactgtgttgcccaggctggtctcaaattcctgagctcaagcgatgcttctgccttggcctcccaaagtgctgggattacaggcgtgaaccactgcacacagccaagactcattttcaacatttgtaatttgggaaatttcatatgttcagcctctcttggaagctcgaggaggtca

SEQ ID NO: 51866 - DNA, 2329 bp, Homo sapiens
cctcaggcttgtgttgtgtttgttttattgtgtgtgtgctttttggacctggctactaaggtgatggaaaaaccgtgcccagtcttggagggagatgggttggcattgagcaacgatctattcaagttgcacccagggcgtggggtgtgatgtcagcttctggcgctggcctggaatgagacggtgctgctgagacaggtggagtgcgggcgtctctcttcccgcccttctgggatgcgtgcacaccttgtcttccatttattttctgaagttaactcaagactcatgttggatttttccaaagcaggtatattcctttcctggggcctcagtttccccgtctgtgaagtgaggttgagggggggctagaattgcggtccttgaaaccccaggctttcttagagatgctttagggtttccttgaatatctaataaaaatgatcatttaaaagaacattaagacgttaatacagtgataaaaatgtgctcacccacctttaagttcttaatattaactcactgggttctactaacatgctaacttgttagtagtatgttttgggtatccctaagaattttctttggggaggagggcagacatttgataaacattttttaaaaagttgaaaaaccactgggctagatgatctcaaagggtcttcccagccttggcaatatataaatctgagtttgagctcccagcccgcttctgatcccctggccataagagaagtcaccgtctaagggatgagacccaggtgtctgcctggactgttgtggccatgaagggctttaaatcatcccaggatatctattacagaactccaagcaatgatgcccagaaggagcctaacccagaagggaaaggttccagggtttcccctggtccacctggaggaagctgcagctccagagacccccacttgcttccccaaaggacaacttaggctgcgaggctcagcgatcttcaagccggacgcttgttgagttccacctccatgatttctggccacatccatgtactaccgcctgtgctattacgtacataaaatattttaacaacttcattgaggtacaacttgcatatcacaaaaactgcccattttaagtgtacaagtcaagatgagtaaattcacagagttgtgcagtcattaccacaatcccgttttagggcattgcatcagcccccaaaaagatccttcatgtccatttacagaaaattccaattccaagcccagcccaggtaatcactgacctgctctgtctctagaaactagccttttccggacatttcatagaaatagaaacatacactctgcagtcttttgtgtttggcttttttcacttagagaattttttttgaagttcatccatgttgtagcatgtatttgtaggctgttcctttttatagctaaaaatattcctctgtagtatagaccatattgtgtttatgaatccacccaggtattcaatgtattttaaatttaaaacgtcaactgtataccaccgagcatcatctcatgtgccatcagtggtccacaaactgtgctttggaaacaccaacccaaaccagagcccctggcctggggtgcctgggtcctggccccagtcaccactgctttggttttcccttggcccaaccaggtctttaccacgtgggaaatgtggtcgctgaagccgcaatgaggacgaggttgtcaagcgttgatttggaaaccaaaacaaacatctctactctgtcaccacccagggccactaaaatatcttgttctgactttgcaagctgggggcttttccctggagtttcccactgagtttatctgaactcaacagtggagagttccctgagttggcatccaggagacctggactttaggtccagctctgccactaggtgctgtgtgacctctggccaaccgctgccctctctgggcctcagctcctccacctttacatgcaggagttcctgtgggtgatctctctcagcttgctctctactttaggtcagtgactccaagaggcccgtgttgtggctgatctttctgcctctggagaccacactgtgttcgctgaagcctttctctgttctgggcttccccttccctctcctatctctgccccagataactagggtccaggctccaggcataggcagcgctggccatcccatccccaggcttaaccggttcaaccgtttcccctgtcttcattggctccaaggaaggatgcaggaaatctttaaggctgtcaagaaaaaggtccctccagcctggcagctgtcacaaagttgccatggactggtaggggaagttgccctgggctggtagag

SEQ ID NO: 51867 - DNA, 1012 bp, Homo sapiens
atctaaggtcaccacctctgacggtggtgggacccacagtgggtatggggcagcaggatctgtgctttgctgagtttctgagtcagggggctgggacaggaccagaattagccccaggtgccaagtttacagggggaagtcatccagagccccgaactctcacgcaggatgggaggtgggggtgttctgggcatgggcaggagtgaagggcacagggtctcaggctcattgttctttggactctgttccttagatccctctgctgcctttggccaatgaccttgacaccccatccaccccttctgtccacaagccagcttggtcccgacaaggagtcctggctggaccccttgttaggctgttcccggcttcagagatctgggaactgtaccagagttgtatttactgagcacccactccagcaggatcaccatgcctcacgtgatctccagtccttttactgttgttcttcctgttttacagatgaggaaccttaggctcagagaggcaaactcacctacccaaggctgcacagcacgtaagtgagatgcagcctccctgtccagccagcctgagccctgcttcttcacctggccctgctccccatctggtctgggcacggattgggttagatcatcccagctcccagcaggagggcacagctctgggatccagggtttggccaggtgcccagcaggcaggcagggcagccacagccaagggttaactggccgcaggctgggagccgtgctcggggctgggcggacaaggtgcaaggccctgggaaccagctccaggccgggctgacagggagctccgcaggcacccccatcagccctcgtgccagaacaaacagggcaattaggaggtggcttttgtttggtggggcctgaatgctgggcatggagctgctggcgcttcagcccctaccccctcatgtggcgggaatctgctcgttcacgggacagggtcacatgcggagtgtcacagcagacaaaaggacaatgccact

SEQ ID NO: 51868 - DNA, 1552 bp, Homo sapiens
ctcagcggaagctctgtgctgggatggtcttcgtcgacctggtgcctgcctccgcgtctgggcgggcctgtgctaacactgctcacctctgtgtgtttgttaactccaccacctctttacggctcccactggctctgtttcagcctagatgtttcaccagcatcataccttagcacatgcctcgcgttcttcccagaaagtcagccctgggaccaggtgggctggtaaagtcctcagtgctgggccctgtgcctgttgcatgagcctgtgtcactgtgactgtggaagttggagctagtgagaggaggaggaggtgggcagaggaaggagggtcccttgggctcgagctccacatcagccctgagctgctggcaagcacccctggcctgcagccagggagagccagagcctttgccaggcagcgagcctccgtgccttccactcctaggtcaggttttgacagcaccactttattactttgtttaagctgttagaaaatttcagaacatcagacacaccctattcaaatgtgagaacaaaaacaccttccagcagtgcctgcttctggaacaggactcctcctgcggaacagggttttgctcaatgactacctccccggtcatgctgctgtccagtgagcagccgggccagagcttgtcggaccgcagtgtgttctctgctagatgcggcagctgtgactcagggggaatgggggctgtatgcctgctcctgacacacctctgcccgttgtgctttgcaggtcttttatcagaaatcaccgatccagagagcttcctgaaggacctgttgaactcagtcccctgaccaccacacagcagctgcggcggcgaagacgaagctggcttgccttccaccctctgttctccctccttgtgcattaagttccctccgcgggatgctgcattgttaccccgccctcccctctctcatttttcttggtgtggcttggggtttttaggcttcctgttttatctcgtgtgtgtggtgcaccagctatgaggttgtctgtaacccaagccatcaaagggcctgtacatacctaggagccatgagttgtcccggccagcttcatacttgagtgtgcacatcttgagaaataaacaagtgacttaacacacattgaaaaggaaggtgttgcctgctgcttcaactcgtcctcagtggcgcaggccaaatggtttcccttgaatgcacagccatttccggcgtcagcccgggaagactcatgtcagacccgctgtctccaggcctgttgtcagcgctaagtgcaacctgtctattcttggccagcaagttggggcaccacattggatggctctgatttttcccaaaacaaagcccatgccttgctcttaattttttggccttaagagctggaacccaaagacacgtggagcccagagctttcctagccctcggctgaaggaaggctcgcggagtagggcacagtcttgttggaccacagaggcctggggagcatttgacattctcatgctgctgtgaatcgggaatcccttggtgacttctctcc

SEQ ID NO: 51869 - DNA, 2100 bp, Homo sapiens
gctgccatttaacacagcacatgtttgacaagttaccgtgtttgactggtttaggtctgctggcttttaagaaatttctcctagtgggaatgtaaagactgaattaaaaccttgtttcctacctcatttattaggttccatcaaattccaagagcttgtcggggcccaaacacaagggatacataggaatcctttgcctttctttaagtcactagccttgcatttgccacgtctgccctggcgatgtctcccccggttccattttaccctgatctggaagatgagcactgagagaatcagatgaatttcatggagcatttttgtaaccaataaacttctgggtcccagggctccagaggttcttgcccacagctgcttttttccaagcagaaggctagtcgctggaactccgagatgcatacaccactgtgactcttcccttgctcccagcatgccttgctctgtccttgtgagtatcctcctagggacttcatgtgatggaactggattttcttttccaggctgacagataaggcagtgaaggactattccgcttaccgttcttcccttctcttttgggccctcgtcgatctcatttacaacatgtttaaggtaaggaggctgtcagaggcccagtgggttttggcaagagtgtaaaatgtctgcactcctgtccctgactctgcctcagcacccacatggctgctcctccgctgggcctgggggcgcttttttcctagaaacaaacaaccccaactgtgggagggattgacactggcagcctggagccttgtgtctgtgaggtacatttgttttgtttggttttgtttggtttggtttggtttggtttttttgagacggagttttgttcttgttgcccaggctggagtgcaatggcgtgatctcggctcactgcaacctctgcatcccgggttcaagtgattctcctgcctcagcctcccaagtagctgggattacaggcaggcaccaccacgcccggctaattttgtttttttagtagagatgaggtttaaccatgttggtcaggctggtctgaaactcctgacctcaggtgatccgcctgccttggcctcccaaagtgctgctattacaggcatgggccactgtgcctggcccacatttgtagctgagatcactcctgtcacctgctcccgagcctgctccagactcggctgtgcaggaagaccttccccgccgggtctctctttgctgctcttgccgtgctattgggataagctctgttgccctgagtgagtctgacttaccgcagccagcttataacaggacactcctctccggagagaatctgagtttttgagttggttcctttcatcatcggaatgagacagctcatggaagcacattgacaagtccctttgctctggggaatgcgaatgggaagtgtacggggagggaatgcagccacttgttggagcctgtagcttcaggtgacacagtgcctaataaggagggcctaagaggaatgaagtgaaattgtgtcgttcctggagacaaaacgcacgctctagggtgcctgttggtatgctttggtgtaggttgggagggctgtcctttgaggggttgaaatggcctgactgacttgaggcggaagatgaggcagcagtaagtcacccacctctcttgtctcctgttgattctcgtagaaggtgcctaccagtaacacagagggaggctggtcctgctctctcgctgagtacatccgccacaacgacatgcccatctacgaagctgccgacaaagccctgaaaaccttccaggaggagttcatgccagtggagaccttctcagagttcctcgatgtggccggttagtgtcaaggttttctcttttaaagatcctccgcagcaaagccccatgtcttcctccgtgggtcatccgtagctttatcttcacgaccagaggaaacgcagtatgaaccagcctgtcagctgccactgaaagccctgggaaagatgcgtaaatagcaagtcaccgataacgagaacagcagctctaacatgtactgagcaccccctctttccccgacatgggctgttcactgtatgtgatctcagccct

SEQ ID NO: 51870 - DNA, 1029 bp, Homo sapiens
tttagtgcaaaccatgtaaacataacataacaagactatgtggagcaagggggagtcaggctgtggacccaccagggaatcttgattcatgtttttggccccatcactcactagcttgctgactttgggcaagtcacttcacttttctgggcctctggagttactagcacagttccatgttggggagattgtgaacgtccctgatatatggtgctcaggaaccagtagttgcttggaattgtattagagctggggtaggagctagacatggggccagggaagaagggaagatgccgcgaagaagggcctggaaggggacgaagggcgtggattatcagaggaagtgggagtagtcggcaaggatgggtggggagtgttgagtcatccaagcgttcagcaaatgtcacaagacaacgacaaattgagcaaattcttcctgctcttgctgccgggtcctgcttccaccctgcttttattttatcatgccgcttttcttctagaacccgagcaacttcccgagaagagaagaacctccaaggctttctggaacagcccaaggagaagtgggtggagagtgcctttgaagtggacgggccctactatttcacagtcttggcccttcacatcctgccccctgagcagtggagagccacacgtgtggaaatcttgcggaggctgttggtgacctcgcaggctcgggcagtggctccaggtggagccaccaggtcagtacctgcttccggaagctgctgctcactatttcccatcatcagttttgaaaagctgcttagtggtacgcacgtgctaggtgaaggcatgctttgtgactgcggtggttgacaccagcccttctcccttctcagtctgtcatgtcaagagtctaagctgatggctggcaggttgcctggtcatttctgggttttctgttccgctactagaaaggtagagccagtcttacctactgtagaaaatgttaggaaggcagccaggcacagggtgataaaaccaatgagatgatcagggctaaga

SEQ ID NO: 51871 - DNA, 1025 bp, Homo sapiens
agttctacattgcttcctccaaaatgtactccacatgcagccacggtatgtcctacaacattagttcattaagaaatgggcgcccaagagtggtgggctctcatcaaaacttggcgagtgtcacgttcagtcactgcagaaatgaaaacgtcctatggccttgtcgtcctgctggccccagccttggcctcaactttcccttgtattcttgtctccgtttgcaaacctttgcagccatcaggcctgggagtactggaaggaggctctgtctcccaaactgggttttcaccaggaactcacttccatttcattgtttgttctgcttccctctagacacaacacttacctccaggaatgtacaggccagcgggagcccacgtatcagctcaacatccatgacatcaaactgctcttcctgcgcttcgccatggagcagtcgttcagcgcagacactggcgggggcggccgggagagcaacatccacctgatcccgtacatcattcacactgtgctttacgtcctgaacacgtcagtaccctgtgtcccaggggcggcatctcgcagacccaccctgcatccctctgcccgagatcccctcagctttttcatagcctctcatgctagttccggagcaagcgtctggcctaaggcagcctttttgccgaggtggggatgctcatctgcattcttttagggccatgcagaaaaagcaataaagggaacttccttcccccaaactgccctgtctcccaccatgggcagcccaagaccgcatccttggactgacgttcagctcacaggggagcaggaagtgggaaaagtcaggccactgaagcctctacttcgatgcagcggctacttctactttccagactgttctcttgaatggggggaggccacaggtcggagctgtgcccacatcattagtcaagggcatatagattgttacaggtgatggtttcccatcaaggggatgcagcagagctgaggacccagttcataaatggaaaactggatttgttatc

SEQ ID NO: 51872 - DNA, 1068 bp, Homo sapiens
ccaaggcacataactaataagtggttgacacaaagggttctgtgctcttctaactgtcccaccttggaggaagcagagtcctacaagctccttttccaaagcacagacttgagtgtcagcagttgaaaagctcacctgggaacagtgaatgaatcatagtgcaacaacccttggaagctgagacttggcattgctggcacgaagatgctggcatgaagaaagggggcttttctgatggcaggtggcaccttgccagggctccagctggatgacttcctttgcttcagtggttcctgtaggaagagagaatagcagaagggcctgggtctttatccttattagaagacagctcaagggctttcctctcatgcacctgtccttttagtggaggtagaaggttagccctgttcctgagcatctccaagctagggtgggagagggtgtgtggaaatccccttgacatgccaccggggttcccctacagacaaatgaaaagggccaggtcgtgaccaagacagcactcctgaagcagatggaagagctgatcgaggagcctggcctcacgtgctgcatctgcagggagggatacaagttccaggtacagctgctgggcctacggtcggtcctgagggcccagcctgaccccttgttctaggtagcatccccctcctccaggccattttgttcttagctaggcaagatcaaggcctgcatcttaggagattaacaaaaggaccagctgtcctctttagaggcaggaaggcgagctcatccgaactttagactttgttatctttatcatcatcatgacaaatgctgctcattggattcttcctatatgtgaggcctcatgctcagagctttgtgtaaactggataattttatttaaacctgtaaaaagtctcaacttgtggttaagcaaacaaaggtcacatggcagagccagaattccagcctaggcttctcagactccagacctgggcttttaaaaacataccatgctgcctccattcagggtaactggggagaaaatcagaactttctaggcttatccaaactagattccac

SEQ ID NO: 51873 - DNA, 1494 bp, Homo sapiens
attgtattggtatattttgaccacctgagacaattaacagcactgtcacagaaatttagaaacgaatttctcaagtgaaactccgactgtttgttattccccaagaagtgccgagacatagttcttctaggggtattcctgatgactctgatggaagtggtgacttttggggctcagatgttggctgcagccacagtcctgactgcattaatggcatgttcaccctcttttctgttgcagggcaacctcctcctgacaggtgacaaggatcaactggtgatgctcttggaccagatcaacagcacctttgttcgctccaaccccagtgtgctccagggcctgcttcgcatcatcccgtacctttcctttggagaggtggagaaaatgcagatcttggtggagcgattcaaaccatactgcaactttgataagtatgttactttgatttcatatagtgaaatgagagtctccactaaaacgccgaactaggtctgtgagatgaggaagaatcctctgaatacctattagatttttgtgtcctcgttctggcttttaaggagctcagtctagttgggaagtgaatagttaaaatatactgtattagagtagcaattggctagtcagagaaggcaaagtggttggtgagatgggaggaatatgacgagatggagccacgtgtgcgcaaatgtgagtgcaagagaaggctgtgagcgtgggagacatagcaggtaaacagggagagtggcaggagccggggcagataggtctttgtgtcacgttagggaatttagccttgatcttctataggctgttgacagttgttaaccaagagggtgacatgactgggttttgtcccgcctttcacaccctcaaactctgctctttcctcctagatatgatgaagatcacagtggtgatgataaagtcttcctggactgcttctgtaaaatagctgctggcatcaagaacaacagcaatgggcaccagctgaaggatctgattctccagaaggggatcacccagaatgcacttgactacatgaaaaagcacatccctagcgccaagaagtatgaagccctcccgcagcggggctgctttgccttcgctttgccctttccttttccttctccatcagcatcttggcataaagcttcacgtgtgccccttgccctccttggggcctcccaaccgcttctggaaactatgtgggtgaccattcaaccactgcagagtcctcggggcttgccggaaaaggatggcaactttttggtttctacttagagtactcacttctttctggcttttcagctgagctgggtggttctatgtgattctttatgacactcggagagggtcacggttaatcatgccctgggggtttaaacaagccagagtcaacaactggtttctaggtagcctttgcttccctggcctgctaataagccttcctttgctttgcagtttggatgccgacatctggaaaaagtttttgtc

SEQ ID NO: 51874 - DNA, 1729 bp, Homo sapiens
ttggagatacggaaaagggctgtcagccatcagccaggaatagggctgtcttatcctggcctattttattcccatcttcaccttaccctccatttctgcttggcttcccttctcccctagatgaagaagaagatgaagaagaagtgtataaaatggctggtgtgatggcccagtgtgggggcctggaatgcatgcttaacagactcgcagggatcagagatttcaagcagggacgccaccttctaacagtgagttgggggcagcaagttgtgggggccagcctttctgcactgggagaggcccctgtggaaagaagctatggccactgtgtcattttaccctagagggcagcatggtgccgtggagcagtgcgagccagtgaaggacctggcagttaggactacattcttaggcacaccttttcccgtcctgctggcccacttcccttctccaatacctctctatagagccagcatctgactgtctttccccaaatagctgcacttgtgttaactattatcattgttgttgtttttaaaatggattttgtaatgtaactcatttcttgcattgtagggttttgtttgggtattcatccaactaatctccttagtgaggattagagcattccagagaggcaccacaaatactacactgttattttcactactccccacccccactcccccagggtttatgagaatatgtattattgttattattgtgcctttgttttaaatgacctatgtggttctgagctctcacaggccacgagctttgggatcattttctttactattagtttagggtctgagttgatgctgggatttcccccaagacaacaaacagagcatcacctcttccattaggaactgctgtcattgccgttgtattagagatggtagagatatatcccgccattggagctaccagcctaatgtgagagcccagccatctcaccatgtcccctgaagagccgcttctccctcctgtcctcttcatttcaggaggagcccctgctgatggtgtagaccctgcttagacatccctttcctactggcccccatgtcctacactctcatgtggcctcatgggttttgactggcttttcttgtcaggtgctactgaaattgttcagttactgcgtgaaggtgaaagtcaaccggcagcaactggtcaaactggaaatgaacaccttgaacgtcatgctggggaccctaaacctggtaaggagcatggactgcaggtgaagaagagtgggccttggaagtctgggtgtgaaagacctctcagttctgggctcagatgaaatggactcacggcttcttcaagcccttcatctctctggctgactggtgcagaggcttgggtcattcagctgcccttctcctctggctggctcacctcctgcccccatgctgctgccatggcactcaagagcttccttgctcctttcctgagttcagatcagagataagaggaaggcagtcccttaaacagtctagactacacaccagtgggaaagaagtgcccctctccttggggcagcaaagctgcctgtcatcaaaagctcacacgcttgtctccctctcagaacatgcatatacacgcacatacatacacacggtcatacacacatggtctctggggagtaaggctgtgagggcatccttgagagcaattgtcctcagcagttagtggctgtggtcttattctgagagtgactgag

SEQ ID NO: 51875 - DNA, 1053 bp, Homo sapiens
ctgaggaattctcactgggcttctatagccggaaacacttctgcaactggcctttctggcaggttgtcttcctccagggtgtcctgtcctgaagctcagcatagacttggaggcaggctgcttgaattagcgtgctaccaaatcccccactggatttcatcagtggttactttgagctccaatttctagtctgcaaaatgagaataatattaatatatgtgctcagtgccagacatacagggaactttccttattctccaatttagtgaagttgctgtaattttgtcatttataaaagacttgattcttatcattctagtcagattgtgggtttagcttaaagaattgtggatgaaccccctccttgtatggttatataaagacgtctgaatctctgtaggtaaagattgatgtactctcttttcctgttttgattcccgaggcttgagtcaaagctctttgatttaaatggccttgtttgtcctgggtagtagtccctattgattggagacagtttctactcctgaggaaggtccaggcttggaattagacctccgcttatagcttggtaaccttgaacaagctgtgtaaccttatgtaaaaggatcatagaaagtacttaattagcataggacctggcacagagtaaaacattcaataaatatttgttagattattacatagtgttctaatgaaattgaaggagatagtgtctttaaaatgtttcatacaatgtctagcttctagtagacacaaaataaaattagcattctttcccctaagtgaattgctgtgcatttggattctagatgttgtggttgagactttgtagaaaaatagaggctctccacattgctggggctttaagcaagaccaagtatggagtcctttgcatttgtctgggcctgtttttaagtacctttctccaactttctctgctcagggagagcccatgaggattgtttatcgtatgcgggggctgctgggcgatgccacagaggagttcattgagtccctggactctactacaggtagatcatggcactgcacatt

SEQ ID NO: 51876 - DNA, 1032 bp, Homo sapiens
atcacatgagaccagcaggaggaggaaggaaagtccctcctcgcaccccttccccgattttttaatatatctctcatatgtcactccttgtctgcttgttttgttaggctttatctcctaatccaccctggggtttcagggtagatgcttgatattttagtctacttgagtttgtttagatttttggaagtacctctgagtttcctgtcctttgtatctttaaatgtttggggggcttgctgagtttggtgtgttttcctcgagtgtccatggaacaaggtagcatggtataaatctccacctctgccatcccttctgatgcacccttctgtctgtcctccaggaggagaatgaagtcactgagttctttgtgaccctggagaaggatccccaacaagaagacttcttacagggcaggatgcctgggaacccgtatagcagcaatgagccaggcatcgggccgctgatgagggatataaagaacaagatttgccaggactgtgacttagtggccctcctggaagatgacagtggcatggaggtaatgaccataggacagtgctgcccacgtttacgattaggggcttcctcctaggctaaccaaatccaggtgcttcttcctagtagctgattaacttggggcaggtggccttcagtttctccactctgtaagttggggttaatgattcccacctttctacctcacctagtgctaaggttaataacctgtaaagggctctgcccagtgcctggcaggaagtaagcatattgttaatggctgttggttgtagtggtggtgggtatttattatcgttattgcctctggcagagacttctcggtgagtctgagttacctgagccccctaaatattggcgttttaccccctgtgcaggtttatgtccccgtgtcagttactttctggcagaccgttgagggtctgacatttttacatagtgaaaagccttttctggtgctgagcctgcaggagaaggtccccggtgggtgtgtctaagctggagcctgtgtgtggg

SEQ ID NO: 51877 - DNA, 1085 bp, Homo sapiens
ctgggacagtggtggaggtaactggtatccttggcagtgatatcacactgactgcacttgtcatcctgtttaggaaatagctcgtctgctggccctggaggaggctaccctgagtaccgatctgcagcagggttatgcccttaaaagtctcacaggtaaagagccacctggaccttcctttagggcatcctgaatctgtttagggacaacccttagttccttgggtgctggggttgactctcttctctctggtactgaccttagtgcagatttaagctctgcattttttttctgtattgatacgtttatgattttgagaccctgtttgctattgactgtttccgcttgttgaacacctgctctgtgccatgcacaaagatagattttccctgctttttgagttgctcataatcttttgagacacagactgtccttatgttttcatccagagctctcacagcaacattttcctgtctccacaggccttctctcctcctttgttgaggtggaatccatcaaaagacattttaaaagtcgcttggtgggtactgtgctgaatggatacctgtgcttgcggaagctggtggtgcagaggaccaagctgatcgatgagacgcaggacatgctgctggagatgctggaggacatgaccacaggtagcactgcccagtggcctggagcctaaggcactgtcccttctggggctgccgaggtgcattcgaccaatttcccccagttccacagatccagaggaggggtggcaaacatctccctgcattcaaagggagactcatttcttgacaaagtgttggctcttggaattttaaattctagagctgggctcagtcactttggatttttcatgttgagcttatagagtggtgcaaggtcaaaggctctctcattggtgtcttctatcagtctggaaaattctcagccattgtctctttaatcccctctgctgtattctctttcttttccttgtgaaactccattttcactctgtcatccatatctctccatctctcataatgttcatctcattgtgtatttatgctgcatttttgacaatttgttcaattcag

SEQ ID NO: 51878 - DNA, 1055 bp, Homo sapiens
accattgtggaagctctagccaccattcccagccgcaagcagcaggtcctggacctgcttaccaggtaccatttgggagtgggatgaggagcgtggttagacttgctctagagccttttcatcttccccggggaatccatggatcagggtaatgagaggcacacctctgggtagaagaccccagaaacaacaaagtgttaaaaagctgacttttagtgatggtagtggtggtggtcgttgtggtgagggtgttagcagcagcagcagctaatatttgagatcttatgcagctaatattgatcgagattgagtgcataaatgcttggcatgcattatcttatttaattctctcatagcaatcagtgccaaaatatgaatgcttagattctgtggcattcactccctgcagtgtgctctgaatgcttcctagatgtgggaaattcccatgtgggaattggagctgtcttggatgctgttcctccaccctctaggaagcaggagagacagacagcagaagataggaaagattgggaggagaaaggggagccttggagctgttcgaaatgctagagttcttgactagagtgccctgtccctcttggtggcagttacctggatgagctgagcatagctggggagtgtgcagctgagtacctggctctctaccagaagctcatcacttctgcgcactggaaagtctacttggcagctcggggagtcctaccctatgtgggcaacctcatcaccaaggtatcctaccctattgcccaagagagccccttccctaattcccccttgtaccttgatgtaaactctactatggtgttttgtttgtttgtttttgctgagaagaaatatttgttgaaggtgtttggaaatatttttatgacttcattgtatttattatgtagctgtagcaaactcttgggagcatttggactgtttacagtttttaagcaatcccttaccagcgctgtgactgttggcttcctggaaaggagttctgcaagggttcgattaagaagatgtaactacagagtgtctggtgctgcaag

SEQ ID NO: 51879 - DNA, 1032 bp, Homo sapiens
ggactttggggcttattcagtatgttgggaagcaagagtgagtgatacggtttgtgttttttattaatagtgggaacattgttacaaagagacgtaaactggaatatgagggccttgtggaaaatgaaatgcaggcagatggagaagacagggaaagagttgtgaccaagactgagagtggacgtctaggttttggagactgtgtcacaccagacagcaggggctctgtcgcctgggacatgggccccataaggtggtgctgctcttccctcagttagcttctgttcataggcaaggcggctgtaatgggccctttattattaccgaccacggttttgtgaagctaaagttctagtcttgccccgggaaggaagtagaaaatttggggccaggtagccttagacattgatttcattttccctgggccccttcaggtggaaaggagtgtcacacctgattgtgaattataggactccatttctatttgcttctgcagagacaacccagaagccacccaacagatgaatgacctgattattggcaaggtctccacagccctgaagggccactgggccaaccccgatctggtgagccggcctagcaggcccagctgtcctctctgacttcccctcacatgccttgtgtttctcagcttcccctcccaggtcctgcggtgactgaggagggaaggagcagaacattaccccagaatggttttcccagggaagagcctggagcacaagggtctccgtctgtcctttgtctctgttggagccacctaggaccagaaattgtattaatagttaagagtcgctggaccggagctgaccctcttgactcatgtctcttcccattgccttctaggcaagtagcctgcagtatgaaatgctgctgctgacggattctatctccaaggaggacagctgctgggagctccggttacgctgtggtgagttaggggattttcagagaaaggaaaggaggctcaaaggagcagtcctggccggactgggaggggaggagggaaactga

SEQ ID NO: 51880 - DNA, 1033 bp, Homo sapiens
tcagttgcaatgtcacagacctaatctccatgagatgggaggctggccatagacagaggtacctcatataaggagagcatccagtttaccttccccctcaaccccaaattgctggagtgccatctttgctacacgtgtattagcttctgacctttgtctttgttacatgggagttaagagcataagcctgccatctgagtctgagttctgactctgccacttatcttggtcaagccactttctccaagcttcagtttccttctctgtaaaatggagataaagcatctaaccagttgggttattgagaagattaagttatataatgcatgtaaagttttttctaaagcaaaactaattttctaattaacatcctcttcttattttaattgctaattcccattattgttgcctttttgttcttagaaagtctttgcttcgcgcaaagagttgttggaatatgacctacagcagagggaagcagccactaaatcatcccggacctccgtgcagcccacattcactgccagccagtaccgtgccttatccgtcctgggctgtggccacacatcctccaccaagtgctatggctgcgcctcggctgtcacagaacattgtatcacactacttcgggccctggccaccaacccagccttgaggcacatccttgtctcccagggccttatccgggagctctttgattataatcttcgccgaggggctgcggccatgcgggaggaggtccgccagctcatgtgcctcctaactcggtcagtacctacaccatggttatgggcctagtggttcctactgacactggcagccatgccaggagcgttagagagtgcacagaatagtgcttctgaccacccagcaagttaggtagcttataacaaaggaaagatggaaagagacacagggtgtaggtgagcgagcttggggagcattgaaacccaggtttccttgtaaatggcatgattggcttgtgcttttttggttccagtacagtgtcttgaggaaactctccctgaggcct

SEQ ID NO: 51881 - DNA, 1946 bp, Homo sapiens
aactgtggagagaatgtgtaccagtgtcacaaatgcaggtaagtcattggtcatcccctaggccagggctgtgcacattccttgttatttttctgtagtagtgtcagtgtgagcaattacagtgtctgattccctcagaacatttagagaattatgggtttgtagagtgggttcaagggtagaaagggaggaggaagaagagagagtgagtgagtgtgtgtgtgtgtgtgtgtgtgcatgtgcacacgagtgtgtctgtcctgtggcaggggtggagggtaagggcggagggaggtccagaagtttagctctgggtcttgctttcttgttacctggctgcttaagtcattcatttgttattgtcccttcagtagcccctgcagtagttaccagagtatataaatgtggcacaatccatttcctcagagtgacccccaccccacccagccttgtcaccttactgacccaaacgctttggttactcagatccatcaactacgatgaaaaggatcccttcctctgcaatgcctgtggcttctgtaaatatgcccgcttcgacttcatgctctatgccaagccttgctgtgcagtggatcccattgagaatgaagaagaccggaagaaggtgaggccagatctggcctagactcagggctgtggccttgatctggactttgggcagacctggtgcagtgcagtgcactttactttctagcctaagccttcttcgactcaacaccagtttcagggcccagcttttgggtgggagcaaagaatggcatgaggtatattgtattgaaagacatggtttgcataggattttagaaaagtgttgattggtaatgaaactagagtatctccaggtacagataactttggatttggatgctttgccctgcatttcttccacagactgcttcatattgaggctgctggccctccctcagtattagattgtccagtgctagttcccagcctgcataatatgggcaggggcggggggaggttctagatattaaagaacagtgaaaaaggggcacctatagggttaacagaagaacatttagctttggagtcagaaggacagaaattctaattccagccatacttttaatacttgtgtaacctagtataagttacttctctcagcattgtattattatatatcacagatgtgtattgtatttttattagaaataatatacccacctcacaggaaagattattgtgaagaacagagataatgtatgaaacacagtgcctgacctataggaaatgttctggtaaatggttagcagtgaggattactcagggaaagtcatcagccaaaaagccttcactcagtccctgtcttttcctgtctaggctgtatccaacatcaatacacttttggacaaagctgatcgagtgtatcatcagctgatgggacaccggccacagctggagaacctgctctgcaaagtgaatgaggcagctccagaaaagccacaggtagtcccacgctgcaaagggcatttggataagggcttgggtcttgatcagaagactgcctcctaggtgagatcaccttaggtggggagcctgacagcttacctcttggggttgcaggatgactcaggaacagcagggggcatcagctccacttctgccagtgtgaatcgttacatcctgcagttggctcaggagtattgtggagactgcaagaactcttttgatgaactctccaaaatcatccaggtagagagcggggagcagcttttgggtgtgttttgtccaagtgttactggtgttgttttcacagcagtcctgctgctctctcatctagcagtccaggtcttggtgttgtccctgcccaatctagctgaaaaggcaggcagatggctgcaccaaacggcatctcccccaccgtgatttatggcgctggtcagaatgctgagttcatgcta

SEQ ID NO: 51882 - DNA, 1901 bp, Homo sapiens
gtcctgaggccaataggtccagtgggattcttgtttccagagatggatcattatcacatagatgttcctctcctaatggttggtcaccgatagtaggaatttttatctgccacatttattaccttaaatagaaacttggctgggtgcagtggctcaagcctataatcccagtactttgggaggctaagatgggaggatcccctgagcccaggggttttagaccagcctgggcaagatggtgagaccccatctctacaaaatattttttaaaaaattaaatagaaacttcatcttgtggatgaagagtgggttacactgatgaatttttaaaaaggcagtacgagtcttgaactaataccatgttttgtgaactcttgtatttagtatatcaagctgtcttccattaaagtggacacgcggtacaccaccacccagcaggttgtgaagctcattggcagtcacaccatcagcaaagtgacagtgaaaatcggggatctgaaacggaccaagatggtgcggaccatcaacctgtattataacaaccgaaccgtgcaggccatcgtggagttgaaaaacaagtacgggctttttaggcctcgggaggggcagcaggttgtaaggctgaagctcagttgctgccttcggttcctggaatggagtaaggcagcacatccctagaggcctaatacatcctcttggcccctccattcatgaccaaaggacaaaagtgaaacaacagttctaagcatgttgacaaagattatttctaaattagcccagtggagccataggggtctgtggaagttcctcaacagcctgcctagggaggggaagctgagtgaggggacctccaggcttctcatgcccattttaactattcttacacaaaggtctagacttagataaaaccttctgtattgggaagtaattgtcatttcttggattaagacagctatgctcttgctcacagggcagaaagttatttctcaagaagcttctttagtacacacactcttcgatttccacatggtgccttttctctgtatctgctgatactggatcttcctagcccatgtatcccagtgactgaaccagggcatgtcatatttaggccaagagaggcactcacatgggttatagtgttgactttcacagagacagatcgcctttttttgaactctcaggcattgctactgaagggagaacacaggttgacactacttgaatagtaagacttacagagctgttctgcacacaggatggaagtattgctgttattccaagaggcagaataaggctcatgtaccacagcaacacgtggccatgaaggctgcctagggaggttttctcttcttgccttgaaaagcctagtttaaccttggtgacctgaaagtagatgctgcacattagggtggcccattcccctccagaggaggtgggtttgatttttcattgtgtggagtcagcagagctactggtagactatttgggttcagatcccagctctgctacatagctctgtgaccttagagaagctgcttaacctcagtttctgtaactataaaatggaggtaggaccccacttccagggtttaaggattaaatgagttagtatgtgtcaggtgctgagaacagagcctagtacatagtaagtactcagtaaatattagctctcattgtgttatataatcaccccaaaattattacataccttcctctttatgacttgacttagcacttggttcagaccctgattttcttcctctgcctctctaaaatagcctgggtttatctttccaaggttgctgtcaggatgggaacttggcatgcatcatcattgcacctcttacaggcttcagtgtggcatgcttttggagtcatggtttcccttgttatatact

SEQ ID NO: 51883 - DNA, 1049 bp, Homo sapiens
tatatctagttttgcatttcttggtaagcactcgtaatatgtctgtgatgtagacagtatacactaacaaatctaacttaacataggacgtaggtcaaggtcaggtggggaaagaagatagaactcattacagttccttggaaaagcaagtgctccttgttttgctagtagccctgattatacataccagaaaatgtttctgcaattagctaaccattttatggcttctccataaaaataaaaatgatcttcctccatcaggtcagaaaagggtactacctatcactaaagctcatggaaacttctaaaggagatagaatccatttaaatgattgaaattaggcccagctttgtatgattctgactgagaagtctggtaggtctagggcagtattcagctagaatgcagaagacaaaagtcttttccaataagacttcaccttgggctttaagttgtttctttactgaattctgtttcagttgaaggagtattcacagaaggctgtggagattctgcggactcaaaaccatattcttaccaaccaccccaactcgaacatttataagtgagctttgttttgctttctacctgtgggaagctcagtcagcattctgaggagttatttgcatggtgataggctcttacataggaattgacaagcgcctgagagaagagcgaatctgcctagttgagattccaatcccctccatgtaggccagggtcttgcaaatagaaggtactcaaaatgtcattgctgagttcagggtttggtgagtagtaatgtagaaaggtctgtatagcctgggcaacatagtgagacttcatctcttaaaaaaaaatttaaaaaagttagccaggcgtggtggcgtgtacctgtggtcccagctgctggggaggctgaggcaggaggatggcttggggccagaagttcgagggtgcaatgaactgtgatccacgccactgcactccagcctgggtgacagagtgagaccctgtctcaaaaaaaaaaaaaaaaaaaggtctttagtttcaagggtttaagttaaat

SEQ ID NO: 51884 - DNA, 1508 bp, Homo sapiens
aagagcaagaaagaagaaaaagaaaaggagaaagatggtaagggtcaccctcttgtcattgtgactacaatgatgtatgtaaatctctcttggagcacatggtttgtcctgttgtaaaaggtcttttaatcctgatttagaggggacttaaagcccaaatgttctctagtgtctacttttggtctcattttcaattatactgaagtgacaccttaaacagcatgacttctcataccaagtgacagtaataagaaaagtcaaagtgcactgaacatttttagtagaccaaatttcttattctgtgaaataataacaccttctctatggagctcccatcagagttcagtgaaatgacactgagtacattggtaaatgctcagtaaatgttagctctcttagctgaccctcaccatcagctgcactgctttccatggtccttggagacctgagatcagtggtcagggttgagagccatggtggtggttcacattcccccagttaatgatcagacatctctgtgtaggcctattgcaagcccttgaaaggaagttcctcctcctccagtgtcactgtatttgttcagtgccagcttacatagcactttatcctgtggtttttagtgtcattattgtatgtcttgtctggaaggcagctgtgctcaccactgcatcaccaacgttacacatatgtctcatttggggctgacctatttgtcccccagtaaacaactaaaaattgttttgcagaatatcagcattcagtagaaacttttagaaatggacagaattccctccctcaccatttggtagcccaggccttaggaccctggaggacttcttcctactcttcagcccttagtcctgtcctaatcttgcaggtgagacctctggcagccaggaggaccagctgtgcacagctctggtgaaccagctgaacaaatttgccgataaggaaaccctgatccagttcctgcgttgtttcctgttagagtccaattcttcctcggtgcgctggcaggcccactgtctgacactgcacatctacaggtagggccagggcttggtttgacagatctgcaagggtgtgaggccagggtgcgtaatgcagttctattttgttttcggttacatatggtcacagagtcagtagttacgccagcctgaatcctcttgtgctttagagatttctttattgttgtctgctttttagccattaaactgacgtcataggcaggagacgatctgttttctactcagaaggctatgtatcggggtttgtaacatgaccaagcttgacccttcaggctaaaaaagctcagcttctgctctgggatatgttgggtgatgggtagaggcagcaaatgactatgctgcatctggtaggattgattgtcaaaagtgaaacaaaaccgttcaaacttaacccataattgtggggaaattgaggtaccagagcctcaatgataaacacaggtgcctcagggttttctgctgcttggtaacatgagc

SEQ ID NO: 51885 - DNA, 1118 bp, Homo sapiens
tcaagaggaaatagcttggtttgtgtttctccccagcctttgtttttttttttttttttaagaccaagtctcactctgttgacccaggttggagtgcagtgacacgatctctgctcactgcaacctccgccctctgggttcaagcaattcttctgcctcagcctccctagtagctgggattacaggcagtgctaccacggccagctaatttttgtattgttggtagagatggggtttcaccatgttggccaggctggtctcaaattcctgacctcaagtgatcagcccacctcggcattccaaagtgctgggattacagctgtgagccaccgtgcccggcctgtccccagcttttaataacagtttattaaaacccagggtgtgagagccacagttgatatagatacagtcccagagtcatttactctttgtggtgtttttcttctcaagtacctcatgatccagcagactccatttgtgcgccgtcaagtccgcaaacttctgctcttcatctgtggatccaaagagaagtaccgccagctccgggatttgcacaccctggactctcacgtgcgtgggatcaagaagctgctagaagagcaggggatattcctccgggcaagtgtggttacagccagctcaggctccgccttgcaatatgacacactcatcagcctggtacgagggctgggacctggtagggcagggaggggggatgtgataaggcttagccaagtaggtaatagggctggaggtaataatgcaggacttttaactgtgttgacaatggcatggttagggctgagatgagggtaaatccataacccctgtctgggtgctgtaccatgtgtagttggcttcaggatctgggatgtccccctcagcactctcatcccacctggcagcagttcctccactgtgaggtgagtggcccgagcttcttaccagtgccatttgcttacatcctagtcaggactgatctctttgtgcacctctggtttttacccttgaatactaaagaaatgatgaaggttcgagtagaaaaatgtattgctgcctaaagagaaactgtttggacttagaggagtaaactgagtattttgtatgtgaacaaccta

SEQ ID NO: 51886 - DNA, 2417 bp, Homo sapiens
acaaggtgtgagagagtagagcagtgactggactttataagaatttgggaaacgtgagaaagaaagggctgggtcactgtgcagctgggtgatatagaatttgtatatagcagaattctagaaaataatgtctggaggcagaatagggccacatattagaaaaaagccataaatcttgcagttggaggtttggttttgaaactgagaactactagggcctggaggcttgggaaatactttgaacttccctgtagtaggatttaattcagtgccatcagttgtattttagaatagtttcactttcttttaacagagtgggatctctccttctgtgttgctgactggcataccgattaggcagttcttaacttttttttttaatgctggagattgttcctaagcattaggcttcttgttgaccttggtagcagggtggggttggggagggaactgtattcagctgtgtcctgttggagtacagctcatattttctatcttttccccacccttttaggctgcacatggtccgtctaatgctgttggagagattactgcagaccctgcctcaattacgaaacgttggcggtgtccgggccatcccatacatgcaggtatctcttagctcacctggatctctgtcaggtcatgattggaccgtccttaagcatgcccacatctctcttccagaggacctggaagccttcgtttggtgttaggccacagaataatgaaatctaatttttgagctacaaattatagctcttcattttataaatgagaaagctaagggtcagagaattttttaaatgcacaagttcatccaggtagttattgacagagccagtgcaaaagcccacttctgagattctgagtctctagtctttatgttgatattagagtgtgggccaatagctgttcttccactcactagctgtcttcctcagaggcaaaactgttctttaattcttagtttggtgtaccaccctttctcaagctacttgcttggatataatataggttagtccattaattttacaaactttttacaaaacatttttttgtaatgtcaagtgtggcatatatcagaatttgacttttctgactctgaacactgaagctttggatacctggaatttagaacgctataatggattacagttatgattgatagggatgtcaggaagattaggatttcttctgaaacaccccgtatttcaagtcgttcttctttaggaaattgggttttgtgttttctgtctttgacttctaggtcattctaatgctcactacagatctggatggagaagatgagaaagacaagggggccctagacaacctgctctcccagcttattgctgagttgggtatggataaaaaggtaaaatctgagaggcagactgtgtgagaaacaggattggctgagatcctttctcaggttcccattcgtttcatagaggaacttcacctcgtttcaaggggtaaccatccactgagggctgcattctgttgagtcaacaaaagcgtattcagggcctgctttggcccgagcatagttttggaccctgagcatagttgagggcaaagatgaagttcttaccctcatggcccttttgtgctcagtgaggtgagaacattaaattagttgttcgtatcttaatatggcctcttaagtgtatcgggctctaggtaccccaagtatagtccatggatatactgggggttgttttgtgtctgattcaatctgaggaacattttagggctgatgggcttgacttgaagggatcttgttcagaggatgcctcaagcatcgagtaagtagaggtttctggacttacgctttggcctgcaggatgtctccaagaagaatgagcgcagcgccctgaatgaagtccatctggtagtaatgagactcctgagtgtcttcatgtcccgcaccaaatctggatccaagtcttccatatgtgaggtatttttgctttgggttcatgggtttggggaaaggtaagcggattgtctgggtagtgctagggccagcacagaggtggtagtcctctgtaagaataaagccattgttccctgaggggagtaagattctaagctgtcaccttttcaagagcagaacctccaccttttcccgaatcccttccaagctctggtctttggtaacaatccctccaatggaggggtaaaagggtttggaagttccattattgaagagcagggctctcttctgcaaggcacagagtggctaagaggattcccctagtgtatgttgctataaggtatggtaataaagcagagagaaagcaatgtgtgtgtggtgaaaggagattagcataaagcagagaaggtagaaattgaggctgaactgcatccaatcttaatgagcttagggagctgtggggtttgctgggatt

SEQ ID NO: 51887 - DNA, 1484 bp, Homo sapiens
aaatattttgcctgttttggtaccattttgggaatccagaatgtattttacactagtggcacatctccttttagacagccatgttttaagtgctcagtagtcacatgtggctggtggacagtgcacatctagaggattgtacacaactttgtgactttcagaaaatcttccttgcatatcatttatcttgcctaagcttttgggttaggcagcagtttgtggctcttttccctagcaagaacctagagtggagatagtttatgtttctaacggacatatttacaagctttagcaatccatcgagtggaaggtgaggtctctatcctcttctgacaattaggagtctcacctggacatcttccttattagaaggccttctcaccttcacacaaaagtgggcacaggcaggacctgcagtggtgtccttggtttccagtcaatggttttacacttcaattctggttcttctcatagtaattacgtagtgtgaaaatctcactgacctagttgttttagaaaaaaatagtgaaataaattctaatctgccatgacagacaaaaggtaaagatcccaatcatatgatttttcctgtcttatccaaggtctcctgagagttagcgtgagtttgggaggcctactggttttagatctctcacctttatggaaatccctttggaatccaagtttgtttccttcaccagctggaacattttatttttgtggggggcaagctgtcgcagccaactccatcttcccagatgctgtaggtccaagaagtaagagaacaaggccaggcatagcaccccggagttctcccgctaaagcccagggtgctagctggtagcttgtcttgggtttttgttgccacctgacttatggcaccatgtgccaagggaggaaagcaagcaccttcaggtgactggggtttctttgactcaggagacaaggatgatgatgacgatgatgatgcagatgagaaaatgcagtcatcagggatcccgaatggtggtcacatccgtcaggaaagccaggaacagagtgaggtggaccatggagattttgagatggtggtgagtctctggcagcaggagaaggggaggaggagcttcacaactctcctctagctcttattcagtggacttccaaaagttaccacttaccatgggacactgacagagctttctctctgcagtctgagtcgatggtcctggagacagctgaaaatgtcaacaatggcaacccctctcccctggaggccctgctggcaggcgcagagggcttcccccccatgctggacatcccacctgatgcagatgacgagaccatggttgaactagccattgccctgagcctgcagcaggaccaacaaggtagaaggccatgccaagaacaaagcggcccattggccttgcacaggaaaagagggtttggcagttactgatatccagctgacttagtttgtccccagatatggggagaggttg

SEQ ID NO: 51888 - DNA, 3773 bp, Homo sapiens
tagatttgaattttcccatcatactttgatactgcagggtttttattttttaatgacattaatattttatgtattaagaaacttaactatatgaggctgctttgaagatctgttgtaggtgattggtgttcattggcctgttctcttgagaggaggtaataatcctggtgatctgccagcttttctctcctctttgcttttgtacccagctcttgcttatggctgaccctctgtgctcctgttgttttacaggatcaggccttgctgagcaaagctgtgcagtgtctcaacacatctagcaaagagggcaaggatttggaccctgaggtgttccagaggctagtgatcacagctcgctccattgccatcatgcgccccaacaaccttgtccactttacggagtcaaagctgccccagatggaaacaggtgaacttggcctctgtggccgtggtcctgagatctgcttcatatgcctatttaccctctcattcttactgttcttactggcctctgactgactgcatgctcagagacagggattttgcttcctggtctttataccttgtagggccttttgacattgagattgtacaattttaaacacattctttttccagtgcttatactttcgattatccttgagtttatttagtgttctagacatcagatataatctgtctctgaagttattacctcttaggagcttcaggggaaagctaagcttggttgggccctggttgctttaaagcaactatggcatatctttcgctttcatgccattcttttgccagtgctattattaataatgtgtagcaactttctcagtgctcagtgctgtttcctcatctcctcttctgttggctgggtagcaaacctgttttgtcattgtcaaattgagttgattgctgcctttacaattctgtgttatttacatgctcccatatgcatcatcattctgttcctccttttaatactacaatcccagaattgttctagagagatctctagaatgttcagatgttcctctacgttttagaagttgaacagttggaactgagatctttgaatctgcggtaaacatcctaaatgctccccgttctacttaattctaacatacaatgttttctgcgatattcctttcccagactgtttttttcctagatgtgcctgctggagtctagggatagttggcatattgattggggccccacttgaaactccctccccaggcaagcttccttgacctgagttaaccttaaaacaaattaaattccatctcagatttaccatcgttgataattttctttctcctgcttagaaggaatggatgaagggaaggaaccgcagaagcagttggaaggagattgctgtagtttcatcacccagcttgtgaaccacttctggaaactccatgcatccaaacccaagaatgccttcttggcacctgcctgccttccaggtatgttaaaagggatatttgaatcttggtaatgaagcctgatgtaagttctgtctttgaacagctatgaccgttagccattagctttcattcttcataatccatttcttccagaactcataattgggaagtagaagtctgcgagataaatgcaatgttcctgagacaggaatttagcagtgtggcagagtgggattttcttctaccatatcttttcatcggggttgaatattttacataaagaggcactgtgtgtgtgtgtgtgtgtgtgtgtgtgtgtgtgtctcagtggtttataattgtttttaaaaatctttgacaacttggcttaaagccagctcaaaaggcacaagtatcttgaggattattctatttctaagctatttggtctctaacttcttacactattgaaaattcagatggaagagtaaagggtctgaatagcaatatagaaaagtaggatgatcctggtgctcattcatgtttggaggacatttgggtggtaaacctaaaaggcaagtcaaggtcatgttttgtcatcacctgaggttgggggatattagggaacatttagtatctgccttcctcttcatatttccttgccttgtcttttgatatccagagagagtggacagctacttatttctgtgactcaagatatctggaaagacttttgaggacaatttgggagtttaggaaactgttaatgaaacaaatcataaataatacaggctactgtgtgtgaatgagtgtgtatgtgagtgtttgtcattttgtttgcatgaccttttacatggagataaaaggttacacttttgtctcagactctcaagtagttagagttttttcctccagattttcaaataatgtttgtctctcctttaggactaactcatattgaagctactgtcaatgctctggtggacatcatccatggctactgtacctgtgagctggattgtattaacacagcatccaagatctacatgcagatgctcttgtgtcctgtacgtagcattacaatcccagagagctcgcagcagccagggaatatctggaaaattgtttttagcttgctaagctaatgaaataaaatatatttagaggaagctgaagggaatgaagtttcaaatatcaataaaagctttaagatcttactccatggaagagaaagatttggaaaggggatgggctcagtctttcttattcagtgctgaatcaccagggacagcctactgcttgctacatagtaagtgctaggtaactcggtgaattgtgacttaaatgagcacatgaatgaaagtagtacatcaagatttctatttccagtgaccctttcacagaagctaagtgttaaaactactgattttagcacagagctaagacgtgcgctgggggcttgatcatctgataaaaagccagaaccatttgtaaggggccaaaatggcctcaggagcaaatgacctgccagtccatccccaggaactgagagacaggaggttagcgaatggctcttaatgtgtgccagaacaggaagcggggattaacttaacctgctgaacttggtccgctgggttgcaggtgagagtagagaggtattccacttgcatgtgagtgagtgaccaagaaaggaaagtgttttatagagagtttcatgaataatatgagagcaaagcgtgacagtttccttttaaacctcaggatcctgctgtgagcttctcttgtaaacaagctctaattcgagtcctaaggcccaggaacaaacggagacatgtgactttaccctcttcccctcgaagcaacactccaatgggtaatatgaggtctgggtttaggctcaagcctgtatttgggaggaggggagagagggaggtacagtagcattgggcatgctgctcatgttgaccaaggtcctggagactttatgtatctgtcttttttctaatcctacctcaccccataaagaatttaggtggcacatcaaaatgtatatagtaagtaggataaaaataaagattaaaggccatgggaaaataaaagtaccatagtaaaatcaaaatacagaaaattcacatcacaaaggtcctgcatggttggtaagcgagggtcttatatttggctgaaagcttcctaagagccatagcaaaaataaaatcacagtgaccaaagacaaaacagaaacataacttttcttgggatagaagctcttcattaaatgtccattttgttgccaaaggggcagaatccttagtggacttacctacaataagttggatagcaaatttcacaggaatttccctcacaatacacagt

SEQ ID NO: 51889 - DNA, 1078 bp, Homo sapiens
ctatgtcctacttttcgggcccatagtgagcgtgtgtcacagaataggatgcgtgttggtacaagaacactgttctgggaatcatgagcttggattccatgtcttcctctggtaagaaggaggattataatttctgaaacttttttttttttctctttgcagtccatggagcataacctagccctggtggcctagaaggaaggaagggcaggcagagtgtagatagttcattctgccttgagttggtggggttagtgataaccctgctgtcttttgccttaggagagaaacaagaatgctgctcaggagctggccactttgctgttgtccctgccagcacctgccagtgtccagcagcagtccaagagccttctggccagcctgcacaccagccgctcggcctaccacagccacaaggtaactgttctctcagggaaaggaaattgcagtgctgacagggaatcaaataagttagcttttcattgtaaagcaacagcacagcaaagtaaggtagagggaggatagcattcagattagacctacattttacagagtttctcctgagaaattctcaagtgccactcaaaaccgagggtaagccagtgactgggcccctggtttgtacttatttttctgtcactctaacaggatcaacaagacttaagaaagagaaggagggatattgagcgtgggtagccttctcgctggaaaagggtgaggtgagggagtccctcaggaaatagactgctagtgttttcgctccctcaggtgtggcacagcacgagaagtgtactgtacttgttggtgagacaagtgttgaatagttcttggagtgcctctgatgggaacatctggggaaagagggtatcacttataaaagaaaggcattgccaaaggagacaaactgggccaatttctgtagatggaaaagatgagagttcagacccctgaggaggaaggctctgagaggagccatcaacccagagctttggttagcttctgtgcctccaacccggagaactgagaaatgtgagtttaacctgctgtctctcaaggaaagacaattttggaaacactg

SEQ ID NO: 51890 - DNA, 1051 bp, Homo sapiens
ttaccctagtcctctctgctccctttctaagtggatgaaaagggggtttggggtagagggattaacagcaaagtcctaccatctgataacccactagagagctcgttctatccaaatttgttttatgcctcagtttcctcttccctagttctttattgccttcctctaccccttaacccctttctttccagttaccttctgaatacttttctttctctgtccagagcttcagctgtcaggatgttgttctttttactatgccacattaaattgaaaggagtaaaccctggggagcatgttacttggtacctttaatagtaatagttgggtttcctattcctttcctaaggggaaaagttttctaaagatgctttgtatttaccccttgaatgttggcaattggcatgcacctaaaaaatagtttgttctctcccccatacttgggactcctaggaaatgcctttgtgcatatatagctttaaactttccaatataagaggatggtttttacctttccctttgtgtgtccttttgcccactgatctctgggcagctgagctttgggtcccattgcatcaagactgttaagcccatctcagtgatccctgccacaggcagcagaaggaagcacatttatcctctttgaggaagaaaagccctgtctttgagttacggattacgaacatggcctcaggttgatctctgagcaggagccaggtttctcctggcctgtaacgtaggaaacgatatgcatggtgcctgtggcaggtcttattgtgctttgattttgtatttggcattcattagctgtccccaaggtcctcatgactatagtttgcttaggctaaagcgcaaggcggagagaacggtgttgtactcaagccaggttttctgtctccccaggctggttgtgagttctttagaagccctggaaagctgctttgccgttggcccaatcatcgagaaggcaagtcactttttcaaagcacatggaagctttctgaagaggcaggaagtcagtggagttgcccgaggccctgaggcctcgaag

SEQ ID NO: 51891 - DNA, 1747 bp, Homo sapiens
ttgactgactcaggactcttcaggaaagtgaaagcttgagtttagcagtgagcaaatccagctaagcaaagaccattacagggatcatcacattaccttaaatttgctctacagtctattttgaaagaatggtttattcatttacattcattaaagaagtagctcctattgtttattttaaataacccagttacaggagagcctattgttattagctgtacacccaataccaatgccagatttcttggtattgctaggacatgtcatagttagggataacaaccattggagagctaaccacatgtaggcatcatgccgatgcaaatgttataatccagagtttgcttagattagagtgtgagtgtgggctctgtctgggaggagtctttaccagtggtgttggggcagaggtgggagagactcttgacgatctggtaccgttctctgcagcaacccgcacgtctagccaggtgactttccccattgacttttttgaacacaaccagcagctgacagatgtggagtttggtggtaacgacctcctacaggtctataatgcacaacagataaaacaccggctgaattccactggcatgtatgtggccaacaccaaggtaagaatggcactgggctgggatcaatccctgggtagaaggactcaaacaatatggtttgagaacacatctccttttagaaagcaagtatagagtatatactcacagtcacaaccctcggttctagttaaatggttccttagaaaaatggatattcttactcacttggcaaaggacttgtacaggttgggtttccaccaataccagcaggattactgtgtagaggacatcaaagaggtggttaatactggggagaaggaagcctgacattgaagagaatctgctctcttttcctattttcccatttttagaaacaaggaagtcattaccagggagttaaaaggataagttttaatgagcttcacatgttgagacaatgtcagagaagaaggagtcctagttaaaacttaagaacttctgtagtttcttgatgtgtgccttgtctccctacagcccggaggcttcaccattgagattagtaacaacaatagcactatggtgatgacaggcatgcggatccagattgggactcaagcaatagaacgggccccgtcatatatcgagatcttcggcagaactatgcagctcaacctgagtcgctcacgctggtttgacttccccttcaccagagaagaagccctgcaggctgataagaagctgaacctcttcagtgagtcaccaacccctggtgcagactctgtcctcattgtgactgcgaaattgggagccactggcctgtggctgtccaacattctgggatctctccactctgctgatttttctgtcctttcatcaggaaactttgagcttcatttgatgtattaaagaggcaaggtgacaggaaaggagtacaccggagcatggtagcagtaaagatagggctgcactgtgttgagtattcatttcaatagtgttgtgtccacctcactaatggggctacttctgtgtttaggccgagaggaggcagattgacatgaaattgcaaggctttcttaacgcacagaggaagacctcaggtcacacatggctgagagatggttggcaatggcttgctatgccactgaaaactaaactctcagaatacaaatccttgagccttactcaagactgcatttctctgtcatttattggcc

SEQ ID NO: 51892 - DNA, 1523 bp, Homo sapiens
taactcacacttttctgtattctggcctctccatcaccactaatgttgttttaacttttattttaagtgaaaatatggatagtccttcaaacaactctaaaatcattttaaaaacagtttcctagaaaactagaaaaggacagtggtacgtaggtattcttaaactattttgtgaactatataaagagaaattgttttcattacttacctgttctgtcctccatggaaatacattccatagcttttagccaggagtaatagagactaatactgatctaggattttctactagacttatctgtaaagaaaaaagtgtgcaacctgttatccctattgaaagagtttttgttacttgctttgacttctctgagaggaccaggagtaggaataaattagtcattgttcctttgcagatcaccgttctgcagctctctgcactcctgaagcaagcagattccagcaaaaggaagttaactctgacccgcttggcttctgccccagttccttttactgtgttgagcctcacaggaaatccctgcaaggaagactacttggcggtttgtgggctaaaggtaaaaatccggatctaggtttgattgccttgagctgtggattctagtcattttctctcccctgttctcagaactactttttcttattcgttgtggagattaaaatttaaaacctactgaaatgcaaaaggaatttttctttgaatttctcccagatctttcagatttctccaatattggaagtaatctttgtgttcatgaaacctgaatgttactagacagtctaaatactgtctgaaggcaggggatattagaggaaaaaagggaacgtcattactctgaaatgaattagcccacttttcagatcatcttttcaccattttgtttcttaaacattgtccaggactgtcatgtgctcacctttagtagctcaggctctgtttcggatcacttggttttgcaccctcagttggcaacggggaacttcatcatcaaagccgtgtggttacctggttcacagaccgagttagcaattgtcaccgcagactttgttaaggtacagttacagttctttgatgatatggtcctagaatttttctacttttaaatccagaatcactatgtgctagcttctcccaggagttaaaaaaatcagctgggtgccatgactttcacctgtagtaccagctacttggaaggctgaggtggagaattacttgaggcttagttcaagggtgcagtgagctgtgatcatgccacgccactccactccaatctgggtgatagagcaagaccctgtctctaaaaatgataacaagccatattttgtcacttttgctatgttgctgagtaggagctttctgtctttaggcaatagggaattgattctggttctaccctcactgtaccaagtgcacacctattaccatacttgtttcagaatttatttatgtatgtctgtcccctactcattccttgaaggagagtgaaaggtgttctgttcatctttat

SEQ ID NO: 51893 - DNA, 2791 bp, Homo sapiens
ttaaaatgactttcacttaatggttaaaaaatgctaatgttaggggggaaatgctaatgggagtctcttcatactctaatctggtcttttcttgaatgattttaatcagtttttactctattcttctaatttcaatcctacttcatcttacaagactttgtaaagagctgtctttgtgcctaagaatgaatgaatacatgttacttcagtacaatttactgaccagctacgtggggacggagtggtaaaacctggttaataaataaaaacacactgtttttcttctctgctctcataccatttctctgatcttgagctttatttgaaaaagcttgagaaaacatggtttacataatgaaacatggagaatctgaagttgctgtggggcttctcttacagcatgtgatgatcttggagtgcacatgccatatcatgtcttacttggctgatgtcacgaatgccctgagccagagtaatggtcaaggcccaagtcatctctcagtggatggggaagagcgggccattgaagtagactcagactgggtggaggagttggcggtggaagaggaagattcccaggctgaggattcagtaagtactaagtaacctcgaagttaacctctcaaggtaatgactaactggcatggtaccaagcttttggctctgttttccagcctcctgtgagcttcaaaacttcctagtccttgttgctgccaggccccaattttctaggccttcagagcaaggcatggggatctaatctcttgtggaaaggactttttcataagctttttccagagtcacttgtcctgctttgtcagtctttaattccaaatggaattttagggataagttcttcatggggggtagtggaagctcccctatagagaaagcataagatgttttttcttaaccacaaacccctaagatctcactcacctgaagtaacaacagattttcagccagctagctatttccagttgtggtagatttccacgggtcatttgcgagtcaactattcaccccgccatagggcgttgaggcacatgtgtttttgtgggtgtttatatgcagggatatatttcgaattaaaaagacttattatttttgaaggatgaagattctctttgcaataaactctgcacttttacgatcacacagaaagaattcatgaaccagcattggtaagggtagttcttcctttaaggtgaagatttgctgggcaccgattgttgggacttctgagcttatttgctggttcttgttctttgtaggtaccactgtcacacctgtaaaatggtggatggcgtgggtgtctgcacagtgtgtgctaaggtgtgccacaaggatcatgagatttcctatgccaagtatggatccttcttctgtgactgtggagccaaggaagatggcagctgtttggtgagaggaccctccctgagctataaagggtggcttgttagtgacacgggattactgaagccaaactggaaaattcccatcacctccaggatacctgagtctaggaatatgttccagctcactcatcgatgatctgcacagttgtggcctaaggacttcatttagaatatcagaaccagcagattccttagagatcttgtagttcgtttttcctaagacctccccacaatttcacacgttataataaggcctgatactgtgagtgggtaaagaagttagatattaggtgaatactatgaagatcagaatttaggcttttggataacattgaaacgcttagccagtttcttctttgggtcaaattttcctcggagatctcaggcagtatttcctctgtgcttgaggcaagaacttagggactctgacattttctgtccctaggctctggtgaagagaactcctagcagtggcatgagctctaccatgaaggagtcggcatttcagagtgaacccaggatttcagagagtctagtgcgtcatgccagcacctcctcgccagctgacaaagccaaggttaccatcagtgatggaaaggttgctgacgaagagaagcccaagaagagcagcctctgccgcacagtagagggctgccgggaggaattacagaaccaggtggggctgactgatgctccctagtaagcagacagagttcagagcctgttgaattggtgtgagagtaaataatgcacatggctccccttgcaactcattttctcctttacccattttcatagtgtgaatgcaaatactatgtattgtcgtcacgagggaaggatttatgactgagcactattaggagtattatggggggtgatggaagcataaattttagttgtgtcatactgtagagtaccctttcttggccagggttccttatctgaaacacagaaaacaaaacgatttgagtgtatatattctcaattttcccatggatggtacaaaacccaaaccattctagaaacgtaagagagaagttagctcatttcatatgagggatgcctttgcgcattaggatatctatgtgggacccctggtttagaaagattgctctggagttagtaccacaaatgcatattgattggaatcaatgccaggattatgagaatgagaagatggctagaatatccaactggaagtgaagtagctggattctgaaggaagttactggcaagatgatttttacaagtattatccattgtttttcttttttttttttttcactggtgtattttttctatttttctcaggccaatttctccttcgctcctctcgtgttagacatgcttaatttccttatggatgccattca

SEQ ID NO: 51894 - DNA, 1037 bp, Homo sapiens
cagttctgtttcactttcaccccacggagaattgtacaaatgaaggtgccacatgttggaatttcctgtctcttcgttgttgagtagtccaggttttcatcaaggattccttttattccctgtctcctcttttctttttaacagataaataatttcagacacttttagctgtgtagaaatgatttgtccaaagtgtctttttccctaaatcactggcagatctggattaggactgagctttagatgcctttcctgttcatcttcctaatgaagaggatagaaaaataaagttgaggggctgctattaattcagtaaacatgtattgaacacctactttgtgccaggctttatgttaagctttgccaaaacaaaattagacattgccctcaaggtcaaacagacaaactttggattttaataaatcaccataaggaggacattgaaacaggtcttaatactggtggttaagttttccgtttgatcctcagtggactggatgaatccatcctggaggaatgtctccagtacttggaaaagcagctggaaagtagccaggctcgtaaagctatggaggagtttttctctgacaggtgagccgtgttttgctttattcagtgaatattttttgaatgcctcttgaaagcaaggagctatatatgttgatttaggtacttattatcagcaatatttaaggcctggttaggtgtctgcactttggggagttaattgctgactccttggggttgttggtgagggggttaatttcatgaacaccttgtgctattgactcataagtggtcattttccccagaggagatgagattgtgaagaaaggatgctttttatgtggggctttaatgtgattctttccatttttctcccatcttgcctcccagtggagaacttgtacagatcatgatggcaacagccaatgagaacctctctgctaaattctgtaaccgagttttgaaattcttcaccaaactcttccagctgagtgagtgacagcttttagtaatcttcttatgggaacttt

SEQ ID NO: 51895 - DNA, 1142 bp, Homo sapiens
ggataaattcccaccattgtagggactaggtcaggccaatggagggactattgtcttcttatacataggtaacaggtaaagtcttatattgtattgccctaaaagtgatccaggttcctggcagttcttctagaaggcttgtctgggatggaatacttgctttggtttcagttaattttctttgttgaatattataaaatgcagctcattaatttgacgttttaataaatggatttttcaaatgaaaatgatttttgtttctgatataataatgaaaaagaagaatatgaaattgtatgatgatacctgtgtataaaatagctatcatgggaaaaagactggaataaaggcccttgcgcaattccccttcccctcttccccggcaagtaattgaattaccctgtccttgctttgcagctttttggaggagtgtattcactaactcgatttcattttctttgctgaagttggtcagatgagatgaacccaccacaggtaattcggacactgctacctcttcttttggaatcaagcactgagagtgttgccgagatcagtagcaactccctggaacgcatcttgggccctgctgagtctgatgagttcttggctcgtgtttatgagaagctgatcactggttgttacaacattctggccaatcatgcagatcctaacaggtgagcctgatggagaacagtcaggtttcctatgacctactgctgctatcagtgaaatgtactaacactgctgcctttaggtcattaatagcttattgtttttgtgtgtggttttttttttattctgagacatggtctcgctctgtcgcccagggtggagtgcagtggggtcactgcaacctctgcctccggggctcaagcaatcctcctaccttagccttctgtgtagctgggactacaggtgcatgccaccatgcccagctggttttttttttttttttttttttttttttttttttttttttttggtagagatggagtttgccatgttgtgtaggctggtcttgaactcctgagctcaagtgatcctcccatcttggcctcccaaaatgctgggattacaggcgtgagccaccacacatggccagcttattgttatttgtgtttttcaacagaaaattctgt

SEQ ID NO: 51896 - DNA, 1325 bp, Homo sapiens
ggccttcatctcctgtgttgaagcagtccccctgccgcagcctcccaagtagctgggatcccaggcacataataccatacccgtataatttttaaatttttttgtagagatgaggtcttcctatgttgcccaggctggtgttcttttcatttataggggacaggaagattagcaagctagtactttgtgcctggaaaaatctctttgctgggttaggaatgatctggtagaaatttagggtggaaaatcaaagggcttgattggagttaagtacagtagttaccgtttaaaatttacaatcaatcgtttgtattttccttaatttcaagctttaaatattcatttaacattcagatagtctcactttgtactgcttcattgaatgctgttcttaatgtgtgttatgatccctgcccttaagattcgtcttaaagagaaaagagatcaagagaaaagtgatacctatttatagaaggggagcagatgtttaatggtgatttcagtctgacttgcaatgactcaccctcactttgcatcttattttcagttgtcttctttacttgcaagattagaaagtgaacatgatgggaaatgaaaaccttacaattgagagtgttagctattaagcaattaactggttcttggacatagtactgctattgaaatatctatctaagctatcttactaattattttgacagcctgggctgtactgtttctttctgcatttgggcttggcttttaaaatgctctgtgtcgttccttctttcttgtgatgattccttgtcctttctgtcgcctccaggtccgacactggttcagaatttgccatcgtcagtgcagactgtgtgtgagtcctggaacaacatcaataccaatgaatttcccaatattggatcctgggtgagtccctatctgttccagggtagaaatactgagtgctagccattctgtcttttgttcttaagcctaaaggaattaggcttaaactagctaccaagatatcttcatatactgcagtaatattggctatggctgaatcattaatcaatgcatttaatcacctagttggttctcatatggctttttgcttagaagtttgtgttatcaaaagacaaaccattttatttatttgagcctcagtttcttcaccaattgaatattgggctgtgacgattcaatgtattgaatgttaagtgcctagcatattacctggcacacgaattcccaatacgtgttaactctgtttcctttgtaggttgtatgtcaggaacctgctccttttgtaacagttttacagggtcgcttttagcttctctaggctt

SEQ ID NO: 51897 - DNA, 1036 bp, Homo sapiens
cactgtgtcacccaggccggagtgcagtggtgcgatctcatctcactgtaacctccacctcctgggttcaagtgattctcctcagtttcccgagtggcagggatgacaggtgcataccaccatgcctggctaatttttgtatttttgtattttcagtagaaatggggtttctccatgttggccaggctggtcttgaactcccgacctcaggtgatccacctgcctcagcctcccaaagtgctgggattacaggtgtgagccaccgtgcccagctctgtgggctttatgctgctttaaagggacctagatctttgtcagacttaactaaccttgtctcttagtatgactgccttgcagaagatagagggctgttgtttgaggcaaattttttttttggctcaaatttgtttgagccaaacaaatatgtatggctgctacgtgccaggtacttttctaggtgctagggttatggcagtagccaaagcagaccaagtcattgccctctgggaatttacagactctaatctggcctaataggccagtactttccacactgagctgttaacgttcctggtcaagtaagtttgcaaaatgttggataaacagttttttttgttttgttttgttttaaaaaatatagtattcagagcctttactgtatacattgtcaatcttctgaggtggggaaggaggatagatatagtattcactgtttctcaggcttacttgtcaggcagtcatgttttgggagcatttcagaggaggggacattctttgggaaatgattacccattggaattcttagagaccaggaaggggcaggcactatcaactacattaaatagataggaaactgagatatagggttttcagccagtctagggccagtttttcctaactggtgggattagaatcttatggcttcactttccccctgttttttccccagagcctatttgctgcaaaactttaatgaagagggaacaactgagaaaccttccaaggagaaactgcaaggctttgctgctgttttggc

SEQ ID NO: 51898 - DNA, 2908 bp, Homo sapiens
acttatctggctccagatgtcaatattgttaaggttgggaaaccttattataaagtattttctgagttttacattgcatactagtcagatagagttaagaatggaaccattcttttaatcagcatattacttttcagatgctgtcccacaccccagattctactgtgtcctgtccccagaagcctcagaggatgatttgaaccgacttgattctgtggtactaggaattttaaaactgcattttatatgtgggtcagatggtttccaccagaatcagcctactggggggaaagggaatgactgactttttatagtgaggaaatgtggtctgtgttacgatttgagcttattctaataggaaaatgttacttggatatttatttgttgggtgcacttttgctgtggggtttgtcctttctggattggcacctctgacacttgatttttgaagacagtctttgttagcatttttcacatgcaagtattttaatggacaaaaataattgtcttactcccttattctaaagccagcagctgtgtgctcacaatagcttgcaaacagtgtgagtaatgtcccagaatgggaatctgttccaaggagaaattaatgattatgatttgatgggatattttgtcaatcatgaggataagtgatagtgtataggcagtaggaaaaaatactttaaaagtaaggaaatgactctctttctttcttgatgtcaggcatgtgacgtccttttctccaagcttgtcaagtatgatgagctttatgctgcactgacagccctgcttgcagctgggtcccagcttgatacagttaggagaaaggaaaacaagaatgtaacagccttggtaagaccatggaaccctgagaagtctttgggttgtgtttgatcattgatcatttctatcagaaatttccttctgaaatgtaaccagtttattgaatattgatttgcaaaactgactgatacttgagtatttctaggtagtttgtgtagctatgttcaccttaaagataatttaatcagctgttgcatttttttggttaccattgagagaactgtaatttaagagttagtggtccccccccaagtgctatatctcctgtcaatactggttgatgtgtgatattgaaagcctcacgcttgagatttttccatggctctgttaatgtgtctctatattctagaagcaattccaggccacaaaaacggatagctgattgcaggtctgctaagcagaatgtcctgccctcttttggttaattggtaaattattggggagccaaagttgtcttggaatagcctttttggtctgtgaaatgtgcagaatacggaacaaattatttgtatgtgtgttctgccattttctgctaggtgcactctctagaaagatctggagaatggacttgggggccaaatctcaatttaaaatcaggactctatacagttctggtttaaaagttgtatttggagtagttcgtactgtgagggagatcttgaggccataccaagtgctacctctatgctgcttttcctttctccaggaggcctgtgcccttcaatattacttcttgatactgtggaggatcctaggaattttaccaccatcaaagacttacattaaccagctatccatgaactcacctgagatgagcgaatgtgacatcttgcacactctgcgatggtcttctcggctccggatcagctcctatgtcaactggataaaggtaacacagagcttgctgctaagactattcaaagccaaagtgctttgtgcttactggagcttttaaatttgaagataatgaaagctttgcctatagtcatctcctaaacactttttcttgctgtccaaataggatcaccttatcaaacagggaatgaaggctgagcatgctagctcgcttctagaactggcatccaccactaagtgtagctcagtgaaatatgatgttgaaatagtagaggaatacttcgctcgacaggtatgtaatattggaacctaaatgatagaacttggtttctaccatagcccattgccacagctaattatattttgcatatttttaaagatctcatccttctgtagtatcgactgtaccaccatcttgcagctgcatgaaattcccagtctgcagtccatctacacccttgatgccgcgatctcaaaggtccaggtctctttggatgagcatttttctaagatggctgctgagactgatcctcataagtcgtctgagattaccaagaacctacttccagccacgctgcaactcattgacacctatgcatcgttcaccaggtgtggcgaactgcctgcccagagatgcacatgcactcttcactccgtgcagatcccgcattgactcagaatttgacatttttctctttcttcagcttaggggtttttttccccacgtataatgctttcttctctagtatgaaggggtgcttgatgaggaaattttcaaatagtgcaggaggagtcaggaggaagtttaatgtctataattctttaaatattttgtacgattttactcgtaggatacagagaaaggtaatttttcaaaacactgtcatttctgttattaactgagttaaagctccttaaatgctctttatttattattattaaaaaaatttttttctgagatggcatctcgctctgtcgcccaggctggagtgcaatggtgcgatcttggctcactgcaacctccaccccctgggttcaagtgattctcctgcctcagcctcctgagtagctgggattacaggcatgcaccaccgtgcctggctaatttttgtgtttttagtagagacggggtttcgccatgttggccaggctggtcttgaattcctaacctcaggtgatctacccacctcagcctcccaaagtgctggga

SEQ ID NO: 51899 - DNA, 3425 bp, Homo sapiens
acttctcatgttttgtccatttacaaaattatcctgattctggtatctcaatgcttttctcttttttcaggagcccatatctgacactcattaactataaatgttaatgaggttagatcagtaagttttcacttatgtttttctcatttgttgacctaaatgatctttatccaaactattccaaaatctgaatttctgggtccttctttctttaaaatattctgttcaatattaaacaaacaaacgtttgagaacatgagtaaccttttgactttatcccgtatctgtttgctaatgttctgttccatgtctttcttgtcagaacacactgttgcagcagctaggagtggctcctttttctgagggcccttggcccttgtacattcaccctcaaagcctctctgtgctttcacgcctcctgctcatctggcaacataaagccagtgctcaaggtgaccctgacgtcccagaatgccttaaagtttgggacaggtaagatgtctgtaagagaaggcctatagagaaagttatttccttttttatttgtttgacttctttgtagttaatctgtggctttgaggctttgctgtaatgataatgtttagagtggggagggtagaagagggatggacttggagatgtgctgttaaaaaacaagtatgtcaactttggtctggaaataaatctccctgtagcacatgggggatttggttataattatgcgatggaaccacaatcttgaacagaaccaattttatcctgacctgcttttttgaaagacaagcagggaagccagctctgtccttggttattttgctttcaacatgaaaccacttaggggcacttgcagtgttttttggagaaattttaaagaatttttttccttgggggaagctcagattaatcatctaaatccactttagatggacctgtatttgccatttttgtttacatggttagaagtcttcaaagcagtttgttttcctaaaaggctttgctttctgttccccattgtaggatcaaatagctctaatgctggatttgagaaagcataaaccttcttgagtgccaaagacccgctatatttttcctggtggaatcttgcaaaaaggctgagagggtcgaggggtgcaatgagggaaacccttgttaaacacacaaatctctttcctaatattaaaacacaaatctctttccaaatagccaaaggcaatggaaacagttggctacattcattccttttttgcattaaagctcttctgacaaattctctgaatagtatattttcttttttattgctttatagtctatcgagttatttttgactattatcatgcagtgatttttaacctgtagtataaactctcaaaactagaattaaatgatagaatcaaaatatggggaaaagtaattgaactggttcacctgtccaagtttgttaatcagaaaggaacaatagcaacatttttgtgggggagcttgtagtacttttcatggccacaaatgacagggtgggcattaacacgcctgtgttaaggcttgcctcaagcaatcctcccctcgacctcccaaagtgttaggattatagactgagccactgtgcctggctggccaagtctgactttttttagccaaaatttagtttctgtcttgtctttaccatgtagcctttttttcttccttaatttgttatcttactgcctgggtttaggaaatttaactcttctagtgcttgacattataactcctggggaatgctctttttcccaccagatatagtcatcttttctctctggtaggtttttgtctacaatgaagcagaatgccctgcaaggtgtggtgcccagtgagacagaggatctgaatgtagaacacctgcagatgctcctcctcattttccacaatttcaccgagacaggccggcgggccatattgtcgctttttgtccagatcatccaggagttgagcgtcaacatggatgctcagatgcgcttcgtgccgcttatcttggctcgcctccttctcatctttgattatctgcttcatcagtactccaaagcccctgtgtatctatttgagcaggtacagaccaacacgttcttttttgcttcaccattactgagaactttattcttctcaatggttaccatgatccgcagcccaaatgacctacccactttaggttttaggttttggtaggttgatgggtaggattaggaggaccactgagactttgtacttgatgtttagccagaagtgatacatgtagattacttgatttgatgcattttttgaaagtggaatgtaggctgtgttcaaaggcattctcccacgaattgccctgctctacctgtgtctgatgcagtgccctgagcatcggcccttgatgagtatttgttagtggttgaatgacagtcaagtagtaaattttatggattggtaaattcctttgttgtaaggatccaaaataaggataggaggatccgttcagacttaactgtgttcagcatttcttaaaatgtttcattgagcactataccctttatgttgcaccaaaaattgcattccaaaagtagtcacagaaaaatctttaaatttttattttggtttgtgagtttcccaggctttggtataccaagctattatcgtacctgagtgaaaagctgaatggtgcccaataaaacagaatatttgaatgtagaacacccacattcagattaccaagattcagtgtaccgagctattatcatgcctgagtgaaaagctgaatggtgactgtgtatctttcttaatttcagtatttgtgttttaaaaggtacagcataacctgctaagtcctccctttgggtgggcaagtggatcccaggacagcaacagccgccgggcaaccactcctctctatcatggattcaaagaagtagaagaaaactggtctaagcatttctcatcaggtcagaaagaagactgttaataagaaactgacttactgattctcattggtggggttgaatttgaagcttggggactcttggaggatctttggtcatttgctttagtgtaatccctatgggtggcaaatcacctatggattaaaacatttcagaaatggactcccacatagcctacatttatattttttaaaaaattgaagctgggcactgtggctcatgcctgtaatcccagcactttgggaggcagaggcgggcagatcatttgaggtcaggagttcgagaccagcctggccaacatggtgaaaccccatctctactgaaaaaatacaaacaacatttagccaggcttggtggtgcctacctgtaatcccagctactctggtggctgaggcaggagaatcacttgcaccaggaagcagaggttgcagtgagctaagattgcaccactgcactccagcctgggcagcagaacaa

SEQ ID NO: 51900 - DNA, 1074 bp, Homo sapiens
cccgttctgatgatgtgagtgagtcagatacagttcttgccttcatatatatagcttacagtcaaggatgtggacaaaaaacatttatacaataattcaatttaattttaatagagaagagctaggaattctatatatgtgtaataatcattcatataggcttcaggattgaatatatcagtagtgaattggagccggacaaaggaccttaggagaacaaaagaaatgggtcagtctatttggaaatcctgttttcatacactgttttgtaacatctgttatattaaactggaatgccattttgtgtaagtagaattaggtgggaaagagagactcataatgaaacttaggcccactgtaagtgatttaaaatctgattctttcattcattgtgtttattgcaggatacctatgagcatattttattttctatttgtaatcagagtttataggaacgctgggcttatgaccctgataagagcttttttgtgtgtgttcctttcagttcttaggtctggcttccaacattttgaacttcatcacctcttccatgctgaactctcggaacaattttatccgaaactatctgagtgtatctctttcagaacaccatatggccaccctagccagtatcatcaaggaggtggacaaagatggactcaagggtcagtagacaagatatgtgcctgatggattttttttctcatggagtttggctgttggcagggaggtgtggtgcattcaatagctgcttaaataattggcttttctacttgtctttaaggttcatcagatgaagagtttgctgcagctctctatcacttcaaccactcactggtaacctctgaccttcagtcacctaacctgcaggtttgtgtgtgctgtgaccatctaggcaagagctcatgacaccagcttccataggctgcagctccaattgtttgtttgtttgtttttttgagatggagtcttgctctgttacccaggctggagtgcagtgacacggtcttggctcactgcaacctccacctcccaggttcaagcgattctcctgcctcagcctccagagtagct

SEQ ID NO: 51901 - DNA, 1575 bp, Homo sapiens
gtatattggttgatctggtatattgtttccctatctctgtagaacacacttgaaagattagccattaattcagcaaatatgtttgagggcctactgtgtgtcagtgtacttttagggaaatgcagtaaacaggaaaatttccgatagtgattaagtgcgctgaaacaatacattgtgattgatagtgatctgggccgggtgtggtgactcacacctgtgatcccagtactttgggaggtgggtggatcacctgaggttaggagttcaaaaccagcctggccagcatggtgaaaccctgtctctactaaaaatacaaaaattagctgggtgtggtggtgcatgcctgtaatccccgctactctggaggctgaggcaggagaatcgcttgagcctgggaggtggaggtttcagtgagccgggatcacgccatcgtactccagcctggacaacaagagtgaaactccgtcttaaaaaaaaaaaagtgatctgatgtggagctgggcatgctgcttttgattcggaggagggatggcttctgagaaggtgacatttgatccaaatgaaaagagggagtcagctccatgtgaaggtcaaggaaagtacgatggaatgtatcattgaaaagaggatattgaactcttcaagttaaattgtttgggtaggatttagcatttatgatgaaatctgtcagcttgttcagatttttgtgtctgtttgatattgtacagctcgaaatctatgacatgattggacaagcaatcagcagttctcgccgggctggtggtgaggtaagaagcgtatctgtctctgctgcatacttcctatcttgtcctctctgagatgtaaatatctctatgattatgttttttattttgtgcctttcacaacagcactatcagaatttccaattgctgggtgcttggtgcttgttaaacagccttttcctcatactgaacctcagtcctactgcgttggctgataaggggaaagagaaggacccactggctgccctccgagtcagagacatcctttctcgtactaaagagggagtgggctcccctaaactggggcctggaaaagggtatgtgtctacttgattataacttatattttgttttatttcgctaacattttatatttacagggagctagtatgacttcatatcaataggaaaatttgccttcctacctggcttgaatttagcaactaagataatgatcatgacctgttatctccacagcatagctttgtgatttttagataagtcactcattctctttgattctatttcctcatctgtcaaaggggaaaaatatctgtgcaatgtgtatttcaggaattttatgaagttcacatcagaaaaacatgtttctgtcttgtaaagcgggcttgtttgacttggagttgagtacttgcgtgtataacctgtaagatgagaatattgtcagggcctcctggtttgcttcctgtaatatttgctgttgttttgatgaactctgaaagaagagatatgaccaatgtactgttcaggtttcgttttctaagcccaggtgtttctggattttattttttca

SEQ ID NO: 51902 - DNA, 2223 bp, Homo sapiens
ataaatgatgaacatggctgtgttccagtaaactttatttacaaaaacaggcagtgtttgaattggagctgtagtttgccaacctctggtacatggggctacagagtcttctcaaggattgcaaacttacatacctgcaggggccaggtaggtaacagaaaatgagtaaagtgtgctagttgagaagattgcaggtcccaactaaaggggctaaccactatttggctctgggttattactgccatgcaggaatggaggtgcaaggttgctatactgtgaattatttgagcgtgagaatttcagatttgcatgtgaatcttttcattcccttcaaattttaaaaaaatattgtgagaacaataagacaaatctataagctacatacggtctaaggacatcagcttgcagtctttgctttagtgtttatatgaacctaaatttggccctgtgccagttagaatttccaaaagagtagaattttctgaaagatctatttgtttttgttttcttttgtttgcatttgttttcttttcagaaacacttgattctcctaatcaagggcctgtgcactggctgtagccgactagatagaactgaaattatcacatttacagcaatgatgaaatccgccaagctgccccaaacagtgaagacactttcagacggtgggtgttcctttgacagatctgatcacatgaccacccccatggcaccttttccatggcacctttgccttctagtggcactttcctcagcccttttttttgcctttgtattttacagtggaagatcagaaagagctggcctcaccagtaagccctgagttgaggcaaaaggaggtacagatgaattttttgaaccagctgacctcagtttttaaccctagaactgtagcatcacaacctatcagtacacagactctggtgagtttctttagtcaaatgtcttcttctctgtgggttttgttaagatgataacactaggggagaaaaagtgatgtattttatgtttgtgatataaaatgatatacatgtctgtgggacaaaagaaattgaggaatacaaaataaaacaagtaaaattcaccccaactccttcttctgtccacggttattactgttttgacgaccattctaggcttctctcaatgcaaattaacaaatgtaaggtgtatgtacagttttctatataaaggcatcactccattttggttatagaacatatatatattttaaagctgtatattttttccctcctcctgaaaatgtaacctgtattttctccaacatgagtaaggaattttcccttcactaactggggagtctggagagtatccgtgcagctactgctcacttttgacagttggtttggtgaagagataatagtatcttgacaggccttatgtttcttttcaggtggaaggagaaaatgatgagcagtcatctacagatcaagcctcagctatcaaaaccaagaatgtgttcatagctcagaacgtggctagtcttcaagagcttggtaagactcccaactgttatcagaaagctgatttctgggctgtcaaaaattccttaagtgtgcttctgtcatatggataagaatcaagcatcagacaaaggcctgtttgtaaggttgtggttttcattcatttaggtggctcggagaagctactgcgtgtatgtttgaacctgccatatttcctacgctatatcaatcggttccaagatgcagttttagctaattccttcttcataatgcctgcaacagtagcagatgccactgctgttcgtaatgggtaaggtgcttcacagtgcacatgctttactttttttgtttttgggacagggtcttgttctgtcacccaggctggagtgcaggggtgcagtctcggttcactgtaacctcgtctcctggttcaagcagttctcccacctcagcctcctgagtagctgggactacaggcacacaccaccatggctggctaatttttgtattttttgtagagtcggggttttgccttgttgcccaggctggtcttgaactcctgggctcaagcaatcctcctgccttggcctcctgaagtgtcggaattataggcgtgagccactgtgccgggcccatgctgataatttctttaactgtcacattatagaagtgaatgattctaagagacacttgttgatctctgtcatgttccagctttcattcattggtgattgatgta

SEQ ID NO: 51903 - DNA, 1047 bp, Homo sapiens
ttcttccctagcctgatgaccttgaatgagatatttaattttaattctctaagcttcaccttcccaatctttttttgagatgaagtcttgctctatcacccaggctggagtgcagtggttcaatatcggctcactgcaacctctgcctcccaggttcaagcaattctcctgcctcagcctcctgaggagctgagactataggcacgtgccaccacgcccagctgatttttgtatttttagtggtgacgggttttcaccatactggccaagctggtcttgaactcctgacctcaggtgatccacctgtctcatctttcccagtcttgaaggggaataggttgatgatactatctaccaggtagtaaggattaaataatgtaatatccataaaggggtatctggcacatagtaagcgctaagcagatgctggctgaattattattatttttacagtgaatcagaaatcctgcaccatgagaagcagtacgagccattctactcatcttttgttgcactttccacacactatattacaacagtttgcagtctcagtaagtattccactcttgtccttcccttctgagggcttgtgaatagggggattgtttatcctctcgttagtgtatctgaaaaagttgttaatgaagtctaggttttagcactcctaagctgctcacccaagagtagagacaactgtcagctaggatgaggctccagaggttcccttacctaggctaaccaagtggaattttaaaactacttggcttggacacctgctttataagtattaagtccacctcctttcccttcttaatccaaagcattttattgatttctcatgtaattactggtgtgttaatttccctggggggaaggcggtggtggatactgacctctggagttagcagccactcaaggctctattccttatttggttttggtgaggatgtggattctcctttgtgttctctggtatatgaagggatttcaacttcagttctccattttcttcatttttctacccccaaaatggctaatccctatttt

SEQ ID NO: 51904 - DNA, 1001 bp, Homo sapiens
ctgagatagtgccactacattgtagcctgggcgacagagcgagactctgtctcaaaaaaataaagtataaggctggaagtaaaggaaaaactaagtatatgaggtagaaacagggggatttagtagggagttttctgctgtacatgtgagccttaaaactgtgtttagtcaccagcaacttttgagtgctgcttgttgtggaaaggtttttattttctcctttttatgtaccctgacaaatggaaaaggacccttagtgggcaggaggatccttgcacacatcatagatgctccataaatatttttttcttggtgaaggagttattctaagggactaatctttgatacatacccatttatccttgatctgcatatagcaaagtgctcgcaatgccagactctcaagtgttattcaaggtgattcatcaccgacattggcaccttccaaatagtgacttgtccttttggctcctgtgttcatttggcaggcagatagtcttgcaggcagtgaatggagtgttcactctgtttacatttcccttcttaggatgatactttttttttttttttgagttggagtcttactcttttgcccaggctggagtgcagtggcacaatctcagctcactgcaattccacctgccgggttcaagcaattctcgtgcctcagcctcgtgagtagctgggactacaggtgggtgccaccacacctggctaatttttgtatttttattagagacggggtttcaccatattggccaggctggtctcgaactcctggcctcagataatccaccagcctctgtctcccaaactgctgggattacaggcttgagccaccagctacaatgcgtcccaccataggttgatacttctgctggggattgactcactaagtaaactgttcaaccacactgttgttctttccatttaataaaatatattttagtctttgctttaccttcatgtttctttctttttttttttctctgagacggagt

SEQ ID NO: 51905 - DNA, 2041 bp, Homo sapiens
tttgcagagaggagaacttaatcccgtattctccagatgtacagatacacgcagagcgattcatcaactataaccagacagtttctcgaatgcgaggtatctacacagctccctcgggtctggagtccacttgtttggtgagtagagcccacagctgccctatttcacccttggtggatcattggttgtttctttcctaattcttattccatctgccttccaggttgtggcctatggtttggacatttaccaaactcgagtctacccatccaagcagtttgacgttctgaaggatgactatgactacgtgttaatcagcagcgtcctctttggcctggtttttgccaccatgatcactaagagactggcacaggtgaagctcctgaatcgggcctggcgataaagaacaaagactgtgcctaaaagtggagagccaggggagtgtgggtcagataagcagctacagctgcagtttggtggattggtggagtatgtgtgtgtgtcagtgctcagctaagaactgtagggaagatggatgaccttcacgcagaactccttttgggatatacatgatgcagaaaggatcctacatggagagagacagaactctctcagctgacactctcagagattcctgatgggctttctcttgaagtccaaaggcgtctgcattgtttcctttctttgcccatccatgaatgttctgttttgttttttttaataagaattccggctgatttttgtgaggcctgtttaaattgactttactttgccttttgtgtttctcaattttatctagaaatctttctgactttttccatctcttgcttcaaagtaagaggggaactctccttgccgactccaccttataggtacatttggtgttttgcactgggaagaaataggatccatccttagctgaggcttgaggactgatccagcctctcatggcttccctccaaagtaacttagggttgagggatctatatgtgatgtcaaaacttactttaaacctctagtttcgtgctgtcatttattaggctgggccaccaaatctttgtttcaatttatcagaagccaagtgcatactagcgtcttgtttgttgcccattgcctatacttttcacctgagatgtgtgagttggggccttttaaaaactactgaattgtctgagccttgaagacatttccagggagaagagataatctctcatttcacccacaggctggtctaatcataacctagttaaagatgtccttgtttaagaaccccattatttatttttagtttttaatataaattaacatgtgggtcattatatttctccttaaatgaggaaattttaaattttattgatctaacctttgaagctttaaaaaaggagaaagagggtaggggtgggaaactggcatactgtgtgtatagcactgccgattggctaggccactgtgtctctgctacaaattaaagaaatcctaaaagttttccttggtcatagagttggggaatgacagaatttttctttgttgtgaaatgtatgtacagagtagaccatctctagccctgtggtgaaagaggtacactcgaatgtttgcataaagcaagtgacaaatgacactgtttaagtcctcttttgtgtcttagaagatcattttgaggctattttcacattagaggggataaaagcagtgaagacatggagtaagtgtattttattttagtaaggaaaggtcagtttaatcatatatgggttggttaggttatctaaaaatttgtcatctttctatggtcatatgctgatggtagattatggcagagaaggaagaggaaatgacaaccattttattaattgtcagtttgatattgagtgactgaatgtctaagaatctccagaaaaaaacaggcatctatcatcctgacccaaggcatattttaacataacctgggagaagagagttaagtacaagttaaaaaaaattctgccctagttttgagaaagcctggctggaattctgactgtcttacatacatatgtgcaag

SEQ ID NO: 51906 - DNA, 1746 bp, Homo sapiens
gccagctttggcctcccaaagtgttggggattacaggcgtgagctgctgcgcctggggggaataaagtcttaacttggtattgtaatagctaccattgcctgtgtactaaaaatttgccaggcaccttatactcattgtccctaaagcagcagccatatctgtctggagacaccattgggttgatctgggtattgtggaaacagcccagtgccctctaaagctggccatggtcccaactgccaggatgaacttgattcactctgctctgattcagtcctgccccccaccctctctcttctctccattcatccagccctccaacggatagctgttgagggcctgctctggaccaggcactctgctaggcaatgcacattttcttaagctgaggattaatttgactttactgtttatttctgctgcctggatccagcaattcaaggtaaaacctgcttcttgctgccttgttgctcgttgcctgctcacatggctagcttttggttaattgtttttcttcctaacttggaccaatgaggtacatccttggggtgtgtgtgtgtgtgtgttgactgccatgcttgtgagttgtcctgttgcttctcacttctcttccttgagcagaggtgggtggaaaataagataagcagaggttctgctccttttttagtgagttattaccatgtaccagccaccacgctaaatcctttatgtacatcgtatgatgtaattttggaacagtccagtgggttacatgccactttacagatgaggaaccagaagcaaaaaggtgaagtacatttctcagtgttaccccgcagtgagtggtgaagctgggatcttaatctgggcctgctagattccagagaccatgctctttaccttgcttccttgcatctgtttacaaatctgtggtctccaatggaggagatttggagggcagtggcttcattgacggaatcagggaaagagtgaatgatggtcctgggaactcgttgcaagtacgtctgttgggtgcaggttaaacagctgacaaagtaggaatgaagcaatgggagatggaagtacctgctcatgatacatattcactgacctgcaccctccacccccacactcatacctcttctggctttgtcatggcacccagaaaccttcttttagcatcttggatgtggggctgtggtggagacattcacagcatggctgtctcctgcatgcctgatccctgacctcttagtctcctattccaagattccagctgggtttagttgttaagagccagttaagcagtttttggaagctcctgcatgagcctcacctgagtgtgagactttgggcatcagatacaggactgccctttgggcttgtggcctagagtgtggactttattgctccagaggagaggcagagatccctcattaggaaaatcatgtacctccttatggacccctagtctgatgtagagtatgttacttttcctttacaccagatggcttgctggggatgttcctgaaacgcctctcgtctcagcttatcctgctgcaagcatggacttcccacctctggaaaatgttttatgatgctcggaagccccggagtcagattaagaatgagatcaacattgacaccctggccagagatgaattcaacctccagaagatgatggtgatggtaacagcctcaggcaaggtgagtggggtttaagctccagttactgaaccttttcaaattctgagggtgaggaacaa

SEQ ID NO: 51907 - DNA, 1035 bp, Homo sapiens
ttttttttgagatggagttttgctcttgttgcccaggctgaagtgcaatggtgcgatctcagctcactgcaacctccgcctcccgggttccagcaattctcctgcctcagcctcccgagtagctgggattacaggcatgcgccaccatgcccagctaattttgtatttttcatagagacagacggggtttctccatgttgatcaggttggtctcgaactcctgacctcaggtgatctgcctgcctcggcctcccaaagtgttgggattacaggtgtgagccactgcgcccagctaacaaacacgtcttatgtgtcctaaaatgaatgtgatggtgatagccctgtgattttttttccggagcattttgtggaatggtgattttagctccttatggtcccctgtactctttttttctcaggagacagcaatatgttgggaaggtcaagtttgcctccttggaattttcccctggatccaagaagttggttgtagccacagagaagaatgtgattgcagcattaaattcccgaactggggagatctgtgagtgaactgagaactgtgtctactggctgcctcagggatgaaagacttaccattgccaactctgcctggctgattcctgaataaggaacatgttggccaaaagatgcctctcctagtggattctgatactttttttttttcagtcttaccatctttgaatatttgtatgttcctataactgacctttgcggtttgttctctcagcttgaatcctgagtgtccttaaataagatattgctgcaagcccaggcgggaggatcacttgagctcaggagttcgagaccagcctggggatcacagtgaggccccatgtctaaaattaaaaaaatcaggcatggtggcgtgtgcctagattcccagctacttgggagactgaggtgggaggattgcttgagcccagcaggttgaggctgcagtgagctgtgatcatgccagttcactccagcctgggcaatagagcaacaccttgtctcaaaaaaaaagatgct

SEQ ID NO: 51908 - DNA, 1897 bp, Homo sapiens
aacctgggctgcaggctgggtgaaacagtctcctcctgcacaatgactccactcctagaggctgcctcatggtggctttggccagcaccacgtgcagagcagtaccgatcagctgcctccccttataacagagaggctccatgtgtttccatgtagcaggacccttcctaatgtgggtgaatgtttctaggttaacagctgatgatcagttccactgttggtcataaataagtgagagacctggaaaaggccgtggggtgtagatccatggctcagcctcccctgtggttagggatcctaatttcagtaatggaggtaggagacaaccaaattagaggcctccagttcttccagtttccatagttgtcaggggcccagagcagattcattctcatctgaggccagagtagtgcccgttgtatgctgctgcttgaactcagagcctcgtgaattgtcccacagcttcggaaatgtgtggacacctacaagtaccttttcatcttctctgtggccaacatgaggaacagcaagctgaaggacatccggaacgcctggaagcacagccggtgagcgggcagggggaggaaggcccttctgagtggggacccggccaggctgctctcagtcaaagcacaggagcaatttctgaccctttaggtgcctgggtcatgccgctgacaccttaataaggacaaagtgctacctgccactgaagagcacttccttttcactgttaaagctggtcttgggcagggtgcggtggttcacgcctgtaatcctggcactttgggaggctgaggcagggggatcacctgaagtcaggagtttgagaccagcctggccaacatggcgaaaccccttctctactgaaaatacaaaaattagccgggcatggtggcaggcacctataatcccagctactcaggaggctgaagcagaagaatcacttgaacccatgaggcagaggctgcaatgagctgagattgcaccatcgcactccagcctgggtgacagagtgaaactccacctcaaaaagcagattttgcactgagctcctaggggcaggacttggcagttgctcaggagatgtttgagaggtgggcctttccggagaagtggccctttaaccctggactgtgggccatttaggagcatcacaccagttttagaatgtcagtagggacactgcgacacagacagtgacctgggagcaggatgcaggagccacatggcaagtttctgtcctggggcaggtggctctggtggtggtctcttgccgcaccagctctggttcaggctgttaacatgcctcccgcatacatccagatagagaactggtacatgatgctcgtgatgggctgggagacaaaatgttgccatgtcaggagtctgtgggtgggaacataatgaaagggaccccaacgtggggacagtgtggccaggcagcatggagaagtgggtgccactggctcagcctgggcctgagctcactggggaccggagctactttgcatgttgctgagggatggggagggcagggctcttccttcacagaatgctctttctcttgcttggtaggatgttctttggcaaaaacaaggtgatgatggtggccttgggtcggagcccatctgatgaatacaaagacaacctgcaccaggtaagtctctggccctcacggggtggagctaaggcaaagccgccctctctcccactactcccatgtgacagcctcccccagccattggcaggccggaggctcagggagagcagggcctggcttaaagctctgggttctcccttcacctccggacccaaggaatagcagcttcctgcctcccactccttcctgctatgacaaccaaaaacgtctttaaatgttgccaaatgtacccgg

SEQ ID NO: 51909 - DNA, 1060 bp, Homo sapiens
tgtaaccagtgtccagcatggagttcatacagcagatatttgtggaaagataccattccacttcaattttctgtccttgggcccaacaccttccctccatcccctactaacagtagtgatgttagaatattgctgaagtcctgggccggtgttgctttagaggtttgaaagtggaaggcaacagttccttctcttgacatgtccaccctgtccccggggtccctctccctgcagggcatgtacaacgccaccacccggcaggtggaaacggagctcttcccctgcctcaggcactttggactgaggttctatgcctacaaccctctggctggtacgtggagcattcctgaccctgtctcagcctattcctgacccacagatgcccagcccagaatttatgaagcagggagggtttgacaagaggctgggctgtgttcttcagcccctcctgggtccctgcccctcccctagaccagagccctgagggatgtggcagcttctggggcactctggggccaggggctgattgctgccttcccgcagggggcctgctgactggcaagtacaagtatgaggacaaggacgggaaacagcctgtgggccgcttctttgggaatagctgggctgagacctacaggaatcggtgagccgggggtgggcttggtgaggatggctggggtggggtcaaatctatgtggaatgaagtcctgggctgttcctgaggtaagaccttcctttgctgtttgcatctcctcccctgcattgcttcaggaattcccaagccctctgtgggttttcttgttgtcttgagacctctgggggggaaatgaggatccctggatgttggggtcttgaagtcatagctcgttcctgagcaatcacctgctgggaagcaaaaagcgagcccaggatgggccaggcatggtggctcacacctgtaatcccagcactttgggacaccgaagtgggagggttacttgagctcatgagttcaagaccagcctgggcaacatggtctctacaaaaaaaaaatgcaaaaaagtggtcaggtgtggtggtg

SEQ ID NO: 51910 - DNA, 1096 bp, Homo sapiens
ctttgactttgcatgggttcccatgctctggagtgtacttcctgctcttccttgttggctgggactctgggagtgatcccctagagaaagccttccctggagtctccaagttggcttcatgcatctcatctgggctccttggcatcgtgtgcctttccctcctgtgcttaccatattgtaccatcatcctctagggctccaggagggcagagatccattgtgttcagttcatctctgcatactcagtctctagtgcaaggcctggcacagccagcaggttggtgactaatgatagttattctaataggtgaacattgagaactcacatatatgacattatttaatccccaggacctcccaatgaggacagtttgattattatcaccccattttacagatcatacaattgaggccaagagaatattagtaatttagccagggttacatggttagcaaatggctctaataggtcacttaaccattccattctctctccaagtgaaaattgccaccaaggccaacccttgggatggaaaatcactaaagcctgacagtgtccggtcccagctggagacgtcattgaagaggctgcagtgtccccaagtggacctcttctacctacacgcacctgaccacggcaccccggtggaagagacgctgcatgcctgccagcggctgcaccaggaggtgagggggccctccgagctccaaaggtgggctcctgctcctttctttatcctgatcctactcatgagagcagaggcaccagggcagtcccagggtggggcagggaatagccccattccctggggccccaccctggcctccccttcctggtctgggctacactgcgttctgactggagcctcacccatgcagggcaagttcgtggagcttggcctctccaactatgctagctgggaagtggccgagatctgtaccctctgcaagagcaatggctggatcctgcccactgtgtaccaggtgagggccggggctgcagaggccaaggtctccaggactcctgctaatcctgggctctctttgcccccctgactgccccctgtgccgtctgcatagcagccactcccctgct

SEQ ID NO: 51911 - DNA, 1062 bp, Homo sapiens
ccttggcctcccaaattgtggggattaccggcatgagccatcattcgtggctacaacctgctttaaattagatgaacttgatgggcctggcctcagcagatccttagagagtaatttacaataataacaagaaattaggaataccctaagtgttcaagagtcataggaaaaggtaacatcgagggctcagttcaacacactgtgtatgaactcactgaacccacacaacagctgtatgtgggaggcagcactgtgatgaccccatttacagatgagagggctcaggcacagaaaggctgagtctttgcccaaagtctagcatgaatgggtgatgaagcagggatttgaacacacccgtcccttctgcagatccagcacgctgcctgcatgtgtctgtagttggcgtgtgtttgctgtgatctgtgcacctgggagctgattgggtcctggtgggtgaagattatgtctttgcccttctctggctcagggccaggagccccgtgaaaaggctgggatgagcttagtttgggatgaccatgaataggacctggacctcccagtgctgaaagcctcctcccttcctccctgtagaacccttgctggcctcagaacaccagcgccctccctccggtgcagccctgcctggccgggggcccctcctccacagccatggtctggaagaaactgggctcccgcaacttctccagctgccccagtggctccatccagtggatatgggatgtgttgggtgaatgtgcccaggacggctgggacgaggccagcgtgggcctgggcttgatctccattctctgctttgctgcatctaccttcccgtgagtagtgtcttggtggcaggaccagggcagggctgtggggttgaggcagtggctccagctactgctcagcgaggggttgtctggtgggccacgggcctctccagactagaggctggggtgtgttccctcgacagggacctgcactgattgctaccgcaggtcagacctagtgctgggcagtgctgatacagagatcatcacctttgcaacagtttattgagtgccc

SEQ ID NO: 51912 - DNA, 1015 bp, Homo sapiens
tggagacccggcgtgcccaggccttcggcccgcacgtccctttcccagcactgttcttgttgcaatgcccttccctgcatccacaggagaaaggatccagggttctatgcagcggttgtcagggcccaacacaaaacttcaggaccctacataagccccagatccccactggagaccccagggtgtggtagaggagaatctgagtaaggctgcggctttccctggagagatgcacagccgtagagtcctcggcttagaagggattccccaggggactcctccaaagggccgagaaggcttctgaggatcccgcccgtggggaggatgggccgccaggccacttcctctccatcgccgcctcgatccccatggtcgtctcctctgggcggtgtcccctataaggcggcatcccctgtaaggtggcctgagcatgcatcccttcctcttcctcttccacagccagttcatcaaagcctacaagacgggcaacatggaccaggcgctgtccctgtggttcctcctgggctggattggcggagactcctgcaacctcatcggctccttccttgctgaccagctgcccctgcaggtgggccggtacccgggcaaggtggcgctacccctaaccctgcttcaccctgcagggttgcctgaggagatgccaggctctttggcccgcctggtctccagaaccctgacccgtcattccatcttgtgggagggccccatccttctgtctgccgaactgtgactgtgggcaggtcactgctcttctctgggcctcagtttccccatctgcaatatgagcatgtctaacaggaaggtttcggggtcttccacctccagggtgctggagtgctggcgaagctttcagagggtgggcccctcgaggagaaagggagtttttccgtgggaggcccagatgccatcctgctcctgtgggcaggcagagctggggctcccaatcaggaaggcattgtcttcccatgtgggaccagaaagttctgactgccct

SEQ ID NO: 51913 - DNA, 1039 bp, Homo sapiens
agggcagtgagcgcgtcctggcccagaccacaggccggttcctctcgcccaggggctcattcagcagacacagctccagctcctcctctgtgtccggccctgggcttggagctggggaaacgagggcaagtcacacaggctgcctctgccccagccttcaggaggagcaggagacaaggtcagcttgaggctatacagacacggggagggacctggggaggaagttgtctcatcagcgttcctgcttcgtgtaaccccctcctgacctccctgccctcagcgtttcacctttataactctaggagaagggtactgttgttgtacccattcgacagatgaagaatgaaagctcagagaggttaggtcacttgcccaaggtcacacagcccctgaggggcaaggccaggacttagcaccctcccccgacaaccgctgccactcagccatctaacctcagcttccccctgccttgtgtgcagtgtctgcccccatcaactccgtgctgttgttcctcatggggatggcgtgcgccacaccgctgctgagtgctgctgggcccgtggctgcccctagggaagccttccgggggcgggcgctcctgtccgtggagtcgggcagcaaggtgaggcgtgggcgtggcggtcgaagggatggaggctggctcatccccagggctctcccctgcacagcctcatgggtgctaaatggggtgggggatcacctctggctcctacgagacaccaagtgcccccttctgccccacagcccttcacccggcaggaagtcattggcttcgtcatcggctccatctccagcgtgttgtacctgctttcccggctgcctcagatccgcaccaacgtgagcctccagcaggggctgggtggggccgagtagaggagagctggcctggccacccgggccctctgggctaaggagtagcacagcataggagccttggttcagaaagtctggtctactcccgctgttggcttgggcaagttaatccaatctccgagcctccatttctgcttctggaaaa

SEQ ID NO: 51914 - DNA, 1008 bp, Homo sapiens
agggcacagctaaggtagcggctgggaggttatggctggcccttcccacctgcagcgtgggggtgggagggaggggagagggaggcagctcccaggagtcgaaggcccccaggggcaggtccaacccagtctctgctcagcttggccttaacggcggcacccccagatctccatccagttcctggtgtacaggcgcagcaccgccgcctcggagcttgagcccctcctccccagctgaccagaaccaggctgagcgcaggaggacaggcaccaccggatgccacaccaggcaggaggaggtgtggacagtgatggtacggcggccctgcatcagcctgcgggtggcctctggatcctccgtggaccgaaccgtccccccaggaacacaccttcaggtagaccccgaagcctcaaggccggggctggagcggagaccccagggcctctcaggagacagtgaggctgcccctcctaccacctacctcattctgcctactcaccccaggggccacagccacagcctgctggactcaggactgtcctgtcaactccagacaactgaataaacaggccgggtacagtggctcgcacctgtaatcctagcactttgggaggccgaagcgggtggaccacttgacgtccgtagttcgagaccagcctggccaacatggtgaaaccccatctctactaaaaatacaaaaattagccaggtgtggtggcacacatctgtagtcccagctacttgggaggctgaggcaggagaactgtttgaacctgggagacagaggttgcggtgaaccgagatcgtgccactgtactccagcctgggtgacagagtgagactccgtctcaaaaaaataaaaaagataaccgaggaaacggtacctccccatgagacctgcttctgttgctccttccccaaggtgctgagggatcggggctgctttggggaccagcggtggatgtggatggggattcaggacgagctgagcagaggggaccgcatct

SEQ ID NO: 51915 - DNA, 1218 bp, Homo sapiens
gttcaatctgctgataacgcctttcctcccttgcaggtctgtgcagacttttgcagacaaatcaaaacaagaagctctgaagaatgacctggtggaggctttgaagagaaagcagcaatgctaaacctctgtttcatgctaaccagacacgccgtgcactcgttagattcctttcttagaaaactcgttttctgctcccttccctcgtcccttccctccccgacaggtcacataacagctgcatcattgaccgcacagcgccatctctccctgagaataaagccgatagccaccctcctccggctccgagcctgcttctgccacacctcgctctcagttctctccacatttccatagagaccgtgtggtttttgttcacccgggccccccgtcttcctccctgtccccccatttataggcataaaatccactgtctgccagcctcccttccctcccacctttttggtacattggtgtaaaaaatgtaaaacaaaaaaattttatgaactaactgtggtgtgtgaaagagagaagaaaaactggaaatcttattccgtgtgtgtttgggagttgcttggggttgggggtcgtggggacaggggacagctctgggagcagaggtggccctcggtgccgtcctgcgcagactctcccgtcccacggaggccgcggggtgggggctggggggggtgccgccgaccgttccgctcttccggccaggtgcttttctgtcaatttctatggaatgcaaaaggaggtttttgttttattttgtttttttgtaaagcttaagaaaaaaatctacatcttatacttgagcctccatacttaaaaaaagaaaagaaaagaaatcaataaaaagaaactggggcgcagttagcgctggccttctgtgttccttctcgccggcctcgctttccgagcgcgtgtggccgtggccgtgcgctggctccaagctgggacgcgtgtgggccccgctcacggcagcaaggaagtgtcccgtccccagccccgccgccctgaaaacaccaggtatgtgatgaggtgcagagtccctgtccctttccgccctctgccgttggagggcagaagcaccagcaaacactgttctggcgccgcagcacgcacctcccgccgccttcccactgtgcctagtacaaatgtgaggcagccgaggttcagttgcagtaactcagccaaggctgcacagagccacag

SEQ ID NO: 51916 - DNA, 1152 bp, Homo sapiens
tgtgtgctttccactctgggtggaggctgggtgtggggaagacggctgattttttggcttttgcttctgaagaagcccaggccaagggacggatgctgcctctccagcagcagccacttgtgtgcaccggcctgactgtccccagggcagggatctgcctgccgtccacccccccatgcttcagaggagcctctgatgctggtgcagggatcccagaagccacataagcctccccgctgctcagcggcacattgcctgtccagggctagctggcttggaaggggtgacctcactctctgatctctgagtctctggggttggagggcagagtcagggctggactccaccctggctggcccagatgctctgctggagctgcctggacgcccagtgccgactcggccacaaccagcataaccttccgcccctaacgagctgcagctgttcctttaaacaggtttcgctaatggaaaggaaaatagtcttgcttgttggtaatggccaagaaccatgacttgagcttgtgacagatccagatgtagggaaggaggcagcatccctggagagtaggagggaaacttgtttgtaaaaagaaggcatttggaaccctgccaactggggctgcagagcccaggtccaggggctgcgcactgaaggcccaccccagaaggggtgcagcagactttccaaggtggaggtggggtcaggcacttagaaaaccaggtggagctgcttttccgaggccgtgggacttaagtgcaccagtctggtctgtgtgtgccaacttaaggcccacgactcgggtcagcctcacagtgtggccatcaggcatttccatcatggcattgagaaaaaactctttttaagatacaccgtgatggtgcagttccctggccgcccactgggggcgtcctggcgtagaaaccctggcagccaggtctgctcaagatgactcctccctcccacagagtcgagcactgtctccaagcgctgattcgaggttgcttggccgtgaccttcccaagcattgtcccttaaataagccccctgctccttccgccttccaccatttcacttctaacttcctgtgtctaacatgattctagctctggaactttctccttcgtgtgatccagccaagacctggcgggc

SEQ ID NO: 51917 - DNA, 1821 bp, Homo sapiens
aatgccagtgggccctggtgtggcttcagttgcggctgccttggccctcctgtcaccacgttgtttgggaaggcagggaggtgctctcgggtttcacagaattgttcacaaaattagtggggagcccaaggggtggtgatgtggtttagagcagctcccaggcatgggcagagctggccgccaatccctgggtactggcttcctccctgcctgtggactgtggatgggaaggtgccgggagcacagatggcaggtggggtcttggcagcctggagcgcgctcactgatgccccagagcaggcgtgtgccaccctccagtggccacactggggactgcagggctggcaggtggagggagggcgtgggcctcagggttcctgaccttttgccactgcgctgaccgacctcccttccaggacatggaaaataaaatcagaagtacgctgaacgagatctactttggaaaaacaaaggatatcgtcaatgggctgaggtaatgtaccagaaagcacaagctttagaagcagacagagggatttgaaccctggctctgccagttactagctgtgtggtcttgggcctcggtgtcctcattggtaggctgcagtgcccctcttctgggatgatcattatgttgattttggaaagtaaagtcctgatgtgtcatctgcactctccgtagcagctgtcggtccctatctgcaccatttgttttctggggcatgttcaccctaacagccattggtgcccttgcccccggagcctcctcagccctgcagtttgtcagtccccgctcaaaaatctccccaccctccagcctgggcctaggggagccatgacaccacattccgggcagcccggctgcctctggctggcctgctctccgagacagcagagcgcaacgtgcaggcagggccctcagtccgggccttctcaggcccccagcctccctgacgccacatgcaggcagggccctcagcctgggcgttctcagggggccccagcctctctgacgtcctctgccagggctctgctgccagtggccagtgtcctgcaccatccttcccacctcgtgccctcagctctgcagtgtcagcccaaacaaaagccgggcgctctctggaccctccaggtccacggcggacagagcaggaggcaggcctctgacatgaggccagagcccagctgggggcagtaaacggctgtggagggagcactggccttggagtcaggagagtcaggaggccgggatctcccctaagctctgtcatcccgagctgcatggcctctggcactcctcgcagaggcccttgtccagtcgaggaggcacggtcggctgagatgatgaatctagaacacgctctgcagtccagcagcaccgtgtgagtcgggctgtgctatgcctttagcggccagccctctcacccactgccgtggtgtagctctcacagcccagcccagaggagaggcaggctgcagtcccggggctgccccagctcgtggactggggtgggcgacagatttcagtcacctgctttacagttttaaaacagaggaggagtcctctttggacccttgtcttctgatcccctgcccacctgggggaggcttggtcttcgtgacctgtgacagggttagagcccagtggtccctggcgttaggcctgccactggcagccactgcccgatacaccaaacacactttcccgcccagccaacctgcacagtccccaggcagtggctgggaagtgggggagagaagccgaagagcctgcgggtggtggtggcgagcccctgaataccacgaccaccgccagcgtgg

SEQ ID NO: 51918 - DNA, 1037 bp, Homo sapiens
acagccaaacccccaggcagccagctcccctgcagcctgactctcccacatcctgccacctggggagtgggtggaaaatcctgaatctgtatccagagactgcttcctgtatcacttaccactccaggctgttgataattccacccggtttacagtgacctggacaaatatttaatcctcagccctcctaatagtttaaatcagagctgtcagcccatggccagagtctggttccggcttgccgtgagcagtgtctcctgccaagctaaacccaggcctgatgagtgcctgtcctcagcacaccttggccagggcttcggactttgtttgcgttgccttttgctctgggggctttaatgaggaaattaatgctctgccatcattctaacggccgatcaccacatcattcatttgaggtgcattaaagctggggctgggttccaatgtaagtaactacagaagggggagggattgcaatgaggtagacaaatctaagttaatgatgcacagcttctgagcaaacaggggaagtgagggttgcagagcttggctacgggtcccagaggagccttggaaaaacgcctgtgcttgtttggatgggaggcgaagggttctgggagaagtgagcagctcagtgagcatgaacatgcatggtttgcaggctgtccccttggattagattgtaaccaaggtcaagttattctcatttaacaggtgaggaaactgaagttcaaacttaaataatttgcccatataatttaaccagtaagaagcaaagctgggatgtgaacccagatttgcctggtgagaaaaaaatatgctactttctaccatgccacaactgttttggtcttaattcgtcctctgtgcctgccattcggtgactgctaaatagtcagatggaagtgcatggagcagtcagctcagtgtagacaggactctgtctcagcagccggcatgagcagctgcagtggacctgtagcctcaggagcaagcaggccccgcaagcaggatcaaccctgcagagccgcacacgg

SEQ ID NO: 51919 - DNA, 1045 bp, Homo sapiens
gcattccagccagccccacctcctgtgttcccttctacttctgcctcatcaaggctgtgggcgtttccatcttttctttttctttttttctttttgagacggagtttcactcttgttactcaggctggagtgcaatggcatgatctcggctcaccgcaacctctgcctcccgggttcaagcgattctcctgcctcagcctcccaagtcgctgggattacaggcatgcaccaccacgcccgactaattttgtgtgtttttttaatagagacggggcttctccatgtgggtcaggctggtctcgaactcctgacctcaggtgatctgcccgtctcggcctccctaaatgctgggattacaggcgtgagccaccatgcccggcctggtttccatctttatactgactccaacatgaaaaaagtgcccagaccagagccctccttcctggtggaccatcagtttctccacagaagccttcactagggctgcccgtgctctttctggaaatccacgcgatctggaactcagtgacatcctcatttgcacagtctcctgctttcacgtatattcctgtgcataaagacttcgggggaagagtggcttggatagaatacagatcacaacagcttcgggatcccaaaagagacgttgaaatgttgaagccatgtctacgagagtgatctgtcacagatttgagtggaaagtgatattcttgggtccagtctaccaagttctcaagtccaggatgtgagaggtattttcatggcaacacataagaaaaaatattcagctgtacacggtgacttatgcctataatcccagcactttgggaggccgaggtgggaagattacttgagcccaggagttcaagacctgcctgagcatagcgagaccctgtctctacaaaaaaatttaaaattacccaggtgtggtggcatgcacctgtagtcccagctactcaggaggctgaggtgggaggatcacttgagcccagaatgtcgaggctgcaatgagccatggtcatgccattgcactccaacctgggca

SEQ ID NO: 51920 - DNA, 1163 bp, Homo sapiens
tgcttgctgagtaccagggatgcacctcgtacgtggtagatgaggcccctgccctcaccacactccattgtggaaaaacaaacagtggaccagtgaacaagtcattgctgctagtgataacagggagcagctgacttgttatgtagagtggcccatgaggcctcttgaggagacacttgactgaggtctgacattgaggaagccagccaggcaggggggctggttgtgccagggtctctgaggcaggggcaaactcacctgtctaaggccctgagactggtgccccttaatgtgcacacacagctgtcaaccagcaagtgcacaccctcagcctcttttaaattggaagtcaatttgaaagagatttgggcaaaattggccccttttatatgtaagcttcttgggagccatctcaggatactccaggaatacagcctgccctttcagctaagtttgaaggtggaagtggaaagttcccccttgaaagtgtttgctagattttcccccagcttggggagctaacgtgccatgcgtgtcatcccctaagcctgaggaagttgcctggcctcaccccttctgttctatgaggaggctgtactctggcttattactgggctgcatgttgagatatggaggtgggggtgattctgattctttatgagacttaagtgttcatgttgttactcccttaataaagtgaatcagatgtgttgccttacttcgccatttagggccagccttggggaagagcccagtttcatcttggacttctgcttcccttgttctcccttcccatctcatcgttcacatatgtaatgatacatggtgtatggttctgcaggggcttttatggcctgttatcatgagaatttccctactatcattaaaactcttcagaataatcactgaatccttacagtgactataggacaagtgggagttattccatttggcagctgatgaagctgaggctcagataagtactcaagctggttaacacagctagaaaaccacaggagccgggagtcatagctaaggcctcactcttcacgctgcctctggtgaagcctttcccttccctgggaaatgtgtatttgtaaggtggcttttgatttctgtgtgcctttgacttgcctacacactcctctctgaaggtaaactga

SEQ ID NO: 51921 - DNA, 1048 bp, Homo sapiens
catcgtgattcataataacagcaggtgccactggtacagtgcctactgtgtataagaaacagtgccaggtatttctacatagcatctcaaatcctcacaaacatagctagtttagtcctcgtttctcagattaagaaattaagacacagattaaagtatttgtccacagcaaggggtagagccaggaattaaagtcagacctgtttatctccaaaggcccgtatggatttttttgccataccacacgctcacttctgacctggagctcaggggcctctgcctccagctgctctcaggccaagataagtgcagtccttacagagcaggagcagagcagcaaacatcttcctgaatcctgagttgtttgtggcctcggcaccttccttaaaaagcgttttgctagatctgttgagatttcttcctgctccgtctaatcctgcctcccagcaccacagcaccaacatgtcacttaattgttcaggcttacaaggaagggctccagagaaagttagccataatcaacagaatctcatttataattaagctctatactgaaaatacagcaaaactgtaaaataggcaatactaattcaagttggcagacttttttctgtcaagaaccagatcctaaacgttttaggctttgcaggccacataaggtctctgttgctgcttcttggtttgttttctgttgaacctttaaaatgtaaaattcacctcttgagctttgaggtgggtggggcttggcccccagtctgtagttctattatatacgaatattttatatacattatctttactccttaacaagaacctctggggaagatggttttgttcctccttttacaaatgagaccaaggttccaagaggttaaatgactcacacaagaccacaggacatggaggtgaaaagctagaatttgaacccatatttatctgaaattcccacaaattgttgattttcacagttaaaataggcttcagtcttttaaaggttcttacatctagaactttgtcctattgtagaatagttccttccccagtgata

SEQ ID NO: 51922 - DNA, 1033 bp, Homo sapiens
tggctaggggcctggaaagtactggagactccacccagcataggagcctgtgggagttcccggcacggacgagtttttctactccgagttctttagattcctgtgtatttgaaatgtttaccttcttctcgggacttcagcttgtactttgcccaccagagaccaataccaagcacatacacacttaaatttactaggccaccctggtgaccaggtaattaaagctgcacacagtttttggaaggaagactgtattagaaatcacgctccactgtaattcaagaatgggtttctttatagagggacacagttggtgtcagacacatgtggaaaagaaaagaacaggcccataattttgtctcagtgcccagggccagatgttaaaggtactgaccacaatatggctgcagtattgttagccacctgagtttggtgtgctgttttaacctctgtttcgaccttgtcctttctctctgccaggtccccagtctatgtgaggatctcctgtcttctgttgaccagccactgaaaattgccagagacaaggtggtgggaaaggattaccttttgtgtgactacaacagagatggggactcctataggtgagctcatgccccggggatgcagcaggcacagcaggcacacgcgggctgccgtaggtacctgctgcagagcacggggaccttggacttgggcagctggcagcccattcagctttccttccgtttgttccctgccctcctctcctttcttctcttgtcctccccattcttctcatcgttccatctgttattccaatcatgcagcagacgtttgaagagtgccacccacaagcatgagagatagagcagcggaccaaaggccccctgccttcatggatcttccagtctaacgggagagggatgttgttcaaaaacaactgttctattataattgcattcagtcctgcggagggcagtgtacagggtgcgcatatgatggggatcctgagggctgggagggtctctgtggtaagggatctacgaacgcagct

SEQ ID NO: 51923 - DNA, 1029 bp, Homo sapiens
ttttgtgtagaacctgggcctgagcatgtgaaatgtgagctgggggcggtcgggcagtgtgggctggaggggttagaggagatgtcctttgttgagaaatactgaagtataaagttggataggtaggaggtatccttgaaagtgaggagaccttggacttgatgtggtgagaatggtcaccatcagcccactgacggctgaacttgtatgcagtgcctcatgcgcagccatatttaaactctcatcagtcctatgaggtaggactacagaatgtggtctgggaagtgctttaatggctttgcatttttcttggtcagaaatctatgattgatcctacgtggaagaggtgggcaaaagttgaaggtgtgatctgcctttaatttggtcagctgcaggggcttgtttttcctctaaactcagcatgaaagcatgcttggctgagtttaaatttagtttgccaatttagttattactgtattttagaaataagccaaacatagaagtaggaaatgatgagcaaatttttctcattggacccttcctggtgtttaataggctattttgttcttatggcaactgaagtgttttactacagctgtgtcttttctccgggactccctcatcactctctctttcagggatgtgcatgtagctgcttttatgaaaacctggtcaactggctcccttgctgcccgtgcgggttttccctgggctcaacagggaaattgcagcattgatggtgaatgaaggagagtatcaagagctgtctttcgccatagccagataatgagagagatcacctctgaggcttagttgcaggatggtacttggacacaggttgaagtgccaggccgtatctaccactgatatatggtgtactgtgtgacattctatagattactgtcagagcatacttttttttttttttttttttttttttttgagacagggtcttgctctgtcacccaggctagagtgtagtggtgcaatcaaagctcaatgcagcctcctaaactcctgggctcaaat

SEQ ID NO: 51924 - DNA, 1024 bp, Homo sapiens
taaccccgtgtgcatcttgccacttgttctttgcctggcttttctccctcccttggagcttctcaaggaacctggcctggggatgttacctgatgtttacacccaggttacaacaaagggcaaaagtaatccgctactggagtgtgttcaccatggaaccaactggggggcacgacatctgcagccaccagggcctgttgagcaggagcaggggagccggtgagggagctttctgacgtctccagcctgcttccacttctttcagggtcttttggatgcccccacttgagacagagactgctgtcaaaggggagcaaacagcctgcacagtcgccccccgctccaggctgctggcacacagagacctggcggagggcccactgcgtggctctttgggttttagaatgccttgggcaagcatgctttttaaaaggagtttttgatattccttctggcaaaaatgactgacgcacttgtatttctccctccacagagtgatcagcagctggactgtgccttggacctaatgaggcgcctgcctccccagcaaatcgagaaaaacctcagcgacctgatcgacctggtacgtgcctccttcatatggttccatttgagactgcggctaagagttagttgcttttgtgtagctttttccatgcagaattcacaacacaggaaaccttttctctccctggcagaccatgccactggactatgagattcctccaggcagagagaagatggatttcatatggtggtctgtcattcagaaccatctgtgttgttgaagcccaagttaggagttctaaagttaatgacagtctgctccctccccagctgccttgtcttcagtttctagaagcttgcatttagacgtggtgaggaagaggccatacccatcccgcaggcattcagcagtgcacgcaggccagacgctgtcagtctctgctatggtgtgagtttctccagccaacacagtacaagcgtctacctgtaagatgcttccgtggcttcatttctagtt

SEQ ID NO: 51925 - DNA, 1053 bp, Homo sapiens
acaacagcagtcgtcattcccctgtggaaaaatctctaggggctccaaaaccttcacagaaaagtggattttaaagaatgtggcacagatgccttacctataaactggacaggagcaaaaaactgcggggagaagtgagattctgagcctagctcctcgggccagcatagctgccccctgagtagtttgggtgtgatctggctcttgtgacaaggccccagtcacctccccaggccatgccccatggttccccacctcctcctccacgcacctggctcacctctccttagcctgctgcacctgctgcctggaaaggcacacctgcttatccagggctaacctgctcctgtggccccattctgagacatcttctggggctccctgccctacttagtgggcacctgtactctgacattgacattgttgtagatggtgtgtttactctaccaaacttggagtgtaggtactggttacatctcacttgatggtttccaaatcagactttgccctggagtttgcctagtaggccaagttttcctgtatgcagatgatttcataataccgtcggatgtctgaacactgtagcagatatttagatggtggggttttatttgactgatttcttattctgaaaaattgttttagtccgtattaatggtggttttatttattgcagggtgatttaagcaattttatgctttttctttaaatcatgtgaaaacaggaggtgaaatatttcttatctcagtttatataccaaaataagaaaataacacaaaaaaccccctaaacctaccccttggagccttgccagcttaaaatggggtaactcccctccttattatttgacatcctaacaaggactcttccttgattttttttttccacactgattttgactgcaccataagctccatgaggagcagagacttttatgttcaccactcagcatcagaaacagtgcttgttacctaggaaacactcacataatgatcagatgattaattgaatggacagagaattccagaggataaggagaaatggtccttcttt

SEQ ID NO: 51926 - DNA, 1050 bp, Homo sapiens
ttcccacttgcttaaaacacctttgcaaacttcctgttagtgatcgtacagtgcttcatcttacagttgtaccttaatttactcatgttggacatgaaggctgttttcactttttgctatcataaataatgctgaaatggatatctttgtgtcaaagatctcgtgggtcaaaaaaattttaaaaaggccaggcgtggtggcttacacctataaacccagcactttgggaggccgaggcgggcagatcactggagattaggagttcaataccagcctggccaacgtggtgagatcccgtctctactaaaaatacaaaaattagctgggtgtagtggcaggcgcctgtagtcccagctgcttgggaggctgaggcaagagaatcgcttgaacctgggaggtggaggttgcagtgagccaggattgcgccacttcactccagcctgggcaacagagtgagattccatctcaaaaataaaaataaaatacaaaaatttgttttcttcccaatttggagctatcttacaaaattgctttttagatcacctctctgaatttcagctacacgttgtaattgcttactttggctggaggattggttcctttgtgtcagtttcaggcatgaggtggggagtggcagaacagccaggccagggcctgggaagatggcagggtccttagagccagtgtgcagttatgtttataatctagatggggctaggcacgctgttttctgtaaatagtccctttgtgttcgtcattagttttcagtaaaggtttgtttgtttatatgagtgagaaaatgttttcattgttttaagagggttggaccctagagtgttttaataagatacaagcccaagttgtcacagggtggggaggtggcagctgggtgtctgagacctcagggctggggggtgttgcagactgatggaggggcaagccctggggccatgtacacctcaggagagagagggattgaggccagagacacacctgcctctttctatgggagacactcctgctgaagctcttcattgatgaaaatctgaa

SEQ ID NO: 51927 - DNA, 1052 bp, Homo sapiens
caaagccctgggctcaggtgatcctccttcctcagcctcctgagtagccgagactgcaggtcccttcttgtgcagtcatttttatgattgtatcattaatagaatcagtagtaatagcacatatttattcattgctgtgtgccagagacagtattcaagacattaagtcaatgcatcatctcacttaaatgtaatgacttaatcttcattcaccccagtgagctaggtgttattatcctagttttagagacaagaaaactgaggctcagtgagggtaggtaattcgcctgttatgatgtttctggtgatccatagcattcggattcctactcaggcttgccccattccaaactcttcttcagttaagtatttatgcagtggcttctaaaagatagatttcgtttccataaacacttaaaactcttattttaagtaaaagttccatcaggtttttacaaaaatagattttaccctagtgctcaagtcaagggggcaatggccctgcgggtttaggatttaggatgaggtgagcaggaagcatgcgtggaagccagctcatgcccctcatgcatattcacgaagggcctgcttctgtgaaacagaccccgactggagtgcctctggatgcccatgctcagctcaggctgggtgaagctccgcctcagccaggagctccaaggagtggcaggtgggtcgggggagagagaaggaggcagagcctggtcctacaacgttcagttgtccctctgtgtgacctatgctgagggttgccagtttgcaaagcaacagtgacctatgctgaggcttgccagtttggacctgaaagtgggctccaccccctgcttactagctgggtgaccttgtgcaagtcccttcacctctctaagcccatatgaagatccattctcccatccactaacaatacttctggaggctcagcccatgagccacgtgctgtgctggaacccgcccctcccccccccgcccccgcccaggggtgaataagagacagctgctctgcctacttgaagcttgcatctgagtgaagatga

SEQ ID NO: 51928 - DNA, 2784 bp, Homo sapiens
aaaagtttattgtgtttttttgttttgttataaaagcagtatgtttattatggaaaagtttgaaaatatagaaaagagggaagaaacaaaaataattcataatcttagcttgccagcagcactgttaacctttcaatatattgtttcagcgtcttagtctatatgcatagtttggagttcatattgtcagtgcctagcccccttttttaggaggcggggtctcactctgtcacccaggctggagtgcagtggctcaatcatagctcacagcagccttggactcctgagctcaagggatcctcctgcctcagcctctcaaagtgttgggattacaggcgtgagccactgcgcctggctgagggctgcattcttaggccctgcaggggtggaatgggcacagctcttgagagctctgcggccctgcagtgttttcaagctctagttcccagcatctgatgctggtgtggaaacgatgtcggggaagcataatgaggtgttatgtgaacccaaattgtgctttaaaccaaaacagccctggtcatttgggcttttgtgaatggggaggctttcgggggccctctggcctctctgcactgggaagcatgcagcagatggaagagaatttaatggggacacctgaatcactcaggcaagaaaatggattaaatatctgagctgatacctgtcccacatactgggatagagggaggccattctgatagtagtctcagggcgggtgttaaagggccatttgctccctgtgattgggctgatacacagtgtttggacctttggaccttagcacgtttggggtgagaagagcggtgacttaggctagataagtttgtagggagaatgagtgtggcacatccgtgtcctctgctgtgggggcctcactcctcagcgcaagagctgagccgctggaggggactgttcctctctttgcctcccttctcccttctgtttgctttatctttccttttattccttcttgctttagcctgctgcactgcaggaatgagcccagtgtggctgtctaccagcacaatgtttgctggatttgtatgctacttttattattatttatttgaggctttccttaaaattggcttgagggctgggcacagtgcccgtagttgccaggcatggtggatctcagcacttcgggaggccaaggtgggaggatcacttgggaccagcctaggcaacatagtgagacccaatctctacaaaataaataaataaataaataaaagctgggtgtgatggtgcatctggagtcccagctacttgggaggctgaggcgggaggatccctggagcttgtgtgttaggatttttcctatgaataactcctgcattccagcctgggtgacagaacaacaccctctctcaaaaacaaaaacaaaaaactttggcctgagcctaacaccgctatctagcctcttcgtaagcagaaacatctacaaaatcatgtttgatgtgctagttatatttttcctatgaatattaaatataggtaattattaaactgcattcatccatatgctctctaaaacctcccttaaaccccattggcctgcacagcatgccatgggaaatgctgcaggcgtgaaaagagcactgtaccaggagtctggagcgtgacttgggactgcatcctggcctctgatgtgctgggtgatgttgaactattcccgatcccccatgcctctttttcttctttgcatatcagaccatgtgagcaccagggtccctccaggctcacacgttttgagtgactgcaggatgccattcagtggtacctcgaggttactcagcccctctcacatcacctgcgccgtgaggaagctcaggactctgacctagacatgtgatctatgagctcaaaagattgaaaaacgttgcagctcaggaacattttgtcttcacgtgtgctgcttgtttttgtttgggtttcagctctcactgtttattagccaaggaagcagcctggtctagtgcaaagagtaagggctttggagctaggcaggaccttgaatagctccatgcatctggctctgcctccccagtgtgggagtgaaagaccctcctggcggagctgtggagctggtggagtaggccaggagcacagattcacctctgagtctgatcctccacccaccacacctcagcctaagtgcgtgcagtgattagtgtcgcctctgtcccaataaaagggttgtccttggtcatggatggtagctgggctcctggggccagactgcctgggtttaaatctttgttcccttacacttttagctgtgtagccttgggcttcacttaactctctgggactggttccttgtcataggatcgatttgaggctaattaaatgaggtcaagcaggtaagaaggcctgtcatacctagcacatatagggctccgtacatgttgttggtcttatcactgttaatgagttaatgcacgtcaaatgagtcgtagcacctgggacatagtaagtgcccaataaatggtagctcttgtctttatcacatgagcccagaggcccaggacaggaggcactggcttctgggaggagaggagatagatggttttctacattcagctctggttagatccagaggttttcattctccccaccctctaagcttttggtgcctatatccctgaccaacaggaacccagcaatggaccacaccacttctacctgagccattgcacagagtcacctctgcagttggctttgaaagaattagagctcaagtttggaataggcaattca

SEQ ID NO: 51929 - DNA, 1674 bp, Homo sapiens
cctctgcatgcaccgttccgtttccttcccagaatccttctaagcatgggatcctatgaatttaggcctttatgtaaattcagaatgatacagatttagactttatataaattgccaataagtggcagagtcaggtcttgaacccagctgctctgaatttaaaagcctttgccctcagcctctgctgtgtcatggaattttactgctcacaggggtttggggcttgaccaaggtcccacagtaaaccactggagcactgggatcaggtcctatgtctaacactctagaatctagattctacactcttgtgtgagtcttttctgccacataaacttaggcctgtttcaaagctcatctttgaacatcctttttcagtgatgcatggaaagaccacattttccaaataggacattgtgagagagcttcgtggcaattgggtcgaacagtcagaatgccaatggcctgagttcaagaagaaatctaaggaaaggtccagattcaagcccaggtccctttgatctgtagctcatgtttatggggtacatagggacaggaatcatcgtaacaagacactggagaaagtggttgtccaacagtaggtaaaaatggtggcacatctatgcaatggactattttttattttttattttttggcgacagcgtctcatgcttttgctcaggctacagtgcagtggcgtggtgacagcacactgcagcctccacctcccgggctcaagcagtcctcttgcctcagcctcccgagtagctgggactgcagatttgctctaccgcacccagcaatttttgtattttttgtagagacggggtttcaccgtgttgcccagtctggtctcaaactcttgtgctcaagccacaatggaatggaatgcagccattaacatgtgacatgtgaagacggtgttgtagtttggaagatgtgctagtgttgagtgaagcacagtagtccgtctgtcctgggcttgtggttctgtggaataccccccgacctgggtgcttgtgggcattacagaagtgaacaatttgcaagccctttactgtgctctctgttgcttgcagtgggcgggcgtgtgtgtgtgtgtgtgtgtgtgtgtgtgtgtgtgtgtgtgtgtattcttttcctccttttgagtatcttccttccttgagataagtccccaggagggagagtgtagagtattttttctctctgcaccttcttgaaccggtcactttgctctgacaaatgctctctccgtggccgccgcctcactgcctgtccccagagccctctgagctgactcatcctccctgcctagcaggcttcacttcacttcctcaatctccctgttctggccaagttgagaggactcccttcctgcaaaaatgtgttctaaggttagctcatggtttttgctgtattaatctctatgccagaactgttatttattaattttttctttaagtttcctcactttttaacttaaattatttaggaaggaaactttgtccttaccatgaatggaaaacaatatcaattgctgtatatagaaagtacacactgaaataaacatatagtcatctactgccgtaaaagatgttcatctgtagagcacccacaatcctctggccaccaccagcttgtggctcccccttccctgcctgttccctcctgcc

SEQ ID NO: 51930 - DNA, 1053 bp, Homo sapiens
agtgttcactcacagagtggccccttccttctgccagtatttaccggatgcccacagtcattgtctgtaattctctcaacaccaaccctgtgaggtctgtttcctcattttgcagataaggaaaccggagctcagagaggtgtagtaacttgctgaagggcccccagctagttaatggcagttgccatggaggtccaggtccaccgcactcagcgcatgctgatggaattcccctctcctgcctctctggcaccagcccatggggatgtttattttatagatgaggaaactggggccgagaggttcccctgtacgtctagccacagtggctgaagaggtctgggttttgtttaggaggtttttttggttccacttgttgaaatgcaaggagatggaactttgtgaactgcaatctgttttccaaaagatagccactcagctgaaagggcgagatagtcttagcctagcgtcggccactgtgtggcttggcctactggacaggacggttctttgtgcagtagtgtcagtgtccctggctcttcctgcctgtgacgtgagtggcagcagcacatcttaatcattgcgacagccctccatggggactattgggtgacaaagccttgcaggatcctttggctttttcctatgaagccccatcccagccctggtcaccatatacagtgtaagatgcagggattctgagaggaaagacaaaattggcctgtttgattgattgattgagacagggtctcattctgttgcccaggctggagtgcatggttccatcttggctcactgtagcctcagcctcctcggctcaagcagtcctcccccttcagcctctcatgcagctgggataacaggcatgtgccacagtgcctgccagctgggataacaggcatgtgccacagtgcctgcctgcctgcctatctatctatctatctatctatctatctatctatctatctatctatctatctatctacttattttttagagacagagtcttactttgttgcccaggctggtctcgaacttgtgggctcaagggat

SEQ ID NO: 51931 - DNA, 2022 bp, Homo sapiens
gggtgaaatttgtaatgtacttactccagtgcttggcacacagtagctgtggttgttgcatgtcttattctgcataccacagaataagggacacaaatagaagccatcatccctgtcctctaatctgggagggggaggcaagatgcgtccaaaaagccaagtgcagcaggaatgaagtagtactagaaaagacttagccagggacccatgggtgctgtggtctgcccatccctgcaggcctggcttgcatttccccctcctccacgcagccctgcagaccactccagcctgcagtcggcttgggggctgggcatgaagcctgggaagagtgtgctcaggcagagaggacagggtggggtatggtcaaggggactggcacaaaagcagaggtcagggggtgtggtcacacaagcagtagatgcgagcccatggggtgcctcagtctcaggagtgagttgtggagtgcctgagttgctaagctaaggagtttgcattagatctgggacagtgtggagccagtgaaatttttgacagggcaggtagaaattcgaggaggctggcagagcggtggtattttaggaagagccctctggctgtgcatgcaggaggcctgggaggtgaaagagatgggagagaggcctccacaagcatcagcttgtgagcttatgagggtcctggccactgtgcagctgtgggtgtggaaaggaagggatggtggaaggagataaaggcagagtgacacggaatgatttaccacctctggagctgagggggtctgccccagagctgtcccatgtaggtgttctgattggacagtttatcattgacacacagctatttcaggtcagtctaaatcctagatagtggtgtctgcaaagccttgagagcctgttaacaactgaatggggatttcagtctgggtagcccagtgatccatccagccagtgactctgtgactgcaggtggcaccaagttcagcctgatgcacacagcattaggttctggtgcctaagacaccagtctgctgagggagatggtggggtggcgggctctgcatggcagctgtaggaataacagaagctagtttttttttgtttgtttgtttgagacagagtctcgctctgccacctaggctggagtacagtggcacgatctcgactccctgcaacctccgtctcctagactcagggaattctcttgcctcagcctcccaagtagctgggactacaggtgcgtaccaccatgcctagctaattttttgtatttttagtagagacagggtttcaccatgttggccaggctggtcttgaacgcctggcctcatgatctgcctgcctcagcctcccaaagtgctggggattacaggcatgagccactgtacttggccaggagctagttttgactgatgactttttaatattccagccagccctacgaggcagattctcatgtcaccctcattatgcaggtgaggaaaccgaggcccacctggcagtcctggcactgcgctatgctccctttagtgatttttttccatcgggtcattcattccgtggatgtctactgagcagtcaggtagacctaatagaatatgccatctgagtcttaaggttaaatggaggaagcgggtggaagcaagtatgtccaaagttctgaaagactcaggagtgagtgcagaaccagcctggggaagtccacagcgtcagacaggcagggaggctgcttgcctgcgtttttccgtgcttcctcctatggtcaccccacatgtttctgacatctctggatgcttgtgaacaggagcctttgcctacaactttctagtgttaggttttcagttgtgtcgtcacgtgtcttgtaaggcaacaaccctggtggttgccattcacctggcacgtagtgatgattgtgaggactgagtttatgtgtggaaagtgtagacgatgcctggcacgttgtaagtgcagtaggagtgttatctcttattattgtggttattctgttaacatggatggatgataggtg

SEQ ID NO: 51932 - DNA, 1122 bp, Homo sapiens
cagctgaggctcaggaggtggagtgacttattcagggtgttgctcagccagtggaggaaccactgttggtcagtggaagcccatctggcaggctctaaactgttcttcccattgtaccaagctgcttgtatgtcagaaggtttaatgataccgtttgaaaaacataaaatgggatattcaaacatggcaaggggggaggagcagtatttattgcccatgtattgtattttagatcctttgtataggaaatcatgtttatagtgaaatagctgtatggtgatacaggcatatttagcatgggccagaatgagctcttggagggcagagatttgtgtcttgtgttttccgcagctgtatccgtggggcctagaacagcacctggcgttggaagaaaccacttggaatgttctctttggcatgtgtctgtgtccatgaacttacctgcttggatttcatattcattctctcagtcacttgttcttagtatcccttagccttgtaatttctgactgcttattgttacgtttatcccctatttgaatactctgaccattaagccggtgtagatggttggcgtaggacagaagtggtggtgtgaggttgcattgtaggtaaatgaattcagatcaccatgtttttcattttcagtagatttgatggtagagaatacagctagatctctgttatccattgagggaaatagtgacttgagaatctaaaatgcatttgactttggaatgaattccatgatttttgttggcatgagtttctccttcccagttaaaatgcataggcaaatggaatttatttgcattcccttagcaggtaataatcttaccactgtctgagtgctgtacaatttcagagcaccgttccttacacagcttcagtttctgacttgggaattattcttagttatgatgatggtgaggctttagcaggaacggggactagggaggccccctcaggaattgctgctccagctcacagatggttttgcctggcaggagctgatgggaacttggtattgttacaaggtgaaacaacatagttgacattaatgtctcttgatgtggataagacacattgttcaactcacatccctcttgtctgtctatacag

SEQ ID NO: 51933 - DNA, 1075 bp, Homo sapiens
cctccccaccatgatccccttccctggacttttcgccactcctagcgtaacctgcgtcagccccgctcggtccccgccctgagcctctcatcagggtcctgccccctgcctggtgcacgacccagggtccccttccctgtacctggggcgcgccttctttgcagcctttggggagcgaggggagctctccatcagggatggggtggtcccggtgctgtgccttctcagttgccgcttctagggaggccgcctaggagccagcgagggaagggcgggcatcggtgtgcccagaaggcagcgcgctgctctgcgggcccttctcgaggctgccgccgtgggtgctgtgcgtgcgaagcattctgcagggcaggccggggtccacggcgcccgggcctgagtgggagccgaggggcgaggatgggtggcccacaggacaaggatgaacgcacaatcgcccttgtgaggccgtggccttggggggccaccaggccctggatccagcatatggcctggacacgatgcacccaagcaggcgcagcctccccttccctctgaactgtcagcttgcaagggttggaactgctgattatggaagtccctcggatcaggtgagcagaacgcctagggagagtgctggctccgctcgtggtgtttgttttggtaaagaaggcagatgctatccagacttttgaggaacctggggtttcacataggcccccacagatagacctgccctcctgccacttgacccttctgcaggacaggcccagcacttaggttggaagggccagagaacttcttcctgacaggatcaagggatttttggagcatgtttgtatgtggactttgggcctcaaagtgttttgaggaccatggttccttgtttagtcaagggatgttgctgctgaacgagggtgagtagttgagatgggttaagctttcttttgatgccttcctgtatgctgattaaaaacatgggcaatgccacttttaaggccttcggatttgtccagtaactttggctgaaaactccttgtttggggaggtgggcctggccccaggccttgatggagaa

SEQ ID NO: 51934 - DNA, 1972 bp, Homo sapiens
gaaaagagtccatttgatttggcggtaggtaatctttcccagagcagtttcggtgttagtggttcaggcgggaattccaatgcaagaaaccagtgaacgaatgagagagtgagtagggaaagtgaaggtgagtacgttaatgaatgaataaatcaagtctgtaccctctcttgcccgggggatttccagggccaatgtcgcactttggtgaggaggaaaggcctggtcacggcttggggtgacgcctaggaaactgtcagcctcgcaaacccataggcgcagccccaaggtcagggtcacctcgagcctccagacaactcgtcaccttgacgaccaactgaaaaaaccggaagggatggaagcagcggatcatctcgcgatatctggagcgtctgcgcctgccttcctgacctgggacttgtttccagctctcgcgagactttcaggggtcggagcgcgggggccggccgagaggaaagctggaggcgcgggtggggaacatgtctgagtcggagctcggcaggaagtgggaccggtgtctggcggatgcggtcgtgaagataggtaaggggcttttcgccccagcaggcccggccggtgcagagctgctggctccaggctgcgctgcccaggaggaaggaagggaagccccacgggaggtcaggcctctcggccttttccggcccctccggccagggcgagccgcccgggccccggcgggaggtcactcgggcggcgggcacagacccgaggagccggagcagcagcccgggtgcggggtggagttgcagcccggaggaggtggtcggggttggcaggtggcaggagagtcgcagagctcttgagtggaagacagtgtcggggcacaccctcgtgccggagccgcggggttctcctcccgggtggtgcattccccggcacgcggcggggaaccggctcaggaggccacgctgctccccggcggaaaccaaagtgccttctggagaaggtcacctggagcatttcatagacaccgccaggccctgatgcgagttgctgtcattcccgacttgccacctgatttatttgaatcagagtagtctggggcctgaacttagaggggtgatgatctggaatgagaattgcgctggaaagtaagaagttgttcacgttaagtttttctgcgtagtcctttaacacgtgctcagtgacggcacaaattatgaagtcactgtatggtggggaggagaaaggaaactcgtttattgagcgtatattgtcttcattgtgcgaaataatctttttacaggccgtgaaatggagagtcaggtgaaggaatttgcccacggtcacagctaacaaatggcaaaattagggattttacccagcttttctggggtcaagtcccatgttccttcttcgatgctaatttttgttacccaaatgtgatatttttgtgtggtaatcttagggtatttaagaggatttaggattgtgtctttgaatgaaaacattgaggaataagattgtaagctccatgagagcagggatgttttctggtttagtcactgccccatccccagcccctaaaagagtgcttaataaaaattgttgagagtgagtcaataaatgaaacagtttataagttaccatttcacctctgaattcagcacttacagtcaagtgatttggggcaagttatttaacttttctgtgcctgattcctatttggaaatcggcagtaataattattactatctcatggagtcgttgggaggattaaatgagttagtttgtttaaaggcttgaatatggatcacttaggaatgggttattttggaagcgactaaacagtcacttttgttttgttactgttaacagcttgcagttcagagagaagacttaacacctagctatgaaatgaccaaagtagttactaggcaatgtcatatagttaagaaagggctttgagctgggcgaagtggctcaggcc

SEQ ID NO: 51935 - DNA, 1140 bp, Homo sapiens
aaaaaagaaaagcagttatattttacctgcttattcgggttttaaaacctctatttattttgtatcaaatagtgtggaagaataggtgatttctagtatggtttgaactgataaattaagcccatggatctaaaaacaatagcaaaaattaaaacccatctttctcttggaagggagctctgagtgatgggcacagtgggcccttacttgttacacatccacttctcttttttccacttttttagcccttgttgctttctttttctttattcctgtcacatttttacacttctttttgacctctattcttattcctgccactgccactacatacattgcctagttcatctataaagtttgacattgataggtcttttttccttagtaaccctgttagcatttaagaagttcctaggtattctatttattctttatcacatcatttttcttaatagcatgtttcaccatttgaaatttgtaattggtttctttacttgattgtttcttctccctggaatgtaaacttcataagaaccagaggctgttgtgttcactgttgatcccctaacgcctggtttagaggaggcgtacaataattattgttaaatgaatgacatgtattgctgagaattttgtagaccgttctctgcccatatttgcttctcagagtgtgtttattaactgaatgaattagtatttaactgaaaaactccaagtaaagtagatttctgcccgttcacatgtttgatcatgtatccttgtgttcttgggacttataccaacttttaatttcatctgggaatgtaaattaactgtcagtagatcttaataataaagtagtattaaaaatgtttgggaatagtcaactgagaaacataaaccagagagcacttttgtatttaaacaagtagagggatgatgttggtttaagtggtagtgccaaagccttattgcaggaaattaaaaaggagtgaagaatattacattttatgaatggcatgttccgttagttttatgtgaatgcgtcattaatgggttttgcttattttatggatttatttttaagttttatcagatttattaaatgctctggctttctttatccactcagttcaagggctgtggtgtttattttccttg

SEQ ID NO: 51936 - DNA, 1140 bp, Homo sapiens; identical to SEQ ID NO: 51935

SEQ ID NO: 51937 - DNA, 1648 bp, Homo sapiens
aaatatgctgaattgctttctttggcaagtgcatttcagtattgaatccaagtaaaaacacaaatatttacttataaaagtcatttggtgtagtaatatttttactatggccactgacccactagtgaaatgttagggcattgctagattggatcctgtttatttaagggccgagagaaagagaaagctaacattaattgaatgcctattaatgtgccatcatatttggtacactattatctcttttttgctttcccagcaactcgggaagtttatattatctctgtttttccagcaagaaaagtagctctcaaagaaatttatagaaattgagaagttgatttttaaactctgaaaatgtaaacaatccaaaatagtcaaaccaatttttaaaaagaacaaagttgagattcttgtattagctgattttaaggcttgcagtaaagctacaagacagtgtggtgttggagaagagctggacatataaatcagtagagtaggataaagtccagaaatagacccatacatacatggtcaattcgtttttgacaaggcaatttaatggagaaaggaaaatcttttcaacaaaccatgctaaaacgactaggtttccatatagagaaaaaaatgagcctcgcttaaaagggtcgtagacctaaatataaaagctaaaactataaaacctataagagctttcccgtgtggagtctggagacgacgtgcagaaatggcacctggaaaggggaaggaaaagaaggaagaacaggtcatcaacctcggacctcaggtggctgaaggggagaatgtatttggtgtctgccatatctttgcatccttcaatgacacttttgtccatgtcacggatctttctggcaaacaaaccatctgccgtgtgactggtgggatgaaggtgaaggcagaccgagatgaatcctcgccatatgctgctatgttgaccacccaggatgtggcccagaggtgcaaggagctgggtatcattgccctacacatccaactccgggccacaggaggaaataggaccaagacccttggacctggggcccagtcggccctcagagcccttgcctgctcgggtatgaagatcgggaggattgaggacgtcacccccatcccctctgacagcactctcaggaagggggtcaccgtggtcgccgtctgtgaacaagattcctcaaaatattttctgttaataaattgccttcatgtaaaaaataaataaaaaaagtgaaacctgtaagagaaaatcctttgtgaccttggagtcagaaaagattttggggaatacaaaaagcaagtttcaaagaaaactgatatactggatttgataaaaattaaaaacttttgctctttgaatggcaccattaagaaaacaaaaaggcaagccgcagaatgggaggaaatatttgtaatacacatatctgataaagggcttagaatacataaagatctcttaattttaaggttcccccccacccatagactcagggtctcacatgttgctcaggctactacttctggcctcaagcaatcctcctgccccagtgtccgaaaattctgcaatttaagatgtgagccacttttcccagctttttttttttttttttttttttttttttgagatgggatc

SEQ ID NO: 51938 - DNA, 1648 bp, Homo sapiens; identical to SEQ ID NO: 51937

SEQ ID NO: 51939 - DNA, 1120 bp, Homo sapiens
tttaatttttatcaaatccagtatatcagttttctttgaaacttgctttttgtattccccaaaatcttttctgactccaaggtcacaaaggattttctcttacaggtttcactttttttatttattttttacatgaaggcaatttattaacagaaaatattttgaggaatcttgttcacagacggcgaccacggtgacccccttcctgagagtgctgtcagaggggatgggggtgacgtcctcaatcctcccgatcttcatacccgagcaggcaagggctctgagggccgactgggccccaggtccaagggtcttggtcctatttcctcctgtggcccggagttggatgtgtagggcaatgatacccagctccttgcacctctgggccacatcctgggtggtcaacatagcagcatatggcgaggattcatctcggtctgccttcaccttcatcccaccagtcacacggcagatggtttgtttgccagaaagatccgtgacatggacaaaagtgtcattgaaggatgcaaagatatggcagacaccaaatacattctccccttcagccacctgaggtccgaggttgatgacctgttcttccttcttttccttcccctttccaggtgccatttctgcacgtcgtctccagactccacacgggaaagctcttataggttttatagttttagcttttatatttaggtctacgacccttttaagcgaggctcatttttttctctatatggaaacctagtcgttttagcatggtttgttgaaaagattttcctttctccattaaattgccttgtcaaaaacgaattgaccatgtatgtatgggtctatttctggactttatcctactctactgatttatatgtccagctcttctccaacaccacactgtcttgtagctttactgcaagccttaaaatcagctaatacaagaatctcaactttgttctttttaaaaattggtttgactattttggattgtttacattttcagagtttaaaaatcaacttctcaatttctataaatttctttgagagctacttttcttgctggaaaaacagagataatataaacttcccgagttgctgggaaagcaaaaaagagata

SEQ ID NO: 51940 - DNA, 1065 bp, Homo sapiens
gggccacacagtgccgctgtactatcatgtcagctgggtggtgcttcctggccttactgtccttgccagattttagcaggctctcagaaggcctgaaactcaggcacattctttcaacaccttttcagatgctgacttcggatatcatcatttgtatcaacacatcctaaatgcagaaacatgggtgtacttaaaaatatttgactgccttttctgtttatctttgtccgtgaggctttttaatatactctttcctacggatccctgacctatgaattgtcgttaagtgtggtcacttcccccttctcagaagttcctagtcctggtcaaacccttgcctttgcctgtactggttgtcttccataccatctctttcatttctgcctatcatggaatacaggaaaggtggagggagggctgttgagagatcacaggatgcaaggtggtaacattaccagtcagttgagccgagaagggtctgaagtctggaccttagctcccacttgcagttgctttggggctgcagaagccaactggtattttcacctctgatggcggcttcttcagatctgtcctcattgctgccagagtgaactacataaagtacacatctgatatatagcttctctacttaattccgtctgttgcttccttattgcttacagggtagaggccacgatccttagcatggatggcataaaaggttgtcgttctttatctcctaccttacacttgataatttggcagcaaggagcttgctgtagctcctatctcttgccaccttacctcccacttccttctctaaccctcctggacagtttgggtatcctcagtgctcctagtacatcctgtttctgtcattgtaccctgtactttgtgggtctgattatcagttggctccaacactggaacagtgaacatagtgcgggaacttatcattccccagggcgtggcatagtacctggcacacagtgggtacacggtttgtataactaaggaaatgcccacacataatgttggccagaaagaagtttggaagatgtttagttttcctgtggtgggttt

SEQ ID NO: 51941 - DNA, 1048 bp, Homo sapiens
cctcccttataaaaaaaaaaaagcccagatacacacacacctgcacacatacacacccactctctctttcacacacacacactctcacacacacactttcacacacacacattcactctcctctctctcttagacacacacaccactcactcactttaatttttttttattttttttatttttagtagagacggggtttcaccgtgttagccaggatggtctcgatctcctgacctcgtgatccgcccgcctcggcctcccaaagtgctgggattacaggtgtgagctaccgcgcccagccaccactcactctcttaatcaattgttaagtcctgtgaattctgccagcaaaatgctcttcctttccaagcaatcctacacaccttagaagagtcttcctagagcagagcttcagtcatgttattccttctaaaacattcttcagggaagccaactgctgactgagtgaagtgctgcagacccagcttctggtgccttctgcagaatggcccaagattcctttgtagcctcctctcctgctgtcctcctggatgtgccttatgcttcagctggattgggccactcctcagttccctgcacagccctgcttttctgccactgagtggagtgcgttcccgtctccacaaactctggctgttaaatgtctgcctttctgagacaactcaggtgccaccttcttgaaaacttaaaaaaaatcttcctagccaaatgtattcccatcctccttctctggacccacagaacactgtcctttcatggcactgaggttctgcttttggacagttttctgggtaaaatggacttctttctgacttcttacccttcttgatcacaagctccccagggaagagactgtcttatttctctctgacccttgctgaagccagtactcttgccctttagtgctcagtaaatatttggactttcgatttgttcttgaaatgtttttttgtggaggaagaaggtgaaccacagttactatgtgcactgtactagtcttccaagtgttttacacatctcatgggtt

SEQ ID NO: 51942 - DNA, 1047 bp, Homo sapiens
ttatttatttattattattattattattttgttttgtttttgtttttgtagagatgcagtctgactgtgttgcccaggctggtttcaaactcctaggctcaagcgatcctcccatcttggcctcctaacgtgctgggattacaggcatgagctgctgcacgcagcctgtattacacctctgaaatcttttatcagggaggtggcagaacttactaccacttagtgtattccatgtcagacactattagagactttccatttttctaatgtagcaaccctgtaaggttgttttcactctacagatgagcaggttgaggctgggtagggttgactaattggcctggggtcagagagctgacttgtagggactggagcagcggtttgggcccggcctgtcttgctgcagcatcagtgctctaaccactcactcagcaggagagtacatccagcatttatttagaaattggatcctttctttcagacatgtaagaatgaagaagttgtctggcacaaggcttctaggatcttaaagactggtaattcctgtagcttctcatatttgtgaactgccagttgaatatggtacttaagtttttgctcatgcatcttgatgtaagttatacaaaataaaatggagttactttgctattttaactaatcttttagatgtagataaaatgtagcactgacaactataccttaggcttatgaatataggagccttgttgaaaatgttacatgtaagctggagtgaggtcttaataattgccataagttattgatagatgaaatgggtctatagtcttttttcccctatgatctattatagaaatatttcaaagtgaatttctgtttctgttcctcttcagtgagttgttcttccttcattgaaagtccataggcaattggaacttttgtgaagttggtcgtacaggagcatatatgactacagctcattctgttaggggctaacatccaaaatacattgctgcccaaagactgcaatcagattatatagcctacttgttaattcctgctgattatgtt

SEQ ID NO: 51943 - DNA, 1327 bp, Homo sapiens
aattctagagattaagattttctacttgatattgatggatgtggaagcattgctcatctttttgattgagtggtacggttagcaatggagtcggcatcattcttggtctactgctaggaaaagttgagcatcagagagctttttctccttgggggaaaatagaagagacaggcatggagtcagagggacaagaaaaatgctgaaatattttcctttggggcttttgatttctttgccaaaaaattgcctccagatggagaagagcaaaagctctgattgtaagccattatgtttttactggcttatctccccattccgttgcctggtttggaatctgtaagctagtccaaatcctttacctcattttctagtaccaatttactgtcttactcatcttccagctgcaaggagtgaggcaagtcgccttaaaattgaaccctgtaccattttataaaccaagcaacagcagagtcttgccaaggaatatcagtatcaatggcttccatgtccctgaggttcttgaatcacacctaccaggtcaacttcttgtgtctgtgacttgtgcggtaggattggtctgggaatgaatctaacaggcccttttggctttgtgaagacttgttactacccaggttgtctagcattctgagctgtatggggagcacagtcatattttggctgtatttcactggcagtagaaatcttgacattccaatttcccttgaggggtagtaattgtttaggggttgaaactggagaggaatccaacatctggacatggcaggtacagtagcattggagtctggcagacttgagcccagatgactgttccgcaactaactaaacaatatccttgggcaagtcattttcttcatctggggctctggagggccgtctttttcctctgcctagatattctggcttgtgtgatagctcagcctttaggaattgttctggattactgctttttatcttcctcaaaaagtagccatcactccaagtgctgaggtgacaaggggagcgtcctgttggcactatctcatgttttggctgtggtatccctctttgaggtgggtaggagagcccaggatgctggaggctccttgccagcagtgtagagagggtccactctagaacagtctcctggcttgttcccctgccccacaccccgcaacttgtctagagagaacagggagtcaagtttttatttcatgttgggcaggagaaccaaaggcatctgtaaaacctctgacaaataaagacggttagaaattagaaaattaattctctaccaaattatgaaaaaaaatctgtttaatgatgttca

SEQ ID NO: 51944 - DNA, 1057 bp, Homo sapiens
caagtagctgggattacaggcacacgccaccatgcctggctaatttttttgtattttagtagagacagggtttcaccatgttggctaagatggtctcgatctcctgacctcgtgatccgcccgcctacgcctcccagagtgcggggattacagttgtgagccaccgcgcctggcctttactacttattttcctcaaacttatcagcataggcacttaacaagtatttgctaaattaataacttcactaatttacacctcttttttggggccattgtgaaacattgataaaaatgtatggttattatagtcattagtatgatgcacgttgaatatttattgaaccctaagtaaatgtatttaagaggatggggagctttatcttctcttaataattccctattgggattttcccttttttgctcactaggaagaatgtggccattagccttcggttctggcatgggattaggaatggcttattccaactgtcagcatgatttccaggctccatatcttctacatggaaaatatgtcaaagtatgtacagaatatatatttctctttccttcagaagaaaaagatttctcctgagccctgaagaattctttagactgtttgtaatgagtaaaccatgtgtgtcattgtggcaccactctcagatactaattgctctttggccttcagtgatgtcatcactgctttggtgctaaagtctcccctgtgccttcagatgcgtatgtacgttcagatatatactcatgtgctagccgattggaattaaggagcctgcttgaatgtttatcatcaatggtaaggtagattgtgttaactatctgtaagtagcacttttcatttaagagctcagagtgccctgtaaacatctcacatatacttaagctaaacccaaagacttccgggactcagccatgattctgctttttattaatttgtttcatttttttgagacggagtcttgctttgtcgcccaggcaggagtgcagtggtgccatcttggctcactgcaaccgggttcaagtgattctcctgcctcagctt

SEQ ID NO: 51945 - DNA, 1056 bp, Homo sapiens
aacttggcaaggccatgtagttcgtaggctgatgagaaccatgctctccccactcccctgggacgccttcgacaggttttaggaattgttatccaggtcatgatggtttggccctgttccactcgtttcccactcttctccctggaagattggggctggatggcactcttaggaacctaggtagggtgtacatagtcctgttgtgagacagttttaacgtaaacagtgtgataaggttttggcttctggccctttgggtctgacctgatacagcaattagagagggttgtcagaatgccgtctgcacagttttaagctgaatgtccttgctttacaggagcaggagcagtgacttcacctgagaacatcccagcgggaggacaagagaaatcatgtttattcctcaggaatactgaagtgccctggagtaagctgccattcttctgtaacaatgttatcagtaatgctttaaactccagcacctggttatgcatttgaaaccaagtctgtttcttgttttgtattttctctctggaagttgtaaggaggtggtcttaaataaattaaacaaaaagaggaagtccattgcatggcctttgtttcttcacctttggtctctgagcatgaggaggactgtgtgtgaactgccagcagctgtagccacctgctcacagcctctctgagaaccccctgaaaccagttgttgggtatccttcccatttgccccctcaggcgtagttttcagaactgcttccacctcgtaatcagaagttgaagattgctgctgcgtggcctgatggagatgactgatgtcttaaggcgcctttccttctgtggcacctcttcgtgtgttctcacctggggacctggcagggcacatctccgctgtgcctactgcaaggcggtcccactgctgctgtattagcaggggaagaatcctggctgtgtggatggcccactccattgaagtcaagtcctgcagcttcatagagcttgagacagtccaagcttcagctctggagggcggaggaaagctcatggcatacccacctggcc

SEQ ID NO: 51946 - DNA, 1020 bp, Homo sapiens
ttccagcagacccttacaagcttcttttttcttccttcctttctcttcttccccttccccttcctttcctccccccttttctttctttttttttttttttttttttttttttttgagacaggttctcactctatcgcccaggctggagtgtagtgacacgaacatgactcactgcagcctcgacctccagagatcaagcagtcctcccacctcaacctcccatgtagctgggaatacagacgcgtaccaccacacctggctaattttttgattttttatagagacagggtctcactttttgttgctcaggcaatcctcctgcctcggcctcccaaagtgctaggataacaggcgtgagccactgtgcccagcccttatttatctatgaatgtacacccagcttcgttccagacacaggatgaaggcaggtcctgcccaagactgtgccgccattaagtgtccaggtgtgaggtcaggagtcaagggaactgcgagtttatacgagtcacctgtgcttccagacccccagtttcccactcggtagaacaaaggtgaaatgtcctactatggacttgttcaatgatcaaatgagtgctggcatgcccaaacttggtgtgggccctgagccgatgcctgggttccagtcctgctgacatttcttcactgcataaccctgggaaacttactagcacctgctcttcagatgcctcatctacaaattgaggacaatatccgcatcactgggaggtggtgcggactgggcgaggaccctgcacagggcccagccttatatattaatctgtaaccaatacttttgtctgtttccccttctcccagggggccaggcaggccaggcccaggcaagggctgatcctgggccattgtgtgggtgaagagatggcatgaggcaagcccacaagaccaggggccaaaatccatgaagcccagttctggaggcccacccaaggtgtatgcgaggccagaaactggcacccaaggaaagacatgaaagctggggag

SEQ ID NO: 51947 - DNA, 1054 bp, Homo sapiens
accgggtgccaggctgtgttccaagcacttgcaagtgtgatcacattcctccctcactgcagccacaggagggaggttccaccagtctccctgcttcagatgagaaaactgaggctgagaggtgaagccacaagaatcctaagtgccagagccaggattcaggcccagggagtctggccctggagccctcactcctaaccactatgctgtatttggcagacggcagctggactagggcagggcattccagagggtcggccagcatgggcaaaggcggggctctcaggggtgtctagaaacggtggcatctggtgtctctgcagcccacgtaagaggccccccaggtgggttggtgggaaatgctaataggtcagggtgggagcctggcactgtgccaggctaaggagttggaaacaactggttcaacgctggggaaagattgaggtctttaaactgtggagtgaatgagtaactgagtggatcctgccaaggaggacccgggggcactggtgctgggcaccctacagttcacacacatgcgcacatatgcacactcacacacacacctgcacacattcatacacgcatctgcacacactcacacggcagcaactcggcagaccccaagggcctctaatgcccctgctgttctctagatcagtgtggatgtcccagcatgactcacagggccccactcatgatctgccttcagcaccttcccccgcctctctccacctcacatgccgggctccagcagaccaagctctatttccattgttccctcttggtccgtcctctctgtctccttttctagataattcctactcatttctcaggtctcactgtgtctggaagctttccctccaataataatgatgataatagtagtagtagtaaccacacagcacacacttatggaatacactgcgttttcatgcaccagacacaattctaagctcatcatatgtattatttcatggagtccttccaacagctctgtgaagtaggtacaattatcacatccattttacagaggaggaaagagaaatgcaga

SEQ ID NO: 51948 - DNA, 1429 bp, Homo sapiens
gaagctatttctcaataaaatgtatggttcacaaggagggagatgggaaggaaacaggtactggttgagcacatacatttttctgctcaaggagatgggaaagcacagcatgccatccattctcaatataactttattgactgaatggacgaagaacgaatgaatttaatccttacaagccaacaactttatgaggtagaaattagtgtccgccttttgacaaaagaggaaactgaggcttggggagatgcagcatcgtgatgacatcagccccagttgcgctgagcacttgcagtgtgcccgccgccatgctaaatgctttacagataatctatttctggatcctcacagttcatggggaggtagtgactgttatcccttaattcatctataatatgggtacaataaccatactgcttcttaggataagattaatcctgtgaagtgcaaagcccagtggctgagatataagaagcccttggtaaagattaaccatttttcttctttgattatcaccatgctttgctatcactccacactgagttattgttcagactccaacctcagttcagagttcctacttaataacctctccatcccagccgcagcaaaggggctcagggctgaatgtccaataggaaaattgggcttcctgactcttgagtgctcacaacagcagttctcagggcacacctgaccccaattcactctaaatgttttccttttgctagattttctagcatttccatttcaagtctgaacaagtctagctactgctccaaggccaaggtctcccatcttcaaaatgatcattttggaggaaattggtttccaaatatcccagagggaggtgggatcagatggcaggttggggaagaagggaggggaggagggaggtgatggagtctgtgattatctattttgtgcttcttctgggtccatctgtttaaagatcttttttgtgcttctcttgctattattattttttgtctttttattattcaaattgcaaccctgttaggatggatccattgggtaagtagtacatcccatacactgagattccccggctgggttttagaatgttttcagctttttaaaccatcagtgggctcaaggtgactttggtgccttactctgagtggcagagtagctacccagcattggcccctgtttgagggttggtgtggtggggatgtctcaagggatcctgggcacagctggccctaaagaccagcctcttttccctcagaatggccgaggcatcccgaaagaagaaagaaaaccggaggaaatggaagcgttatctcctgataggcctggcgactgtcggaggcggaacggtgatcggtgagtccagctagagatggtggcacacgtctgggttttgtagacagagaaatgatgccaggctgtgggtgagagtgga

SEQ ID NO: 51949 - DNA, 1160 bp, Homo sapiens
cagtatagaaatacctggatccatgccaattaccataatcacgagggcatcctaggttctttggatatgtcgggaatttataggatcttatatgccttgaaattaaggaacctctcagttattatttggaaatcttattatcagagagaaacgtattacccggagcgatttgttctgataataccggtaaccccaggtcagggaagatataaaccagaaggtctaatacaggccagttctgccacttaccagccatgtgaatctgggcattatttaacttctctgagcttcaacttcctcacctgtaaaatggggataatagtagcgccctcctcacagagttcctgtggggcccagatgagttcatatatatgtgaagtgtttcaagtgagcctgggacagagtaactagtccataaatattatttgctgttgttaacaatactgttctaattgtgttattatagacccttttataaactattatagaccctattgtagtctatatgtagactctttccccaggaaaaggcttcacacatgtaattgtttatgcagcgttagggactctcagattctgtggtctctggaaggatctgagacccagggaagccatagcaactgttcagccaggagacctggctctcagtttgattctgctactaaccctctgtgtggccttgggcacgtgtctttccctccctggacaccagcacacattttctttttttacctatacaattaagggattgaatgatacgtaaatttctcttgactgtaaggttttgtgtttctgggaggtgagttcatcactgggccgaccaaggtgactctttgcagctgaggtctagagtgtgacgtaccacccctctgctcctgggtccctgtctgagccctaaggccacccggcttccctcacttgtttagtgacttcacctctcctctctgtgcctcatttcttcatctctcacatgaggataatggtagtatcgccatcagcattgagaggattaaattacttaacacatatcaaaagctgggacccgtgcttggcacatagtagagtctcagaagatgtgagctcatgagctgctggggttgatactgctcacataggccaggcgcagtggctcacacctgtaatcccagcactttgggagg

SEQ ID NO: 51950 - DNA, 1295 bp, Homo sapiens
tagctaatggtttcaatttagacttcactgcctcagtctcactgggtacatgagaaggttggaatcaacatgcttagttgcctcagtgggcacttgaaaattccttcactggcagcccgagtggaggcccagtatgtctagtcctgggatgactgttgtcagcagctgttactctagtacaggtgctcctgtgaactctttattaggaactgaatgtgtcttaacctctgtgttacatcttggctggcagagatttatgttacatgagattgtcttggtagcttgtagtgtggtcaggagaaaggggatggagcagtggtgcatagctgcttactgctcttataaacggtatataaaggttttacggattttgaaaatatttttttttagaggtcaaaataaataccattttagtggcaacagctttgaactagagaggtagatgtattaaagcagcatagaaccataacttctagataatgtagttgccactaggagatattagaaagttagaatgtatgtgtgtatttagtttttcaataataatgaacatacactttcaggagcaaagtatggttgagaaattgtggcagaaagaattttaaatgttagtcgaagttgtctgtagtttctttattaagctctgaaaacacttccaatgccagtttgattctgagggcttgggaagtgggatctcccttgtggagcagctggagctggctgggagggagcctctccatgggtaatttattatgcctgccctgcttcccccagggagctgcttcagtgtgaaatgatgtgattgtcgggggtggggtgggaggagggccaccttcagtcggggagttgctcacatattacacaggtagcatcaggtggacttcagcgctgaactgtactagtagtgagtccctgtagtcaatgtgcaatttctctaattctgagaaactctgtagactctgcctgggttttactgggtcagcatagaatgctatcagtttacctctgtgaaatattcagtcagttgaaggaaacttggattcctagtcagaggtgactaaaagttaccctgaccaaaaggatctctgcggggggaagagaatggagcttcctgattttaatgtgttgcgtcagtggccctcttcgactcccgttttgggtagatgcgtagctcttcactttcttacctcaaggctctgtctagccatgttaaatctttagactcagtctgatgccgtttttctgttttgccattctcattattcacagctttcagaacaagtgttgctaaaact

SEQ ID NO: 51951 - DNA, 1241 bp, Homo sapiens
ctataacatgccgtttacctatattaaggtatagaaatgatgcaatccaattactgttgactcgaggcttaagaaggcaattagagtggcttgcattttgtaatacagcactttgtctctagggatcaagattgcacagggaatttaaaaaggaaccaggaacccaaattatttcagaagtgtggctcagtttttgtttttgtggtttttagaatctgaaaaggagaaaaacaaaataaaggaagatagaagagatttccttagaatagtggttctcaaaatgtagtcccctaccagtagtactggcattacctgggaacttgtgagaatgcagatttttaggccccaccccacacttactgaattagaaactccagggattgggccctggaaatattttttacaaggctccgtgtaattccgatgcttgctcaagttggagaaccactgccttaggagaaaggttgagatgttagaggactgatcagacacataaaatggaaaatgagatcttgatgaccaggcatctataatcctctagctagaattgaaattggggagaataaattttgggtcataatccccttggatttcagtttgcaaggtaatatacccctgttttctttaatctcatatgctttcatgttggtttttaaaaaatcttatctgaaggatcaatggaaggtttttcacaaaactaggtcacaaatgctacctgtcagacaattgtaagatgacatcgattttaagatgcatccagattgcagagacgttaaaatgaggaaaagatatgcattttagaataaatgattagagcaattctcagactttacttcctgagaatttggtaatgggagaaagtttatattcaaatgcagggcacattgttgaaactggtttttggagcatccttctgattcatttgaactcatcacagaacctctgataggctgtaccagacaatgaggctgaaatgaaactggctgaattagaaattggaaatagaatgtgggattaattttcagctttggtttggtggcagtattatcaggattaggttcagctgtgaatgataaaaataaaacatgatggtggcttaaacaagatggaagtttatttctctctcacagatatctggaagtagacagtcttgagtgtaaaagtgagtccacaatcatcaaggacaggtgtcctctaacttgctgctgtgccattctgagtatagtacctcatggttcaat

SEQ ID NO: 51952 - DNA, 1506 bp, Homo sapiens
catagtctccatggctgtagcttctctgaagggtgtttgatccttaaggaggcaagtttttcttgccctgatacctgccctacatctcccacgagtccccagttgttcaagcctaggggttcacagtgcaggcagtgccacttgtgggtggaacctggtctcaggctggttgacgtcgtcctgtcatctctgctgtatcccattcaaggaactttccttcctccagcgagaaggaaacccagtgagattcaccactcccaactatgacggagctctggctccgtggtgagttgaacttggtacattgttcttcatccagaaagcctatcactgagatgacaagtattgccaaggaagaaagatttaatcaggtgcttgcaaacactgcctccttgcaaacactgcccgctgcctggtgcaggggggagcaccactccccaacagtcctcttctgccctgaaacctcatgcaaggacctccccgagcaggggtgggggaccacccttcctcatcaattcagactgtaaagtgaaacccctgttcttggttgaagcgtccattctttcatgcgcgtccgtgtgaagagaccaccaaacaggctttgtgtgagcaacatggctgtttatttcacctgggtgcaggtgggctgagtctgaaaagagagtcagcaaagggtggtggattatcattagttcttataggctttgggataggcagtgaagttaagagcaatgttttgcgggcaggggtggatctcacaaagtacattctcaagagtggggagaattacaaagaatcttcttaagggtgggggagattacaaagtacattgatcagttagggtggggcaggaacaaatcacaatggtggaatgtcatcagttaaggctattttttcttctttggtgtatcttcagttacttcaggccatctggatgtacacgtgcaagtcacaggggatgcgatggcttggcttgggctcagaggcctggcacattcaggaaccttccctgctctgagaggatccctgctgtcaccacacttggccctctgctgtccttgtctggctgagaagacattccaactcgctgagggttgggcgggactctcacccagctgtggcacccttctgctcgcaggtgccctgctaacagctcctggctcaagtctagtagtgttttgagtctagaggtgatttgctttgggcatggctgggctccacttatcagttccgaggtctcctcatgggtgcctcctctcagcctccctccttccctccctttctacccaattccagtcctccgctgcctgtggcatggccagcacaaggcgtgtcctcatgtctgaggctggtgttgtcttgggagcatagcagtggatgtttgtatacttcagagcagaccatctatgggacaaatccatctctctcatgtcctcttatagcataattacatgttttgtgccaagtatcctctctcaaaaagcctgagtgagaaggaaacagaag

SEQ ID NO: 51953 - DNA, 1113 bp, Homo sapiens
ggattctggatcggaaaaaagccaacaaattggatataaaaaccattattgggacaataggggaaatttgtatattagatagttttactgtatactagatacagtattgtgttcatgttcttgtccccgccaagactgatgagcccccagggactcagatagtcaagattctaagcaggctgtcagagccttaacaaggttctgagcccaggactgaggtaggggttacttcgggctgaggggattagcaaaggcttgtgaagtggctaaagccgtgacctggatatttcaggactcaaatccacccgcattggaattctctgggtgactgcccagcccctttggcaggacagccagccacaggccctgattgtgcaggacttcctgcctctgcaaaggcagtcgggggctgagcagggttctacccggctgggtccaggcagaagtttttcctccccacctccgggtttgtcctcatcatcggtcactcccattcacagctttaagattctggaggccaagaatttgactccccccggatccatggtctgtggataccaatgttccgactggagacggggagcccgcgagacccgggtctccagggtctgcccaaggaagttgctcatgggagcagacctctagagcaggatttgaggccaggccaaagaggttagttactgatgggggctgcataaattgggggttgtggagggacgccagctgggagggagagactggagaagggggtgtgtggagagcccaagaggaggcccagggggaggtgcgcaggcacagcctctgttgaaggagtctctctaaggctgctagggtccttcacctgtcattgtcaggcctggagagcgggcttttaaggaggccaggccacacctcaagggaagatggaggttaccggaaggtcatacctaaaattacgggcaaaaccagggagagttatgaacaggctgagttaggacttgtgtttacgttaatctgaggccttgcttggatttctttttaacctaaaccacaggcaaatattcccctttagggagagaattcgccgacatctatttaacatcccttaattgttgagagcatccactgtgtgcc

SEQ ID NO: 51954 - DNA, 1848 bp, Homo sapiens
agtttatttctggatcacataacagttcagtaggaatcacacgttggctcctcccatcttgtagttctgccatcccctatggcctcagaattctttgctgggtcatctccatccagccgaaggatggcggcagaaggacagtggagtaaactgtgggaagtttgtctgggcaggtctggaggtggagtgtattaattccacctacctcccctggccaggaccaaatcatgtggccacacctactcgcaagggaggctgggaaatgtagtctagtcgtgagaccaggaggaaaaagagggtccatgacctgctggctagaaatgaggagcaggaaattactcagtcacactaccagatcctccctgccacatcgcgtccaccaaggtggcctctgctaaagtgacatggttgaatttttgctcctattagggatggggtcaggagggcacccctcccactcgggatctaagtctcttgcacggacaggtgctgttgggcgcatgaccactgctatgggcggctggaggagaagggctgcaacattcgcacacagtcctacaaatacagattcgcgtggggcgtggtcacctgcggtaaggctggggcttcccgttcgggccattggaagagcacctgactttaagttcagctgccctagagaacagccagcctgtatcttgttgggggaggaggagttgggtgcagaactgggacgagaggagcaggattattgcagctgtatcagacccccagggtagggctgaatcatccactgggtgcaaaagtgcttgacatgcttcctttttcttgattcccccacaaaatacctgtagagtatgtttaggcttctccattttagacatcaagaaatggaagctagaaagcctgccagtgcacacagcaggattcaagctcagggcctctgagttcaaggctaaatctggggatggttctgctctatgagaatgagagttcctccagagcagcggctgcctccaccatcagactgggagtcccccagaggaaggaaggtgcttcctctatcagactgggaactccctgagggcaggagctgtctcctgcactgaaacctcaccctgagcagcagctgtgccccttccatcagattctctattcccccgatttaggagccatgcctcttccatcaggctgaaagctcctcggagcaggaagtccatggggtctctgctgagactggagcatgctcttcccaccctcattctgctcttggtgtccttttgcagagcccgggcccttctgccatgtgaacctctgtgcctgtgaccggaagctcgtctactgcctcaagagaaacctacggagctacaacccacagtaccaatactttcccaacatcctctgctcctaggcctccccagcgagctcctcccagaccaagacttttgttctgtttttctacaacacagagtactgactctgcctggttcctgagagaggctcctaagtcacagacctcagtctttctcgaagcttggcggacccccagggccacactgtaccctccagcgagtcccaggagagtgactctggtcataggacttggtagggtcccagggtccctaggcctccacttctgagggcagcccctctggtgccaagagctctcctccaactcagggttggctgtgtctcttttcttctctgaagacagcgtcctggctccagttggaacactttcctgagatgcacttacttctcagcttctgcgatcagattatcatcaccaccaccctccagagaatttttacgcaagaagagccaaattgactctctaaatctggtgtatgggtattaaataaaattcat

SEQ ID NO: 51955 - DNA, 1028 bp, Homo sapiens
ggagcacctccattcaaactcagctatgggccaggtgcagtcccagcacttttggaggctaaggtgggaggatcacttgaggccaggagttcaagacaagcctggataacatagtgagactccatctctacaaaaaagtaaaacaaattagctgggcatgtttgtgtgtgcctgcagtcccagctacttgggaggctgaggtgggaggataacttgagcccaggagtttgaggttgtgatgagatgtgaacacaccactgcactccagcctgggcaacaaagcaaggtgccatttctaaaacaaaaaacaaatccagctatctgtttcactctaaaagtagcatcatcacattcatacttgccttttcttgaatccctgcaaactcttgggtgctatggaaaaaaaattaatcctcagttaagcactggttaaaaaaataaatcagtgatggtaactgttggagaatatgagtatttggctcctctgaatctggattgtgaccaccttgacaaacaacatcagagaaatgggagggagtgaagcttagaattcttgtaccaccttgaggggagtataccctgaaacctaaatgtgaaagtgatcatagatgggctagtatgctagagacactaagaggcgtggaaacccaggaagcagaagctggaagcgggtaagggagaggtctcacagaagagggctaggatagtctggctgttataatacaaggggccaaggagagcatcagatgcactgatcagtcagggaattcaggaagcatgagagtctctggctgccaatattctttctgtctaccctgtccccagtctaatctgtaaaaattcagggttcccccacttttcattgaggtcttcagcaggaatcatgctatctattaaaccaaaaagctcctctagaacatccttcatcctaaataacaaggcatgggagttatcttctcaaatactaggctaactcactgttttgcctcagtttcctcttggtgaggtagtggactacacatcatttt

SEQ ID NO: 51956 - DNA, 1140 bp, Homo sapiens
ctccttcctggggcacgctgcctgcaactctgtgattctcagagacccagggcagggctgggagcaagtggctgctgtgtggttcacgcaccacctccagcagttggctcctagaggtgcccagtcagaacaatacacagggatttcgggagagagtgctgtccttcaaatcattcaggctcatttcccagacaggccaagcacaatgccacagatttccccagtggcattacccacaggacaggtgccccttgcctctgtgggtagcagagaagtgcctcatgtgtccgaagactgcagaagtctgcctcactggtcacctgtctgtcggcagtggtctacacctcttcaaacccctgagctgaggtttatcgtggtcaaggggcaagatcatggctattagagccaccttcgtctagattcaagtcccagctatgcaacttactggctgggtgatgttaggcaagttacattactctccaagcctcagtttccctatctgtaaaagggagatgcttgtcaaagtgcttggtccagagttaagtcaacaagcggcatatcagccccttgccatctggctacattttcacctctggccactcctgcccagttcctctgccatgctttgcacacactgttctctgcctggacgctcaccctgccttgcttgctgggccaaggtctcttccttctacatggcaggcaccgcctccaggaagccttcccagacaccctcagggcattggtctatcctgggttctctgagcctccatactgttagagtggtgaggtctgtaacggtcagtgtgtgtggaccagggttgtgtcatttttgtcccaatgactccagcacaggactcagcaggagtaatatcagttgaatacatagataaaagaagcactagaaaatagaaatgaattaatgagtagagaaaggaaagaagaaagcatggaggaaggaaaaaaacaaaataaaggaaaaagagaagaaagcaagggagggagagaaaacagaagatgaaaagaaatgagagagaaaaggcagagaaggaagtgggtcctcctagggtccctcccgccatgctgatgtctcaagtcccagctatgaaacttacttaccccccgtcctgcctgcttctg

SEQ ID NO: 51957 - DNA, 1162 bp, Homo sapiens
cccacataaatcgaggtcgttgtactgagtggagccgggatgctggagtcctctgcctcaggggcccccagtccaatcccaggcccaggaactgggacaaacccagagataaacaggggagtcattctccaaggcagagcccacctcctcaccatgcctgtagagttcagcaaggccctaacagcacccagcttggcttggtagggaagataaagggtacacataggtgggggaagagcggagcagggcaggatatcaaaccctctgcaccagtgagctccttcctgtgaaattttagcatctgcaaatttatttctgccagcaatttaccttttctgcaagcaagagaaatctgttcttgtttatgagtcactgctttatggggaaaattagaaaacgaggcatctgcagtttggaaataagacagggaggtgaagtttggtggcagggccagtacaaatgagccctggagtaaagtctaatgtggtctcacttccattcagccagaggtgattattttgttggctggaggtacaaggctttattagtatccacacagcatccttttttgataaagcaaacattttctaagtaaataaactttgaagcttaaaattgaaagctccacttgacacaatagaataaactggaaaatatgctgtccgtagaaagctgttagaaaatgttaagccaagaatggtctgggtaggggtttagtattagatccacagctgggggctcgggagaggtggctggaccctgtctttgggagtattgccatcattctgtgctctgtgggggaaaccgccactgggagaccacctgggtgtctttccagggctgtcctccccctcgatgggcacctcagtgaggcatatgaggccacactacctggtgttgtagagtataccggttgtcccctagtagtcacagccttccagctcaagactacatttcccagcctcccttgcagccagtctgaccatgtgactggggtccagccaatgggatatgagcaaaagtggcacatgcgactttgggctgtgctctttaaagtgagtgtgttttaccctcctcttcctcacttcccgctgctggagcagaccccttgggccccaggagggaagccacacgtggaggctggcagcactgccctgccagc

SEQ ID NO: 51958 - DNA, 1032 bp, Homo sapiens
ccgctgcgcgtcgtgggaaccggttttggcgtcccctcctggttccgctcatctccgcacctagccttgcccaccggagctgcgctcgggacttacctggggtcccgagacccaaagactttggctccctctcctatcccagctccagacatttctgtctaaattagtgcgcctggtgcggggaggacgcgggccagtgcgcgccctggctgcagcaggagcggctgggttggcgccctctgtttccttttctcagaatggagctgggacgcaggctggaggatagagggtggtgggtggttcagaggaaagcagggaagggacccctggcagggacggaggatggagctgtttcaccgcgcagtgagccctgctccctcgccctctcctctcccgacctcccactctgggcataacgggaaatgtcagagacctctggctaggccccagcgcgctcacctctcttttcccccctttttttgcagttgttattgaagatgataggattgatgacgtgctgaaaaatatgaccgacaaggcacctcctggtgtctaactcccccaaagacaatgagttaagggagagaataagaacggcggtaacagttattggcaaaaagcatgaaaagagaaagcactttgaaatttattactagcttgctacccacgatgaaatcaacaacctgtatctggtatcaggccgggagacagatgaggcgagaggaggaggaggaggaggagaaggctctgggctcctctgcaaaaataaaaataaaaaaataaataaaattttaaaaataataaaaattcactatatacacatataaagaaataaaaagaagtctcagttgcagctatttgtcaaaattaatatccatttctttttatatacggtgaatattgcgcaattatagatctggattttgaaccacttaatgaagcggcaacaccaggtgttttgaggtgttggcattcttcgctgatttggctgttcccaatgtttacattatttaatcttgcaaaaatggttct

SEQ ID NO: 51959 - DNA, 1237 bp, Homo sapiens
ctgggccctcagggtctgaattggggagcaagtgtggtggggaggaagggctccccggtttgcagatggcgggggaggctatgtccgcgggtcgccctggagccctccgatctttgccccgcagcatctgccccccaggggggtcagcatgcttccgcccttccccgcgtgtgcgtcgtctgtccgctccctctccagctcccggaacccccactccccccgaggtcccctcgggaggcaaagccggctgcggggcgggcgcgcaccagctccgggccccgtaaacacccgtgagcgggacggcgggggctgggggcgggggcaggaagctagcggcagcccgggccggccggcgcggccccgtgacgtcgctccgctcgcagggatctctccccgaggcccgcgggtcccctcctccccgcctcctcccgccctcctccccgcgcctcgcctcggcgccgcggccggcatttctcctcgcagctcgctgcctcctctatccctgcctccctctcccccctctgtttttctcccttccttccctctccgaccctcttcctctccctcccgatcctttccctcctcctctcatctttcccctgtctctccgttctagctcgtcccccaccccaccttttcttctttctcctcctctccttcctctccccctctcctctgtctccttccaccgtctcccctgcctccctgtctttcagtccctgtttttcagccccgtctccctctcggtttctctcccccaccctccctccgggtttcctccccggtgccctccctcctctctccctcccctccccctccgcccctcgcagccccgccgctcgcagctcccagtctgcctccccgaaccggcgccgccgcccgcactcgccgcaggaccggcccgcccggctcccggggtgcgccctcctcggtcccgcgccctccgggctcgcagggacgtctcctccctcccggctcgcggccccgcccggcccggcccccgcccagagccccagcgcgccgaggatgtgagtcctgctcgcctctggcggagcagcagccactcgcgcgcggagccggagcgcagcgcagcgcagccgcgggcgctctccgggccgctcgcgcgagtgccgcgctcttgccctagcggcgtcccccggcctctcgccggcgccaccgccgcagcagcccgcgggccgtccccggccggccgcccccggccccagcgccgctgacc

SEQ ID NO: 51960 - DNA, 1059 bp, Homo sapiens
cctgcatgaccctgaccctggccacctccccacagtttcctgcatccctttcagtctcatacttgtgactccaacaacattgaactgttgagtttccttaaacatgccatgctggccaggcagtagctcccgcctgtaatcccagcactttgggaggccaaggcaggaggatcacttgaggctaggaagtagaatttgagatgagcctggacaacatagcaggacactttctctacaaaaaataaaaacaaagctgaccatggtggtacacacctgtagtcccagccactcaggagactgaggtaggaggatggcttgagcccaggagattgaggttgcagtgagctgtaatcatgccacagcactccagcctgggcaacagagtgagaccctaactccaaaaaacaaataaaaacaaatagaaccccatgccatgctgttgtctgtctttgctcacatgaattcctgatctggaatgctggtcctttcttcaccttgctaagatcgattcacctttaacactcagctttaggtgtgtcctccagggaaaatcttccctgtccctccccacctaggctgggttaggtatccctcctctgagattccataataagagtctcaaatctcgattcctgctcttagccatattgtcaatgtcttgggcggggactgtctcataacttttccttctccagcacaaattctgggttgtcagtgcagactaattagaactcacatcagggctcactatttgctaggtaccctgagaagtgcagtacataatgaacccttccggtcctcacttgcgaggtacggaggaatgtgtttgtattattcttaaataaaaggaaacagaggcccagagaggtcaagtgtcttgcccaagtgcacaagagggatgggacttaaacccaggcagtctgactccagagcccaagctcttaactacagaatgtacatggaatgaatgagtcaacccatgaatgaaatagtaggtgtgggcgaaacaatcctggaagactgcctagaggagctggtttttggaccacagatgaaagt

SEQ ID NO: 51961 - DNA, 1061 bp, Homo sapiens
ccaagtcttgagagtttgctctgaaacttaaacgtatattactcataagagtttaatacacaattattttatttcctgccaatctaatggcgaagacatggaataacccatcaaacagcccagtaaccccaggaaaccagagggacggaaaccagggcgatgggcgagtcagtcatggccagtgcgccgtgtttcgaaggggacggccatggagcggtgggtggtcgctcagctccccaatcgctctccgacacccggctggggagacaggacctccctggaggccgcagcagcttgattgtcacccgggcaaccccaccttccggttccctctacaaccccttgccccgcttccggttccggcgtcgtgcgtcatcgctgggcgactgatttcgagtttccggtcaggttaggccgggggggtgcggtcctggtcggaaggaggtggagagtcgggggtcaccaggcctatccttggcgccacagtcggccaccggggctcgccgccgtcatggagagcggagggcggccctcgctgtgccagttcatcctcctgggcaccacctctgtggtcaccgccgccctgtactccgtgtaccggcagaaggcccgggtctcccaagagctcaaggtcagtgctggagccggcctggcctcagccgggtcatctctgtcccaggtgctggggagcccatgattcaccttggccgccccaccgtcggaaactgtccaaaaaaggaaacagcctctgaagggtgtcatccagccagtagatggaggagcgaggggcaggattcgggctcgggataacggctgctccgctccttttctcccaagtccctcttatgactcagaatgaatcttgacttcattactttactcgaaaaatatttattgaacacctgcgatgctccaggcagtgagtcgaacagatgaaagtccatcccctcgtggagataccattttagtacgactagacagcaaacatgtaaatcaggcggtgtaacagatggtgagcaatgctttagagtaaggtaggggagagaggacatggaatgctg

SEQ ID NO: 51962 - DNA, 1046 bp, Homo sapiens
aaagggaaagaggcacatcctttctttctttctgttgactggaatgtagtcaagatagctggagctccagcatccatctttgaccatgaggtagtagctaggtattgaggatggcacagcaagaagataaaagacacctgggtccccagtggctgtaaagccaccctggacttctcatattcattatagcaaagtgaacctttgtcttttttgagccactgttgtttggtttttttgttactcccaaccgaagctaatcctaactgctattcctaactcccttgcgttggctgtccctactggcttccctgcttcatttttctccagagcacttattaccagctaatgtattacatttgaataatttgcatgtttaccattggtctcctccaatagaatgtaagctcacaagggcaggaattttgtgtggtttgtccactttcacatttccaccttttccatagttctcgaacacagtagacactcagtacatatgtgttgaattgattaattgaaggataatcaaccctaaaggtaaataatcttacgatcttatagaagaggatgctgaggctcagagagggccgcaaattagaaagggatggctcctggaaattcaccaaggcaatctggctgcagaatgcatgctcctcaatactaactcaactgccaacacatgcaccgaagtcacttaaaagccttctagctgaaaccatacactgtctttaatggggaaagctacacttcttcagggaggaaatgtgagcagaagtccaaggccaagaagattctctgagggctcaggcttagttacgaatgaatattgggagtaaaaacgggaaatctcaaatatcctggattctaagacaccactgattataagacacaccaccaatttaattagggataggaaaagaaacacttcattaaatatatacattggtcacgagaaacattctgatttcagaaacattataatggggagaatctgtatcttcaactgaagcgatggggtagtcaaagatgccttcgagaaacttgttgag

SEQ ID NO: 51963 - DNA, 1026 bp, Homo sapiens
tgctcttacattgcatgcctgtatctgagtactcatttcatccgtcagctagggtctgcgggacagatccggtagggtagggaggaggttgctgcactgctccacgtaagagatgatggtagcgtggaccaggtaggagcagcagacatggtgagaacgagtcagatctcgggtgcagttggagatagagctgatgtgaataggtctggactggttaaagggtatgaaggaaagagaagagttgagattgatgccaaagttcttgacctgagcaaccatggctgacattaccatcattggtttatgtcattttattgattgattaggtgagatagggtcttgctctgtcgcccaggctggagtgcagtggcacgatcatagctcattgtagcctcgaactcctgggttcaagtagtcctcctgcttcggccccccaaaatgctgggagtgtaggcatgagccactgcacctggctggtttatgtcattttcactttgagtttatttacttctaagtggagggcaggaaagactctggaactgagagaagtcccgactacagatataacttggaggccattagtttataaaatggtgttttatgccaacagcctgatgagctcactaagggagcatgaggcacttcagcatctcaaggtcaaggagataagaaatcagcaaaggaacttgagatggagctgccactaaataagaaggaaatcaagagaggaggtaaataaaatgtattcaggaggaagcaatgatcagctgtatcaaatgctgctgagagctcagtaggggaatcgaccgctggatttagcagtgtggcggttgtcagtgaccttcagaagcactgtggaagccaaggccggataggagtggatccaagagaaggaactggaccaacacgcagccttttttcaagttgtgctgtaaagaaaggccaagaaatagggcaatggctggagaggagatgtaagaacaagacagaggcttatttcatttttttttttttgtaagtctgttt

SEQ ID NO: 51964 - DNA, 1031 bp, Homo sapiens
tgggctgctcaccacattctcttacaacctgctcgcactcatccctgagagcacacacacagtctataccatatgctctgaaatacacatgaaccttctcagagatatgaatacatgcttatgagaagcccccagcccagtgctccctccctgccaaatgtcccagacacctgcatctgagtgcccaggcgtacagacatcctgggaggctgagacagacagccgacgtccctccagggagcctggcacatgtgattttcagacaaggcataagttactgcctccttctctgacattaaggaacagcttcctggcagcagtccccagatcccgtcctaatcctggggttggctctggctgctcaaaagaactactttcaggtttctgatggtaaccagggggagctatacaggctcacctgtggcttatctgatcttcaatccattttttcacccccagcaggcctggcattaaacacaacacaggagtagtgacagggctgtaaaagcaggtccactttatttacaatgatcagtgacacatagatctttgggctttttgtggtcttgcggagacacctgggtggggggcccactcccttggttggttaacacaccctccttcctcatcctgctgggagaatccactgctgtcaggacccacctgctctgaggagcctcgacttgggagcaactctgctgcgtctactttctaggtagtcagtgtcctaagcacctgccaaaggttctccttacctcctttgggagccccatcttggtcctggttgtggggcacctaggagggggccacacacatccgtctgcagagagatgggatgggcaaggaatcccctgggggtgccagggcagaggcgtgggcagcggcctggtgcagggctgttacctggcctaacctgttgtttgaacgtcggtaggactctcccagtgttctccagaggcagagcagtgaagtcacaggagtcctccaaggcgtagagaggcggggcttgggcgtgagaattcctccctgtg

SEQ ID NO: 51965 - DNA, 1178 bp, Homo sapiens
acctggccttttatctcaggagtatagcatcgtgatccagcagctctcaaatggcaaatgggtcccctttgatggcgatgacattcagctggagtttgtccgcattgatccttttgtgaggaccttcctgaagaagaaaggtgagtgtagttcctgcacgaggatgctgccagaaacggccccaggcctcacttgctctcgaggcccaaccaggaaaagctctgggaaacccctcccggttattcttgttggttcttccgcaggtggcaaatacagtgttcagttcaagttgcccgacgtgtatggtgtattccagtttaaagtggattacaaccggctaggctacacacacctgtactcttccactcaggtaagcacaggtgacagcttctgttttcagctagcatgtgccctgcctgggctctgcagtggccaggtcctgccacctctgtcctcctgcaggtatccgtgcggccactccagcacacgcagtatgagcgcttcatcccctcggcctacccctactacgccagcgccttctccatgatgctggggctcttcatcttcagcatcgtcttcttgcacatgaaggagaaggagaagtccgactgaggggctagagccctctccgcacagcgtggagacggggcaaggaggggggttattaggattggtggttttgttttgctttgtttaaagccgtgggaaaatggcacaactttacctctgtgggagatgcaacactgagagccaaggggtgggagttgggataatttttatataaaagaagtttttccactttgaattgctaaaagtggcatttttcctatgtgcagtcactcctctcatttctaaaatagggacgtggccaggcacggtggctcatgcctgtaatcccagcactttgggaggccgaggcaggcggctcacgaggtcaggagatcgagactatcctggctaacacggtaaaaccctgtctctactaaaagtacaaaaaattagctgggcgtggtggtgggcacctgtagtcccagctactcgggaggctgaggcaggagaaaggcatgaatccaagaggcagagcttgcagtgagctgagatcacgccattgcactccagcctgggcaacagtgttaagactctgtctcaaatataaataaataaataaataaataaat

SEQ ID NO: 51966 - DNA, 1101 bp, Homo sapiens
cgcgtcatcttcagcggctccctcgacttcttcagcgactccttcttcaactcagcagtgcagaaggcggcgcccggctcccagaggtagctgccaggaggcttaggggccggggatccgggtggtgcagtgtgtgtatatggggaggactcagaaggggaagaaggaggcttttagctaaaagtgtcagaggctgagtgtttcaggtgctgtcagattatttcagggctttattgctatattgctggtattggcacttccaattttttaaggtagtagtgacttatctagagatccctaacctccaccgttccttttagaaatttgtgtatttgttgtgcagatgacaagcaaccagccatatcttttcgtttgtttcctgcgttccctttaaccatgagtccctaggtgcccaaggcctacaggcagaacttcgctagggtactgtcatggtggacatgagtggtcctgcccatcaggcaccactggaaaggtggctctggtgcccaagctgctcctgtttccctcctgcaggtattcccagacaggcaactatgaactagctgtggccctctcccgctgggtgttcaaggaggagggtgtcctccgtgtggggcctgtgtcccatcatcgggtgggcgagacagccccacccaatgcctacactgtcactgacctagtggtaagagatgtttggggtgggagggcccaaagggtttgccaagctgactgagctcagctcagaagcacttattgaacacttctttgctggcctaaagggcataaataaagatgaataagttaatccctacacctaagcatgccaggtgagatgcagagcctggcgtgaaaactgatgtcctaataggagcacttcttttgaagaggtgtgtgtatttgctatggggggcagcagtgggaggggcttcactgattaactctgcccaggaagttggacttaataagagaaataggtcattaggttgaatttgttaggcaagagaaagcgaatatggaagcatgaatacttgaaagtgcctggcacatgtcggggcaggagggtggtttgggtccagactttgatgggccatgaatactgtg

SEQ ID NO: 51967 - DNA, 1437 bp, Homo sapiens
aagtgatggcatcactggagatgcagaagtgctcttcctcagaccatttagacagggtggaattgacaggctctggaaactggctccagtgatcagcatcactagcgtgaaaggtgcaggtgatgagatgaaatatgggcagtacggcatttccaaatgcatatttcctatgtgagttgaaatgtgtacagcttacttgaccagtgcaattagtggatgtttgactgtttcctccaaacctccagaagtttctaattctgagccataattttgagtcttcacgctgcgaggatggggccttgcccgttctgggatgtggtgtgggaagcctctccctcattgtggcccccagagggtgctgctctgtgagtgatcgtggctgctctgcccttcatgtcccctccctgccagtgtcagaggagcagggagaggagacctctgggtcactgtgtctggtgcctgctttcagattttggaggcaacatcaacgtggagaccatcagtgcctttattgacggcggaggcagtgtgctggtagctgccagctccgacattggtgagtccgacctgggaggttctggtgctttccacttctccagggagttggagagcattacaaacagaagctgccaaattagcattcactgggtgggccttagctggggagtcagtgagggaaccgttttctcagttcagaatctgactcctggaggcagaataccacactgctgtccaggggtccatctggggctgagcccagctggatgaagctgcagggcactggggctgacagagagggagtcacaaggaagccaaggacacttggcccaaggcccccctgtaagggctcagctaggtgtctcttcggtctgtgcaggtgaccctcttcgagagctgggcagtgagtgcgggattgagtttgacgaggagaaaacggctgtcattgaccatcacaactatgacatctcagaccttggccaggtaatcaggcctgtcaccttccaggtttcaggggcatatggcaaagctctgcttagccaaaagccaagagggtgtgaggaggttctccctggcttggggaaccttttcctgaccacccacctttccatctactctttgcagcatacgctcatcgtggctgacactgagaacctgctgaaggccccaaccatcgttgggaaatcatctctaaatcccatcctctttcgaggtgttgggtgagtgagtgagcagggagaggacagcagaaacctgggggaagaaggggtcacttaatttttttgggaaatcaaggcaaaattgtaattctttaagggtacgtagatgggattaatttgttatatcaaggccgagtatagtggctcaacctgtaatcccagcgctttgggaaggcctaggcaggaggatcgcttgaggccaggagtttgagagcagcct

SEQ ID NO: 51968 - DNA, 1227 bp, Homo sapiens
ctgggcagcacaggcccgtccatgccatggcccctggagccgtgagcggcaggaaggaggctccaagtgccctgaccctgatcttattcttccaactcctcctccctagaaatggtggaggtggggcctagttcctggtcccgagccttcccaggcccagtgaagaccccgccagcaagaaggtggccaaacaccctgtccaggacgcgacggtcaagcccggggaggaccccgcaagctccagagggaagtgggctccagactagggggcgggaggccggcctgggcggagcaaagggcgctcggcctcgttgattggccgcggctgcagagctgtctctctaggattgagccttttctttagggggacggggccttgattcactcccaccaatagggttcaaggaatccacctcccaccagggcacttccggcggcgctctccgcgccttatcgccaaagctgcggctctggacgcccagccgcggcgtatcccgatcacttccgggtagtgctccacgggcacgagccgcgattgggctaccgtagatggggtacttccggtgtgcacgtgctgggtccttcggcaggaggaggaagatggagcccagcaccgcggcccgggcttgggccctcttttggttgctgctgcccttgcttggcgcggtttgcgccagcggaccccgcaccttagtgctgctggacaacctcaacgtgcgggagactcattcgcttttcttccggagcctgaagggtgagagcggggtccgagggggtagcgtgtgggggcctggggttggtacagcatcgagggcattgaccactctccttccctctccctttcctggagcaggccgcccgggtctggcctgccgcttggcgtgcgggtccgcgatgtctgcagcaggggtttcccttcgcgtcccgtcttcctcaactacctgttttttcttgtccagaccggggctttgagctcacattcaagaccgctgatgaccccagcctgtctctcataaagtatggggaattcctctatgacaatctcatcattttctccccttcggtagaaggtaagggttccgcgtcgcccctagcactggaattcgagacccgggacttgatggattgctttcttctggttcttgggcatgtcctgggtcacaggatgggttgccagtcctggatggtgctaccacggagataaggaaaatgctcatttctgacctg

SEQ ID NO: 51969 - DNA, 1083 bp, Homo sapiens
cctaatcagcattgtcactggttcatccttacgacagccctgagaagacaggttttctacccatttcacataggaggacacaatctcagagggtccaaagtcacagtcacagcagtgagtgggaggaccatggatcaaaacccacagttcagagtttcaggcctggttccacttccgctcttgctgctgacctcccgtatggccttccgaagatcactgtccctctctgggcttctttacaaagaaggggttggatcagatgaccttgaaagcctcctcacctctgatgagtctcagagtaaagccagacatgctgtggctctttctccagccgtggacctgactctgcccatttggggagcccgcagtgccccccaggagtcctccctcttgctcagcgtgttcatccaggtccaacatctctgatgtttattgacaccatccctgctgagaccccagcccgcctccatttcccacatgctctgggatgcagcagccttcctgtctgtccccaccctcgcctgctgtcttgcctggaagccccttggctgctgtcttgcctgcaagcagatgagggtcttctctggtgcctgagcccctcctgctgtctgtttcttaaaattatcccttggcttgggctgggaagtgtcctcccctgtttaagcctgagccaggcctgacccccacctccacctgtgccctcctctaggccttgcaccaggcagcagtgacttcagcttttgttttctcatagcagtttcaactgggccacagaacaaaccagcccgcaaaacctctgcagcagacaatggcgagccgaacatggtgaggaccgcgggagagggagtggggtgtcgggggctgggagggctttgcccccagtgctgtgggtcagtgttactgtggagagctggttttccactttcctcccgcctaaggattaaagaaggggccaaggctggatccttttcatgcccctccattggcacctagaccctcaaccccctctggccctcattcaaaggtactcacagtcataaataccaagggaaagtagatggttcggtggcccatcttgccggt

SEQ ID NO: 51970 - DNA, 1051 bp, Homo sapiens
ctagaagtaattgtagtaattactcctgtgctctctagcaagtaatgattcttaatagtatggatgttaggtacctgtgctcagaattctgtactcttctggaatcaaaagttgggagattttggttggtttctttgctttatgatactgcttttaaagagacttactgaataatcacctggtggctgtattgcacaccaggcacttaagcacaggctgagaagtttagatcatttaaagtttcttccaactctaacgttctgttaactataaggacagtttgtttcagtgtgatgtaaagggaaaagacaggaaggtcatcgcactcttccacgaacatccacaactgtcaaagacatacgccttacttacattgagataaaagaatgtttgatttttcccttccaggcattccaaaggagcagaacacatttataatttttacttccatgttcagaaaggggaacaacaaaccccagaggtaatcccagaaatctctagcatggatcaatagcttcagtactctgttggtggcttagtgacctcatttacagtgtttcatacactctgaaactacctacaagctacctttgataaatgagtctcagaaagtgctgggagagagattgttggcttcttaacctacaaaatgaggaaggaaagatactattgttgagaaatgtggagacctttccttagcactatgacagaagcattcattgcacatggattctgactatgcatccacatggacttaattaaaggaaacctggtcctgtataaatcttaggaaacaggtgtatgttttaatcatgtcttttgggtataattaacaggaaaatgacatgaaaacaaaactaaacaatctgctaacaccttttgacatttgttttttcatcattgctgtttttccaaattttgttagcccttgtcaaggtttgctaaccaattcttaattaatacttactttaaagagcctgtgaaattattctctctcaggctgtgaccctcttgccatcttgatacgtcatgagaacgaaactcaccagcc

SEQ ID NO: 51971 - DNA, 1018 bp, Homo sapiens
tcttttgccagtattatgaggctgaagtgtgtattccatgcagactgttcattgctgtgtactcattggctaatacagtgccagatacatattaggagtttaagtaattgtttactaaataaatgactatggattaattttattaaatagtgggtatagaattaggtatggtgcaggacttttatagatttggcataactttatatgtatgttcaaaatacggtaaattgtaacctgatacgtgtaacctagcttgacatttttgggaagggtgggaagaagtgggatatgtccaggtaagagcatctaggttcacattatttttcttgttttatatgggacttgtgttttaatctaatttttccccgtatagcccaggagttctgtttccgaagaaagagccagatgattctagagatgaggatgaagatgaagatgagtcatcagaagaagactctgaggatgaagagccgccacctaagagaaggtgtggacatgtgaaaaccccttgtggggaggacactaaatacctcagagctgaaaaatagtgctataggaggggctaaagctaaaaagcatttcagaaactcaggatccttctcaagttctttatataaatttggattgatcttctcctttgaaaatcaagggctccagacttttagggcaagcctgtgtgtatccatagtttagttattcaaagaaaaataattacatatttccctaggaacaacgtcatgaaattgtgtctagacttcatgaattggttgaatttttatacaattttagtaaaatctctagtaaaaaattgtcacattcctattcttaacgtaagtgaccacttcatatgccgtttctctttagaaagcatctggttgtcccaacaaaacgaatctcttaagtactaaatgacggcctttgctctttggttctcacaggttgcagaagaaaaccccagccaagtccccagggaaggccgcatctgtgaagcagagagggtccaaacctgcacctaaag

SEQ ID NO: 51972 - DNA, 1041 bp, Homo sapiens
ttagtagagacagggtttcaccgtattagccaagatgatctcaatctccttacctcgtgatctgccggcctcggcctcccaaagtgctgggattacaggcgtgagccgccacgcccggcctatttctatatgccagatgttttaagagaagatgaatttggttaacaagcctttcagtttcactgatatttgcagctgttttttggatactgaatcaccataaaatatattttggatatgtctctgtaagaaagatgagaatgaaggacttcaggaaccatgatattgttttgttactgtttactgatttatgaataattagttctgttcatctttataagagattctcctagatgattatcaatacctataggtacacaatagatgtttaagtgaatggaaataattaaatacttagttttaggtctgctgtttatgtgctaccttagagcaagtcacttaactactttgagctcaagtcacttaaccactctgggctttttttttttccctgtgaaataaggtatttgactcaatggtctctaatgtgtcttttcattataactcttgccaggtatggtggctcatgcctggagtcccagcagtctgggaagccaaggtgggagtattgcttgagcccaggagtttgagaccagcctgggcaacatagtgagactttgtctctatattttgcaaaattttaaaatatagatatatgtatgtatgtatgtatataatttaactcttgccaaacttatgggcaataagtaaatgtttaattaaatacctttgaacacataggattcacttagtgtatgtcaattaccgtatgtgacaggatattaaattgatgggcatctgtttgtggttgagggaattatctaatctgaataactagataactttcatttctgaattttttttttcagtgcatttgctgaaaaaaaccctgcagaaatgcgaaaagaatgggtggatggaacagatctctgggaaagggttcagtggcaccttccagctctgttttccctattatcccag

SEQ ID NO: 51973 - DNA, 1050 bp, Homo sapiens
gagaaaacaaaagctcagagggttaactgggttgtccagtattactcagcatcagctagatggtatataaaggagctttcatctgaagtcttttgactctgcattgactgtttttttttttttctctgaagaagtaaacaccactttacattagctcttgcattaccatggcctgtaatttccttagcctactgtaaagttatgaatactagaataacaaaaattaatttactttaggttaaaggaaaaggtgcttctggaagttttgttgtggttcagaaatcaagaaaaacacctcagaaatccagaaacagaaaggtaagacatctataccacagtttgagtgctgtggagctgttactgctactaaaaatagcaacattcattgagtgtttgctgtgtgcctggcactatgcaaggttcagcctttctgctaaggcctagggaagttataaataatttgttcctctagtgagtagaatagccaaggtgcagatccaagcagtccaacctggttaagcctgtgctcttaagtgccttatattaaattatgggcagctatataaattacactgttttttgttttgagatggagtcttgctctgttgcccatgctgtagtgcagtgacatgatctcagctagctgcaacctccgcctcctggattcaagcaattctcctgcctcagcctcctgagtagctgggattacaggcactcgccacagtgcctgactaattttttttgttagtagagacagggttttaccgtgttggccaggctggtcttgaactcttgacctcagtgatctgcccgcctctgcctcccaaagtgctgggatttacagggtgagccattgctcccagctgaattatactgctttttgtgaaatatcttttaaactagaggaggtataagagtcctctgtttttttgtttgtttgtttgtttgttttcttttctaagatagaatcttgctctattgcccgggctggagtgcagtggcacgatcttggctcactgcaacctctgcttcccggattcaagtgcttgt

SEQ ID NO: 51974 - DNA, 1504 bp, Homo sapiens
gaattataaaatggctagtttcttaattatgagtctcatgaatattgcaaagtagaataattaaacaattggggatgaaatgagttttcctttctatgtaatttcctggtctatttttctaataatagataaataaccacctgaccaggaaacttgagtgacataaagaatgtaagaaaactgcattagtggtcattcattttcattttagaattcatttgttaattggagactttggctggtccgtttaataagataagcttttaccttttattgactcagattggaatacatctgcttatgcaattctgctcacctgattttttagaaccagacataagttcagaggaatctgtctccactgtagaagaacaagagaatgaaactccacctgctacttcgagtgaggcagagcagccaaagggggaacctgagaatgaagagaaggaagaaaataagtcttctgaggaaaccaaaaaggagtaaggagttatgtcttcttgctatttatatttgaagaatgtgtaaaaggactttagattagattgttttaaagtgttataacattggtttatgctaggtatttgctatttggatttaatttttagaattaccatttgaaataggtttattatatagttgtttgacctgttagaatatgctgtagttagcagaacacaatggtttgaataatccaaaagtctttgtcattggctttggaatgtgtttttgagcttgtaatttattgtgggagtatctgatattttaagcattggcaagacttcaataagaaatgaaacataactataaaaatctgacctagaagacatttcactattttattcctacttctgtgccaggagtgggttgtttttgtgtgcttatgttagaaggcattgatttgtatcaagccattggtagtgtgacctaaaagtctatatatgtttgatgaaatattcagttgaagaattggctttgagaatctgaaagtaaaatttgctattgatgtgtatctatataaagtgatggcagttactttttaatttttaatttttttttttttttttttgcaggagagctgatagtattcattccactcttttcataattggtcagaacagttagaaattgcttttaactatagtcatgcattgcttaacaatgggtatacattctgagagatacatctttaggcgatttcatcatcgtgccaacatcataaagtgtacttacacaaacctacgtggtacagcctactacatacctaggctttatgggatagtctgttgcttctaggctacaaacctgtacagcatgttactgtactaaatactgtaggcagttataacacaacggtaagtatttgtgtatttaaacatagaaaaggtacagtaaaaatataatataaaagataaaaaatggtatacctgtgtaggacacctaccatgaatggaccttaaaggattggaagttgtttgggtgagtgagtgagtggtaagtgaat

SEQ ID NO: 51975 - DNA, 3148 bp, Homo sapiens
cagcctgaccaacatggtgaaaccccatctctactaaaaatacaaaattagctgggcatggtggcgcatgcctgtaatcccagctactcaggaaggtgaggcaggagaatcgcttgaaccaaggaggcggaggttgcagcgagctgagatcgtgccaccgcactccagcctgggcaacagagcaagactccgtctcaaaaaaagaaaaaaaaaatttaatattaatggatattctggttccctaagtatgagtgtgttacactgcactgaattctttcagctgactgaaagatttccttgcagctgactgacaattgacaagtctggtattgttcttggtgttcccataaaaatattttcccgataagtgtgaatgcatcctctttgtttcaatcttccggatttatcctagttgttgtaggttgggactgttacttgccaagttgaaagctcttcaattcttagacaaggttagaccttaatgtagaagttgcatgactgtcattccctactcattgttaatagttcattagcacagagatctagatacttaagtggtcttttttttttatattgaggaatttttgtataaaatgtcattgagtctcagatgagatttttggggaagagggggtgttagtgatcaggtaaacttgggtgactgcatgggtttttatctttgaatatttaattatattcttctgtactagttttccttacattaaaaatatgacagtcttagaagcatacttttattctcctaggtgatggtctaaatttgcttctgtgggtctggaagctattagaatgtcatgttattcagcagtatttttccccttgtgttttcccttaatagaaggaaaaaaaaagtactttaatagagatagagtttaagattacagttaattttcctgactctttcgagaacagtaacaacaaaagccttctcttggtaaactgatctttgactaactgttccttagtctctttattctatccttctaagttcctgatggtggcaggaggggatggggttaggttccttaggagcttccttgcccttgttgtctttgttcatgtggaaggtgcaacagctgccgtggcttatgcattcgtcttagttgctgctttatgtagtctatattttggtagttttatctttctgagtaaccaaatcatctgtcacttacctataaattttatagttatattttttccctttggatgtgtattaaatttagacgttttagtttagttttgtttctgttaatcttcacaccaggtcttttctgtgctttaggttgattcttcaccacactgaaaccattaggaaaaatccttgtggttaacagcagaggcttcagagtgtaacctgtactcgggcctagaaattatttaaaatggcgactgatacgtctcaaggtgaactcgtccatcctaaggcactcccacttatagtaggagctcagctgatccacgcggacaagttaggtgaggtaggggctgacacattcttgaagctcactcttggatcaatccctgacttcaggccctgctgggtccttcttggtacatgttccttcccttactttggggagtctaggttgtgaatttgaaacaaaatcagattcttttcatcttccctttcccctcaaattcctgagaaaacctccaaccttctaaatttatagcaaatcaactataattatgtgtttccatttgaaattcaagctaaaataacatactttaaaaagtgtatcttaaaaatcatatttcacttcaaaaaaaacttgttaaaagtaatttgcatcagatcctggagtcgacttgaagaattctcctacatctgacacccagttaggccctttgagaaagagagaaaagagaattttttaatgcatgtttgattatggccatctcttttcttagaaggtagaagatagcaccatgccgattcgtcgaactgtgaattctacccgggaaactcctcccaaaagcaagcttgctgaaggggaggaagaaaagccaggtaaagtaaaatggtgacacagcttaaaacatcaaaagttatactgcaatttggagtgtcccataaattcctttgaacttaattgtttttttttttttttcatggctaagtgttttggggaaacatttagagagaatcagtagctattggtatgtcattgccagaccatgagggcaaagtaaggtttcatcttctctataaaggtttttggaaggtgaaaatgttatgttggaattaaaaacaaaaatgtttggggatgacaggaatggccagagagtagcattctggacataaagtgtcatggggatcagtgcagtgtgggagaatggaaaacgtgggcctttagaatagacagtggaaggttcatccagaaatcatctggaggccttcagagaagcaaatggtgatctgttgatctataacaggtattggtagagagaagattggccagtcagtggtgggagcataacaaatggaaagaaacatagacccatcaacatggagtactaatgctcctttatggcatgtataaccacctcttctccttttcccgtctttatttttcttctcatgatctttttggtttttttccttatcttttcccttttttcctttctctcttgccttttatctcaggtttttcagggataagcacactgtgctgcctctgttgtggctgttagaatcaattatttgctgaccagcatgtattaggaatagagggccgggcacagtggctcacacctgtaatcccagcactttgggaggccaaggagggcagatcacctgaggtcaggagttcgagaccagcctggccatcatggtgaaaccccatctctactaaaattataaacattatctgggcatggtggtgcatgcctgtaatccctgctactcaggaggctgaggcacaagaattgcttgagcccaggaggcagaggttgcagtgagctgagatcacgccattgtattccagcctgggcaacagagggaaactgtctccaaaaaaaagaaaaaaaaaaaaaagaggagtagaaaatacatgcatccttggtgcatcagggcagacatcaataaccagtcaatatactcttttctggctgagcctggattttttct

SEQ ID NO: 51976 - DNA, 1012 bp, Homo sapiens
tttaagcatttcccttgacaaaaagcaaatatttgttattgttgtaacattaagtttaagcaagctgatgttcataagaggaccatgtaaaccacaagtaaactcagactgtttatttttggcacatataaaaaccaagatgaaaaacatgaataggccgggcacggtggctcacgcctgtaatcccagccctttgggaggctgaggtgggcggatcacgaggtcaggagatcgagaccatcctggctaacacggtgaaaccccgtctctactgaaaatacaaaaaattagctgggtgtcgtggcggacgcctgtagtcccagctactcaggaggctgaggcaggagaatggcgtgaaccgggaggggaggttgcagtgagccgagatcgcgccaccgcactccagcctgggcgacagagcaagactcggtctcaaaaaaaaaaaaaaaaaaaagggaaaacacaaataagttttatttgttcatcctttagtttaacaaatattaattgagcatctattctgtgcctggtatgttcttaggcatcaggtatgcagcaaatgaaccaggtagataagatccctgccaggaacaagtgtggcagcctcaaaatttgatcattcagagtgcaatagtaaaaagtttagttaataggtacactgggtcagatgcagtggcttacacctgtaatcccaacacgttgagaggccgaggcagatggatcgcttgagcccaggagtttgtgaccagcctgggcaacatggcaaaaccctgttgatacaaaaaagagaaaaattagccgggcatggcggtgcgtgcctgtagtcccagctactagggagactaaggtgggagagtcgcttgagcctgggaggttgaggctgcagtgagctgtgatactacaacctgagcatcagagtgagaccgtgtcttaaaacaaacaaacaaaaaacataggtacagtgatgttaaggcagtgtgaattaacgttgcatatacttagctctgtaatg

SEQ ID NO: 51977 - DNA, 1103 bp, Homo sapiens
aggcaagctactttgtgggtaaggagggcacttgtgcttgggtgggaatgccccactgggagtccagtgaaacttgtttccaacactaactaaaaatgcattcaggacagtaggcctcaagggcagtcctttagataactaagttttccactctgtgtatcaggactcaggacaataattcactttgagactgccactaccactgattttaaaatcttccatcaattgcctgcaatgcttaagaaacccaaagatgtcctctaaagaatgaataaaaccaaaagctatattatgcttttacaaaagtgggggtgggatttttataaaagtgggggtggggtttaaaatcaagccaataccatgtatgcaaatcacattgtctgccaactccaacctcattcaagccattctggtgagtataaagctgactgtgggcctctgcttgggcctctgcttctcctacagatattggagtgctgtgctttctaattttcccaccctttcatgaagtcgcagtctctacagatggttttccatttcagttgtttgtgggccatcaacctacaaaatgtatttatgaagaaagccagactactcccagataaatagtctttttcttttgtatctggataacaagagatttctgctggcttccatctctgaagaaataccacattaagagacttggcaagacttgtgaaacacaagaacaaaattttctatagcaataaaatgtttctctgaagtgtagttgaacacaatacaagatcccactacataagcccacagaggccatttttcagtggtggaatgctgtatgccactggtccccaatgcacaacctagatccctcacatgtgcagttcacaatgggttcgcgctcctgtgagaatctaatgccaccactgatctgacaggaggcggagctcaggtggaaatgcttgctcacacaccactcaccttctgttgtgcagcccagtttctaacaggccatggaccagtacgtgtccttggcccaggggctggggacccctgctgtatgctgcttttgttttgttttgagacagggtgttgctctgtcacccaggttggagtgcagtggc

SEQ ID NO: 51978 - DNA, 1050 bp, Homo sapiens
gtggctgcgggaagcagaagaggagtctgaggataactaaaacttcaaatacacaaaatgaaacaaaagaaacaatttaagtatttttttaaaaagtttcacgtcttcgccaatcacagtgcagcaaggccaattctcgcagaaacccccacgtgtgcacgagtgggagaggggaaagagaaaaaaaggtgatcatggaggaaaaaggtactggataaaagtaaacttcaaaccttagggcgggagcactaaaaccaaaatacatgtattatttatagaaaatattttctgttttaatcttttctttttaaacaaggactcatacttaaaaaaatgtttagcaaaaaaaaaaaaagttgagaacttttaatttattttaaggactgcaaatgccagtgtaattttttaatttgcagtttctgtaaacaacttgtataatagaaaagcagagaaataaatttccctccccttcaagatgcacctcatgtttgttttaaggtatagcatttagtccagatttgagaaagtttggggtgaacaaggtaagaaagatttttttttttttggcatcaaatctttctgcctgcctctcagcttgcttcagaaaatttaaaaaatcacaatagtaatcaaaacatacataacattgaaacagaaggaaatgctgtggaccacagaactccaagaattgtttaaaaaaaaaaaagtgctaccctgagaaaagtactcttaatactcttgaaatctttagagcaactttaaggcttgtaaatacatagaacaaatatttaaaaaaacaaaaagaaattgactcagtactatttcttttcactttgaaaatataaagaacaaaataaagacaaacattgcaagtttaaaagaaagtaaagtgacttctcctttggacagctgctgcatgtgtgcccattcctgggggtgctgtctggctatttattgtctaattcaaatcactcctgaggggagagagataaaacgagagagagtgagagagtgtgtgtatgtgcgtgtatgcgcacgtatgtgcatgca

SEQ ID NO: 51979 - DNA, 1029 bp, Homo sapiens
acaaaaacccagtaaataaaatgaagtggagcttttgtagttgaaatgggcggagggatatctgcagtctcatctatgtagaccttaccaaagttcagtccagtggctgtggttttttccttccacccaaagaaaagcctgacagtccaatgactgtgatggtcactacatgccaagaggcaagggtatgatgtagctctgtttcattttttcagcttttagaaaataacgtgtggtgcaaagcattaatataggctatgtagtagtgcaaagacataaagacagttattacctaggtgcttcagcacactcaagatttttcttttagaatcatgcaacaggatttaagaactgtaaacctgaaaaaaaaataagcttcttacaggcttgttctatggaaatcctatgttcagccaaaaaagttttttgttagcagtatagatttgaccactgattgtgttctgtggactgtcccatgatgaactgactgatcaaggcataaaaaaccaaagcaagaatatgggtatattttatttgtaatgagataaaatatatgagataaaaatagcagcaggtacactgctgaaagaccagcatggctacagttgtctcttgggcccattaaacagcttaatttatgctgctagcccacagagcatgagttggcaggatcaggtggttaacctagaaatcctggagtccagctagattatatttcatcagtggtacattaactgaacccaaagtatgcacataatgagagaacctgcaattatttgacatctatttgccatagcacagacaccgtcctcggcatcaaataattgcaagctgtgaggtcagaaagttggaattaaggattcatgaagcccagagttagataatatggctgagctgcaaactgttttgaagtggcagcttcagaatggtgaccctgcctatggtggtagctctttttaagtgaaaagttttagtgagatgtaggcctctgaaaaaagggtggcatactttggctagaacctggaactg

SEQ ID NO: 51980 - DNA, 1060 bp, Homo sapiens
ataccagcatctgaagagttaaagggtacttcatagttttataacagttctcattccctaggtatgccttagctgaacagtttgtaaattttctcctttctctattaaatgttatggtgaggaggtcctcctgctgtattttaagcaatctgaatttcttacaagtccctgtaacatcccacacttgacgttgctgttagattgtgtatgctgtgtagagctcctcaaatgtgtgaaaattctcattgagccactgcaagacaaaccaaagagaaggtattaggttatctttagctgacttcatcttccgtggtaacctgttgtttttgtatgcatttagcatgtatatacttagaggacttgctcggataatgctctaaaaattgcttcatgtatttaacctgtgtttcagtttccttatctgttaaatggggataagttgtacctaccttttcaggatattatgaaaattaaataagaagttaatacacgtaaacacttagaacattacgtgataaatacaaggttttcaaaaagtattaaatgttgtgatgacgaatatagcaatggaaaacagtttaaattgaagattattttcagcctcttttaaatattagtcatgaagtaatagcagttttagttttttagtatttatatagctttctaatttgtttcactatataaattgtatctcttaactgtagtccctaaatggatctcagagacaaattgaagtgtcttctcccaattggtgtaactttagataatacagctttagggacatatggcttttttaaaatctgtgctagatacttttgaaatataacaggataggacataaaatatcttgggtgtaatgaataatgtagcacagctgccctatgtgtttttattgtctggttcatttgtacacttaccagatgcacagtgaatgtgaggcccttgatccctgttctcggccttcagtctgctgagtcagaaagaccttttttagtaattccacgaaagacacaaactgagaaaggtgctatgaaggaaggaatttagttctaagagaata

SEQ ID NO: 51981 - DNA, 1023 bp, Homo sapiens
tgcactcccaactgggtgacagaacaagaccctgtctcaaaaaaatacaaataaaaattctaccacattatattttggctataaattgatattcctagaccatttagaaaactacatgggctggacgcagtggctaatgcctgaaattccagcacgttgagaggccaaggctggaggattgcttgagcccaggagttcaagaccagcctgagcaacataatgagaccctgtctctacaaaaaattaaaagattagccaggcacggtggcacgtgcctgtagtcccagctactcgagaggctgaggtgggatcggttgagcctgagaggttgaagctgcagtgagccgtgattgtgctactgcactccagcctgggcaacggagtgaaaccccatctctaaaaaaataaatagataactacataaataaataactgtaaattggtaaaattacgtttaagtttctcagacaggagtactaatgattttgtctcttgcagccacgtatggaccagtactttaatcagatggagaaaattgtgaaagaaagaaaaacctcatctaggattcggttcatgcttcaagatgttatagacctaaggctggtgagtgggaaaaaaaataataataagcctgctggtccagtctctttaaaggaattgggttggggaaggatgtcctgttgtttacatgtgtaaagatagtgcttttgcttcaggactcagaatttggattggcaaactttccgtgggagagttctgagaagggacaaaaggcctattgccagttacgtgcttcttctccttattctgattatcaaaccatattgcaattttgtttgcgctttgtttttttttttgagatagagtctcactctgtcgcccaggctggagtgcagtggctcaatctcggctcactgcagcctccgcctcccaggttcagatgattcttctgcctcagcctctggaatagctgggattacaggcacatgcccccacacctgggcaatttttgtatttttagta

SEQ ID NO: 51982 - DNA, 1098 bp, Homo sapiens
tttaaaagactcctgcctagtgtttcataccattatttatattataccataatttagacaaatttctatttttttacatcaaagttattttctgtaatgagttatgtggctaaagtatttttacgtatctctaaatataaatacatttctaaaagtgtaattactggttcaaaggttacatacacagttttaaagcttttgatacacgttgtcaaattgcccttagaaatgttaacagataatgctcccaccagctaagtgtgtatatacctatttctagaattctcctcagtagtgaaaagaaggtaatttttgactatttgttaaaatagattagtttaattatttctgtcactagttcacagtccttgttaataatttgagaagttgaacttatatattatttttaaaattaatcattacagaaagcaccatattgtcacagttactctaatgcttttttcttttttgtggcccttctaggagctttttagaaaagttcgaagtatcttaaataaattgacaccacagatgttcaatcaactgatgaagcaagtgtcaggacttactgttgacacagaggagcggctgaaaggagttattgacctggtctttgagaaggctattgatgaacccagtttctctgtggcttacgcaaacatgtgtcgatgtctagtaacggtaagaagagaggaaggagtaaaacgagaaatcttcaagaggtatattctcccctcactacacattcttcccagaagtgttattggggcaacataaaggggagaatatatttttagtatttattgatataatattctcattattaaagacaatcttgctttattaaaacgtatactcccctctggaggggatatgaagtctggactgaaatgggcatgagatgggcccattcagcgtaagaaagatagagtcaggtttaaattagtaatgtaaaattatcgtcatgggcaacaaatttttcccgtgtgtctcttatggaaagcaagcaaatgcgtgctttcacatttaattaagtttgaaatttaaaaacacgttgattctaattctaatctctgtgaaaatgaaaggatagttgtt

SEQ ID NO: 51983 - DNA, 1054 bp, Homo sapiens
tcacttatacacccatgattctgtggaatttgtaagccagatgaattttttaaagccctttgtaaacttaatcctttaatctagaaatctgaaacaatggaataattcagtaaaaattatctattttcttagttttcactctatcaatatgaaaggctaggcaaacagtcctgatctgagatgaaaacagaatgtttcagaaatgctgcctatctaatgaaaccttaattgaagtatccttttgttgtctagaaaacttaaaaataacagaatcctgagcgtattattttttattgcttgaagtaactttagatatctagtctcactcttatactttatagctgagtaatgtaggggcctgagacctgtgacttgcttaagttcacatagttgatgaatagaagtagacccaggtctagaactgaatcacaagtcagttttcttatgtatgtactcatcacatgttgaattacatgctgggatatttctaaccatgaaatgggaagaacgcaggccactggttagaaagctacgagtttgtacccacaacacttgatgttgcaatctctgggctactacacaattgttcacttgatcagccaactatttgtttggtataggtaaagttctcttttatcctgcttaatttgaatataggtatcacttagacctaatatttctcagaatgactttgcagtggcaagtaatgggcctgatcttgtatttcagctcaaatagctataactgtaccaaagacatggaagaaaccaaaagatcggacccgaaccactgaagagatgttagaggcagaattggaggtaagcaaatctcttaagttcatattcagagcagtggtgccatttcatagacaggtatgtgtttatacctatttattgaaatagttttccaagcaaaacttaatatatcaagctcagagactaattgttttaagtccattttatattagaattttaaaaagatttttagtaacatgtttgatttcattgaatacttatttttctttcaaaatacctcttttaaaataacaaacttg

SEQ ID NO: 51984 - DNA, 1053 bp, Homo sapiens
taaattggttaatagattgatttcatttgttctggcaatgctaatttatatctaccatgtgacaggcccttttctgacctctagcaccacagagatgaatgaggcaaagtctttttccactgagaacttgataattttgtagagagacagataaatatatatatatatatatatatatagggatgggtaaggtgaagagaggagggaggaagtgatggtccctgttagagtgtattttttattattcatagtagctcccacatattaaggttaaagcaaatttctctgtgctttgcagtctggtaatgtagactcactgatggtcagatggaaagtagattttttttttccatctagagttatatattcgaggcagtgagctgtagcattttatttggagatgaaaagtgttgagtaggtgtaagggtaactgtattatagtctctttcctaattaaattacatatttgtgctgtagtgattgacttttttgcatctgtactagatttaccttgaattaaattgcagtcttttttgatgatggtagaagtggttcaaaagtgtcttattaaaatgcaaaagtgcctaaaacacagagcagtaaaaacagaggcctagaagatatgccagtggtctcattggagtcatctttgttctcagtgtcgacaattgcttaatggactgtcctccactgaactttttggagcaaacctacttagtgtcactttgccattttatttttttaatgacatactgtgctgttggggcaacaaactgcacatcctgtcatgctacaaaagcaaaagacaactttaaccaagataaaaatgaagctggaattcaggcaagaaagtgaaggataaggcagacttgagaggtggggtattgagtggggaagcgttttgaagttagatctgtgtttcagttctagccccaacctttactctctgtaaaggggaaacttataatctctctgttcttcagtttcctcatctctgaaatgggaatactgtaatactacctacacaaagagatttaaccagtattgttgttc

SEQ ID NO: 51985 - DNA, 1041 bp, Homo sapiens
tgcagctagcgaccagaagcaaggtttgtgtatgactgttttcctccctcttatctttagtctcttttttattaattacattgccgtcagcattcaagagtaagagtacagcatccaaggattatttagacacccacctttaaacaaagctttgaggcagaaaattaaagtattctgcctctaggaaactaaagtagggatgattggtaaaattatttcatacatttgtttaatctctcactgttagtatctgtatacagtttaaaggttagctgccttaaactgccctttaaaacaaggtgggaagtggagggagaaatcctagcatatattactttacaagaacaatacagtttagcttatatattcagcatgtccctaggtatcttgctattttaaaaaagaaaaaaagataaaacatttcttcttacaagtttgggcttctatagccacatttggagatggagccaagttccaatcccggctccatcatgcactagttatttggtcttgattgagccactgaccttgtgtgtctcagtttcttcactgatagaatggaataaagacctatgtgcttgacaggattactgtgggaacatgcctatcacaggaaaagtgcttagtaaattatagtcattaatgctgtattaaggaatagtacactaaggtctctgctcctattgaacttgaacatgaaggtgccaaatgtttgttgaaataaatactgtgcctttgggaatataatagaaaacttaaaggaaatctaataccagaaagtgggatatcatagtctttctttcctgcctagttgtattttaacttgacctttgctaaaattgagagagaattctaaacatagttcggggaagcaagtaactttgaccctgctttatgtttcagatttctaaaaatgattggatatcaatatggaagccatgtaccttcttactttcttgaattatttattcctccaaactatttgtttattctatagctctatagttagtatatagattttctaaaaattattcttttttt

SEQ ID NO: 51986 - DNA, 1163 bp, Homo sapiens
tcctgatggttttcttaaacacattttcttctagcttacattattgtaagaatatagtatataatatataaaacatacatactgagaaaaaaatatgttttatcggtaaggctttcagtcagcagtaggctgttaccagttaagtttttggggagtcaaaagttatacacagattttcaactgtgtggggtcagttcctctagctcctgaattgttcaagggtcaactgtagttcatttcatggtttagcagtaatagtttcctagaattgggtctatagcttcggttatgatattcatgttatatgttaatatgtgcagtaaatagttacattcctgcatgaagaatttgaaggtgatacctagtataatgtaaacaaatccaatcttttaaaatttcattttgtcatctcagtcataggcactgataaattaatagcattctgtaccttaaagcatacaggtatggtttttgttttagtggtgactacgataaaaatagtggttactaaattaaattatatttttctttatctttaatgaaataacttatcattagtaacctcccttgacttaaatggttcttttcaataatatgtaaagccttgtagactttaaataggtatctaaactggggtggattctctcaaaagtttttaaatgggacatttgaaaagtgtcctattctctgttcgtcatgatgagcagagatccttgctttgttatgctgtttcatagattaaaatgaatttgtatacactatatggtttgatagaggaaataagatctagtgtttggtagatcagtaaggtgactatagtttacgataatccattgtacattttgaaatagctagcagagaagaattcaaatgctcctagcataaagaaaagacaaatatttatctttgaattatgtgaatgtgttaaatttttgtgggtacactgaaactgtgtacatctgttacgcagtaataaaaattattattattatttttttgagacggagtcttgctctgtcaccaggctggagtgcagttgtgcaatcttggctctctgcaacctctgcctccctggttcaagcgattctcctgcctcagcctcccgagtagctgggattacaggcatgcaccaccatgcccagctaatttttgtgtttttagta

SEQ ID NO: 51987 - DNA, 1047 bp, Homo sapiens
cacaaaacaagcagtcagtaagtggtaactgtctttaatatgattgttatggaacaaagtctggttggataaagtaaatgttaccagtatttgcctgtgttatcatatttacaattcttattactgagtaaatggatattgtttagttgaaggcttccagtgatttaatacctgactctgtttttcaaaatgtattccttccaatctggaggatgtaaaggcaaagcaaatctgagttattaaaggtactttgcaggaggatggctatatggggtggatggctattgtttgggtttcatagtgaaataaaacctcagggtattttttttaattcagagataatattgtaaagtattaatactttaagagcttggacttcgccatcagctagatctaggtttgattcttccatgttaaccaagtgttcttggataaatcatttactgctctccaccttagttttctcacctgtaaaacggagacagtaataccatgttgaaactattatgaaaagtaaattagataatgaaaataaaatgattagcggggtgtttggcacatagtaactaggacatagaattagtattactactactaataataaaaatattagtttcttatgtaaaagagtgtttataattgaaaatttagtccagtgccatagaagcatggcttaaattttaatccagggacaaggcaaatactcctaaaagagagagacgttggggatctttactcaagaagcagagtgaaaagaaactatttatttgagaaataactgcaaaggaattagggcaaaaacgttttctgatctcctttatgtaaggcacctgttaatttctttgttcacatgcttgtgtttttcaaaccttggtttattttcataagtcatttcagataagctagcctaaggtaaactgttagtagagggaattaacgttaccattgaccacaattattttggtggattttatacactgtagattgatggaatgatgagtgaattttgaaacaaaaacagtattgctgaataggccaggtacggtt

SEQ ID NO: 51988 - DNA, 1022 bp, Homo sapiens
agatgtaatttagtaaaattcaccctttttagtgtatacgtccataagtcttgacaagcagagacattcaattctcactataagcatgatacagaacagttctgtcaccctcaaaaatctccttgttcctcttctgtagtcatctccttcctctttcaaccatttatttcttttctgttccttttacaaaatggtatcatacagtttgtagtttgaagtattgtttctttcctgtagcatgtgttttcctttatgatttttggttttgagatcatgcttcaagaatcttttatcaaattgatgagaatattcatgtatatatttttaaagaattctgtttttttcaattttaaaaattttaagtgtttgttcagtctcgtgcttattttagtgtaagttgtgaggtaggaaatccaattaaaaatcagatagttcagctgtatttattaagattgatttactaatataatgttcttactaaatattgatttcctcacaggtaacacaagtggcaagacagccgggaacccctaccccatccccttattcagcacatgaaataaacaaggggcatccaaatcttgcggcaacgcccccgggacatgcatcgtcccctggactctctcaagtaagataaaccttttttaaaaaaataagaaatgtccctgtaaaggcatcatttttgtttttctaaagagactcctaagcagtaacataaaacattacttgtatagtaatttcaagtttgtctttggcatcttttcagacttaaccgttcataaagatggctactaacaaatttcacacatttcattttgaagtcattaaaaattaactgttggtgatatttagttttcattttcattgtttaagaagttagagttttattctaaagtttactggaaaacccccccacaaagcactgatttgcttttcgatgcttaatctgctaccgtctcgcacccctttcgggtgaagcattaatggttattttctacttatgtgaaaacttggtgtcttcc

SEQ ID NO: 51989 - DNA, 1054 bp, Homo sapiens
aaacttaagtaatttgcttatatagtttctgtatagtagagccagaattcaaacttaggtctctgacaccaaaacccattctcatttttttctttttttcttccccccgccgccccaccactgttttttttttaagatagagtttcagtctgtctcccaggctggagtgcagtagcatgatcatagcttgctgcaacttctgggcttaatccttctctcccagcctccctagagctaggactacaagtgcacaccaccatgctaaatttttttttttttttttttggtagaaacaaccccatgctcttttattgatgctgtttagcctacttggatgccttgaatctgtttaccttctgtttatgttccttctttcaagtttgtgtttggaaagtgataattcgtgactcagcctcagaatggaggcatatatcacacatcttacatgatttggatctgtgtcagaggaacttaatattgtggttttgataatataattgaatttatgcttatagttgaatactaaaatctgagatttattaataccttggaattaaaatagaattcacttaccttggatcagttaaataactagttgattagcaactgactgaagatcaacaggaaaatagtaaggcattagttttaaaaaattaagttgtaagttggtaaatgactaattccattgcagtcactgaatgtatatcagtaatctccagactcgcatacaaccttgtcttggtggaaagctctgactatggattttgaacataagaaagagaatgtgagtgtctgttaaaagccatcactcctcagatgatgttaaaagtcttcactccacatcttctgaggagttgtcaagtgttcctgcttctgaccacaaggacagcaattggcctgtaatatatgtattccttgaaaaagtaaggagttaatttgttatgcttgtgtagactgttactaattttgtgtagttttactaaatgattggatttagtagaatagacaaaccttaccactctttttttttattcaagacagtcattcctaactg

SEQ ID NO: 51990 - DNA, 1541 bp, Homo sapiens
gggactacaggtgcgtgtcaccaaagccagctaattttttgtatttttagtagagacagggttttgccgtgttggacaggctggtattgaactcctggtctcaagtgatctgctcatctcggcctcccacagtgcttggattacaggcttgagccaccgcatctggcctctgaactttagatattgaaggcatcgcatctttctttttttgatgaactgtttttcccacagtgttatgtcttgtattatttaagcctaccactgtctcagagtcattgtggactagggcagattaagaaaattggagatccttttgtgactagacagatgtcttacaacttttaaatattttgataatttaccattaagaaagaacggcaatgataatggaagacacaagaggaaaagcctggccatcaagctgtatagcagttttccagaggcttttactttttattgggattggattatattaaccttacattcatgttccaaccgtgtaattttgccctaatacattattttaacttttctctagcttctgtagacatcatgattcctgtcttgcttgaatccgaatctgtatagcttgaaacagcattattactagtataagtgcaattacacatcatccatatgtgtaatacaaactggcagactaagaccccagccgatatgttaaatgcattggaaaggagtttttcacacatttaaattgtgttattttcttacatgaaagtgctcgatattattggtttgggctataataattgaatcacagttgaacttgaattcacccaaactgaaaaacatctcgtttgacctgttctgtatcagtgtgctaactgctgaaggtattaaaacactaggtgtgtgaaagcatattaaataaggatatgtttatttaaaaagcatccggtttaaatttgcaactaattttccaatttatgacatgcaaaaaaagtaattctccttttctgtcaccttgtaatttataaaaatcaacagaaaaataagttacatggtttgaattagtcatttagttttttggttttccagtatatgggaggatagaaattatttgacttcttgcttctgtttacatgattttgctctgagtaattacagtttattcttttcgtataaaggagttttcatatcttgaaaattgtccatctgagggtaagcatggtatgaatgtaatgcagtagaaatactacattgagagctcatctaaactctttcaaattcaaatgtgtcattgttttaagcagaattctctctaatcctaatgtttattgtttacatatgcatgaattcattccagagggggaattagaggatggtggctataggctttgttgggactggagctcatgtgacctgggttcagtcttggctgtgactctcaccaggtgtgcgaacctgggaaaaccacctaacctctttgttgcttagcttcctaatctgtaaaatgggcttaataataagcccattacctcataaggtaacctaccttacaggctgttttgaatcttcaa

SEQ ID NO: 51991 - DNA, 1142 bp, Homo sapiens
actgtactccagcctgggctacagagccagaccctgtctcaaaaaaacaaaacaaaacaaacaaaaaacaaaattgggaaatactgcttaatctcttgtttagcaggattctttttgctatttaggaaaagaccacattaaagaagaggttattttgttacccttaggtgtaataaaaacagtttatttgttttggataaagactttccacaaaaaaactcttcagttgcttaacattgggaagtgggaatgagtggagttgctgattttgtaagattgtatctgctttaagttttaaattattatgcatgtctccagcttagctcttactcaatattcaaaggaagtgggtcttaattagtccatgtataattttaatggcatcaagtacctaattaataattgttgaatctttgaggctaatgtagtcagctgatactccctgtgttacattgttgatctttttcagaaatattagagtttgaaagtagtccaacttcctggaataaatgctgtttcaaaagcagactacagagcacttgaccttagcttattaccttttatattgtgtgactgagtgagtgtatttaaatgtggtacattttaggtaaggcaatgaaagctgagtgtggctctggaatgtcattgatttcattcttgatcttcattagaaaaatcatagttaaaggatccaaacataagtatgcattagcttatttttcctttacacatagtagacagtaaatttaaaaagaagtgtctttgaaaggtgccaccatgagccagtgatttttctaagctggaaaggagtttggggatttttctggttcagctttctgccccctctcctacctttgttctagaggctgaggggaggttagggcaacttgcctaaccataaagttcatgccaactcaaatttatttgaggtctttaacaacactgaccagtgacctactaatagatcctgtttctcctgtaatggtcctggtttggatagtaaattatatggatacccccacctggtaaccattacatagcttagacaattaggaatctttttatttatttatttttttttggagatggagtctcgctctgtcccccaggctggagtgcaatggcaccatcttggctcactg

SEQ ID NO: 51992 - DNA, 1833 bp, Homo sapiens
ttgtgttattcttgcaagtggagaggagggatttacagaaaccagttaatgttttctttgtctgatggtaagtgacatgttctgtggtggcttattgatattagaagatactaacatggggcagaggcagaggcaaagcagcagtttgctcatataagctacttctggtttttggcttgttaatgttagattcagccacagagacagaagcacctctctaacttcagtggtgaagactgtatagttagttgtgagatagtgggagaccataaaataaggttgccatggtcatttgctggcttgttctgggtgatgatacagttagttcattatgagatatgagggaaagtaagttctggaataaactcccgtggtgctgtggtgagacacaatctatttttacctaaggaataatactttgagctaatataataggaaagtaactagttcctgattattagccacgcatatgactttaagcaatggataaactgcagctgagacttacacggatgagatattgcaggatcccaagcgacttctgaattctcaaatggcttccagttctttggcttgctgccaaccaaaggaatttttcaatctcctgtagctcagctgaaatttgagaaagttaaactattttaagtgcatttgaaatttgttggtttttacgactttttttttttttaatttatttttttagacagggacttgctctgtcacccaggctggagtgtgatcttggctcactgcaacctctgcttcctgggttcaagtgattctcatgcctcagcctcccaagtagctgggattacaggtgtgtaccaccacacctagctaatttttgtatttttagtagagatggattttgccatgttggccaggctgctcttgaactcctgacttcaaatgatccatccaccttgacctccccaagtgctgggattacgggtgttagctactatgctctaccatgatctttattaactaataattgttttgtacttttttttgagacagagtctctgtcgcccaggctggagtgcagtggcgcagtctcggctcactgcatcctccacctcctgggttcaagtgattctcctgccttagcttcctgagtagctgggattacaggtgcgcgccatcacacccatctaatttttgtatgtggggtacaggtggggttttaccatgttggccaggctgttctcgaactcctgacctcaagtgatccacccatctcagcctcccaaagtgctgggattacaggcatgagccaccacacctggcctgttgtgtacttttttgagcccactgtgtgctgcctgactttataagacattgaattttgttaatagaatgtaaactccatgaaggcagagatttttgtttattttgttcactgtggaattgctagcacctagaatactgcttgacagacagtaggcagtctgtaaatttatttgtttgtttgtttgtttgtttgtttatttatttatttttgagatggagtttcactcttgtcgccctggctggagtgctagtggcacaatctcagttcacttcaacctccgcctcctggattcaagtgattctcctgcctcagcctctagagtagctgggactacaggcgtgcaccaccacgcctggctaatttttgtatttttagtagaggcggggtttcaccatgttggtcaagatgttctcaatctcctgatcttgtgatccgcctgccttggcctcccaaagtgctgggattacaggcttgagccaccgtgcctggcctgtaaatatttattaaataaaaagtgtgttggactttgggaatcaatt

SEQ ID NO: 51993 - DNA, 2225 bp, Homo sapiens
ttagtaatgggagagttgtgatgtggtttgtggtagagatctgaggaggaaatgtgacgccggacgcttccctgtctttgacctttttaaaggaagaggaagttcaccgacattacccatcacccacaaaagtctcacttcttggaagatttgtgttaggctgaatatttttaatgggctttaatttactcctcataggcctgatgtctagagagttaccagggcttctggaggaaagtctagtattgaatgtttctaatttcatgttatttgctcgattgtagaattttggagagctttgattgaaaagacttggtgatggggtattttagtcaaaaactagccggtgaaggtaaaacgttgaattcatgtattccacggagatttagaaaggtattgcgtacctgagaataacatttcatcatgcatcacctcctccctacacccactgtatttgtgtaaatcaataaataatgattggatgttagatgtgttgtgtttttatgtttgtgtcatcgtgcgtttgacttttagagattgtaggatgtttgagcaagtaagaagctaactgctgtgaggtccccagattatttcacagtctgtagtttgattcttgtctgtatagattactttgagaagggaaagcaatctcccttctagagtcatttcaggtcattgtttgttttctgccaagtgtcattttctctgttctttaaacctagttcgtgattttcaatccaggcaccgcggtgcagtgtaaagataaattccattccagtgtgacgtgtgtactgatttcataatgtttttatcctgcatgattctgttcaattaggaattgttcaccgatgagaaagtgtggtgataacttagcgttgcttatggaaaacctggttggttttgttcagtgtctctggggtgggggaagattggctggtttgcctacttaaaggcagagttcagtgttgaatcttttaaacctgtctttgcttactactttgtgagtttaaattcctttctaatttcattttttaccttgattgcctatactcggttaggacttttaagtttctgaattgtgctaccacgtaaattactcattacctgcatctttgagctgttttggcaattgaacagaaataaaaggaaacctgtagtaggtgtccttgatgtacagagtagtaaggaccacagtgctgaatgtgacactgtttggtgaattgggtggctttttgggatacagctgtgtttcaagtatgctttttctcagtgcatttcatagaaggacttataaaagctctgagttggttgcaacattcaagtagttacaaaagctgaaacttaattttcttttgaataaaaagcacttgttaaagagataaatttaagtgtaagttccagtgtagataattttaaaccaattttagtcatatggaacacttacttttgtgtggctttaagtttttactttgcctcatgccattgaagctaaaattaatcttcctcttgatgtgtttcacagctcttattgttttctctttgcttttacacactgaaaggttacaattgctaaaatagaaaattttattatataaacagtaaaggaagtataggttgtagatttcatcagacataccagtggtgaagtgttatcaactggtaatggggtattgattaaaaaaggattgaaatagagcagttctacttttctaccctgagggagtatgggaatttgtatttgacgcaagtggtcattgttcaataagtggataacatttaagcatcttggcaggagtgcatagctggagttagcactgttcatggcttgaatagatctccagaccctcaaagtatgtgggtatagttgtgtttgcattgaattaataagttcagacagttttatttatttatttttgagacagagtcttgctttgtcgcccaggctggagtgcagtggtgtaatctcggctcactgcaacctacgccggctggattccagccattctcatgcctcagcctcctgagtagctgggattacaggcgtgtgccaccaggtccaggtaattttttgtaaggcgtgatcagactgggtttcaccatgttgaccaggctggtctcgaactcctggcttcaggtgatccgcctgcctcagcctcccaaagtgctgggattacaggcattgagccaccgcacctggccctgatctggtgaaacctggtctctac

SEQ ID NO: 51994 - DNA, 2964 bp, Homo sapiens
ccaaagtgctgggattacaggtgtgagccaccgcacctggcctcccctgctgttataatgggggcagtctggcagcccgagggccccacagtgaccctggcctctccctgttgccccttcaaaggtctggtgctccgtccgcacacctgagagctcccacgaaggcctcatcaccgatccccacagcccctctcgcttccgggtcatcggctccctctccaattccaaggagttctcagaacacttccgctgcccacctggctcacccatgaacccgcctcacaagtgcgaagtctggtaaggacgaagcggagagagccaagacggaggaggggaaggggctgaggacgagacccccatccagcctccagggcattgctcagcccgcttggccacccggggccctgcttcctcacactggcgggttttcagccggaaccgagcccatggtgttggctctcaacgtgacccgcagtctgatcccctgtgaagagccggacatcccaggcacacgtgtgcgccaccttcagcaggcattcgggtgctgggctggtggctcatcaggcctgggccccacactgacaagcgccagatacgccacaaataccactgtgtcaaatgctttcaagatatatttttggggaaactattttttaaacactgtggaatacactggaaatcttcagggaaaaacacatttaaacacttttttttttaaggaaagaattggtatatttattatgttctgtttttctaaataacctgtggacaagggaagccccactgatttactccctctcttccccactccctgtgaggctgggctgaggcacggatccctgggccacagagcaagtctccaaatcagacagctgcctcagcccctgggatgtgtgatttcagctcctgtcacctcatgcaagggcgtggagaccagtagaggtgtggaggccaggcagagagaggagcctgctctgcggggggcccagctcatgggcactgccccttcagctagcctgcctccgtcccctgagtccaacagtgggagccctagctgggaagttctgatccccaaagccacagcaggggactgatggctatagcagaatgaggtcgggtcaggaccctcaaacaccatctgggaacaccaagcaccctgaatcgagactgcaggagccctgcggggtgagactgtgtcagagatacactgctggccacaagtgtcccctctcagtcccaccttttcgggctgtcccatgtctatctcaggggcccgttacctctctgcagcagtcccccatcccagccacaccagggtctgtccggccaaccctcttccccagggaaaggagaaaagagaaaacaggctgggcccggtggctcactcctgtaatcccagcactttgggaggttgaggtgggcggatcacctgaggtcaggagtttgagaccagcctggccaacgtggtgaaaccccatctctactaaaaaaaattacaaaaattagccgggagtggtggtgggcacctgtaatcccagttactcgggaggctgaggcaagagaatctcttgagctcaggaggcagaggttgcagtgagctgagattgcgccactgcactccagcctgggtgacagagggagactccgtcccaaaaaaaagaaaagagaaacagctgtcacctcccgcaggacccaaatcctctctctgagcaccgtcatccaccacatggctgggcctggctcccaggaccagtccagtcctctagtgccttatctgaggctgcagccgccagtctccaccccaaggagacagcccctgctcctagatgcccttggcctccgcagtgcagcccccaggtgtcctgactgaagcacaggccatagccccatttccccggtgcctgcagggctaacctccacgggagcccaggagctctggccggcaggtccatggcacagggcatcggaagactgcaaaactgctggacttaccctgggctgcagtccattgtcggcccctgggttgaatcaagatagtacttgcagctagatggatgcttttagccaggggacattgtgaggggaagattcctccacccagtctggcctgtggtgtctgtctcctccctgagaccacagcttctccagtagcagactcatgggcgccaccaagtggaagcacctggagcggcctctgccatccagtggggaagccaggccccgagacggaggtgggggcagcacgtgccctccacagccaccgctttcccgcctcagcagcccaggcctcctggcccagccctgcctggacagtgctctcccctcacccgggaagctggaatcctcctgcccgagaggaagcagacggcacagggacacccctgccaccttgggatctgcctccaagctggtgcagggtatcgagagtggattccagatggaggtcctggtcccagcacgcagcagtcctggtagctctgcagaggagacaggaacccgagaagtagctgaagcagaagccagccgcagtccccttgccacatagaggcgggcttctcccagccatggtgtcccctctgcctcccctcccccgaccctcctgccttccgcgtggagggtggtggtcctgtagtgtcagcaccagcaccatgggcttggaccccctccctggacacaggcaggtgtcctagggctgggggtgcagcccgagggaatggagaccacactcatggctcaggtctgccggggccggcagggggttggggaagaagagggctcaggcccagcaggggtggaagcccctgccactgccactacccgctccagagctttaaggaaaatgaagtgagacccctccccttaggcctggggagccatagggctggcttctctgtgggtgcgtggacgtggggttgggagctgggaatctattttttgtattatgttttgagctactgtagtttt

SEQ ID NO: 51995 - DNA, 1014 bp, Homo sapiens
tcctcggaacatgagtactctagatcttaaagcccgctccatcaaaaaggaatgctgtggtccaataaggcaataaggctgggagaggctgtgtcttctcccctctctggaagaatcacggtgcctattattaccatattaaaggctctgaaaagtaccacagcagagacttttccaactttcccgaagctcatcctaagcttattggagcatggagccctgtgtgtggaaggccagtcctgtcttgcagggtgttcacgttaggagcgtggtttggaagcacagctgtggctccccttctcacccagcctgacgcttggaaaattgagtttaatctctggccatcattgttctgcacggggtgcctgttgcatttacctgagaccagtgcgcagaccttactgctgtgatgtgtatctcctcaggccaccgagatcatcctggagattaagaaggcatttgaggaaagcctgagcaccctgaagtggatggatgaggaaacccgaaaatcagccaaggaaaaggtgaggctggccaggcacttggagggggtgctgcggcgtccagcacagatagaggagggtgggggaaggagaggccggtttttttgtttgttttttgaggcagagtttcgttcttgttacccaggctggagtgctatggtgcgatcttggctcaccgcaacctccgcctcccgggttcaagcgattctcccacctcagcctcccgagcagctgggattacaggcgtgcgccaccacgctcggttaattttgtatttttagtagagatggggtttctccatgtgggtcaggttggtctcaaactcccgacctcaggtgatcgacccgccttggcctgccaaagcgctggcattataggcataagccaccgcgcccggtgaggccagttctgtccggcagcacagcctggatgctgtctcgccttcagcgggtgagcggtctaggcctagcaggattcggggtaggcctcaagcacatgattgcttggatgt

SEQ ID NO: 51996 - DNA, 1089 bp, Homo sapiens
gatgagtgtctgtaaattaaatctaggatctgtttctgctttctcaattgatcacgcatgtcccaacggaaagaaatgtttgctgcctctgcaggtggtgaacaagtgctgaataaggcctttcattcattcggttgttcattcaaaaacacgtattgaggccgggcgcagtggctcacgcctataatcctagccctttgggaggccgaggcgggtggatcacctgaggtcaagagttcaagaccagcctggccaacatggtgaaacctcgtgtctactaaaaatacaaaaattagccaggcgtggtgttggatgcctgtaatcctagctactcaggaggctgaggcaggagaattgcttgaatccaggaggcagaggttgcagcgagtcgagattatgccactgcactgggtgacagagcaaaaactctgtctcaaaaaaaaaaaaaaaaaaaaaaagcacgtattaaacagctgctagttgccaaacacagtactagacaatggaaatataaaaacgcataggatattggcctgccctgaagttcacattctagtaggagaaatgaacaaggagatggtcgtgacatagcacagtagcagagcaggcacccaggccgctgaggggcccagagagggaagggggtcgatgaaggtttccgtaggaagagggggccttagatgagggggcctggaaaccatgaggtcatcaaaatgcatgaagcacttcctgggccaggaatatttcatgaagtttctgcaaaccattaaatagttaaataatcaagccattgctccttaagcacctcgtaggtccctagcccaatgtccagcaaagtaggcacttagtgaagaactcaaatttctgagactgctttatttatttatttgagacagagtctcactcttgtcgcccaggctggaatgcagtggcgcgatcttggctcactgcaatctccgcctcccgggttcaaaagattctcctgcctcagcctcccaagtagctgggattacaggtgccccccatcatacctggctaatttttgtatttttagtagagacagagtttcaccatgttggccaggctggt

SEQ ID NO: 51997 - DNA, 1125 bp, Homo sapiens
ggaggggtcactgtgagggcctttcctgcctgctaggggcttcagtttgggggcccccactcccgacctccggggaagggaggggtccccatctcccccgggcctctcgggtcttggggtctccccgggaggccggaggttgggaaccgggcgccggcgaaccgatcaggccccgcccgcgaaggtggtgcaacgcctggcccggcccatcccatcccggccacccgggcagcgggaccaggcgtctggggcacagcatgcggggcgtgtggccgcccccggtgtccgccctgctgtcggcgctgggggtgaggcgggcgcggcctggagggcgggggcgggaggcgggcgggacccctccccgcgcgggccgctccgtgggccggtctcggtctcgggtgtccaggccggggcggggcgcggcggcggcggcgccagggtcggggccgcttccccattcgggcgcgagagccatggaggcgctgagggagtccgtgctgcatttggccttgcagatgtcgacgtacaagcgggccacgctggacgaggaggacctggtggactcgctctccgagggcgacgcataccccaacggcctgcaggtaggcgccctccgctccctcccgaggtccaggcgccccgggcccgggcatgcgcgctgccgctgccgcgccccccgcccctacctaccccgcctcttcccctcccttcccctccctcgtcccggcatccgggaggggccgcgcctccccgcagctggagctccgcgctgagaagccttccggagcccaccagtctcccctcacctgcccccgccatccctagagcctcccggccacctgcttctggggccacagcccaggtggcagagttgaaagcacccccgagacccgaactggtccagttccctttccacagaaggcacagtttgtgcatgtcccgggacttgcccaggccctttaccggcagagtctacggctgtttctgttttagcgtggaaagccctgcatccctggaacccactcccccagtccggggcaaactgggaaagttggtcaccttatccgggaggcagtaccaccctcttcctcttgccctcccaatacctgagtttcctggggccag

SEQ ID NO: 51998 - DNA, 1045 bp, Homo sapiens
actgaggcacagagaggctgagtcacttgctcagggtcacagagttgggaagttcagactggggatctgaaatgaggtttagatccagagattttacccactacattatagcatctgtgaaatataagtgtttagctaccagataatatgagtgtgttttagatgacatgtaaagattgaacagatcccagccaattaccagcaccaaaagtagtaactgatggggacttcggccacaaagggcagcgtctctaaggagctgaggcttagagacaatgtgaaagtagctgtggagggtgtggctcagtcccaggcctcagaatttcacatgtggggcttcccttttccacctcatcaccccaagatgacttaacaatcccccgcctttggccaaccaaacgcaagagccatatgagtgactaatgtcgtctgggcaaagggggtcatgcccaggtgctaccaggccaggaggcttttgtcgccagaaacctgtgcgtgtttatatttctcgtttctgctcaccacaggcctttgatttacaagggtggagtttccagagctgggcactgttgcaccttcatctggctgtcatcacttcctctgtgcagctggggcaccggggactgaggacggggcagtccacagggagctgtggttccaccccttcactcttggtttctgccaggccctcctcttgaacactagacccagattcaacccagatttctcctccacggctgcacagtgccaggaagggaactgagaagaccaaagtggaggttctttaccttccccaacacactcggggccaggcgtggcacccacaactgcaaatgagacaattagggagaataagtgctggctgccctgtcagcccagagcctcagtctgcccagggcacccagactctgtgaggttcccacctgaagaagcagttccatcttccacaaggagcacaggaccaagagtccaggacccaggttcgaggcccagctctaccactttctcgccgcggggctcgggttctctggaggcagcgtaatgg

SEQ ID NO: 51999 - DNA, 1059 bp, Homo sapiens
ataggagactaaccacatgcccccacgtcactctggtgcctctcagccactccagatggggctcccagagcacagtgcgtacttcaccctgggcagcctgtgcccctgctggtgactgggctactgaggcctccttacattgctacactcttttggtaaacaaggatgttgttaccttttgttaaagaataaatacattgttttccctgcagagttggggaggccaggggaagaacaggatttgaggcatgagagggctacaaggtgggcttggcagaatgttctgggcgttagcccagaaaaccagcttggccaagtccacactttcatgtctacggtgagagaggaaccatgagcaaatgtttacaattttttgtgcttctgctcaatttttttctctccaattgactgggtaagcctcctgccatagtcaaagggcttcattcatttgttcattcactcactcaccaaacaagtctgtctggcacaacacgaggcatgggggccgtggtcagtgtgagtgagactgataggtctctctctcccacagtctgatggacaggcaggcagacagatacagagcaggaaattacaagcgcaattactgttgtcagggagacacgcggggggctgtgggattggaccgggaacctgacctgaggatcagaaaaggctccctgagcacatggcattaaaatcataacctaaagagcgagtgggactgggaagagtgttggggggcggggggtggagggagcagaatgtgcaagagtacagaccgctgtgccttcagggatggttcatctggaggcacggaggactgtgcttaggaggtggcccggagggtgcactcagggatggtcatatgaaggacctggggctcaatccttagggcagtggggagccactcaggagtttattttttaaatttaattaatttacttatttattgagacatagtcttgctctgtcacccaggctgagtgcagtggtgcaatctcagctcactgcagcctcagcctccctggttcaagtgattctcctcagtctcccgagtag

SEQ ID NO: 52000 - DNA, 2773 bp, Homo sapiens
agaaagccagatatgttgacagacacagagacagacgccagagaggaaggcagacaaagagacgggtggagacaaagactcccaccaagagacgcagaaggaagatgccgacggtaaagacaaaacaggagacgcgcgcaaggagcaggtcagagcccaggctcgctgagagaggaagggctgggctggggcagcccggaggcagagagaccgagagtgcggggcgggcgagggacgccagggccgcgtcaccccagcccgttcctagctccgctcccggcagggggcgccctggcctcgtggcacgaccggcccgcggggcgcggggctcgggccgggggcggggccggggccgggctggggaggggttggggccgggggcgggggagggggcgggctgcccgggcctcactcgggccccgcggccgcctttataaggcggcgggggtggtggcccgggccgcgttgcgctcccgccactccgcgcccgctatcctggctccgtgctcccacgcgcttgtgcctggacggaccctcgccagtgctctgcgcaggtaaggattcgacgctgccccgcgccctggttccccagggccccagcggacgtggtccatccccttctgcatcctccgctggccccgtggttgaactttaatggcagggccggggtctccagcgccacgccgcccacagcagcccattcgggacgccctgcaattggtcctgcccctgtcctcccgcgcatcccaagctcccggcgcgcgctctgggcgggacaggagattggacgtggcgcccgcggagccggcgaactcaggggaccgcgctcgggaccgccctgcagtcccagggtctcctacctcccgagccgctgcctgggaccctgcgctctgtctgggcacctgcccttggtgccccgtgactgagcccctcctggtgcctccttagccgtagctctagagacctgggctgccaaccccaaggcctcgtggcctggcgccctcccaggcgtcccacctgacccggtggggtctaaagcagtttggtttgggaggaggagagggcaggaggcgcttggaatggggggcgtggcgggaggagacagaggacacccgcgtgggtgtcaaagtgtgggcacccactgtgggcaccgcagctgtggggcaaagctctggagcccgcgaagccgaaggagcctgccgccccctttaggctttgcgaggtgggcctcccagggctgcttccctgcccagtcttggtaagaaagggttaaacgcaggtctcagcagaaaggcaggaggccgaggaaagcctcccccactccccattgtgccttatgactctttttcaacacataatggggtcgaaggcggggcctttacaaaggcctctgggtggagggtgaaattccttgagatcaaaagagggggcgattcttgggccaggaagggctttgggccctgggaaaaagtcagaccgctcaggtgggcccagctgcccagggaggcaggggttgggtcccagcctcagtgtagatactgcaactgttttttgaaggcctaccgtgcgtagagggacctgctctgacatctcatgtacatcatttcattttacaaatggggaaactgaggcttagacaatttaagtaagtggtgggaccagggtttgaatccagactccaaactctgcagccctagcgtcctgctcccactgtgttgcctaagagatagggggctgagccttggttttgtcttccggctcctcctgggctcagcccgctcttcctccactctccagtcttgctctttccaactgtttagtcctccccacctgtgggtgtccccacgctgtcctgccccagccatcccactccctggccccatgcatcttgttcctgtgtcacctttttctttctttaactgaatacctgtgaattccctcagaagaggcccctggacacagcttctcaacatcccaactggtgaagactaggctgagtgatgatcccggtccatgtgcccatttgtaaaaaggggtgtattcccctttcgggactattgtgaggaataaaactgaactgaggccagaacaagatgctatcttcattcagcaaatacttaagcatccgccgtgtgccaagctctgttctaggtgccgggaatgccacagtaaatcagccaaaagccctcttctggattggatgtttgcataacaaaattctttcaggctttgaaactgtcagaattcacagtgtagacttgaaatcaagctattcataaggaaggagattaagacgcaatcacctgtaaaatggattggccaacctttggccctcactttagcaaaggcagccttgctgtgggacctgggatcagttctgttccctctctgtgcctcggcctcctcccataagctgtggagatcaatagtgcctaccagtggtgaggtctagatatgatgaatgcttgcgaagggtttaagctggtacctgtgcttaagaaaatcctggctatcctcagctctcttctcagcagaaaatgcaatgcggagactggaagttgggttatgtgcctaccctgcctctgaacctgttacccacttctgcccaggcccttcccatcctgttgggctacacatgtggggtggcatggtgccctctttgctcacactcagatgccaccttctgtcgccatcctaaacacagcctgggctgggagcgcagagctccatgatgagatcagccctggagccatcatctctgcagcgcttcctg

SEQ ID NO: 52001 - DNA, 1010 bp, Homo sapiens
taccatcgttctttctgaattccagtaaccaggagtcaggtttcacaaaaagtcgtagtgttctttcctggctggtgtggactcgccctctctattattattattattattattattactattttgtattcatctgaggccacagagtactggccagagaggagacatagatccccagaatttcagttggaaggcctttagaagctggctcggtcaactgggctcttggtgcaccagggagactgaggcccagagaggagaagaggcttgcccagggtcacacaattgcttagggcagagtggactgggaattcagtctcctggccttaagctacatgatctttccaaaggcaaccactctcctgaatttggtgtgtttcatttctacagtatattcttagcatatctgttttttgaaaatcattgtttaagggaggatgcagatgatgtgggttggtggaaaaagatattaagctcaggagagctgagctgaagtccttgaatacctctgtgaccttgggcaagtcacttcccctgtctgagtctcagattcttcatctgtaaaccaatatatctgaggagtaggagtggagagatgagacttccctaagacttggaatgggtctaatgtattcaactggtcctcagatatttatagcctgctgtgtgctgggttatgggagatccatcacaaactgccttcctaaggctgcagggggtgggggattgttgacttttgcggtgattaaacaacttttatttagttgctggtgtttttaaaccaggcaatttcattttatataaagataaggatttctggcttctcttgaaagatcagaagatgtggccatatggggctatgtccctgcctggccacagtggctggagctgattagcagctgctccatccactttaccacagtctccaccacgccccactgcctcacacttgcccacctgcctccctgacattacctacctaccttctgagcttgcggtttctgggctag

SEQ ID NO: 52002 - DNA, 1050 bp, Homo sapiens
ataagtagaaaatggttataacacctaacctgtcaaacatggtagcttagcctgacttaccctaaatgtgttcagaacagttacattagcctatagttgggcaaatcatctaacacgaggcctatttcataataaagtgttgactatctcatgtcaatttcttggctatactgtattgaatgtgaaaaacagaatggctggttgggtactcgaggtgtggtttccactgaacactgtagcttttgcatcatcgtaaagaaaaaaatcttaagtgtaagttggggacagtctgtaatgaacatttaagggcttactctgtgtcagaaactgagctaatcactttgaatgaccttattgtattgagctcataattctttccattttgcaaacaaggaaacggaagctcagagagattgagtaatgttctcaaagtttggaaagtgcaggtgagactcaaatccagggttgcccaatcagattggcatctggattcaaatttgcatgtttggagaagagctctcagggcaccttgtggtacacatttgtttttcagtgagtgtttgcaaatgacatgggggtgggaggccccagggggaggagacagaacatagacacacctggtggggcaccagcgtctgttctcccagacagtgtttcttagcctgttcaccccctcataggaaatgacaagcctagaaggaagcatcctgagaaacccagaggggcctgggtttgaatcccagccctgccatttcaagctgtgtgaccttcgccaagtccctttccctctcttagcttctggctaccctccctaccacgcatggtttatttgaatgaggcaaggccttaggatttttcgatttgtggatggcgaatagccagcatgtctccttcctctctcctgccctgcacccacatcagacatcactagtcaaccactgcttgctttccttcccagattccttctaagtacagtgctccagacagccattagcaactaatatagagttggcacacaagataaaaggacatcccagaaccagattagat

SEQ ID NO: 52003 - DNA, 1028 bp, Homo sapiens
ctggtttgtgtgagaactttgttctgaaatttcccttttcaacaaccaaatccctgggctggcctgcctgccccacttccccctcttggaggaaacggatgctttcctcttgggcggccacatgatttgaataatcaagtgtttcccagctggcctctggccaaacggagctcagctgggcaaggcccccagttggggcactgaggcaagcctgccaacctcctcatcccgccacacgctccagccaccgagggtaaaatacaggaaaaatgcatggcccatagacttggctgggccaggccccagactattcctgtgatggaggcagcgcttgtcttgggctttgtcccatctacctggagaaagctgagtggaggaagaaaaaggctgcccctgctcaggaaattcctgatggagcggcctctcctggcgtgctcacctgggtgctggcgtcttggcacttgtcagggtggagagaggaggaagccagtcaagaaggggaaagacgggtgcgggaggacattcactgattcaacaaacatctcattagcccaactgcctgtgaggcccagggttaggtgctggaatcacagatggatctgccctggattttgccttcaaagagtgtgtgtaggctgggctccgcggctcacgcctgtagtcccagcactttgggaggccaaggccagtggatcacctgaggtcaggagttcgagaccagcctgaccaacatggtgaaacctcgtctctactaaaaatacaaaaattagccgggcatggtggcgcgtgcctgtaatcccagctactccggaggctgaggcaggagaattgcttgaacctgggaggcagaggtggcagtgagccaagatggcaccattgcactccagcctgggcaacaagagcaaaactctgtctcaaacaaacgaacaaaaagagtgtgtacagaaatggtcttgtaagcagactcccccacagagccctaggtggtagaggatgagggaaagcatgagaggccacctagctaagcc

SEQ ID NO: 52004 - DNA, 1005 bp, Homo sapiens
cgaacgtggtgctgtgcgccggtggtcccagctacttggtctcttgctgaggcaagaggatcgtttgagctcgggaggttgaggctgcagtgagctatgatcgtgtcactgcacttcagcctgaatgacagagcaagaccctgtctcaaaaaaaaaagaaaggagagtgaagctggatgggccaaatactggggcttctgaagaagtcaagaccttcaggcagacaggaagctcatgacacttagctttctcgttttctttagctttttaaaccactctgactgctcctgagtggaacaaactctcaaagaaatgatagcctcagcccactccactccaatgactaggagaaaaagcagtagcactgggcccaggcagatctggagacatggcttggccctgcccctgtttagcagagggacctagggcaagtcacttcaccttgctgagtctctactttctcctctgaaatgggtgtagtggtattctccctccgaggccttttgtgtaaaacctactagaaaggtgaattataaccagtcattaccaaactgaagggcctggaaggcagagcttgtacctgcaagtcctgtcacagggctggcacacaatagatgcatggaacctggtggtcaaagggttgtaaacttcaatggacaacaacctgtcagaaagtgaggatctgagtcctgcagggctattagacaagtccagccccaaaactttctgtaattctagaagtttatagattccaagtagaaagtgacttgtaggaagttggactcttacattaccacatacttgaaacttgtcagctttagcttgtttgcaagatttttcctctggcagaaacagctggcagaatatgaatgacctgatttggttgctcacaatctaaagcgctgagaaaaactggctgagctgcagttctgaggtcagactctgtgttccaagtaacagaaaagccaagacgcacaatggggaaattaattggctcatgtagcc

SEQ ID NO: 52005 - DNA, 1034 bp, Homo sapiens
tggccaatgccctgtcttgaggatgagttgaaggaggggattatgggtgggggtggccagggtgcgcccacctggccgggggcagagccaggtcttgaatgccaggtcttgaatctgggatcctcccctccctgccactgcaagccccaagtgagttgcactgcagggctggctacaagataccgtgcaaagatcagaagagacttggaccctagatgtgacattctcttgctgtgtgacctctggcaagtcacctcacctctcctgtaaagttatgattataggaagccctcccactgggaaccgtggtgcagatacaatgaaataacatttgggaacagagtgtagtgagtgtgaatcaaatagcagctgcacgcaatcccttcatctgcaaaagtataatgtgtctgtgtaatgtacatattgcagagagggcaaatggtggtttgtttccagtcttgcctcctgtttgaggagtttatgcttagtcctgggagacagaaacatccccaagtaaggctgaattctggctcgctcacttactggctgtgtgaccttgggcatgctccttaatctctctgtgcttctgttttgtcatctgtaaaatggggataataatagtgcttaccttgaaggttgttgtggggatcaagtgagttaatataggtaaagtgtttagaacaatgcctggcacataataaggtctatgaaaaggtttgttattattaatcttatgaatacgatgacaaaatatgtaaaataggatttttctaaaatagtctcagtttgaaatattttcatcagttgccgcaaatcactaatgtacggaagtccaagacattggcatccaagctgcgccttgaacactgccttgcctttccagtaattgccccccaaatcctcagctggttagtggggagacctatccctgcccctgatgtgctgtgtgacactggggaggttgtgtaccctctctgtgtcttccttttctttttccttttttttttttttttgagatggagtctcactctgtc

SEQ ID NO: 52006 - DNA, 1504 bp, Homo sapiens
aggctgtgtgcctgcaaagcagccatgctccgcccccgacccctgcctgggcactgcaggccccaggcatggtgtctctgggccctgctatctccctcccctgcgatctccctactgcgcctccctgctgcttctctcctgccactagtcctctggcttcagtcctctgcccacagagttggtttggggcatcatgaccgtcctggagcctcagggacccccagagaagctttggcttctctgaacccagaccctcagggtttctgattccagctctgctgtgtggccttgagtaagtgacagtcagagcctcaccctcctcacctgtaaaatggagctggcaatggggcatgtagtgagatgaggcatgcagagggcctgctctccaccaggccgtgcttggggagcagagccctttgtggtgggtccaggctgcccctctgtcctgaatgcaagccgcctgctcgtgcctttctccctgaaccccaaactccacacattcctgcctccttgcctttaaacactcaggtcctgttgggagtgtcctctctctctctctgctcatctcaaccccatcatccttccagcctggtgctcgacccacccccacggacacttctggcccataccctgtcctagactttctctctctccccttcaagatggaaaggaagtgtcaggctacctggcaggttactcctttcttcccaagtgagtgtgtgagggagagagagatctggttctctttggagatgggagccctttgactgtaagaataggacctctgccgcttaagaacaggccctttgaagggaaagtactcagcaggcaggtgagcttctgggttctagagtctcagagctggaaggactgtctgcagccatccaggtgaacaggtctctgggaaatcccaaagcatatggtggcttgatcgagtgggcggggaagggtccatccgttctctgctccagcccctcatctgccccacttgcccatctctgccccgcagtccatccacctcatttgctccccctccccataaccctagctcctgactgacattcactcagcacctaccacatcccagcctccgttttacacccttgtgtgtatgaaggcatccttacaacaacgcagtggcttctattaggtgtggaggggtgaggtcacctgctctgagctgcccagctggtgaggggcagaggcaggatcagaatccaggcagcctggctccagcatccatcttcactgctgctgagctgtctcttcagccacccaccctctgaccccatcatccttccacctagcgacattccctggccacccggcctgtgccggcctctgccagccacggggctgctgccatcagcagagcaggattccagctccctaggagctcaccacggtgagagggtgacaacctatgattctctaaggctctgattaatttcaccaagggcttcatggcactgggtgctgggagcttggggaggagccgaaactg

SEQ ID NO: 52007 - DNA, 1040 bp, Homo sapiens
gcagggcgtggtggctgctcccaggggccctctttgccccaagatggccctcctgtcccccatcctggatgtggtcctcacggtggccctcagcctcctcctcctggggctgatcctgggcctcctttgtttcttcacttgccgcctggccaggccgctcaggtaggggaactcagctggcctgactccccctgcatcccgccaaattccctgccctaagctcgttcagcttccatttgttctcgtgagatggagcaagcggggcactcatttctcttactcttcatggtggggaaaccaaggcccggagaggttgagccctggcgtcagcctgggcttaaatggcgcatagtcgaagactagccaaaccctctgttgggtttcctaagctacaaaacgggggctcttcatccatattgtgagatcagggatgtaaacagcatggggctgagtggaacatgagggcctaagaaatggtagtgacacgtttgtcccattcttctatcatttgccccagatcttctgagacccagcccaaggctggctttttgccccactccaggatgctcccgggccctctgcctgggttgctgaatcagtcctcagagctaaggcctgcctggctcctcagccccctgcactgaactgccaagtagctgctcctctggcgccacagcctagccggggcttctgcactggccatgcgtaatcaggctacggaggagccgggagcctggcagagaagggagggagggggtggcgatggggctgacacacacccggaggccccattttaagctggcagacattggcagagggtggtgggcagccggggcccccacagccccaaactgggcccctccgcttccagggctgccacagagcagccaggagcctctgcgagggggaggggtcctaggggtggggccagcagggaggctctgggttctgaaggctttcccaggtccccaccctctccttgtcctgagcggaggctatgggagaaggcacctgcctccaggccaagcctatctcaatgc

SEQ ID NO: 52008 - DNA, 1121 bp, Homo sapiens
ttgctctccttacagtttgagaaacactgcaccaaaagattggactctgggaggtagggggcttcagatgaattgaaagtggaaattcacttaggaaatgggacggaactgctttgcagcatggaactcattgacactgacacagctgtttgtgtggttaagcttcctgagacagggaccagctgggtttggcatcccaatgttgagccccatgcctggtctgtaataggtgctcaccgaatacttgttgaatgaatcaaggaatgaataagtgagtgaaaaaggatctctagagctgtgccccacatgcctctttttctctttttttaatttctaggattggaacatcagttaacatctgaccactgccagcccaccccctcccacccacgtcgattgcatctctgggctccagggataaagcaggtcttggggtgcaccatgatttcaccattcttagtactggccattggcacctgccttactaactccttagtgccaggtatgcttggggacacaggtggaggcataaaaaggtggtgcagatggggtatgatgagggcagtgtctatgttttaaggtcccagaaccatccaaagtatttaagagctgaaaacagtgttcagagcaggaaacctcagccctgctacttgcatgtgttagttggataggtcactcttttcccatatatatatatatacacacatacacatatatgaaatatatatatacaaggaaaatatatatatacaaggaaatatatattttccacatatatatttttccatatatatatttcatatatatatttttccatatatatatttcatatatattatatatattctttcttaatttttttttttttgagacagggtttcgctctgttgcccaagctagagtgcagtggcgccatcttggctcactgcaagctctgcctcctgggttcacgccattctcctgcctcagcctcccaagtagctgggactacaggtgcccgccaccgcgccaggctaattttttgtatttttagtagagatggggtttcaccgtgttagccaggatggtctcgatctcctgacctcatgatccgcctgcctcggcctcccaaagtgctggga

SEQ ID NO: 52009 - DNA, 1054 bp, Homo sapiens
cccagaagctttagtcaggggccaaggccaaaacacaggtgacaaggccaacatacaggtgacagagccacagtccacttgagatccctcaggggtcctgtgggcgccttgatgaaggggaggactccagcccaggtgctcacatctcaagggccttcggggtgaggggagagggttccagaggcagtgttctggctgctcggctacttggaagccactgccagacacctgctgctgtggatggggagactgagacccgggcaatcctcagaactgaagcgggggcctgtctttagcggggagggggaagggagggaggaggcctctgggacaccccgatctgtggataaagccaaacccgcccctcctgcaccccagggaaatctgtgggcattgtgaccaccacgagagtgaaccatgccacccccagcgccgcctacgcccactcggctgaccgggactggtactcagacaacgagatgccccctgaggccttgagccagggctgtaaggacatcgcctaccagctcatgcataacatcagggacattgacgtgagtgctcgggggcagccgggcagggacggggtgaggcggggcctctggtgggcaggaggcctcaggcccaggctggcccggagaaagcagcctggcctggctccccacacacctgggaggctcccagcccattaggggatttgcggttgggcaggcaggcactgtgggatttctctgcggtggggctgcggggtgaaccctcatgtgaccgccaccacaccccaagaaccaggcatccagggatgattccataaattgaaacctggtgctgtgccctcctctgccccccactacacgggaggtggtgatggccaagtgtcgtctgcctgccctgcgtattcacatggtcacagatgggtacatatctgtacactcaaccaccagcatgcccggcaaagagctggtgtgtacagtggttggctagtgccagctctcgtgtttaaacttccgagttccagaccttgccctgcgtgttgctagctgtgtgaccttgggtc

SEQ ID NO: 52010 - DNA, 1144 bp, Homo sapiens
agtgccacagccggaaaagccctgggtttgaatcctgatgctgccacttcctggctctgtggccttcgggggaaaaaaccaatttctgtgcccatttttttagttggaaaacaggtggccagggtttattgcagccttggtatgaagttgagtcagaatgtatcttaaatgcttagtgcctgacacacagggaacgctctgtaaatggtctgattcttattcgagtgggagttctgtggattccgggaagccaagtaaggtaagttatcagctcctccaatatccctagaagcgccaaaccaccgtcccaatagactcgtgatttcatctccccacgctggacaagtaaggcccagagatgactgaggcctggctcaccaggctgggaaagtgtccacaccatctccagggactccaggagtccaggttccaagccgaggtcactggggcttctgggcatcttggaaccctgcagaagtgatggctcctgtctcttttaggtgatcatggggggtggccggaaatacatgtaccccaagaataaaactgatgtggagtatgagagtgacgagaaagccaggggcacgaggctggacggcctggacctcgttgacacctggaagagcttcaaaccgagatacaaggtagcctgtgctggggccatgtggctgcagaggtggcctgtgatggggagaggctgtgtgacccctgctctgaagttctgttgtcctctgtagaaagggcatcggaaatctttcctccatgggctcaaatggcctaagagatatacaagcagtagatagtcagtgactaatcatttccttcccttggaggggataccagagagaggcggatggtgaggaggaggctgggccagggaataacctgcgtggacattgagtcaccctgagcacctattgtatgtaggcacctggcggggcatgcgtgaggcacagaggctgagtcagatggccaaggaaacatggaatgctgtgtgcctgcatgggggacgcctggctctgcaggcgccctggggggacagatgacagggaggagccaagaagctctgggcaagtaggaggatggagggaggaggcagcgctggatggatcaggggaggacatggttggccccagtgtgcaag

SEQ ID NO: 52011 - DNA, 1071 bp, Homo sapiens
acagccacgcctttatctcccctcccagatggggtccccaaagcagagctggggctttgcttcctccctggccctccacggcctccagaaaacagcccacacctgtcagcactcaaggcccctggagacctgtgcctggctcttctttgccccatgatccctcctccctggaatagccttcctgaccctaggctgttcaattcccacttgtcctccagggacccattagaacatcacctccaccaggaagccctccctggtcctgtgtctgggctcacggcctccctgggctctatcagaattctcatccccttgcattatacattataatgggctattgattcatcatttcttgaggtcagggatggtgggtcctcagggagagatttttaagtgagggaaggaaacaagtaaaggcctcagactctgatagctgctggggtcagtccttccgactctccctagcccccggcatgtgctgacacagcccttcctcctagcactcccacttcatctggaaccgcacggaactcctgacccttgacccccacaatgtggactacctattgggtaagtggagggggtggaggggaggatgcatggctcggagcctggtggccggagctgcgtgtggccagcacctggggacaaggccctagcctgacgcccacttaggggcctctgctcttgggcttcaggacctgggagaggcaaggaagggggttctggttcctggaattaggcctgaaatctgctggctgtgcagggggattagcctcattgggcacaagaagaaactgaagctcagagaggggagtggcccgcggcatgtggcacaagtgacagcggtacggcccaggcaagtttgagccctggctgggaactgggacttaacagctcctgggctatggagcctgggacctggagtcagctctactgtgtgcatggccagggcagaagccagccaagttatctctgcccatcctgacgattgccctcctccccaggcagtggggagcatgtggtgagggcccaggggcagcttcaggtctggtgggatgcagccctgag

SEQ ID NO: 52012 - DNA, 3296 bp, Homo sapiens
agagacatgggtgtgtcgtgcctggcacattgtagggattccagcgtgcccccttccctacctcccaaaggcttcagtgcctccttcaagcagctagagacagtgctgggaggggcggtgggaggagtacagcttcccggcctggtgaatttgattacacatctggactttgcagcccccatgcatgtgcctttggcaccggggctgtccctctctggcctccgtcaggttgaatggctgcgtaaaatgcctaggctgtggtgctagctcagagtggtgcccggcgaaggttcctgtccttccctagctaacaaaggttaatccagcagcagtgttgtggggctggggagcagatcttcctcccctcctccctcaccgaggcctttgccttggtgtcccaaggaggcagaattgaccacgggcaccatgaaggaaaagccaagcaggccctgcatgaggcggtggagatggaccgggccatcgggcaggcaggcagcttgacctcctcggaagacactctgaccgtggtcactgcggaccattcccacgtcttcacatttggtggatacaccccccgtggcaactctatctttggtaggtgggccttctttggggtggacactcctggggtctcctgtctacccacctgggagcaggagtgggtgggagagccagcaagcccagagcatggtggggactcaatgacaactgggtggggaggaagagttactggggatggggagaaaatgcagggtgaggcaggggagtgagttgagtggtggtcgggtagacaggcaggtgggtggatggatggccacgttgaccatggctgggcgagaacgtggatagatgaatgagagaggatggctggctggatgatggatggatgatggatggatggatggatggatggatggatggatgatggatggatggatgggtggatggatggatgggtggatggatggatggatgggtggatggatgaatgggagggacatgggtacaatgaaaactggggaatggttagttggaaataataaggtttagaaggtggcttcttggaggcattgcagggcccttcaaagaagatcccaggggttaccaagccaccaaggagcctaatctgggggctggggactgtactcctggggccccagcatgacccctgaacaccccctccctgtgcaggtctggcccccatgctgagtgacacagacaagaagcccttcactgccatcctgtatggcaatgggcctggctacaaggtggtgggcggtgaacgagagaatgtctccatggtggactatggtgagacctccaggacccagggctgggaggggacagggcacccctcggggatgggcttgggaatagggtgtcagcttgtggtcaaggtcaggggtctcagaatgactggggcttgagtcccagtttgattgttgagtcccaggttgtttgattcaaacaacctcagtttgaatcgccttctacaatctagcagctctgagactttgggcatgtgacttcatctttctctgcttcagtttcctctctaaaagggttctacctttgacggttgtctgaatgaccaaatgggtctgatgagcttagcatagtgcctggcacaagtaggtgctcaatattttatactcatttttcttggccctataatattccagtatacgagactttgcagttagttcatcccatcccatatcattcattcgttcttgatactcccagtggttctagggggtctaaagatgcagcaatggtaagagtctccccgtcaactctccctgctaatccaagcagcccaaatgaggttaattttctctgttgggggttgagaatgcagactcctgtgtcagaacaggctcaggttcaaatcccgtggccttaggcaaaatgactttcccacattgagcctccttttcctcttctgtgaaatgggagcattcaagccagcctggaagggagatggaaaagctgcgtgcgcagcgccaggcccctggcaggctctcagcaggtgtttcccctggcccacagctcacaacaactaccaggcgcagtctgctgtgcccctgcgccacgagacccacggcggggaggacgtggccgtcttctccaagggccccatggcgcacctgctgcacggcgtccacgagcagaactacgtcccccacgtgatggcgtatgcagcctgcatcggggccaacctcggccactgtgctcctgccagctcggcaggcagccttgctgcaggccccctgctgctcgcgctggccctctaccccctgagcgtcctgttctgagggcccagggcccgggcacccacaagcccgtgacagatgccaacttcccacacggcagcccccccctcaaggggcagggaggtgggggcctcctcagcctctgcaactgcaagaaaggggacccaagaaaccaaagtctgccgcccacctcgctcccctctggaatcttccccaagggccaaacccacttctggcctccagcctttgctccctccccgctgccctttggccaacagggtagatttctcttgggcaggcagagagtacagactgcagacattctcaaagcctcttatttttctagcgaacgtatttctccagacccagaggccctgaagcctccgtggaacattctggatctgaccctcccagtctcatctcctgaccctcccactcccatctccttacctctggaaccccccaggccctacaatgctcatgtccctgtccccaggcccagccctccttcaggggagttgaggtctttctcctcaggacaaggccttgctcactcactcactccaagaccaccagggtcccaggaagccggtgcctgggtggccatcctacccagcgtggcccaggccgggaagagccacctggcagggctcacactcctgggctctgaacacacacgccagctcctctctgaagcgactctcctgtttggaacggcaaaaaaaaatttttttttctctttttggtggtggttaaaagggaacacaaaacatttaaataaaactttccaaatatttccgaggacagagctgagtctttgtggtcagtgagaaaaagactgaaagaagcttatttctctgggaagaactggcctcagggcccggggtacaggtgggttggacagggtggaaaggccttctgctgtcctgggggcttcacactccctacctgtgccactttggacacataggtttgtgtctcagttttcttgtctgtgaaatgggagacaacccccttctg

SEQ ID NO: 52013 - DNA, 1970 bp, Homo sapiens
ctagccagtgccaagggcataggctaacctccctccctctttccaccccctccccaggagagcgtgtcatcctcaggaacaccccacaagcgggactccttcatctatagcacgtggctggaggacagtgtcagcaccactagtgggggcagctccccaggtaccaggacaaggcagcttccccacaaagcagggctaccttggggtaggagggggacagggctgggcaccagttcccatgccccatgcagtggatgtgatgtgactgcccctgacttggaggacagcgggcaggtcattgtccagcctagggtggctgggtggattggagggctggtttcttccggaagggtctcggaggataatgggggatggcaaggaagaaagttaagggtggggttggagcgcactggtgccgaccgcccacctatgcccccgtctccctggtgcctccccgcggccagtgaggtggctccctcctgcccccctccccaggcccctctcgatcaccccacccagacgccggcaagttgggggaccctgcgtgtcccgagatcaagatccagctggaagcatctgagcagcacatgccccagctggtacgtgcagcctcctggggctggtgctgagggagccccacccgggaggggatgagctggcggggaggctgggagctgaggctcgaccaagaggtccccctaggccccgctaggccaggaggggtggggcttgcccggcctggacacagccagtgactttgtgcacctgtgtctcccgccccgttgcttctcccgtcttgccacctgcctcaccaccactgtctgtctgcagggctgttagccgggccaccccctctgaaggtgaaactgagcaggttagacccagcccctcagcttgtgtttggtgggagagggtgggggtgtgtagagggctgagctgattcctccctgttcttctgtcacctctctggggtgggagctatgtatctgggtttgagccccctggtcctcagttgctgggtgacttgggcaggccacggcccttccccgtgacctctgcccttgcattgttggaggatttgatgggagtgtgaaagggacttggcagttgccaggtggggagaagtttcaggggttcccaatgggatggaaagacctggagcctggaattccaagggtgggcccctcccagggtggggttctctgaggcagggacttggcagagttggggcacactggtgccagccacccaccatgccatgtttcatggtgtctccatccccctttgccctgcagatgaggccacagaagcacaaggggaaggtgccgtgtcaagcccaggcagacgagacctctgccctgaagaccaacaccagcccgtgggctgccccctgcctccccaccctccccatggcccacccatctgggctgtctctgcagggcagagccgtccagacctgggatcagggaagctgctggcatcgtccccacccccagcctgggggtctgggctggggcagggattgctcagtggaagcaggactgggggtctggcttgccccctccctgggcctccatcacccctgagcatccctctggactcagagggaacaaggtgggagagagagtttgagacagctccgtgtggagagcttagcccctggaggcagcacaaggaggatgtgatatgtgggggagtgagcactgggttgggagccgggtcctggtttccaatttgggttctgctgtgtgactctgggcaagtcactctccctctctgggcatgtctgctacaaatggacaagattatttcagaggtcactgaagactgtgattacatgcacctgccttagaaggtaggattttcttcccagggacctcctatcaccctaccctgcttcttgaggtccctggagccccaggtgggctgaggggcagggagccggctgtgcccagtatgcctcctggacc

SEQ ID NO: 52014 - DNA, 1188 bp, Homo sapiens
agtggtgaaccgtccttcccctcccctgcctgggcccgggacagcacaggagccttgactgtgccacagcagggtgtcagggggacctgggcattctctggggccctcctttgacatatacccagcgagcactttgtgcacgcccagccccgcgcccggctctggagcacagaggtgccctgcgcataggtccccgcctcacggccgcaggtccatcagaacgcggcctcataggctgttgccggatcatggtgataggaggaacccgaagcagggttggggggatgaagagggactgggggcagaggtgttttagatgggtcctcggggagacacctccatggggtgacatttgaattgggaactgaaccagccctgctaggactggcatggcagaggagctcggccagtgcagaggcctggggcacactccagggacagaaagaagggtggctgggagtggtgacgtatgcctggagtccacctacctgggaggctgaagcaggaggatgattttagcccaggagttggaggctgcagtgagctatgatcatgcctgtgaatagccactgcactctagcctggacatcatagcaagactccattgcttaaaaaaaaaaaaaagagtatctgaggggctgggcctggacagacattgtgacattgtgctgggtggtggcgggaaggaggttggagaggtgggcagacactggcttatagcttagcaggctgtacaagagctttgactttttttttttttttgagacagagtcttgctctgtctcccaggctggagtgcagtggcacaatctcggctcactgcaagctccacctcccgggttcacgccattctcctgcctcagccccccaagtagctgggactacaggtgcccgccaccatgcccatctaatttttgtatttttagtagatacggggtttcaccgtgttagccaggatggtcttgatctcccgatctcgtgatccgcccgcctcagcctcccaaagtgctgggattacaggcgtgagccactgcgcccagcctaagagctttgacttttatcctaagtgtgacagggaaccttgggaggattttaattacgagggcgatgctttaagaagctgacttcggttgctgtacaaagaggctggagtggggtgggatggaagcagagaggccagtgaggaaa

SEQ ID NO: 52015 - DNA, 1011 bp, Homo sapiens
tgacctaccgcttcttgatctgcatgtggcacgttaggtgacgtgctggccctggtgcccgacacgcagcagggacttgaccacacagctgtcactagtggggatggagaggcagaggggcgggcactcccttctgcctgccttgctttgccaccgaatggggctcagggatggggatgcaggggaatggggcactgtcccccactcacccacctcttctcctgcacctcctgtatgttctcgatgccaatggcgctgctgcggcgggagccgaacgggcccgacttcttcctcgtggggctcttcccagggacaatcagtgactgtggggagaggccccaactcagtgccaccttacctgggagccccagtgccccccccacatcccctctggggatcctgctgccccaggccctgaagcagagttgatgagcaagaaagaacgagagaagatatccattcccagagacagcctcccagtttacgaaagggaaacagtccccaggagggcaaggggctctcccgagctcacacggcaggactgcacgtcaatactggcccaggattaggacagcatcctgagggggctagggtgggaggaggccgagtcctcagaatggctaccgctccccgccccccagggctctgtgggatctgcagcctaagggcagtggtcagagggcagtgtagcaacccaagtcccaccccgtgccagctagggcccctccccggaacctccaaattggctgggggaggttctggcccagcagctggaagactcccccagcttcccacacactgtgctgggatgccccaggccccagaagcccgcccccagcttctctggaggcaggaaggggtaggaccccaggtcacttcgtggcggggaggaggagtcagggcagaggagagggatggcgctccatgcagaccggcgatattgggggacgtgcggctgggtgtagggcctttgggtaccggatcctggcagggactgggccagggtcccag

SEQ ID NO: 52016 - DNA, 1073 bp, Homo sapiens
ccatccatccacccacccatccacccatccatccatccatccatccatccatccatccatccatccatctctatccatccctctatctccatccatccatccacccacccaccgatccatccatccatccatccatcctttattgactgtctactgcatgccaagccctgcgctcagtgctgtgaggctatgtcacgtggcaggagggaattccccgacctctgctgtccagcagtcaccaagcacactgtcatgcgaggagcaggcccaacctcccccaacccagttttatcaaccactcccttcctctccaccagagtgacccagcctcctgtgggtggccgagaggggccccagggacaggaccaggccagcagcacccaccatggcagtaaccggacccatttctgttttgtttttgcacaactctccctctctctgtgtttcctcctttcattctactctctctccttgtttttttgttccctcctcccttccctttccccgtcctgtggcctctctgccctttggctctctgtttctccttccttcttgcacctgtcttttttgctccctctcctccttcccttctccgctcttctcaccctcgctttttcctttcggccttcccctggcttccttctctgtctctgaccctccctgggcctgtgtctgtgtccttgcgtccctgtctctctggatttccctctgtgcccatctggtgtgccctcgctggctcacgcgtgtccctgtctccgggtaactgtctgtccatctctcccccgtctcccttgtcctctgtctctccttgtgcttctcgccttcctttccccggccctatctctcccattgcctcctgcaccgttctcttcctttttctgtctgtcttcctcctttccctgcctctcctcctctctgtgtctccctcccaccatctctcttgctctctgactctctctctgtctctctctctctgcccccgccctctgctgcttgccagtcattgcttattcctgggaaaagtgcgagtagattcggacgccggggcagtgccataggcataggaaccgtgg

SEQ ID NO: 52017 - DNA, 1076 bp, Homo sapiens
cctgactccaactctctctgttgccctgctgcccacatgcccatcctaggctctggatttggtctagccactactttccatgggaggggggtgaagtgcccaggccaggacactgcggtgctgacagcttgcagcctgcagccccttcccaagctccttggccctcccctcctcctggccctttatgcattgaggtgtgacttcctgcaggtcagccctgggacagcctctgtgtctcattccttattgagtatctatctgtttgctggggactgggctgctgtgtgggcacctactgtcaagccttgggtttctgggagcacctactgtgtgtcgggctgtgggcacccactgtgtgtcaggccctgggctgctgtgtggacatgcactctgtgagcatctactgtgggcctggccctgagtacctgtgagcacccactgtgtgtcaggtcctgggctgctgtgtgggcatcaactctgtgagcgcctactgtgtgcgcagccctgggctgctgtgtgagaacctactgtgtgtcagaaaatggactgctatgtgagcacatcgtgtgtgataagccctagatgtcagtgaacacctactgtgtgtcaggaagtgagctgttgtgtgggtactttctctgtgagcacctcctactgtgtgtccgcagcagccagggcctctgtggtgtggctgcctattgtgtgtcgggaatctggcttctgtgtgagcatctccagagggagcacctcctgtgtgatcactgactgttgtccaggttctgggattctgctgctcacactcaggagtgctgggcacatggatgaatacggcctatggctgtgggcctcactgctgtccactgcctagtggccaccccaggacactgcacccactgctgtgctccccacccatccatccagccacccatccatccacccacccatccatccatccacccacccatccacccatctagctatccacccacccacccatccacccacctacccatctacccatccacccacccacccactcatccatccacccacccatccacccacccatccaccca

SEQ ID NO: 52018 - DNA, 1115 bp, Homo sapiens
gcatgcaggtccgaatatggtccagactcgatgagcacccagagatccagcgttactacccaccttcactgaactgagccaagcacttcatccctttcagtcctggctgccaccaaagtacagggttccctcctatttggcagactaggaaagtgaggcacagagcggccaagtgacctcctcaggctgcccagctggtcagtggcagagtggggctttgagtgcaggtctgtctgatgtggggtctgctatcagccgtgacacctgctatcggcgaaggacctgcatctgggagtgggttggctttctggccttgtttccaaaagccccatgctcagcctcacccactcccctggcccccacctcccactgcaggagcatttcaattactactcactggacgctgccctcggccaccttgtcttctcactcaagtacgatgtcatcggggaccaagagcacctgcggctgctgctcaggtgagggtggtgggggagtcctgagatggcaggaagggctgaggtcttacaatctcagagcccatctcatttgacccactctcttcatcaaggcccatagaggggcagggatttgcttgaggttgcacagcaagttagtacccgagtcagcctgacacccatcatcacctctggtcctcgctgtggtccacccccttctggccttactttgtggggggtggggttcccattttcctgtcctgctgcccaggccttcatcgtgtgactttctcttctcaggaccaagtgccggacataccatgatgtcatccccatctcctgcctcaccgagttccctaatgttgtccagatggcaaaggtgaggtctccgctccgctgagcttcccgggctggctccgcagatgggcacctgtggggcttcagcttgccttggcgcgtccccttcagctgtaggccctagccctggcctgccgccctatcctgaggctgtctctcacttgttcccatcgtgtcttgggctgccacgtgttctcctaggcccccgtcccctgcctgtgtgcttttggttttctctatagcaccttcagatctcaggggacctccgttccctgagcaacagtgaaccccgagtcctgc

SEQ ID NO: 52019 - DNA, 1060 bp, Homo sapiens
gcgccggcggcccccggcagctggaccgcggcccgctggggcgcggacgtatccgagctggggcgggggcgggggcggggcggccgcgttgccaaggtgacccgggcgcgggaaggcggctccggctcgcgcgggccgggccgggcggcggcggcggcaccatgagcggccggaagcgcagcttcaccttcggggcctacggcgggtagggcgtggcgcggcgcggggcggggcgcgtgcgcgcgtgtgcgtgtgcacgcgtgggggggagcccgtgcggggtgtgctcgcgtttgggcgggtgggcctgggctatgactgctgtgggggctgagcgtttgacctcagtgcgcgcatggctgtcgtgctgtggcgcctgtgtgtgtgtgtttctgtttctgtgtctgtgtgtgttcccattgcgtgtccatgtgcatgtgtggggaggtgagtgcagggtggacattgctgtgtttgtgtctaagcacatgatagtggcgcttatgcatgtgactggggctgcggggctactccgcctgtgtgtgcgcgcgtgtgtgtgcatgcgtgtgtgcgcaactgctcacatgtataggtatgtgggagtaggggcaggcaggtcagggggaggttctgctggacctcccactttgcctctgcagctgttgggcccctcagtgacgctctggataaagggactctagaagcccttagcaggtcctgcccaccctgggcaccaggctgccctccttcctgcatcctggctctcaggaacctcctcctccctgggccactggctgcctgggcttggaggcctggaggaggtcagagtggcagcaggttcatcttggggtcaaggggtgcagaggtgggatggggatttatgcctgttgcggagatttggcaaattggagggacgatgggttagacagagtgggctcagagcccctgcccagccagacaagcggctccatgaccttcaccaggccctacctcccagtggtcatagggacccatgggacccaccttggggtgtggagcgctggggcttgtgtgtgggcat

SEQ ID NO: 52020 - DNA, 1082 bp, Homo sapiens
gatgaggttctgagattcccagtgatgcctgcctcctccctgtcacgggaacaccacgcccttcagtggcgtggtctggaagagacagactggtgggcagagctgtttccaagagacttctctgcccaccatgcacatgggggctatgctgccccagaaaatcagattgagaagggcccttggaggggcctcattattcagagaagaaaactggggagctgcccacagtcacattgtgagccattggtggcactaggcttagaacacagatttcctggctcagctcacagctgtccttgcacgtgtccagtaatagtactaaagacagtctccatttattgtgtgcctactatgtgccaggggtgagcagtttacactgaatcctaagaacaatcctatgcggtaagtacttttattatcattgccatcctcttttacagatgaagaagctgaggctttgagaggttatgaaaatggaccaaagtcacaagccaggaagtggcagagcaggaatttaagcacaggtccatgtgattccaaacccatactgatgccaggccttatgtatattatgataggactaaagttgactttctgtttctttatgttcatagtcaacgtaggccatcattcattcattgaacatttatggagtgctcactaaaacaaggagactatagagctgatcagggttgagggtcagagattaggtcatgaggcagggagtctcagacactgctaagctctctgcctccaccaagaatggctgcgtctccctcctttttttttttttttggagacagagtcttgctctgttgcccagactggagtgcagtggtgcgatctcagctcagtgcaacctcggcctcctggattcaagcgattcttgtgcctcagcctgctgagtagccaggactacaggcatgcaccactacgcccagctaatttttgtatttttactagagatggggttttgccatattggccaggctgttctcgaactcctgacctcaggcgatccacctgcctcagtctctcaaagtgctgggattattacaagcatgagccaccgcgccccagcc

SEQ ID NO: 52021 - DNA, 1074 bp, Homo sapiens
tggcagcctcccacccagacgggggccgctggcccttccctgatgcgtgtgccctggcgccgactgccactcttcatcctgccttgctgtggttagagtggaactgtcctctgctccaagccgcccctgaagcccaccctccttgccggcctttcctagaccttacctgtggctctgtggacagcacaccttgaggacttgctgctttggggttttcttcccctacttgctctggtgggcagttcctatctcagtttttctcccatttgatctgactgggaaggagtgggcgggcagagatggggagttatttccaagaggcatcattcccattttaggactgttcccccctccctcacctgcagtctcatgcattatttggagtttaccgtggtgccacccatgttttcgttctccagcctttttggatgccagatttttaaagccagctttcatttctcagtgatagggagcacagagatggtggctgggtcgcaatgtattaagtgtctgagacaaggcttgtgcccagaggcagccatgcgtgagtggtcagtcctgagtggtttggattgaaataggacagggaaagcaaagctccggggcctttgtccaatcttccccctcagtagctaggctgcatgccaagctctgtgcccagccccctacggcacgtgctgcctcctcgccaggggccctgacagtctcagaatggtgccccccaggacacatgggagattataagcctcttgcattgagggaggttttctgtaaaggggaaaatgctgtaattgaaaagctccttgattataaagaagaaatagagacgcctggcatagaagagacttcgttctttggtctgctcagccagggtcggggacattcagtacccccaggctaataggctcttgagctcttaaggaccttggagtctgcaggtccagactccagaaggttatgggaccatgaagaggtcacacagctgtaccccttggcttgctgcatttctgcatctccagtgcctccatctgccccctccctccagctcaggtgggacacctttgtctccactca

SEQ ID NO: 52022 - DNA, 1045 bp, Homo sapiens
agttgtagaagttgggccacctgtgttacagataatttcaccatttaccttgtaaccaagaaaagtgacttaatcttgctttaccttaatttcttcatctctcaaaatagcagtatttgctatttttgtttactacactcagaggattaaacagtaataaatattgttgaggtaaaaggctttgtatttttctttgcatttagaagaactgttgcctttctgaggaaatgctgttggaatctcttttgcaagtcttcaaaaagaggccttgtaaccacctagcaaagctacctggagcatcttctctgagaactttagaaactaccttttacttcaagcccttccaactaaaatgataactagacaggtgttcgaccatcctgtcacataaatcttttctcctggcccataagaataatgaagccaatggccaaactgcaagccttctcaattcggtgttttttttgcagggtcatgtcgaaaggtatttgaaacacgcttagaatgcatgttgaagatttatgtctccgtgatgggcagtttctgccccaaaggggcagcttcagttgttttgattgtcattgctaagaacatcaggaacagatgtctcgagctgccgaggcatggctctgcgggcactgggaagcaaagccatgcggaggcctgtggctggtgctcagaggtcacttcctggtctgagaattgcgtttttcattatttacctggtgatacttagtgaataatatcgttcaagggtagagtacacgaaacaggtatttcttacgtctcccctcccccaacaaatgacagaaccagttatcaaataaatacaagatactaaccatgtgagatttctgcatgtggtaaggtttaatatctctttgagcctcactagattttaggaaggaggaggttgcagaattgtggcttgccaggagttgtatgacctcttcaaagtgacattagtttaactttgttttattttattttaatttttgagactgagtcttgttctctcacccaggctggagtacagtggcacaat

SEQ ID NO: 52023 - DNA, 1085 bp, Homo sapiens
cttcctcctgctctgacaacttgccttgttctgccagcactgctgaaagtaactgcagcccagcggctccagtgacactgtgaagctttattaccaaggcaggagctcaggccctagacccgctgaatcggaatctgcatccacaggccactcctgtactctttgaaaccctgggcttggggcctctcccacccatagtaggcagagttgcaaagaaacgtatgcttgtattgaatggttttgcattgccacccttctcacttggtacagggaaaaacaggtaaagggtatgacctaaagcccgattctcgtttcgtctgtaattatgaatagatggagtccatttgccttctggactgtgaaaagttcagagactctttgtgttggggttctaatgccatgcatgtgtacttttttatattagatcagtctccggtataaggtattatgaagcttgggtcttttccccttgatatttctgaccattctttaatctgaaacgaatgtgttcagcatactacactggtacagattgtcaccacgaactgaaatataggctgcatttgggtgtcttcatttcctggggagtaagtatctttctgtgtatttatgaactctattgtttagaattactgttaccttcctgccaaatttaaaagatatgagtgtccctttatttctgtgggagcataatccatagtgaattttttggttattttaaatgtgcttttggttggtctatgtggtcatagatctgttcatcagactctggttaatattggaatctaatgctcaggttgaataacctgttttaaaaacccaagggatgatttatctctgtctaaacaaaccgctgaagcgaaatgagcaagaaagcctgtctttcctgttaccgaatcatggggcagaatcatatcctttctcttgggtactttagtcctcagctcattcagtgttaataggggactgcgaacagagtgcatgcagattaaaagccagcgttttcattttaagaagattttcccagcctgagaaacatagtgagacttcatctctataaaaaagcaaaaattagccaggtatgc

SEQ ID NO: 52024 - DNA, 2080 bp, Homo sapiens
aggagttcgagaccagtctggccaacatggtgaaaccccatctctactaaaaatacaaaaattagccgggcatggtggcgtgcgcctgtaatctcagctacttgggaggctgaggcaggagaatgcttgaacctgggagataaggttgcagtgagccaggattgcaccactgcactccagcctgggcgacaagagtgaaactctcagaaaagaagaatggtcattaaatgaaagaatcaataaaatctggttagtttgtgtgaagatacacttaggaagcacatggctttcaacaaaaatgtgatttagcggagagcctggagtctgctggtattttgtcttatcctcccacaccaaggtgcgactgtgttcatttattaaatttgatgctccctgttgatgatgtgttcttggtaaatggaatccatgaacttttaatctgtagttcacaactatccctccacgtgtgtttcttttcccaggtactggtcttcttggacattaatctttgaatacttgctgactgctaagaaatgaccagaggggaagaggagtttgacatgttagggcattaaagcaaaggtggatttaagaattaaaccattacatgccccttccaaaaggcagaaatccattcaaacgtgactgtcccaaatgccttatgtcaaataaagcagattgcactgatggacatcagacttgaaggaaatgtttccaattttatatttaaggggggtggtgggtgggagggggcaagtaaagacggaacaagtttagtagcagtaatagtaaatcatgtttacatatgagatttatagtcgtgggaggggaataaagttctgttatatttccttgctcgagtttcataccagatgcgttggtccataaaggattgtatcaagtagatgggacaacattctgctctgaacgaaaagtaattttagagacataacctgcttaccaatgcctgtctttgattcatattctactttcaataaagcatgaaagtgaagaacttgtcctaagtgtggaaaagtgtcttcagatttagactcttctccatgtcagctgcagcgccacccgccttacacctgcccggccgtctgtctcttggtattgggtaaaggagggggcacctgcatgtctcctgcaatgagcaaggaattatgtctcatgttttgacttcagaggctttttgctttggtgcatttcagaaaggatggagaacatttattatgtgtgaaagcatcctcttccggttttgctgttattcaaaagtgggaaatgtacctggcacgtttgaaaataaaaaatctgactacctatcagaagagtaaatcagactgaagtacatttggataacacaaggtttctataaaatttgttcttcctgtcctccatgtcactgtttcttggacctcagttctctttttgaaagcattattccaaaatgccctgagagggtctcttagatcattgtttaaaaaaggaaaaaagtatatggatgtgctgtccatccaactcaggattatcattcttagcaacacgtaaccgaagcaatattcttaagaatattgaaggggtttttttaattgaacttaagactggagtttttcctttgaaaaaaaaaaaaaagttttctctgttgagtccgtctgtgtaagtttgtggctgagatgctagcttaggcatctctcttgttaacacttttcttggccttgggtttgtgcaaggctttttccccctttcatgaaaatgtgaactcagatcatggatggggaaggcagattttgatttgagacccgataaccttggcagcatcccttttgaatagctccttttgtcagagtaattacggccatttggtaaaattctaacttcgtgtttgtgtttcccctctgtgtttctaatgtcttcagtctgtgtcccctgaggaggcagggggtctctaatgagcctatctatgggggaaggtgagagctgcacacagccccctgagaaaccatcctaggagtggaaccaagggaccaactgttctggccttgaggttggcacaggggaaggacttgaagttgagctg

SEQ ID NO: 52025 - DNA, 1100 bp, Homo sapiens
gaaaataacctataaataatggcaaaaaaaaaaagcaaacaataggaagaggaactatataaaaggaacatttggagcatagaagagagttcatggaaatgtaaaaaatgatggtaccctgggtttgatatagtaagtaaaaaactaagggtaagagggtcatgaaagcatctagaagtaggagggaaagccagtcaaattcacaggatgaagtcaggaagataatagagcagtgcccgcaagatcctgagggaaagcaagttccaatctataagtctgtaaccctcacacctgatggccccttgaacatattcagggcttcaaaagattgatctgtcatgcaccgtctgccatgatactgtgtgaggatgtgttcttcttcttaaacattaaatcaagaaagaatcaacagtggacccagtaaatagcagatcagcctaggataagatgccctagaagatggtgaagggaagtctcagaactactgttcttcagcaggcagcgaagacacctgatccatattggagtggtgggatgcgagcttcaggaagggatgccacaaggaaaagtggaagggatgatgactgtcttcaagaggttacaggtctttaagaatttacacgtgaattggagataaatacagagaaaatgaaacacatcagtaattcagtagttaccaagcccagaaagaccaagtcataccatgtagtaaatataaccaaggtgcaccaaggcattcaactgtgactagtattaatggcgtaaaaagtaatgccagcgctggagactggcttaacaacaacaaacaccacttcatcaggaggatgggtcggggcaggtgctatgtaagtggtaaaacagctgtttgtatccttcactgaagaatttattagatttttatctaaaattatgaagtaggccaggcacgatggcccactcctgtaatcccatcactttgggaggctgtggcgggcggatcacttgaggtcaagagttcgagacgagcctggccaacgtggtgaaaccctgtctctactacaaatacaaaaattagccaagtgtggtggtgggtgcctgtaatcccagctacttgggaagct

SEQ ID NO: 52026 - DNA, 2045 bp, Homo sapiens
ggtttcaccgtgttggccaagctggtctcaaactcctgacctcaggtgatctgcccgcctcacctcccaaagtgctgggattacaggtgtgagccactgcgccaggcctcagtgacttttctttgacagtgtcttagaagcccctactttcactgggcgcagtggctcacccctgtaatcctaacactttgggaggttgaggtgggtggatcatgaggtcaggagttcaagaccagcgtggccagcatggtgaaaccccatctctactaaatatacaagaaaattggccaagcgtggtggtgggcacctgtgatcccagctactcgggaggctgagacaggagaatggcgtgaactcgggaggtggaagttgcagtgagccgagattgcgccactgcactccagcctgggcaacagagggagactccgtctcaaaaagaaagaaagaaaagtcattgaaccagcctcatttgcccaattctaccctccctaagggcctaacttagtcgcttcccattgcctcttttgtttcttcttggccaaaagaatccctactgtgccgaataccaccacatcatgtggtagaatcattgttcaggttttttattttgaactgtgaaatgtatgcttttcaaaccttggagcccccgttctggtgtgataaagttaggccctggaatgatgaggcagacccatatctaccccatccatgcacacacacccctcatcccaccacctaacccctccctctgtttaacattctgcatttcctggaagtataggttctgtgaaatggttttgaaaacacattgagttgctagatcctaatgatcctgtctaaagtcctaaaacagcctgtattgttgaacggtttgtacttcacatgggcagctagagtctgtactggtcattggcttcattatccttgcagctaaccttatcataagctcagacatcataagcttcctcctaaaaaggaaatgggtatcttgttcttgctggtgaagtgggacaaaagtataattttaacctaattggtattctgagaggaccagtataactttttatttgtacccctcactgccactacgagtatcttagctcacattggtttaatcagtctttagtaaccccagggtgtctaaacatttccatgtctaaaggtgtctttaagaatgggaaaatagtcccccctgcctttcctcttcacacacacagtataccacttctgcagtgttgactctagacccatagccagcagggcatctgctgttaaacctggacgctgctggctgtggctgaaactgagttatctactggacagtgtgtttgtgtcttatagcaatatcagtagttgaatcatgggccatacttcaaatttcagactccctctcccttgtggttttgaattgtcttcatttgttttctaggctgatgaaccaattgcagattatgctgcaatggatgatgtcatgcaaggtaaagatgaatttgttttaggaatctgctgattaggttttagacggaggtgggattttagatattgaagctttagtgtacagtgcttttactttgaaccttgaaaaaagcttccacatattgttacagtagaatacattatcttaaaagatcatagaaaggagggaaagatatctacaaaaacttggaaagctaacctgaggaaactgaaataaatgtgagctctgcctgtggaggaggtcaacaagaagcaaaactaagtcagattgcagtgccccagacaggcacacacaaattagaggcctaggtacctctgaaggtgggaatgaattgtgagcctaaaaagaagataacatgatacttgtttggaaaactgtataagaagcagttagacaactctctacctttcacatccttgtcacttccccatctccacctggacctcagatgggcacccagaattatgtgtttccacacttggaaaaattaaactagaaaggtgggaacgaagcctataccaaataggagaccatctcttagccctttgctcaaattcgggcagcccat

SEQ ID NO: 52027 - DNA, 1032 bp, Homo sapiens
cacacatctgtagtctcagccactcagaagccttaggtgggaggatcccttgagcctgggagttcaaggctgcaatgagccatgatcgcgccactgcactccagcctgggtgacagagtgagaccctgtctcaacaacaacaaaaaaaaaagaaaaagaaaaaagaaagaatttggacttgacttgttgatgaaaggatatggggcctgggaaagatgaggtgacagtgatgaccttgcccaagcctcagaatagccatcagcccagccccactttttattcattttatttccccacacctccatccttgggaagctggtaaggtaaggaacaaacgcatctatatgtgtaattgtttcctaatactctaccagacctcttaaggatgttcccggatatatagggacgatagcctcagtaggagtataacaagtaggctgactgtaaacaatagtggttttgtactctgaagccttttttttttttttaagaatccatgcataatttatttaaatagggtataagtcttagtattttgcattatacggactttctctcttttatattggcacagatcatgcatgcattttcagttgctccttttgaccagaatttgtcaattgatggaaagattttaagtgatgactgtgccaccctaggcacccttggcgtcattcctgaatctgtcattttattgaaggtaagtaaacagctccttagctgaagaactcaaggttttacatgttacataactatgtgtaaactgtgtgaaatggtggttaaaggatgccttgggtctttagcagagggtagtgataaatgactgctgtgggtttttgcagctcagcccaactctggctgagccccaggagacttagaggaggtcaggacatcatctatcttgttcttgtgtgttatagtaggtgatgttacgccacagcatcagcaactgctggtaccctgagaaggtgaaagtgaaggctttccttggcctttcctggatcacctagatcagtttctatgcctttgtgg

SEQ ID NO: 52028 - DNA, 1123 bp, Homo sapiens
tcacccaggctggagtgcagtggtgccatcttggctcactgcaacctccgcctaccgggttcaagcagttctctgcctcagcctcctgagtagctgggattacaggtgcgtgccaccacacccagctaatttttgtatttttagtagagacagggtttcaccatcttggccaggctggtcttgaactccttacctcgttttccacccgcctcagcctcccaaagtgctgagattacaggcgtgagccaccgcgcccggccttgatagagttttaaaattatctttaccttgatgttttccaaattgttatatagatttattttagatatgtcctctccatccccctcaaagcatgcattgctttacaaatcagttccacggctgtagtgcaggcattatgaaatggtttcatgatactgttatttcttggtatcaatactgaagtactataaataagcattccagtggtaaatctcaaaccctaggcagaaggaactgataaattcaagatgtccataaaaaattctggcccctaatctgtttcagtcactgatagatatccaaaaagttgaccaaatttcctcctttgctacttttatgtggcatagtttactggttacacatttttcttgttgctgatatttatcattgtaattgaggcaaaagtacaggccttcctttgagggtgttatgtattccagattgtcctgacaacagtatttcccttggttgaacccatggctctgaaaataagtgtgttggcataatatctttactctgttattgtaccttttacatctaagaaaccttgtttctatcactggctttctgcctgtcattgggaaacctcgaacattcaaaacctttaaattacagaaagagcccctgtgcctaaagacatttttaaaagcctgtgctgcttttattatggactacaatttttgaagaataaaccagaagtcagcagaaataacccttccatctgagagcatgtacctgcccgaatgagctgctagaagatggcagctgttcacacagcccccagaggtgctcttcctgaatgtctgtctcatctcccactcttgcttcagggaccactgcgggccaaacagagtcaaagaaa

SEQ ID NO: 52029 - DNA, 1035 bp, Homo sapiens
cctcctgcctcagcctccaagtagctgggactacaggctcatgccaccacgcctggctaatttttggttgagatgggtcttaatatgttgcctaggctggtcttgaactcctgggattataggtgggagcctcctcaccaaaccttaaatgtctcttgtaacaaacatttaaactgcttacatgcacttagaggtgtgtattactcattattttcttttatcaattttatgtgagcctgctaagaaagtctcgttagtttctactcattgtttacattgaatttcaaatagttaagggaccaataaggaaacagcttttgtttacctgaaaaacttcatgagcaagggtcacattgtggttaatttcagtgctttcttcatttccaatcttcattatagagcaatggtggaacaaagcggcaaaagatatcccatcaaaattatatagcctatcaaaagcaagttattcgccgaagtatgcgacatagaaaagttcgtggtgagaaagcacttctcgtttctgctaatcagacgttaaaagaattgaaaattcaggtgagggaaacatttgttcaagtttgctctggacttaaaagggcctttatgaattcctgctttccacctgtatttacatatatgtatgtatctgtgtttttttccagaagacttaaagttttcaaaatagccaaaaatctttttgtgaagatgaaagtgaattttgggttctggaaacttgggctggttctgcaatagctttccaataatgagaaacgctgggaaccacttaatttgtcacatgttgaggttgtgccaggataactgttctctcactttattgtgctgtatgcttttctttgaccacttaataggtattggaggctgttaccaggaactgctgtgaaatttaatgggagataaaaggcagcttattattagcgattagtgattgcttattcactaggctgtcacagtatttttggtggcagataaatctatttgatagatagagggggtttttttttttttttttttttt

SEQ ID NO: 52030 - DNA, 1050 bp, Homo sapiens
tatccatcccgattcaggactccattctcttttgtctgtttggctggcagtaccgtatgttttagttattatcacttggtagtatggcttaataatcagttgggaatcaaatttttttattttgagaccaagtattgctctgtcgtccaggctggagtgcagtggtgccatctcggctcactgcaagctccgcctccgaggttcaagccattctcctgcctcaggctccccagtaacggggactacaggcgcccgccaccacgcccagctaattttttgtattttttagtagagacggggtttcaccgtgatatccaggatgggggaatcaaatcttttattgcctgctgtcactaattatctgttctctggttaactttgtaaattagtttgttaaacttgacacaatgttcttactgtctttagtttgttattttaagctttgcttttcaccctaagagttatttagaaactatctacattttcaagtgatttagattttagaaagctaacttttttttggtggtctagttttattcattgtggtcatgaccacagcaattttttcaaagtgtatgtggaatcactctccttagttgtggatgacaacagatttcacgtttataaatatgatagagaatgttggggaacattgctttttatactgtaattattttttatactttataattttcttctgtcttccttttccttctttggatattgtaatactctaaaatgttttacattttgctttctcacaaaaaatttttggctcacaaaaaatctcaagtgtaaccttcctctttggaaaagaatagatagtccctgaaaaatgttcagcattttcaaaatgtcaccctcctcatcacatatctcagtacaaagatagcttctgtaattgctgctttaaatccctgtaataaaaaatgatgcatttctgcttgtccttagtggagataaacaaatcccttttcctcttttctctaagctagatcaacccaactcctttgacttcatctaaaaatttaggttaataatatactcggt

SEQ ID NO: 52031 - DNA, 1686 bp, Homo sapiens
taccctagtggctattgctggtctagaatgaaatttattccaagaagggatcatgatatggaatgaacgaccatacactatcaggttttatacatcataccaaggatttgggtttattcccagtgtagatataagcccctggagagtttcaagcaaggtcatgatatgatctgatttatagtttaaaaaaaatcaccctggctatagtgtttggaattgctgtgagggcataacagaaataagagaggtcagttagagcctcttccattgacctgcaaggataggtgaaattgattggatatgtttgggaagtggaggtgttaatacttgcttggattggatttccaagcatttttattatattagggatggctcttgggtagatcctgacccatatctctagatatcttattaatttatttaattccatgctttctgggattaaagacaaaatggaatacattttatttgatgcttgtttccaaacacattttttagaagggtaacttataattatgccctggaggccaagggttctgctttacaagctaaataaactaaggccttcatttcctaatttgccgagaaaatgaagttaatgagtataaatgtctctgtttctccctgtaaaattttcttaaatcttttgttctctggtataaaatattatccaatttagatgtagtttcattattcagtttaataagagtatttcatagtgtttgcaagagagcgcttcttccatctttcgttttctcaattcttaaagagcatgtaactcctgccacttgaatagtttgagaacttgaaaaggcttggcaatcagtgtgctcgggaaggtgtcaagcaccttcgaacttctgcaaaataacatcattgtacaagactgataataataactgctctgcagagacctcttaaatgtatggtgagcacattaaatactacaagaataagtcatagggtaaaaaactaacatgttaaaagagcatagaaaaccgtgaaggcttgattcttgatccactctccagtctataatcccaccatgataaaggtgttcctcgtcttgataaaggttgccggtcccagcccccacatcctccatagcctgccttcctagggtctgacctacttctctttgttgtcctggcacattcaggtgatgaaggattcggctccggaactgaatgtgagtagttctgaaacagaggaggacaaggaagaagctaaaccagatggagaaaaagatccagattttaatcaagtatgtgttgaagctgcttttcattgttatactttctgctgttcttatagagcagccactcgaagcccctggccatgtctctgtaccctgtatgggatattggttctttttttttcttttttttttttttttgagatggagtctcgcactgttgcctgtgctggagtgcaatggcactatctcagctcaccacaatgtccgcctcctgggtttaaatgattctcctgccccagcctcctaagtagctgggattataggcgcccaccaccacacccggctaattttttatatttttagtagagacggggtttcactgtgttggccaggctggtctcgaactcctgacctcgtgatccgcccaccgcagcctcccaaagtgctgagattacaggcaggagccaccgcacccggccttttttttt

SEQ ID NO: 52032 - DNA, 1045 bp, Homo sapiens
cttctctttctcccacccttcctctcacactaaccactgtactgaatttagagtttatctgtctcagaaagtattctgtaaaaaaaaaaaatgcacgcacataatgtcttgcatatttaaaactttttatataaatggcaccatactgtatttatacttctgcaactaacttattttactcaattatgtttttgagatctaaccatgttgattcatgtaatttcagtccatttagtttcgctgctgtggtaacattcctttgtatgaaaaactattctttgttgatgatacgtatcttttctctctaattcctttggattaaatgttagtgttaatggttttggtttagcagactaatggattatgttaattctcttaatttccatgtgtcttaaggcatgttgtgttttttttttgcacagtatagctctcatatggcccagtgagtggcaaatgatacaaaagctctttgttgtggatcatgtaattaaaatcacgagaattgaagtgggagatgtaaacccttcagaaacacagtatatttctgagcccagtaagttttcatattgctttcggtttctatagttaagagctgacattttaagaagaaagggtgtgtcagtgttgtctgcttaaagttaaagatcatgcggcggtcccaactccctaggtggaaactctcattataatcatcccattatttgtacgtttatttatggacagtaaatggatttccttatcatttgcatgtaatagaatatagtggttaatagaaaatattattaagagtttgggccagcacactagctcatacctataatcctaatactttgagagactagggtggaaggattgcttaaggccaggagtttcagaccagcctgagcaacataacaagaccttctctctacaaaataataaaaatgtagcacatatctgtagtcttgagctactcgctgagaggctgagtcaggagcatggcttgagcccagaagcttgaggctacagtgagctatgttcataccactgtaccccagcctgggtg

SEQ ID NO: 52033 - DNA, 2280 bp, Homo sapiens
ttacaaaatattattttaatgcagtgtgatttcaagattagtcaaatgggaggcaataaagtctgcaggaaatgataacctttgagtgtgggagtagatgtaattttgttaagcagcgcttgccatggcacagaggtcccaggactcctggaatcccatttttgactacttccttccttgcaaggagaaagaaaatgcacggttttagctttgtacgtttgtttttatctcatgatttttttttcaatcacagacctagattaaggacgtaaaattgaggttaatggctacctcctttagaattaaaatgaaatcggaaattcagaagtttttgaaaacaagaaaagagagctagaaataccaaactttagcaaagcaagaaaagcgtacctgtggatttttcttaagtttaagaaataggaaatagataatgactttttttcagctgttttttttttttccaaatatatttttttaaactcaggtgagttatgcatatctgaaaatgaaagaaggcttgtttctaaagaggcttggagcaaactgcagcagtactttccaaaggctcctgagtttccaagttacaaagagtgctgttcacagtgcaaggtactgaacgctactgacatctggggaaatggcatgccacctccctgggttgacttcccaggggaattaacactgtacttctgacgggggtgtagggaggaggcaggtcatgtgctgtcagcaggagacagttgattgcttcattctctttcagattttagaaagagaaggggaagaaaatgaagccttacataagatgattgcaaacgagcaaaagacttctctcccaaatttgttccaggataaaaacagaccgtgtctcagtaactggccagaggtataatgattcccacaaaagaaagaatgcatcttttctttttaaagcccttgccaaattcccagtgagctatttcagaacaacccagaacttctcatattctcatttgtttagttatctaaccaggggatttactccagcctgctattttttggtagaggactgtgttttcattttatttataaaacttgaataaggacaaccaaagtatattataaggaatttgtgttaagcaggcggtgaattgacggatactgttttgtgatttttgtgttctaggatacggatgtcctctacatcgtgtctcagttctttgtagaagagtggcggaaatttgttaggtagaaacaaaatatgttttatttcctttattgttactgatttggttgactctggtattttttaagatatcgtggattctgtttgttgtacccttccttcatggttactttcaccagcatacactgaaagctttcttttctattaattaaatgaataagcctaagaaacacattgaattactaatattttcttaaatatatctctgattttgaaataattattttaaaatcttctctttcgtcatgcagtaattaggtatatttctcctccttgtctcatttgagtagaaagcctacaagatgcagccctgtgtcatcagttgggaacagtgctcttttgtgtccccacgggggcctcatgtttacatttgcttccatgaccaaagaagattctaaactgtgagttccttctcttcatgtgatttttttttcttcttttctctttttgatgattaataaaatatgtttaggaaatttctcatctgacatagtctgttttaagaatttagtcctttgctgaattgtggggtttttttttccccttttaaaagagaagaagactgcttctccaggaaagacaagaggctgcccgaggctatttgtctttttgctctttccttgtccctcttgaagacaacacagccaccctttctcttcccccgctgctggtgaccagtgctgagacctcttttccagaatcacagaatcaacatggtcttggttataggttttgttctgccatggccaggcttcagacaattaaaggaggaggctagcagggtggcagagcaaagccactgcactggtcatctggaattctagggtcttagaacccaaattttattccatgcttcaagtacttccagaggtgttcatctgtgaatttctcccgattttaccaaaaatcgtgatatacgagaaggtagaatgcttccaacattgtcagaaaatcaggaaaaggaaattggaacacataaataaaaatgcccttggggttaagctagagttttattattcatatttcagtactttaacatcatttaagggagttca

SEQ ID NO: 52034 - DNA, 1003 bp, Homo sapiens
tttgctgtcacactacaaactgtaagttatggccacagtgtgagttaagatggaaaaggcattaaacttgtgggtggaagacatgaacagaaatgtgccaatggatgtttattgagttcggtggtaggttttaggcatccattgagggtcttagaacatatgccctgactgatcagcggggagtactctgtttgatgataaaggttaagtccttatttaatttgcctttaatgctttgtgttcacccccaaaaagtgtaggtaggtgaaaatgacatgccatgacatgacatgtagatgattaacttggtttatgacacagtattctcgatactttgactagaattaatagaagaattccattttttgaatttaaaaaagcacattttcttgcataacctaaatctttaaaagttaactgtcattgagatgttcctctttccttttaagggaaagaaatataacactttttagcagaactgtgtaggaatcacatgggtctaattttcagagttttaaagttttctttgttccaaattgtgcagagtagtatatctgctactttcaactttaagtacacaataaccacagcagatatcatttgtatttcttttgattagatgaatcaaaggaagaaagaaaagaagaggaggaattaaattttaatgaagatattctgtgtccacatggtaagctagaagcataaatgaattctgttttattgtccttttttttacttttagcttctactgcctggctttcatgccagtatctctcacatcttacctgggaaaaattttttttaatagaatttccccatatttagaggaaatcattggaaaagaaacttcttgtcacttgttccattgaagtgcttttgaatttgaagtattgaatttcagttgtttcccatgactgtcattgtccaagttaaacactttgagaatagtgctcgtatgtttcttcttcttcatcttgttagggctatctatggttttttattt

SEQ ID NO: 52035 - DNA, 6403 bp, Homo sapiens
tcagatgtttttgatgctgtgattgttctagactttataactttccaaagaaaatgtgtcatgttcaaaatccaggtttttttttttctttttaaagaactttgaaccaaaatgtatatttccctgtggtaaatattttaatattttgctttcctcatcaaatgctgaggtttcatatagtccggtatctccagcttgataataggagagttctccctcatttggagttgattatgtccatggcctttggaaagcaatgcttgtagtttactgaatcacaaatactagggaatatatttgaggggcctacttagagtctttttctagtgcagaaacatctgtagtgtaaaaactttgccacaaacagaatctgccttaactatgagacttgtgctccacttgtattctcaggcaagctcttggcagagtcagtgcaactctttatgatgatagagactgaaaatggaaagaaagacagacttctgtgaccatagtcactcttccttcatggagcccacagcgcactaaagtgaaatctggagaacttgctgttagtagtaagcatggtattagattagaattataggcctgttctctgctttctgtcttcctcctcttactataaaaccgtacatagtttttctaatcattgtatcttacattaaatttatattgaacaattcaaaaaccaaaacaacaagctttccttggaagttttctgtgagattggaaaatgttgtcttgcctttgagccacattgttgctggacagtcagggccacagtcaccctaggctttgaattcctgcagacatcccctggcaaggagggctttgtgcattttgagctttcctagattcctttcattgtgagggccaggattcttagggtgttttctttcagttagcaataacagatactgctgtctgtccactcctccccagctgctggggaaactaggatgcctagtgacttattcttgaatgttgctctttatcacaatcctgttttttctcctttgatagccttcatattgcttaccattttaatctaattgactgtccttgggaaaagatgagagtatgctaagactttgatcttgctttcagaaagggatcatttatctttgcattccccagatacccagtgtactctatccctggcagattaagcttgataaatggcaaataaagtcgggaggcattttgaatgtaattagccataccatgatatactgtaaagtgctgcagctgtgttacatatactgcatcttaaagtctcctcttttttttttttgagatggaatttcactcttgttgcccaggctagagcgcactggtgcaatgtcagctcaccacaacctccgcgtcccgggttcaagtgattctcctgcctcagcctcccgaatagctggtattacagtcgtgtgccgccatgcccagctaattttttgtatttttagtacagacggggtttctccctgttggtcaggctggtctcaaactctggacctcaggtgatctgcccgcctcggcctcccaaagtgctaggattacaggcgtgagccaccatgcccagccaaggtctcctcttttatatattaagtttacgtaaatgtataattaacttttccatatctcttttcttccaaaaagctcaaaatgcttcacatagcttatcttttatactcaacaacattcccatgaggtaggtagaaggcaggtattattaccttcattttacaaataaaagactggaaacatagaaagtttaagtgacttgttcaggttcattttcttggtagcagaacttggattagaccgtgacctcgactcacagtcctgtgctcttcctctggagccacattcgacttgaccagttagaaggctcttagttgatgatgtacagtgccaaattttgttttcataaaaattgagatggtttactgtaaaattaaaatgggagttagttttctagacatgtaactctctggggagtataaaactggtcacaatgggctttgcgttgaagtatctgtccctcagatctcatcagaaggagtatataatacaaaaatataaattcaacctctgtatgttttcttctatgttttatgctgggactcactggagatctttgtaagtaatcaaagctggccctttatctttgattttggcttttagggaattctagggacttcctttccccaaattaaaactcattttgaggtgtttggttttgtcttttaatttttgcaacttcaaaattgatgactcagttctagtgtactttatcctcgaacttgtttaaaataggttactttcttgaaataaataataatataatgaagagatcatgacttggatttgggtgggggaattaaataccttttcaaaattgccatcagtatcatcttggatgaagaaagttcagtggttaaaagcgtcttctgaagtgtggtcatagtcggtgaggtttatttcagtttggcttctcattttaattttcagatgtatatcacatatatgtgaaaagtactgacaaaaataatttatgaaataaacacagtagggcatgaggttgtgttatttgtgaggcagcaatggagcatgacttgtagtcaacaaacatgggtgtcctgatcaaagctctgctgtgctattcggcaagactctatgtggatgcctcttgtagaatgtggttaataataccagccgatctcatagggcactgtgcagactcagcattatggtgcacagctccttgaactcataggagtggcacttaactggagctttgtgtcgtactcatcaaacatcttcccccagacaatgattcttctgattctgctaactctggacagagtttgcattgtcttttgagaaaaatgaatgtatcacttagtcaaaaaactgtaaaaatacataggctctttccgatgcttgctttctcagagccctatgagtttgtctctctggaatggctgcaaaagtggttggatgaatcaacacctaccaaacctattgataatcacgcttgcctgtgttcccatgacaagcttcacccggataaaatatcaattatgaagaggatatctgaatatgcagctgacattttctatagtagatatggaggaggtccaagactaactggtaattcaagatgtcctctctgtttaaaaaagagcagctcattaaatcttcatcttatggtctttatgagtgtggcttatgatgatttgacccaaactatgctagaccaaatattccttacactttgcacaaaggatttgctaaataaagtagaagttaagcaactgatgctattcatagagggttggttggggttttttggtttgtttttttggtttgtttcttttaacccctctcaaagcagacaaaataggacccttttaagaaaactgtctggtagtagtttgttactctgtgtaatactgtttaaggtacttgagcccttgtctggttaattgcaagtttgtgcctccatgttatggtgacttctttttttttttttttgagatggagtctcactctgttacccaggctggcgtgcagtggctcaatctcgactcactgcaaccttcgcctcctgggttcaagtgattctcgagcctcccgagtagctgagattacaggtgcgcaccaccatgcccagctaatttttgtatttttagtagagacggggtttcactgtgttgcccaggctggtctcaaactcctgggctcaagtgatccactcaacctcgccctcccaaagtgctgggattacaggcaagagccaccacacccgcccagctatggtgacttctaacagtgtgtgagctgtagatggttacttagtttatgaatggaagctacttgattctcccttaaatatagagctatatatgaccacatagtacccaaccatagtattttgttttggctgcctttctgttgtgcctccttgaaacatttttctttttacatgagtagctgccaacacaatcctccctccaattttcagatgaggctgtaggaaattacatgacacctccctccccaatacactttttctgtaattaagtgctgttttctaatggtatacaacttattgcataaaacttgatatttaactacatgctgcaggccttctgttaaacacgactggagttttgcttcctaaatttctgggaatttttgtttttgtttttttgagacagtgtctcactctgttgcccaggctggagtgcagtggtgcaatcacagctcactgcagcttcaacctcctcaggctcccgtctcagtcttccaagtagctgggaccacagacatgcaccaccatgcctggttaagttttgtattttctgtagagatggtgtttcatcatgttgcccaggctggtcttgaactcctaggctcaagtgattgacctgcctcggcctcccaaagtgctgggattacaagaatgggccaccatatctggcccctgttttttttttttttttctctgagacagagtcttattctgttgccccagctggagtacagtggtggaatcgtagtgcactacagcctagaacttctaggcttaagcagtcctcccacctcagcttcccaagtagctaggactacaggcacacatcaccatggcttgctaatttttacactttttgtagagacagggtctcactatgttgcccaggctggtctcaaactcctgtcctcaagctaccctccctgcttggcttcccaaagctcttggtggtatgagccactatacctgccactgttcttaattcacaatgaataaaccatgcaataggaagagcgttcacattttagatgattcctaaaacttctttgtgttttaaaccaggcccttcattttgcttttccttttagtgtgctttgaagatcactttcacatgaagatcattatttataattatcagctatatttaacccccccaccttagaacctcagtgatttgattatcatcttgtaaagattgcatgtaaaccttgtcagatactgtatttagatacttttaatgtaatacaacattttgtctctcattgttctttattcagataacagtattgccgtcttggtttctaattgtcttagtaaaataatttagggtatataccaatttgccatattgccaacatttgtgactttggtttagaatgtgtctgtgtttgtgaagtgctgaaaacattttcctaacaggaagtctgtttgaatgaaatatatttcctttcattctttcttgcctgtagtgaaagccctgtgtaaggaatgtgtagtagaacgttgtcgcatattgcgtctgaagaaccaactaaatgaagattataaaactgttaataatctgctgaaagcagcagtaaaggggtatgttgcacagtgtacattgttaatgataaactaagaagttttcaagaggtcataaccaagcatctcgttatttattaaaaataggaagttgggatttttagaagaagggtgataaagtggatggtagagccagatcaaaagtaaattttgcaatgactgcccctgtggcaacgataaagaaaactgctgagtcagatagcctttgccactgtattccatcctaccatttgattggtgtgattggcttgaaggtaggaaaagcaggataatatttagaatggaaacaaaatattagatccctgcagttcaatagtgaacagagaaaatgaccgaaattaggaagtgggttaaaatcaattacatgtacagtagctgatgttgagtgtttgtaattcactttagttgtttttacaggcaaagaagggaggacagtgtttggaaatattacttatatgatttaacattctctctgttccacagcagcgatggattttgggtggggaagtcctccttgcggagttggcgccagctagctcttgaacagctggatgagcaagatggtgatgcagaacaaagcaacggaaagatgaacggtagcaccttaaataaaggtaacactttaaacctatgtgtagatcattgtgaaactataccatgaaaatataagtgggccaggcacggtggctcattcgtgtagtcccagctacttgggaggctcagacgggcagatcacttgagcccagcggttgtgccagccccactgcactccagtctgggtaacagagtgagaccctgtttccctaaaaaacaattttagtctgggtgcggtggttcatgcctataatcccagcactttaggaggccgaggcaggttgatcacttgaggtcaggtgttcaagaccagcctgagcaacatggtgaaaccccgtctctactaaaaatacaaaaataattagccaggagtggtgttgcacacctgtggtcccagctactcgggaggct

SEQ ID NO: 52036 - DNA, 1840 bp, Homo sapiens
cccgagtagctgggattacaggtgcgtgccaccacgcccagctaatttttgtatttttagtagagatggggtttcaccatcttggccaggctggtcttgaattcttgacctcacgatccacccgcctcagccttccaaagtgctgggattacaggtatgagccactgcgcccgcctggcgtcatctattctaaagtggtgattttgagccattcgattgttctgggaggctgatgatgtcatggagagctaggtggggggaatcaatttaggattattccagtggctgtcttcacttttacttctgccttcagtttggaggtttctagcagacagggagaccatagttggaatttctgccaatgttttaatcagtatttgatatgatttagagattagcatggttcactatatgtgaaaacaagaataaagttgttttttgtctttctgttttgaatagcctttcttcaagagctggtagatcgggataattccaaatttgaggagtggtgtattgaaatggctgagatgcgtaagcaaagtgtggataaaggaaaagcaaaacacgaagaggttaaggagctgtaccaaaggttacctgctggagctggtctgtaagatattctgggacagcactgttgccattaagtgccttgtttttttatgttcacaaatgtatatgaagaaactttctcaaacttactctttctaataacccactaaagccagcttaaacactctaaaagtactttgtaaaccaacaataacttgatgtgtagcattccatattatttcattacgttgtactcctaaaaatgggaagctgttaataaattataacatttaggtcagcactctgcatccatgagtattgtagatatttatattttgtgagatattaacttgtttaagaaaaatccgattggattactatggaaaaagcaacttgcctgttctgtttctttgcatactttgtgacctaacagttttaacagacattctattatatgaatacagtttttttgatactattagattaacttgaagtttaataccaaatattatgctaagagtagaaaagctttctgctgacccctgatttcttagaaatatcccacataatccagcttatcccttttctgtatatgtttattcaggtttacctgatgtctcaaaatgaaaccaaattaagcctttttaaaggctgatgtgccatttgtattaagttatctttgtcattttaaagacatgaattccccaagcctaattcctacttaaggaagagagacaatttagtccttactttagaaaataaatacttaagcataattgtacttgtggtttgtctttttaatatcttaattttccattactagtataactttaagcaaaatgtaaacaaaaattgccaagtctataagaatatattttaactaaattttaattcaattctgacccttctttgtaatctgttactttaactctgtccaagggttgggattaccctaaataattaaactgaccttaatgtaactggaaatgatttggaaatgaacccatgattcagatctctaaatttataggtctttgttcaaaggtgttgggacctagaaatctattttccaaactttattcacggtttcctgtgtccactgggcaagagaaagggacttaactgggtctaaagtgaaatactcatttgaaccactctttagaactatagagttcaaagatgttatgtgtcaagttagcactgtgcttcctttggctgttttcattcagcatataggaaccttatgttcttagaatatgcttatgttcttagagtatttctctgtgtt

SEQ ID NO: 52037 - DNA, 1024 bp, Homo sapiens
gcttaatttttgtattattagtagagacagggcttctccatgttttggccaggctggtcttgaacttctggcttcaagtgatctgcccatcttggcctcctagagtgctatgattacaagcatgagccactgtgcccggcttcagttaatttttgtaatttaagactaacataaaaatcagcttatggcaatagtgatttttttgttgttgttctaggtttgttccccagaaaaatgtattttctttttacctttaaaaaatagaatgtggcaggcaatagtggtagtaaacttttttaaatattaaagctaaagagcctgccaaatttctatggcctttgaatgttttagattggtgttaatgtgtcttgggtgtatattttggaaattgttttctatagccccgctaaagaataaacaaactctaggcacttaagttaaggtaccttttgatttctctatctcagcagaaccttctaagtctcagacacgtaaacccaagtgtggcaaaggaactcattgctctcgaaatgcatatatgttggtttatagactgcaaactcaagaaaagcccaacactactgttcaagttccaggtaaagcagttttccaggattatagcaggcaaatgttttagaatgccatactcaaagattaatgataagtaatggattgcttttagttactatgataaattgattccataaggtgaatgttggtgaaagtaaatattaattgcaaatttacttttaagaaaggagcttctgaaataaagcaatgcaattattaaaaaatcagaaagtaatcaaaacatgtatttaaagtataatttggttttattttgttcggtttatagagtatttgtgaattttatttaattatctatagatattctagacttcataatataaaaggtagagttgttgctgccctgaagacagtctgagtctgaatcattttactcagcacttttctaagcttggtggcatcatctattctttcttttttttttttttttgaggcg

SEQ ID NO: 52038 - DNA, 1045 bp, Homo sapiens
attacaggcatgtgtcaccacggctggctgattttgtatttttagtagagacaaggtttcacaatgttggtcagactggtctcgaactcctgacctcaggtgatccacctgccttggccccccaaggtgctgggattacaggcgtaagccactgcacctggccttaattttttctatttttaatagagacagggtttcactgtgttggccaggctggtcttgagttcctggcctccagtgatctgcctgccttgaactcccaaagtgctgggattacaggtgtgaaccatcatgcccggccaacctggcaaaaatgtttaaaacaatttttttgtggagacggggtcttacctggttgcccaggctagtttcgaactcctgagtttaacagtcctcccgccttggcctcccaaagtgttgggattacaaggcatgagctaccacgcccaggtagcaatgcttgctttttaaaattttagttaaaaaaatttacaattattttgttccagagatggttttcataatgtcatgttttcagtaaagcttgaaggcaaatgatcagtttttaattaccaggtttatttaagtgggtaggggaggatcatgggcattaagttagtgatgatgaatagtagatttaatgtagtaggatttgtaattattttccttgggtcaggaaatttattttggggaactaattctagcaggtaaactttgtttctccttcctttaagtatcttacccaaatccttgagcagtgcttctgtggaaaatgagctggttgctactgtgtagtagtgaggtctgccataaagactacttcttaaaatagtatcctagtatgtactttcatcacctcagttgtcttgggcctaagtacccatttattttccaaaggaatggacagtttttctagttggagccatctcctgagctccatctcctgagctgtttatcactttcttcccattgtctgtcagacaggtataggcaattgtccaagggcacatactttgttctggaaatctaacacacagcacagtga

SEQ ID NO: 52039 - DNA, 1089 bp, Homo sapiens
tgacattcgtgtctccctggtttgtataagttttaagtttcgtaacacacagagagtatgaacagccgattcttgggaagcgtgtggcctcgctagtgtgtgctgaagagcacggtgtgtagtagagtagcttatattccctgagtgcccaggaggccgtagtttttcatccgtgtattttgcagaggcttggagaattaatacagtgtgctgttcagagtgtgtctaagagagtgttaagggagtgtaattatacattattttgtaaaactaatttgtaaaaattttaggtgacatgtttttagttataccacatgtgtaaagattcgtaatcattacaattcaggctcaggatataagaaataactgttatccaacgtttcttttactttctccctttctctccaggtgggtcctacgtgtatgaactcagcgcagtcctcatacacagaggagtgagtgcttattctggccactacatcgcccacgtgaaagatccacagtctggtgaatggtataagtttaatgatgaagacatagaaaagatggaggggaagaaattacaactagggattgaggaagatctaggtaaaacctttaagttgtgagtgcccttttaaaatataaatttattttactagaaatatttgtgataaattattatggctcaagattgttatgttacagactatcaaggatatttgcatttcttaaacacatgtaaaatcactgaacatcttgtattagcaatgcttgtttttcgagtccggttcttactctcttgcccaggctggaatgcagtggtacagtcatggctgactgcagcctaaacctgctaggctcaagtgatcttcctgcctcagccttcccttcctagtagctgggcctacagataagtgccaccacacctgacaaaattttttttgtcaggtaaaaattttgtcaaaatttttttcagtaagagagagtcttactctgtcactaaggctggagtgcagtaacaccatcttggctcactgcaacctctgcctcctgggttcaagcagttctcgtgcctcagcctcctgagtagctgggattacaggcatg

SEQ ID NO: 52040 - DNA, 1050 bp, Homo sapiens
cctgcaaaatgaggtgcttttgaccaattagggtcaatagagccacaaaaagaaatatatcacctttctcagttattgatatatttaaaatgagttgtcatcagtatttgttcataaatgtattaaaggtatccagaatattaaaaaaaaatttttaaaccactttaaacgttaaaaacacccagtttttataatccattactgaccatgttggaatattgttcaggctgatctctctacccgagctggttatagcagtgttgttttgttgcttctgttcatggttgtctttgactgcatgctggttattgcacatagagaattatttatggggattcccctagggctaggatacatgccatctcctccacaaagccctttaggtttatttctgtcaggcatttggggcctctgctggttaggtatgattacagagttcaaggcttgaggttccctggcttacacagactggaagaacctggtatgggcaatctaagaccatcacatctccctcctttttatttctaccgctctgttcaggactcaggagttttctttttctttttttcttttcttttcttttctttttctttttctttttcttttcttttctttttttttttgagatagagtctcgctctgtcacccaggctggagtgcagtgccgcgatcttggctcaccgcaacctccgcctcccaggttcaagcgattctcatgcctcagcctctcgggtagctgggattacaagtgtgcaccaccacggttggctaattttggtatttttagtagagacaaggtttcaccatgttggccaggctggtctcgaactcctgacctcaggtgatccacctgtctcagcctccaaaagtgctgggattacaggcatgaatgagccactgtgcccagccaggagttctctttatggttccctgaggttaggaagataggctttttctggctcacctttaacatgaagtaacggggagagtgcagtgcagtagaaagaacagtggagggtgattccaagtaaaccctaaaattggagtatg

SEQ ID NO: 52041 - DNA, 2190 bp, Homo sapiens
ttttgtatttttagtagagacggggtttcacctgggcagccaggccggtctcgaattcctggcctcaagtgatccacccacctcggcctcccaaagtgttgggattacaggcgtgagccatgttgcccagcctttttgctgtctttaaatgaatgttgcatcaaaatacatgtgacatttctttttaaaacttactttagaattcccagaagtgggattaccaggacaaagaacctaaaacaagtatttttaatatcatacatttgggaaataggcacatcagttttaaatatcagtgtattcaaattgataatgtcactgctgaacagttcccattacttttgtgtgtccattatttatagtagctgtttttaagtagcttaagtgagagctattaactgaaatgaaattatactttacatcaagggttttatcacttgttttaaacccatcttctttttaaaattaatatgtcttattcttgatcaggaagaaaaattagaaggagacaatcgctatttttgcgagaactgtcaaagcaaacagaatgcaacaagaaagattcgacttcttagccttccttgcactctgaacttgcagctaatgcgttttgtctttgacaggtaaatgtgtgcaaatattagtgtttgttgttcattgtggtctactatgtacagactttaccatagatgagatgataaaatggttgtaatttgaaactctagatttgaggatgaaagttatagatggaggctgtcattttgaaatgtcgatatttcatgattttatcataaaaaattttaaagaagccaaccatatataaatgataactagaaaagtaaaaaatccttactttttttattctaagaaagtattaaaaactgcaagggccgggtgcggtggctcacgcctgtaatcccagcactttgggaggctgaggcaggtggatcacctgaggtcaggagttcgagatcagccgggccaacatggtgaaaccccgtctctactaaaaatacaaaaattagccgggcgtggtggcaggcgcctgtaatcccagctactggggaggctgaggcaggagaatcacttgaacccaggaggcggaggttgcagtgagccgagattgcaccattgtactccggcctgggcaacaagagtgaaactctgtcttggaaaaaaaaaaagaaagaaaaactgcaagtaattgaattaccctgaccttctgtattgtcctttattttaaatagaataaattttgtactcattacacccccgccatgggaatgtatttttcattttataattaaaatcaaggcaatgtttgcacatgtgcatgtcttctgtaaagcaggataatctgttttgtgattaagttgaaacttctggaaaataagctgtgtttggaatcagcacttcgcattcacattttttaacctcatatttgtccagctataaaacaatattctgtttacttctaattgtacatgttttggaggaagattgtgaagtgaaagctagctactgttgagtttattaaaatagctaatagagcttatatattgtattatgattgttttaaatgtaaatataatcagctttcctcttggttaggcaaactggacataagaaaaagctgaatacctacattggcttctcagaaattttggatatggagccttatgtggaacataaaggtaatatttttactgaggagtaaacattataatgctcagagactctaacttgtgatcggcttgtgattaatatagaatagcagtcaattgccaatttttgtttgctaatctctctctgggaacctctgtctgggaacaaagacttttttaggagagccaagatgttaattccattttgtgtgagtaagcatatagcaaagatgaggtggttcatcgatatgtacagaattaagggtataaaaataatttgtaaaaaatgaaaaaggtattttactgtttctgaacccgcacttgccaccttagtttcaatactattatttatcatttctcaaaactaacagtctccaagcgcctctattcacttttttaaaaacgttgtcccagaaacattaggtggcataattccagtatttatgctttcatttttcatatctgcaactactgatacgccctaggatgctatcattgttttaacaagaaataagtactgcttttt

SEQ ID NO: 52042 - DNA, 2359 bp, Homo sapiens
aaagtagcaccttaaaaaaccccaaatctatatttttgttttaatagattatgagcctcaaacaatttgtgagcatctccagtacttgtttgccttgttgcaaaacagtaataggcgatacattgatccatcaggatttgttaaagccttgggcctggacactggacaacagcaggtaagaactgaatttttttttttttttaaatattcagaggtacccaaacatcctaagcatgtttataaagggagatgaagtagaatgctttttaaaaattaaattttttctattttgaatgaaaacctttatttactgtccaatagtttacacattatacttgattccatttatggaaattcatatgggggcacaaactgattgaacatagctgtagcccctgtttgaaaatgctaagttgaaagtataggtagtttctggaatgttgaatgtattactatttgtagtagaagttgaaaagcaagatatgatttttcttttcattaacctaaacttgtaggatgctcaagaattttcaaagctctttatgtctctattggaagatactttgtctaaacaaaagaatccagatgtgcgcaatattgttcaacagcagttctgtggagaatatgcctatgtaactgtgtaagtctgtttcaactttttcatggtacattttattctaagacagttgctcatatgttaactatttttcagtgcagttccaggttgtagctttagtggtttatcatgggacctgaaatatttatagtaatacatttccatgggaacatataaacaagtgagttggtaattgcagttgcacccatccaggtgttaggaacggtgtctgggtgagctcttgcagtctgctcttgctttatggctgtgtggtgtgagctaaagagtaagattggaactggctagaatactaaaagtaaatgtaaaatgcctgttaaaaaaatgtgcatgagtacaatatacaacatttgggtgatggttacattaaaacctagacttcaccacagtgcgatatattcatgtaacaaaactgcacttgtacctcttaacatttattttaagaaagtttcccaacgaatgtttagcttcaccaggcactttgtttttatttcttttctttttttttttttttttgagatggactcttgctctgttgcccaggatgagtgcagtggcgtgatcttggctcactgcaacctctgcctcccaggttcaagcgattctcctgcctcagcctcccgagtagctgagattacaggaacgcgccaccacatccggctgatttttgtatttttagtagagatggggtttcaccgtgttggtcaggctggtctcgaattcctgaccttgtgatccactcgccttggtctcccaaaatgctgggattatatttcatttttagtatacataatttctgtgaaggagaactaatgaaagttataaatgcttttttccatctttctaggatgtaatacaatataactttgttgcttttcacactctgatctgaattttgtcgttctgttttattatagttgcaaccagtgtggcagagagtctaagcttttgtcaaaattttatgagctggagttaaatatccaaggccacaaacagttaacagattgtatctcggaatttttgaaggtattcaaattttggtgtatgtattgttcctgcccattaacagttaaatgctgttctgaatgctattctgttttgatttagtggctagagcttttattgtgtcagctttttctacataagaagcatctgtaatgatccagaagacactttatgaagtaccaaagcagcctgtgtcttaaaaataattttgcttatttcaagttattttatatgtaaagttatgtatgtgtgagaagatattattctgtgattgtgggtagtggggtattgaaagaactctatgctgagttatcataaaggtattttaccttgttgtctaatgaaaacgagaatgtgctaaatatgaaacttttttacattgatatggtcattctgctttctgtatatttagattcatgtggagataattcagtgattcctttctgttctgagtggaaaactgctaagaggaaccctttgttgtcaagcatgaatgtatacatagtgtaatagacaagcttattatctagctagctagctagctgtcttcagatattttttgtgctttcttacttcctcagctcatccatgggcatgcctgaagtagtcattgaattcatttcgctgaattttttttttttttttgagatggagtttctctcttgttgcccaggctggaatgcaatggcacaatcttggctcattgcaacctccgcctcc

SEQ ID NO: 52043 - DNA, 2192 bp, Homo sapiens
tttttcatgctgtgtgtgtgtgtgtgtgtgtgtgtgtgtgtgtgtgtgttttacagttgcatagtactctgccatatagatgtaccatattgtctatttttgggcatttgggtggcttccaatattttgcaattaacagacagtgctgtaatgaataaccttatgagtgagattttgcattgttggaggtatagcctaaggaacagtaaatcctcagaaatgagattgctaggtctaaaggtagttgtctatgtagttttgttagtgactgcatttctaccagcagtatatgcatgctttcttctccacaccctcacaaactgagtgtcttatactttctcagttttgctaatttatagatgagaagtggtatctcattttagttttaatttgtttgtctctcatgaaactatggtcttttaaaaattaaaggttttttttttccccttagacgaaactgcaaaggaaatccgaattgcttggttggtattggtgagcatatttggttaggagaaatagatgaaaatagttttcataacatcgatgatcccaactgtgagaggagaaaaaaggtaaaccatcattttttaagcgattgctatatgctgttttttgtttttgtttttgcttttgttttgggcctgtgatcagaaaactctactgatttcaggtaacctgtgcagctttaagataagcagtagaacttaagactctaagccacttgaattggaacacttcttaatgatatgctttaaaacaggcagctgcgtaattcagtaagcctttaaataatagttttagtttgaatgctgattctatgtttgctttaacattgcatgttttattttgaaatcttaacgcctctttaaaggagatggtaattcaagggaacaaactcatgatgatagcactttgctttctagggcttgtattttatatataattttgctttttaaaaatatacattaaattttctagacataaatcttagcattcacgaaatatccaagtttgttatatatagatattttaataaaataataattctttgtaaggtcaggaattcccaaccttatctttggaaaaagttgcagccagttccctctaccaccgccaatctttaaaatctctagaatataaaggaagttttctgcataagttttactttgtcattctgctgaatgctggcagtttagaaatacagaaaacataaaacctatatacgcttgttcaaaaccgatcttttctagaatccactgttctaattttagatttaagtggctggagaagacgatatgctagagatgagcagtgatgccgtccgaagtctttttcactcctgtggtcaacccaaaatggggctttcatgaaaattatgccccacctccagccaagagaaacttaaggtggctataccatgttggttgtgacggtcttacacatttttaatctgaaaatttaagaataatgcttagaaattggttgtttaaaggaaaatgggttttataattatgaattttgtatttttgtagaactcatttgtgggcctgactaaccttggagccacttgttatgtcaacacatttcttcaagtgtggtttctcaacttggagcttcggcaggcactctacttatgtccaagcacttgtagtgactacatgctgggagacggcatccaagaagaaaaaggtgggtggaaaggggtgggggagagctctcttcctgaacatttttttaaacttttttttttttttttttttgagtcttcctctgtttcccaagccagagtgaagtggcgccatctcggttcactgcaacgtctgcctcctgggctgaagcgattctcctgcctcagcctcttgagaagctgggattacaggcgcccgccaccacgcctggctagtttttgtatttttagtagagacagcgtttcactatgttggccaggctagtctcgaactcctgacctcaagtgatgtggctgcctcggccttccaaagtgctgcgactacaggtgtgagccactgtgtctagcctaaacttattttattattattattattatttttttaagacagtttcacacttgttgcccacgctctagtgcaatggcacaatctcggttcaccacaacctccgcctctcaggttcaagcaattctcctgcctcagcctcccgagtagctgggatta

SEQ ID NO: 52044 - DNA, 1445 bp, Homo sapiens
gtaggggaaaggaagacggcagccctttgcgtgcatttgggaggcgcggagccgagcgaggtggagtttccccctttgcgccgtctgcgcgacctgggaaacgcaggcttcccgggctgtgcgcggaggtgatgctggccaaagcactttaggaaggtttgggttcccatccagaagatggcggtggagatgaaggcaggagctgagagcttagcaagcgttgatggttggggtatcttggccacagcacggctctttcgtttgtaaaaaggaactttttggaagtgagcttcatcacagtgtatcttgttggtgttgacaccgaaggcctgatcatcttagtattatttttgtagagggcagctttagaaaaaactgtggtcagcctacgtcatcgataccctgcacccccgttggccttccctcactcgttaatctagtattttttttaagcctttctttggtcgttctggttcgacaccagtttaccgagtaccaagtttaagctgtgatagtgctgtccttcacgtctgcgccgcccttgaactttacctttccttaaccccctcatatagattgaatccttaggctttgctcccgtttattcccttttttccaccttgtaacgcgggaactatagtttttgtttcagaatgttgttgaaattgacttggccaagccgggcatgctcagtagccgtctttcggcaggcatttaggaaatgctttctggagtttttacattccgctgggggatccggaaggaatggaagtcatggtctctggctttggagcttaaagtctagtatgagaagtgaaataagttagggagtttctataaagcaaacgaataagtccaagctctgggcgtctgtctcacaaggagggtaaatctgactttaacagtaagttctggaatgtttgaagtctgtgtataatagaaataatcaagcttcagtcagtttctcaacgtaattagtttccagactaaccaaataatgtaaactactaatagttctggtggtttttgagacagggtctcactctgtcacacaggctggagtgcagtgtcacgagctcggctcactgcaacctccgtttcccaggctcaagcgatcctcccacctcggcctccggagtagctgggattagaggcacgggccaccacgcccgactcagttttgtatttttagtggagacgggttttcgccatgttggccaggctggtctcgagctctgggctcaagcgatctgcccacctcttctgggattacaggcgtgagccaccatgctgggccaatttctgatatttatttatttattgagacggtgtttcgctcttattgcccaggctagagtgcaatggcgtgatctcggctcactgcaacctctgcctccttggttcaagcgattctcctgcctcagcctcctgaatagctgggatta

SEQ ID NO: 52045 - DNA, 1753 bp, Homo sapiens
cttagggctagagctcgcccagccttcctcgcctcctgggctgctggagcccacaggccctgtcctctcacctcccggcaggcggagcccctgacgtggccacgctgaccgggggcagattctcctcaggcatcacaggctgtgtcaagaacctggtgctgcactcggcccgacccggcgccccgcccccacagcccctggacctgcagcaccgcgcccaggccggggccaacacacgcccctgcccctcgtaggcacctgcctgccccacacggactcccgggccacgccccagcccgacaatgtcgagtatattattattaatattattatgaatttttgtaagaaaccgaggcgatgccacgctttgctgctaccgccctgggctggactggaggtgggcatgccaccctcacacacacagctgggcaaagccacaaggctggccagcaaggcaggttggatgggagtgggcacctcagaaagtcaccaggacttggggtcaggaacagtggctgggtgggcccagaactgcccccactgtccccctacccaccgatggagcccccagatagagctgggtggcctgtttctgcagcccttgggcagttctcactcctaggagagccaacctcggcttgtgggctggtgccccacagctacctgagacgggcatcgcaggagtctctgccacccactcaggattgggaattgtctttagtgccggctgtggagcaaaaggcagctcacccctgggcaggcggtccccatccccaccagctcgtttttcagcacccccacccacctccacccagcccctggcacctcctctggcagactccccctcctaccacgtcctcctggcctgcattcccaccccctcctgccagcacacagcctggggtccctccctcaggggctgtaagggaaggcccaccccaactcttaccaggagctgctacaggcagagcccagcactgatagggccccgcccaccgggccccgcccaccccaggccacatccccacccatctggaagtgaaggcccagggactcctccaacagacaacggacggacggatgccgctggtgctcaggaagagctagtgccttaggtgggggaaggcaggactcacgactgagagagagaggagggggatatgaccaccctgccccatctgcaggagcctgaagatccagctcaagtgccatcctgccagtggcccccagactgtggggttgggacgcctggcctctgtgtcctagaagggaccctcctgtggtctttgtcttgatttttcttaataaacggtgctatccccgccaggggcctcctgagtctttgatgagggcttcactcagtggagcctgtggatggggcagagcagggcaggtgagatctgggggtgaagcaagctggcttgggatcagcgaggcccccaggcccccaaccctgtgaggcaggaattgtcctattttctagaggggcagctgagtctcagagggttagggggcctgtccaacatcagacagagagccagggggttagaacccaaagagtctgaccccagagcctagtatcattcccatgtgcccgaagcccctctagggatggcctccctgatcctataaggctgggccactcaactgcagccccctggggagacctggctgggacatgggtagcacgtggtacaggctgtgctgcagtggaggcagaggccacgggcaccaggttgccaggccagccagc

SEQ ID NO: 52046 - DNA, 1918 bp, Homo sapiens
aggcatgagcccccacgcccggcccccagtcccatcttattacccaggtgcccaccccattacccgccaccaggtgctccccctccaacactgtccagtctctgaagaacctgcagacacacagagtccctcgactgcttcccctgcagtcctccctgtggcctcttctggctcccgccttgctctgctcagttccctcctccaaggcctcccaggaggctggcctggccctcactagcccagccccccggggtgtgatgggcagacctctggcatcaggacccccctccctccagagtcacctccgtgtcttttcactggcctatgtgccccccagaggcctgtgggcccgacgccacctgtgtgaaccggcctgacggtcgaggctacacctgccgctgccacctgggccgctcggggttgcggtgtgaggaaggtgaggggagccaggcctgagacccccagggtcctagtgtcagctggggaggctgggtggggcactctgaggccatgatgggccctacggatgataaaacgattcccaagccagaggatctcgaagtcacctggccacatgtctgcccagcctgagccccttattgagtgagggcccccaaagaggacccctgtcatattggagctcctcccagccccgtgtgcaagggcaggggggctcctgtgccactgcagctggtgccaactggtcctgagcctctgggcctggagagtgaggcaggcaagggtcccagaggaaggcagagtagctggaccccacccgagggtccaggatccccactgcctcagctgagctgtggctgctgcaggtgtgacagtgaccaccccctcgctgtcgggtgctggctcctacctggcactgcccgccctcaccaacacacaccacgagctacgcctggacgtggagttcaagccactcgcccctgacggggtcctgctgttcagcggggggaagagcgggcctgtggaggacttcgtgtccctggcgatggtgggcggccacctggagttccgctatgagttggggtcaggtaagcacccagcaccaaatgcggggctctgcacaccaagccttgtgcccccctcggctcttcaagccccagggaggcatgggaggataaatgcagggatcagggcaagtcccctcttcctgtgcatttcgtctctgtgtcacttgaggccaatccctagccctctctgagccatgggctcctcatctggaatacagaaggctgtagggcattccccatctgctcagggccctgtttgtggtggagagggcagggagccccgtgtgcccccatgtgcccaaccctgcctggcatcctccccagggctggccgttctgcggagcgccgagccgctggccctgggccgctggcaccgtgtgtctgcagagcgtctcaacaaggacggcagcctgcgggtgaatggtggacgccctgtgctgcgctcctcgcccggcaagagccagggcctcaacctgcacaccctgctctacctggggggtgtggagccttccgtgccactgtccccggccaccaacatgagcgctcacttccgcggctgtgtgggcgaggtaagagcagcctcctcgggacaagcgggaggggaggggtgccaagccttgtgtccccctcggctctccaagcaccttggcattgggcccctccacctgcagccacccacgggccctgggccaggacactgtacctctgagcctcagtttcctcctctgtaaaatgggcatgatcacacctactttgaaaggttgggcagaggattgtctgcactgacggatgaatgtttctagcacacagtaggcactcaactcctgcgcctccctccccacaccgagaatccatgctaccactcagggcccaatgtgggctcccagctcccc

SEQ ID NO: 52047 - DNA, 1106 bp, Homo sapiens
aggtgctaggctgcagggcgctgagcctggggtccctgtgggctgctctgggaaagctcccagcaaaaggatgtggggagagaagatccaggggatgggtcacggggagggacgacaagacagggacaggaacgggaacagccccagggctgggactgcaggaagtggtgacatccctcctctgggacccctctacccaactgggcccctagcccttcttacaaaccccctatccactctctcctgccccggcctgccccacggagcaggttcgatgcaggctcaggcatggccaccatccgccatcccacaccactggccctgggccatttccacaccgtgaccctgctgcgcagcctcacccagggctccctgattgtgggtgacctggccccggtcaatgggacctcccaggtgagacccaaccccatactgctacttccagccctcatcccgcccttgcccagcctctgttgccattcctgacttccccacctccccagggcaagttccagggcctggatctgaacgaggaactctacctgggtggctatcctgactatggtgccatccccaaggcggggctgagcagcggcttcataggtgagccccctccccacctccagctgaggctgggccttacctggctggctggaagagccctggagagcctgggagggcacctcagggtatgggctgggacaccctgccctgtgctcatcctgcccactcacctcccaggctgtgtccgggagctgcgcatccagggcgaggagatcgtcttccatgacctcaacctcacggcgcacggcatctcccactgccccacctgtcgggaccggccctgccaggtgaccccacaccccacacaccacctggctgccgtggcctccacccctagccatggctggcccctgtggggattatggggggtactgaatgttctcggccttacttctgggggctgctttgcagaatggcggtcagtgccatgactctgagagcagcagctacgtgtgcgtctgcccagctggcttcaccgggagccgctgtgagcactcgcaggccctgcactgccatccaggtacgcaccccgaccgccagtc

SEQ ID NO: 52048 - DNA, 2746 bp, Homo sapiens
caacctgcctgcctacctctagtggttattgggaaactagaatgcaacactgcgtgctgttctacatcagtttttaatgcccacacaattgcaaagcattcttttttttttttttttttttgagatggaatcttactctgtcacccacgctggagtgcagtggcgcaatctcggcttactgcaacctccgcctcccgggttcaagcgtttctcgtgcctcagtctcccaagtatctgggattacaggcgtgtgccaccacgcctggctaatttttgtatgtttagtagaaacagggtttcaccatgttggccaggctggtctcaagctcctgatctcaagtgatgcgcctgcctcagcctcccaaagtgctgggattacaggcgtgagccaccacgcccagcccaattgcaaagcattctatcagttgttttcaactccctgatgtcttattattttttctttatagaatccagaacttggaccagagctgccaagggacgtatatatgccaggcccatggaccttgggggaaggcccaggccagtgcccagctggttatccaaggtaggagggtggcttcaggcctctgctaagagcagggaacagagatgagaaaggcagagaggcacaaggcccagaccctgttccctaggaatccccctaaatgtgtcagaataaagagaattattccattttgccttgcttgtgtctagcatagagtaaaaggggcttgatacatatttcaagggagggaagaaggatatggatggagtgtgtgagtgctcagatgaaccgatgaagattgaatcagtgtgaaccgggcatggtggaacgcacctgtagtcccacctactcaggaggctaagctgggagcattgcttgagcgcatgaattctaggctgtggtgagccgtgatcacacctgtgaatacaaccaagaccctttgtctaaaaaaaaaaaagaagtggacacgtgagtgagtaaatgcataagacctgacaagtgagtgtgtttgtgagtgaatgcatgaaaaagtgaatgaggagtgaatgaatgctggagcttcagtgctcacctttccttgggcagtctatggcctccctcgggccaggcctgcagtgactgatctcactggacctctgcctccctcctccccagccctgccctcggtgctcatcaacatccggacctctgtgcagaccgtggtggttggccacgccgtggagttcgaatgcctggcactgggtgaccccaagcctcaggtgacatggagcaaagttggagggcacctgcggccaggcattgtgcagagcggaggtgtcgtcaggatcgcccacgtagagctggctgatgcgggacagtatcgctgcactgccaccaacgcagctggcaccacacaatcccacgtcctgctgcttgtgcaaggtgaaggccagtggggacttttgttgggggacagtgagtggggcaggggcttctcctgctgccatcttctgcctgcccgctctgctcttcctttctgttcacttgggacattttccattgtgtgtgtttaaggggcaggtttcataacaggtggcagcagcaggggataaaagtgagattcccccagggcagcctggaatgtacagggagagagctaggccatagagcatcaagaagaaaaaagaaaccttgtcctcatctgcagggagtgcctgctctgctgggagagacctgcagcatagtctgagggcagagacataacccagtcaacaaacagacctaatagagagtaaaacaaggacaacagatgcagggcagacacaaacactgtgtgttctttaaaggcaattcctttttaccccaagccctgtgacttgcctccaaacttccttacctatactgcccctagtgtgcacttctcaggtccccaaagggctgcacaattttttgcccaggcatgttgaagaggtctcaggctgtggagtgaaatggatctggccctgaaccctgactctgcccgaccaggagcaaacagccgcttttcccctctgagccataatttcctcatctgtgaaatggaatgtagtggcttccttcaaggggtggtgtgaagatgaaatgaatcagggtgcaggctgggcacatatctgtgactgtcatgttgatggcctatgtctcttccatgcctctcagccttgccccagatctcaatgccccaagaagtccgtgtgcctgctggttctgcagctgtcttcccctgcatagcctcaggctaccccactcctgacatcagctggagcaaggtaagtgctggagagggaaccagcgggcatgacttgggggctgggaacagatctgaagcgtctcagtgtccccaggatgtggcacaggcttggccaagagcaaacgctcaatgttggaaggtgggcctgaggcacagatgggaggtgggcccctggagccgtgggccaaggccagggccctcagtgctagtgcatttgcagctggatggcagcctgccacctgacagccgcctggagaacaacatgctgatgctgccctcagtccgaccccaggacgcaggtacctacgtctgcaccgccactaaccgccagggcaaggtcaaagcctttgcccacctgcaggtgccaggtaagacaccacccctaagaattggcagtgccctgcccactccctgactggcagggtcttcagctgtgctctctgctggcagagcgggtggtgccctacttcacgcag

SEQ ID NO: 52049 - DNA, 1134 bp, Homo sapiens
cctgcatgtgtaggtgtctttgccatggccaagtccctggattctcttatttaaactgcaggcagaataggctttgctgtccttccttaaaatgtctgagtatggccgggcgcggtggctcacgcctgtaatcctagcaccttgggaggccgaggcaggcagattgcctgagctcaggagtttgagaccagcctgggcaacatggtgaaaccccgtctctactaaaatacaaaaaaaaaaaaaaaattagccaggcacggtggcgcacctgtagtctcagctactcgggaggctgaggcaggagaatcgcttgaacccgggaggtggacgttgcagtgagctgagatcgtgccactgcactccagcctgggaacagagcgagactccgtctcaaaaaaagtattgagtccctcccactcttttcgtggcctgccctccccacccagaagcgaggagctgtggaaacagagcccagcgctccacaggcccttatccatgttggtggaatggcagctgtgtgtgcagatgaatgaatctgccactgaacggtcttttttccctggtcagagaggctatcaggagaacattccttgaatgttgggctgggggtttcctgggtccctggaggggcatcagggacatcacacacacatatacctgcagaacctcatacatgtccccgcaggccctcccggctctctccctgccacctccatcccagcagggtccacgcccaccgtgcaggtcacgcctcagctagagaccaagagcattggggccagcgttgagttccactgtgctgtgcccagcgaccggggtacccagctccgttggttcaaggaagggggtcagctgcctccgggtcacagcgtgcaggatggggtgctccggtgagtggggccgggggcaggactggacttgggcagcatagcccagggctcacagtgagcagagttaaagcacctgccccagggggcgcaacatgaagcactgtccttggacacatcactttacctctctgagcctcagtgttctcagctgtacagtgggttatataagactgaatgaggtccaggcacggtggctcatgcctgtaatcccagcactttgggaggctgaggcgggcagatcacc

SEQ ID NO: 52050 - DNA, 2219 bp, Homo sapiens
ctcagaatgcactaggcacagcacagaagcaggtggaggtgatcgtggacacgggcgccatggccccaggggcccctcaggtccaagctgaagaagctgagctgactgtggaggctggacacacggccaccttgcgctgctcagccacaggtgtgaccaagggctggcacatagggctggcagggcagggatgccctggggtctgaaatgtagacacatgtgatctagagatgatgtcatgcccaggggtggggagtacggggagaccgtgttgctagcatcccccagtgatggccgaggaacccaactggggtccccatagagggacaggatcacccagggcccttcctcaccatggccaccctctgcgggtccctgaggtagcccagtgacttctgtcatcttccactcgactccacaggcagccccgcgcccaccatccactggtccaagctgcgttccccactgccctggcagcaccggctggaaggtgacacactcatcataccccgggtagcccagcaggactcgggccagtacatctgcaatgccactagccctgctgggcacgctgaggccaccatcatcctgcacgtggagagtaaggcctcatcccttctttgtctgcaccaaatggagatctgagccccccgactaggctccaccccacacagaaccccaggaaccccatccagaggtctccaggcgctgcagggtcctggagcctgccctgcccgacacccacaccctggcctgggacctttgctttccttatccccagtcctctgggctcaccattcagcttccctggacactggatccaacgacctgctgccattctgacctttgccctccccaatcctgacctctgtgtccccccactcaggcccaccatatgccaccacggtcccagagcacgcttcggtgcaggcaggggagacggtgcagctccagtgcctggctcacgggacacccccactcaccttccagtggagccgcgtgggcagcagccttcctgggagggcgaccgccaggaacgagctgctgcactttgagcgtgcagcccctgaggactcaggccgctaccgctgccgggtcaccaacaaggtgggctcagccgaggcctttgcccagctgctcgtccaaggtaagcagccccggctctgcgtggaaggggatcacctttcctcctggccctttgatgacccagctaggcagactcgggtgggaaggcctccctccataaccccacctggaatgccctcatctcccctactctccagggcccgaggcaggcttgccacctccaggaagccctccatcatgtgtgctcagctcctctagctctcacggctgctccccacctttggcacagccctggcactgccaaaggaaaccattctgtgtacataagcaccccagcctgcctcccctgccaggcagtgagaatgctcagggcagggcctggacccaggcatctcagcagccctgggcttaattgagggcaacaaggcccaggatgggctgggtaaatgcttgacagggacaacagtgaatgagtgacaggagcacccaccccagcacgcccagggcttcagtggatcttcagagagcccagcatttccatggcctcctgcatcaatgatacaaatgagggcttttgggccccaaacttaaagcagcacagcatgtagcccactggtcaagagcctggactgtggactcagacctgggttcaaagcacagcttggccatttgctggctgtgcaaccttggccaagtcactgaacctttttgagcctcagtttctttctttttttttttttttttttttttgagacagaatctcactctttcacccaggctggagtgcagtggcatgatctcggttcactgcaacctccatctcccgagttcaagcctttctcgtgcctcagcctcccgagtagctggcactacaggcacgcgccaccacgcttggctaatttttgtgtttttagtagagaaggggattcgccatgttggccaggctggtctcgaactcctgacctcatgtgatccacccacctcagcctcccaaagtgctgggattaccggcgtgagccactgcactcgtcctgagcctcagtttctttatctgtaaagtggagagaacaatgccaaccatgtaggctgagttggaaaggtacacagaggtaaacacagatgtaaaactgtgg

SEQ ID NO: 52051 - DNA, 1787 bp, Homo sapiens
gcagggccaggatgccagcttcaagtgcctcatccatgacggggcagcccccatcagcctcgagtggaagacccggaaccaggagctggagggtgagccaggctggtgggcaggtgggcaagctgggggcaggcatgggggtgccgtcatccccactgtgcaagggtggggcagaagtctggacgccccacattcatggtgtggccctgagtaaggcccttcccgtctctgtatggcaagagcgctggacccaggagtttccaaggcctttgttactttctgctatctgcgactccatgagctagacacacccaggccggagggattggggaagtgggcccaggggcacaggctggcagcaccaagacacgagaaggaccaggtcaatcctctctcaccctcccccatgcaacctcacagacaacgtccacatcagtcccaatggctccatcatcaccatcgtgggcacccggcccagcaaccacggtacctaccgctgcgtggcctccaatgcctacggtgtggcccagagtgtggtgaacctcagtgtgcacggtgaggggacgttgaccctgtggggctctgccctgtttccagccctgattctcagctcagagcctccaagtttaaatcctccttccaccattgactctgtcttgggcattctccctctctgagcctcagtttccacctcagtgcagtggggagacaggtgcccacccagcagttactaagctggaggccatggcagtgtgggtgagcagcagagccctgcctgtgtgtcagtggttgtcattcctccgcacagggccccctacagtgtccgtgctccccgagggccccgtgtgggtgaaagtgggaaaggctgtcaccctggagtgtgtcagtgccggggagccccgctcctctgctcgttggacccggatcagcagcacccctgccaagttggagcagcggacatatgggctcatggacagccacgcggtgctgcaggtgaagccggggctgcctctctgggtctgaggcccagtccatggcccagccttgagcgggtgcttggaggagatagtagtggatgggcaggtggtgatgagtggatggagagaggaagggaggaatgggatgggatgggtggatgacgaatagactggaagatgagagggaagagagaaggaaggtaggagaaggaagaaagaatgagtgggagggtgggtcgaaggccaagtggatggatggactaatggggtgtcatgagggtgagccctcaagcaaccagatgggacagctaaaaaccaaggaaagggccaggcatggtggcacgtgcctgtaatcccagcacttggagaggctgaggcaggaagatcacttgagcccaagagtttgagaccagcctgggaggccaaagtgggtggatcacctgaggtcaggagttcgagaccaccctggccaatatggtgaaaccccgtctctactaaaaatacaaaattaggctgggtgcagtggctcacacctgtaatcctagcaatttgggaggctgaggcgggcggatcacaaggtcaggagattgagaccatcctggctaacatggtgaaaccccgtctctactaaaaatacaaaaaaattagccaggcgtgatggcgggtgcctatagtcccagctactcaggaggctgaggcaggagaatgatgtgaacctgggaggtagagctttcagtgagcagagatcgtgccacagcactgcagcctgggtgacagagcaagaccctcaaaaaacaaacaaacaaacaa

SEQ ID NO: 52052 - DNA, 2446 bp, Homo sapiens
tggcattgttctctccattttacagatggggaaactgagactcagagaggtgaagttgttttccaaaggtcatacaactaatcaatggcagagctgggatttgaacccaggcagtctggccccagagtctgggttcttagccacattctatctgagtctgccaaacattagtggtctagtggtctgtgtggaagtgtctagacctcagccctggccccactggtgctgggagcatgggaggaggaggagatggtggggccattgcctgggggcggggctgggggaatgagaagtgcctccacctcccaggctagcccagctgctccaggcctcaatggaacgggaagggaaagaagccatgtcccaaatggcctctggtcctagtatctgggccccaggggaagggctgagggcatcagggtggcatctcagctcactgacctctcccctgtgccccagccccaggtggagccccacccatccgcatcgagccctcctcctcccgagtggcagaagggcagaccctggatctgaagtgcgtggtgcccgggcaggcccacgcccaggtcacgtggcacaagcgtggaggaaacctccctgcccggcaccaggtaaaggagctggagaaggatgcatgcatcctccacacctgcagtggtcctgcctgaatccagcgttgaagggaaagtggcctcagcaactggggcttgtgggaaatggcagcaggaggtcaatggaatcaggaagttgagagcgggctgggcacagcagggccaccaccagccccacagcaccttggtgcaaaatagaaaaggacatctctggctgggcgcagtggctcatgtctataatcccagcactttgggaggccgaggcaggtggatcacttgaggtcaggagttcaaagccagcccggccaacatggcgaaacgaaaaacacaaaaattggccaggcatggtggcagatgcctgtaatcccagctactcaggaggctgaggcaggagaatcacttgaacccaggaggcagaggttgcggtgagccgagattgcaccactgcactccagcctggatgacagagcgagacactgtctcaaaaaaaaaagaaaaggacacctgttactcaaggctcttgacttcctcctgccggagaaaccatcataataaacatgccctccacaatgcggactgtcaaaggggtcgcctccaacaggatgcgcctacatatctgtgcatggcagtcccagggtgtgggtaccagaggcctgggcatctgaaggctcccagctcaccctccccgctctcaccccaccttggccaggtccacggcccactgctgaggctgaaccaggtgtccccggctgactctggcgagtactcgtgccaagtgaccggaagctcaggcaccctggaggcatctgtcctggtcacaattgagccctccagcccaggacccattcctggtgagtgatagggagcagtgggcgatgccagagcacaggcgcggggctccttcccagctctgctcctctcctctctcccagccgggcacttattgttgcctgcaggcggggtttcctaccacggaggatcaagccaacccaggtgttcccaagtctgacaatggtcccgtcccctcaaccagggggaccccagccctgagtttcaggaggacccttgagtccccagggaaaggagacccttcttaggttatatcagccactctcaagccaccgcgcccccaggatcaactggagctggtcttcactgccaccaccttcagcccctgccttgatccccggagcctggcctctctcacccaccccctgtgcccacagctccaggactggcccagcccatctacatcgaggcctcctcttcacacgtgactgaagggcagactctggatctgaactgtgtggtgcccgggcaggcccatgcccaggtcacgtggtacaagcgcgggggcagcctccccgcccggcaccaggtacaggggccaggatggggaggattccaggtcaggcaaggttagacctgcagttgctttctgtacccaaacctcatgcaaacaccagcctgcttggggaccccaggggataaaatacgtttgcgggacgagttcaccagcctgcaaatcaggagacctgggtttttctcttggctctgcagctgaatcctttcctgggcctcagtttcctccactgtaaagtgagtgggttggacctctaggattctgtgaatgaagcttccaccagccctaccagctgagaccctgagcttccgagagaactcttgggtaccggcacagttgggcttggggacattccttgtcctggggactttgccctgataactgtcccctcgctgctctgacagacccatggctcccagctgcggctccacctcgtctcccctgccgactcaggcgagtatgtgtgtcgtgc

SEQ ID NO: 52053 - DNA, 1028 bp, Homo sapiens
gtgttaactattagtgttactctggggggtgagattttctatggcagagggtcccaccaaccctgttcccaaatctgacaacggctgtgccgactcactgatctctgttcccccagcccctggcagctccatgcccatcagaattgagtcatcctcctcacacgtggccgaaggggagaccctggatctgaactgcgtggtccccgggcaggcccatgcccaggtcacttggcacaagcgtgggggcagcctccccagtcaccatcaggtatgcagctggcaggaaatggtgggagagccgctggatgtgggggccctggctagctttgccaagagggagacctaggagcccccgtggggtgcagtacccccctgtgtcagaggttagaccctggccccaggccttcaacagttccagactggcacctgactctgttcctctgtcctgtcccctattcagacccgcggctcacggctgcggctgcaccatgtgtccccggccgactcgggtgaatacgtgtgccgggtgatgggcagctctggccccctggaggcctcagtcctggtcaccatcgaagcctctggctcaagtgctgtccacgtccccggtgagggtccctgcagtgggacgggaaggccgggggagggaggaagggacagagaccagggggcagaactggcagaaggaaacactttctggcactcggcgagaactgccgctctgattccagacttcacctcccgccacccacacggtcccaggaccaaggagccggctcaggtggagtggttcctgtccctctccacggcttgcgagcataggctttggactatgctcatctgtgcatgagtcccagttcctctggccacacttggagatgttgcacaagggacctcagctttccacctgtcactgtcccttatctgtaaagaaggggtagtagtactcttgtactctactatctaattatagagttcccaaaagcctgggactgcacctctgcgagtattggagggtgatttacaca

SEQ ID NO: 52054 - DNA, 1998 bp, Homo sapiens
ggtgccaagtctcagtcgtccctggcatgggtgaggtgggacgctagacccagtcctgacactggggcggtagataggaagggagaaggtggttttccctggaagagtttccatcgagttccagctggctgggctgggagtggcaccagggaagggaacaggagcttggcgtgagccgcagtgcccagctctgagcctgcctcctccctcctgaccctcccaggtgcatggctcgaggctacgcctgctccaggtgaccccagctgattcaggggagtacgtgtgccgtgtggtcggcagctcaggtacccaggaagcctcagtccttgtcaccatccagcagcgccttagtggctcccactgtgagtgtctcgggggtcatgcaaatggtggagggctgggggaccccgactgcaccctcagcagctcccacaccctgccttacatctcaccctcccagcccagggtgtggcgtaccccgtccgcatcgagtcctcctcagcctccctggccaatggacacaccctggacctcaactgcctggttgccagccaggctccccacaccatcacctggtataagcgtggaggcagcttacccagccggcaccaggtacagggccagcaggtggggagggcaaaagcagggcacaccagcccccaatgggaagaggggggactctcagcacctcactctgtgctcattcagtcattcaacaaacattgagtatccttgctggatgggtcctagaccagtgctgagaatacagaaataaggctccctgacctcagggagatccacttctgcaccaaatctcactgaaaagctgctccgggccatgtcctgtgcctgacactgaagattccagatggaatgagacagttgcctgctctcaggcagctcgcaggctgtgggagccccagcaggatactgtgtcaacactccggagggccttaacaggctttctggaggggtgacaaaaggctagacgtccaccccagcccagagacaggccacatgccatgctgggagcttcacgaaggccactgaggaggcaaggcagggaggcccccagagtccaggggcagcggcagcagtgcccaagatgtggaggagctgcccacacctactgccatacctcctgccatctgcttcctgcagatcgtgggctcccggctgcggatccctcaggtgactccggcagactcgggcgagtacgtgtgtcacgtcagtaacggtgcaggctcccgggagacctcgctcatcgtcaccatccagggcagcggttcctcccacggtgagagcagagagggcagggggtacagacaagtggcgcagagggtggcagagaggtccccggtgccatcactgttatctcactctggctgcgtggtccacacccgtctgtccccagtgcccagcgtctccccaccgatcaggatcgagtcgtcttcccccacggtggtggaagggcagaccttggatctgaactgcgtggtcgccaggcagccccaggctatcatcacatggtacaagcgtgggggcagccttccctcccgacaccaggtacagagtggagccacagcagcgggggtggaaccatggtctcctggggtgagcagagcaggctccctgtctcacggattgggccctgggtagaccgatagcagcctcaacaggctgagcaggaaggcctgagccagctggtgaccccagcgtccctccactccctctccctctccttccccatccgcacgtccagacccatggctcccacctgcggttgcaccaaatgtctgtggctgactcgggcgagtatgtgtgccgggccaacaacaacatcgatgccctggaggcctccatcgtcatctccgtctcccctagcgccggcagcccctccggtgagtctgcctaggaaagggacgagggatgcaggcaacagtgttccctggggagaaggaactttcaggtcagagtcctcagacctggtggtactca

SEQ ID NO: 52055 - DNA, 1060 bp, Homo sapiens
gacaagagtcccccttccccatgtgaaggacagggaaactgatccagagctgatggccaggccttgggggtcagagtgaggcagggttgcaggttataggaacaggggtctcctgagggctccctctgactcacccccattctggccagacccacggctccctgctgagactctaccaagcgtcccccgccgactcgggcgagtacgtgtgccgagtgttgggcagctccgtgcctctagaggcctctgtcctggtcaccattgagcctgcgggctcagtgcctggtgagtagctctcagggagggcagggctggggacccagggtgggaggccccccactcttgcaacggcaggatcaggaggccaagccgcagactgcacctgccttgagaccaggagccccatctcatctcacctcctagccggctattgaccctttgccctctgtccccagcacttggggtcacccccacggtccggatcgagtcatcgtcttcgcaagtggccgaggggcagaccctggacctgaactgcctcgttgctggtcaggcccatgcccaggtcacgtggcacaagcgcgggggcagcctcccggcccggcaccaggtaggaggcaggagctcaggaagcctgaaggaccctgtagctgcagtacaagagcataggcttgaccgggcgcagtggctcacgcctgtaatcccggcactttgggaggccaaggcaggaagatcacgaggtcaggagtttgagaccagcctgaccaacataatgaaaccccatctctactgaaaatccacaaattagccgggcgtggtggtgcgcgcctgtaatcccagctactcgggaggctgaggcaggagaatcgcctgaacccaggaggcggaggttgcagtgagccgagatcgtgccgttgcactccagcctgggcgacagagcaagactccgtctcaaaaaaaaaaaaccacaggctttgaactcaggcatgttcgagttcagacactgttccgctacttgcatgctgtgtgactttaggccagtcacttgtcacttgattctctg

SEQ ID NO: 52056 - DNA, 2601 bp, Homo sapiens
agcctcccaaagtgctgggattataggcatgagccaccgcgcctggccagtcatggtgtggtttaaatgagacagtgtctatggaaagtacttgtgagcacacggaagacgtcctgtagaagggaggtgtctcactgtcatccgcatccttgggcgcagcctgggtagtaaagcttgctggttccctatgggccagaggagctcatcatcaagaagtcatgggtgggtcaatgggcctccagcttgtggttagaggctggggagggaagaagccatattcggctggccatgtggaggcagaagggtgtggccctagtcccagaaaggccacctgtcggccgtccccactagggcctggtcacagcccagagccttctgccccagggctacaggttacagcccaagagttcaggcctctgagcagccgctctgtgtccagtgcccggcagcacccggcccatccgcatcgagccctcctcctcacacgtggcggaagggcagaccctggatctgaactgcgtggtgcccgggcaggcccacgcccaggtcacgtggcacaagcgtgggggcagcctccctgcccggcaccaggtatggcagccccccgggaccaccttgctggaggggctggatgggactgttccagccccctcccaacccaccccatttgcacacagacccacggctcgctgctgcggctgcaccaggtgaccccggccgactcaggcgagtatgtgtgccatgtggtgggcacctccggccccctagaggcctcagtcctggtcaccatcgaagcctctgtcatccctggtgagtgactcccagtgacatggaaagctggaggaggcagagaggcctccggggtggtgagatccaagggacccctcttgctgacagggcagaaggcccacaccggagctggctgcagggccctgcccaggccgactccacctgtcagagtaaccaccgccttcccgtcacactttgctttggccacatgactcctcaggcgtcccctcccacctcctcttcctctctccaactcatctctgccctcatctctctcacttcctcactcccctctgcaaggcgtggcccatgccctggtcctcccatcagggttgctgagctgagggcatcaagtccaggcccccagatgcctgaaaagctggatctggccttgaaaccctgggctgagctagctgcagggtgggcaacccctgccctctcatctcaggagcatctacaactctcactcccatccccactgctgcaggacccatcccacctgtcaggatcgagtcttcatcctccacagtggccgagggccagaccctggatctgagctgcgtggtggcagggcaggcccacgcccaggtcacatggtacaagcgtgggggcagcctccctgcccggcaccaggtacagggcaccaagaatgtgggacggggccatggacagtgggttgcaggatcctggcccctaggctgaggggctggcacttcctagatcggggggacagcggtggggcatttgctggcctccgggaagcccccctcacacctctgcccacggctgcccaggttcgtggctcccgcctgtacatcttccaggcctcacctgccgatgcgggacagtacgtctgccgggccagcaacggcatggaggcctccatcacggtcacagtaactgggacccagggggccaacttagcctaccgtgagtggggccaccaggctgggctgggatgcagagaacaggctggagtggcttcagagaacaggagtgaccggtgaccatcttatccctcagctgccggcagcacccagcccatccgcatcgagccctcctcctcgcaagtggcggaagggcagaccctggatctgaactgcgtggtgcccgggcagtcccatgcccaggtcacgtggcacaagcgtgggggcagcctccctgtccggcaccaggtatgggactggaggacagacaggccaagaagaggaagcgggtccctgggtggcggaggttattgggggagggctagaggctcccctgagatcaggaagccctggaccccattgcacagatgtatagtgcagtggttagaaaccagaatctaggactgactaacctgggtgtgaattctggctccaccacttagcttgtgacctcggacaagttacttaacctctctgtgctatagtttcagggcctataaaatggtaacaatggtacgtaccagccgggcacggtggcttacgcctgtaatcccagcactttgggaggccgaggtgggcgaatcgcctgaggtcgggagttcgagaccagcctggccagtatggtgaaaccccatctctattaaaaatataaaaattagccgggcatagtggcaggcgcctgtaatcccagctactcgggaagctgaggcaggagaatcgcttgaacccaggaggcggaggctgcagtgagccaagatcacgccattgcactccagcctgggcaacagagcgagactcagtctcaaaaaaaaaaaaaaaagtacctcacagaattatcttaaagattaaaatatatgcaaaatcctcagagcttaggctcacagaa

SEQ ID NO: 52057 - DNA, 1115 bp, Homo sapiens
gagacagggggcatcatgggaatcagagggaaaagggctttcagggcagcctccctgctgggaagtcacataagggcagagaaatagcccttggaggtcatgctttgacaagagcggttttcagtggagagaagggatagaaaccagattggaaggaggcgacacatgggtgggaaggcagcgagtgtggacaactcctgcaagagtcttggctctgaagggaggccaggaagtgggtcattgactgcgagagcatgaggtcaagggggagttttcggaaatgggaaatcctagaatgcactctggaccgaagtgatcgcatgagaaggaggagacgctgatgttgcgagagcagaagaagccccggggaggggtggcactcaggcgcagcagtgggatggggtgagggcaggagaaggggcctgtccttcagggaccagtatctagagagctggtagatttgagaggctgggaaaactcctgacttgtcgtttctattttctccataagtgtgtgtcagcgccactagctaagaaagtggaagggtggttggagaggctggaggagatgggaggaggtgtgaaatagttgtttttgggggatagaaactcaaaccagacggagaaacccagttggagtggggtgtgatgtgtcaggagctcattgtggtctgtgatcaggaactggagccaagtggacccatggtgtgatgttccccaaccacatcctgtggccactctgtgctggcaaggagggtggggatggtggggttcagccagaatgggggagggaggtgccagggggtagaatgagagctaggctggaccaggaaggaagtgatgcctagaggttatggagaaagacaaagtggccacaggaccggggcctagccagcaccggctcacaggggggcttcccgtccctgcagaggctccaagcaagcccatcacagtgactgtggaggagcagcggagccagagcgtgcgccccggagctgacgtcaccttcatctgcacagccaaaagcaaggtgtgcaggtcagggagtggggatggaggaagtctgtcttctggggtctctgagccccacccatgaccccctttcgccttgccctg

SEQ ID NO: 52058 - DNA, 1068 bp, Homo sapiens
gggaccatggcccaggatggggacgatgggcaaggcagggagccctgggaatttgggggatactgggtctggggacagggctgagggtggggtaccccagcttttgggagagcagagatattgaagacaatgctgaaaggcccttcctgtcccggcccccacccccagcaaaccaagccccactggtggtcgaggtccatcctgctcgaagcatagtgccccaaggtggctcccactccctgcggtgtcaggtcagtgggagcccaccccactacttctattggtcccgtgaggatgggcggcctgtgcccagcggcacccagcagcgacatcaaggtacccatggccctaggctcctcagccccaagagccatcccagtgggaggggaggcaggggcctgtccctgccctagtgggatgctgtccttgtgcatggggctggatgtgagaaagagtgtatctgcaccaacaagctcttgtctcctccccaccaggctccgagctccacttccccagcgtccagccctcggatgctggggtctacatttgcacctgccgtaatctccaccaatccaataccagccgggcagagctgctggtcactggtgagtccctacgccccctgtaaccaagactgcctgtcctgggctgggctgcaggctgcagattcaggcagatggtgcattcacctgctgggagggggcagtggttgcccgaacaaggtcagcagccatggagatgaggagaggtggcagattcaagactcattttagaggtaggatcagcaggacttgactggtcggtgagggcaaaagaaaagggtgggccgggcacggtgggtcacgtctataatcccaacactttgggaggccaaggtgggcagatcatgaggtcaggagttcgagaccagcctggccaacgtcgtaaaaccctgtctctagtacaaatgaaaaaattagctgggcatggtggtacacacctataatcccagctactcgggagaactgaggcaggagaattgcttgaacccgggaggtggaggttgcagtgagccaagattgcgccact

SEQ ID NO: 52059 - DNA, 1257 bp, Homo sapiens
tctcggctcactccaacctccacctcctggattcaagcaactctcctgcctcagcctcctgagtagctgggactacagacgcacaccaccatacccagctaatttttgtatttgttagtagagatggggtttcaccgtgtcagccagttggccttgaactcctgacctcaggtgatccacccgcctcggcctcccagagtgctgggattacaggcatgagtcactgtgcccagcccattttgctttttataaacaccacggagatgagtgtccttgtaatgaaatctttgtgcccttccatgattctttctttaagatgagttcacaaacttggaatttctagatcaagggattgcaaccctgaaaggcttctggtaaatttggcctaatggctggtgcctgccctccttgtgccctgcagcaatgccagcacaacgccgcaggggagttctgcgagctttgtgcccctggctactacggagatgccacagccgggacgcctgaggactgccagccctgtgcctgcccactgaccaacccagagaacatgtgggtaccctagctcaaggcccaaggacacacttccactggggaatgagtggaaggcgttgcactggcttttggggcagaagtgaagggagcaagatggagattgggcttcccatgacctgacctttgcctccccgatcccaggttttcccgcacctgtgagagcctgggagccggcgggtaccgctgcacggcctgcgaacccggctacactggccagtactgtgagcagtaagtttgtaaacagaagtagggggagggtggaggacaaatggtggactcccaagtgagagccttaaagggtgttgctcagaaaagtctcttctaggattatgctccttccctgcctcaaacacttctaagacacctcattgctcttgggacaagcccaccctccttaggcagctttactgtagcagtctcatcccacttctgacacccaactctgtactttagctgggcttaactttttaaatgctttttctttctttttttttttttaaactgagacagggtctcactgtgttgcccaggctggtcttaaactcctgggctcaagcagtcctcctgcctcagtgctggcattacaggcgtgagccaccatgcccagccactttttgaattcttgatgttcaggccttgcttatgctgttccctctgcatggaacagtcttcacccctaaaccacccgttcctggctaacttccc

SEQ ID NO: 52060 - DNA, 1072 bp, Homo sapiens
ccctgcatgtattcctcccgacagccctgagttacatatcattatcccctttaacaggtaaaaaaatagaggtgctgaggggtgagtgtgtcccaagggcacacggctaatgtgtggcagaaactaatttgaacctgggtctgattgactccaaagcctagcatgtcctaaccactgggcagtgcagcctcacgtttgggccacactctccgggggttaaaacccagttcatgcccttgagggggcccaccagagacagggagccaattcagaaacacagattactccggcccaaagcacagcatagagatgcctcccagaggtgaacagtgtggactgggagagggccgtgggtgggaggacagactgagcagaagtggggaaggaggggcgccggcctgtgatgttccagggtcacccctgggaggacactggagggaggggttctgggtctgctggctgtgggtggggcacgttgggaacagaggccaaccttcctctctgcccctaggactgtgcccccggctacacgcgcaccgggagtgggctctacctcggccactgcgagctatgtgaatgcaatggccactcagacctgtgccacccagagactggggcctgctcggtgagctgcaagcgaggccaggacagggggtcagctcagctgggcctgggtgggggaccagggctggacaaggcaggcatcaatccaggggatcaggatcatggggcatggcctgtggttcaaagcacctgggtcagcaggccaggtcaccggggatggtggggtggccagagctatggaataacatccttctgtgtaaagaaaactttggttctttactatttttttctttttcttaaaaaaattttttttatctaatacagatggggtctcactttgttgctcagaaggtcttaaactcctgagctcaagcaacccacccgcctcggcctcccagagtgctgggattacaggcgtgagccaccacacctggcctttttactttttttttttttttgagacagggtctcagtctcgttctgcctcctgggttcaagtgaatctcat

SEQ ID NO: 52061 - DNA, 1074 bp, Homo sapiens
gctgtctctaaaaaaataaatcggccgggcatggtggctcattcctgtaatcccagcattttgggaggctgaggcaggacaatcgcttgagtccaggagtttgagaccagcctgagcaacatagggagaccccatctctatttaaaaaaaaaaaaaagtgcctgagcaacatagggcgaccccatctctatttaaaaaaaaaaggtgaaaaaaaaaataaaaaatttttaaaaatcactgtgctgtacacacctgcaacttgccagaaagtcagtcccagaaatggctgtgaactttctggcattcaaagcaagcaggaaaccagttattttatggttatttggttccactccaaaattccttaccatgccttgagctcatggagaatatccctgtagccatgtagcccagggccgtgtgtgtaatcagcaggtgtttgataaatgctggttagctgagtgaacacacaaatgaacaaagaggtaggcttgatgcagtttggtattgagatgaatgtctgccctggtggcagaggagagaaagcaaagtcctgtgggacagagctggggagcctcagctgtccacgtgaaggtcctctgcagcagaagtaaggactccccagtcatgagcaacacagtgcccaagtccagtgggcttgtctgcaacaaagaatctatcggctcatgcaactgcagagtctaagcatgtatggtgtcaggcatggccttatccaggggctcattagggctttatcttggttctccagcttctcatctgactgcagaagggactttctctggcctggtagaaagagcataagtgcacgggttacttgtctatccctgatggggtggcaaagggcagtggtaggttatgcagattggccaggcctggctcatgtctccactatagaggaggaggggatcagggccctcagaccacatggtctgcatgtgcggagacagttgttctttatagaaaaccacggtttagtttctagaaagcaggaactggatactgggcaaacaaaaaccacctgcctaggaggcaaggcctccgaggggctgccgtcag

SEQ ID NO: 52062 - DNA, 1511 bp, Homo sapiens
ccctggggctgcctccagcacttctgcccctcccttgctgggcaccctttgtagggcttctcccatcagtcacggcccataggcagccaaacccatcccgggatatccccgcctagctcaggaggaacaagagggcagtgggtacaagggccagagtgccaggtatcagcacttgtgagcagacagtgcagagcgggtggctggctgggcccgtggggaggtgaagcctcacggacgtcctttctgtccctctctgctcccttctgccgctcttcggctcctggtcccccaggtggacgaggctcagagacggatggatgctgagatctggcagctcctgtccagctttgctgcccaaccccaaccccctccccaggggctctctcctcatccccagcctgcagctgctctgcgagcagcacctcctccttcttcttcctcctcctcctcctcttcctcagcttctctgtctttctcaccaggctctcaggtatgtgccaaggtgcccatcaagggatccccacccaccatgctttctagacttcagtcatttctgaaccaacttcaccaatttctgtgaactacttggactattatttctttccaattttctcttaaatcaatcatgtaccaactcaggctggttactctctttcaaatacatatgaaaggagccatcccattgaaattgtttactgatgtgctgtgtaaacgttggtccacaaaagagacccaccagatgggaggagaagccgacccaggccacgcccagagagagcagctggggacctgggccgggattgggaagaaagtcgtccaaagagcaaggccaggacccgcactgtcgggtgggagtggggggctctgtctctctgccctgccaccaggcctccctcccatgacggtccacccctgccggaaccacctccgccctcccacccccacccctgctcccctcggctcttaccacctgcccttccctcctagttctctctctcctacgaaggcttctctctgcttcctggaagcctctattactggcagctgccccgggccttcctgggggacaaggtaacaaggatttggggggattataggggtgtcatagaatcccaaaatatcagagggccctttgtcaaggccctttatgacacaaatggggagaccgaggctcacggtgggtagagacttgcctggggtctcatgttcaggtcagagcacagctgagactgaactcagctctgcccctgtccttcagcgggccctgacccctgacccctggcccctgacccctgtcagaggagctgtctcgcctgggagggtttctctagtgccttttctctgggcttccttgaccttgtgtctagatgctggcctagtttttggtacttcactcagtcattcaagaagcattaattatttactgtgtgctgcgtcgtgtacaggccgagtgggccctggcctcccagagctccctgtccatcccattatcattcctgtcaccatcagta

SEQ ID NO: 52063 - DNA, 1048 bp, Homo sapiens
tggcacccacgctctggggttggggttgccctatccctgttcgttggacacagccaggtactccaggcttctcccggggctggctgccttctggtcccttctcccctctcccttctggggttcgctatctcctggcctccctgctgccctgtcctgcaattctcagacctatctctgtctcctgtcctggcatttccctgcgccccacagggggaggcgtactttgcgcggatgcgccgggctcaccaggtaggcccaggacgtgcgtggtgtgaagttggtgtggtggggcgtggtgccttctcgggtgctcccagccctgcgtggggagatgcgcagtgcccaaggcattgggggtctgcatgaatccaggcggtgtcccatgaccccagggttggagccaggagggtatgtgcctcaccttgcctcacctgctgtgtggtctggtcctggtgccaactgtctgaagtcagaatggcaactgaggtagcaaggagactaacccgatgctaatccacatgactgtatctagccccccgggttcccctggccttgcctctcaagcaaccaccatgaaccctctgtgtgcatgtgggcggcctggagttaacccttgggtgccagcctggagagggggggcatgcatctttcttcctaattagtgtgggcctttctgactaccatgtccgtgggtagaggaccctgcccatggctctagctccaggactttgggaggtcttagctcgcctgctccctccatttcatcagaaccgcacatccctctcagaggagcagttgcgggcagccgtgacagctgggaggatcccagagcccccagagggcagggactgggcacagcgggcatcacaggtaactgaggacctggctaggacaggttgtacctagggccacagcgaggagaccagagagctgagtccaggcaggcacctgagcgaagactccagctttcctgggccatttcccctatgccaggccaggccccagcctgatgcctggtctgctctggtgtctcccctgggaaacattc

SEQ ID NO: 52064 - DNA, 1846 bp, Homo sapiens
tccagggcacgtccctgctcttctctgcccagtttccccgtaacatgggcgagtcaggctcttcttttcttccagtgcatgaggccattgaattcaatatggggccctcagcccagccctggggttctgcttcccttcatccaaaattcatcagaggctttttctctctgcaggtgcgcccctggctactatggcaaccccagccagggccagccatgccagagtgagtaggattggggaggtcattggggtcgggttacccagagtccctagggcggagctaggacagaagcctttactcccctttggctttgcctgtccgagcctgtttcttcatctgtaaaatggggataggagaaggccccaccacctccgagggctgtcgtgagagtgttgagtactcacatcagaaatcagagctcccgctcagtggtgagcagagtggagggaagaggggtgctgggtggcgggtttggggctccagccatggctttcttccacctcaggagacagccaggtgccagggcccataggctgcaactgtgacccccaaggcagcgtcagcagccagtgtgatgctgctggtcagtgccagtgcaaggtcagtccgaatccctgtccctgcggggcctgctctgccccgctgcccagaccctgcggggaaatcaggcagcatctggtggaagccgagacctgggcatggggggcagggcatgggggacagggcaggggctgcccggggctgctggaagtggccagggaggctggcctcaggctgctgggggtgcaggagacccactgagtcccctgcctgcctccttccatccgtctacccaggcccaggtggaaggcctcacttgcagccactgccggccccaccacttccacctgagtgccagcaacccagacggctgcctgccctgcttctgtatgggcatcacccagcagtgcgccagctctgcctacacacgccacctggtgagagcctgtgctgcccagccccaggcggtgttgccacctgctgcctgttactgtccatctgagcactgagcccagcgaccctcatccccgcctcagtaccctcacatgcccccattatttctctcgcagtcctgatctcaacaggaccccattccgcaccttaacaccctcccgtgccccatcccccaccaaggcaccccggtgctcaggctgacgccccctcctttttcccctgccagatctccacccactttgcccctggggacttccaaggctttgccctggtgaacccacagcgaaacagccgcctgacaggagaattcactgtggaacccgtgcccgagggtgcccagctctcttttggcaactttgcccaactcggccatgagtccttctactggcagctgccggagacataccagggagacaaggtgggccccagccaagcaccagggtcagccgtgactcagacatgagttcacctctgcgccgtctctcagcaggcaggcacctgccacctgcatggccatatcgtggttaggcacgtggcttttgcagtcccatagacattggtctgaaccccagctctgccgcttgccagccagacaccatttgataaacctcaacttcatggtggctgaggggattggagatcgtgcctggcacataataagtgctcagctgttcatgacttttagctttcatgcagttattctacaaacagatctgggagaggccgggaaatataaagacaagtgagacacagtttcagtgtcattcacgtgcccgctccgacttcactcatccacactgctggctctgtgcttgtgttggacacagtaattctcatgataggtcatgtgtg

SEQ ID NO: 52065 - DNA, 1215 bp, Homo sapiens
ttcacaaggagagggacgcaggaggggggaggggccatgcagggatatggtttcaggtcaagtctagccccagcctcagcccacagggagctctggagagtcattcgccggagagtgatcgttctttcaggcccgtgggctcttgtagcctgtatcagcctgtcattggggaccccaggggaacgaggtggtataacctctccaggtgaggaagggtgatggtttggagtaagttgcaggtaacagctgtttgccacggtcctcgcagcctctggagatctggacagggccccagcagcactgtgacagggctgtcgggaggactaataagaccctgccagtggaggactccaggcgtgcctggcacagagccagcactcctattcacgctgggtcttgtcacgcccagggtctctggcatcagcatggacgtggctgtgcccgaggaaaccggccaggaccccgcgctggaagtggaacagtgctcctgcccacccgggtaccgtgggccgtcctgccaggtgagtcctgggccccacgccagcccagccagccccctccatggtgcttcccgctccttctccatgagccctccacacctccccagccctggccatccagtgcccctacctgaatgggccgtgttcggaagtccctcccactgccatctttctgcccccaggactgtgacacaggctacacacgcacgcccagtggcctctacctgggtacctgtgaacgctgcagctgccatggccactcagaggcctgcgagccagaaacaggtgcctgccaggtaagtcccgccctccttccgcccaccccagcaatctgtggcctctggaggcccagcctcaactcacatcctgctcctccagggctgccagcatcacacggagggccctcggtgtgagcagtgccagccaggatactacggggacgcccagcgggggacaccacaggactgccagctgtgcccctgctacggagaccctgctgccggccagtgcgtccagtccctgcctgcacctgcccttccctgaaatgtctaccacccgctcccacacccgcttcatccagggcccttctgagaggcagtggttaaatcctggccttactgcctgctcagtgtcacttggtgtgagatacacttcactttcagggcctcagctgcctcatctgtgaaatggggtagtccaccctcctcagcccctt

SEQ ID NO: 52066 - DNA, 1917 bp, Homo sapiens
tcaagaccagcctggccaacatggtgaaaccccatctctactaaaaatgcaaaaattagccaggcgtggtggcgggcgcctataatcccagctactcaggaggctgaggcaggagaatcacttgaacctgggaagcagggttgcagtgagctgagaccgcaccactgtactccattgtaggcaacaagactgaaactccgtctcaaaaaaaaaaaaaaaaaaagaatgtgagtatcaagtgtcggtgtaaaaaagaatggatggattctggagtcaggcactcctggtcttaaatcccagagtggatgggcaagctgagtaactttgtgcaagtcatttcacatccctgagcctctgtttcctcatgtgaaggatgaaggtatcacctacctctcaaggtccttaggggagttaaatgaggtgatgtcgaatggaaagcagaacagtgcgtgaaacactccataaatagaagcagcaattatttcaatcaagtcgctgtatttcaagtctaaatttattggtgaaccccctggcagccaaagagaaaagggaaaaatgcttgcctaagtgcttgttaagtgggaattactattcagatggcaatgacgcctcatacatgtgctctttcttttcttttcttttctttttttttttttttttgagatggagtctcgctcccatcgcgtaggctggattgcagtggcgcgatctcggctcactgcaacctccacctcccggtttcaaacaattctccttcctcagcctcctgagtagctgggattacagctgtgtgccaccacgccaggctaatttttgtatttttaatagagacagggttttgccatgttggccaggctggtcttgaactcctgacctgaggtgatccacccgccttggcctcccaaagtgctgggattacaggcgtgagccaccgcgcccagccacatgtgctctttcagtggctcccctgggtcttgggttcttatctggactgagggtggattcggccagagctccaggcagcctctcccatgggctgtccttcagctccaactctgtgcctgcagaacaatgtggtggggcgcttgtgcaatgaatgtgctgacggctctttccacctgagtacccgaaaccccgatggctgcctcaagtgcttctgcatgggtgtcagtcgccactgcaccagctcttcatggagccgtgcccaggtacctctgcaaggtgggcgggcaggaccgccaagccctgggccggatggaccaagcgccagtcccaggccacggcccccatcccagccctttctcctcctcccagttgcatggggcctctgaggagcctggtcacttcagcctgaccaacgccgcaagcacccacaccaccaacgagggcatcttctcccccacgcccggggaactgggattctcctccttccacagactcttatctggaccctacttctggagcctcccttcacgcttcctgggggacaaggtgggtagtgggtggaaaggcaaaggaaactccaggcagcaggaacagcgcaggcaaaggcttggaggcgggagggtcgtggtgccttgggagaatagtgagatacactgcatggaaaaggtggctggagcagtgacagggcccgaattcaggcctccgcaagctcctgtctaaccctggtcccaggtgacctcctatggaggagagctgcgcttcacagtgacccagaggtcccagccgggctccacacccctgcacgggcagccgttggtggtgctgcaaggtaacaacatcatcctagagcaccatgtggcccaggagcccagccccggccagcccagcaccttcattgtgcctttccgggaggtgagcaatactgtcccctgggggtaggggtgcgggcaggcccttgctcctgcctctccg

SEQ ID NO: 52067 - DNA, 1952 bp, Homo sapiens
tttcttttctttcttttttttttttttttttttttgagacagagtcttgctctgtcacccaagctggagtacactggtgtgatctcagctcgctgcagcctccgcctcccgggttcaagtgattctgctgtctcagcctcctgagtagctgggactacaggcgtgcaccaccatgcctgtctagtttttttatttttagtagagacgaggtttcaccatgttgggaaggctggtcatgaactcctggcctcaagtgatctgcccgcctcagcctctcaaagtgctggcattataggcgtgagccaccacacccggcaaaaaactgcattttcttcactttggaagagagatcaaagttttctcgaaatcaaatttccactagaactttcccacctttctggattgctgcccctcaagatgggtgtatcaggcaggcccaggctgcagccctcagcctcccccttgccacccacaggtgtgaatgtgacaatgcctgcgcagcccggcacgccacccctctcctccacgcagctgcagatcgacccatccctgcacgagttccagctagtcgacctgtcccgccgcttcctcgtccacgactccttctgggctctgcctgaacagttcctgggcaacaaggtgaggggcctgggctgccaccctgggtggggaaagaattcctgtgggctctgctccttctgcagttggtggacaacaaggcagacttggagggaaaggtgttaccatgccccgatgcagccccctgtggcagcggctcatccattcagggcaggacctctcccctgcactgttggcttgggaagaagagctggcctcccctcctcccgggagccctccctgaccactcccccatgcctgggctgggttctgtgcctccgcactggcttccctgggtaccctgtgcactgcatgattccacaccctgccatggaccaaacaccctagagtcagggcctgagtctcgcccatctcggtttccctgtgcctagctcagtgcctggcacacagtaagtctcaggtaggcagagtgagggaggagctggaagactataggcacctcataggcacgaggtgtcaagtgtgcccacagctgcccgtgctgatccaccctgttgtgccaggtggactcctatggcggctccctgcgttacaacgtgcgctacgagttggcccgtggcatgctggagccagtgcagcggccggacgtggtcctcatgggtgccgggtaccgcctcctctcccgaggccacacacccacccaacctggtgctctgaaccagcgccaggtccagttctctgaggtgggtggcgcctgagcccttagggctgggagcaaagggggatttaggctgggtaggcactgatgtgtgacccctgccaccttcacccatacccaggagcactgggtccatgagtctggccggccggtgcagcgcgcggagctgctgcaggtgctgcagagcctggaggccgtgctcatccagaccgtgtacaacaccaagatggccagcgtgggacttagcgacatcgccatggataccaccgtcacccatgccaccagccatggccgtgcccacagtgtggaggagtgcaggtgcctgagccggcagggctgggaaccacagagaccctagcaaggatagaggagaaacggcagggcctcaccgtccttgcagcgactcttttggtcctgtccccacagatgccccattggctattctggcttgtcctgcgagagctgtgatgcccacttcactcgggtgcctggtgggccctacctgggcacctgctctggttgcaattgcaatggccatgccagctcctgtgaccctgtgtatggccactgcctggtgagtagtgccagcagacacttgaacactaaaataggagaagggacaatgtgtgagattccctgtgttcatgagctcagc

SEQ ID NO: 52068 - DNA, 1114 bp, Homo sapiens
ccaggtggtgacacctccccgggagtccatccaggcttcccggggccagacagtgaccttcacctgcgtggccattggcgtccccacccccatcatcaattggaggctcaactggggccacatcccctctcatcccaggtgcggctctgggcccaggtggtggggtgggaatgaggggcagctggtccagagccctaggccagatcctaccacttgtcttggggctcaccagggtgacagtgaccagcgagggtggccgtggcacactgatcatccgtgatgtgaaggagtcagaccagggtgcctacacctgtgaggccatgaacgcccggggcatggtgtttggcattcctgacggtgtccttgagctcgtcccacaacgaggtactgccggagggcaggtgtcaccgggtgtgggggcagagccgggctgcccaccacagccggctgcagcccccgcccatgccgcccagcaggcccctgccctgacggccacttctacctggagcacagcgccgcctgcctgccctgcttctgctttggcatcaccagcgtgtgccagagcacccgccgcttccgggaccagatcaggctgcgctttgaccaacccgatgacttcaagggtgcgttggcgggcgggtgagcgctgcgggaggtgggaggtgggtacctctgtacccagggggcacagaggatagatgcggacagagggggccaggtttcgggaaggaatgtgagtcgctgaagaaacactgagccctgtcaaaaaagcatttcggggggaaaaccaagatgtttaggaagagccaaatccccccttgctacctacctgcttcaggttacggcgaggacgggccctggagccagcttccagcttcagatcctgacgtggacgctgtccacctgtgtcctgggtcaagttacccactatctcgtgtctgtttcgtcatctgtaaagtcggggggtgtggaataataactacctcctaggggttggtaaggacttagtggagtcacgtatgtaagcctctcagaattgtgctcagcgcattttcagcacccaggaggtatttgctaacgtcacagtcattgtcctcattctgagagacagagg

SEQ ID NO: 52069 - DNA, 1050 bp, Homo sapiens
accctgtctctaaaaaaataaaaaagaagagagaaaaaaattttttaaaggatggagaggaaagaagggtgtgggcaagatggctggctgggcacagcccaagacagctgggcactcccttctcccctccttctttgtcctcactgggccaggctgtggcctgcatgtgtgtggtgtggtggttgcatgcgtgtggcatgtcaactgtgtgtggggtctgttttagagatgggggaggccactgccgcatgtcccatgccccacgtgtgctgtggatgtgtctagtgtgtgctgcttgccctcgttgtgcctgccagaaaccgagctgcctgacacagggccctggagcccactccagccacacagcacctacagcttcccgcacctgcctcctgccgcctctgactccagtctgcttcctttccacctgcagtgccccagttcccaagagcctgcacggaggccgagtttgcctgccacagctacaatgagtgtgtggccctggagtatcgctgtgaccggcggcccgactgcagggacatgtctgatgagctcaattgtggtgaggggatgtccggggccacgagtggtttgggtgccaggggagggccagggtcctacacctgggtcttggagcccatcaaggactatgagggtttggtgcaggcagaggatgggggcataggaagggtgatgacagagccaggcagggggtggcagggagtggtgttggggagtacagggtgggcctggggagggttggggacaaggagcaggtgaggagccatctgcttctgccaaatgccaagcggaatctatccacagaggagccagtcctgggtatcagccccacattctctctccttgtggagacgacatctttaccgccccggccagagacaaccatcatgcgacagccaccagtcacccacgctcctcagcccctgcttcccggttccgtcaggcccctgccctgtgggccccaggaggccgcatgccgcaatgggcactgcatccccagagactacctctgcgacggacaggaggact

SEQ ID NO: 52070 - DNA, 1487 bp, Homo sapiens
agcagggcactgtgggagcccaggggagcggtctctaccccagccagggcagatcaggaagatcaggagacaatggctgagccaagtcctgaggaatgagtaggaactgaccgaggaaggctggcagagcctttcccagtcacacgcaggtaatccctgtgccaggccaactccctctgggagccaccccttcttgtccagccttcctctgaactgtgggggtctcctcttttgcactagcacttggtttctggatcaggccatttcccctgttagttaaagcccctcagtcaagttggggccttggcattgacccctgagcatgtatacctacaggcagtcctgggtgtagcagtgggcacacaggtgtcagcctcgagggaggcctctgggggccatccccccaactctgcctgaatggtccaactgcctaaggccactagatgccaggctggggctctcaaaatgatcctccttcgattttccagtttatttccgagccctggtgaatttcactcgctccatcgagtacagccctcagctggaggatgcaggctccagagagttccgagaggtgtccgaggctgtggtagacacggtgaggtgaagggggtttgggaagctcgcgggtgtggcggggcaggaccgaggatggggtgaaggcctctggggctgatggcactgtgtccctccccagctggagtcggagtacttgaaaattcccggagaccaggttgtcagtgtggtgttcatcaagtgagaaggggctccctgggggctgctgggggacttgagcgggtaacctggagggggctgatgaggatgggaaggaagcctggcaccgcggaaaggcctatgggatgagtcgctgtgggtggaaattcaggaattggtcgggggatcattgggacctttagttgcccttctttgggtacaggctgtcccggaacagggcctgagcgtcggggcgggagcctcatggaggagctgagaacacaggtgtctcgctgaccctcctctcctgcctgtctccatccccagggagctggatggctgggtttttgtggagctggatgtgggctcggaagggaatgcggatggggctcagattcaggagatgctgctcagggtcatctccagcggctctgtggcctcctacgtcacctctccccagggattccagttccgacgcctgggcacaggtgagcctatcctggtgtctgggatcgcctcctccagactcgtggggtcccctttcagtgtctctgccataggctcccaacttgggcttgcacaccactagaaacagggagctcactactcctgagtctgccccatcgatctttacacaatcttggcttggtagagcacagactgtttcctctagcacatacccgttagacccgagttctgctccttccttctagacctctgcacattgacaataggtaatcaggcctttatttatcctgtacttccaagtccaa

SEQ ID NO: 52071 - DNA, 1632 bp, Homo sapiens
atagcctcccctccctaggaccccttcccacgtctcctcccccagtttctttccatgttctgacctgtctctttctgtcttcccccatgcccgtgtgtcctgctctgacccttgtcggcatgtctgtgtgtgtcccctgtcctccctgccctgggccctcttccccactccttgagtgtctgtctctgcgcctcctccctctgcctcatcctgttcttctccctctctctggctcaccatctctgcttctgtcgccctctgtctttccctctctcccctctgcctgttcttttttttttttctttttccctctgcctttttcttcacctttgtcttaccttttctctctcattctcccccgccccactttctttatctctgtctctgtctttctgtctctttgtgtctccctctctcttgcaatgtctctgcctctctctctgcttctctccatctcgtctccctcgctgtcaatgtcccttcttgcctccttctctgtctctactctgcaggctcagggcagcccctgggccgcccgcccgtggctggcatgatggtctcggagcctgatgaggagtcccctctcagtaagtgacccaggccctggccaggtgggagcgctgctctccctctgcctccctccccatcctctctccccactcttccttttctctcctttctccctgttctcttcctccccaacctgcactttgctgcgagtcacacaagaggctcagaggcacctccctgcagagtccaggggctaggccagccactgcccctgcccaggacacagccaggcccaccctgggcccacagatctaaacacagtgggctggaaccctggcgggcgttcttccccatggggtgttgacgggcagagatgggtgcagcagccctgcagggaccaggccctgcattccagaggccacttgtgtccaccccagcacaggccaatcctgggcccacccgagggacccacagggacccagggctggagttcgggggcctgggtgtgttgcagagagttctgttgagcagggatgggaatcaggagttggtgagtagcctgctccggggccagggctagtcaggtgtgcagcccccacttctaccctgagtgcagggcagctgtctccctctcccggcctctggctccaagggaactcaccagatagggtgagaggagggagaggactggccagagagcacccctattccaaggcagcctcgcccctgctggctgcaccagtgtccttggctctggaggctggttcttttttccttttcttttcttttttttttttttttttgagatggagtctcactctgtcacccaggctggaaggcagtacagtggcacaatctcggctcactgcaacctctgcctccctgattcaagcaatcctcctgcctcagcctcccgagtagctgggattacaggcatgcactaccacgcctggttaatttttgtattttcaccatgttggccagcctggtcttgaactcctgacctcaagtgatctgccggcctcggcctcccaaagtgctgggattacaggcgtgagccactgcacccagcccgggggctggttcttgaaatagaggtggcctcaccttctgccccagtgc

SEQ ID NO: 52072 - DNA, 1330 bp, Homo sapiens
aaggtggagcttatcctgggctcggcagcagcctgaggtcacgtggagttgacaccacgcctgtccccattcagcccagatactgagctctgcctccgcgctgctgggcccagggatgagcctgtcagtgtggctgcatgtgccaaagctaattctccaacacagtggaatgtgttccctgcagcctggagacgggcaggccagagtgaggcaggaagaggagccaaatggcctggggaggagctgcctggggaggcaacggctttgagcagctcgcccttgacttctgcctgtgtccccacccatgctgaccctggccagccttccacctgcctgtgccccccatctgcgctgcccgaggccacccctttacccgcccgcatccccccatccactcactcatgtcctgggtgtcccttgccttctccaaaggaaaaggagtctttacttaccaaagtgatttacattttattgtctgctttatttgaggattcattcggaaatagcagggttgggctctgaagcctccaggggctaatgggacttggggaaactgaatcaaaagggttcagccccagcctggctcactgagccatactaagtcaaatttaaccactaaggggcctgaaggtgggattctgggtccccctggaagtgaggggaaggaccgtggggctcagtgggagctggagagagtgactcaatcagctctcgtttgcttacaggtgacccatgggctgagggcatacgatggcttgtctctgcctgaggacatagagaccgtcacagcaagccaaatgcgctggacacattcgtacctttctgatgatgaggacatgctggctgacagcatctcaggaggtgagccaaggatccaaggctgggagcagaggggtggggggtgagactgtgcttcttcccactggcatgggggaggagggtgaccgaccattccgagctttctcaaccctgtcccactgtatactaggtgcccagaacagtgcctgacacccagtaggtactcaacaaatacttgttgttgctgattacatctcttttttgcttatagacgacctgggcagtggggacctgggcagcggggacttccagatgggtaagttgctgcaggcctcctgcaggtctccctcctgtcccccagggaagccccagagccagtctcctgggctgagggctccttgggcctgccctggggtacaaagcaagaagaagtgggtgtgatctcttaacctgctgagtgacagttgtgcagactgattggcaggtccctgcaaggctggtgtggccaggtcctgtgcttgcccatgccaca

SEQ ID NO: 52073 - DNA, 1048 bp, Homo sapiens
tggcctttgtgtcgggctctgagcccctggcagtttgtacaacaaagtgctgccccgacagattccttcctgtgtgctgtctgtcgcctgtggacagggcactgggtggcctgggggtggggcagggcaccttgatcctgtgtctggggcctgggttgcagccgagtaggggaagcacttgttttggggttacctaggagcctgcatcctggcagagggggatggggaccttgtctgggttcatgtccctccccagagatttggggaccatgggtcacattgtctgctggttccttggcagtgggcaggggaaggggcactgaggcagagcctgtggtgaccgtggcagggaggcaggtgggcaggcaggagctcttttgtccccccgcccctgcactgtctctggattttgatggggtgagctcactccatccccacatgcctggagcctggccctgggcagctgcagccgccctggggactgtgcagtgctcagaccttcctgcctagctgcgggggcagtcgggggctcagtcccaggcttgggctacaaggagggtggggtggactggctgctgaaggcatgtgaacaatgtgtctggagaagcccaaagccctgggttggtcccagagtcagcctctgagcaggcagacaactttgagccataggacccaattctattgcccaccccttgctagggtcctgcccactcagccaggctcctcccttcatcccagatctggaggcgaccccaggcctgagcccacacctcacactccgcatgcatcacccctcaaccacacctacccctcacccctaccatgcaccctctgcatgatactaatcctaatgcttattaagcacttactgtataagtaattctagtgcttattaagcacttactgtataagtaaacgcctcactaagtgccttacctgcttgatcccatttacccagccgattctctctgagcctcagtttcttcatccagaaaacggaaataataataacacaagctcacagtttcttgaccgaaagcctcagagt

SEQ ID NO: 52074 - DNA, 1049 bp, Homo sapiens
ggactacaggtgtgcaccaccacaacgggctgatttttaatttttttgtagagacagagtctcactatgttgtccaggctggtcttgaacgcctggcctcaagtaatcctcctgtctcagccttcattaattaattcaacaatttatttttttagatggattttcactcttattgcccaggctggagtgcaatggcacagtcttggctcactgcaacctctgcctcctgggttcaagtgattctcctgcctcagcctcccaagtagctgggattacaggcgcctgccaccacaccaggctaagttttgtatttttagtagagatggggtttcaccatgttggccaggctgctctcgaactcctgacctcaggtgatccacccgcctcggcctcccaatgtgctgggattataggcgtgaggcaccgaccatgcgcggctgaaaggtgacattggagcaaaaactggaagaagtggagcgagtgatggaatatgtggggacagtgtcccaggcagggggcttggtgtgtttgacgactattgagaggatgcatgtggctattttagaaggcagggagttgggggagcacagtagcaaaagaggttggagcgtggcgtgtgtgtgtgtgtgtgtgggtgtgtgtgggtgggtgtgtgtgtagacagattacatagaacctggttgaccatgattgtgtgtgtgtgtgtgtgtgtgtgtgtgtgtgggtgggtggtgggtgtgtgtgtagacagattacatagaacctggttggccatgataagggcttttcctctcacccgttggtgagtcaggagtcgtgggaaggcctaacccgacaggttcaggaagcggccgtggttgttagtggtgtctcatggcaacataactttgtggaacattccgcccatccttccatagtcctggcactgtgcaaggggcatcattcatgaaatctgtgggcagtgacccaggagggtatgggcaggcccaaccaggttggtgtgcccttgaagccccacagacctgccagggcagcagggcagctgggag

SEQ ID NO: 52075 - DNA, 1087 bp, Homo sapiens
ggtcttacggagggcaaggccttttgttccccagggaggaggcccagtcagagctttaaataccccgtgcagcccagaatagcccccattgtgttggtctgcagctgggggacccagggaggaaccaacatcgccatggaggatcctgagggggctgattctggcagattctggaggtggggcggggaggtcttcaggcacttccctatatggtgcggtggcatttctgtggaaggcttttctagtctggctcaggcaggaaggcctgctttgtgggaagggtggagcagcagctcaagttctgcgtgagcaacgtgcagctgaggggggagcctggtgggtgggggactcccagggacggctctgtgcctgactgaaggtgcctctttgtgcaccagaggtatgtgtgcattggcccactgggccctcctgtaggtgggcctagcccaggcccttgccagggcctcttggcaccctctcctgctctagctattttgggcactggctgtgttcgggtttggggagtgatgggtaatcctgcctagaccaaggctgctggggtgaggttggtggggtactgactggactgccattccagctccctgaatctttgatcactgtagcctctgcccctggcttcagcttcaaagggtcatggtcagcagactctgaggggatgccagccccactgatgaggcagagaagggtgccagacaagcctgtcccttgggacattccctgctctcagtatcagggatagttgtgctttttctaagcaactggtttgtttttacattgtgagacatggaatctagggactggtcaggtttccttcttcccattggctgctggcaagctcagggccacatgagttgtccctttcctagatctctgggattcagcatgtgctctctgtctgcttgcctcactccaggctccatctgcctgccctgcctgagtttttcttatatttctttagttaatattctcttggctgttaagtgtgcatctttgtaagctgtctgcagcctttttggaacagggcaagaggggaggtataaatgaatgatgaggatgatggtgatga

SEQ ID NO: 52076 - DNA, 1982 bp, Homo sapiens
cgtgagtcaccgtgccaggcctttttttttttttcttcttcttcttttcttttttgagatggagtcttgctctgtcacccaggctggcatgcagtggtgtgatctcggcttactgcaacctctgcctcccaggttcaagcaattctccttcctcagcctcccgagtagctgggattacaggcacacaccaccacgcccagctaattttttttatttttagtagagatgtggttttaccatgttggccaggctggtctcgaactcctgacctcaggtgatccgcccacctcggcctcccaaagtgctgggattataggcgtgagccaccatgcccggcaaaaaattcagtttcttgatggtactagcctcatttgaagcgcttagtagctatcttattggatgagtgcaggcacgcaacatttccattgcaccagaaagttctgtcggaagcgctgtgtatgttaagtgctgggtattgctggaaggagttgctgtggtcattatccctggttccctgtcccatattggaaccgttccagctctcattggttcttcttgctgctcctctctctgctgggctcttcctgctttcttctcggcagcctctcactctccctttgcctgaccacacccataatgtgaaaaactccatgacttgccttcatccagctcctctgcccctgttattttcccacgtgctccctgcagcctgtctgcatatctgccctttcagctgctggcatctggaatctccatgtccgggctccgaaattcccactacccattcccagtgggagaaggggaggaggcctcccctggcagtccctagtccccagctcccagcagaggtgccggctgcctgggccccttagcggtgtagagatgatggtttgttgtgacgggggcaccctgcccgctctaacgcgcccgtatcagggcgccaagtgtgctgtttgcacttggctgggcctcacgatctggccgggtgcccgtgagggctggcccgctggcacccttggtaacaaaggtaacaaaggccaatcatggaccctccgcctggtcaggaacataaggagccggtcctgggctgggccctgggggtgagggacgtctgacacccagaaccagagtgcaggacagaggccgtggctgtggctgggctctgggtgctgagtgggacaaggcccaggcaggcataggcaggatgtgagcttttgggggtcaggcaggtggttgctctgggcagttcaggtgggcagggtctgcacctggcattcacacctgcccggggaggagctttggcctgagatgccagagaagctcaaggtcacctcccagcaccatcctttctcctccccttccttttggggaggagaaagtcatctgcgaagtggatggaacaggcatctctagcccatgagtgacaaggacattgaggccctgcaaggagctgcagctggtctgagatcacatggccaatccctggaagaatcagagcttggactcagacacctgcgcttttctacctttctgctcctccccatgggagttgtgaagccagtcgtccctggacacctggctatggagggtcagatcctggccctgccagattctcctccgggggatagagacaattacacctagctctcagggcagtcatgggggttagataaccggcctcctggctgttttccaaaacattctgaggctcctcctgcctctggggtctttatagatgctgctcctggtgcctgggtgctcttcctctaagtatgcacctgacttgctctgtcagcatcaccctccatacccagggaaatagcaaccctcaacaggccactccccgtcccctcaccctgctgtatttccttttcagcactctcaccatttgacatgtatatttggggtattaatttatggtccatcggtctccaagtagacggtcagcaccagcaagggcagagaacattgtgtggctcata

SEQ ID NO: 52077 - DNA, 1747 bp, Homo sapiens
tcccattttacagaggtacacattgaagttcagtgcagggaagggtctggactcctctgctgggatcacaggaggctcgggaagagccataagaaattgagtcctcaaacttataagccaatattataattcagttcaacatagtaagtatttgtttattatcccctagctgctggacattaggaagtatctaaaggttgaatatatacatatgtttaaaagatgaaaaaaaaaaacttggtgtctgtccccaaggagctttggttccagcaggagagaagagacagtaactcaagtgattataattaagactgaatctctagtgttctgaggtagaaattaagtccacatatttgtagggagaaggatgtctttataggggttccaaaaagtctttagagtggaggtggtgattgagtgggccttgaaggatggatgaatagattagctcgaagggcatgggaacagcattccaagaagagggaaccacatgactaaaggcctagaggcaggcaaatgtgccctgtgttaccctgagtgggtgtcgtccagttcttaggagcctcagggggctgatgggtggagaagtccaagcccagcttttttgccattgaagattctcagtgttcttaaagacatggcttctcgaccaactgggactgttccatccccattctgccctgtcttttatttttatttatttatttatttatttatttatttatttatttatttatttacttttgagacagggtcttgctctgtcacccaggctggaatgcagtggcacgatcatggcccactgcagcctcgacctcctgggctcaagtgatcctcccatctcagcctcccgagtagctgggaccataagcacacaccaccacacttggctgatttttgtatttttcatagagacggggtctcgccatgttgctgagtctggtcccaaacttcttgggctcaagcaatccacctgtctcagcctcccgaagagctaggattacaggcatgtgccaccgcgcccagccattctgccctttcttagtgtgaaaaaatcaaagacctttgtaaacaggcggtcagaacttctggtcagcgtgtgataactggtgtagctgacagaattcaggccaaaagcagacagacttgatatcttgattaacgaggcagccttatcaccacacatgttcgatttccgttagccgtttccagccttgacaataaccatgggtggggagccctgtggcagagccaggcctggttccgattttgcctctgcagcctacagctgtgcagccttggcaaacctcagtttcctcctttgtaaaatggagatagctccatctccagccttggcctaaggatcaatgatggtataatctgcactgtctgatatggtaactgctagtcacacgtgactatttaatgcaaaatttaaaattaaataaagttttaaataaaaattcagtttcttttttttttttttgagatggagtctcgcactgtcgcctgggctggagtgcaatggcgcaatctcggctcactgcaacctctgcctcctgggttcacgcaattctcctgcctcagcctctggagtaacggggattacaggcacacaccaccacactggcaattttttttgtgttatttatttatttatttttattttttttaagacagagtctcgctctgttgcccaggccggagtgcagtgacacaatctcggttcaccgcgagctttgcctcc

SEQ ID NO: 52078 - DNA, 1054 bp, Homo sapiens
agatcaaagctttcagccggcctgggccccacctctggtttcacctgagcaattgaagggaattctctagctgggaggactgtggcctcctaggcaggggggttttaggcagggccaccttcctccaagaggctccaccttacgttggcttcaggtgcttcctccttccccccacacctccacctcatctcccagaagacccaccttgtgccctgacaggtactagaagccccaggggccacctttacttcatacttcaagtggtggggggatgcaccctctctagcaacaggactctctcctgctccctccactgccctctcatagtttgggtttctaagcccaggacacttggttttagaaagaccaggaggaccctggctaaggagctgaaaggcttcagaccgcccagaaaagagcccagagccgccttgctgtggctgttagctcccgtccatcaattccgcaccgtttcattctgcaggttgcactttgggacagtgtcataggcaggaggcatagccctgaggcctatcctagcttcatcactgattgctgtgtgaccctgggcgggtgagttcgcctctctgagcctcctctgtcaggtgggaatggcaattcctacactgcagggttttggtgaagattagagatcatataaatagcctacagctggaatgggcagttgataaataacgggaactattattttgtgattttatctttcctccttcgagagagcccctggtacttggtcctagataaacctctgggtctcagttctattgtgtcgtccccctgcaaccccacctgccacctcacccccgctatgggaaggccctaagtcccagagtccatcctctcctccaacactcttttcttatgggatcttcataatgttgggaggggagcaaggtgggaaggagtgtgagtgcagggggccgaaggctctgtaaatgctctcagggaccttccctagggatagcaggttgagccttcctggacagctggtggtccaagctttccctctccactgccagaggcctcaccaggc

SEQ ID NO: 52079 - DNA, 1042 bp, Homo sapiens
agcctggccaagatggtgaaaccccgtctctactaaaaatacaaaaaagttagccgggtgtggtggtgcatgactgtagtctcagctactcaggaggctgaggtaggagaatcgcttgaacctgggaagcggaggttgcagtgagctgagatcatgccattgcactcaagcctgggcgtcattgcgagactctgtctcaaaactacaaacaaacaaacaaattcaagtgagcaaattaatggctttgaggaagccagcaggccaagaaggcccaggctccttgctgagattggaaaggggcgtgctctggcccctgcacttgggagctgcctgcccagccatgctctctgcagggccccagaagatgtgggacaagctgggatgtccactctgccctttttgacttgtctgtgtcctcattggtctcagagccacttccctgggcactgtggtcaagggaaagatgtgggctcaaaaggccctgccttcaagtcttggcccagccctgactggctctgtgaccttgggcaagttgctttacctctctgagcctcagtcaaatgtgaaatggggaggcctgcttcctggtggttatgaagtaaccaggtggatgcaccttgctcagtgcctggaatgtggcaggtatttgacaatccgtgattgcactaagtctcgttcctgctaaagacaaggccggtggaatatctgaggcagggttcccagggcacagccgggcacgccttctctatgacccaggtcctgtactgggcttgttgaatgaatggctgtgtaaggggattgtccattccctgggcctctttcgcagtctcagagctccgggtgtaactgcctctgatctgtcactgcccctccttcgcctaccgaggccgcagctgtaggacagagtccatccttccaccctgattgctccttcctggactgggagaaggaggggggcacaccccagggtgtggcctgggaaaggctggagtctttggacgccttgtccccttcccagatgtgtgcagttggtgggctctga

SEQ ID NO: 52080 - DNA, 1039 bp, Homo sapiens
ctgcaccctcagactacttggggtatatgggaagggttcccagccctggcctgttgcccccctccccttcacccaatccagtcccagctatgaggggtcagactggaggaggaagtgaatatgacttggttccccggcagcttcccaagtatctgctgggcctacctctccctgtcccagggcctaccctggcctttttctcctctcgctcctgctcctgccaagaagagggaggctgcgccgagggtcccggccctgctggaatgttgcttccgcctgggccttggcctctttggccctgccaccccctcctgctcccggggccagctgccccagcacccagagctggctgactgaaacccagaagtatgtgtggaactcacttcgcggggagccgccggcctcactgcccagcctggtggcgtcagggctgtgtcaatagcagccttgagaggggtgtggctcgtggctgctggggtggccgggtcgggggtgctgtcatgaaagccctgagaacaaggtggctctttgaggcctgggaatgtgaggcctttgagtcttgctgcccccagaaccactctcccttcccttccatgatgctcatctgtgccaggcctgcaggaacctcagagcatccctggaggcatctgtggcatcctgagatagccttaggaccagctcctagctcctgaccagggcccattccctgagccatgaaggagggtgtcctgttgctctgggttttaggggagtatctggtgcgcaaagccttgcagagtgtgttgaatgaatgaatgaacaaatgatgtatgtgattaagcgttttttaaaattcatttcacaaatatctgtggagcatcttctatgtatctgactgtgttctagatcttttttttttttttgagatggagtcttgatctgttacccaggctagagtgcagtggtatgatctcgccgcactgcaatctctgccccccaggttcaagagattctcctgccttagcctcccaagtagctgggattacaggaacacgccacc

SEQ ID NO: 52081 - DNA, 1039 bp, Homo sapiens
ggcggcgggcgcgctgctgctggcgctgctgctgcacgggcggctgctggcggtgagtgtgcggggcagaggggcggggggcgggggcggaggggctaggggcgccccggtcccgctcgccgcctcccgccaacttggctggggcgcccaaggctgcgcggcggggactctggcccgggacggcggcgcccgccggggaccccgggccggcgccaccctgcggcatggggctaatccaggggggccaccagtcaggacccttcgtggggctgggggcggggctggcccgtgtgggagcccgtgggtctctcggccacgttgccgagtgctggagtctcgctgggcatggtccggcctaccattcctggggaccaggaggggaaactttgagcagggtgggaacttggcaggacgagggaacccttctgcgccagcttggcagaacggccactcagtggtgatggggaccctatgagtctcgctgaaactttaccacaccgtctatcaccttggggagcttggacccaggtaggcacaagcaaaacttttgggacagaactgaagcttgtgtggaacacccacgggccttggagtcatacagccgaagagttgaatcaatccctgcctttcactgagtaactgtgtgacctggggcacgctagttaacctctctgaggccagccccacgtgggtcaagggaactcaaaatgcacggcctcaaaatgcatagctgcagggcgttgctggactgcgtggaatgagctgcaaagtgcgtggtgcggggatgcagtgcacccttgggggacccgagttccccagctttcctcttcccaggtctccaagaggcagggagaggcctgcccttgcagtctagtcccctactctgagcttaggtggaggaaaagggaattctacggtcaggaatcccgaggcttagaaggcacttggccagcagaggccctgaggacctgagtgaacttgaggaggactgggtggggtcggtgggcagggagctagtggcagatgtgggtgggggcac

SEQ ID NO: 52082 - DNA, 2003 bp, Homo sapiens
gctgatctggaatgcctgaactcaagctatttgctcctgttggcctctgaaagtgctgggatataggcatgagctgctgtgccgctgacaggctttcttggaagtaaaagactagttgtgcttttatttatagatgtattttaaatgcacttctctattgttttagagtttttttttttttttttttgagaggatgagaaacaatgagcaccttaggctacagggcttcctttgaaggggagagagggttaaatattgtgttaacatatcttccatgaaaatatctctctgtattaaaaggcttcattctggaattttatggtaatgccttattcagtgttctcttccacatagatttcctcattagattgtaagttctgtgagggcagggctttggcctggcatggtcaccccattgctaatgcctagaatactgccatacatacagtaggttttaagaaatattttttaagtgaatgaatttgatgatgtctgagggttaacgttttccctaatattccatgggcctttttgctgtgtttcctgagacagcttttgtgcttggtcagccatatctttatttgggctcattgaagtagtgattactaatctactcttgcttgactttttccatctgtttaggtcagtatcttctgcagctgcactgtctggacaatttaccatcacttagaaaatctgtgatgactactagttctcttactctcctaaaaattattcacttaatgtttgtttccttatcttcctttatttctttgtttgcaaataacttttaccgcttgttcactactgtatcagattcctggtcatgttatgctttgtgtcttactagtttctacttttagtttctcataccttcagtccaaaatatttttactaaagcaattttcattacttgccatttcagctacctctgctgctgctgctgctattttaagtcctgaatgtcaaaactcttctgggacattgatctcaaactgcttattccgtgaagtgaaaccaggctttctgccaccaatgtggcgtccctttttgcaattttagaaaaatattttttaaatcaaagatttggcattagccattatactaaagtccagaacaatttctaatagagcagaaaactatattgttcagccatggtattcactaagcactggtgctctatcaccttaagacaaagtctgatttaggctctgttactgttgttctgtaatgctttacactttaaccttgcatccttttctgtaaaattaagccattgccatttgccatttcaattctgctgtgtgttcttgattggtatattgctactataatgattaaaagcatagactctggaaccagactgcctgggttcagatcctggttctgccacttattaggtatgtgcagtctaagtaacgtctttgtgactcaggtttacttcctctaaaataggggtagcagtagtgcttacctaacagggctgcagtgttaggaagattgaattaatatatatgaagtgtttaggactgttcactggcacatagtgagtgctgtatagatttttgctcttggcacaactgtgaggacccttccccgccatctttgagaagctgtgtttctctcaaacataaacattttaataaccatccttctcccggactaatctgatgaatccaaaaacatttcttttttcttttttgagatggagttttgctcttgttgcccaggctggagtgcaatggcgcgatctcggctcaccgcaacctccgcctcctggattcaagtaattttcctgcctcggcctcttgagtagctgggattgcaggcatgcgtcagcgcccctggctaattttgtatttttcgtagagatggggtttctctatgttggtcaggctggtctccaactcctgacctcaggtgatccgcccgtctcggcctctcaaagtactgggattacaggcataagccactatgtctagcccaaaaacatttctaaatga

SEQ ID NO: 52083 - DNA, 1476 bp, Homo sapiens
atagcaggtggtcaggcggttggggcagtttcaatacctagactagttaggaaaggtctcagagaaggagaggttttgtagtggaagggtagcttgaaaatagggtgagttgtaaggccagacacccaagatttggctgagatgggaggatcccttgagcccaggaaggttgacgctgcagtgagctgtgattgagccactccactctggcctaggtgacagggtgagaccctgtctcaaaaacaaaaaaaatctttaggaaacctgtatatttgaagatcaagggctaaaaatccactcagtaccatttagcagaggatgtatgacatccattacacatctgtttcaaaaacagcatgtttccaaaattatacatctctttacaaataaacgttatagtattaataactatagaggcaccatcagaactagttacaaaacatgctgctaactttcacaaggcatctctgagccatctcttaagttctgtattttgatcccggggctttaagaacattttctttgctttaattagttgtaggtctccattttcattgtcttcataattggcttgatctccctttttggcagacttttttcctgttgtccccaccaaggtctcatattctagccatttcttctagccatttcttcttcatctgacacgtaaaattccactgtttcatcttcaatttctgctttgttcttagtattcacctgaagcactaatttctcaacctcaggagtaaatctgatgaatgaaattccttccatagaaatgatcttcacataacaagagatgctgctcttctgttatgaaattctttacttattaagctctggcaaatctgagtaccagtgctcttaactaattttattttcttcctcttctagtcatttcttagtttctgagtccagtcttctttgcatgaacttcatgtacagcaggttcttggagaacttggtcttgtgctcaggtgccatgctggcttcagcttgtgctgtgttctggccacctgctgtttcttagttaagagactagaatgagaaagttacatgtaaggatgtcagttggtagtattattgaaggaagaatatgtagggggtgatgcttgtttattgtctgtgtaccccactggaattgttgctccaagagggcgtgaactttgttatgtgaattgtggggtgtgcctacgtataggacaaagcttggcacgtggtaggtacttagtaaaggcttgttgaatgaatgagtagatgaatgagtagatctacaagtcttgagtattttgaggaaaacatcttattgtaatctccattttattccttttttttttttttttttttttttgagacagaatctcactctgtccccaggctggagtgcagtggcacaatcacggctcattgcaacctctgcctcctgggttcaagcaattctcctgcctcaccctcccaaatagctgggactacagg

SEQ ID NO: 52084 - DNA, 1061 bp, Homo sapiens
ctgagaacaattagtataatcttcccttgatattgcaggggattgattccagaactctccaaggatacaacaatcctggaatgctcaagtttcttatataaaattacatagtacagttatccatctgtatctgtgggttctgcctctgtgtacatggagggctgactgtactgtaattatcttggagataaaaagtgttatgagttcctttctaagaagtttggaattgctgttttaaaattccttatattgactttaaagttaccattacttgttaaagactaataattaacatgtactaagcatgtactgtatgccaagcactgttgcaagttctttacatgtattatcttagtttaccttatgagaaaggtagtactgttttcatttttagagaaggggaaaccaagctacacagaggttgaataacacagaggttgaatagctagagtgtggtagagccactctgactccagaacccaggcttaacaggggactcacaaccaaccagtttgtaacaaattgcagagcagtcaggtcgggaagtctaagaagtggaagatttgtgggtaaatagaaaggggaagaacaaactcttatcttactcccttctcccaataaaattcagtagttatatgcagggtgaaaaacaggaaataagcttagcccctattttttgcttcctcttctttatatttgctttcctctttgcattgctggtaactcacggatatatacttgtcattccactagcactgattatatttgtttttattaatgtcacttctcagacagtatagtgtaatgtaatgtttatcaagagcagggacttgaggttgggcacggtggctcacacctgtaatcctagcactttgaggggcccaggcagttggattacttgaggtcaggagttcaagaccagcctggccaacatggtgaaaccctgtctctattaaatacaaacattatccaggcgtggtggcatgcacctgtaatcccagttgctctggaggctgaggcaggataatcgcttgaacccgggaggcagaggttgcagtgag

SEQ ID NO: 52085 - DNA, 1028 bp, Homo sapiens
tataattaccgtgtgatcgtgtggtgctctgctgcttgttggtcagagcctgagtaaggctgaataaggctggatcatgaaccattctttaaagcagtggcctttgtattgcagtctagttgacatacatgcatacatacaggtgtgtgtgcacgtgtaactgaagaacagctttcacaaaataatatttagcacactgtggaattttctctgatacagcctcttctctttcatgataaaaataaattcgctgattatcacaccactttggaccttttaaaaataacacttaagaagttggaatagccagggatcagaaacttagaaatggaccttatttgttattgtaacttatagcaagtcattgtgtctcttattgggttcttttagccataataattgtgctagttcttttcttgctctgagtgcctgaacctgttgctaagtgaggaagaaaaatccatatgtaagtataaataaacaaatgtctttaatctttttgcaggtcatcatcagatttgaaatatttaaagtggatacaaaactatttcagcaatgcagacaattaagtgtgttgttgtgggcgatggtgctgttggtaaaacatgtctcctgatatcctacacaacaaacaaatttccatcggaatatgtaccgactgtaagtataaaggcttccttctgttagtaaaatgttgtaaaatttgatatccttttgaaaacgctttctctatgtgtactgaatttttttctgttgtctgcctttgtttcctgtttttaaagatcttgacttctcatgggtaaattatatacactttaaacagctgaaaaatcagtggaaagtcagaaggggtgacacagggtttgcaagaagtgctgggaggcaaaactccagtagacaagattctaacgagtggtggtctcaatttggtgaagtatgccctacatcttggaatgaggtgacttttttttttttttttttgatattttggccaattattgatcagtacttggaggtctcctgggata

SEQ ID NO: 52086 - DNA, 1370 bp, Homo sapiens
gtcagggttgtgttaaaacaaaaaccttacaggaaaggttcagataagcataaacttgcaagagacgatgtgaatgattttttttttttctaaacacttaaattttcatctgaatatgtctgatcttttcttgccaattctgacaattgatactatactgtttcttgggcaattcaaccaggatagggaattagtcataataattgagactttaatgtcaaagaaggcagccatggctatttctgccacagttctcaagcgtgctttatatagtgtccctattcctatatttttggaagtattccttcctcatgcattccggccgtttttgagtgatttaattggaactccttttgtagtttgatgggaaactcagattttgaagatagggagcaatgttagggtatttggaatgggacttgtaactgatgtgtatggtttaaactttttcaccttcatgatatcgctgattccgtcctttgagtactgttctgggggcaaaggaaaaggttatggaaataattagcacaaaagttttatgttctactggtactggtgctttgaagtttgaacactgagcagacatgcctaatagggcaagattgaagggtggaggtttctaataattatattaaactcattatatttatgcttatgttttcaggtaattcattcatttttattgtgtttctaaaaaacactattggattcttaactacgtgtatactagggtaaatggcatatatgattacttattacatatgcactaggtatttagtttatagggcctagtgcataatttaatagtaagtttagtacttggttggatatttacagataaaacttttatgcttaactgggatatccctcaaaataacttcgaggcctagtatcagatgatttaaacataatcttctaatcctcgtttttttgggcagtttagtgctattatagaagcagttatttaaaagtttagaagattttacaccttctcatgcatagcaactgttttgagagttttaaaaaatgcctggtgcttctctgtgtgttttagtaacattcccagaaaagtgtgcctgtgtgtgtatattgggggagacaagggaaagtcatgtgtgaaacactcatgtccatgttagacactaattctgtgtgcttctgatgcatacctctgttctctagatatgggttgctttgagggaagacacataggccctgtggattcacttttaggttactagtgatgctttagataattggatgcttttaatgtaagatttttacagtatcaacaggtgtatatagtaaatccgtttgtagagagtatgaagtttaaaaggtcttagcaggtacatttttcttaccagagt

SEQ ID NO: 52087 - DNA, 2799 bp, Homo sapiens
tctgtactccttccttccttttatattttactgccagagttggttcctagatgtgcagaaagaattgcagtggaattttaacttttatgtggcatttctactttgtaaatgatgtagaaagaggaaggctttttaacttttgctgcttttaaagaatttactgctgtttctgatttattttgtgtctaatgtgacatgtgggtaccagtcctgtgggatgtcatggatgggggcagggtggaggtgggaacacttggggtggtctggggttggcacttacaattggagctgtgttctgggacttttaggacatatttacttgggatcaaactgatcaaactaaagaacatgtgaaacaaccttgggtggtaaacttgtggcttcagatttaggtgattttaggtgagtctgtagacctgggtcctaagtaccaccaatgctgagtcacactgtcatgttggagtttctggctgaggtgtaagtgtatttctgtatcttaatccccgtaagatctgagaatattcttcgttttcactccatgctttatgctctgatacccatgcagacatcttaaagcactggactgcttgctaaaactcattctaggaccccattctttgttttcttatgacttgggtggtggttacttgctctaataacattgctgaataactgaagtgtatgctgtttttagagtctgttctttaaagtccttctagttggtactgttgcacaattaacactttttaaatgtctgaacctttccgttctgggaaaccagtttactctgaaatcttgattaatcacattcagatatgtcattgaacctagaaacacatagcatgcctgttagtctgctatttgtgtccttcagttattcaggggctgaattcacataagcctgaaattgtaatagatttatttccaaaatgtgttagaagtcaacatattgcattttaataaaaattgctttcctgctcagttaaccttgcttgaggtgaagtttttggtcagttatctactctcctggttataatgggcttaagatctagcattctagcgtttttcttaaggcacattgcttctgtgaattcagctcatttaatccggactgctgttgtacctgctagtctttctaatcctctaacctggctgctattctctctcctcccctctgtcttgtagagaggtctgaagaatgtgtttgatgaggctatcctagctgccctcgagcctccggaaactcaacccaaaaggaagtgctgtatattctaaactgttttctccttcccttctttgctgctgcttcctgtcccactactgtagaaagatcgtttaaaaacaaaggaataaaaccatcctgtttgaaagcctctgcgtctttttactcaccaccttagagcaacctctgtattagtttttgatcaagaatgcaatatcatataaattttttgtgatcagtagtcaagttggacttgttttaacgttctgctgcttgagttgcctgatgctcagagctttttggtttggattactattgcaaaagggaacttggtctggctttaagaatgtcctcttggagaaaataacaagagttttaacacttctagatcttagttctagatggagaaagtaacacaaacatcattttactcttatgatcaattgttaattgtaattgcatgacaaaccttatggaaaaggggtgacctagtagagtgtaatggggaagggaggattcttttctggttttcctttgtgcggtgaaactttgtgttgctgttgctttggctgtctgtgctgtagtggagtatttgtcagtctggggtggggaagatattgatgtatctgctactgctttatgagttcatttgttacattatcttttaagaataacatccatttaaacagttgacttacagtttgttaatgctgagatgtaaagctgccacctttatattttcctgcttctgattttattgtgagggaaatatacaattgtggttaccttcaaattttgaaattaaaaatatacaaccgtttgtataaatgcctgatgaagctttattcctgttgcactgactggctctaattttacgtatgtatcaggtacccacatttttgctcccttgaatctccttgactctgtctaactggtgggataaagggagttcaaagtgactatctttgcagctaccataatcaccctctctctctctttgcctgtgccttccatagaataaggatgccactgacccgtgcccgtcctctcagtcctctgtttcatatccagctgtttcatttgaatgcagagctgcttcccttgtttttatgtaaaatgtttcagcagcacattacaaaactcatactgaatgagcaaatgacacatgtgcttgtttgcttcttgtgacatacattggtctgcgcaaagctttctcaaaggaccactgtctcactcatgaatatctgctcctctgctcctgaattgctgaatccttccagtgccctggacaaatcttggtgaagtgagattattgtgttgagattcagggttgtttttaatgtttctttctttgccaactcttgggggtttgaatgttttaaatttgaactccaactttattatactgaaaatcagaccgcccattttttctttctaccccttttcagaaaggcctaaagaatgtatttgacgaagcaatattggctgccctggagcctccagaaccgaagaagagccgcaggtgtgtgctgctatgaacatctctccagagccctttctgcacagctggtgtcggc

SEQ ID NO: 52088 - DNA, 1712 bp, Homo sapiens
ttttgagtaattgtattgtcagaaaagtgattagtactatttttttttgttgtttcaaaaaaaaaatttttgtgtgtgtgtgttttttttttttttttttttgttgtttaaaagcaaggcatgcttgtggatgactctgtaacagactaattggaattgttgaagctgctccctggttccactctggagagtaatctgggacatcttagtgttttgttttgtttttttccctcctcttttttttgggggggagtgtgtgtggggtttgttttttagtcttgtttttttaattcattaaccagtggttagcccttaaggggaggaggacggattgattccacattccacttcctagatctagtttagaaaacatgttccccatctggtgctcttaggaaggagtatagtaaatgcctcatttaataacatactcctttttgaaagttgccttttctctccacccttgagtagatccagtatttgatgaaactcatgaaagtgggtggagcccatcttgcccctcctcttttctaggacgcactatatgtgactgtgactttcaaggacatttgtttgccatttgctgatttttttgggaagttaatttctaacttctttcactgataaatgaagaaaagtattgcacctttgaaatgcaccaaatgaattgagtttgtaattaaaaaaatttttttccctttcagtcattgtcttatatgcttagcatagatttgcagctcagtagtatatggtgttcctagaatgcagctgaagacctgttatgtagaggaaatacgaggggtggtgctagaagacagacatctgtggaatgattcacatcctctcaagttaggaggatggaggcctgcttcattaagaagctgggggtagggtgggggtggggagaacacttaacaacatggggaccagtcaggggaatccccttatttctgttttgcatatgaggaaccctagagcagccaggtgaggctctctagtttaataaaaatcatggaaagactcttaatgcagactcttcttaagtgttaatagggattttttcagcttattttggttgcagtttccaatttttaaaaatgttgaggtaatctttcccaccttcccaaacctaattcttgtagatgcattagtgttgaaccaatgctttctcatgtctcaattctttgtatatgcattcttttcagatgtattaaacaaacaaaaacccttcacaagccagcctgagggttgttattttccctccgtctcttacttttcagatattgaggagtgggaatttgactcttgataacatcaatttctaacaaactttgggataaaattttaaagctttattatttttattttctggcattttagtttgagataatatttagccctctatatgttcaggtttgtgctttctcctctaagtttgacccttcccttaaataccaagtaggtccataataattcttagtgaagcagtgttcaggaagctcactgctcatggtggaaggaaatgtcagtgtacctttaatccatagatcattgaaaagcagctcattttcccccaagttttctgcatcagtggttctccaactggagtgcagcttgaacaatgtgatttttaagttttccaggcatttctaaaatgtagccaagtttgggaatcaccacacctagttggttatctcaaactactactatca

SEQ ID NO: 52089 - DNA, 1215 bp, Homo sapiens
ctaaaatgccagaaaataaaaataataaagctttaaaattttatcccaaagtttgttagaaattgatgttatcaagagtcaaattcccactcctcaatatctgaaaagtaagagacggagggaaaataacaaccctcaggctggcttgtgaagggtttttgtttgtttaatacatctgaaaagaatgcatatacaaagaattgagacatgagaaagcattggttcaacactaatgcatctacaagaattaggtttgggaaggtgggaaagattacctcaacatttttaaaaattggaaactgcaaccaaaataagctgaaaaaatccctattaacacttaagaagagtctgcattaagagtctttccatgatttttattaaactagagagcctcacctggctgctctagggttcctcatatgcaaaacagaaataaggggattcccctgactggtccccatgttgttaagtgttctccccacccccaccctacccccagcttcttaatgaagcaggcctccatcctcctaacttgagaggatgtgaatcattccacagatgtctgtcttctagcaccacccctcgtatttcctctacataacaggtcttcagctgcattctaggaacaccatatactactgagctgcaaatctatgctaagcatataagacaatgactgaaagggaaaaaaatttttttaattacaaactcaattcatttggtgcatttcaaaggtgcaatacttttcttcatttatcagtgaaagaagttagaaattaacttcccaaaaaaatcagcaaatggcaaacaaatgtccttgaaagtcacagtcacatatagtgcgtcctagaaaagaggaggggcaagatgggctccacccactttcatgagtttcatcaaatactggatctactcaagggtggagagaaaaggcaactttcaaaaaggagtatgttattaaatgaggcatttactatactccttcctaagagcaccagatggggaacatgttttctaaactagatctaggaagtggaatgtggaatcaatccgtcctcctccccttaagggctaaccactggttaatgaattaaaaaaacaagactaaaaaacaaaccccacacacactcccccccaaaaaaaagaggagggaaaaaaacaaaacaaaacactaagatgtcccagattactctccagagtggaaccagggagcag

SEQ ID NO: 52090 - DNA, 1065 bp, Homo sapiens
agaacaattgtaatatttccttcattctgaggtgtatttttctcacattttcatattgtaattaggatacctgttaacattggtgtacatttaatgtagtagtactttttctccttttgccctgcaagttgtcactaaatttgtgctatcataattgttaccttcatagaatgcttaaatagtggtacttctttgacttgttaggtttggactattttccttttcttcttccatttgtgaggtaaattagtggttattttggtgctgggtgctaagaaactcgcaaaacaagggccctgctcaagaaggattgaaacttagtccttgctgggtacaaatttagaaatttgttatataactgtggggcaagggacaacatttcaccaggaagtagcaactccatcatctttcaggaagggctgatggttagggcatctctgaatgattattggagggaagtggctttatgtcacacttgttttctgtaagtcttactctgtatctacccgacttcagatcatggtgatttaattacatggcccaatcatgttttctttccagggctgcttgaatgcttgaatacttttttttttgagatggagtctcgttctgtcgcccaggctggagtgcagtggtgcaatctcggctcattgcaagctccgcctcccgggttcacaccattctcctgcctcagcctcccgagtagccaggactacaggcatgtgccaccatgcctggctaatgttttgtatttttagtagagatagggtttcaccatgttagccaggatggtctcgatctcctgacctcgtgatccgcccgccttggcctcccaaagtgctaggattacaggcgtgagccaccgcgcctggccagaatgaatacttttaattactactatgagtcttttttcaaagtgcctccaccttaaaaaaaattccttattttattcacttgccagaataatgttgcatttgaaccatgccaacggtagcttattaaaacagcatttatttttctcattcatgggtcagctgaacttgtctctagccttcagattgggct

SEQ ID NO: 52091 - DNA, 1073 bp, Homo sapiens
cttggcggaccaccgagcccctcagcaaacagggaggtgagtgtgcacccggtctaggcctgtttgtgttggcctcgccaggcgggggattagctcagctgggctgctaattgcctccgaagtgccggccgggatgctgacaagggctgggcctccagtcccctcctcccgcagcaggcactgtgccaggcttgggggcctggcccagaagggccccttctctcccctgtcagcgcctgcttggcctagacccttgagatgtgggcagggggtcaccaggactggcggctcaggaaggaatcgggggagatgcttatgaagtcatcgactgggccaggccaggctgtgttccacacacccctcccccacatgccttaagaccgcctctccagctccccttctgaatcagacactttctcctgaagctcagcacttttttcctcttactaggaagctgctgggctcctttgcccagacaccctcacctcagtcgctgctctgagctcccacagcatcttctctcttcttgtctctttctccctgtcttcctcatgtctgtcctccctctctgccttttcgtcactctgtgtctagcctttcttagtctcccgcagttgtctagttcctagacttcccttctgtcctgttttcctgtgttctctggcctttgcttggcctttactgctccccagacttcccatggactggttgttctcaggaagaggctgagaaggaggtctactttgtcactgcattttcacggctctcctagagaacttcaggcccaagctctgagggcagctacgaggatagagcctggacacaggctctctgcaagcggacccagcctgggagcctgaaagtcttacttccgtccccacaggcagagcgcttggggcccactacaccttttcctgcagctctggcactcctgtctgcacttccgacttggccctgctctctggccttgccctgcttttcccagacattgggatctcaatcagcccctccagctggtgcccagggacagctttgctataaccttgttggctgctgcctgggtctcctggcct

SEQ ID NO: 52092 - DNA, 1014 bp, Homo sapiens
atagaagagaaaaaaaaaattagcagggcgtggtggcgcgcgcctgtaatcccagctactcgggaggctgaggcaggagaatcgcttgaacctggaaggcggaggctgcagtggggcgagatcgcgccgctacactccagcctgggaaacaagagcgaatctcccatctcaaaaaaaaaaaaaagaaaaaaactttacttaggaagtgtggggagggaaggagggagtggccaaggtcagaggtcagagaagagcctagcaaccagccggcccccgccgtcctagcataggtggagagcgagcgcgtgacgcaggccccgcccccagcacgtgaccgcggcgcgtggggcaggtcgggccgccccctcccctctgatacccattgcgcgccggcctcaagatggccgccttctggcgtctccggcgctgttgaatggcgaaagctttattgttcccttcgggcaggagtgttcgtgtcctctatggcgctgtcaataaagaacggcagtttgaatcggtgctgaacaggtaaccatagaaacggggctgggactccgcgtggagacccttcctgcagcgggggcccgggtgcgccctaaatgaggggtgtatacagacccttccgcgtggcgaactccgcgggactcggccgaatcacggccgcctcacctacaccccggacgtgccccctccaggggcggtccgcacccctggcgccggctctgctgtagactgcggaggggagagaccgcggggacccactcagggcgccaggcccgacctgacaccgcctggggctcgctgtcgccccgcacctccctctcggcccgtccggaggcctcttgtcgctgtctcactccccctcccttcaggtcccttcgccgggcgtcagcggactatggccttgggcctaatccatgccccccttctctcttcccctctcggtctttgtttacagttgcaaatggttagggggaagaatatttcatgtaatttgcgaaagttctatgaaat

SEQ ID NO: 52093 - DNA, 1061 bp, Homo sapiens
gctactactgagagaactgcacgcccaagggcaagttacagattagttatctgacctggaaaatgtggataatggtgcctcctcaaagggttgtgcagattaaataagagaaactgtattcatagctatggtattttctttttgttgttgttacacatattgctgaataaccaaatttagctccaaatggaaactttataaagtgctaactaataacaaaaatccagaaatacattacagacaaaattaagaatgggggaatccaattaaaaatagaagccctctactttctatctccagaaagaggggagcagatcttgttttttcttagtgtttctgcttggagaggaacttttccaaatggcatctaatttttttaaagccaaattgtacagctgtctatgcagaacacttttcagcattttagtgttttaagttggaaactacttatgttcctccatcaaaggtgtatgtattctcttaaggcattctaaacaaatgttagacttttagttggtggcgatttaaaaatttgtttgtgcatgatttcaagtttcctccaaaagttttcaaaataatgtcacatactctaaaacagtattgaatgctttgaggcaaatggcaggctttttgactaagtaaaaataggataatgttcgggttcataaatgtaagaaattagaagcaataataaatcaagggaactatgtaagaagaacagcatggcaggtttcgctttaaactctccctagtaaccatattgcacatgtcatcagaagacacattctaaccctgcaaacggagcaaagaactggacagagagtgtcatttaatgcaatgttaaacaacaagccctgaattaaattgctattttaggtttgggtgggacctttgcatctaaagtattgcagttttactctgtgatttgggtctgttgggttccagtaaagagcaggtgctaacactagctttgaaggatagtatgaaactgcaagaagagccagggcataccagtttgtttttcagtctattttatttcagttcaaagcatcattgcagac

SEQ ID NO: 52094 - DNA, 1050 bp, Homo sapiens
tatggatttggaagaagaaccagtgggaaaggctgaaaaggagtggtcaggaaggcaagttcttatcccacatacttcagtgctgctgaaatcggaagagaattgtgatacagaggcactgccaagtgccaccgaaaggtcaagtggcacaaagccagaggcaaggcttgttgtataaacgttggttaggggaagaatctgtgaagccccttcaggctgaaagcagtcattcacacggggtaattaacatgtgagtcatatgttcttacagctggcaactacaagccaacacactgttagccttaattgttacagactatatctaaaattaataaggcccgtgtctttttaagtagtctgtcatttataatgtaaatgatttaaggtattcttttttcctaaattgtgagattttaattgcattctcaaataataaaatgacagttcattaaatttaaattcagacatccctgcccatgaaatacttaaaatgccagattcagaaaggtataattaggtaagaagtgcattaagtttattaaaaattcactgagcccctactgtgtgccaggctatgctatttgctgcggatacagagccctagaaagcataattcctgtcttcaagaagtctagtaggagaaaaaaaaaattataatatagtgtgacaaatgtcaaattaaaagcagtgaagaggaggtagggcctgtggccaggaaaggcctcccagcagaggtaacccctgagcaaggttagagcatggagtcgtggaattggagtcctccagaagacaggggcaggagcatgggaccgcagggcttgttggaactgctgctggggaagaaagtgcagtgggtgaggagcttcaggagaagctggcgggaatcaaactgttgaggaccttgtttgccaaatgcaaggagcggatggttcttgtggttcgctaatctatctttctgggtacttttgttccatagatgatagtgaaatgtttcgagggtgaaggaggacattcagcattccagagaatcctgggtaaagtaagagagga

SEQ ID NO: 52095 - DNA, 1053 bp, Homo sapiens
taatttctaagaagtggaattttggaatcaagagtataaaaattttcaagcgtttgatatatattgccaaattgcccttcaggaaggttgtaccaatttactctcccaccagctagctgctaaaatcctcataaaactgctggcatgacttctcaaggcaactagataactatgtttgttggtgttattgatttcaactttgtgctaaaaatacttttatatctggaaggaaggaatagggatagagtacttttgtggcatcaattcctaaaaccgtgggaagcgacttaagtgttcaggagagaaaacgtttagaagccactgatataatggctaagccctgaatttacagtgaggactagatcctcgattttatttttctcagtgatcttatgttgcacatgtgcgcacgcacacacacacacacacacaatggaaacaacctttaatctcagaattacattttgtgatttaattgtttttaaatttttaagtcctttgaacttcttagagaaagaaaatatacaaagattaaacttctgttttttttctccttagtcttcaaattaagtgtaatttcaggcactcaatttaagtaagttgcttatagctctaaaagttcctgattccctctttagtgatttcattcgattactcattcagacctttttctttttagctagattgaatgtgtcctttgaactgtttcattatcttggtaaaacagcatttatagatagagtccaaactcagcttcattctctgcagcaagatagaccacactgtcattttcttctgtcactttcagtttacttgacagagaaagctgaagcagaagagcttaaattagttataaatcacaaaaacacttcttaagattggggttccaccagagcttctttaagtgattccttctcatgaaagttgaagcagactaagaaagtgggagtggagaggtgaatgttgattgaatagccacagtattttgacatcgtgtggaatgtgtacccaggccttttcaaactttttttctggttagaaactatgctaata

SEQ ID NO: 52096 - DNA, 1050 bp, Homo sapiens
gcactgtgcccggcacatgggcattcagtaaatattagttgctgtcttcactgtcatcatcggcaaagattatgctttgatagttgtctttgtacatagacaaagaccttcagataatttcttaaggttggatttccagaagtggagttactgagctaaagaaaagggtacatttttaattatctgcaaagctaagagaaatgcctgatagtttcaatttttcttaacttccaagtaaatatgacctcttaaaagagagaacctaacaaattggcccaaagggcacctaaatagaaaaaccacgggtcagcttcacacgcacagccttgattcgtgctcgtctttaggatcgccacacggatcctctacctcaggcttgacaaacacccccccttgaacctgcacatctgagtctcttacaagtacagccttctaattacccccctggtgagcaattgctagctcctaccaccaggcactgactttcaaagcgttaacggctttatgaccctgaagcgccaagcgattaagtgtaggcagaggagctctgaacatatgtgtatgaggccccaagccagggctctgcagaggacactgagcccttgtgctgattgctctcttcctctctcattggtaatatcctggagtcttctgtaggaggttttgttgcatcaaacattattgttttgctaatatccttacagtccaaccaagccctgatgattatgggactgagctattgagacgctatcatgaaaacctctctgagattttcacagacaaccagattttattaaagatgatctcacacatgacaagtttagcccctggagaaagagaggtaagagagggagagaaacagagggaggggagggtaaaatgagaaagaaggaaaaaatatgaatacacacacacatttatattttctgtaaatatacatatgtagccatgttgagaattgctaagtagaggagaaatagaaggtatctcagtttctaaggtggaataacaaatagaatagttctaatttctgtggtaataaggaaaggc

SEQ ID NO: 52097 - DNA, 2706 bp, Homo sapiens
gaaaatgaggctgcttgtcctagttgtggtagaccctgggatccggggttctggtgccatgcctcaccaattgccctgcttgctctctcggcccataagggagcttggaggttcagttggtctagcatttctcacaaatgccagttctccagacttgttctttatccacattttctaataatctttggcagtctggtcattatatcctcattatatgcatgtgaaaatatagaaaccaagggacacataataactttatagcaagcaactggaagaaggctttcattcctctctgaatccacgactctcacctttgtgcacagttgcagatccacactgtgtatgtcgccaggggatccaaacccacgtgtttctgggcacagggatgtatctggttgcgggagtagagtgcgctcttccatacttgtggtggctgatgaacagatgggttgtcttgtgcagtgagaactccgtccttattcctttgtccaaccacactcgcaccttccgtgtgatcggctgtgtttgtgaggtgccatgtgatgagacggctcagatctcacccagcgtattgcagactgcctgatgttttaatgtcatctaccagatgatatttccctgatacgtgctgtagaattagattttgtttgtagcaatgccataaatttttagtgctgactctaataagctcctgtgtatttgcagggaaaatgtatgcatgccagtactgtgatgctgtgtttgcccagtctattgagctgtcccgccacgtgaggacccacaccggggacaagccctatgtctgcagagactgtggcaagggcttccggcaagccaatggcctctccatccatctgcacacctttcacagtatgtagagactgtggatctcaagccctcagtgccagcctggcactgggaaagcgtgtcaattgcagcagaggtgtcaatccatcagacccaagctccattcagtgcattccccttacctgttccgctgcaaaacccagagtccctcattcctagttcaggaagaatctcattttaaggtatctcatataacgcttatttctctctggccaggctgtttccctgtcttcctttttagcccacctggcaccatttgtccaacagaggcaaattttgtttgaaggagaaagcctctgtaactgattggctcacagagcactggaatatttccattaggccatcttccatttgccttttcccgtaggagcagtccagacactttctgagttaatgtctaccatcgtaagtgagccttggttatgtttccttaaaaacctcccgcccagcattctcttccgaatgccattgtatttcacacagttagtggggtctgcccctgtctttctccccttctgtgagaactgacacagacagaaacacacttttattcggcatgcgtgcatgcgtgggcacacacacatatatatacacacacaggaaggaaggacaaagaaattccgtgattcctcattacaccatcgggaaatcaccagcgtggcatttggctggccacatcacattttcttcagcctctcttgttgcagcaggagtgtaatcagcacagcacagcacagcaggggagttaagagcttggagtctggaatcacacaggcttggacttgaatcttgaccctgacgcttacttttcttgaggccttaaacaaatttatttaccattctaagcctcttatgccccttctgtaaactagagcaaataataatgccaccaccttggattgtaattagaattaaatgagaccacatgtaaagcatgacactccacgcctgacacatagaaaatgctcagtaatgccagatactgttattattggtgacaagagcaaccctctcagatgccatttgtcaccatcaaaacttgtcttttttgcatgccctgcatctcacatgctcttcttccctccccacccctcttcccacacaccagtttctagctgttggcagatacagtgtctcacaagtgcgctttatgtaaacacatccaagtctgtcgtcagccagccagcaaggactttgccaaagctcctatgtgcccagcatgtggctagacattgggtgatgcagggggaaaataaagtgtggccctttccctccaagcagtttacaaggctgtccaaaaaaatccagttacagtaggcttccagatgagagatttggcttggatccagtgccacaattttgatgtcctcttgacctctttaatgacattctgctttagtcttcctttcccagtagcattacctgggcgtcaggaaaggggaagacgttattaactttcagaagggagaagacccagaatactttgccataccctaaactatatcatccgtggcaggcctagcatccaggcccccctctctctcccatttcttgcctgtttcatagaaccacatcattgcttatggaaagctgcatcaaagtgtcttagaagatggtgtaaaactgagatttcaagagctcatgtccacagggaaactagttagtgataccgaatgctgctgcatgtcagaattcctgaattaatctgaatcaatgcacataaaagattggcttgtgagcaaaggattttattaaaacattttgatttctgttgctttaagaaaaagaccaaagtttcctgccataggatggcaaatgtattcttcatcactactagtt

SEQ ID NO: 52098 - DNA, 1163 bp, Homo sapiens
agtgagagatgggattgttactcagttcagccatttcttaattatgcccatgggcaagatactgccttaccactctaaaccttgattttcctaatctgtaaaatagggatgataatagaacctactcatagagttattggaaggattaagtgagttaatttacataaagcacttagaatatgcctgtcatagagcactcattatgctaatgtttttattgttgaatctaaagtggggagaaaggaagcatccctccacttgtgctgttgatgacaaaggaattagtgatgctctggggagtgtgctggaaatcctctacagagaattagaaaactccagaatgcccactgcaaaccggacgagccagggtgaaactccctggaaagtgataaagtgtaatttaacttgaaagatgtaaaatgaggaatggagatgaactacatgatgctgcagagacagttagtcttgaaaccctggaggaatcccacctcctaggatgaaggtgggggtagtcaggtgactgctacactgatttctgatccttggagtctatgaccctgcctgttacgtaaagcagagtcttcacatttgttgctgtacacaacaaccagtgtttcactgatggctgcctatggtgttttcttttcctctccacctcttcctctcatggatgtcccgtgaaactagacatagaagatccttatgactgcaagaagtgcaggatgagtttccccactcttcaggatcaccggaagcacatccatgaggtgcactccaaagagtaccacccctgccccacgtgtgggaagatcttcagtgccccgtccatgctggagcggcacgtggtgacccacgttggagggaagcccttcagctgcgggatctgcaacaaggcctaccaggtgacctcaggtgccactgggagctcttcccctcacccctgacctactctccatttgatcttccctgatgcccgggttggtggcttgcagatcatatcttgtatccaggatgtgacaattggctgattctcatgaaggatgcagcttgtgatccagattctctaaggagatctggtcggagtgctgcagtgggggagctcattattggagcagagagttcatacgcttcttctcttagacagcagacttgtcgtgaactaa

SEQ ID NO: 52099 - DNA, 1004 bp, Homo sapiens
aaggcacagccttactgaccagcacgcccactgactggcatctgccggctttgtgcaggcagccccgacggtttccacagcgagcgccagctccggccagcctgggacagctcatcccagccgactacacctgcttctggtcctgtccacattttgatacgcagatcacttgagcttgtcaattagggttctgccattctgaaataaatgaagtttctaaagcagagtcggcctcagaagccaaaaactgaccagaagatggtgctcaaacctttaagacttcatctccatgtgaagggctcactgtttctaccaaggctgtgcctgtattaaggcttttccgtcctgggaactgtcagtctgggagagctcttgatctgcaggtggcaaaatggcactgaatatccccttggcagcagagaaaacccactgaaagatcgtagagtggcacatgcttacagggcattggtgccaagtccagtggatgagaatccagcccctcacaagctgtgggatggggcttgggagttgcagtgaatgtcattaaaatttcttccaaaacaaaactagaaataattgctgagggcttatagggaagtgatttaaaaagaaaaaacaaacaacaacaaaaaaaactcttcggaataaagagggctgtaaattttgaattccagtgtcagatcctttcaagcactgagaaattctttctcaggtttctttttttgggggagacagggtcttgctctgtcacccagactggaacacagtggcacgatcttggctcactgcaacctctgcgggctcacgcaatcctcctgccacagcttcccaagtagctgggaccacaggcgtgagccaccactgctggccagtttttgtatttttttttttttttgtagagacagggtctcgccatgttgcccaggctggtttaaaactcctgagctcaagcagttctcccacctgggcctcccaaagtgctaggattacagacatgagccact

SEQ ID NO: 52100 - DNA, 1118 bp, Homo sapiens
tcagatgccctctggcccatggcacactcagcagaaggcacaaacccagtgctggttctcatcaagaaagaggggaaggcccttcccgagtttactgtctgctctgagtgggctccgcactggctgactgattttatagtcttgctctctagagaagcccaggcatggatcttataggaaaactttctgactctgcttggccattttatccttttctcctacttctgcccaagagacctgaattgctgccatagaggacagtgtttgtgtggtctcctgagtccacatcgctcgcttccatggggtcccggtgttgtttttgcctcgttccccataggctgctgcccttatggcctctggactgaactctggggcctttggggtggtgtgaaggagtctgtgggcttcttggaacacatggatctgttcggtgggtccccagacctctgctcccagagctcatggcccaggtggtgaggagggaaaggcagtcagattccaggctggagtgtgattctgtgggaatactggggtcagttatggaacaggacttgcccatcataggtaagtgagacagcaaatagatgattcaagagcaaggattactgcgggaaggtgagactcctactgtccacgcgcatgagcagaacctggaaccagaggggcagggaccaggggtctttactcatttattttatgggtaaagagacatgaagagacagcctctctcttctgtctcagaagctctgtgtttgggaaactttgagcccagtgagtagcagggtctgcagtgtgagtaccaggtttccctggcaatccaggtctcctctgaggaagcattctgacttcccactgaccacggaaggcatgtcagcttcatgcctcgggctagagttctgataatcggggctgaggggtgaaaagaaatccagtcagacagacagtggggagacaggtccctgccctttatttgcgggatcaatcagggactcccagaaaggaaggagaatggtgagaagggccctaagagttcgtctctcacctgggggctggtgacgtggtcaccacaagctgaagacaggctaatggggtggcgggtgtgtgtttaaacctcacgt

SEQ ID NO: 52101 - DNA, 1030 bp, Homo sapiens
atatatgaatgagaaacagataccaaaacacccatgtctgtccagactcaagatctaaagatcccagcgcctacaaattctgtgggggttttggttagttggttgattggttggtctttttcatgggtaggggaaggaaggggaggattaatattttttagaaataggccaggcgcgatggctcatgcctataatcccagcactttgggaagccgaggcaggtggatcatctgaggtcaggagttcgagaccagcctggacaacatggtgaaaccccatctctactaaaaatataaaattaaccggacgtggtgtgcatgcctgtagtcttagctacttgggaggctgagtcaggagaatcacttgaacccaggaggcggaggctacagtgggctgagatcacgccactgcgctccagcctggagaagacagagcgagactccatctcaaaaaaaaaaaaaaaaagaaatatcctaattaataattggtgttattacatgcttaccacacattagacactggatgaagagctttttgtaattttttgtttttttgagacagagtctcactctgttgcccaggttggatggagtgcagtggcacgatctcagctcactgcaacctccacctcccagattcaaaccattctcctgcctaagcctcccaggtcgctgggattacaggtgtgcaccaccacacctggctagtttttgtatttttagtagaaacagtgtttcaccttggtggccaggctggtcttgaattcctgacttcaggtgatccacttgcctcggcctcccgaagtgctgggattacaggcatgagccacagtgcccagcccagtaattcttatttcttagaattctagcaccaactccacaatgtaggtgctattattatccctgcattacagatgaggaaaccaacaccagagaggtgaagtcgctatgtagctagagagcagcatagctggggtccaaacccagctgtctgactccagagtctgctcttaaatcgcttgctattttta

SEQ ID NO: 52102 - DNA, 1024 bp, Homo sapiens
cgctaaggagatggctcagtggcagctgggggccctagagaccctgagccgggaaagggaaggcccacggggccctggagctgtcttcacaggccttcaactgtcagagggatgtatttaggacacagatctggccacgccgtggcccaccctcaccccccacagcgcctgagatgaaaccctggtagcttagccagacagtgccctctgagacccgacctctccagcctcgtcactcactctcccctgcctcggacttcgctctcaggtcagcagactaccagcagcctccatcctcccaccagctctgcccagccccatttctgaggcaagaaggaagcgtggcccttccctcactgagcctctgcatgtgctgcccccgtgccagagggcccttccctggcctcttcctggccaacacctgctgacactttgacactttgagccgtgactcagatgtcacctcctccaggaagtcctcctgtgtgctgcttctgcaccctgtccttctcctgatccttgaacttaggctctactgcggtcatctgtgtctgcttcagcagcacaggccaggtcagagtcggcatctgggtgtggactgcccacgtggctgtcctcacaggaaggccagagcagccaaggcaagtgctgtcttccccattcaacaagtgaagagatggagtcttggagagtaactggcccaaggtcatacaggtattaggaggtggagcagggatcgaagccctgagtctggcatcagagcactcacggggtgaggtgagtctgaggtctgcagtctttagagaccttcactgacactggggttctcagacatcaccttctccgacagtgtggacagagccctcactgtccacactcccccgaacagtcccatgccactccccatcctctcaccatcttagttttttacagagcacctagcaggatcgaaagttttataggccgggtgcggtggctcacgcctgtaatcccagcactttgggaggctgaggcaggtggatca

SEQ ID NO: 52103 - DNA, 1001 bp, Homo sapiens
tgcccactaagaggcagctcttaccccgctaagcccctccacaccagatgtgcacggaggacgtgctaaatgccaggcaccgtgctgggggaacagggtgattatgaagctggggccagtcctcagatgggaggtatgactttgcagcatggaccttgaatgccatcatggctcttacaggagacaagggtcaggtcatcatcacaaaagccctgtgggaccggaattgttatcaccccattttacagaggaggaagctgagactcagggaggtgagggggcttgcccagggactcacagctcctaagtggcacaactgggattcagaggcctgccagcttcgagcccacctcaactatcccactgtgccaccaaccaaggatgtctggcacttggaacagcttgtgttctgggagttcagaatattactttttggccaagagggtgagaagaaggcttcagggaagagaaagaacttaaactgggccttcaaggagaggggaagagagaaagggcattcaggcagagggacccgtgtgagctgtgtgctgggggctgagtgtggaccagtgtagctgggtcaggctgctcttgaggagctggggagaagtcagaggggcctgatgccctcttgtctcctgttttacagtgaatttgctggacacgtcgaccatccacggggactggggctggctcacgtatccggctcatggggtgagtgatgggcactggggacaacgtcatccctctgtgagcagagagaggctgccactcacagagtctgcatgagatagatcaaaaggaagcagaggcccagagaggtcaagggacttacccaagggcacacagcagttagtgctgctgatctcttaacagtttagtgcatacagacccttgagattacagaaccaaccctggcaccagatccctgattcttcaagtctgaggccctaggtccggggatccccatggctgcatcctacagattcatgaggtgccag

SEQ ID NO: 52104 - DNA, 1050 bp, Homo sapiens
ggcgtcccacgtaagaaccagtgtcccataaaagagagaaggacagcatctccacccctaaagctggagacagggcctgggggaggggtcaattagaggagggctggggaatttggagatgctcaggggtggggctcactttgaggctgggactcccatgtcagggtctgaacctcagctctgccctgactggctgtggaaccctgtggaagacacaggccccctctgcacttcagttctgccctctgcaaatgagggcagcactgggcagtgtgaaggtctgcacctccatccctctggggcaccccccaggaagctgtgggccacagtgtgagcggtccccaaggccagccagggtggccctgctggctcatgtgcagccgccttctcctccacagcctgtgagctgggcttctacaagtcagcccctggggaccagctgtgtgcccgctgccctccccacagccactccgcagctccagccgcccaagcctgccactgtgacctcagctactaccgtgcagccctggacccgccgtcctcagcctgcacccgtgagtaccactccgagatgccagtacccttgagcccaagactgggccgggcccctgtgtttggtcctccaggcctcagagagccagttctctgctggtggggcaggggcgggtggctctcttgagccagaggccagtctgaggtggggggggtgactctgatccctccacggtggcctagacctctctgggctcccagcctctgtcctgtgtcacctacactggagggcagaatggagctggcctcacttctttccccacatcgggcagtttttgtcatcttctgatctagcagcgatgccgatgtcctgggggccaggtgggcaagccagggtgctcgcctgtgcggagagggtgagggttagggcagcaacccttccatcaccatcatctttgatgaacttgttggaactgctgaatgctgagagctgccttacatgtgtatggtgtgtgtgcatatgtgtgtgtacccatggagttcgaatatctgattctg

SEQ ID NO: 52105 - DNA, 3030 bp, Homo sapiens
cggggtgggggctcccggcccgcgcccccgagatggggcccggcgccccggagagcagggactggcagagtggaagggagcgcgccagcccccgcgtcggtgcctgcccatcgcccgcggcgtacaatggggtcccctccccgagaggactgcgcgggggatgggtctgtgggcatctctccgccgcgcaaggtctccgggcacccccgccggccaccgccccgcggccgcggcgctcagcgtggcggctggagccccgggaactctccagctgccgccggggccggaccagatgctcttgccatgtgttggccttggccagggtcgcgggccctctccccgtggcctcgtgtattggtaccactcgacccccaggggggcaagggtagttgctaggtctcccgagccagcttgctctggagggaaagttagtgcggtctgggtgtgtccaccaggaatggccgagcttgcagggcaagaagcgaacgtgaataatggttctcacgtgtactgcactttacagttttcaaaccactttacagtttatgaagtacttcgcactatacgcagctctctgtggtttacaacgtgctgcacagttgacaaggtactttaagctttacaaagtgctttcccgcccaccagcgtgttggatccctcaaaatacaccttccggggaagacaggtaggtatgattcctacttctcttgaacagatagggaaaccgaggttctgaaaagtccgatgtctcacccagggccgttgggtgacaaaaatagaacccaggtctgtggtctttctttgaaaccagcactcacttagctgggttttgttgcccctaaactgcgtgagcccttccagggttctgctcccttgggcttagggatgatgtctgtgtgcacctctcaggccactttagggttgtggggcgccccttcccttcttgcagcctaagaaaaaacgcatatcagaccagacgtgggggctgcggcctctgggaaaggcgtcgtgggggaccctgtgctacaacttcagtttctctttcggtaatgagcactttagtgaccgcagtcagggggtggggggtgtccctggatggcagccacagtttctggcactgaggcagctgtccttcggctcctgggggatttggcggctgactgcggtttcccggagtggggccactggggcacctagggtgccacgggccctgggtgtggagggcagccctggggcctggctgctggcgggagctctgtggaatatggctgaggtaccacttattaactctggctttggggaaatgactcatgcgttggcccgctatacattgggatgtttacagtattatggggagcttggcataaatattgctatttaggttgcagtcagcggtgctggaggggaagaaaattggcccctctctcgttggaagaggcctgggtgtgtttttaattactctggggtagatggaagggccacatctgtccagccatcgccctggcagaggctggttggaatctggtgggctgtggccagcctggaccctggccctggacacagggctggtgggcgctgacgtcacaggagggtatggctacttggactgccacttgggggcagggtggggaagggaagccacagcagggtgggaggagggctgcagcaggcaccccaatgcttgcctcaggctcttgttccgtttgccccctggacactaggaagttagtccatcagtggttaataaggagctggccgaatggatggggagatggtgtgaggtggaggtcagagggcctgcttctcatttactatgggaccctgggccaggtcccttccctgtgggggcctcagtttctctgggtgtaaaatggcctggctaaatatcttgtagagtccatcgtctacgccctacttcccctctttgagcctcgttttcctcccccgtctagtgagagtgatgacagcgcctgtcctgcctgtctcctggggtgtttgtgaggatcagaccagatgatgggtgggagaagtcccccttcaaagccagggatggacggtgctgcctgtgcacatttggggggcggtgctgcctgtgcacatttgggagacaccagggtcctcctgagggtgacacagtctgtggagacaggactgggccgtggagcagtaggagggtggcccctctggctcccagaacccagagccacatggctaccacttccttcccttcctccttccttgtctcctcagcccgtaaagggctgtcctgccggttaagtccccaggaaatccccagctccagccttcggaatgggggagaggagagtgtgtgtgtatacggggggtttctaggttaggacggtaagcttagcatctcccccaaactgtgagaccgccccccgaccaagtgaaagaaagcatggagcatgtgaagtggcggcgagcaggatggaagagcactggggaaacgtccaacaggacaggaggccggtggcagaccctgtccatccctggccgatggaatccaaaggtcaaggtctcaagaaaacagcctccttacatctgctcctttgctctccaaatatcgatagagtttcctctctggctgacagggtgctggactccggggcaggcaaggagacgggacaagctgacagggaaaagagtgggcgagacagagcatgatacggggtccaacgtacttcccagaggaggctgtgaaccccccggggcggcaggtgcacttgaggacagaacagggttatttcatcttttatgctgttatgcattgcctcattttctcaccacccattttccctgctatgaaactttcttagccacctgtcatgctaacgaactgtgttctcaagagttaaagaggttgactttagaacttataggatgtggagaattttacctaaaaaaggaaatagcatgtctatatgtccatagaaagacatggaggcaggatgatcaggtgcttactttgatgtgtctgaggagggtgggtgttgagggcagcagtggggg

SEQ ID NO: 52106 - DNA, 1009 bp, Homo sapiens
ccatgatccaattgcttcatcacttagattccctgggcctagcatagcgcccagcccctagtaagtgctcaactgatatatattgattggaagaatgaatgaatgaatgcacggctctcagatgactgaaaggaggatatgcttctgtttgttcttttgggtgacagttggcagagtgctgtgacatccatcatctccctttaattgaacggagtgggattgaagtctgcaggggcttggcacagggccaggccccagggtgggggtgtgggatccgaggtgaattaggcatcatgggcctggccttggggagctcacacactggctgtgcacagccccctgggaggaaggtcccactggtattgttctcctggatggacagatgaggcttctaatactcagagccaggggcggaggcgggggtggcttgatgaggccacacagctagtcagtgggacagacgtgcactcagatccaacggatatcaagccaggtggcccttcccccacttcttgtgggcacttgggtgggaggtgtcagggatccctggcctttgggggtcttgacatcccaagctcttaccagccatgtggctgtggacaagttgcagggggcagcatggattgtcctgccctatggaggttttattctaatggacaggactgatgccagatatctagtgagtagcttaagtagggatggtgctaagaagaaaactgctgcagagatgggagggccagcgagaggagggatcaggaaggcctttctgaggaggtgacgtttgagcagaggccagaaggaagcaagagagggggttcagggatatctgggggagggtgtttcaggcagtgaggagagctgggcaaaggccctgtgacaggggtgtgcaaggcagccagcgtggctggagcgggagggccaggggagaatgggagcaggtgacacagagggaccagccatggcaggactttggcttctacctggagtgagatgggagcggtgcagggct

SEQ ID NO: 52107 - DNA, 1061 bp, Homo sapiens
agcgtggagtgcggagtgggaggggccttttcctttggctgtgcccaggctgcctgtgggggagaggcaggagatgaggctgctgagtggacgggccccctggggacagtttgtcggggagcttgacaaggttaaggatcttctttggacatcctttcactttctctcaataacctggtgtggatctatcatcccagtatttatctaaacccttgctggacccatttatatcctccgcctctccagcttctcggcgtaatgagctccagatgtggtgaaagggccttccccaaacctctgcctcaagccgggagggtgctgggattgcagggatgagtcttcgttcaccaaaagacaggaaggccttagagcctgcaactcaaccttagcttcacccttacacaggcccaagacacttagattcgtgatcccctggggttccaggccgctgtaaggaccccaaatcctgggcctgagtgttctgtgggctccttagggggcaccccagagacactggaccctctgtggccaccccaggagtgagacaggcagccaggaagctttcagcccatggagatagcagaaatgtccccaaaccaaaccaaaatggtggctcaaaggtgctcagaaacctcccgtcttgtggttcccagctgtcagtctcaatttctaccatctcaagccatgttctcactgttgttctacaaatgactcacttttctatttcctgggtaaatgtatgaagacagaaagtccatatcccgccataaataaaacaccagcatctcttgacaccacagaagttaactgtaactataaatacaacagaggcaggacagggtgaccatgtccggctccagcctggtgctcactctttggctgggcttctgcagaagggaggacacctgagaccagggctcaggggaccagagaggggcccagggagggaggaaaaggtggcgcgaggtgtgcagtggagcttaccactgctggggcagctggggctcgatcccccaggcctggtacggggccatggagagcacacctcagaactgccaccc

SEQ ID NO: 52108 - DNA, 1081 bp, Homo sapiens
gcggtttcaggatggatgggggcagcggaagggtccggaggggaggcaggaagctccactgggcggctggcctgggacggtcccctgggagaagcacaaggagccttcagtcagactgaccgccaggacctcatggtcctgggccctgacccggccctgaccctgagtcccgcctgaggtgtggactgggccccagtccttcccttcgcccgtgggcggctttatctgggagtctccggagggtgtcccgtctgggttgagcaggcctggccgcctgcagatttatgaggtgtgggggaagtggcgggggcagcgggcgtgtgaggcagccctggtgggagaggggagagctggaggatgctctccagcccatggacctgcgctgaccccatttccaccccgaactaaccccaccccatctcactgggccagccccagaacaaggcggcacctgctgcctcagtttctcctcacagacaccttgaggggtgagtagagagaggctacaggcaagaaccttagatatgaggaggctgtagacagaacatgctagaagcttctgtacccgggtcagaagatgtctatgatacgaaagcagtttactaacagtatgctgggtatgattccatttgcaactttgaaaggaataaatatgcatctgtgcctctataaatacattttatgtgcagtaaaatgcctaaatgatgtttagtttgtgacttcttctggggaaagagctttgactttcactttatacctgtctatattgtttcaatatcttgtaagcatatacttttttcacttacaaacttttttaaaaacagagtaatggtagggggtgatggtgggtgggagagggcctttgtgtttatgggtgatagggggttgcttttgtggggtcctgagggtgctcagggtttgggtggttctggaatacttgagtcattctctgctgagagccctaccctccgagagaccccagcctcactggggagaccccacatggatgagctcccaggataaggcaggcacagacaggttccagggaggtgggtagagacagtcagggagggtttcccaa

SEQ ID NO: 52109 - DNA, 1107 bp, Homo sapiens
ccagtggtcttgccaagtgcaggtctgtaggcttcctaggctggcagcatcagcatcacctgggaggcttgtggaaaatacagattcccagccaccaattatgagcctgcccccatgattctcttctgatctcatggggatcagggaatgccaggactgatgtttttaaaacgtgcctgagtccattgtgatgcacagccagctgctaccctgtgccaccaccaaatgatgttcaaagtgtgacagattatgagaagcaaaaaaacaaagagtagcacgaacacaccaaaatgttggcagtggtcgcggagagcgggagggatcgtggggggagataattattattttgtactttatacttccatctgacttttctgtgttttccaaattgtctctaatgagcatgtattgcttttataatgaaaaaaataaataacagagcatctggctgggaactatttggagaggggtgagaataagcattggagccatgtccacacagacccgggtcagccaccccgctcttgggcagggcacttgacactgagcactgagcctccgttcccttgtctgtaaaatggggataggaaagtctcaaagtatagctgggagtgttgagtaagataattccctagagctaacaattctccttcctccttccctctcctggacctctctctccctggcaacccttcccctggacgcccttccctgccaatgcccagttgaagcagttgaagcctcctccccggctcatccagaccctcatggtgtgtgcagtctgccaggggctttcagggctgcctcagcaaagcccattttgcagatggggaaaccaaggcccagggcagccgagggacttggttgccagctctggctccccagcagagggaggggggcgtccacgtgtctgctgcgcatctctgcctgtcgttgccttgctcagtgtgtgtgagggggcagcaagtcaccatctgtgttttccaataaaagaaaatgaaaattgaagcacattaaaaatagctcaattgggattccgagcggggctctgaggcctgctgtggcagacgcccagcctgcctccccctcctcccagcctggcaccga

SEQ ID NO: 52110 - DNA, 1081 bp, Homo sapiens
gaaacggcaaagttggcagagtgggaggtgggtggtaccagcgaggctggcaaggatgtggggagacagggatgatccagcagaggggcctcagagagctgctaaccgttcatggccctgtcctgtgctacctgggcagcccctgcttaacccctccaggctcagctcttagctcccaccacttccagccccacccttcagccagcgcttgattcccacaaaccccgctgtggctcagctcacctcctggcctttgcctctgcttcccctctgcctagcgtgcccctcccactccacatcagtcactccccactcacccagtctttaagcctccatgcaggcgtcacgttctcctggaagccatccctaaatttggcattttcttcccctccttccgtattcatttcctgtaacctgcaataaaccatgtacatcctcattgtgatcttagccacatagtgtggtgattaattatctgtgtacagtgacaacagcttcccctgcaggagagattgtcaccgtcacagtggggatggagatagaaacatttccagagcttcagaggcagctcgagggagcccagcagctcccaaagtatgggaagtgaaatgatgttccgtactttgcagacaaacatttttaattgtagtagtctgtgtttattttccttcctgtcatggcaagagatattggttttccatttataatcatgattacgctttttcctctttaagatgcatttaagaaagaaaaggagtcaagtggaagaaaaagtagtaactaaataattgtacaggttgtagttggaaatggctaaagtcattaatgttgtctgtatgaaaggctcaagcctggccaaccctagtggagcagaacactggcgtatgctcaagtctggcagatggggagaggaggcccgtgtgccaagccctgtgctaggtcttagggatcccaggaccaggacccagcaccacctctcaggggaccacagagctttgggagatgatagcaaataggggtagttaccacccagaatatcttcaagtgccgggatatctcgaagcacccgtggctgcagagc

SEQ ID NO: 52111 - DNA, 1032 bp, Homo sapiens
gtagagaggcggagtctaaaccgagggcagtctggagagttagagtcagatgactggggcaatggaagtaggcggggctctcagtaaagaaggatgagggcccggccgtgagggtctggccgggcacggtggctcacgcctgtactcccagcactttgggagggcgaggcgggcggatcacgaggtcaggagatcgagaccgtcctggctaacacggtgaaaccctgtctctactaaaaatacaaaaaattagccgggcgtggttggaggcgcctgtagtcccagctactcgggaggctgaggcaggagaatggcctgaacgtgggaggcggagcttgcagtgagccgagatcacaccactgcactccagcctgggcgacagagccagactccgtctaaaaaaaaaaaaaaaaaagaagaagaaggatgagggcccaacagaaagattgacagcgcctggtaggtggggcggggtggtgactctttgctctccccacagaaacgctaatggactccactacagcgactgctgagctgggctggatggtgcatcctccatcaggggtgagtcagtggtccccaaaccttgcattggtccccaggatccctcaagccctgctgcagggcccgaatgccccctcatattctaacccctttccccctcttcaggacccagagccaggcctctctcagccccaccctcccaatcccctaccattgatggagccatgatcccctaccattgatggagccagttaccatgacaacaggctggatgctttcagcctttatcccgtggaatccttagggcaaggctgagaagtaggtgctctcactacccccgttttacagatgaagaaagtgaactgtcgtttcctgagtacccattctatgtcagatactgtattaagtacctttatacacatcatctctgatcccatggagaggaattatctccattttacagatgagaaaaccgaggctcagaaaggtgtagccacctgcccagggccctatagataataagtgaaa

SEQ ID NO: 52112 - DNA, 1444 bp, Homo sapiens
aggtggatgtacccatcaagctctactgtaacggggacggcgagtggctggtgcccatcgggcgctgcatgtgcaaagcaggcttcgaggccgttgagaatggcaccgtctgccgaggtaagggccagggtggggcacgtgcccctgcaaatgcatagaactggtcttggctgcagactcgggctgcagacttgggcctggcctctgaagcttagagctgaccatgaggcactctagggccagggtttccaaaccagcaaccatcgttcagcttcttagagggaggcacttgaatatagcactttctgaaaacgatccgcgcacatgccgcaggtggtataccagataatctgggttggcacaggataaaggttttttgtttacatcatcatatgagtatgtcaagtggtgtcaatttcttcctttacaaaggtgatatggttccccttttaagaaaacgtatgttatagtaagtaacatttatatattaataagttaacatattttgagcttttactctgtcagtatagaccagacaatgctgaagtgaccaaacaataaaagtttatttctccccttaatgctccatgtccattgtggatcagcttgggactcctccctctgagagccaaatggatggagcaccaccattcgggatgttgccatctgcagggcagacagatggaaggagtgtggcagttggaatactggctttaaagcttccacctggaatgcgcccccgccataacctctgtgcacatttcacgggccaaagcaagtcacaaggttacttcctattcaaagagatggagaagtgcaattttactgtgagccaggcccacgactcccccttgtactatgtgctgagcacttctatgacttaattcatttaatcctcacaaggaccctgtgacagaaagtactgttgtatatgaagaagctgaggctcagagagcttaaacagggactaagtagaggatctgggattccaaagcccaccctcttaaccaccatgccacactgttagcttaaggaaaactattaagtaagtataagtggtgtttgaatatggtaaagaaccatgaaggtggtctgcaaacaagctttgcaaacacgagaagtttgtgagaggtacaccctggtgctaagaaggctgtgaaggttgaaggacctgggttaaatcaccccttccactcactagcggtatcaccttggccaagtgtaaaaccctccttcctaggctggtgtgaggagtcaggaacttgaggcatgcaaagtacttgtaatggtttccagtacacaggaagtgcttaatagatgttaactaaatgagatgatgtgtacaaagcccagatgctcagcctgtgagctgcaatggtggtgctgggggtataggggacttgaagctacttgtgtcatgtcctcttgcattccccattggatt

SEQ ID NO: 52113 - DNA, 1073 bp, Homo sapiens
taatccagaagtgacatcttgccacttctgccatattctctgcattaaaagcaagtcacccaattcagcccataccccaggggagggaattacacagggtgtgaatgccaggaggtgggatcatggggccatgttagaggctgcctggcataggcaggttctcagagtcagagctactccttgcagatggtgagggtgcaaggtggggcagggttaaggtgtgcccagccctggctcccttccaggctcccttccactctcatcttcccctggacctgaaagcctccccaaggcctcagcccagcccagccatccactgagtgtgagtggggtccagtcagggtgtgattaatgagctcagggagcccagaaggacaccagctgttgctgtggcctgtgctgctgtcacccagatgtgaggctgctgcagcccaagccccataggcactggccctgctggagcaggacgtgcaggaatggtgattccagctcacatccaagtaacattggccaagtgctttctcgtcctctagcttagggcttctcaacctttattgtggatcagagtcacctggttagttggttaaagtgcaggtttctgggtctgactcaaacctctcccccaggtctgggaatgtggctctgagatggggccaagaatcagcagggtttattttgttttgtttttttgtcttttgtttttgtttttttttttttttttttgtgacagggtctcactttatcactcaggctggagcgtagtggtgcagtctcaactcactgcaagctctgcctcctgggttcaagcaattcttgtgcctcagcctcctgagtagctgggattacaggcgtgcaccatcatgcccagctaatttttgtatttttagtagagatggggtttcaccatgttgaccaggctggtctcgaactcctggactcaagtgatccacctgccttagcctccctaaagctgggattacaggcatgagccaccgtgcccagctggaatcagcatttttaaacaagcagtcctgatgattctgtaccaggaccatgagctcagacgcacgatg

SEQ ID NO: 52114 - DNA, 1030 bp, Homo sapiens
tctttctggagccccttgtcatctctaagatgtccaatcagacagctccccccgccgggggaggttttccgggacctgttaccatcccgccaacccatccacacactcctcttcacacgagccacgtgttctcaggtctgtgaggagctcacactgaggctggcctgcctcttcccacccagggcagagaccaaggtctcaggggagcccaggggtctcactcctgctaaggtggaagtgggtgcaacaagtatttattgagcaccttctgtgagctcagcaccatcctagaacctggaaatacagtggtgaacaaaacagacaaaatagctgctcttttggaccccacactccacctgggaaagacaggcagttggggaatacagtgggaaatacacagtatgtcaggcggtgattaggacgacggggagaaacaaatcagggaaggggatgggctgcgtagcccccatggctggggggccaggggttatcctgcggggtgggctggcctgggactgctgctcttgctggtatcctgggctttctgctccttcctcgggccttcccagtctcttcccatgggacctggtggaggttggtttaagttactgttttcataacgaggattttgttttctggtcacagtaacctgcttgcccaatgagacaacaggccaaggagagggctgtgagtgcacggccatttccatctcacttgcaatccgtgagctttgtctcctgtcctctctgtcccccccatcccccaaacaaagggggccaaggccacagcttgccagcttcacagctgtaaaaactgaggcccaagaagttagatgaaatgacttgtctggggaccggcactcaaactcagggtctgacgcctgactctgtgcctcttgctggaatctacttgtaagtaacagaataagaatacccggaggaggcaggcacaggctcttatcaattgggtgctcactctgtgccaggctgctgccttgagcttggtgaacactctgctgaatccttacagt

SEQ ID NO: 52115 - DNA, 1022 bp, Homo sapiens
gcagcccctcgtggggtcccctcccgccccctcgtgctgcagtctttgtggcccaggaagaatgcctctctttatctcccagacgccccttccctttgattctcctctacccagcgtttctgctgacctctgcgtgttgggaatccaattagaggagcggacagggagagtgacagccgcgccgaatcccgcctcagcccctccgagcacgctcagccaagctgcaagcagcgcggggcctgcttgtcatgctgggccctgcgcagggctttgtggggattagctgctggggggtggggtgctcgcagatgggaccagaagtgatgctggtgaatgtcacgtccaggcagagagtggaggagggggcccgcccagtgttgaatccagcttggggaagagaagagaagggggctagggggcagactagcctggcctataggaggcccatgggggaaatgatggcccagttgggttatttggttccccatttgagggttggagggtagagctggcagccaagctcagctgtgtctacagtggagtgggcaccagaaggatttccacctgggaggggctttgggggattgattggattgcaggggtgggtattgactcttcatttgcaaaacactttatgtatgatggaggtggggaccctaagaatggggaggtggcaggctttgagagatgtgtctagagaatctgccaccaccagccaccccttggcagggccaccagtctaaggccaaagactatgcccttccccagccagcaccatgaaagttacccttctggtttacagctgtggaaactgaggctccgagaggagaaaggtctggctcgaggacacaagggtagtccgtagcagagatgtctcatccccctgtccacccgcaccacccagccccacccccaactccctggacctcctgagtgatgagagtccctgatgcccttccccacagagggatatggcatctgaggaggtggatttcaggccctcaggggaagcagtatcaggt

SEQ ID NO: 52116 - DNA, 1043 bp, Homo sapiens
gaccctggctccgagttcagtgctccctccaggccaccatgaagcttctcagtgaaacctgaggtggggctgggcccaggatcaggccgtgttgggtgcagccagcccacgctggaggctggcctgagccctgcattggccccaggcccttcttggctctcaattttggtccaagtctcaggggccgttcaaagattccgaaggcatgtgaacattttggaagcaatttgtcagtcctggaagctgcttggaggctccaaagactgtttaaagattccagaatctgttatatttgcaagggctgttgttcatagtttccagagtggtttgcaggccctgggcgaaggtccggaggcagtgtgggggtctggggctggaagcatggctgggagcccggggcggtgctggaagtggaactgacggctgtctaagctcccagttttctctccaagggctcagtctatgaagccaccatgtccatcgggcatctgctgttctgagaggcagaaggtgtgtgggtgttggcagcagcaggagaggatttaaaatccaactttaccattcacgtgctgtgtcacctggagccaattacttaacctctctgggccttcttttcccccatctatacaatgggacttagaccacctgtgctgcaagcctaactgtccaccacccatctcatctcaggcatctgtcggattagtcagagaacatccccatccagaactagttaacactgttcctgggtgtggacttggtgtctctatccagggtggaagcctggccttctgtaatagccctgccggccctcctaaaaccagacctctctgagccccagccctgctgtgtctgtcactggggaggagccatgcactgtgccaaaggccctggttgaccaggatgtctgttcctacccatgccccgtggaagtttctggctggtcacaatcccagtcctgcctcctgccttcttcataccgcattgccttctccagcactcttccttccaagcccattggcccaactcccccatccccacccacc

SEQ ID NO: 52117 - DNA, 1123 bp, Homo sapiens
gcctgactcccagggtggtcatgaaggtcagatgagatgatggataggcaggagatgtataaagtctaaagtgatgaggctaatggtggctgagtgatttgcctaaggtcaccctgggggagatgggggccaagccaggacctcagtccaggtctcctggccaggacgtcgaccactagagccccagaccatcatgggtgcccctctgagaagttttacttttctccaactccctgacccacttgcagagctgcaagcaggcaggctggctcccagctgggataatcactggccgctggctgaggtgttaaatgcatcgtgccttcctggtagacaggaagatcaataccaaggtggatgggcagcctcgctggatgccacagccagcccccaagggtgagaatgggccaagaataaatataaccaggcctgctccctccacagggtcagaccaggccagatgaaaatgctgtagctttgatgggaccacctgtggcattatcatcatcatcccaagcaacatgattagaccataaactcttctaaacttgtttgttcctgacatgtgtaaactcactgaatcctcataaccacgctctgaagcaggtcctgatattattcccattttacagatgaaatgtggcacagaaaggcttgtgactcaccgaaggtcacacagctagattagaacccgcagttgcctgggtcagagcccatgcctgctgctgggatagtctgctgcctttttagtcatatggaccatcctgtggccacacatgcccacaggctccttcctgttcagaaatggcaaatcaggggccttgtctccagcccccggtgtgctttgggcacaggggtcttcagtgcctgagcttcttggagttttcagagcttggactgtgctttagccaagagctcctggacatgtatagacacgtacctagcagatgcccatgctccctcattcttctagagctcagagcaggcaggctaaaggcgagcctggtccccatagacactctgggcatgagtgaccccctgcttggcatgaactctcagggatccgagcccttggactgcagtggtctcagcctcactgcccatcggctaggggcctgcatag

SEQ ID NO: 52118 - DNA, 1014 bp, Homo sapiens
ccctgctgcaggtgggaaaccaaatcaacatgtctgcccctggcaggagccagagaagcatctgccaagagagttagacaaatgaggatcgtctggggggatgctggctggtgtctgaggtggggaggggagagtccaggatctgagtcagatcccttgtcccagagtggctgggagctaagagtgcagggtgggttgaaggctgaggcctgaggagtgaggaggcccctgctgaggctggatgccagctcagggatttaagctgtaaccctgagggcactggggagccacggccagattctgagcaggagagtagctagatcagctgattggccactggcagtgcgggagtgaattggagtgaggaagcaggaggcagggaggctgccttccttcaggcagtgagtctactaagtgcgttcagtgtgacctccagaagcatagatagtgcactctttagaaaaaggtgggcgcacctgcctctccccacggccttgggcttaaggagtatgtttggcatttccttgtagtaccagttcccagaatatagctcacactttctgcaactggggtctgcaaaccccagaatggggagagggtcccaaatatattctcaggggcccaggaattctaggagaatttaaacttttgatgtttagatttggatgctgattctaacagacaatttggttttgaccagttctaaagcaacacttctctcccagtgatctctcaagggggaaggcatccttgctcctggcatcggaggactggagaggtagtctccaagggccacaaaagaccatttccgtttctaaagagtctgttcttgtccagccctgagaaatgctgtcacgcctgcctcccccaggacagtgagctcttccagccgtgctggagctggtctggctcactgtgtctccgcagcctgacacaggtccggacccagggagggtttatgaattgaggcaggttctttctggatgtcccacagctccctccttgtctggccct

SEQ ID NO: 52119 - DNA, 1090 bp, Homo sapiens
tgttggagatgattataaggggagggccaaaatgatcgtgggaatccaatccccgtggcagtaggtgggagatgctgacctgggcttcctcagaaaggtgtgaaatgttgacaccctccccttgggctcttcaagggctcaagaggggctgtgttaggctgggctggaaacagagggctgaccatcatgggttccagagggagctatccacccccctacctagccagaggcagccaggattccattaacctgattctctgccccacataaacctgcaaagggagcccctggagggaggggtactggggagaggaagaattgggcttccccaggccccaaatggagcagccagtggtgctagtttcctctcttgcagtccaggaggaccttcgaggcccctggctgtttgagcggggaatagggagagcgatggagagccagaaagtagggacaagagactccaggctggggtgcaacagcaggaatagcaggaacagggtgcacgtcatcagaacaatgggtcctgagtcactctgtgcctgcccagccctgcatggccctgggtgagtcatgtcacttctctgagctgtgggttcttcctcaatagtaagggcaaaccaatgccacctctcagtgttgctgggctgattcacaataccgggcctcaagaaatggtggctgttgccaatgctataattttacaatcttgaccccatgtatcccttctcagcttgcaagccacattcatcctttttctccttggagcctcacaatacttctgcaaggtgtccaggattcttaccagagaggttaagggacttgttcagaatcacacagcttctaacccttggcctgggatgcacccctagtgattgtcatggagtgggccatcccagccaggctacgccactcttcttcagtctgggtggttgctattcctctgccatgattcacgtcagatgcctcttcctccaggaatccctccctgaccacacaagagcctggttagtacaactctctgctttcccacaacctttgagacatttatcagagtgtttatcagcagtcatcacaaccgttaggtgctccc

SEQ ID NO: 52120 - DNA, 1036 bp, Homo sapiens
gatatcagaaatgaggaacacctgttgccacttctctgctgaatccgaggcagacagtaccaatcaatcacgatgctcttcctgccaacccacatgctacttcaggatcttctgaatctcaacgcaacactctgggcaaccaccagtcaattggtcagagttggagggcaatctgaaactatgcataccaaccctaaatcctaaccctggacttgcccaaggccatttggccagaacgatctgttctgacactcagacgcagggtctttcactcactctgcatctccatttgctcctgaaagcaactcttatggagtatccaccaaagatgagtaaggcctggtgaccgtcagcaagaggctcaaagtctgggggagaagaaagtcaaaggggaagtaattgtgatatggggagaaagtcagggatatacacaaatccctgtgggaatttggagaagagaacaacctggctattcaaggacagggttagggggcagggtggtggttaaggaaggcttcccaaaggaaaggacattgaaatcagcactcagccagcaaatacatggcaaacatggggtcctggatagggtccagatgcctcaggtgtctgaggatgaaggacatctatgaactgacattagaaggcatcgtagcagggccaccaaccctggtgaatgggcaaagttgggacttgggaggagaaactcaggaggtaggaagggaagtttctaggctgttttgagctgaagcccagtgaactagacggtcaagcccctactgaactcacctatcgtaccctacactccttcacttgtagccctcatcatactgctaattatttaacataggtctaggctgggagcccggatagggcagggactggatctcatttgttactagctgggacttgaacgtagccctggcgcagtgcctggctgcttcattgtaagtactcagtaaatcttggacggatatgtggatggatggatggatggatgaatggatggatggatggacagagagatgtcatgcagcct

SEQ ID NO: 52121 - DNA, 1048 bp, Homo sapiens
gcggccaagaccagaccagagactgctgaggagggaagacctagtaattgattggctgtggggggacagggtggagagtgatgccacttcccagggcagagaagagtgagtttcatgaagcagtgccatagatacagaaatgatacagtgcccggtggtgggggtcgaacctggccaggcaacagagcaaatgaagggcggcttagggcaggggcagcctggggagtctgagagggagccaggacactgcaagggggagagggcagccagaaaggcagtccagatggagaggctggcaccgcacagaggggagagagagcagccacccactggcggcccccccgggaatgccccgcagatggaggagggatgctgagctgggcaggctgtctccagagagggagcaggaggagcctgatcttggggccaaaaccctttggcatctctaaggatggttctagaccttcctggaagccttgtgcccccattctgcagaggaggaaacccgttcagagaggccgactgctcgaccagagctggggctgcagcctgcatgtcctgactgcccagaagctctgggcagtgccaagatggtgaggctgccccttcatccagccatcagggaaaggtcggtgcccaagaggaaggcgagagggagggcaggacgactcaggggacccagacccagtgcagtaatcctcatgattactttatgtggtagatgctcttaccaatgagaacaatgtagctcagagaggtcaaataacttgtctaaggtctctcagcaaattgcttttgaaccagatggcttagtactgccaggaactgttacaagtgtttttacataagttaagcaatataaactgacaacaactctaggaggtagatactgttgtcccattttacagataaggaaacagtttaagtgacttccccgaggccacactgctcacacaggtgggtctgggtttgccagcagcctgcacactaaccactatgttcactgccctcctgcttgcatggcctccaaagcccatgctcattccac

SEQ ID NO: 52122 - DNA, 1048 bp, Homo sapiens
tgcactccagcctgaatgacaaagcgagattccatctcgaagaagaagaaaaaaaaagtcaacaagtgatagaaaagacccctaacagattagaaaacctcagctgtgcgtctctctggcttgacaaagctctgagctggagaaacccaggcccccaaagggggtggtggagagggaactctttctaactggtagaagccagaaggaagctcctggagccctttccctggttgcggggaactctcctacatccatttgggagctctgcaggtggaactgcctactcaagacgcctcagcttatttgtagctaggagtggttctgggctgctgggatggaccctgctgtctggagctggatgtacccaggagtagagatggggcggagtatggacgtgaggggtttccggggaataggcacacagggagagccctcaggatcgaaagacagagaagcaatgagaaacaagcactggattaggagcagagaccgaggcttggctttgccgttcatttgctgcatgacattagcaaatgaacggcattcatttagtcagtgtatgagtcagctactcctgcaataatgctgcataacaaaatcaccccacaactcagtagtttaaacaataaatatttattttctcactcactagtgtgtgggtcagctagggtttgactaatcttggccatgctctctgtgctgggcaggtctccagaatgtgatttgggttcagcctatttcatgtgtctcctcattctccttggactggcagccaccccaggcttgtttctctcaaggtgaagtgtaggagcatggagggagccaaccatatctcattggccaaaacaagtcccacggccaagcccagcatcagtgggatggagaagtatactctgcccacagtgagtgggccctgcagatttacttggtaaaggatgtgggtacctaatcctatcacagaaaaggaagaactggggtcattgttctaatctaccatgcacgtgaaaatcacttcctctgaggcctcagtttccccaccaaattgtac

SEQ ID NO: 52123 - DNA, 1052 bp, Homo sapiens
aaccccagcaccatggccttctagttcccgtggttgaaattttaccttgtgtcattgatcatttagttcttgttcgtctcccccatcatcggcactcgcagcacacaatgggtctgcttttcctcaccatggttttcccggcacctagagggggctgcaccacagtgaacattcagcgaacatttgcagaagggttcggagaagcgtggggtgaggtggggtgtggagaagtgcaatcgggctgggaaacaaggctggggactcaatttccagacaaatgcattcagtggtcggttttaaacagaccctaaaattcaatatataaatatctagctcattgccttaaaaggaaaaagtgtttcttctgggcaagtgactgggccttgctcgcaatcccttggcattcaccggggccagaactgtcttctgacttcatccagccatcatgccgcctttgaaccacgctctgcctttccagagcacctttctgcctcatattcatgagtcgtgctcatggccccgaggaaggaggctgggctgggcttgagggataaggaaacgggttgggagaggtcatgccacatactcaggtgtactccgctggacagtggcagacccaggagtcagtctggctgttcagagtgagccacgctaccctcctgcctctccacacccacagacaagaccatagcagagaggggcaggagggagggacagaggctgagccttagggtgggcagtcagaggagagcttctctgaggaggtggtgtttaagctgaggtccgaatgacaagcagacagccctgcagacctgggggctgggaggtgtagcatttcactgatcccgggcttctatccagcgcccttggccattctccagggctgccccggacacagcctaagccctttaaggatctcaccctgagcaagcccagaacacccccacctctgccagcttccggaagtagtgggaagggtctgtgctttggaatcaggcagccgaacctggctttgagtcaagcctggccgctcaccagcatgcaaccttgga

SEQ ID NO: 52124 - DNA, 2473 bp, Homo sapiens
caccagcctgggtgacagagcgagactctgtctcgaaaaagaaagaaaatgtaagctggcttccccctcccaatagcaggggagagaaggccccctagggaccctgattccgactcaagtgctcttccacctcacaccatagtcgctccctccagctgtggctgcctgcccactccccactccccactccccagtactccttgctttgccatcttcctcccggggaagcccaggcagctctctaccaggcacaggaccccttcacccgcatatttccctaacacacgtgcttctctcccaaagggacattctccgggttggggtcactttggctggccaccagaaaaaaatcctgaacagtatccaggtgatgcgggcgcagatgaaccagattcagtctgtggaggtttgacattcacctgcctcggctcacctcttcctccaagccccgccccctctgccccacgtgccggccctcctggtgctctatccactgcagggccagccactcgccaggaggccacgggccacgggaagaaccaagcggtgccagccacgagacgtcaccaagaaaacatgcaactcaaacgacggaaaaaaaaagggaatgggaaaaaagaaaacagatcctgggagggggcgggaaatacaaggaatattttttaaagaggattctcataaggaaagcaatgactgttcttgcgggggataaaaaagggcttgggagattcatgcgatgtgtccaatcggagacaaaagcagtttctctccaactccctctgggaaggtgacctggccagagccaagaaacactttcagaaaaacaaatgtgaaggggagagacaggggccgcccttggctcctgtccctgctgctcctctaggcctcactcaacaaccaagcgcctggaggacgggacagatggacagacagccaccctgagaacccctctgggaaaatctattcctgccaccactgggcaaacagaagaatttttctgtctttggagagtattttagaaactccaatgaaagacactgtttctcctgttggctcacagggctgaaaggggcttttgtcctcctgggtcagggagaacgcggggaccccagaaaggtcagccttcctgaggatgggcaacccccaggtctgcagctccaggtacatatcacgcgcacagcctggcagcctggccctcctggtgcccactcccgccagcccctgcctcgaggactgatactgcagtgactgccgtcagctccgactgccgctgagaagggttgatcctgcatctgggtttgtttacagcaattcctggactcgggggtattttggtcacagggtggttttggtttagggggtttgtttgttgggttgttttttgttttttggttttttttaatgacaatgaagtgacactttgacatttcctaccttttgaggacttgatccttctccaggaagaaggtgctttctgcttactgacttaggcaatacaccaagggcgagattttatatgcacatttctggatttttttatacggttttcattgacactcttccctcctcccacctgccaccaggcctcaccaaagcccactgccatggggccatctgggccattcagagactggagtgagatttgggtgtggagggggaggcgccaaggtggaggagcttcccactccaggactgttgatgaaagggacagattgaggaggaagtgggctctgaggctgcagggctggaagtccttgcccacttcccactctcctgccccaatctatctagtacttcccaggcaaataggcccctttgaggctcctgagtgccctcagatggtcaaaacccagttttccctctgggagcctaaaccaggctgcatcggaggccaggacccggatcattcactgtgataccctgccctccagagggtgcgctcagagacacgggcaagcatgcctcttcccttccctggagagaaagtgtgtgatttctctcccacctccttccccccaccagacctttgctgggcctaaaggtcttggccatggggacgccctcagtctagggatctggccacagactccctcctgtgaaccaacacagacacccaagcagagcaatcagttagtgaattgaatggaaataaacgctttagttataatatgacccctgttctctgtaagttccaagggagaccttggtacccttgggatgcacgtgacccaggtgctaagggttgctcttctaagcagcccttcctccctcaggcttccagaaagcccagggcagagaaaacacatggagaacgacagctccacgtggcctttctggccctggcttgtcaaaagcacaggcaacaaaggaagtgagttggaagtggctcagaactcagccttcgatgccctgggaatcagggtgagcccctgcaggtacataagtagcagagaattgacgagagtgcactcgg

SEQ ID NO: 52125 - DNA, 1031 bp, Homo sapiens
aaactgaggctcagggggatgaagtactttgctcagggtaacacagccaggaaggagcagagcaaggccatgagctttggatttttctgtttccaatgtctcctctaccgtgctcaattagatgatgagaaacagttggtgtctgatgctggccaataagagaaaagaaagctcaagtgggctggggctgtcagggagggcttcatggagaggctgtcttgaaaatgacagaggtcaaaagaaaggtcactccaagacgcagctgccagaatggtccaacacagtgaggagttgtgtctggatgggccagtggaacgggggaagtgaaggttgatataagtggaggttgaggcagtttaggcgtgatgtacagtccagccacagcaggttcttgagcaggagggtagcatagtgagcatcaggttctaggaagaagcaccagttcagccatcagatggggcaggatgcctcccagctactcctctccccgagaaggaattgcccccggagcggccctcatttattccaggagaagccaggccctgctgcttcagtttccatcctcactgacgcagataatccaaagagtcacttcagctgcttggaacagcagggttgggtcttgtgctacctgattcttaatttggctgatgtctaccccatttcctccaggcttctctagaggtggcaggggtggggtggggagaaagctgccagacaccaaaggagctgagcctggcgggggcgggcgtgcgggtgggcatgagaaattgctcaggaaacccatccctgccctggtcaccctagtcctggagagatcacccagacatgttggaatgagtctggggtcctgtcttttccaataatgtgttatcctggggaaacccagagggaagttgagggagccccactgtgctgtgtgatgctacatacgcatgcgaatacaccaccgggtggccttgacccagccttctgcaaaatggcttctgccatcaaacttaaggtggagaatggtcttgcagctgccagtt

SEQ ID NO: 52126 - DNA, 1032 bp, Homo sapiens
taataatattcaccattttaaaatgtatgattcagtggtttttagcatatttacaagattgtacagccaacaccacaattgattttagaaccttttcatcatccccaaagacatctgtatcattagcagtcactccccagtcctccctacccccagtccctggcaaccactaatctactctttgtctatggatttgtctattctgaacattttatataaaatcttatgtagccttttgtatttggctttagcatgttttcagggttcattcacgttgtagtgctttcattcagtacttgataactctttatggctgaataatattccattgtatggatataccaaatttggtttacccattcatcatttgacgcacattggggtttgtttccaagtcttggctattttacataatgctgctgtgaacattaatgtacagtttattttgtgaatatgttttcagttctctttgggtgtgggcctaggaattcctgggttttatgttaattctaggttttacttttgaggtatagccaaacagtttcccatagcagctgcaccattttacattcccattagtaaatatatgagggttccagtttctccaatgttcttcttcgtttttttttttttgttgttgttgtttttgagatggggtttcgcttttgttgcccaggctggagtgcagtggcatgacctcggctcactgcaacatccgcctccaaggttcaagtgattctcctgcctcagcctcccgagtagctgggattataggcatgcaccaccatgcccggctaactttgtattgtgtttttagtagagatggggtttctccatgttggtcaggctgtttcaaactcctgacctcaaggtgatctgcccacctcggcctcccaaagtgctgggattacaggcatgagccactgcgcctggccttcttcttcttttttttttttttttttttttttgctgagacagtctctctctgtcaccacccaggctggagtgcagtgatgtgatctcggcttacta

SEQ ID NO: 52127 - DNA, 2444 bp, Homo sapiens
cttacagattagtttgaacctgaactgacacaagattgtttcatgagggctttgtttttaataactacctattatgagctgccttgttccttgttgtatgcttacttcccttaaaatgtgaggttaacaatttacattgactgatggttccaaatagagtccctaattttaaatgttcactgcatttagctttccctggtatgatctccatataggtagagtacagagagatggatgaaagcttggccaacctctcagaagatgagtattattcagaagaagagagaaatgccaaagcagagaaggaaaagaagcttcccccaccaccccctcaagccccacctgaggaagaaaatgaaagtgagcctgaagaaccatcgggtgagttgtagtatccaaccacagttctgttttatcttagaaataagaatgaatggatttatttccattttgcaatattatttatgtctttatctttggtttataataaagtctgatattgagtctcctgccatgtgtgtctttgtgtgtgtgtatacatatacatgtatatgtgtgtatgtatacacatagatacgtacatactggtactgatactctttttgtgtgtctgtacatatacaggaggaaagtaaagggtgggaatggaaggacagtggcaatataaggtggttggaaagtaggagaaaataaatgattagaaaaaacatacagaaagccatatccaaagcaccagacctctcaatgacagttctgattcagaaattgttctggctaaatgatgtgtttaccacgtagttagatactttctgataaaacttccacggtgtggatcggttttgagaagtgccttttcctggtgaacaaatgtaaaaatatatataggccagaaaatctagaaagattatgggagtctatagttttggtttcagagcttcaaacagctttaaagaattctcactaacatcccctcaatgctgagtactagctttctgaggatggctggaccaatcagggatatctgcctttctgttttggagagaccaagcaaaagcagtattttaatgaatttttgtatcttgtgcccttaatgacattttatttactctttttgactttgaatttttactaagttcctcttcttgaaataatttttatgtttcgaatagcttcagacccacacacctctctggttcttttagtcctgtaccttttaaaaacaaaatggtggtttcagaccccatctgctatatcttgcatgactttcgtaggtacccagattaagacatacttcatttgagatgttttatcttttgttttagccttttttttttaagggttttctcccctatggtgttactgtgaattaccagaagcagtactgatgcttcactttagggcattaccagtcaagtgttaacttaggtttggagcttatcaaagtctggctaaaacttaaaaatcaaatttataatttataggattgtaataaagtgtactaaaggaatacagtttgagaacattcagaaaaagattctggtttcagttcattcaaaagtcagggattttctaagaagagtggttttcctaaaactttcttaaaatgatttcttgggcaactccttgtttgaaggtttctagtttcagtagtatattacctttggggctaatgtcccaggcaaatgtagctgcctttttactttacacctctcgttattcatttttcttcttcctctttctagtcttatacatttagctctcttccttctgttcttacctccaacctttcccttcaccctgtgctcttttcttctgtgttctttttggttcttacctttcttctacctttgctgtagacctgctaatgagatacttggggataacccttttaatgtctgcggtggctcaagagtgggctgacttcttagttcaagggctctaagtactacgcattgatgatctgatatctcagatgctgcctcaccttttttgtgtggttgtgtctccagtaaataattgatttaccataggttccaagttgataaacgtttctttgaaaattttaaaccatgtgttggtgttgctgtttgcttttttctgaaagcttttttttttttttaatttcataaacgtcaggtattgttcccacaaaaagtaaacgtcttagcaaaaggatttaggatttgggagctgtctttattgtgttgtagttaattataatgcagtggtttagtttaagttatctttgtttttggggggacgttaaaattttaagttgaggatatcttcaatgcttagaaatgtgctgataacagccagaacttactaatatattatttgtggttatgaaaatagtgattcttcctttaaaacaacttaatgttttttttgaaaatttctggggtgaattagggatgtactttccctagaaaaaagtgtcaact

SEQ ID NO: 52128 - DNA, 1141 bp, Homo sapiens
tcagcggtagccctgaggttttttgagcaaggggggttacactgaaatatgtttttggaaagaccaatctcatgctaagcgtgaactaaaggagtaaagaagctgagattggagagataatttaggctattggtcaatggaaaaatgttcttaatatcaaagttgaatttttatggaaagaaaaagtttgggtgtttttgtctgattgcacttatataattggaaggaagttctctctgttgacctaaatattgtttttagatttatcaatttttgaccgtaagttaatgtgatattgtagtcctatggtagtcaaaatgggtaaataatggatttttcataccaaatattactgtttatatttaaaaactacctcattttgttttcctaaatatttccatgcatttttatacttactatacttttgaatatatttgttttaacacatgatggttttatttggtttcctagtaccttttctgtgaagatgaaagtttttttaggtcatgccaactaaacttgacaggttgtctttggaattgagtgtgtttggttactagcagcgtcacataatagtggagcgtttatgaaatagagtcaaatctccttcagttggacttcattgatttagaataattgtcccccagtaaagtacccttctgtttattggagaaatgcctttcctgtctttgctcagattgttaccctgtgtaccttacattattttcctcaatgagttttgcattcctgtattaactgattctccaacacttacttggcttttttattttcacatggaaacatgactccattttttttttccctccactgcctttcagcagtcaaattttaccagaaaaatcttactagttagttcctggatttaaattgtgtattgggtaacttttcactagagaactcaagatacattctgagttagaagtagcttagttgtacatagcctgagactttcatggaaagttattctaaaataagtaaaaggaaatttgaaatgggttattaagatgcctttcttaagcctttttcaagttaatggatttttcagtagagacatcagaagtgtgtgtgtatatgcatgtgagtgtgtgtatcatttttctaggctccttgatgtcctagt

SEQ ID NO: 52129 - DNA, 1128 bp, Homo sapiens
taggaaaaaaatcagggcagctttagaccagacagacacacatactgtgttactttgggaaagtgtttgtggtgggccattttcagtaatgagtcgattatgaaatagataactttttaagcatctggaactgtttgtgtgtgtgtgtgtgtgtgtgtgtgtgtgtgtgtgtaaaacttaaatcttgataataatcttttaagttaaatcatgagaatgacagactttgggactttctaacatagtttttttttctttccttaagagaataatataattgaaattcttgcatcggctgttgagttataagaaatgttttgtaagctttgttattaaccagacacaccttaagcttggtagttggacacataacatctgaattgtaagctttctctggaacattttgaaaagtgaacacaaaccaagactgcagcaaaataagtaaggatcaggaaaatttctactatggaatgtggagggaaataatatgtgaaaaagtaaattctttccattggcttctaaagctttgcatttctccctagcttgtagggccttttactttcttttgataagatccttgctactacccagtggaagtcttcaagcacatatctgtggtgttattgttctttcagcagttcagtggaagttccaggcaagctcctgcttcaagcaaaacaatttttctttttttctaaaccttaagaaggctgttttacttcagtattttacatgatactgtaacccagggattgctattctagttggaactcataatttcattttgactgttgctcaggctggtcttgaactccttgttgtaagtgatcctcctgacttggtctctcccaaagtgctgggattacaggtgtgagccactgtcaattcctttttgaaactgtgactttccttatgttcatgagattaatcatgcatttatgactgcttcaaattatctgagcctattattacttccatgctattttgaagtcttttagccccattcttacttctgagttctattgtttaatttccaaccatctttagaacatttccatttaattgtattagccagtctcccaaatttcccattttgtttgtagcattactagtcttctgaacttaaaa

SEQ ID NO: 52130 - DNA, 3697 bp, Homo sapiens
taaaatgtaggacctatattttcaagataagtttgcagattggatttagtaacccgatcgtctcttcatgattgtatgcctttttccaagggctgtaaataggtataccttgggccttgtctgagaagcataaccttcttgaacctaaaggacccttcagacgagagcttagtaaaataagtttagaatgagattctattctaccttcataacagagcatgtatcttctagcaacacattctaatatcattgtcagaaataatttcttatatctaagtatctttttattctctttgttgttcccttctaactcaaatggtggaataatcaatctgctttcttattggggtacgtattttaaaataaactttaatgaagcttgtctgagtttatctagatcattgggaggtggtattttatgtcttccaaagatcacactcattttcctatagtgtaccaggtgactagaagcttaagagcatcatagcatctgtcttgatgatagattttggaagagttcagaagacaatctattctttatcagattgaattttcaagctttgattcttttcttgaagttacttctacatattaatcagtgaggaaaatttcttaacaaagcttattatgtagcatgaagtagaagattcaagatcttgcctgcctttctctgtgttaccacaagtgtgtgtttatctacagtacttggcacacacacacacacagtgtcttattgtgtgttctttagttttatttaggaagcactggcatatttaactgtactagtgtctactgtgtatagtaaatgaaacttctttggagactgagtcttttaattatactccttgctttgaagagaaggagataatttttcattaaaattagaaagttaaacggatattaagttgatgctgaattgcaatgccagattctagagtctatgtcagctccattttcagtctagcagccgttagtaaaagacactcggaatccattttcccccatccagactattaatattaaataagactgacagcaaggatttagtgattagaaatactatgtactttgttccactgcctttcaacaagaatcaacatgtaaagttgaaacttcctgaccagaatttggaagactatgatgtaattccctgggccttgattccagaagaaggagctctctgaatatgggtttactagttggtggtgaattcatgagtcgccaactattaggcctttatgtccagatattatcctaatttatggagtaaggtccctgagttctcctctttccttccacagggcaagcaggaggacttcaagacgacagttctggagggtatggagacggccaagcatcaggtgagggtggcattagatgcttgccacttagtagcaagagccgccaagtaggaattgatgcttgcaagtgtttttggctgtggtatccacattttagccagaagcgcaggtgaaatttaacccacaggacataatagtatagtaggagagagtgtagtgagaacaaaggcaagcaaaaccttttgaagtcctcaggccgatctcagccctccactctttgtgttttcgaggagatggcgggtacttttctccccagcagcctttctattaatagtaaacatgatatagaacatagacttaggaatcatgggacccttaaagagaaatacagcagtatacacagagaggaaaagtcacaggctcaaaagtctaaaagcaaaaacaaacgggactgagaggcattctaggactagtcagaggaactatgtgggcaagtgacatctttttaaaaatggttgttacagggtattgggtaccttttttcagttaacattacgtagttaatcattcttcagtttaaacattttgtttctcatgtgaaaaatgtcttttgaaaagtctgaaatacttttttctgttcagaccaaacagtatgagatttttacttctaggaaaaagtaaagaatttataggggccaccatctggaacagttaaaatttatcccagcaatccaaaataacgtatctggatttcatcctttgtctcttgaaggatgtttttgttccagttgctcaaagctggtttatagatacgttttgatagaattggaataggcactacttcacttttggaggttgtcacttttcaactgtcttaagtctactttaaaattatttgttttgcagtttgcatataacaggtcctgggactgtttctatttcactctcttgaactaaaggtagttcattgttaatacagcaattagtaataaggggatccagaatgttaggagcagacttttaaaaatgctgtcccaaggattgcaggttgataatcagtacatggttatcttagcagaattaaaccctgttcagagtctagatctgtggcatataaaccttgaagaatgcttttcatcaaatgacgcacaattagatcttccatggaactgttgaagatcagggatggcctttagagttctaatcttgaagaaagaagttgagttttcttgttttttgtttctgttttttttttgtgtgtgactatttgctcttttgcattaagtaaacaatatcatatattgctgaaagtgaaagcagactttcatataaaagtgtgctgctgattactgttagtagaacatgaattttaagtgtttccaggaatgatggtgactgttgtaaaaccttcaagatctctcttccaatctttgtcacgttcagaagcatgcatttgtgaaatgatcaatcagggttagaaatgtgcttgtaagagatcaacattcttctcttaatgaagccagatgaccctcatgggtatcttggtgccaggatcatatcttgacttcttaaaacccacctcaagttggtgtacacatcctaaatcttagagctagaagagaacttgaggtcatcttgtctaacttcctgccttcaaacagtattttatctcccttattttatggattaggatctgaaacccaaagaagttaaatagattgaccagcaatacaccagcagttctggagaaggagaacccagggatcttgcttcttagtgcaaagactattccttacacccttagaatcctttaaaatagtgtttaccctagaaattaaaaactctgaagtataggaggttgtacaattctcttttcgttttctctctcctccccctattccttattccttttattttaaaacattctaggacttgatatgatacatctctagttttctcatattaagtaaagtctttaatatgtagatcacctcaggcttttattttcacgctagaaatctagttatagttatctacttgatataaaaaattaaaggcaagtaactctcatggaggccttcttttctttgttaatttttatatctctattaccttactgcagtcaagatgctacctatatcttacacgaatcaagaggaagtgatttaatggaatagaggacctgtcatctcacctgcctctcccgctttttctacttctaattaacctacttcaaaaggtctaaattattccttcaaatatttaactacatttattatgtattcagagaaagtataagccagtcagaccattagaaagggcagttctgctttagagtgactgcattctgaaaggtgatgctggaatttcctgtataaaggtggtgagcaggaagg

SEQ ID NO: 52131 - DNA, 1325 bp, Homo sapiens
agaatgttcagtgactacttattaaatgtatagaagataacatagctaaggaagaaaactaccatttttggcagggagaagtggaatttaatagaaatcattgattttcatgttaatagtatatacttatgaattataccaagaattgacctatttagagatacttggttgaaatactcaggatttaatgtgtagataagttctttataatgtgagttatttttagtcttggtggttttgttttgttttcagtttttatttattttgatttgggaatgggagctggggacatcaaagccatatagtttagaaaatttcacattactgaaataaactgtatccacaatagtaagcatttcttcttttcttgctgtaatttcatgctccacctacaatatggcttttactatttttttattttttattttttttacccaaggaataaattatcctgacagtctttaattttgggtatggattagttaaatgtaaggattgttgatttgatttagtaatgtgagacacaatgtttatgtcctcattatctacagtagatggatagttttttctcctggtctctaagaatagtatttcttaatgtgtggcccatgattggcattaggcgtttttgcttgaccacttgttaaacatgatttttttctaggtagtgtttgccatttgaatgtctttgtggaaacagactccttaatagcttagctataattttctaagttaacatctttacctgccttgtttttttaattctcctaatcttactaataccttagcattagttttgcttccattatcagtgcttccaacttcttgttttatgtgctttaaaatgattatatatgggctgagcatggtggctcactcctgtaatcccagcactttgggaggctgaggtgggtggatcacttgaggccaggagttccagactagtctagccaacatggggaaaccctgtctctacaaagaatacaaaaaacattagccaggcatggtggtgcatgcctgtagtcccagctacttgggaggctgaggcaggagaatcgcctgaacccagaaggcagaggttgcagtgagccgagatcgcgctactgcacttccagcctgggcgacagagtgagactccctctcaaaaaaaaaaaaaaaaaaaaaaaattatatatggatatctggcgcctattttgttacttatatgtaattacttaaatggtatggaattttgaaactctttaaattgaatcttgatagtttttataagctggtggataagtacatctataaggtgattttagaaatacatttgcatttattgt

SEQ ID NO: 52132 - DNA, 1055 bp, Homo sapiens
caggtggatcacctgaggtcaggagttcgagacaagcctggccaacatggtgaagccccgtctctactaaaaatacaaaaaattagccaggcatgggagcgggtgcctgtaatcccagctactcgagaggctgaggcaggagaatcgcttgaacccaggaggcagaggttgtagtgagccaagatcgcaccactacactccagcctgggcaataagagtgaaacttcgtctcaaaaaaaaaaaaaagagaagaacgtattttacttgcagtgtatagtgtatgtatacactatatgtatatgtgttatagattatacatagtaatattagtagtatatagtaaagcatttctaatgtttctgccagcaaatgtaaattccttgcattcttctgtcttattgttgtctgcttaatttctctcactgcttgccagcgttgaattatgattactaatggatgatactgttgatgggattgtgattttctgctgttgattattaaagtcatctttctgtttcatgctgtaatcctaaaagaaggcatgtgattgtgtttttcgctccacagcttcttttgctttcctgttagtgcattttcctttattctggttctttagttttaaattttattgtacacctgtcagtagtgctaattttaattagatcatctaatatgataaagttattttatggacaaagaaactattttaaatgctttgtcttataaggtagttgtttcactcagtaaagtataaactttggaatgttaagctcaaataagtggctaatatctaaggaagtttcagcttttgagacaattgaaaattttttaaaaaggtcagtctgtgagtgaggcaaaggaatttaagcgtcatcactacccgttttgtattcacttgcacttttcctagatgtcctttgctttcttcgttaggtgtggagggcgcagctttccagagccgacttcctcatgaccggatgacttctcaagaagcagcctgttttccagatattatcagtggaccacaacagacccagaaggtttttcttttcatt

SEQ ID NO: 52133 - DNA, 1843 bp, Homo sapiens
ttaaatgttttggacatattgccagattgcttcccagaaaggctgaaccagtcaacccctcccctccgcattgccctgcccatttttattaaaacagtgataatctatgctcctataattggccaaaaccatctcagttctttttcatttcttggattactgactgcttttcacattagtcatttgtatttcttctgtaaatttttctttcatatcttttattcatcaggaattcttatttagccagagagtaaatggatgagggaaaggtgctattcagaacatgctcatgttactctagggtggtacaacgcagaagaaattaaccttgtgattcagctaacttgaatatgaatatagctcagagatgtcattgatatgtctgctttttagccaccaccagcttctttgttttggctattagattgcaaaaccactgcttaatttcgattgttaaagcaattgataggttatcctgggtttttgtaaaacagaaaagaacagtgaagaaaagatggtgagttttttaaaaagtgaacagaaaattcttagtgtgtagtcgctgatttgtcttataattgaatcagtttctgtgtatagcatatcaacatttgctctaagtggatttttttttagacaaaattgtcatttttttgtttgtttgttttatctgaagagagttttcactttttacttagatttgagcgatggatttacagggatctctgtcttttctgattcaccaaaaatccagatttggggaagggtttcccgatgttagatttgtggtctctggctgtgaaacagaatgtaaatcaacctctactgcaagaattttatcagttctctagtcttaaactataatactttaaaactgcaactttaggattattgaactagactgtgacctaagtgttattttgtaggaggaggaggaggaagacttgtgttgggagtgaggaacttgggcccagtgtgtacttgaggaaatccatttaccttacagtggccacagagtagagtatctgtgtggatttggtcataatcccttagtaatttggtttatttacatatagccaaattaatttcttcttggttgaaagttgtcttatagagcagtctttattaatttttagctaagacttaaatatagtagtgtttagtttgtcatgcattttgcaagtatatactcactttgaagagaattcattttagagcccattgattgtaccatatgtttttttatgtctcatctgttttttcagcagtatttgaaataattgactgctcctttcttctgaaacacagtacttccttggatttgataactcagtatctggtttttctcctgcctctctgggtgtcttctctgattgctttgtaagatgatccttaacaattggccattatgtggactatttggagttccttctcctcttgccctattttttcctctaggaacccttctcaatgcatttgacttcagttattacccataagcagatgactccagaccttctctctcttctgagctccagaccctatatccatctattttatatttcttcttgttatcttggagctaaactcattatcttatttcttctttcagtgattccattcagtgtctggcgtaccaactcgcttagttgtaccaaaatggagatgttgtccttgacacctttctccccaacctcgacatatctagttgatcattagatttttgtggattttatccacttagtatctctggagtcatataacccaggtttgaatgctagttgctcccttctagctctatggatttggcaagttactaggtggttttctcttttaggctaaa

SEQ ID NO: 52134 - DNA, 2101 bp, Homo sapiens
aaaagacaggaaaggtaattattataggctctggggtctcaggcttggcagcagctcgacagttacaaagttttggaatggatgtcacacttttggaagccagggtaagaatttcattttgagtttagaggcttgacctattggaaatatggtaagcaaattatctgttgcaaattaaagaattatacaacttgaactaagctaaattgatttgtataatactcagagtattttggatagtgttatttatatttttaaaaagcttttttttttaatgaatgctttgaaaagtactctgtgaagagggttttagagtatttcttttcctgactgatattttcagatcattatttcttgtagttagctctcaaatttggggccttcatggacatatcctttgttaggaggcagttatttttgatggtggaacagagtgaattccctgtttttgataaagaaaaaaagctgcttctcaggcaggaaccatcttttagaagccaagatactggtttttttcctgttagtcctagagagagaaatggaaacaggaggagcaataagggataatggcacacagtaggaaaaagagcatcatattaggatgctactattcaagctattttcatgaataatttttgaaatctaatgatcttctaatggctttgaactgctaattttttaaaagagtatggggaaattgaaattaaatattttcctgatatactattattaaaaattttatatatttagaaaacatctttgtgcactttgtacattttgtattaaaaaatacaataaggaataataggaccattttgattcctacccatgaggagtttgtaatctagtatgtaggtttttgttttgtttgcatttttgtttgtttgtttggagttccagagtactcttacattatttataatcattaaattatcgctacaactcagccatacttgaaaatccctcgtcagcagtgataaacctgggcctatttagggataaaaggtattgtgaacaggctatgttcagtatggactctctgcccctgggcatgggggtgcactggagaaccatttgtcagaaaaattatccatcagatttttccccgctaactttggggatcagggtgtaagagtcagattacagtggtagaaagttggtgtttaaatagtgttgggatttgtgaacaaatattttctatatgggtggccctgtacattaaaaggtattatagacaactggatagagtggtacctgtgactaaatttatcttccagctgtcaagactgttttatatcacatcatttaattctgtgtcgtttagttatatgacatttaattatatgtcatttgttgcctgcttctccttcaaatagtcttcaagttaaacttcatttgttctttgtgcccatagtactgttgattgcattccatgtaaactctacatctttatttttaaattatagaagacagagccgtggtatggtactatgccaggtttgtggttaaaacagaattgatgattttggctacttaatttctgaaacaggatcgtgtgggtggacgagttgccacatttcgcaaaggaaactatgtagctgatcttggagccatggtggtaacaggtcttggtaagtagctattggtttgtgctatatagtacatggtctaagactcataaaagaaatttaaagccagagatgctattttaaaatgtattggtttagaatagtcatcttccgtttagtgagaggtatagcagtatgtggaaaatgtaaattgtacatatcttttgacctagagtacctttttctagttctaggaaattatcatatgaagataagtagataatgttgtgtttgaagctttttttttttttttttttgtgagacagagtctcgctctgtcacccaggctggagtgcagtggcgtgacctccactcactgcagtctcctccctcagcctcccgagtagctaagactacaggcacacaccaccatacccagctaattttttgtattttagtagaggcgaggtttcactatgttggccaggatggtctcgatctcctgatctcatgattaacgtggcattgttttt

SEQ ID NO: 52135 - DNA, 1620 bp, Homo sapiens
tgtaagcttttgagctttttatattttgagtaaaaatattttttactttaaggtttttgttctctcttcataggtctattgaatttaattgcttgagtttttttctaggagggaatcctatggctgtggtcagcaaacaagtaaatatggaactggccaagatcaagcaaaaatgcccactttatgaagccaacggacaagctgtaagtcgaggacaaacagaactttcaacatttctttggttcacttgaaaacaattttaggagaatggtatggatgagcatatacatatatacacatatagaggtgtatatatatataaactgagggtagagatgatgtgatgttattctggttgtttcttaactcttgagctatgtaggaaaggattattgtatatatacacatttacctgtctgtttaacatttatctttagatatttaatgaaggctagctagacagttaatctttttatttggctgtggccacttactccaagggacttatggaattgaaacctgattcttcggttttttttgtattgtgccttccatcacgtgctttagctccatgtgttctttatgacttcagttctgtgttcataggctaacatttttgatgggctaatagccaaatggtggtacttactcacatgcttagataggctaaagtatttattgaccagaggcataggagcttcctatacttagtatgacaatagcatgaaagtgatgaatggtatggggaattgcacagtttaatgactgtaagataagcttagattacataagtcagtcctaattttttacaagtgagtgaaattcaaaagtttgtatttagcaaaattttactgactgcctttatcaaaatgagagcccacacttctcaggatataagtacatattgtctttatatttgggggaaatggtgatttcctatgtatacggtgggtttagctattcttactaaaagtagtaggatcccaactcgtgaattttgtgtgatatgtctcaaggaacatcctcacttactcctatctaccttaaggctttatggggttcatatcagagaaggacagactctcagggaatgctttggtttccatccccaccatcatggtccaaatttcccaccagggcttgggtggggtggataacaggaggcttcttgcagaataaactgagcagaatgagagagaaaggatgaaatagagatgaactcaacaattgagtaaacttctcttactctaccaagatctgtaaaggatatagagatgaataaggtagtccctgctatagtggtgcttgtagagaaataattcttttttcccaactttttattatggaaatttaaaaacacggactgaagtagaaagagtactatagtgaacctctgttttcccaatcttgttttatctgtcccattcctgcacttttgagtccaggggaagtctggagtattttaaagcagatcacaaacatatcatccataaatatattaataccagtaacataaagtgaaagccaaggattagatagaagaacaaattgctatggaagaaccaaggtggcaagagggtgtatgaaggtgtaagggaaaggacactaagagatctggag

SEQ ID NO: 52136 - DNA, 1862 bp, Homo sapiens
ccacattctgcatgggcgagacacacaggcttcccttcccctggacacatttagagacagtccatataatctacaggaccaagacaatcaggattgaacctatttggaatagtgagactcttcaaatcctgttagtcttgaaggaactatttacctggagcctttcatagagaaataaatggcttcaaaaagtcaatcaaaatctgtttaaagtgatgtccattttgtttgcttcttagaacgctcttaacattattggtcctttccccaaaaatgtttcttagtttgctgttacaagttctcactgtgttgcagggtagaaatccacctgccttctaatgtggtacttaaaacccattgtaatcattcgttgagtttctttctcaggatacaagttaaggatctagattagaatagtcaggtaagatttaaattattgtgacctatgtttagcgattgccaatatttcaattccattttgttgttattgttccataataatttgtagaactaatagaatccaaggattctcatcaaggggaaataaatgacttaaagtatgggtagtttggggttgttgggatagtcatttgttagttttattgtctggatatgtcaaatagaatatttctaactagcttgtttttagaaatgatcctgttttaaaggtattaaaaagcacattttggttttctcccagtcagtattgatttcctaagggacaagtattttatgtattattttccaaatattcctttaatttcaaagtgaaatcttaatgttagtggggaaaaaaagccaggtttcaaagctatccctggctgcacttgcaacattcctgtaattgcttaactaggtggaaatggatggggcctggtggctgacaatctcacataatctcatacaactgagcctcgggttagaatggtgtaccggagatgcagtcctgtcatctggtgtcagtcaaatgtggcagcaatcttttggtttggtttttgtttgtttgattttgttgttgttgttgttgttgttgttactgttctgtgtttttcctttcctcttttgagttttgctttattcctcactgctttctgacacttccccctcactcccctgtcttttgttaactgcctttcttttggccatttctgtgccttgactttcccatttggtctctgtacaatctgttccttatttctctggtggttgcagcttctgagctaacagaatgcttctgtcatgctatgtgtttaaagccttgattttattgctgtcatacaaaactaaacttgatgtggctgttgggctgttatttacagtttatttctctctctgctgcactggttaaaaggacactgtcaaggtatttttttcataatttttcaaatcattttcctcactgtttacaataacccattaaaagcttgaaacctaaatcttttcctttcaaagatcctctccatcatacattcacactggtttgttgttgtagagttgcgcctatatgttgggctggtgccatttgagtttttgtcattgaaagcacgtgtaaaacattaggttttttgtgggtggtgtgggtggactaagggggaaagtgtaatgaatccagtgggctgctcagcaaacagagggaagaaacaggtcaaatttggtccctctaaccttgacagtgtccctttaaatatttctctaccacacaccctggaccccagttactgagcctgagtgctgtgtactttttcagtatgaacttccctttgtgattgtcatcctagttgcaaagattaaagcttgtctgaagcaagccatccagttgacactggaagagctttaatctgtaccatttgcacacttgtgtt

SEQ ID NO: 52137 - DNA, 2154 bp, Homo sapiens
gtttcaaatgagaggtagaatcttactgggatggtcttgtcaacagtcagttacctctgattgtaaaaggtcgctcctcctgagtcttagtgtttactagaatttgcttcaatgttttatttttgtgttaccagttttaggttgactgtataatgaaattctgtattttgaatcacatttccctgctgatatcagcccagcttataacaagtaatgcttgccttaaacatattttttctttctctcacttctgccatcaattcaacaataggattgcagatacagtttactttggggctgaattaagcagtagcagaggggtgtttgtaaactaactgatgttatcaataggcagggacacagcatggcttaggatcatggtcttccagcttgatgacctgctttgcaatctgtttgcttcatccacatcaatgaggagccagaccttctggtccttcatttactcatagactctcttaagagctttgtacattcaattctgaacttattggtgccataaaatattattactgtgcaaaagaataaaagtgctagtgtgttcttattagtagccatgaatttcatttctcttttccctcttcccacctgagattcatctttgaggggaagccagataccttgggcttcttattttcccatcctgcccttattcttggaaggtcctcaggtttgttgacatggtttttgttctctgggacttttctagtgtgttgtttgcatgtcagccagctcaacttaatgcatgtcagctcagtgccacttgtgctccatgtgacttcagttagcaccagtgtaaatcttgtggctgttaatagaggtggagtcccagctctgacggcagtagtgggagaagaagaggaaattgtcagggcccaaacatttcatatctcatttaaatggatctgaccacttcatagaaaagaaaatttgaatcattgtgctcaaaggtttcccctttgagatacatattttgacctttataaactatagagcatttgtgttttcatggatggttatgtttagttttataaggaccaactctgctatacttcggattttcaggttcctaaagagaaagatgaaatggtagagcaagagtttaaccggttgctagaagctacatcttaccttagtcatcaactagacttcaatgtcctcaataataagcctgtgtcccttggccaggcattggaagttgtcattcagtaagtactttgatactgcttattgtatagtgagttccatgtgtaaagatttgctatttatgttttaagtttttctgcaagtcttgtttgaggtagtttttacttaattttgtatgaaaccattgaatccaaagttaaaaattatttaaaataattatatgatcccttaaggcccctttcacttctaaaattcagtgcttttatggtattatactatatttaacatagcctaggaaataatttccaactagccaactttcttgttcctaagtatcagaagtttcagtgggccttgatgcccttaaatgtttttgatgggcacctgtcttattctgcaaagttggctttgagagcagattatacatattgtctctcttaggttacaagagaagcatgtcaaagatgagcagattgaacattggaagaagatagtgaaaactcaggaagaattgaaagaacttcttaataaggtgaaattctgtattttcttcatagctgaagaagctttaataggagaaaaagtctttagaaattttaaaagcatttccgagattttttcctccatggaagagaaagtctgcacagctgggactcattcttaagaaaataatgactaacgaaagagactgttttatctgtcagtctttcagtgtggcattattgataaatggttgccagaggaaatagatctttcctctttgtctggttccctttggctcaggggtgtccagtcttttggcctccctcagtcacattggaagaagaagaattgtcttgggcaacacataaaatacactaacactaatgatagctaatgagcttaaaaaaaatggaaaagaaaattcagtgttttgagaaaatttatgaatttgtgttgggccgcattcaaaactgtcctgggccacgagttggacaagcgtggtttagc

SEQ ID NO: 52138 - DNA, 1090 bp, Homo sapiens
acagaacaagactgtgtctcttagaaaaaaaaaaaaaattctttgaccttttacatatttaaaaaacacattataggaccaggcatggtggctcacgcctgtaatcccagcactttgggaggccgaggagggcagatcacgaggtcaagagatcgagaccattctggctaacatggtgaaaccccatctctactaaaaatacaaaaaattagttgggcatggtggcgggtgcctgtagtcccagctactcaggaagctgaggcaggagaatggcgtgaacccaggaggcagagcttgcagtgagccgagatggtgccactgcactccagcctgggcgacagagtgagactctgtctcaaaaaaaaaaaacaaacacacacattatgacaatttgtttccgaaaataagtttaagttacattagcaacagtttcctttttgtggagattaaatttatttcaatactgggttttttctttgtttgtttaaattaatgggacactcctcatccttctcattcgttttagaaggcagcactgatcttacttatcagatagagttgtggtacctttatgtcaagccctataagatttctttcctatttcccaaatggaatgatgtaggttagaacaagtacttaagaattctcaggaccttgcattgtagccctgttttgttgggatagcagttttgaggagccaaaaaagggtacatgtgatgtagacataaactacattgctatctggaatggtaaatttgtatttttccttcttagatggtaaatttgaaagagaaaattaaagaactccatcagcaatacaaagaagcatctgaagtaaagccacccagagatattactgccgagttcttagtgaaaagcaaacacagggatctgaccgccctatgcaaggtgtggtatacatacatgcctaactggttttacttggaatcctaagaaatagcacagatctggggaattttggaaaagagagccactagccaatcacaagtgccttcagtgcaatgaagacgatttggtacataaggagccatggggatttaatgggttagttcggtttaagacctgcttg

SEQ ID NO: 52139 - DNA, 1163 bp, Homo sapiens
cgacctcccaaagtgctgggattacaggcatgagccacagcatccagcctgcccatcctttctatagagtctatgctgtgtgtaaaatataagacattttttacaactagtaagcttttatgatataaggtgatttcatatgaagcattcttttttttttttccttcagacaaatgaggcctacatgtaatttgctttacgtagtgagcttggcactgctctagacatcagagataaagaggttaataagacagataagatgctactttttgatttgtaatttcttcatataaggcacagccctggcttaggttctgacacagttactgagatcacctacatcacactgagagaactagtgatatcttttaataatcctgtagtcctttgttcttttgcagtgatgtatatctctcatcaagagacagacaaatacttgattggcattttgcaaatcttgaatttgctaatgccacacctctctcaactctctcccttaagcactgggatcaggtaagtttcccttattgtttattttattgcacatgcctttgagagggattgtaagagaaatagttaattttgtatgtgtgtttttaaacagctttagtaagagacatcatttacatacagtgaaattcacctattttaagtgaacagtttattgatttgccagacttcagtcataagcccccacacaatcagaatatagaacatgcccatcatcctgaaatgttttctcctgcctctttgtagttaatcccccatgctctggctcctggccctggacaaccactgatttgcgttatcactgtaattttgtttattctacagtttcatataaagtgaatcatacagtacatagctttttgtgtgtgatatatttcacttagtatagtttttgagatgtgcatgaagtttttgagattcatcttttttgcctgtatcagtagtttgttccttttaattatttaatagaattccattgtgtggatataccactggtgccttaatgggcatttgggttgtttcccttttttgactgctaatgaacgaagctgcttaagaatgttcatgtctttctcttgagtaaatatttatgaatggaattgctgggtactatggaaagtggatttttaactttataaatcaacttccaaact

SEQ ID NO: 52140 - DNA, 1029 bp, Homo sapiens
tcatttgatgtttcaatatgtgtctatttgtaatagtattaaattttaaatgagtgatttcagctgaagtagagtgttgctgccagcccagtattttgatctaatttccccaagaatttcatgaaattagaaatccttaccagcttacaaaaaaaatgttacatagaaaaattttcagtaaattcaaagaagtaagatcattttggggatctttaaattcctggtcaattcctgactttttttttactgtatggactgtcttgggccactctttatggtcctagattaccttcatctagtttgactgacttagttttggaaatcttcctcaacttcaaacctgtaaatttaaagaataaaaactgattttgctctcaggtaaaagaaaatgtaatcaggactgtgaccctgatatccttcaagtctgtaatgtattcaaaagccagataaataaacttgaatgatgtttaatcatctgaatttcctgaatcatcattccccctaccacctccctaccctaaccaccatagaagatccggacttagtggtattggactggaatgataaaaactatccagggaaggccgagcgtggtggctcatgcctgtaataccagcactttaggaggctgaggtgggtgggtcaggagtttgagaccagcctagccaacgtggtgaaaccccgtctctactaaaaatacaaaaactagcggggtgtggtggtacatgcctgtaatcccagcagttacttgggaggctgaggcaagagaatcacttgaacccaggagtccgaggttgcaatgagccgagagcacgccactgcactccagcctggatgacaaagcaagactctgtatcaaaaaaaaaaaaaaatccagggacaaaagaaacttccctaatctcactacccgaagatttagggacattttttggtgttttctctttttccttcagtttcctttggtaactgtagctaaatactgagtgatttgttctttagtttgccttaaaatattgactgtttccacaa

SEQ ID NO: 52141 - DNA, 1171 bp, Homo sapiens
aaaataagcccagcaatccttattatttaggatgacatttacgatcccctttttataggcctgagtttgtgaaatgaccccataagactaagtccatatgaacagacacttgatgatagacttaggcactgaagagaatcaactgacacgcctcagccctgatgtcacaattgggagcatagccaaatgcccaaaaatgcaaggccacctcctcaccaagtaaacaacgaagactgctatttgtacatcagatctgtagacaggagtgtctagggcaagctaccttgttaaggttgccaaatcccatcctttggactgcagatgttttccactcagggagaggtggcacaaactgaacggctggtggctgctgcttcagcacacccaggggaagggtacagagaactgcgtcgcatttataaataaaggtttgactcgtggagcgggtattcacagctatcacttcacatcctgcagaggttgggtgggaaaagactagtggtgatgaatatggcactgataaggacactgaacatttagtgtacaacagatggacatccatttctcaattctcatttttctattttcattaccttcatgtttcacataagaaaactgaggtagaggtgaaataactcatctaaggctacacacgtaataagtgccaggattcaaacccttgtagtcaacttcagaatcctcaactgtcatccccacactaccctcctgatacactggtgatctagactaatgaaaggaccttataccacttactcaagttaagtacatttagaccaaaaataaagaataaagtgctcatcccaatagaaccaatgtcttctgactgtggttagctgctcactatcgaccaacagaagaatgctacaagaaggctgtgatgcagatctgggggatgcagcctaaaactgtggagcgtgctatgcttgagaatgcacagtgattctcagcttgtcagagtatgaatgagttcaaagctgacctcagagagggtactgaaattatgttaacatcgttttcctcgtttgttttttaatgaatgtctgtttatatactatatatattttgaaattatatatctcaaaataaatatgaaagctcagtacatgctcattttctatggctgcagaactcgagaaaatggcacaacatc

SEQ ID NO: 52142 - DNA, 1048 bp, Homo sapiens
tttataaatgcgacgcagttctctgtacccttcccctgggtgtgctgaagcagcagccaccagccgttcagtttgtgccacctctccctgagtggaaaacatctgcagtccaaaggatgggatttggcaaccttaacaaggtagcttgccctagacactcctgtctacagatctgatgtacaaatagcagtcttcgttgtttacttggtgaggaggtggccttgcatttttgggcatttggctatgctcccaattgtgacatcagggctgaggcgtgtcagttgattctcttcagtgcctaagtctatcatcaagtgtctgttcatatggacttagtcttatggggtcatttcacaaactcaggcctataaaaaggggatcgtaaatgtcatcctaaataataaggattgctgggcttattttgaaagcagattagaagagactttaaggaagtctgttgaagccagtattatctggcccctgtcactggctcatgtgcttctttcttatggtaggtggtgttgtgttttgatcgggtgttctgggatccaagtgtcaatttgttcgggcatgttggcagtacgactgccagcaggggtgagctcttcctcttctggaacctctataaaggtaaatgccttctaattttaatcttttccatatccttacaggaatatagaatttgaaatattttgggttttctcaatatatatgccttaatttctctctttattaactcaacaaacaattcctgaaataccttctaggtactggggtataaaaatacctgccttcaaggagctcccaacttagtggggatacagtaagcggggaagcaggcttagaacagggcagtaggtggcctgatgggctgaacgcccaggttactggaggtccactcagcctggagggataggcccagggaggcttcctaccaggggaagcttgcgttctcattctcagactgacttgcccctgattctttgattacttctcttactatgtgtttatgaaattcctacctcctgttcagttattttcttttgta

SEQ ID NO: 52143 - DNA, 1101 bp, Homo sapiens
gaagtaagattctcaggcacctcactgcttctaacctggcaaaatacagcagttctgaagatataatttcagatcttgctaataaaagggaattattaagcatcgctttactttggcacagaattcttaaccttgactaccttggatagctccatgacaatgactacatcccttttagccatcccaggcccctccaagcccaggactgtcttcagtcacccatccggtgagtaattatgcaacagacttaggtggtaggcacagtactagaaaagggggataaaaaatatgatataaactattactccaatagagcaacagatgcaaaattacacagacaattattaacttaaaagctatgaagaaaaacgtaggctacacggaaaagaatatggggtatttaatttacatttggggcagtggagatgtgtcctggaagtcgtctttgaaatactttgaaatttatgtcaagacctgaatgctgagtaagacaggttgggaaggaagggggtcgagggggtgggagaagcagcacccccaggcctagaccacagtacacgcagaggctctgaggcagaaagcagcatggtgccttccaggatgtgagaacagccgaatgtgcctggaatctggggatggacaaggaagtagagatgagctagataatgaagaaccttagcatgggccaagataaggagtttgaacattttctttcagcagtagaaagtcactaaaagaagcaggaatagcagtagtagctattggtaaccgtccaggcaacaggtaagaatggcttggactgggaggtaggcaatagaaaaaagtaaataggtttgcaagagattgtaaggctagcactgacaggacttgacagcctggatggggaagggaaaagacacgctgctgctctcagaaagcaatgtgctcagggagccaagttccccctctgtgaagttagaggctctggggtgtgaaagaccattcaccactgggcagtgaggagtaatggaaagaactggggatggggagcaagccaacggttagctgatgtgtctgcactgacaaggccaatgtcttatttttacagccttttcttggaat

SEQ ID NO: 52144 - DNA, 2648 bp, Homo sapiens
gtcagtgcagacacatcagctaaccgttggcttgctccccatccccagttctttccattactcctcactgcccagtggtgaatggtctttcacaccccagagcctctaacttcacagagggggaacttggctccctgagcacattgctttctgagagcagcagcgtgtcttttcccttccccatccaggctgtcaagtcctgtcagtgctagccttacaatctcttgcaaacctatttacttttttctattgcctacctcccagtccaagccattcttacctgttgcctggacggttaccaatagctactactgctattcctgcttcttttagtgactttctactgctgaaagaaaatgttcaaactccttatcttggcccatgctaaggttcttcattatctagctcatctctacttccttgtccatccccagattccaggcacattcggctgttctcacatcctggaaggcaccatgctgctttctgcctcagagcctctgcgtgtactgtggtctaggcctgggggtgctgcttctcccaccccctcgacccccttccttcccaacctgtcttactcagcattcaggtcttgacataaatttcaaagtatttcaaagacgacttccaggacacatctccactgccccaaatgtaaattaaataccccatattcttttccgtgtagcctacgtttttcttcatagcttttaagttaataattgtctgtgtaattttgcatctgttgctctattggagtaatagtttatatcatattttttatcccccttttctagtactgtgcctaccacctaagtctgttgcataattactcaccggatgggtgactgaagacagtcctgggcttggaggggcctgggatggctaaaagggatgtagtcattgtcatggagctatccaaggtagtcaaggttaagaattctgtgccaaagtaaagcgatgcttaataattcccttttattagcaagatctgaaattatatcttcagaactgctgtattttgccaggttagaagcagtgaggtgcctgagaatcttacttcactctagtctgccagctcctactggctggtgtctggcgacaaagagttctgtatgctgtttcagaaacataatctgtctcttcgcatttgaatggtactgcgtgtgtcttgtcatcagatttcagagcaccaggaataaggtggggcctgataaggaagtttttgaggaaagtctgtaggaaaaccctagaattatcctttctgtttccccagctccaatactgttggcactagtggcaggagaagctgctggtatcatggaaaacataagtgacgatgtgattgttggccgatgcctggccattctcaaagggatttttggtagcagtgcagtacctcaggtaagtaggtaggtggggcaaggagggatctagggttcagactcaaccagggtttaatgtatttgcagcatgttcttggtcaggacagtttaagctagaattgaggtctgtgcttttacatgaataattaatgtttggagttcatggcctaagcgtggggttcagaaaaccccccaggacaagagctggggagtctgaaggctgctagctgcatttctcctccggctttagagtcacaccagatccctgacattttagacaaaatggccaaactccagtgagtatctccgggaagttttcagagaacctcttggtactttttcgtgttctttgaaatactttaaccctttaggattcctttgaagggaaggatattgtgaatttataaaagagaataaaggccaagccctgtgtagatctctggattcatagacaggaaggcaacatggaggggcatccttcctgtctgaagtccttttgtccatgtgtgttttaaagcaggcattcatcacttgatcactggctctcacatgttgcccctctttctcttcacttgcatctccacccaccactgcttttccacctttcaaggattgatttgtgcttggtgtctcgtaatgacttttgctcctggtttttcttttagcccaaagaaactgtggtgtctcgttggcgtgctgatccctgggctcggggctcttattcctatgttgctgcaggatcatctggaaatgactatgatttaatggctcagccaatcactcctggcccctcgattccaggtgccccacaggtgagaagctggcaaactatctgggcttatttgggaagaggccaggatctcatgatgtccctgattttttttttttttttcagattttagtcattccatcttcggaccctttcagataaccaagagcagagttaaaaggatgggcagcatttctgatttctcataatttggttttgtaaatctaggcagtctacattcagaatggaggagtccagagtataagtcaaataacatttttccttattcaggttttctccctaaaaaacaaaaccatttttaattgcacttccattttgtaatggctcataggattgctgtaaggtctcaattactaggggcttccagggcatttctgagaaataaccctgggtccttgtctagacccttatgccagaccccactccaaagagcggtaagaattccttagtgtcatagcccagacctgctgagc

SEQ ID NO: 52145 - DNA, 1026 bp, Homo sapiens
ccagccacagtgcatggtgctctgctgagtgggctgcgagaagcgggaagaattgcagaccagtttttgggggccatgtatacgctgcctcgccaggccacaccaggtgttcctgcacagcagtccccaagcatgtgagacagatgcattctaagggaagaggcccatgtgcctgtttctgccatgtaaggaaggctcttctagcaatactagatcccactgagaaaatccaccctggcatctgggctcctgatcagctgatggagctcctgatttgacaaaggagcttgcctcctttgaatgacctagagcacagggaggaacttgtccattagtttggaattgtgttcttcgtaaagactgaggcaagcaagtgctgtgaaataacatcatcttagtcccttggtgtgtggggtttttgttttttttttatattttgagaataaaacttcatataaaattggccctctcttttgttcctttgagttggagttacatacaagatgggggcattactcctttggaaatgccaagtttatcctatggcaatagtaatacatgttttctccatgtttaaataaggaagaagatgttcatataaaagagaaaaatggtttgatcaggtcagaagataaggtaggggggccggtcctgtagaagcagtggacttcctggtcagtcggactaggcttcctcacttgggtgggggtggagtgtggtggtgtgccaagaacatggttattaggaaactttggatgcactttcaagatagaacacaaaagagctgaaacaaagtctgagcctttgggagaccagtctgcctttattcctgattccctccatgggtatgtgctaaaacttcccaattctactaaaggtggtggtgtacattttgggaagcgcactacataggatcaagggcttaggtaacagctggtttaacagattgccacaaacttagtggctcttaaaaaaacagaaatctattcgaaagttctggaagcttaaagtctaaaatgggtacac

SEQ ID NO: 52146 - DNA, 1019 bp, Homo sapiens
cttactttcagggacaggaatctattgctcatacttctgcttcccagagttttgccaatctaaaggcattgtcatgtggcctgcctttcctgtccacatccccacctctgatgctcaagatgctatttccaagatctcttactgctgcttctcctggcttactggccagaaactagctcactcaaggctgccatccttcacttgcagcctccctgccattctccttcactggttggcaaccttgagagttcaaagaaaatcaacctctgtggtggtcaactaaaggtattaggaaactaagtctgtggctcttctctgctgatggaaacagaagggcgccaagccatgcctaaaaagatctcgccaataattcttgtctttgagtgttggagccctggattctggtgctatagctcctggtgccaaagtctggatctttccacatttcagcagcaccaacatctgctgctactcaaaatgtcctgttgaagagggacagctgtgatgcccttttgctggggctgccatcttgaaatctgagtgcaataggatttgcttgtaacagttatttcaggatattttgtttctttaatctgcacactttctagatagattttatttttaagtgtcctcagcattgcagaaaataacattgtaatagcaagtaaaggctggaggctgtttctctgggcttcaaatggctggcaaggctggctctcaaatcccaaagttgggaggcatgtttctgaaaagcaactgaggtgtgactgtttggacccaggcctcatcatcaggggtcctggaggaagcctccaagtagaggggagacctggtagttgaatagttgtttaatcaagccaaatagtcccactgcccccggtcaacaaacccacttttatgacagttttcttccgcagcttggctcttaaattttactggcaggtgtatggttgttggagggttcctagtgagttgggggacctggcaatagagctgcttggttggaggaagtgaagctg

SEQ ID NO: 52147 - DNA, 1037 bp, Homo sapiens
ctttgcagttaacttatggcctgtctgggctatatctgcctctgctgggttggaaaggacccactatggtagcaggtgagggtgtctcggtcctcactttactgacctccacagctcacttttgttatttattggcacaggaggaagaaggggaagactgtacactcagtgtctacaggcaactgcacaactccctggatccgtctgaactgcctgggaagcaggggctgccagagtctgggcgagtacgggccgaggaacgattacggccaaccaggccctgtgctgaggagaactgagcccgctgggtgtctgttgtctgccctctgctcctgcttctcagctcttccaccgtcctgccccacgaaggatccaaggccagttaaccaggcaagacacaagccttggctggaaaactgtggtagagccgggctgtggctcaggtaatttttgccatttggccagagggaatcagagactacaagctggacagtcacccaggcccaaccttccccaatgcacgagtcctctctctctccttgtccctgtccaccaagtagttggaccattctggcccccaaacaagggaagataaagtccccagcacacagcaggagtcaaaaattcttctcggctccttggtgggttgtttctggatcctagggcagcctctgtctgtgtggttaatgttctggtttctcagtctcctcactatatccacttcactcctcatttgcccaatgggctcaagtaccccataagatttaccagccatcagctctatctagggggctttcatttctttccccttggagttcttttcttcagacttaaagcagaaaggggtctgtgctgcctctaaaggattatgagactaccctttaggttgaagtttgacctggctcctggcttaccagtctcctggaagcagagcatgcagatactcatgcggatacccattggaatgacatcatccctccccaaccccagctctctctgctcaccttccaaaggcacctggaggtgcaagcctcatg

SEQ ID NO: 52148 - DNA, 1053 bp, Homo sapiens
tgttattgttgataaggatgtgaaaaaaatcatgggaggatctggaacagagactacgttggagaaacagaaacccgtctccaaaccagggccaaacaaagtgacaagtagcattactatatatccatctgacagcagcagccccagagctgctccgggtgaggccctgagggagaggcacacatccactagcaatatccaggtggggctggcagagctcacatcagttagcaaccatgtcagctccccttttgagctctccattcacaaacatgacatcaccctgcagcttgcagaagcggagagaatggcagatgggcccctgaaggacaggccagaaacagtggtctctcggagcagcattataatcaagccatcggatcctgtggagaggaatagccatgcacctccagcggagacaatcaggtggaaaagccatagtgccccttcagaagtgggcttctcagatgccagacatgttactgtgcggaatgcctggaagagtaggcgagacttgaaatctttagaagaccccccaactcgaataggtaaaaacgtggaatctaccaatagcaatgcctacacccagaggtcttccacagacttctcagaactcgaacagcccaggtcctgcctttttgagcagggcactcgaagggtaggaccaagttcaggggatgcccctgagccctcctccagaaggacccaaagtagcctcactgtgtcagaggtgcttacccgtcggaatcgggtaggagacaccatcactgtcgcagcctggaaccactcagcaagcatggtgagttccagcctctctcccctctctcttttctccctcccttttccttctttgccttttcctttttcccctctgctctggcctgtgtgacccaggatcttgagaactgagtagaactgggttccttagagaactgttgaaaaatcaggggggtttgacctttctcctaaagaaggtttttggcagcatcactttccaaaatcccttttccaatttgttgtcttcattttgctctcgtatatgaaggtgacata

SEQ ID NO: 52149 - DNA, 1231 bp, Homo sapiens
atccaggcaccaggaacagataggagcacttttctataactgggagctaacgtgcaggttttacatttgctgactgacatgctttctactttccttttgtagattgatgatggtctccagctgtcaaagaagattgtggttgccaagagaaaggtaaccatttctcatccccttgagtggaattggatgcctctaggagcccacattggctggcagtagacatggccgaatttacaagctacaaggagacggcctccagccgccacttgcggtttaagctacagagtctaagccgccgccttgatgagttggaggaagccacaaaaaacctccagaaagcagaggatgaactcctggatctccaggacaaggtgattcaggcagaaggtagcaactccagcatgttggcggagattgaagtgctgcgccagcgggtgctgagaattgaaggcaaagacgaggaaattaagagagcagaggatctgtgtcgtctgatgaaggagaaacttgaagaggaagaaaacctcacccgggagctgaaatctgagattgagcggcttcagaaacgaatggctgaattagagaagctagaagaggccttcagcaggagtaagaatgactgtacccagctgtgtctgagcctgaatgaggagagaaatctgaccaagaaaatctcctctgagctggaaatgctcagagtcaaagtgaaagaactagaatcttctgaggaccgcctggataaaactgagcagagtttagcgtcagagttagaaaagctgaaatcattaactctgagctttgtaagtgagagaaaatacttgaatgaaaaggagaaagaaaatgagaaattgataaaagaactcactcaaaaactagagcagaacaaaaaaatgaaccgagattatacaaggaatgcttctaatctggaaagaaatgacctacggattgaggatggcatctcttccacactgccgtccaaagaatcaagaaggaagggtggtctggactacctaaagcaggtagagaatgaaacaagaaacaaatcagaaaatgaaaagaaccgcaatcaggaagacaacaaagtcaaagaccttaaccaagagattgagaaacttaagacacaaatcaaacactttgaatcgttggaagaagagcttaagaaaatgaagtccaaaaataacgaccttcaggataattacctaagtgaacaaaataaaaacaaattattagc

SEQ ID NO: 52150 - DNA, 1008 bp, Homo sapiens
gtctgttcactcttgccatctgttttctcctttgtaatccatgattaggtcatggacattcttattattttctgttaatggtcattgccaaagggccgacaagctatttgataattaggaggctcactcatcagtcaaattcatcgaattttcagcattccctgtgtgctaggctccctgctgggtactgagaatatagtggtgacacaagttggagagaagaattgagtaaataaagctgcaatagagtgtgataggttctgtgatgggaaatatgtagcagactgtgaaagcaaaaaagagaggcccagatctggcctggggtttgaagaaggcactccagaattttccagaaggatgtattgtctaaagtgggatctgaagaaatgagaaggaatcaaactagtgagggaccagagggaagagggagggcgaggatgtagatgaagaggctggcggggccacatcatgaagggctttgggtgccatcatggggaatttggactttatcctaatagtagccaggacctttagagagttttaagcagtggtgtgtaatacctgctttctctgtatgtttccagtaagtatttgctacatatttactgggtttagctttttcattgcctgtactagttgattcatatcatccagagtcttgataaaacatataaaattggcactaaaagccaaataaataaaacggtggtataattcccagactctctgaattcagaattatgataatttatagatggggctatactaaggtttaacgtttccttcttttgaaaaagagattgtgaaaactatagtataagctagtacaaataagatgtgctgagagaatgctacagtttgaggataagctgggttttctttaacagctttattgagatatgctttatttatcatgaagtttatctctttaaaatacacaatttaatggtttaagcatatttatgaggatatgctgttttaaagcactttatagatgaatcatatatc

SEQ ID NO: 52151 - DNA, 1075 bp, Homo sapiens
tggctcactgcagccttgacttcctgggctcaggtgatcctcccacctcagcctccctagtaactgggactacaggtgtgcaccaccatgcccagctaatttttttgtagagactgggtctctgtattgtccaggctggtctcaaactgctgggctaaagcagtcctcctgccttagtctcccaaagtgctgggattacaggcatgagccaccaccctagtgggttattttcattacactataatgtttcccttttaagaaagttactttttggttgaggctgtgactgatttaaccttggaaaagcaaagcaaaatacaaaaccttttgatcaacaattaggttcttttcctagccatttatggattttatgtgccaatattttattggttggtgttggctaaggcagaggagagcactaatgaaatagaagagatagaagtgagaacttgaacggtcagtggccaagagacctggtggtcttggttgctcctgatagctggatgatagttagagaaagcttccctaggaaagtagagcaatagggtagctcagaatgagtgggaaatgggttctcgtcatagcagtgactgggcataggaaaggaatcttaacaaagcctcttgctctcatgtcaacccctctgaggaaataggtgtagttagggataatacagaactcttctcgaaggagtggaaaaattcaaggcaaactcttgccctgtatttttttattttttgcaaggcgtagtcttgctctgttgccgaggctggagtgcactggtgcgatcttggctcactgcctctgcaaacctcctcctcctgggctcaagcgattctcctgtctcagcctcccgagtagctgggattacaggtgtgtgccaccacgcctgggctaatttttgtattttttgtagagacagggtttcaccatgttggccaggctggtcttgaactcctgacctcaggtgatttgcccaccttggcctcccagagtgctgggattataagtgtgagccactgcacccagcctacacatacctattacacataaaatattttgctatatactgggg

SEQ ID NO: 52152 - DNA, 1045 bp, Homo sapiens
cctgtattttgactgcgacctatcagatgagatcaggtatggaattttccacttgtggagtcatgtgggcactcaaaacatttcagattttggagcattttgaatttgggattttcagatcagggatgctcaacctgtagctgatttctgagatgcttcctagctgtaagatgtcatgtacatttttagactgttgaggaatgttcgggtgttttaatttaagcaaagacagtgggttctaccctaggaccatatcatcttataggaaaggggaagtctcctacagccaaattctttcttgactttcctgagagagacatagccagcttagccaggttcctttagtgtcaggatctagatgcagatcttaccttggccccttgctgacagtgaattgtatgtgaaagtctttgggacagccctctgggtcacctcagtcttggtatgattcatgcattacctatctcttccattctgtttatattctatccaggtcaagagacaactgcctttgaaagagagtgagtgactgtttccaaaacagcaagcatagggagagccgccggaagtattgacggaaagcttgaattacctacatggtaagtatgttgtacagtgaaacctgggtgtaccaatagaattgggtggtttctgaagccactataattttgccactactggaagtggggaggaaagtcagtatttgtgatggcctattatgaaccaaatactatgctgagtacttaaccaaccaacctgatgagggtgaaaaatccttgcatgaagttagcaaccgtaagaattaggccacccttaagaagtagctaccatttattgaatatttactctatgtcgggcgcagtcctgttggacatgttatcgccctaccaaccctgtgaggtaagtactgttgtcatcaccacaaggaaacaagcttaaagaggttaaataactcttccaagttcacacaagtagtagaactaggtttcaaacctgcattattttctttcctttttttctgagactgggtttcgctcccattgcc

SEQ ID NO: 52153 - DNA, 1124 bp, Homo sapiens
ggattataggcacatgtcaccatgcccagctaatttttgtatttttagtagagatggggtttcaccatattggccagggttgtcttgaactcctgacctcaggtgatctgcccgccttggccgcccaaagtgctgggattacaggcgtgagtcaccgtgcctggccgatactatcagtaactcttctctttgggaggccaaggtgtgaagattgcttgaggtcacgagtttcagaccagcctgggtgacatagtgtgaccccatcactacaaaaaaaaattcttttcaaattttattctcttgaggcttgagttactactgttcccctcatcttttaagctgtttttaaaaaactctcattatttgtccattgtaattctagccgccttgctctctgggaagatagaggcagggatgggtgtgtgtgtgtgtgtgtgtgtgtgtgtgtatgtgtgcgcgttcatgcatgcgcgcaggtgcaggtatgtgtgcatgtgtgcatgttttggtggaggtgtggaagttggattaaagggaccaatagtcttggaaggcagtcacaaggtggcttgcagggatgtgtaagggaggcagttgtgatgaaagaagggaggatagtttgtaagatcatgtacaaaagctttaggtttaccactagcttagaagctacctttccattttcctcaagagtaagataacacaagaagtttgacccagatcttccatctgtagtagctcttctctaattttaggggtaagattcaatgggatggtaggcttttcaactctcctgtagaagcctgcttgtttcaaaactggagggtaagtttgcagaaagaaaagctctatttttagttttaattgatattgggtggttcagggctcttttgaggaccgagtctagagggcaacaaaatgagagccagcatggtgaagggactttcaaagtcagacagacttgagtttaaactctgtcatttaataacaagctgtaagaccttggacaagtcacttcttgaaacttaaattctttatctgtaaagtagaggtaacattatcttcttattgtcttatataaaacataaagcatagtgctcagggttggtaaatactccgcagatgtt

SEQ ID NO: 52154 - DNA, 1005 bp, Homo sapiens
taaattagctgtatataactacctacctaagtgccaaggggctgtttggtcagtagggtttacagctccccattggagcaggttttccccttatttttttagctttgtttataaagatataagccagcagcttataaatgtggttgtttgtaatcttggggatttttctccctgggctggtcttattttttgcttaagacataataaaatactctgggtaactgatttttatggagacgagaaaaacttaagaggtagtcagctcagtaaagcaatagcagatagtggtctgatccacctcgtttgtagaggccaggggagtggagatggtggtgttcttgtttctgcctcttttgggcactgaagcaagagaggctaaatatgaaagccctcctttagttgatatcagcttgccttaggttagcaaagtatttaaaatatgagcctcaatttcttcaacatataaaatgaatttgataatatccttatggggtcattattaaggattgagagtatggatgtgaaagtgctttgaactatgaaataatgtataagcattaggtattattgtcaggcgtagtggctcatgcctgtaatcctagcactttgggaggtcgagagaagaggatcgtttgaggccaggagttcaagaccagcctgggcaacatagcaagaccctgtctctacaaaaaaataaaaataaaaaaaattagctgggcattttggtgcacagatacttgggaggctgaggtgggagggtctcttgagcccaggagcttaaggctgcattaagccatgattgcaccattgcactcctgcctgggtgacagagagacctgtctccatatatatatgtttatttatttattaggaggtatattatttagagcgtaggaggcatgcacttctgaggcccttgtcaggatatcttctagggatcctgaatttcagatgattctgggcattcaataattggacttcctaggctggtgccgtgtctcatgt

SEQ ID NO: 52155 - DNA, 1017 bp, Homo sapiens
tgtgttcatagcattaggatgaagagttgggaagatgggggaggtgtggagacttggatccaataagactaagaaggatttgaggaaatggaactttgggttgctggcagggcagaaatacttgaagaacactcccgttttaataagttatttttagtttgcagaaaaagagtagtttcttcagtgtcctggaatcttgtagttgtgtttgtaacctaaactaatcggcttagcctgtgccagaaaagtgtcaggtggcatgctcatttccttctaacttttagtactgcctggcttaactgctgtagttctgtgactaggcttcagggcgttggtaatggggactaactgggggaaggggcaagctgctgctggttgcatgctgctggtctgagcagagagaaccctcgtgctaagtcactgccctaatgcattcactctggctgtacatataatgtggtgcttgaatccagagtgttcacttgtggtaccctaagtatgactttgagtggaactaccttagaatcttatttttccaattaacttgacagtctctagtcatttcttttggctcttgtcctggatattttattctgccttaagtggtttttaatggattttaagctctcagttatcattcattcagcacaactttattgagtgcccactcaaatgtatgcctggcaccattgtaggtgttaagtgtcttttggtgtttctttattagaaactgttgattttataaatgttactcagttgaagaatgtcaattacttaaagtctttttaaaattaattaattaattaattaatttatttatttttaagacagactcttgctctgtcacccaggctggagtgcagtggtatgatctcagctcactgcaacctttgcctcctgggttcaagcaattctcctgcctcagcctcctgagtaactgagattacaggcgtgcgccaccacacccagttaatttttgtatttttagtagagggggggtttcaccatgttggccag

SEQ ID NO: 52156 - DNA, 1052 bp, Homo sapiens
taggatctaaaataggagccaacatagtgtgttttagtcactatttagaagggccctttatatgagttgagagagcactgacttcagaagttgctttaggaggtagaagggaggggagtgggtctggtacagttaaaaattggcctgcatgccatccttggaacacatattttactgtgggttataccattccagaagacgtatatttatgtgtccaggagacctaatgatcgccctcccatacacacttcacagtattttaaaaagtatagtctgtggactatctgtatcagaatgcacagtctgtgggctctgtaacagatccacttaatcagaagatttgaaaatggtaccgaggaatctgtaattttaacaagtacccaggtaattgtatatccatatgaagtgttgaaaattactgtttgtaaccttgtcgatagaaataatcttcaacccagtcttagtaggcaggcaggcaggcaggcaggcaagtacttgcttatttaagattcgttacttttcataattgacattggagcttgcatttccttttgcattgatttaacttctggctttaatctctgatatactgtgtcctccatgttaagatgtgtcgatgagacagcagaaaatgaaacctttgtcctctttccttacattattttgtgttttcactattagccacatccctgggaagaggcagcctctgaatggagaatgctgaattggctgtatagactgatgtgctttagtaaaaagcttgctcacactcaacacttttttccgtgtttattgaaaattctagttatttacctgttactaagagtttatttttcatagatctttaaatgtctaacatgcacttaaaatgaaagagaaaaacaaagagaataggatattgagaaagtatatgatttacttcatagtaagacactaaatacttgatatcaaggtaggggatagaaaaaaaatcagcaatggcaaatttaaaccatctgcagatggtccagctagatccttacaggggtcgcagccatcattttagtgggcat

SEQ ID NO: 52157 - DNA, 1060 bp, Homo sapiens
ggaggcgggcgcttgtagtcccagctacttgggaggctgaggcaggagaatggcgtgaacccgggagtcggagcttgcagtgaactgagattgtgccactgcactccagcctgggccacagagcgagactccgtctcaaaacaaaacaaaacaaaacaaaaaacaaaactaaaattggagctgaagaatttgatcctagacagatccttgagtttgaattaaattatcctttttaactctcatggattcagtaaatatcaaatgttttctgtgtgccaggcttagtgcagagggtggaaggtggtgggagaagccttaagaattaaactaatacagtgaaaaaaaccaagaatttaaagtcaggtagacctgaattcaaatcccagccctgctaattagttattagttgcaaattgctaagtgccttggagcttcaattttgtaatctctaaaatgagaataataactcttatagaattattttgaggaatagggtgatgtatataaagcacttagtaatgtgtgctttataagacattactgcccatagaccaatgaatagacaaaaatgtatggtgagagttactgagtcttgacaggaagcgtttggctgacctaatgcagaatagagcgaagtgattttgactgccaatatacagtgtgctgcttttgttgaaacttgtagctctcacactggtatttgccaacattacatttgacttctcacatagtaaaagacaactcattcctgtggagtttaaggcatgtggaaacatctatctgtaggctagacatttaaacttctgttgtagttcagttgcgggagaaattgcacattaccatagagtagtgaaagtcaggtagcagagagcctctctgggctggtacctatattcactttcctgaattctgtaaacatcaaaagcaagaatggccatccaggatgaaaggtacagctgacagtatggtcaataaactgaacagggtgtaagactaagaacttattttgttttctaaaatggtgccttcttcgtatttaaacttctgtggagcatctgtc

SEQ ID NO: 52158 - DNA, 1840 bp, Homo sapiens
tttgtgtaaactagggaaaggaactctgtttttctgggcctcagtttactcatcttaaaaatgaggttggccagctgcagtggctcacgccggtaatcccccagcactttgggaggctgaggcgggtggatcatctgaggtcaggagttcgagaccagcctgaccaataacgatgaaaccctgtctctactaaaaatacaaaaattagccaggcgtggtggcatgcacgtgtaatcccacctactcaggaggctgagacaggagaaacacttgaactcaggaggcggaggttgcagtgagctgagattgcgccattgcactccagcctgggcaacaagagtaagactccgtctcaaaaaaaaaaaaaaaaaagagattaatagtatctgcctcatagggttgttgtgagataatacgttagttcacgcaaagggctttaaatgacacaaaacaaacacaataaatattacctattattattgtgttatgcttttaagtttttcaagtactttaacatttccttcaaatagcgttcctatgagagaggtagggtctagagtctgttatagtaagtcttgttttacaaagaaatccatgaagaaacttatttaagcacaccagaacaaaattaaaagaaataggctgggcatagtggctcacctgtaagcccagcactttgggaggctgaggcaggaggatcccttgagcccagaaatttgagaccagcctgggcaacatggtgaaaccctgtctttacaaacacacaaaatacaaaaaattagctgggcgtggtgacatgtgcctgtggtcgcagttacttgggaggctgaggtgggaagatcacttgagtctgggaggttgaggctgcagtgagctgtgatcatgccaccactgcattgcagcctgggcaacagagcaagacagagcaaagaaaaaacaaccaaaaaatccccccaaaacccccaccaaaatgaaaagaaatacaatttaaaacattccttaaccccaacctgaaagagaaaaataaaaaggcttgggatgtgttctaatagttacctctcttatataagcaggactaacctgtggtatttggaatgagagaagagatcattgctggctactcctttcttcttttggttttttattctcttcctgctgttagatgggaggtggggagcatgttactgcatatttcttatgtcctagtctagcctagccatctgggaagctgagaaaccatatttgaaggatatcacatctgccaggaactgggaagacagcttacctttttatgtgaaaaaaggtaaaatgagaggagacctgagctaccagtatgatctgttggtgttatgtgagttgtttcaccaatttaactcttaaatggatttaatagaatcccactcttttgttgtgtgtcagtttcttgcagtcgtttagagacatttttggaatctaagtatttctagggcttttttcccttcttacagccttatgccacttgatatctctcagctgtcagcacctgattttgctgcagtatgtactgcaagatctctgcattgctgtaaccagatcttggtcagatgtactctttccatctcttcgatgaaaagatatagcattggagactcttccatatcctttggaaaaacctgaaaagaagagtctttgagaagtcaccttgtgttggggcttctcttggctagcatttctctggctgtagccttcccttatatttaatacgtaaaagcactgtcttcagcaaatgtgtattgtacctgtccttgcaagaggctactaccatattagttactggaaatgcagagagtataacaatcaa

SEQ ID NO: 52159 - DNA, 1104 bp, Homo sapiens
acaacaaatcgttattaaaaacaaatgtccaattcgaaaaacaaacacaaacaaactgttgacacagttcagcaacttgctagtcttggcaaatgaaattaaaggatatttcaggtccagcttctgggaaagtgggttttggagatgattccacttgaaaattagggctagttagtgctgaagacttgttgtctgtggtatccagcagttttttgatatgtttgtcttcattcccctcatcctctgcagccataaagttctttagattactcttcttcatcttcactgttggtaaaaagttatctcaaagttccgtctgccttattgcctcagtattttaaaagctcagtcccattcttttctacctcattcttgatgtccctttactacctgtttctgctgggtctggtagaacctgtgcacaaatgtgagcaaagtcctaagttcttaattttttttcttccaatatttcttccatctcctaacccataagtgaaaacacggctttttctgtaatgaatgctattatttctgttttcattggttgaatactctgcaactccttggacgaggggagcaatcattgtagttctagtcattcactgtccctctagaccattgttttgccatttttgcacagcttctgatttttcaaaaagtccttaccatctgttctctccccatttttattgctttttgtcttttgtcccattgctttatttgcttttgtctgatgacttccaggatccacatggatcagttttcttcttcattgcattctctagtatccagtacctcactctcatcagttatctttctctcttccatcttcaccttcgctattgagtctttcttttcagactacaaatacagaggtcttgtctatcctaaaacaaataaaaattttctgccttttcagctttttgaattattgccatctttttcttcttttacttctaaacttttttttttttttttttttttttgagacggagtctggctccgtcaccaggctggagtgcagtggcgcaatcttggctcactgcaacctccgcttcccgggttcaagcaattctcctgcctcagcctcccgagtagctggga

SEQ ID NO: 52160 - DNA, 1164 bp, Homo sapiens
tagtagagtcgaggtctcactatgtcactcaggctggtctcgaactcccaaagtgccatgactggctgcgactctgtcttaaaaacaaaacaaaacaaaacaaaacaaaaacaggtaagagaaagggcatcatctcagattaaaggggtttttcatgttgaataatttagccttatgaaaaatttactattcttgggtgaaaataccattgactaaaatgactgccctaggaggtctgttgttatgctaatagtgtatgttgaaatgacaggttacagtttactgggattagtttaggctgaagtggtctgtgagggcttcatgcaggcagttagactagagtttttcagtggtggatggatagaggttgaagaggcagaaaggaaagagaaggttttgtttttcttttactttttaaatttttttcttttgtatttgagaaagttaaggatgagggaatggttttctaggcaagagcaaatcaagggcaaagatagagattagacgtattattgatgggaactgggaatacttgtctggtctagtaatagagtttagattatggactaggaaggagataagatagtgaagtaatgctcattgagattatgaacagtcttaacagtcatactgaggaatttggacctgatcttgctaacatttgggaatcattgaaggtttacaagttgagcagtgacttgatgaacttggaattatgacattaatcaagaagtgttgtatagattatctgaaaggaagccagttaaggaatttttttaaagaaataaaattatgctgcaggcatgaatttagcaagtggaatgggaagaaaaaggaatatattggagagattttggagaaggaagagatgggacttaataacgtagagaaagaagaaaagaaagtgaagatagctcttaagcttatgaaactggtagaattggccgggaacggtggcccacacttgtaatcctagcactttgggaggtcgaggctggtggatcacctgaggctaggagttcgagaccagcctggccaacgtggcaaaaccctgtctctactaaaaatacaaaaagtagccgggcatggtggtgggcgcctgtaatcccagctactcggtaggctgaagcaggagaatcgcttgaacccagggggcagaggttg

SEQ ID NO: 52161 - DNA, 2265 bp, Homo sapiens
ggcctcccaaagtgctgggattacaggtgtgagccaccgctcccagtcagcatccctgttttatagatgagcaagccaaaggtcagaaagtaaagtggctgtcccaagttcacacacacaactagtaagaagtggcactggaattcatacccaggtctgtttctcaggtctgtggttgtctctctactttgcccactgccttgggaatcatgagacctagttttttggcctttgactcagccactgggtgactgtgggccctagaataagtcatttaagtctattctccaatagtattgccttttctttcagcagtgttgtaaatatgcacttgaagtgtgctgtttttcttttctttttttttttttttttggtaaaaagacaaacatataaggctgtagtagtgtagtagtggtatgtactatatgcctctaggtgcttacttatttcttatgatgaaagcatttctgttaaaatggggagtacctaagtgatcatatatttcatttatgtaatggaagttgatggatagctaatggcccttccagtgtaaagcggccatcattaaggtaacattatcagaaacagaatcatttttcatgtaatacagcttttagggacagtgtcaacttatgagtaaagcatgctgttacaggtaggacccggatagtccaggctgaaagatgtggtataaactttgatgcatataatagatgcatagcaaatatttgatgagtgaatgaatgaatgtaatgaatgtattccctttttttttggagtgcagtgctgtgatgatgtctcactgcatcctctactgcctgggctcaagtgattttcccacgtcagccttctgagaagctgggaccacaggtgtgtgccaccatgcctggctaacttttttttttatttatagagatgaggtttccctgtgtttcccaggctggtctcctggaactcctgggttcaggggatcctcccatgtcagcctcccaaagtgttgagattacaggcatgagccatcatgccctgcccggaatgcattctttaaaaaaaaaaaaaaagctttattgaggtataatttacatacaataaaattcaccaattttaagtgtacagtttgacaaattttgacacatgtatacagttgtataattaccaccactgtgtttatttttttaaactgtgtgttatcttttaggaattgggtagcagatttatccctgggaatgttatgaggtttctatgctcagattcaatactgtgagatcagaatgaatattagagtgttaatgtgccaacttgggaggaaataggaaaaccttcggtatttaatggtgaggtaaataggaagaataaggagagacatttattggattaggggaaagataaataaattcaggaggaagtagattttagttacttttaagacagaggatacattttggggaaaaagttaccaaaagatttaaggagttgaactttttattttttttcttttgaaatggtagctcctgaaatataaaacttaacatctttggctgtgcttaagaagcgcttaacaaattatggttgttcaaataatacttaagggtggggatggtgtaaagtggttgaaggccttgcccttccacctatgacagaatatccttagtgttgatctctaacttgttttaagtaatattccacaaagggaagaatacattaggtagcaattgtggcttgcggggaagattgtttcttccttttcataatttctcaagtcactgaacttctcccagtatgctttagctcaagtctctgtctcttagaaaatgcctggaacctgtgctagtgagcttctagaagaagccccatttctaccttctctttattttttgattttatctttattcattctgtttctgtatggtgactgtgttttttttttttgagacggtgtctcactgtgtcacccaggctgaagtgcagtggtgtgatcttggctcactgcaagctccgcctcccgggttcacgccattctgcctcagcctcccgagtagctgggactacaggcacccgccaccatgcccggctaattttttgtatttttagtagagatggcatttcaccgcgttagccaggatggtctcgatctcctgacctcgtgatccgcccgcttcggcctcccaaagtgctgggattagaggcgtgagccaccgcgcccagccggtgactattttataagcccttctctcacccatggatttgtctgagaatggaaacttt

SEQ ID NO: 52162 - DNA, 3345 bp, Homo sapiens
tggttattgcaaaatgcacgtttttaaatggtctccagtgtggattgcttctgagctgctgatggattgaatacattgagaaggaatgtgtcatttggaatccaggaccagtcagcaaggataactgcctgattttatggtcagaatgctctaactcttatggcatactgatgactttttcttccattttccaaaaaagcaagttttgtcagtctcagtgtttctctgatctagctactcacaattccattcccaaagtagtgacctagttctgtcacttgggtttcaaagggagttgaagtgtcactgagtgagtacagcaaacctgtttaatgatttataggaagcaaataaaaagaattttgtttgctaacctagaagtatatcagattttggtttcaatttataattttgcaaaatataaagacatttcctggctaactccatccagatgaattattcagtattttttctcctatcttaatgaagttaatttgaatgctaatttcctataaccaagaaaacagttgaattaaataacccttatcttttaaacttaaagcttatactactaataatcatttaacattcacttccttttttctgacttaattggtaggtaaataaaatacttcaaatttgattggcaaattggaaaatcacttagaacaatctgctagtattttttattccctttgttttttcctttacacatttgtactgcaaaataaatcaaggacaaagactcacactgaattgatcaacttgtgtttggtcttcatgggaattacatcttttttcccctcaacatttattaaaggaacatacagaatttcagactatagcaaactaatacctttagcttgactaagagttgattttcgttaaggaacagaacttgtaatttatttcgacatactttaatgtatgactcatccctgttaaagttgtgagactcaaaactacgcccaaatcacttaattttatgtccttccctgtttactgtgtctgaccttcaagatttcgtgactgatgctgaaatggaagccaaccactgcagaaatttgggggaaaatgagatctgaagaatacaaggggaagtaggaattcatttctagcatttccaaacctgcttaatcgtgtctgctccaccacagtcagaggaaaagactgagttcatggaaattaccagctaagccttacatctgtctttaatgtttttaggaagtatactgaaaaggtaagtgagatgtctgttttgaagaaagactcttactgggtaccttaaaacccgttgtttcctattagtaaagatgggcagcttctttattcctagcttcaaaaagccttgcccctgtttggtgtgtttctcagtattgtggagaaggtagtttctgagcaaggtggtgcttttcctctgcttctcagcagctaagacagaaattgcaccgaagtgtacaaagggccaatttttgttgtcctgttgtgctcaaatccttttttttaaaaaagttatttcaatcaagtcttagttttattcctcactatataggaaaaaaatctttaatgcctcaaaagttccattcagcattacatttgcattactcttatttgcagcaaatatgagtaaaattataggtttttaaaggtctctaataacatccacttatattggttttgtagataatccataaattaccagaaataaattattccacatttattacacacccatgtaatagatgtcgtgccaggccctggaatatactaatggcatcacctcatgtggtaaaaagacacattccgccatcctggagtatacaaaggtagactagcatatagttcatgtgctcaaggagttcatttttattgacatgatacagatagaattgtagtttagggaatcaaaatctaataaaatgaggctaattccattttcccattaacactaataactagtgtgtaaatctgaatatgacacattctatatgaaagaagctctgtgtgcatctacactaaatactcgtgtgtgccaggtactgttttaaactacgtatatttttttaattctcataactgttctctgaggtatgtactaatactaaagcttattgttaaaggaaggcagaaaaattaagtaacttggcctaagtttgcataactgtgatctgggatcaatatttgaacccatacaggctgattgcagagcctgcactcttaatttgagtgtgatatttatgtgcagtacctggctataagtacccacaaaacgtttcaaattctttataaaatttgcttagttaaaaaagtaccaattgcataatatggttataagtctggtagaagttaggctttttacaagacatgctgcttactgcaccaaggaggcaagaaggctttttagagagcccagaatttcctttcctcaactcctgcttccaagacagtcattttgcatgataaccgtttccccaaaaaacacagacacaaaatttaaagaactggaacagaggaagcagagcttatcatagtatatatgtttagtaccctgtcacttaggtccacccctctttctttgtggattgtggacattttgtttaactgctaaatcatgagaatatatgactgctgagacttttccaaggattttttaaaaaacacattaggctttgtgcagaagtaaagaaaaagtgctgtgagaaccccaggtaggtaatttactttctattgtactcatagtttgtttgaaacctcttcacctctatcccttattgttttatactctgtaaatctgattttacctttaataaacttttctgaagtgagtgagttttttttgtcttatttcccattagattctctaccttctttgttcactttacgtatgttattgccactcccttcaaaactggtggtttaattaaagtgacagcatcttctatatacccagtactgttgaggattaaaaaatacatgtgtgccggatgtggtggcacacacctataatcctagcactttgggaggcctcaggcaggaggattgcttgagctaaggagttcgagaccagcctggtcaacgtggcaaaaccccatctctactaaaaagacagaaagttaactgggcctgatgttgtgcacctctcaccccagctacttgggaggctgagaggtgggagggtcacttgatcctgggaggtcaacgctgcagtgagctgagaacaagccactgcactccagcctgggcgacaaagcgagaccctgtctcaatagaaaaaagaaaaagtgccaaggctttgctcctagttcggtgcaggttccaaccagtactaaaactttgcaaattttt

SEQ ID NO: 52163 - DNA, 1054 bp, Homo sapiens
ttcttgggagattattctgtacttcagttaggaatcctttaagtctgtaaacttcagtttcagcctaggtttttaagtagattaagcaaagttaatacttttcttttcttttcttttctttttgagacagagtctccctgtgtcgcccaggctggagtgcagtggcgcgatcttggctcagtgcaagctccgcctcccgggttcacgccattctcctgcctcagcctcccgagtagctgggactacaggcgcccgccaccacacctggctaattttgtttttgtatttttagtagagacagggtttcactgtgttagccaggatggtcttgatctcctgacctcgtgatctgcctgcctcagcctcccaaagtgctgggattacaggcgtgagccgccacacccagccattaatacgttttaaaaggccactatttttatcagctaaatcacttttgaaaattttgtgtgttatgtgttatactcaaaatattatcaaaacattctgttttcatttgaacctattgattagaatggtgcttatttatttggctgttgttcaagtacctgaattggcttggtcagaaggacttgggtgttctagctagctgtcgtataactaaatatttttggttaagtggtacatgtttagcattggcttgtcattttgaaatttttccatgcttcctgttaagaaatagaaccttaccaaattagtcatatttaaatataatctgtatagagttggtatggaaaacgatttgatctaaatacaaccaacaataaatatttttattgaaacttccttttaattgatgagtagtaatatggatgtcttcattagttgtaatgtcatttctattttactttcctaaatgtgaaagaaaagatgaaagaccatttcttggacatatcaaatgatttttaaggaatttctggtgattatttaaattttctagttaagctgtctaggtcagaattcatcattcaaaaatgctgctcaaacttgaagtgggtaggaatttctggggattttgattaagatgcagattctg

SEQ ID NO: 52164 - DNA, 1595 bp, Homo sapiens
atttagtactagatactgtacctgttctaaggaaggtagtgaaggagtaggatagtaaaaatgaaaaggctgaactccccagagatttattaaattgccaggaagcttgactgaggttagaactagatctacaggtggcagataggaatattggctgtggcataacaggctgccaatagcgtttttgtgaggaaattgtggcattttggaaatgatcctagagaatctacagaggtgggcaaacgtaaacacttgtacagtgctttcagtaggctttttattgccccagtgcccttgtgccctcgatgtgacatgccacaagtgaaggagaagtggtgaggggattatttgaggaaagctttgttggacagtttggatgcatcatcgggagatactgccaatttacaggaagtactgtataaagagttctctctttgtgtcttaattttataagatttcctcttctcttgcaggtagccctaatacagtggtttttcttatgacttatttttcttgagggtgtacttcgtttctcaccagtcaaaaacatagaagttctgcaactcagaatggaaattcacttgaagtaatgtgtgattcctctgtaatcagtgccattaatagcaaaaaatatttaaaaggaagatgattgggacctaatagtctataaacaaattgagtaagaaagcattaagaaggactagtaatgtattctgccttgtttctttcaaatgaagactgttaaactgagttacggggaagaaaaagtgaataccctattgtttcaaggtaataaagagtaaacagtatacttccttttggttagtgttttccagaatttactgttcttgttgtgttatgttctttttgttccaagatcaaaagatcactcactgaaacaggaaggaatgttctaacagcagaaatatctaaacttgggcatctttagatgtttgcagaatgggaggtggaatgaaaggtggggcagctcactgatttgcgatgtatttcttccaaaaataaagggttgcttaagctttagctgtaccaaaagccccgaatttatttagtttagttttagaaataacaagattttgttaggtattttcctgtggagtatattatattcacctagggagatatcttctgtctatagctatgaaaagaaattaaatttctatttccttgtaattgaaagttgtgaccaaaatcaagaccatgtgtagacatttcctctagctcataagcaagagtagtgttttattcagctgtttacttaaaattccaaatggtgacttttaggcctagatgtctatttgttaagaggcaggaggggctctgtgtggtggtggttcttgctggtaatcctagcactttgggaggcccaggtgggaggattgcttgagccccggagttcaagatcagcctgggcaacatagggagaccccatctctacaaaaaatcagaaacttagctgagcatggtggcacacacctgtagtcccagccaccgtggaggctgaggtgggagtattgtttgggcctgggaggtagatgctgtagtgagctgtgatcctgccactgcactctagcctg

SEQ ID NO: 52165 - DNA, 2747 bp, Homo sapiens
ccaaacattctttaaatgctgcttttaaactttgaaagtacaatttgaagttgtaactatacatctaattagacttaagtaaaaccctgatttttttcctggaaagaacaaaatctacaaataaaatttgagttgtttgtatttcttaattaggtgttacaagctacaaagttgtcataaagaatgctaagaatggggatagaaatgattctgagaaaacaaaccctcgcaaaaacataagattaaaacttgggttccatgtcaaaatcctttcctttaattgcaaattatattttgaattttaaagtggccacctcctcctctgtccttttcactaattaaaaatatatttgcagaggtaccctctaatatttggtttataggttttgtggctattttaaattgtaaagcataatcctataaacattaaaactcaagagcttttcttctttcatgtcttgtaaattaacactgtagcagcattcagagaaaatagattcagagctcaacttttcacataaataaatctaacagtgtaatatataaacctgaaaaatgtcagttgagggaggtctttattctagattggcatttttttttttttaaattaggtacaaattatgagtgtaaggaatttggtttcctgctctcctgtctttccatcttttttgttccccaagctaattgatttggctttatttatgagcctgttacagtaaagtgtgtgttgggaaatatattgaggtatagagctattctttgtaggtaccctggtgagaccgatacaaatatgcccctccccataatggaatactaatttttatttgatcactcatttatagcagttgcttaaatgtatgtatttatatgaaggtattttaatttttaagagcaaaaaagttctaataagttgccagatttctaataaatgcaggtttatttggtgaaaagataaggaaaatgagttatgattctgtagtttttttaaaatgagttcagcataattgtttttcaggtttttttagttactggggttattctgcataagaaagcccaatgctttctgatagtaggagataatttttctctcttttgactttgaaatctgacttaggagatgaattctttttaaaaaggtcagcatgcaaaaaaataaattatatattttaaattctaaaagagaagggacataaaatttcactcctagcataaagccatataatattattcttgaaactcattacatcatttgcctcctgcccatttgaatataatcatacctacgttttattaattgtgcatttgtaaaaccaaacccttccagtaaatacttgctataaggctattgcttgtcaattatcaaggcttctaaatatgttaaaacttgtcattttgatttttcaaagataattttattatactgagctaccaatattcttaaagaaaactaaccaaagttaatattagtgtagtccattattatgtggacaattattatgtggaatctcttaagtgagcaactaagaaaaagccttatagaaagactacactggatttataagtgtgtttatgtttctctaagaatgggagcttctgttaacttaggggtggagttgttctgaggaaaccagtagattggatgactgactggagaatccagaataacaaatccattagccagacatgtttacttttatattagaagtttgttgattaggtcttaattttcaaacgcaaacaccaagctttaaaaatattgcatatacaatgtattggtcagcaatttaataatatttaatttgaagttaattattgttaatccttctagaaaagttttttttctttaaataaaagtacatatatatacttttttatttagaggttaccagaagctctggttttgttttgttttgttttgtttttttgtttttttaatcattttcagatgttatccagaaatctgcaagtgtacttttcctgttttaactccttccttttatcacctgactatcagggaagcgaggttgaggctgccctgacctgacatgtcatgatgtcgacttgctaggtggggttcgctggggacgataaccagtggaattgttggtaagaacttttttttcctatttttttttttatcagtagtggggcattaagtgtgggagaatgcccatatcctataagtgggcaattatgtcagccttgtagaaaaataggactttaatattaaattattttgttcttaataggaacatataataacacttcacttacttttaaattggtagcagatcagcaggaaaggcctgcaagtatgaagtaatgaaatactcagggtatattttaagtgagcaaaatagacaccttataatcttaaaaagtctcttggagagacaataaatttgctttaactgtcatttcagtctagtattatattttctatattttgttggatagattaacatataatgcatcttaaagagatatttattgcacactaattttagtgaaaacaagaagacattgatagaatggagggcttaaacaccaaagatactatttttaaaaatcttccaaagtaatcttaacactgtaaaatgaaactttaaaaagttttagcagtttgacaataatggcctcaatttagagatatgttgagacaatgactttgggtcaagaggaaattacatagctgaaatattaagaccttgaacatagcagaaacataaacctatgaacaacttgtg

SEQ ID NO: 52166 - DNA, 1054 bp, Homo sapiens
gggcttgcagagttcccttattctggggattacaatgcttttatcgtttcaggcttcattttagcttcaaaacaagctgggcacactgttaaatcatgattttgcagaacctttggttttggacagtttcatttttttggatttgggatagattacataggagtatggagtatgctgtaaataaaaatacaagctagtgctttgtcttagtagttttaagaaattaaagcaaacaaatttaagttttcttgtattgaaaataacctatgattgtatgttttgcattcctagaagtaggttaactgtgtttttaaattgttataacttcacacctttttgaaatctgccctacaaaatttgtttggcttaaacgtcaaaagccgtgacaatttgttctttgatgtgattgtatttccaatttcttgttcatgtaagatttcaataaaactaaaaaatctattcaaaacattacctatttcaaattcaattgtgtcctaaaacattattttattcgtaatccttgcaaggaatattgttttcaaagtataactgcctatgtgagtgatcaaattcatgcaaaatttcttgtttattccaacatgtgttgtggatattagactgaggattagtctaaattcaagtatttattccaattagcactttcattgattggtgttctctcatagtctcttctaattttgaaattttatcttttattaaaaaaaaaaaaacaggttcatagacttttgagcattcttgcaggcattggataatttgcattaaaacaaataaaatgtggctgggaaagcagactgcaatttattttgacccacattctttataagggataatttgtgactgaagaccttatttgctggataagtgaatgtacatacagggaaaattgttagtactgtggcgtcaattgcactgcggactttagttttagtgaaaatgatcgtgactaccatttcagttactggtttaggaatataatttcctattactatgtaaatttgctttgagaaacattcatgccttgtaagagaggctt

SEQ ID NO: 52167 - DNA, 2152 bp, Homo sapiens
ctcgactggtttcaaataactggttgtcctgattgaaaatatttataggatggtttgccaaagaagcctatgaaattataaaatatctagtccaggaactgggagtcaccaggatggtcagggcagagggtagatgtttcattttttaatttatgccaggaagcttttgtaaacttgtttagttgctttaactgaagcaacgcaaagctgaggtggtaaaagggaaaattgcagtcttgaggactagtttcgtttttgtctagatacttataaatcactgatagctccaatagaacatttttttatgtgtgcccagagtggggaaaggtatagggaaacaaaaaataaaatatcatgaggaggtgacattttgttactgagtacctgaaccttttgatgtatggcagaggttgttaggtggaacaacgtgaacaaagggctagaacatggaatgtttgattactgctttctacataattgcttgagtcttcattagtccaggccttttctggctctgtacttttaactgttcaagcaaagtacattttgggttaagcattgtgagggaaacctaggcttttttgtgttagtatcttcttgaattttacagataatctcactcagtaacctcatttgtgcttcaaatccttgaaattgtcgtataagaacagtggaagacctgtatgttgtatgctacatgtttattttaaaattctaatcctgagaagttaatctttgtctggctcgtattaatactggcatttttccccggtatggatttgcttctttggtatggcttatcttttaaggagttatttggaattaaggagcagcaataggtggcagcccttttaccttttaaaatataatatcaggtggtcggttttgttctaaatgtaatttatgtataaaaagataaggtcaagggaaacgtattttctttgtgtgtttgtgtttaactttctggctagattcaccttttgccatttaaaataattgtgaagtaaattgttaagtgtattaaattacacaagtataatagcttacatactatataaaacaaaatacagttttatatcgttgtaaaataatttttctaattttttataggctatggatgaaatgaatggcaaagaaatagaaggggaagaaattgaaatagtcttagccaagccaccagacaagaaaaggaaagagcgccaagctgctagacaggcctccagaagcactgcgtgagtctacattttagtagatatatctttggacaaggaataacgtgataatggagatcagattaataaaacaaaatcagagtcttgaagcaaactgatttgttttttcttttctcccttctctactttgctaggtatgaagattattactaccaccctcctcctcgcatgccacctccaattagaggtcggggtcgtggtggggggagaggtggatatggctaccctccagattactacggctatgaagattactatgatgattactatggttatgattatcacgactatcgtggaggctatgaagatccctactacggctatgatgatggctatgcagtaagaggaagaggaggaggaaggggagggcgaggtgctccaccaccaccaagggggaggggagcaccacctccaagaggtagagctggctattcacagaggggggcacctttgggaccaccaagaggctctaggggtggcagagggggtcctgctcaacagcagagaggccgtggttcccgtggatctcggggcaatcgtgggggcaatgtaggaggcaagagaaaggcagatgggtacaaccagcctgattccaagcgtcgtcagaccaacaaccaacagaactggggttcccaacccatcgctcagcagccgcttcagcaaggtggtgactattctggtaactatggttacaataatgacaaccaggaattttatcaggatacttatgggcaacagtggaagtagacaagtaagggcttgaaaatgatactggcaagatacgattggctctagatctacattcttcaaaaaaaaaaattggcttaactgtttcatctttaagtagcattttgctgccatttgtattgggctgaagaaatcactattgtgtatatactcaagtctttttatttttcctc

SEQ ID NO: 52168 - DNA, 1681 bp, Homo sapiens
tcctaccagcaaaatacaagagaattattttcctcattcttgacaaaatagtgtataatcaaacttttgaattttgccagcctgataacaaatgtctcagtgccattaatgattaatgatttgcttctcttactatgaatggtttgaactttaaatatattttaagagccatatgtgtttctgtgtatgaaccatgtattcaggaattttgcctatttttctattcagttgttgagctttttgttattttctggtgctctgatataaaagagagattagctgtttgtgatacatgttgcaaatttttcatccatatttattgtctttgcttatagtatttttttgccatatagaagtcatttatttttagtagttgagtataacattcttatggctcctagattttaagtcataaggtcatccccactccagtgttatataaaggaatcattcttgttctaaaatttcacagtcctccctccacccttttattatttaaattttcaatctatttggagtttatccttgtgtatagtgtaaggcatggaccagcttttctcctttttttctaatttaacactacctgatttaatgatttaagcattatagtttgtttatatttggtagggccagcctctaaatttcactcttttttttcctggttattcttgcttatttattttttcatatgaacttttgaaagttactcagttttagaggaaagaaacagaaaaacttgttttgaaagggactttttgttgattaacttggtaataataattatgtgttggttccttgaaggttctactcagtgttaggtgctttaatgacaacataggagaaggcaggaaccaataatttttgtaaattggtgactgatatcagtgtcattttcctagcaatttctcttactacctgtaacaacacttttagcacttaatgttttagaggagaaaagctatgctatgaagacaggaagaaacacttttcaggtaaaattaagtagccaatgacggttttgtttatttgttgcttactaggtaaaagttttgtttgtgagaaacttggctactacggtgacagaagaaatattggaaaagtcattttctgaatttggaaaactcgaaagagtaaagaagttgaaagattatgcatttgttcattttgaagacagaggagcagctgttaaggtaggaattttgaaattttggttcttgatatttgaattttgtttttgaaacttgccaaacacaaagtaactttaaaaactgaaacaatattggttgtcagcttttgctgaactctttctatttaatctctgtaaagtggtaatagtatgtaacagataagactccatatttcaaagccaggttattactgagtttgtgatcttaggcaagttatttttaatctctgtattgttttgtaagattcgatagcatgatgccttggaagtattacaaggtataaaaattagctgctgtaaacactgaataggtaatgaatgcattataactacttagttgacctcagtttgtgtacctatgaaggaaactgagtggtgtacatgactcatacagtataccatgtttaattgagtagatagattttgagggtatgattagttttacctttatttaatcattttagagttaaaatagcattcactatgttttactga

SEQ ID NO: 52169 - DNA, 1060 bp, Homo sapiens
tgttgaacattttaaacacaatttcagtaagtaattttcacatagtatgttatcgtttcatcatagaaaagtccatgttgaattttttttaaaaagcaactaaaccagtgggagtctgtgtaacatagaggctggaccttagtatgacaaattgagaataataaaggggatggagcgtttgtggaaaatgttagtttttttcctccttaaattagtatcttcttattagatagccctttatctgaagcaacaatttgttcaatatgttagttttttatttggataggtactatgttttcttagttcaaaagttatatagaaaagtatagacaaagaaatttcctttctacccctatccctgtgtctaccaaatcccctttgtctcctataaggcatccagttttaatagttgctggtttccttttagtatttccttcggcaaatatggatatacttccttaattcttagatgagtggtagtaatgttggtagcctaccatatccactgatctaccttttgtttattcaccatcctgtttcatcagctctgaggaaatacatcattactatatgtactactaaatagttaaaaaacactgccaactaaactatggcacagtacttgcttatcacattgactgtaagttgtcctatcctacaactcatagagctcctcttcattttttgggtttttgttttttttttttttttttttttttttgagacggagccttgctctgtcacccaggctggagtgcagtggtgtaatcttggctcactgcagcctctgcctcccgggttcaagtgattctcctgcctcagcttcccgagtagctggggttataggtgcctcctaccacgcccggctaatttttgtatttttagtagagacagggtttcaccatgctggccaggctggtcttgaactcccaacctcaggtgatctgcccacctcggcctcccaaagtgctgggattacaggcgtgagccaccgcgcccagccctcttcttcattttttatgactacatagtagtctattctgtggaggtactatagtgt

SEQ ID NO: 52170 - DNA, 1963 bp, Homo sapiens
aaagtcctgagtaaagagagaagtaatgttttggagattataagttataatcttcattgactatattatgactttattacttggccatgaattatgttttatttagatttatagctaatttttctttttttaagctttttttgtagtttttatttttaaaaatattttatttattattattattttttgagacagagtcttgctgtgttgcccaggctggagtgcagtggtacgatctcggctcactgcaacctccacctcccaggttcaagcgattctccttcctcagcctcccaagtagctgggactacaggcgcctgccaccatgcccggctaaattttgtatttttagtagagacagcatttcaccatattgcaggctggtctcgaactcctaagctcatgatctacccgccttggcctcccaaagtgctgggattaaggcatgagccaccgtgccccgcctcttgtttttaaatgatcagattcccttagtgtattgtccccatgaagaaaggcaaaagattgtcatgtttgctcttatttgttagtggcaaaatatgcatggcaagtcctgtaaagggccctcaattccctcctgattcctgtacttgcgttgccaggatcttaatagtggtgccttgagtactggttcttaagttttcctttgggcgactcctgggacacatcagagttgcatttctttttttttgagatggagtcttgctttgtcccaggctggagtgcagtggcgcgatctccactcacggcaagctctgcctcctgggttcacgccattctcctgcctcagcctcccaagtagctgggactacaggtgcccgccaccacagctggctaattttttgtatttttagtagagacggggtttcaccatgttagccagggtggtgtccatctcctgaccctgtgaaccgcccgcctcggcctcccaaagtgctggggttacaggtgtgagccactgcgcccggcctcagagttgcatttctgctgcttgcaatgagctcttgagcattttagttgtctcttcccttcacagggaggcagcaactctgaatggccatgagttaatggttggattcttcttgataagtcagaagtcaaggtttttattccagaatttgaggaggcaaaccctcgttctaagtagtttggaggagaactctggtttatacttgtataaagtctgggttggcagtgacatctttgggttaatcagataagttctattcagaatgaaccagagaggctctcagaagtgctactcagtatcttttatctcatattccttgagtagatgggtgtctaggaaagggatagagaatttaaatagctctgagtttttattttgattttttactagcttgattttaattcctattgtttcttctcctaatacaactatgactttgggtaaactactgaacatgaatgtcatctattttattgagcctggatcaatctctaagatccaccacaactttgaatctacctgtagtaactaagtatagcctgtattactttttctgtaaaaatattttaaaatagtattatagatgtattataatagaggaataaaatattataaaagaggaataaaatcccatgaaaaccaaaagtatagcttgtaatttgcttaccagccacttctcacataacctttagtaactgctcagatggaagttcatcctaatctttttttagggttagaaaacttcaagatttcattctggtaactcctttttcctagatctaaaacaggtttcagaatgaaaaggaggtctctataaacttaggattaaatattatggagccctttattgtttcttttttttaaaagatggggtctcatgttgcccaggctggagtgcagtagctgcccacatgtgcagtcatagcacactgcagccttgaactcctgggcttaagcgtccctcctgcttca

SEQ ID NO: 52171 - DNA, 1714 bp, Homo sapiens
aagacactgaagcaggaaatacaggatatttagctagagaatagctactatccctgtttccatggttttggaagacttttctgataagatgacatgtcaaccagcacctgaaggatgaagaggttgtagcatacaaagagcaaaaggaagtgcattccaagacagcaacacgtgccaaggttccaaggcaagaaagaagtcagtatattacagtaactgaggaggccagtattattaaaaggtagaattaggagtagagttgtatgaaatgaagtaggcagggcttctgtaggccatgtaaggagttgggtttttattgtatatataatgagaaggtatttaaaggttttaagcaggaaataacacctatttcttgtttatgggatattattcctagcgctctgtggataggggcttggagagaaggggtgtgagtggaagctgataaattagttgaagctgtcatactagtacagatacaggattagactagggtaatagcagtggagatagaaagaagtaaatgagtttggaattggataggagagatgaaggaagaaatcaagaatggctaaccaatttctggcttcagaaccaggtggatggcactgtttattagataggaagtctagggaaggcagattttggccatggtggttcagttttggaaaagttaaatttgcaatgtctaagacatcaaagaggatacatcgggtaagaacgtaggcacatctagagcttagagaagtctggggtaggaaaaaaatctaagtatttataagggtataggtaacatttaaaagtagggctagctgacattatttagaaagaacacatacggagagataagggcaaaggactaagaccagaggaacactaatatttagtgatcacttccattcttggtaaaaatagtaacttttaagttagcttcaaggaagatttttggccatgattagttgtcaaaagttagttctcttgggtttatattactaattttgtttttaagatccttgttagtgctttaataaagtcatgttatatcaaacgctctaaaacattgtagcatgttaaatgtcagaatatagtagatttgttgtatatggctgtaccttcagaacccctaaaattaaaaaggaacatcaaatactgtcccaaaccccatatctaattatgttgatctaattgtctacaaaattagtgactcatgttgaggctgcttcacttatattttgctcatcgtcaagtggatttaggtctgcctaatcgctagatgtgtggtggatgcttttggcttatatatctggctgttggtttaacagagggtttggtggacgttattctctatcatcaacccgatgacaaaaagaagaatcgggggttctgcttccttgaatatgaggatcacaagtcagcagcacaagccagacgccggctgatgagtggaaaagtaaaagtgtggggaaatgtagttacagttgaatgggctgaccctgtggaagaaccagatccagaagtcatggctaaggtaaatacagttgcttggaatgggcatagggtcatcatttaaattttgtactcagaataaagctcaaatattttgagttttatgataaatagaaattgtagctttagacttcaactgtttggcaaggagcggctttaacactaaagttaacagcctgtcttggtatccaggaatttccattaacaa

SEQ ID NO: 52172 - DNA, 2978 bp, Homo sapiens
ttacactcttattagtttccatttttcaagagacttgttctttgataaccctaaggtcattataataaaaattaggattagctctgcaagtcaactgtaagtttcagattgtttccattctttcttaaccatcttcttctgcccccatctttaaaaaaaaaaggcagtaggctttatggctctaaaatcaaatgcttatgttggattctaataagggggttttatttcaggtatttgtaggcaaaataccaagggatttatatgaggatgagttggtgcccctttttgagaaggccggacccatttgggatctacgtcttatgatggatccactgtccggtcagaatagagggtatgcatttatcaccttctgtggaaaggaagctgcacaggaagccgtgaaactggtatgtgataattatccactgtcttagcaagtcactatttgaggaaataaactttaattcaaaaatgtttgtagttaacattattttgatttcttcagttgttgcttggaatgtttttatactgaccaagttggtatgtgacgtttatttttctctgactataaaagtaaaaaagaactgaaaatacccaaaaagtaatgttttatagaaagtctcccattgatttaagaagttatctattagattgatatcagaagtttcatatgagtatttggcttatgcatttctgtcttttggttttaggcaaaaggatgtcaattcttgatgttaaactttaggattcttaaagtataatgaagactggaatgggctgtggggaacataatagtggatgacagtgacttaggattcaattcagaaaatagttgtgaatctgttttattttggttacagcctactcatacgatttatttcatattttctaagtgtatttttgttcttcctgtatgtttcttggcccttgagtcttctctgtctttaatctttctctcctctcctactatttatagccagtctcatattaatttcctttctctagggcctttaaccacttggtgctcatttcagaccagtagtagtagcaacaaagttctgcaaatcaaatgtatcttcactcctgctgtatttaagacacagctatctcagtatcttaaaataacaatgtaattattttttggcatacccttgcctgacttctgaggacctcactaagtctagttctagcctttgtagaatggtcaacttctttcatcaaggctttggtttcattactggtgtctgaattagttccactcctagcttgacccagattttagtttttattatggattttttcttcaaacttgtttatttaatattaagttttcatttttggcagcatatggatgattttatttttaataatcatatctcttagtaaactaatggttaaataatattaaagtataagaagctaaaattggccaggtgtggtggctcacgcctgtaatcccagcactttgggaggctgaggcaggcagatcacctgaggtcaggagttcaagatcagcctggccaacgtggtgaaaccctgtctttactaaaaatacaaaaattagctgggcgtggtggcgcacgcctgtagtcccagctacttgggaggctgaggcaggagaatcacttcaacccaggaggtggaggttgcagtgagcaaagatcatgctactgccctccagcttggatgacagagcgagactccatcttaagaaaaaaaaaaaagggctacaatttatcaagaaaatccactatagtgatttaaataaaacatttttcaaaattttataaaattttgaaagtattgtgtttggtagacaatttaaaactatatatttagaattctgtgacttctgtagaatttgaaatttttctaatatctttgcattgattaaacatagttgttaccctttacatattgttattttgagtatggcttacctatatgcaattacatttccaaggaccctgaatgatcagtctcaggtatttttttctgaaaaatctgtggaaaaacattttcagatagataaaattaaaatatgaaataagatattttaaacaataaagtgagtcctttttatatggaagagtagtgaaggttaacaaaaccaaactaaaacaagagactgtaacaatgaagtttaaaatatacattcatattatggaaagcatgagggaacttggtgagttgatgaagcagggagcgtttggccttaaattgttgaattttttagattaagatcaattgtcctgagtttggggtggttttggggtctctggttcttttcttattgcagtgtgacagctatgaaattcgccctggtaaacaccttggagtgtgcatttctgtggcaaacaacagactttttgttggatccattccgaagaataagactaaagaaaacattttggaagaattcagtaaagtcacaggtaaaacaaaaatgtatttagaaattacttttgcgaaatatgttgtactacttacaagtgctcaaaaaaactgaggggttgtatgtattaaattaagaattcaggtctgaagtatctaaattgcttcctttctgctttatagtggtttgggtttaagcaagttcccttatatccttcatttcttggaatgtccccttcacttctttgtcttaattgaaccttggcttttgctggagcttttgctctatagccctcaagtgaatgctttttttccccttgacaattagtgtattttaggaccaagaggatgaaagtttttactctctccctgctgccttgtctagatcagattttttttttttttgagacggagtttcgctcttgttgcctaggctggagtgcaatggtacgatctcggctcactgcaacctccgcctccttggttcaagcaattctcctgcctcagcctcccgagtagctgggactagcatgtgccaccacgcctggctaattttgtatttttagtagagacggggtttctct

SEQ ID NO: 52173 - DNA, 1029 bp, Homo sapiens
gtaatatgtaatgaaataattatacaactcaccataatgtagaatcagtgggatccctgagcttgttttcctgcaactagatggtgccatctgggcatactggtagatggtgacagatcttcaagcattagattctcataaggagcatgcaacctagatcccttgtatgcacacttcacaataggattcaccctcctgtgagaacctaatgcggctgctgatctgacaggaggtggagctcacagctcaggcagtaatgccaatgatagggaggatgaggagcggctgtaaatacagatgaagctttgttctcacttgcccgctatttacctcctgctatgcagcccggttcctaacaggccatggaccagtacgggtctgtggcccaggggtgtggggacccctgttttatattacatttatggctctgtttcagtcaaaggtagaagaatggaaggccgaaggcatgcatccctgtgaaatcctagtgttcactgaacttgatgatatctaaagtctcttattgttctgacattgtgtaattttaaaaacctggctgggctctgtggctcacgcctgtaatcccagcactttgggaggctgaggcgggtggatcacgaggtcaggagatcgagaccatcctggctaacaacggtgaggccacctgtctactaaaaatacaaaaaattagccgggtgtggtggcaggcgcctgtagtcccagctacttgggaggctgaggcaggagaatggcgtgaacccgggaggcggagcttgcagtgagccaagatcgcgccactgcactccagcctgagcgacagagcgagactccgtctcaaaaaaaaaaaaccaaaaaaactgaagtgtaaatttctcttttctaggtagattgtgtttctttgtttaccattgtatcttttcttctctaagctctttatatagatgttgcctcaattataacataaattcctgagagcaaggagattatcttcttttctatgattgctcttaatacctaatagaatgtaag

SEQ ID NO: 52174 - DNA, 1634 bp, Homo sapiens
gagagtggaaagaattacttagtaaaatttgttttcagattttcctccacctcttaggtggttagcatcaactgtaaccgtctgtaatttgaaggtttatccttggaaaacgcaatgtattcttatcactctaatataaaccaaaatttgttgtattaatgcataatctgtaatacagtatgtacatcagatttaactttcaagacttatacctttgggggagtgggaaatggatgttaggatttggcgggggaggtttgtggatatggagattgaaattcatgtttttggttgttgacattttatctttattttcatatttgtcctggacctttctatgtagtatttggatagctgcgtatatgcatatagttaaatgaaaatacagtttgttagtgatcatattgaatgtaacaattcttgattaaacgtcagtagagcttagattaccccttttgttgcaataacgttacccctttcaatttaatttttaggattggtagcttatgtcgatcttgatgaaagagcaattgatgctctcagggaatttaatgaagaaggagctctgtctgtactacagcagttcaaggaaagtgacttatcacatgttcaggtaaggtcgttactcagaaatgtctttgaacaattagtaatctgaaattattttactattactttttttcctatggagaagtggtattttttgtttgtgactacctcttcttttaaaaaattagtttaaaggaaaaaaactgcttgtggcagagtttcagaagcccaagtataaagcaaaagttttctcccacccccttgtgcagtaagttattttaaaaacttaaaattaaagccaagttttgatggttgttactataggtttttacatgttactcagctttttaacatttgggggttatttgatcctgttttattatcttggaggaaaatgtaggtgggaggaatagtttccgacatctggcaaagacagtctagatacagtcacatatcaacaagtggaagactgtgttttcccagggtagaaggtaagctccctgaggtctatactgccttactgctgtctgctccaatctctggcacatagtaaccactcggcaaatacttgttgaatgaatcagtaaatcttttgttaaaatcctggttttctgaaatttaaatttaattatgtatctgacccttcagatatttttggtgattctttttattgaattacttgtctgttctagaacaaaagtgcatttttatgtggagttatgaagacctacaggcagagagagaaacaggggagcaaggtgcaagagtccacaaagggacctgatgaagcgaagatcaaggtaaaacttgacttgggtagttgtaatgaaattgcatttaatgatgaggtcaaatgcctctttccatgtttcctagaaagtttcactttttttttttttgagacggagtcttgctctgtcgcccaggctggagtagcggcgcagtcttggatcactgcaagctccacctcccaagttcatgccattctcctgcctcagcctcccaagtagctgggattacagccatgcaccaccacacccagctaattatttgtatttttaggaaagatagggtttcactgtgtt

SEQ ID NO: 52175 - DNA, 2978 bp, Homo sapiens
tcttaatatgaagaatttgcacagagaggttcagaaaaagtcagggaggagttagtgctgacatcccgaatctcccagcagcccttttaaatctttaaatgtctcctttttttttgcaaaaatgtttagatcaaatgactccagtcacgttagtatatttgctgcatccagaaatatggtttggctgtgtggcattgtgttgaatgccacatttgaatgagtttcaaatggtctcatatgacataaaaagtcttttcaaaatgagcattttgtatttggcttgaagagagagggctttccttgatccgaaggttttattttctggaatctaattattttacggtttttttgttaaaatttacaaactttttttgaaaattttaaccaatttcagtatcaacttgtagagcctttgcaatgaaatggtaggcataaatatttctgtcttgtacttaatacacaacttgtctttttgctttacacatacttaaaaaccccaccttaacagatgttcattgaacttttctgttaaaaatttgcctcttttctgtgactgatagtattcctaggtacaatgctgtaagggtcttgtgatactgagaacttttgagttctgatgatcttaaggtagtatgtggggatgggggagcatgggaaaacagaaccttatgttcgcaaggagattttgtgttttaggatgcatctttatagaaataggtcgtgttaatcagtaaacgtattcatctcacacaatacagtttcttgatcaaaagtgtgacatttcgaatgtttccgtttttgctagttcatcagaatttgaagcttgtcttgagaaacatccacccagaatttaaccacagtctgcgtctattaagggctatcgagtcttaatagtgttttgtaattgtgaggagtcatgtttatctcattttcagagtaatcctttgcattttcttcttcttcctactctctattacctccttcccctcttggtcttcctccctctttcgttaacttcaactaagtatcagtggactttgaaatgaaaagaagttgttttaagccagaaaactgcacctggtgcatttgcacaatgttcgataagctgtcgggaagtgtggttatcttatgtgtcttagtactttgtaggagacttgtattttctttatagatgactaggtatcttgagtttcatcaagaaaagtaggctttttcttgagatccacctttatgtcttttatttagtatgtgttgcaatgtcttgttctgctgcctattatcttcatcacattgtaatttcaccacagacaaatgcactttaattccctgtcttttgaggcagtacacagactggccttgtatggtttattgtttactctctctcttcagggagtcagtccatttcagcattacctacaggctgaatgtacaaaattatttttgataggttaatctgagaaatctggctgaagtttagcctaattaggtaacggtttttgaaatatttggaagaagttgtccattcttcagtatgtttttacatctttattttactgatatgaaaatttcaacatgtactctttttttttaagaagcaacctaaactatagctcacttagtattttatttggactgaaaacaattgtttcgcttttaaacttggtcattttttcttttaaatctgtgggaatagcgaattaatcttagaacaaaaattaatgtcaagttggtttttttttgttttcgttttgtattgttaggtggagaaaacccaaaccaccagcatgttgaactagagaaaacagggcacttatttcacaccgatactgtatttgaagcagagccaggaaaatttgaaagtccttaaatcttgattaagtggtctgtgggtgttcattctgtttttaaaacaaaactttttaaaactgtgtaagacccgagagctgaggggctttttagtaaaggattttgtagtgattttgatcttttcaccaggacagaacagctgcttttgttaatcagcaattctaccttcagtaaattaaagcctttatcttacccggtgtacatgaagttccttaaagatctaatgcttccatgtacattttctatggttttacaggattattattgccaatttaggtcagatacatcacaggaggaataaattattattttgatagaggttattagcagcatgtatacaaattagtttagataaatcatgcattgtcctacaaactagttatttctggcttaatgtaatatagctcctgaattttttccagcagcataataaaatggctaatcaggtgaatggtaatgcggtacagttaaaagaagaggaagaaccaatggatacttccagtgtaactcacacagaacactacaagacactgatagaggcaggcctcccacagaaggtggcagaaagacttgatgaaatatttcagacaggtataatatgcatttcttgtttctgactggttatgaaagtgagggcaaaccactttgaattttatagttttttaaggttaaataatacttattgtttctgatctgtagagctgaatgtttgttactttcccttcattgaaggcatattgggtttgactttgatactcttatttcattattttgaagccttcttagtgttgaatatgcagtcttagttgtttcagaacagcacatcgatttgtcttagatttaccacccataaaaatgtatgtttctgcataccaaattttacatttttttcttaatcaaaatcagtcatcattttgcttttgcttttctacttttaccttcttaaagtgattgttaaatcagcttaggtctgattaggtggcataacaagaggatagctgtatcgtctgaaaccataataaatgtcagactccttgagagtttgtggcttgtctagtttctaatagaaatccacatctctccgtaatttggaagtgtttggttgtaacagc

SEQ ID NO: 52176 - DNA, 1050 bp, Homo sapiens
cagctggactcacaacctccaggggcccttccaaactagaagttatccgcatccttgtcatcatcttagcagcccatacatgttgagcatttgatatatcccagacaccacactagtgcatcacgtggcttagctcacagaatccttgtattttataaataaggaaactcaggcgtgtagaggttgtgtgactcacctgaggtcacacaagaggctcagacaaacccagggtcctggtgtccctgacactatagtgcttgctatgatctgatcttaccccagaagctattttctttctctgctacttggctgaccacaaatgcccaagagacatcaccacttggagagtcagaggtcacaaaagaggggcccaactcctgtagaagtccgaggagaggaagaaagggttctggagctctcaggcgtcagggccaggcctgcacccttctgtgcccctccatgaatggctggccggcccttgactgtgtcacatatctaccaagagctcaagagcacggacatgaagtaccggaaccgcgtgcgcagccgcataagcaacctcaaggaccccaggaaccccggcctgcggcggaacgtgctcagtggggccatctccgcagggcttatagccaagatgacggcagaggtgagagcagggcatctgcatggtgaggcaggaagccaggtccccctagccctgcctagtgcagagggtcagtggctcgtgactcatcagcagtgagccagggagcttttcaaaccagcctcatctcagcctcccccctgggctctggactagcaggatactgaacacagctaataggttctaagtgctgtgctaagtgtgttcagcgaattggccaagtttatgttcacaccaactgagatagaaaggtgtattatccccattctacagatgaggatcctgaggctcagaggagtaaacgaatttgcccatgcacacagctagaaagagtcggagccaggaggcaagctgtctggccccagcgctaggttgtgtggcatgtgtgggggctgtacgtgtggagt

SEQ ID NO: 52177 - DNA, 1066 bp, Homo sapiens
atgatccatgtcaagtgcctaaaatagtacctacctcatgaggttgttatgaggattataggagatcatccatcaagacatctagaatgctgctcaataaatgctttactctcttaatgtcaaatgtctgttacttattgtcatcctcagatcaaacagcagcaaatcaaaagcggagagccccaaaacacctagcagccccttgacccccacgtttgcctcttccatgtgtctcctggccccctgctatctcacaggggactctgtccgggacaagtgtgtggagatgctgtcagcagccctgaaggcggacggtgagagagcctgggctagggatgagggagggaaggagtcccttttcccaatctcactgagggcagatgaaattcagtctttctcagcaccccaagggatggtacaggaacactctagtcccaggtacaagcaggcttcactgcctacgttgtgtctggctgatacctgtatttctcgaatctcttttagatgattacaaggactatggagtcaactgtgacaagatggcatcagaaatcgaagatcatatccttgaactgtgccggggctgtgggtgtctgcaccgtctagcagcacccatccaaggtgcaagcgagctgggagagtgaggaaggagaggaagggctccgggaacagcccctgctctgcccctgaaccagagttcttaattctatctaacattcattattattttacacctgccagcaaaacttgaaaatgagcagtacctcattcagtgttgataacaaccccacagtaggttccctgatttatccagtttcatgggtgaagtcactaagactcagagaggtcaaatcatttcccaaagcccatacagctaacagtagtagcagagatgggatctgaatccagaaattgtgaccctggaacctggaggctcagcggctgtgccagctaggctgtgtaatagcgtgcctcagttggccaagtcgttacttccaggaacagactagattgagaggtcagcatttcccatgctcagccttttcccttctcccatcctctgatg

SEQ ID NO: 52178 - DNA, 1048 bp, Homo sapiens
taggcatggtggcacacgcctgtaagtcccagctacccaggaggctgaggcaggagagtcacttgaacccaggaggtggaggtcgcagtgagccgccgagatagcaccactgcactccagcctgggtgacagagtgagactctgtctcaaagaaaaaaagtcaattatgtagtatgctagaaggtgacacgtgctatggaattaaaaggaaggcagggtaagtgagatggggagtggggtttgcaattaacaaacagattgattttttaaaaccagtaaaaggaataactatattatatatcataaaaataatgtagctgaatgcattttggaaaaattgggaaaaaatcacctttaatcccatcaccctagctgtaacagtggttagcatttgagtatattttctttagatctgcttttcctcctatgcattggttttcttgcgtgactttaggcacagtccgcatctaattttgtctcctgcttttttgattgctattttaactcagctcttctatccccaaggcccatgtgtttctcctctcctcctcctaaagtgcctgccggggaggctgaagctgatttctctgtttctctggttccagatgagtacagacaactccaggaatccagtctctgtggactccagttagctaaggcctgcctgacagccaggaggacagggacctgctgagaatagttgtaaataatgagcaacacaacccatgtcacatacatggcatgtgttaggcccttggcagatatcgacttccttcccttgtattggttcacttgatggagggtaggtgaaggtcatgaccagccggcaccgcctggagctccctctcccaagtagctgtggcccgggtgggcttccttagcctcaagccagctggccttttcccaggatgctttctccccaccttcctgtcagtactgatgctagtctacaaagcagtctccttgccaattttcttctttcaggagagactctgtggactccaagtcttctgcctcctcctctccaaaaagaccatcggtggaaagg

SEQ ID NO: 52179 - DNA, 1050 bp, Homo sapiens
gtttctactaaagatacaaaaattagctgggcacgatgatgcacacctataatcccagctactcaggaggctgaggcacgagaatcgcttgaacctgggaggtggaggttgcagtgagctgagattgcaccactgcactccagcctgggcaacatagcgagactccatctcaaaaaaatagacactagagggttgggaatgggaggggtcctgacagtcagccaagtgccacccccaaccctaggttcaggtttcaccaaagctacagatatcctccatgtcaggcttagccctgggccctcggcctcgtgcagagcagggccttagttacagtagtggggttctgacctcagccaggagtcagggctaggactctgggggtccaggttggaaggggaggtggtggtagagctggggcaggatctgccaatgatggcagccattcctgtgtatccattcccagattatgccttaaccctctcactttgcagacaaccaggattggagttgctgttaatggggtccgcaagcactgctcagacaaggaggtggtgtccttggccaaagtccttatcaaaaactggaagcggctgctaggtgagagaggacaaggttgtcttgagccctgtttttctcctagcacttgggacaggactgggcctggctcatagccagcactcagtgtatgtctgttgagtgacttaatcagtgacagatggcctctggatccgggaggtagctagtgggggactgccaatgtttgtgtacacaagtgcaagatttgtagacttgtgagttttgtgtacatgtgccacttacgtgtttgtgctctcatgcatttgtctatatagtacatgtctacatgcacacatttgtcttaatatgtgcagagatgtgtttgccaatgtattaatgtccccatgtgagactgtgtatttgtacacacgttcctgttgtttgtgcatttgtgtgtaaatgtgtttgtgtgtgtgttgggagtgtgtgtgcagctgtcctcgtccctgccctttgctctctccccactaagtc

SEQ ID NO: 52180 - DNA, 1074 bp, Homo sapiens
ttcagaggcccctgagacccctgagagcctgggcagtccagcctcctcctccagtctgatgagccccttggaacctggggatcccagccaagccccacccaactctgaagagggcctccgagagcccccaggcacctccagacccagcctgacatccgggaccaccccttcggagatgtacctccccgtcagattcaggttggtgagggcccagctgtgcaaccagggcaaatcccctgacttctctgagcatccattgatttccacacctctaaatagtacctgcctaaagactgggtcacacgccatctctgggcccatcacttatgcagaaatgctgaaccctgggaccccttcccccttcacacacttgctcccaaatcctgcatggagagctgaggaggagccagggatcctccctgctgatgttggagtaaagtaggcttagccccctgtgtggcttattctagaggctctcagtggggtcttcactctgtccccacctccaacccaggatccagtcttctcccttccatacaaacccattcagtctggagtttggggagaagtagacctgcagatatccacagagtcttctggaggtcagttccagccttcttgggcctgtgatggacctggcctgggggccttgtggactctacccacccatcctaagcccccagactggctctgttcctgagccctttctccccactctgaggggctctctggacatgagggtcatgttggcctttccctgccttccagctccgagagcactcgctcctatcggcggggggcgcggagccctgaagatggtccctcagccaggcagcctctgcccagaaggaacgtgccggtaggaactctgggaccatggtttgaggggcggtggcagggtgcctgggaggcagagttagtcaagagtaggcgtattggggtgggagacctccccatggttggggtacagatgggcccaggcagccacagtttggacagtccctgtcctggtgcccaggtgggcacggtttggccagtccctgtcctggtgcccaggtggccacggtttggcca

SEQ ID NO: 52181 - DNA, 1050 bp, Homo sapiens
ctgggatggggactgcagcccctcgttcccaggattctgcttcagctcacatcacgtatcttgccctgccctcctcctagtatctgctcaaagccggggagagccagatgaagcaaggtcctgacttccttcagagcctcatcaagttcttccacgcccagcacaagtaggtatcttcccgcgtccctgccactaacccttccagtgtcacagaacaaggcccctctcaaggtgtgatagacctgagagtctctttggaggcctgcatctttttggcagaactttcatagttcctcattgagtgctcaccgggtgtcaggcatgagtactttacaaacatcaattcgctcaattccccaacacttctgggagcaggtactctattatccccattttatagatgagaaaactgaggcttattttccaagattacatagctagtaagtgggatttgaacctagtcaagagagactcttgtctatggagtgtctgttcttgaccgtcagactacaattccctgaggtgccctgtgatccttacggcagcttctcccacacttctggcttcatctctcatttccatctttatctggacccttgtttggcctctgacacctcttagctttttccaagatggctggaaggctgcccagagcctgttccccttcatcgagaagctggcggcctcagtacatgcagtaagttgggtctcacccttgggcacgtgatcaagccccctgtccttccaggaaaatctgtgggtgtggaagagctggcttctgcccacagagtgaggctactgctctgctcttctgggtctgggctctgtgcctgacatatttgttggctggtgatgggatcccatcctctgtcccatagctccatcaggcccaggaggacgagctacagaagctgacccagctccgggactccctccgagggacactgcagcttgagagcagagaggtcagcccctgaactatcccaaaaggaatgccctcccccaaggcccaccgtggagggagggagagaaggaagacccacagggtcc

SEQ ID NO: 52182 - DNA, 1044 bp, Homo sapiens
tgtttagggccagccagggtaggctgcccaaaggactccagtgggctttccaagctcagacgtgtctcttacactaagatgtgtttcagccacctttgcccagtgcctgccaggctcttgcatggatccattgactcttagctttgaatgaaatctaaatagctgtccattctaatccaaaatccagtgtctgaatcactctctagcacctaaagtatttgaatacttcaagtgacagggagctcactgccttcaggggtggcctgttcttccttagaaatgtcccctgtttgagctgaagtctgtttctgcctccctaacttccacctctcagtcctgggaatcctctctgaggccagcctgaacaaatccgttttcttttcagtaggacatcctttacagtgtttgtattcggggcctcaccattgctgtcaaccttgttttccttggacagatctccctctgtgccctgccttctccctttcctaagcctgaggggatggtgagggaatatggtagaggtggtagaattgggatttaggtttggaggcagatccagtcccaagatcaaataagctgtgccccctaactttgtggggcagcttagagatggggaaagaacattggccctggatttggctagtcctggatttaaattgtaactctgggccaggtgcagtggctcatgtctgtaatcccagcactttgggaggccgaggtgggcagatcatctgaggtcgggagttcgagaccagcctggtcaagatggcgaaaccctgtctctactaaaaatacaaaaattagctgggcatggtggcacacgcctgtaaacccagctactcaggaggctgaggcaggaggatcgcttgaacccaggaggcagaggtggcagtgagctgagattgtgtgtctgcactctagcctgggcgagagtgagagtctatcccccccccaaaaaaaaagaaagaaaaaaaagaaaaaaagttacagctctgccactgttcatcactgtgtgacttggacatgttcctcctcctgacagct

SEQ ID NO: 52183 - DNA, 1043 bp, Homo sapiens
caccaccacgcccggataattttttgtatttctagtagagacagggtttcaccgtgttagccaggatggtcttgttctcctgacctcgtgatccacccgcctcgtcctctcaaagtgctggcattacaggcatgagccactgcacctggctggagtttttttttaagatagagtttcactcttgtcacccaggctggagtgcaacggcacgatctgggctcactgcaacctccacttcccaggttcaagcgattctcctgcctcagcctcccgagtagctgggattacaggcgcccgccaccatgcctggctaatttttgtattttcagtagagatggggttttgccatgttggccaggcttgtctcaaactcctgacctcaggtgatccacccacctcggcttcccaaagtgctgggattacaggcgtgagccactgtgcccagcagtttaaaagatttaaaagatgagattagaatgctaagggggtgcagcaagacttggagggttttgaatgccaattgagcattctgactttttgttgggcggtgtggaccagtggacccaatcatgttgctcaaggaatggatggggttggccctgccagcatagtgcctgggggactgctccatgccaggccctgtatgaggcactgggcagatgcatcgctcagttagagatgcagtccctgccctgtggaccttacagtcttctggcaaagcccaacagtaagcaggtaaacaaataagtcacagccgggtgcagtggcttatgcctgaatgccagcactttgggaggccgaggtgagaggatcacttgagcccaggagattgaggctgcagtgaactccgatggtgccactgcatgctagcctaggtgatagagcaagaccctgtctccaaaacaaaacaaaacaaacagaaagaacaaataagtcagaagttgctcattgtactaagtggcacgaagactcatcctcctcgtcaaggccttctttgaggtttgttctgggtcctcatctcttcagggaatcttgtccacacg

SEQ ID NO: 52184 - DNA, 1083 bp, Homo sapiens
gctgctcaccaagaagttcatttacctcctgagcgagtcagaggatggggtcctggacctgaactgggccgctgaggtgctggacgtgcagaagcggcgcatctatgacatcaccaacgtgctggaaggcatccagctcatccgcaagaaggccaagaacaacatccagtgggtgtgagtgcctgggcggccagtggtaccctccaatgggtacttgtgctgtgggcggagccagaggcaatagccagtgggtgtgagtggcaggggcggggctgagagcaacatccaatgggcacaagggctgaggcggaccaagagcaacatccaataggcttattgctgggggtagagccaatgtatggtgaggaagagcgccgtgtacctgctgaagtaatcggagaacgtgatgcggggcagagtggagaatgacatctgggaggtgtaaaggccaaagggaacctcagattcttcctcttgagtcagagatcccaatatccacttcttctagcttagggcagtcccctgggagctaagtagggggatcccggactccttccagatctgagataggagtactccagcctcctctctccatttctacagggtttaaagagctgacctatagcccttggcataaatcctaagagaaaccaggcaggggagggagtcaggactgaggctactccagttggaggaggctggggcatagggatgaacagagtcgagagcccctcagaaatggggttcaggtcttgacttgttttttctcccaagcccaacccccaaacctctggttccaatccctggtagctccctgagagacaggcatgaccactgatttccacaacccagggaagcaccctcatagactattttttgaatgaccttgttctggagtttcacccacagactgacactggggggctgctctgttcccagaggcaggggaatgtttgaagaccccaccagacctgggaagcagcaacagctggggcaggagctgaaggagctgatgaacacggagcaggccttggaccagctcatccagagctgctctctgagcttcaagcacctgactgagga

SEQ ID NO: 52185 - DNA, 2213 bp, Homo sapiens
caaactccacctcccaggttcaaatgattctcctgtctcagcctcccaagtagctgggattactttttgtatttttagtagagatggggtttcaccatgttggccaggctagcttcgaactcctgacctcaggtgatccacccgccttggcctcccaaagtgctgggattacaagcgtgagccaccacgcccggtcctccttttctttcaatttgtctacattttccagatttcctcttgtgaggcatgaaagaaaataaacattttaacacacaactctacaaggcaggtcaggtgaggaggtgtaggctcagagaggcaagacagtgaatcccaggctgttcagctacgaagtggcagagctgggatctgaaagcaaggttcgaccccttacatttgctcctacccccaccatctgacttagggcttaggagagaccaggctccactctgcgtgaccttgggcaagtcaattcctcttccccaagtcccagtttcctcaccgtggtgcccgtaagggggttgtgcctggtgatctctgaccctctgcacttctgcagctgcctgaggaaggagctgtactcttctccataggggttggcagggtgggcttgcgtcctgaccaggccttgaagatccagccaaaggggctgcctaagagcgtccaggatagggctaagctggcctctggctgtggccatagcctttgctctcctcccctcatcgcagtctcttttcagctcacccttgaactttccccttttcccactggtgctccccatacatcagtgctagcagctccctggtgggggcactccctatgggcaaagcgctttgctgcactatctcactgaatcctcagcataggtggagacaatgatgcccattttataggtgacttgacgtcaactgatttcccagctaagaaggggaaggcctagatgcaaagccaggccagtctgactccaagacctgtgctcagcctcaccttgatgctgatcctcctgggcttgtcctctgccacctgtgttctgcaggttcagcccaagccataggctgactttcctctgggcactgtccaaaggtgtcagggaggtatccttagggggacacttgccgcattgggaccctgggagtgcagaataagggtgaaggagagtgagaaaagagagaaggctgtgtgtgtgtgtgtgtgtgtgtgtgtgtgcaagtacatgcagtgatgggggcaggtgggcgtagcccaggccttggcccaaattctagcaaatcctggggcagcgtgtgtgggatgcagctgaggcagcctggtacatggctttgcagtcagacaggcctgggttcaaaccctggctccggcctttgtgtgaccttgggcatgtgcttactctctgtaagtctccattttttggcttccgagagccagtgccaatactgatgtggtaggactgttacgagcatgtaacaggctcagcatagatattctgttcaaggtcttcctgggattctttctggtttgttctggcgggggagacaggtgtggctggggaggctctgggctgccccacctctgcctcaggtagaactccacctgagcttcccttcctctccctgcccttggtgctcctgctgggggatatatgaagaatactaggatgtgcagccttggtcaggattgatggaggcctcggagctccccaagcctcaattacttcagctgtacaatggggattagtggtatgggaagattcagtgaagtgatgaatgttggggcgtggttcagggcatgtggaaggtctcagccagtgactggccctttctctagtgacagcatggggctaaatctctagaatataggatttcaccagttaggaaggtagaaaaggaatattcaagagactcattcaagaatgagcagtaaagtgtttggatggtttccaggtctcggtagtggtggaaagcaagagtgttatatccaggctcctcaaaccaaggagcagggctcctcacatcagcccaggaagacttcctggagggggcaggagtgggggaaggggaactgacagcaggaagagctgtcaccacctccaacacctgtcagcccagctgtgctcagcagcagttagaagtctcagccctgctgagcatgacctcaccactaaatgttaaaataggcctctctgtccaagccagggtaggggtgtctgggggatc

SEQ ID NO: 52186 - DNA, 1020 bp, Homo sapiens
tgagatccagtttgagtggagcaggtagagttttgggaagagggaagatgagctttcagtttccaggacccagtgcccccaatatctgagtagaagaccccttcattttcagactttggatgaaataatctcatccattctagtggagtggaatgagcactggattgcgagtctggagggagacccaactcactactcccagtgcactgtgtgaccttggggaagtccatgcagccagcgttgccgccattcattcattacttcattgtttggccagaaaccagtactgggtgcctgctattgtccaggcaaagagtatggcctggggacactgtgggactttggtaagacagagggataggtctagtgggtctctcacatccaatctgccatggacagactccaaattgtccagccagctcctgagatagccccaagtatctgccctaggtcctcccccaggcccagtcttccctcccagacagccatgtagcagatacaaatgtgggcagcccccttgggttctgttcagattggctgctctctcctcaagctcccaggctcgttgccagagagggcccaaagtgtagtggcaccaggctgcctgctgacctgggctcagggtgtgttttgtgggagtggaattcctggagcccgtgtgaatcaaaacaactttagggtggggggtggagtgggaaaagcctgggggagtggaggtggtggtggttgaggagcctggtttctggtgtgactctgccactaattctctgtgtgtccttggacaagtcttggacccagtctgggcttcagtgttctctccttcacaatgcgtgtgtgcacagggtggctgtggggctagctcttctcagccacattcagctccaggtcctgggttttggaagcaggctccagggagaggaagggggtgttgtaggtttgcttagttgtgagtttggtgaataagttcgggtacagggataagaccaccccccactgccccagaggcatctggtcagacct

SEQ ID NO: 52187 - DNA, 1057 bp, Homo sapiens
atcgttttaggagcggctccgggcacttgcccggagtgctcagaagcacggtcaggaggctgcagcgggggcagatggggtgaatggagggttctgaggcaggggggtccgggccttttcctggtcccggggacttgagacttgctcggtgctaggaaaccttagtcggttgctccgcttagggaaggtgccagcctttagacagcttccgaataggatgctggacgtcgcataaccacgtgtttcctgttaactgagcaattaagttctgtttcttcgctcactccccttagttggccttacaatgggggcgctctttgttaccctgagcctcttagggttcgatctcagtgtccgtatcttttaacactcaataactgtcctgagttttctcttcacccgttccgttcgtggaggaaggataggttccgagctgtcttcttcccttgatgtcccctaaacattataccttttaaacattcagggtcttcgttacgatttgggatgagcagaaataaaaatgctgtgcagatagaaagtagtaaaactcagggccctcagctgtgagtgtattgactgctgctcttccctgttgcagcaggatcaaggtgaaaaggagaaccccatgcgggaacttcgcatccgcaaactctgtctcaacatctgtgttggggagagtggagacagactgacgcgagcagccaaggtgttggagcagctcacagggcagacccctgtgttttccaaaggtgagtagtcacaaggacatacagggtttgcctgcttgggtcgcttggttgtttcttgatttacctgctgtcgagtctgtttagaaagtgacagtcggcatcacttaaagcattaaattcatgagccggccaagaggtgtcttttttttttttttttattcaagatggcgtgtgggattggaacactagattttatttgagcagatcttaagctaagactagcccaagtaaagattttcctaagtaactaggatatgagatagagtggaaatgtcaggaacgaagtaaagatcattagatctgattag

SEQ ID NO: 52188 - DNA, 2437 bp, Homo sapiens
cctggccaacatggtgaaacaccatctctactaaaaaaagataaaaattagccgggcttggtggcgggctcctgtagtcccagctactcgggaagctgaggcacgacaattgctagaacctgggaggtagaggttgcagtgagctgatattgtgccactgcactccagcttaggccacagagtgagactcttgtctcaaaaaaaaaaaagaaaaaggatgcttgggagtcatttcatgcctctgctttctctgggtttttctctgctctttggaagctgggagaggtcatactgggtagttggggtgtgaatctatagtcgaggtatagtgaggaagtcaggttgtgttctcagccaagtttcattgacttctgtttgctctggggtgcatgttgcaggctgagctattaatagttacttgggggtgggagggagttgaagatgacaaggaatgttattgctgcatttttctccacaggtgcgggagtatgagttaagaaaaaacaacttctcagatactggaaactttggttttgggatccaggaacacatcgatctgggtatcaaatatgacccaagcattggtatctacggcctggacttctatgtggtatgaatatttaatcttttcccgctcctggtctgtgaggagaggggaatctttatttcatatgtggtatgttggtgttcacatgttgagttgcagctttgaatattgtctgcctttgtgttctcctcccccttggggaaatgtgcctcatttgtggcaaatgtaggggtgcagctctgaacaaggtggacaagatccctgctgttggggaacttgcagtcgaggatctgtaaagcacccacatggcttaaaggtggatgaaggaaactgttccctccagccagtgatttgaaactttggagagaggcagtattggtgccacatttggcctatgggttggttggctgcactgaggctgttctccccctggttcttcctatagaaacagctttgggtgatgcagtggtttgctcaggaagggggttttaacatagaaatgaccttttgtgttactgccgtgttttggtccaacaataaaactgaatagcctaaatcagaagtcctgactagtgtggaacctgaaagatggtggcaccctcattagacagacaagtaataagacttggatactcacaggatgttggaggaacagcacacctttgggaagcatttttgagctgaagcagaaggaagaaaatatatatatttgtgcttctcagagttgtatgttttctacactgctggtgtggcaatagatttttaaatgttacttttaaaaagaaaaatggagatttgggagcagtaatggaggatcctcagcaccactggaaaataggctgggttaggggggtgctgaaagttccagcctccaaagcaaacttacagtatggctgtgtgttgcgtgggatgctggtggcagctttgtcagacacagatcatgggtcttgctccagaatccattgggctgccaagtgactctttgaagatctgtctgtaatgtgtgagtcttgtccatctgctcttgactctgagctggctaggtgactgttggttattcctgggacaggtgctgggtaggccaggtttcagcatcgcagacaagaagcgcaggacaggctgcattggggccaaacacagaatcagcaaagaggaggccatgcgctggttccagcagaaggtaaagctgatttatctcaagtgaagtggtggaatgtgatgttggtgaatggagttgggatttggggatgcaaaatatagtactatttgctgggtatcttctttaaagttagaatattgggcatcttgacaaatcaggggcttccagggatgatggtttaaaagaacatccagaactaggccttctccctgtcaccatgaatgggggtagatggaaggggaggaatatggcttttaacaggagccccctttctcagatgatagtgcagttcagcacagtgtaaaaaccagccagcttcctatttagtccagaaaaggatgggattcagagcccaagttcatgtatcaatcagatgtgaattctcaaaagttagccattgctgcaatctctgctgttgcctcctgttctgaaaaaattaaatctcttctctttcagtatgatgggatcatccttcctggcaaataaattcccgtttctatccaaaagagcaataaaaagttttcagtgaaatgtgcaattctgttgtgtgttctgtgaaaggatcctggccatattcaagtccttggacctcaagccacttaaagcttcgatgggagtagctggtaacaaccccgtcatcctctgattggatgccagtatttcctggcagatccaagtccaagcttcatagcattcattgcctgtgcttgccacaccttggttgatgtgct

SEQ ID NO: 52189 - DNA, 2089 bp, Homo sapiens
aggaattggctgaggaatatctggttgaagatcaagggcagaacgctgaaagctgtcagtcgatgaatgaaatgataagtatttagtgagctttcatagtgttctagacactatgactaaggactgcacatggtttgtctctgaatcctcatagtttgtgaagtagagacaggaccaagttcctattttgcagatgaagtaactgaagtttggggaggtttttgacttattcaagatcactcatcgagtgacaaagccagattgtcaagcctgtctctgactccagaactccatcttaacagctctgctgtactgattttgacctagttttaggaactataggaaggaaatgtgatcaaacccagatcacttttctaatctacccaggcattttgtgtccaccgttaacatccaagctctgattctggcaacttgaaattactcttggctttacacttatgtagaagaaaacaattctgttaaacactgtggcccttctggaaacatgatggtcttttcctgtagaggccttttcttccttttacttcctctgtgccaggtccatgggtaattcccctaaaattggtacctttctcataaattctatcaaaactagggcaaaaatgatagttgttgatggcttttatcagagttggtaagttttgattctcttctctacatcttatttccccttggtgtagcacagtggttgaaagcagggaatctaaagccacagacctgagtgaatcttgccccacttgcatcttgggacaagaaacataacttttatgagcctattttcatacttgtaaaatagggatattacttactactgtaaataggcataatacttatactcattactgtaaatggttagcactaagcacttaataatcagatattcttgttaaagtgaatttgactattgaaattaatgttttcttctctgcagctattgaaatatttgaagaaactctccaccctgcctattacagtagacattcttgcggtaagaactgtgtgactttaaatattatataatgatatcccattcccttctcactggagagtgtgtagaataaggttacaagtatgggctttggaagtgaaagaaaccagacacaaaaggccatatattgtctgattccatttatatgaaatgtccagaataggcaaatccatagacagaaagtagattagtggttgccaggggctaggagaattgggaggaacaggatttctttttagggtaatgtaaatgttctggaattagatggttataatggttatataatattgtgaatgttctggaaaccactgaattatgtactttagttaaagtggtgaatattgttaaatgactttatttcaaaattagaattaaaagaacattgactttggcatcaattagtcccagattcaaatctgagttctatgactttaggctgttcctatgtaaaatgggtctgattcctgcttcacagggttattgtaaagactgattcagaactgtatgcaaagctcttatcttagtgcctaacacctgccctaatcactcttgttattaaagttctgaacttggtacgctttgctactgtgtgtcattagagatttggggcatagacacaaagtaatttagtgttaagatttgcagggtatgttgtaggaaggaagtattgcttgttgagtttctcaaagtagaaagccttatttctttagaaaaacgttagcctagttccagacccctctaacaattactttgtcaaattttaggagactggggttgggaaaacagtaaatagcttgcgaaaacacgagcatgttggaagctttgccagggacctagtggcccagtggaagaagctggttcctgtggaacggtaagaacatttctctttaggtttgttcaatttcatggttaaatttacagatagaaaaggttttctttattatttctcttttgccttctgaaattgttttgcctcaattataaaaaataatccatgatcattgtagaatattagaaaatattaaaaatagaaatcaaaatttcctatttctatcacgcaaagacaaacgttatgaacat

SEQ ID NO: 52190 - DNA, 1031 bp, Homo sapiens
tcttgtaccagtcctcatcagatgtacgtcgaccactacagatccctggaggaggaccaggagcccattgtttcacaccagaagcctgggaaaggccacagcaatgcctttcaggacagactcggggccagccaagaacgacacctgggtgaaccccatgggaaaggggttgtgagtcaaaacaaggagcacaaatcttcccacaaggacaaacgccccgtggatgccaagagtgatgagaaggcctctgtggtgagcagagagaaatcacacaaggccctctccaaagaggagaaccgaaggccaccctcaggggacaatgcaagggagaaaccgccctctagtggcgtaaagaaagagaaggacagagagggcagcagcctgaagaagaagtgtttgcctccctcagaggccgcttcagacaaccacctgaaaaagccaaagcacagagacccagagaaagccaaattggacaaaagcaagcaaggtctggacagctttgacacaggaaaaggagcaggagacctgttgcccaaggtaaaagagaagggttctaacaacctaaagactccagaagggaaagtcaaaactaatttggatagaaagtcactgggctccctccctaaagttgaggagacagatatggaggatgaattcgagcagccaaccatgtcttttgaatcctacctcagctatgaccagccccggaagaaaaagaaaaagattgtgaaaacttcagccacggcacttggagataaaggacttaaaaaaaatgactctaaaagcactggtaaaaacttggactcagttcagaaattacccaaggtgaacaaaaccaagtcagagaagccggctggagctgatttagccaagctgagaaaggtaaccccttcagccccttggtggcttcccacccagagcacctggccctgcagagctcagaggattgccctgccactgttttccttagcttgcttttggggggcatgttgaatttcagtgtgcagtaatttcctctgggcttcactggt

SEQ ID NO: 52191 - DNA, 1033 bp, Homo sapiens
aggaagtctattcagcagaaactcgacattgttcagtgtgtattgctgtgcagggtgcctattgtgacaggacacaaatgttactatgttttaatttgctatatttttgaatgggtaaagcattactttacttctcttggttacttgtaccaccattccacccctatccctagcctgccccacaaatctaatattaggaagcctcttaactgaaaccaaatgaacatttgggtcaggtgccagatgtctgctgcctagaatagctttttctaggtgtctaccaccttgaatttatctcttaactgtgtgttcaagtctttgtcattgaaactagtttttcatatcttagattcagttgtgtatgatttaatgtcccttattaggagtctttaggcagggagggaagaaaaaacagatttgttcatagcaatgtcagtatccattttggcacataaagatttttgatgagccctgtttgcatagagccagatgttttcccctcccccaagagtatctacatcagggatgtgacttggtgcgaagagtcaggggaaagaggaaaaacccaatttctaaatgacctccttgcccagcttactaaaatggctgcagagcagacacaggatgaatttgaacctgacacaggatgaatttgaacctttggtctcatttatggaaaaacttgtgcaattttttttctgtgctacactacatacaaatcaccaaattacaaattacccttttgtgatccttggtgtactgagcagtttctttggggctttttctttctgggaagcgggagggaaaggagcaaggtgtcatcctgctcttcatttgtattttggtcccaaaatgtaaatacaattttctatgttacttttttgtggtaactaccgagatgaatattttaattagataagttatatgaaaaggaaaattccatgtctaaataaaaaacaaactccatatactgtgtcttccttacttatagcatcagtggaaagaagttagaaaatgcctgattcttggactg

SEQ ID NO: 52192 - DNA, 1050 bp, Homo sapiens
tgttgctttctcctcccccctccccatcccctccagtttgttgaaagtgatgcagatgaagagcttctgtttaatattccgtaagtatctccttggtgcctacctcaggctaaataggctgtacccagttgcctcagatggattcattcactggtgtcaagagcacacatttgcttctagaaatgggataaattactttggtgggtttgaggaggaaagcatcatagctttcttggtgcagactggaaacagatgtatttgtagaacaataactgagaaattgaggtagatttcttagaattgtagaatgctagaggtagacaggatcttagaaattatctagtacaagttgacagatgagtaaactgaagcccatacaggggaagggtcttgcccagggtcacacaactaaacaggtattcaaactcaggtttgacaaccttctcttttgcattctggcagatttacgggcaatgtcaagctcaaaggcatcattataatgggagaggatgatgactcacacccctctgagatgagactgtaagtggcaaaggcttaggccctcaaaggagctcctaattctctttttctggtaacattttattccagaatagtatcattttcttcttaccgggtttaatatttccccttttaaaatatcttggtcctgttctcattctgcattggaatacatatatttcttcctgaattaatgacttttttagattaagcatctttaggcccaacagcgtgtctcatatttcaaagtgcttactatgacatgattcattcagagagcattgtgtaaatgtcacttgttgatgactctgcagttttcttaataactagctgcagatctcatatgatctttatggattctaggggttagcttcaacatttttccttgctatttcatacagtaatgatcttatgtgttttgttgacatggaattgctccacctgactttgcgtggcatttagttagcaaagttgtgtatacctcttgcaacactgaatcttttgccaccagagctagtaccctttttgaca

SEQ ID NO: 52193 - DNA, 1001 bp, Homo sapiens
gccaggatcgtgccactgcactccagtctgggtgacagagcaagactccatctcaaaagaaaaaaataattcaaatcccagcactttgggaggccgaggcgggcggatcacttgaggccaggagttcaagatcatcctggtcaacatggcgaaaccctgtctctactaaaaatacaaaaattagctgggtgcggtggcacaggcctgtaatcctagctactggagaagctgaagcatgagaatcacttgaaccgcggaggtgcaggttgcagtgagccaagattgcaccactgcattccagcctgggcaacagagtgagactctgtctcaaaaaaaaaaaaaaaaattcatctgaaaaattgattaaaggacttccagagatttaagatatattatagttgagtattagaaacatgaatttgaaagcaaatccatgtatttaatcattttaaggaaataatacctttgatgcttttggagactcatttacttggaagttgatggactgacctgagaatattaggcatccatgctgcattgtgatttagagtgtgggatctggagtaaactgggttcaaataatggctgtaccacttgttagcttcatgactttgagaccttatcttctctatgcctggattttctatatctaacatgggaatggtaacagtgcatacatacctcataagattgtggagaggcttaaatgagataaaacatgtaaagagcttagattaggtctggaacacagtaagtgtccaattttgggtgaacagatacgaatacatagccctcagttctaagcacactacatatattatactttatcaaatgtaagatgtcattgattgtaaaatgtaccattatattcaattaatacagaaaaaatgctattgaactatgacatgtcattgacacatccagaaaaattagattgagagtattaaatcagggaagtttgaacacagatgaggtgttacatgttactaaagaattaccat

SEQ ID NO: 52194 - DNA, 1120 bp, Homo sapiens
ttgtttttgtttttttaaaggaaactatttgtgggctataggaaactttctgatgcctccggattgtgttagtagtagccatcaggagggtctccaactaaaacacttgttcctgcttgctcctttcccctctcattgttcagcattcttgtcaagttgcccagcttggagttgtctgtcacgcacatgtgtcctgtggttatagctagaaggacaggagtctcctgctgatgcgtgatagcttaagcttggggagaaggtcttttccactgcctagctaagcagtctggggagagcatggggatcatttctatgtgtgtgggtaatctggtcagtaagattgagacttagttaagattccccttggaaattccttaatgtttattagcttctaactagtgttgtaagtccgatgccagaatttggagatttgagttcttcttttcatggcttttattcactgtgactaataagcttcctaataaatccttgccagacttaatgtttgtattttcttttgagttcttgatagccactgatgcaactttcatttcatggggaactgtactgaactttgaaattttttgttgttgttttggactaggtagattataggaagtgccacaattaaatcaagactggagccgggcgcggtggctcacgcctgtaatcccagcactttgggaggccgaggtgggcggatcacgaggtcaggagatcgagaccacggtgaaaccgtctctaccaaaaatacaaaaaattagccgggtgcggtggcgggagcctgtagtcccagctactcaggaggctgaggcaggagaatggcatgaacccgggaagcggagcttgcagtgacctgagattgcaccactgcactccagcctgggtgacagagtgagactccgtctcaaaaaaaaaaaaaaaaaaaatcaagactggatcagtttctccaggaatggtcaagcttaattttgtacagtaggccaaaaacactcctacacccatatatagtaaagaagaaggtggggttgaaaacctgtatttcacagaaattaactgggcatggtggcgtgcacctgtagtcccagccacttgggaggctgaggtgggaggatcactg

SEQ ID NO: 52195 - DNA, 1033 bp, Homo sapiens
cagccaggtgcctctcgtgatcccctcttaatcccctcaggagatggcagctgtgaaggaatttcttgagaagctgctgcctcctgtctaactagtcgctggccccagtgcagtaccccagctcatgggggactcagcaagcaagcgtggcaccatcttggatctgagccggtcgagcccctgtccccacccttcctgacctgtccttttcccacaggcctctgggggcaggtggcaaggcctggccgggccttccttcctggccttagccacctggctctgtctgcagcaggggcaggctgctttcttatccatttccctggaggcgggcccccctggcagcagtattggaggggctacaggcagctggagaaaggggcccagccgctgacccactcactcaggacctcactcactagccccgctttgggccccctcctgtgacctcagggtttggcccatggggcccccccaggcccctgccccaactgattctgcccagataatcgtgtctcctgcctccactcagctgcttctcagtcatgaatgtggccatggccccggggtccccttgctgctgtgggctccctgtccctgggcaggagtgctggtgaggaggtggagccttttgaggggggccttccctcagctgtttccccacactggggggctgggccctgcctccccgttaccctccttccctgcaggcctggagcctgtagggctggactgaggttcaggtctccccccagctgtctcacccccactttgtccccactctagagcagggaggcagtgggggaggagttgtgtctcgtcttctgtctccatgtggtttttgggtgtttttcttgttgtgtcctggattccgataaaattaaagaaattgcttcctcaacgctcaggcctggctgattctattccaggggtggatagtgaccatctgtgagaacctgccccagtgtaagaaaacttgtttttatttttaaatactttggaaagctctttcagagcaatataaatgagtgcctgg

SEQ ID NO: 52196 - DNA, 1050 bp, Homo sapiens
gcattggtgaggatccccagggcatacccaacaacctcatgccttatgtctcccaggtaaggcaaaagggaagggacagaggagtggccctggggttaaagctggtgcctgggatctgggacgaactgacctgatctccacctccaggtggcgatcgggcgacgggaggccctgaatgtctttggcaatgactatgacacagaggatggcacaggtgagcctaggaccagggggacctaggagtgggagccaggaaggagagtcagggggaacagactccccatccaacacactcccttctctgcaggtgtccgggattacatccatgtcgtggatctggccaagggccacattgcagccttaaggaagctgaaagaacagtgtggctgccgggtaggaagagaagggagaagtgagggaggggagggaccagatccaggcagagcggcccagaggcgtggtcagtccagcccgctccataaaccctgttctccgtgggccagatctacaacctgggcacgggcacaggctattcagtgctgcagatggtccaggctatggagaaggcctctgggaagaaggtaggcccccccgccccacccacctcacccacctcaccccacccagctctcagcaacagagcagctttggcccttcccactcacctctctggagggtacctggcactgcccagtctcctcagcctgcctagcacccggtgcctgcgggccagccgctgctctgcacttctgcttcttaaagacctggccagcagctgggccagggccggctcagctaagctccaactacctcctgtcttgcagatcccgtacaaggtggtggcacggcgggaaggtgatgtggcagcctgttacgccaaccccagcctggcccaagaggagctggggtggacagcagccttagggctggacaggatgtgtgagtgctggcctgacccctgcagttaggggccagggaggggctaaatcagatctgggcatgcccacccagggcgggctgtggggtgggggaggctctgcattccaccgt

SEQ ID NO: 52197 - DNA, 1008 bp, Homo sapiens
gggatagtgggaggtgactgacctgggaagatgggatgtggccctcgtgtggcaaggccctgactgagtgagagtagcctggaggtggtggggggtaagtggggggggggtaataaatgaatcacagtaaacaacaggggtctgaaatctcagcagtgggagggggttaggctggtgatcagaaaaggtctccctgagcaggtggctttcagactggaacctaaagaatgagagttcaccatgaaaggaaagatactgctggcagaggaaacagtttaacagaaactaaaaggagaagcactgtctctttctgtgggattgtcatgtcaacagaatcataagccaaagcaaagaatgactctagaatttcaggcaacagacgattgggaggtttgcaaggctcatctctgtggcctcttgtccccagcaacaactgtgtttcaccatccttatgtttctagatgggagtgagtgtcgtggactcttctgtggcaggacttggaggctgtccctacgcacagggggcatcaggaaacttggccacagaagacctggtctacatgctagagggcttgggcattcacacggtaagcccacccaccccctggtggcgacagccccgaactgaccagggggcctgaagctgagaacaaaagtggatgggggtatttggggttgttaaggtgctgaggagtaaagagggaaagggttagccaggcgcagtggctcatgcctgtaatctcagcactttgggaggctgaggcaggagggtcacttgagcccaggagtttgaggctgcagtgagctatgatcctgccagtgtactccagcctgggtgaaacagcaagaccctatctcttcaaaacaaaacaaaagaggggaagggtgttggggattatggatatttgatctaatattttaatgtttgtgagagtagggttgagtgaggccacacgcatgggcataagaaggctggagtgtcagggtgactttgacagttcagtccta

SEQ ID NO: 52198 - DNA, 1409 bp, Homo sapiens
tctctactaaaaatagaatgatattagctggatgtggtggcgcatgcctgtaattccagctactcaggagactgaggcaggagaatcgcttgaacagggaggtggaggttgcagtgagccgagatgcagttgagccaagatcacgccattgcactctagcctgggcgacaagagtgaaactccagctcaaaaagaaaaaaaaaaaaattaaaacagcagaggatatttaaaaaacagagtgtgccctagattctttttcttctctgtctattttaagcatgatgccaggcttggcattcatagctagactttcattgtttctgttctctccaggaactggttcagacagtaagtttgggaggcaactatcttctgaacattggaccaactaaagatggactgattgttcccatcttccaagaaaggcttcttgctgttgggaaatggctgagcatcaatggggaggctatctatgcctccaaaccatggcgggtgcaatgggaaaagaacacaacatctgtatggtgagtcttgtcttctgttgtgtgtaagaacagaacagtgccccatccggaactggtatctccttgggtccacaatgtcacaagccaggctggaagttgccttgagaaaatccagaaggttattttcctataaaatttgtaccccatttgagttatgtctcaggctacttggttatctttgactagtgaagggagagagtgggtttggtgaaaagggaaggagcaacaaagcatcagtcaatttattgagattattaccctgccccctaaaaatagtaataatgaatgcttggattgtacggagccccatccaaaattctttccattcatacttggacttctggatctagttatttgatcttgggccccattttttccactgcagaatggagtgatgatgctttatagtgttgtgaggattaaatgagatgagtgccaggcacaaactcagtgttcaattaaagggaactgcttttattataccagagagcttaggtctctggatctaatccctctattaatccctctgttttggatgagtttctgtttagtggttgtcttagtccattttctgttgctataactgaatcccacaggctggatttttattttattttattattattttttagacagtctcactctgtcacccaggttggagtacagtggcagaatctcagctcactgcaacctctgcctccaaggttcaagcaattctcctgcctcagcctcccaagcagctgggattataggcacccgccaccacgcccagctaatttttgcatttttagtagagatggggtttcaccatgttggccaggctggtctcaaactcctggcctcaagtgatccacctgcctctgcctctcaaagtgctgggattac

SEQ ID NO: 52199 - DNA, 1049 bp, Homo sapiens
gttagccaggttggtctctatctcctgacctcatgatctgcctgccttggcctcccaaatggtttcagtttttatcttgtattggccactctgttataaaatatgctgcatttaacatttacattaagatattccatgtatgatttatcattcttcagctaaaccttgaagtaagaaaaagaatttgctattttttttttttttgagtgggattgtcttaagactttttttttacgtaagtaaggctgggattatatagttggaaaacagcctgccatgggttcagatacctgatttgtagttccagcttttgaaactgcctaggggcatggccccaggcaggtcctctcctgttcatttctcctcttatagaaaaagtgatttaccagatgatctttaaagcaagctctcccagccctgacatgtatctctgcagcagggtttctctacctcagtactgttgacatttagggctgaatatttctttgctgtgggggctgtcctgtgcattgtaggacgtttagtaacatccctggtctctacccactagatggcataccacccccgttgtgacaatcaaaaatgtctctagactttaccaaatgtcccctccagagcaaaattgcccccagttgacagccactgctctagactaagtttcttgcttccaaatagagccttaccaaagtgtattacataaagaagtcaagtggttttactcctcatgaccaaatattctttccctccttaggatgaggtggtagtaaatgaccgatggggtcagaactgttcctgtcaccatggaggatactataactgtgaagataaattcaagccacagagcttgccagatcacaagtgggagatgtgcaccagcattgacaagttttcctggggctatcgtcgtgacatggcattgtctgatgttacagaagaatctgaaatcatttcggtaagagcacctttgagttttttgtttttgtttttttttttttaacatgcagtatgatttattttatataatgttcaaaagcttgcaaaaacagcat

SEQ ID NO: 52200 - DNA, 1050 bp, Homo sapiens
tcgtgatccgcccatctcggcctcccaaagtgctaggattacaggtgtgagccactgtgcccagcctgctgtgtttgttttaaatggtggttttattagcaaactggttttattagcaaatgttttcagttttccacatcctctgcactgtgataatttttatgccacatactttcaaaatgaaggaaaattaattttaaaatatttgttgcaaaaatcagtccacaagtcaaatgcagtgatgtgcacctgtagtcccaactactcaggaggcttaggcaagaggatcgcttgagcccaggaattcgagactatagtgcattgtgatcatacatgttgatagctgctggactcaagcttaggcaacatagcgaaaccccatctctaaaaaaaaaaatggtccataagattttactgtgaacatgttcagataataagctctgtcctgatcacatgtcttccagctataaacctgatctgatctggtctgatggggagtgggaatgtcctgatacttactggaactccacaaattttctttcatggctctacaatgacagccctgtcaaggtatgtgattatatgacttcttatttatctcctatgaagaaagaaagtgcaaggagccaaactctggagtagacaaccacagcagcagcaataataaacaggaatatcaacatgggggcagtagggactgggacacttaatggatgttaaaggtttctcctttaatcttccctggctcccttagagtataagttttcttctcctttagtgttgtttttttttttttttaattgagacagaggctcactctgtcacccaggctggagtacagtggtgcgatctccgctcactgcaacctctgtctcccgagttcaagtgattctcctgcctcagccttccgagtagctgagattacaggggcccgccacctggccggctgatttttgtgtttttagtagagacagggtttcgccatgttgggcaggctgctctcgaacccctgacctctggtgatccgctcaccttggcctcccaaagttc

SEQ ID NO: 52201 - DNA, 1050 bp, Homo sapiens
acaaggtctcactatgttgcccaggctggtctcaaactcatggactcaagggatcctcccacctcagcctcccaaagtgctgggattacaggcatgagccactgcgcccagcaggactatactctgttgggataattgacttaaaagataaaagatggtttaaataatattttggtgttaagatatttatgtataaaaggtagttatgtgtttaatcaaaaacacagtaaacctcattttgcttaagtgaatagtgaataatttaaggaaatggttttggatcccattcctctctatatgctcttatgagtgagtgccactgaaatgaaaaaatgctagaactgattttccttaaaataaattatttgttctatgcttaatgacagttgctgttctgtttttctgtttaaggaacatccgctatggactataccactcactcttagagtggttccatccactctatctacttgataagaaaaatggcttcaaaacacagcattttgtcagtgcaaaaacaatgccagagctgtacgaccttgttaacaggtaagacactgaaatattttggccctatgacttttatcaatgaaatcagagcttcctatagggtaccattaaagtggaggagggataggtatgaaaaaaacctaaaagacatcaaaataataaaaagtggtggttgtattaagacaaaatatgttctttcctcctgcctttcagaacttctgtcatgtggccatattgccttctacattgaaacaatcacacaaaacccaggatggcagaaagtcaaaattttagttcccttcttacatgccgttttccctatgtcaggaccctggagagggggtggtttggcatcgggcagatttgtgtttgaattctggctcctgttacttacatgccttaaacagaacactctcctgagcttgattctcactctgtaaagtggggataataatgccttctttgtagggctcagaatagtatgtgaaatgtatctgtcacggtgcctggtacaaagtaaggctgttgttattaccatta

SEQ ID NO: 52202 - DNA, 1767 bp, Homo sapiens
tgaaagttaagctgttccctctagggagacatttttatatatttaagatgggcttagactgttagggcttgtgagaacttattttaagacggggaggaggcgagagcgttcataaccaaaggaaacactgcgtgatgtctacatgttccaagagactgaaaatggatgtgacatgtgtggaaagattggaaaattctggtgggagtttaaaaacacggtctctttagaaaatccgcctgaagccaattttttgatatgactcaacatttaacacttccttgattttatacgcgagagaatctgaaggtctttcccaggaaaaagataaagataaaacttattgcgggacttggagacacttacaaaaattccccaggagtgactggatctcaagggtgaagagtttttttaaatggtcgtggttataaggtcaaagaaagccatcttacgagaaattttctaccttttagttcaggaagtagccttctttacagtcaacgattttcgtagtaaatctaaatgatcactttctcaacgtgtttttgaaataatgaagtaatctttacttttctagctaggacttctctcaaacttgtgtgctgaggagactcagatgttggcctcagctcctaggctgaactcagcagatcggcccatgaaaacttctgtattgagacaaaggaagggatctgtcagaaagcaacacttgttatcttgggcttggcagcaaggaagaggacaggtagtggagatcctgcaatctgaaaagcagactgaaaggtaatcatcataatgggcaaacattttatgatggaaccatcctaaaccaattgtttttattttaaaatagattatgtagatttgtgggtaagctcatttttcttagggaaggtataacaataaaggttgtgcatatattgaagtctgaacggcttgcttttttgagtttaaagcagctgaatagcctgttattgagtcttgtccaaaatatctggagttataagttggagccatagaagcttcttaaagattttgaacttttcttaatggaattttactcaatatttgtttccattcacttgtaggtgacaaagaagctgaagatgggtggtggagagaggtataacattccagcccctcaatctagaaatgttagtaagaaccaacaacagcttaacagacagaagaccaaggaacagaattcccagatgaagattgttcataagaaaaaagaaagaggacatggttataactcatcagcagctgcctggcaggccatgcaaaatggggggaagaacaaaaattttccaaataatcaaagttggaattctagcttatcaggtcccaggttactttttaaatctcaagctaatcagaactatgctggtgccaaatttagtgagccgccatcaccaagtgttcttcccaaaccaccaagccactgggtccctgtttcctttaatccttcagataaggaaataatgacatttcaacttaaaaccttacttaaagtacaggtataaaataagacaaatgtttaaatttagttatgttcacggatagttgtcaattggtctgaaacaaattcgctagggaatctatttgtgtagaactaattaatgtaaaaaaaatagaccatctcgtgttgtgtgcactgtgatataatggtagtatcagtgcaacttaaactaatgattgtacttgatattaagtgttctcaactgagtaacttttaagtggaaaccaagtttagatttggggagtggt

SEQ ID NO: 52203 - DNA, 1512 bp, Homo sapiens
aatttttaagctgacccacatacttgctactggtttcgcttatgtttaagcatttaaagttggcaaaacatgttatcaatgtattatgcaagagtttacatcttttgcataagtggtccattgggttgcacctaccccttgaccaaacaaaaacaaaacatcactggcaccatactcgaaactacctgtatcctaggttataagattgtgaaagccaacaatctataaggttggagggactctagttaatctttgggcttagaggaggaaaaaaagatagtcccatactgcatttcacatctcttaaaaatagttttagcagcttaaacctttttagttataaaacttattacactagggtttactttgaaatatagtttacaaccaaatcaagtataacatacatacactggcactttagcacaagggcaaactttaaaaacaagttattttggacctttaaaattaggccatattataaaaaacagtccacggtcttacattcagcaaattcatactaaaatactccatttttgtaagataaaggccaagaaaactttacatatgctacaagtttattacagatatttacatggctctttctcccctaggtacttaaaattttcacattatccaactccccaaagcaagctttgcaggaatgatgaggccagagcactattagaatagcttgtgcagtgctgtaatacaaaaatgtattttgaaagctattgagtgaccattaaatactgtttctataaaaaatggttttggtgtatttgttgacagacacttaatccactacatttaataaacagggccattggggtgtactatgtctcattctaatgagctccaaatgccctttccacccactgtacaattcactaaaatgcaattattacgaaaaattcacattttctttcagcagtgcatcaggttagcatattactggtttgggtgtttctaatatactaaaccttcagatgtttacctaattctgaatccttgtgttagctagaagcttataatccgattcaccaactttcaacaatctactggtccatgaatgataaattactgtcttcccctaacaatagaaaaagctgattcctttaccactccccaaatctaaacttggtttccacttaaaagttactcagttgagaacacttaatatcaagtacaatcattagtttaagttgcactgatactaccattatatcacagtgcacacaacacgagatggtctattttttttacattaattagttctacacaaatagattccctagcgaatttgtttcagaccaattgacaactatccgtgaacataactaaatttaaacatttgtcttattttatacctgtactttaagtaaggttttaagttgaaatgtcattatttccttatctgaaggattaaaggaaacagggacccagtggcttggtggtttgggaagaacacttggtgatggcggctcactaaatttggcaccagcatagttctga

SEQ ID NO: 52204 - DNA, 6061 bp, Homo sapiens
aaaaaaaaaaccggatgtctaggccaatgataattatttttgatgcagtgtggattagttcttttgttaaccccactgtcttggggaatgatgccagctgggaaattgagtttttgactgaaacatggagccttcactgctttttttctggttcctatgaagatttggaacatagaaaacacaaaaactcaccttaaaatttgagcaggtcgttgatggcaaaaataattttaaggaaaaaggaatattcttatgtagttattctaaagtttaaggagcgttgttgaccataatattgcttagttttcttactgctgttaagtaagtaaattgtttcaaagtaggttttgtgtgtgtgtgcctagtgtaaaagaactgaaattttgatgcttacagcacttggctcgtgcatttgtatcaaaatttgcctgcctctttatgagggaggcctgcttttcacacctcagtttatttaatacgaggcaagttgtaagacaacactcattctaggtgattctgtggtgccatgaaatttaaggtaatttggggaaaaggattagtcagttttaagcaagagtcacatcttttgagctttcgattatcagtgtagtacctgactaaaaatgaagtaatacccttaaaccatttataatttctagtatttctctgaaagatcgttttggggacaaaagtgacttgacatgtccaatttcatttcagaataaaaagctagcatctttaaaaatctcagattgcttgcttacagatacaagtacgaattatggacaaacgattccttttagaggattacttttttcaatttcggttttagtaatctaggctttgcctgtaaagaatacaacgatggattttaaatactgtttgtggaatgtgtttaaaggattgattctagaacctttgtatatttgatagtatttctaactttcatttctttactgtttgcagttaatgttcatgttctgctatgcaatcgtttatatgcacgtttctttaatttttttagattttcctggatgtatagtttaaacaacaaaaagtctatttaaaactgtagcagtagtttacagttctagcaaagaggaaagttgtggggttaaactttgtattttctttcttatagaggcttctaaaaaggtatttttatatgttctttttaacaaatattgtgtacaacctttaaaacatcaatgtttggatcaaaacaagacccagcttattttctgcttgctgtaaattaagcaaacatgctataataaaaacaaaatgaaggaaataatgattaactggaattattacagtattgaatatgattctaaaataacaatggaaacagtcctttatagatttaggaatattttaaatcattgttgcactaggcacaactaacttttactttggaaatgatagaacttgccagaaaggtacatcttttacacagtagttaaaaattcattgtgtaatatcaaagttgtttcatgattgctcattaagcctcttgggttaactaacttaagaggttatttggtagtgttaagatgaaatttggatcagctaattccaagtttatattttcattattggatggatcagtaattctgctctccctcttataaacaagacgcattagggcttaacgtttatgacatgattttaaatcattttaaattgaatgttgatgagcaactaatattaagtgataacctctttggggaagtaggttaggtattttgtggtttgaattctatctactttatgacaattatagctaatttattaagtattcatgatgtgccagacacttgaaaaggctatgtgttaactcactcttcacaaaaccttatgagaaagatacttttattttccccatatcacagataaggaaactgaggcacaaagaaaagactgtaaggcagagccaggatttaagcccaggcctggtcccttagttttgggggggttttgtttgttttacagactataatttgagagaagtagattgaggagatagctcattgaaattgttcattttctgtatagaactagaaggcctaatttcatttttatttttacttgtgtcaacttatttttagacttggactattgagaatcttatatgttgttcctaaagcgacacacctaacagcttcaaaaggactatattacagttgaacccatggtagtttggatcctactgatacttgatgaggatctttacgtagtgttttatgttagttttgggtgatgtagttgagtcccccacttactgagtttacctactgtgtatgactgggctcaatgataaatagaatggttatatcaacactcaaatgagggctgacacacttcacctctccttttacttaagatctctctgcattttttttttttttttgaagccaagtaagcaagaagaaaaatgagagataatgcttcagtgagagaggaaaggtgctacatagagtatgagctgttaagttacatcccaggggaaagacctgggaactattgtattattctcttgaaaatttggcccagtaagctgctacatccagttcaactaacaaaatcctgtataccacagagaagaataaaggaaaccaaactgacaaacatccttcttttatttaagaccaaactgcagctggaatacccagtacagttctgcttactacacttcaagaaagatctgaaagcggaaaaagaaccaaagaagggcagttcaagcgaccaaagggtgggtggaaggtgctgcagtatgaatactgtacgaatattttgactctggtctgaaaagataaaagaatgttatcgaaaactacatggaataattgaagtcccttcaagtttgaaagtaagcattttaggacaaataaaaggaaattcaactttgtacttgtggaaactaatccctaaatatgaataggtttatattgattcatgggtaacaggtccataataaattattggaaactaggatgtctgaatatcaaggaagacagccatagtctcttacagtgcctctgttggtctgtctcaaactgaattgggtgggaaaaggtatggtccaatataaaagttccatttttgccattattggcaaatcttgcctttgtttattttggtgccagtgttttctgcttaatcatttgctttgttggcatctgtgtttatttacttgtacaccacatgcagtttacatctgtcttaactactccttcccaggtaaattccaattatatttgacatccagctaagagggcccatctcttctcacctctttcctagtcagtatattcagcaaatatttattgagcccttactgtgggcaaatcattgtactggataattgagaaaaatagataattcccttattcagtaaatgtctactgagcacaatctagtgaatcattacagtatggcctcattgttttgtttgaggtgtgttattcataacaatattttacaccattcgtatcaatgtaattatagaacacaatatacgatcaaggataagtaattgtgtggttatctgccatttaaaagtatccagtatttgatcacattattataaataatgaaaaaatgatttaatctgtaataaactggtttattgtgcagtgactgtaatatactagagttataataaattgtttactctgcctcaccaaacacatgctaggatataacccccaaaataagtatttaactttgcattaggtataaaggagactgggtgctataattagattattttgaggcagacagagagctgttatcctaactgatttagtatgttctgtaattgagaaaatgttcaccaaattatactttttagtgatttacatgtacattttataggggacatgttctgtgtatagcgaataaataacttttatagtatcacaaaatgttttggattccttagtttcttattaggatatgatgtttctttacctatacattgatttcatcacatttgatttttgtcatcttttttgccacatacttaaaattttccatataaaattaactaaaaatctggaagtggaatttaagcttttaatttgtagcaattttgaaaatatagcagaggtatattttcaagggaggtgtgaaatggaggtattattgtttgtattttattttagaaattttgtttgaacttgcccaagatcacacagcaagtgtcagatcctaggttacagcccataatttttcacttgtttcatcttttgttaccatgtttgttgtttaatccaatggggaagtgtttttatagctttattttcatggagatagtaacattgatataatgggatctagaatttacttagagtcaaagtgactagatttaattacaaaaagtattttgttgtataccgttatacactcattaacataggggttcttatggacagaggttctatgtatttttaaaagaatatgtagaggctatagacttttttgccctctacctcccttctccatttccttttgaagttaagacatttaagggggagaattaaggtgcatattgagttggggttttgtttaaaaaaaattaggtaaatacatatataactacaataacaacagttggtagttctctaaaatatttaattatggtaaatcagaaaaggccctttaatttttgcatctgttgaatgaattgctttaggatctcttctgtggttgtttctctctatactgaatgctgtcaatattattgagcacttactgtgccgaaccatgtgcttttcaaatatttctatttaatcctaaaaacactcctgggaaatgggtattattcccattttacagatgagaaaattgtcctttgtagaatacccatcatgtgatagcttcttgcatattatgctattcatttctcacaaccttacaaggtaaatggataatgttcctggatgagagattaaacgtactcgaagatcttatggttgtgtggctcagagactctaagcatggctttccaaatctcattctcttgtagagattttccattgtattgcattttgaccatgttcctgtttacaaaacctaagattatattctgaagtatctgtgacttgagtgatagctcaggaataatctgagggcattctattaggaaggaggactagcaaagcctatagttagcctatcctaggcatgaactattctcattttagataggatgacttgataaataggatgaagtgagcaacctgtttgtcttcggttattgctatctacaagacattctgctagtcactgtggaaaagtttccttctcttgggttttttcctcttccccttcctcttaacagtgttggttatctttattatgtttctgtgtatttgtaacagctgtttcacccttgtattgcataatggggatttttcttggaataaaaagtgaggcatgtaaattcattgagaactaaccgtagtttgtaaagaagtaaaaggcctttgtatctagttttttgcagatcacatttctttgaatgctggaaagtgaaataaactggtctaggagccaaaaataaatcttgggtttttttaagattttgctcttagatttgtaaccacctgggtacaactttttcctaatttgtgtaagaggttttagagatgcactctgtccctcttgctttacaaattgcctacaagaatgcaaccaaaatactagaaactgaaacttacacaaaacctttcaggttttttcctgtgttgtagttctagggaagaggatagtttattagtatttattttaagcttaaggataggttttggacctggattccatcatagtataactgccatcgaaaagaagacaaattgaaattacagcatttacctaaggttcacagtatggctgacttcagcagccttacatggtaagttctctgtaccagctatttttggttctcgcaattgcatcgacttgggaaattcctatcaccattctctatataggctaaccaaaacttttatcagtacctttcctaaagtatgaagttaggtaatcttccactccc

SEQ ID NO: 52205 - DNA, 1562 bp, Homo sapiens
ttgagattgcgccactgcattccagcctgggtaacagagcaagaccctggtctcaaaaattaaaataattaaaaaaaaaagacaccaaaacacatacacactttttttttttggagacagggtctctgacccccaggctggcgtgcggtggtgtgatcacaatttactgcagccaccaactcatgagctcaagtgatttccccccttagcctcctgggtagctggaatacatgtgcaagccactaggcccagctaattattttttgtagaaatggcatattgctatgttgccccaggctggtctcaaactcctgggctcaagtgatcctcccacctcaacctcccaaagtagtgggatcacaggtgtgagccaccacccgggtcatacatactctctttgggatataagaggggatgcagggatttttttccctatttattgagggctttaatactgtttttaatatttttaaatatttctgttctttgtatttcctagcaccaaatcagatgaaagccaaggaagggaggaatgtgtacagttcttcacgctatgatgattatgacagatacagacgttctagaagccgaagttatgaaaggaggagatcaagaagtcggtcttttgattacaactatagaagatcgtatagtcctagaaagtaagtgtgctgtgtagcacagtgatctgtttaaaaaatgtatttgttagcatttaatttttttttactattttgtatacttttaattatatacattgaatgtttcattgagacaaaaaatactgtagcattttattttaaaagttttatggtttgcttttaattagaaactttgcctctatgaatagatatttgtcactgctttttctgatatgctttttagcagtagaccgactggaagaccacggcgtagcagaagccattccgacaatgataggtaaataactttgctttgaaaaagactcatgtattttttaatttcagagtgaacttttgctctaaaaataacaaatttgattaatatagaatctaatttttactctaattatatctctcctctgttttgaaagattcaaacaccgaaatcgatctttttcaagatctaaatccaattcaagatcacggtccaagtcccagcccaagaaagaaatgaaggctaaatcacgttctaggtctgcatctcacaccaaaactagaggcacctctaaaacagattccaaaacacattataagtctggctcaagatatgaaaaggaatcaaggaaaaaagaaccacctagatccaaatctcagtcaagatcacagtctaggtctaggtcaaaatctagatcaaggtcttggactagtcctaagtccagtggccactgatagtataaaccatggtcatttttaggcatgtatcattcatttactcatagtttggtttacttaaattatcaggaatacaatgttgcaatgatgcttaaaaaacacttgttagttttccctgtaccaggcaatggttataattaaaatgatatgctgttgagaagccactcttaagagtccagtttgtttaat

SEQ ID NO: 52206 - DNA, 5587 bp, Homo sapiens
gcgtccccccaacacgtctctgttcgtcaggaacgtggccgacgacaccaggtaggtacaaggcaggtactccgggcctaggcggggaggccgcaggcgcctggagaggaccctggtggtggcggcactgggccgggggaggggacggagtgaagatggcgggtcccgcgcccgctttggcgccgaactaggccgcgcagcgggcctcagccgccgcgtgggagcgagggcggcgcctctgccttcgccgggccgcgtggcggggtttttcggtccccctccccctccgcagtttgcagcccctttctccctgcttcctgccggcgcgagcagccccccgccgcggcctttccgcgacccgacggccgccccccattgatttgaagttcacattcttcgaggttcacgcccccttggcccagagatttttttttttccccagccaaaaaatagtgagatgaaataacgggatcgagggagaggaatgttgctaccatttatctttgttgttgttgccgttgttaatatttgggggttttaatcagttggaggtgtttggagaaagggagcgttgagatttggggagttagatttttccagttaaatgttgcgagtagtttttcttatttcctggaaattctggtcaccctttgaaaagggaggtttgggaagcgtcagtcattaggacgttgacagctaagttagattaattcagacgtaccttaaataggctttgttctcaccattcccttgtttcgagttgccttcagattattttggaagagttcttactacaagatgaggctttttatttcacaaataatgaatctacacacagaaaataagtggtttgggtttttggtgtttcgtgggggttttttgctagctttgtgatttgcttttgtcttaaatttaagaaggaaagaaagcaataattctttccataaataattctttccataatttctaatagttacgttagcatctagagaaattttctctttacgtcatcttgacacttaactatttaagaagttcgatatttgtgactttttcagaccatatttatctactgttaagtgtgtaaatctgtcgctaaaattggggagtaaaaataagtgcttggtatttttcagagtgctagagtcgatttgatgctgtaaaagtaaaaaaaaaaaaaaaaacaaggcttatatacaacctaatgctgctgtaccttttatgaaaaatgacggctgtagataaaaataagttgtggtcattcccttgtaccatacatatgtctgctgttgtcctgttaatgtaaactgcatttttatcttccaaattcttggatcctagctttccttcatcaaaaagatatattgcctatacatcttaaggacttggacataaaaatttgaggtctttttatgatgttttaggtctgaagacttgcggcgtgaatttggtcgttatggtcctatagttgatgtgtatgttccacttgatttctacactcgccgtccaagaggatttgcttatgttcaatatcctttcttcagatggctgattagtgaggggtgttgaagtttgaaattcaagtttatgtaagtggtaacatctaaaaagtagttctttttgtcctctaataaatgtctgtcttcaaatttttgaaaattaattctgactcacacattgctctcgttattaaagttaatccaaaaatggtaaaatatataaattcccattcatgcttctgaaactcatatcgatgattatatatgtgatttaaatttgaatgcactctggttgctactacctttaatgtaagtcctttaaaagttaatatgttcttgtgcttagcaattaaaatttggtattcttgtttgttaatttgaatcacttgatcaaaaacaaattgtataacaatgaggtaaacttctttaatattgtcccctaatttgctgtcctctgttgttacctcagagaatgtaaagctgtacagttatggcgaccccaaagagaaagcatgaaagaacctttagagtagagttcaacacttaaggcaagtagacaagccaaagacctcttaaggatcaggcttgaagagaagggagagtttgggaaaagaaaaaataaagaaaagctggaagaaggacaagcctaatgggagacaaagcctcgctttatctacaaaagggggaaaaggttgtttttcaaagttaaagataaagccatctgtcatatttggccaagcatctcatgacaagtccttctgacaagcacttaaagagttaaaggtcaagatgaagttgaatgatggccaagattaaaggagtcatacctgatgtatcctacagaataactatttttcttttttttttttttaatgttttgtaagcagttaattttcaaaattattctggtttggtctagtgacaaaacctgtaacttgatttatgtgggcctttgatgttgtgattgtggtcttgtgtaaatgcactctctcttatgaagttaaagtgtaacaggatgtatattcttaagattaaattcagcatattttggttttggaccaggtggtcagatgccacggagtagcaggcagtgctctttggagtagcgtggggttctggggttaagccacagagccctgcttaaaggagagacaggtgcatgcactggggactacttagaaacagctctggtggtcttgtagggtcagaaccactagaaattttgtttatatatagattttaaagtggttgctggggacacatataaacccttaacttctttaacttagccctgtgaagactgctggccctgcgctgctttagcacaatgatcagttggccctgaatgagttgcagaaggccttctccctggtataggtacctaactgggacctatgggagactggtccctgacccagagtttcaggtgaccttacttccgttcctttcagtgagatcatctccctgcaacaagggtttgggttgtggacctcagactaggaaaagttcttcctgcttaaattcagtgagcctcaaacttttaagttagtggagtcctagtgagacttagggaaaagccaaaaactactcctgcagggccagtgatcaaggacagttgtgagaattggttgcaaagctccattacagagaaaataatagctatatctggcttagtaaataaaggtagcagtgcgttctggcttacaacatagacctcattttacctagtgttgggtggccgaggaatcaaggtcagtagtagtttgattcaagagtgtgtgatatttgaggcaaaaaaggctagtaattcaaagcaatctaaaggagaatgataattttaaaatacatattcagtaagtctatggttttaaaatagttgaaaagaaataagtaacaggcttatgaatttcatttttgaaaagaccataaagtacaaatttctccatgactgacatcagagtgatactcggctgcctctgctgctgctgtctcttctgtctgactccattcgcaatagccttttcttcctatccctggcttaccgagtaaagtagaaacttgccatcagcccaggattctgttttcgagggtagccccagagaggatgctctgttctcattaataatttttacagctctcaatataaatcctttttatacttattatattctgtctcttggggtaacaaagtagtgtacccattaagtgaacgtattccttctaattagtttagagcccagctgcattaaccttgagggatgttcagttacagtattcaaggttctgaactccccatcagcctttcccttttcatgttgaaagcccagttatttagaatttgtccttccatttaatctgttcataatggcctcgggaagacagagctggaaacctgcagtccttaattcctttcagaacaaaaagtgggaagtctagtaaggcagaccttttagtctctataataaaaaaataccagtatcggtctcaaaaaaggagtgtgtcacttcagggatattttaaatcacctctctaaatctgcagtcttgtgttgtctctcaaatttaggaaaaagaaatgtgcaaactagaatggggatttttgggatagaatgaaaacctatacctgtacctaacctagctctctttccaaaccatttatatcaaacactgtcttgaatgtgtacttggcctctgttaaaatgatggttttaggaaaggagctaggtttggacagaatagctatataaagccagcagttctcgtagtattattgctgacatgaccagggaggacaagcagcttagcttctcagatcaaaaacaagtaccagtagttcctgcttaaggctggtaaataatatcttgaaattctcaagttggaaaccagtctcaaacccatttctttgcaagaagttgtatatttagggtcatggttagggctttccagtctaggagtccttccagtggtctgtttcttgatagcatgcttttacagtctgcatggatgtaataacgcttttggtatagtgattgtcttgagtactgcttgactctggtcttgatgcccacaaatggctagcgtgcttgtcttcccatgcagtggaaggaagacagttaaatgaaatagtagtattagatatatatgaaaaagaaaacagcaaaataaatttgaagttaatgctttcctctcttgtaaggtaaggcatatactgcttgcttacacaagaactattggcattttctttttttcgtttgaaacaaatatgaaaaatagtattttggttttaagaaatttttattttagcatacaacatataactgacatttgttttttcttttttgtcttgtaaacttaattcttaaaacttaggaaaatttttggataggacaacttggtgattcagctataacagatcttatttcaataataactttactgcaatatgtattcatacattttcaaatgtgtgccttaggaaatcacaagtgcttttatagtgtgaagtgttaatgactgaatccaactgaatcaccaactagtaagtgggggtctggttgatgttctggaataatattgggagattgtgaattgttccagacataccaactgaactttcattcattatcaaagtttgcaaaacttcccaagccccttaacatttagcacatttgaggatgttcgtgatgctgaagacgctttacataatttggacagaaagtggatttgtggacggcagattgaaatacagtttgcccagggggatcgaaagagtaagtacccttatgcctgatatgtatgaaacattattttttagtgttttgagatttttttttaagaatttaagcaatttgtgtttctgttcaaaacccaaagggatcttttttttctttctttctttcttttttttttttgagacggagtctcactctgttgcccaggctggaatgtgtgcagtggtgtgatcttggctcactgcaaccaccacctcccgggttcaaatgattcttatgcctcaaccttccgagtagctgggattacaggtgcatgccaccacatctggctgatttttgtatttttagtagagacgga

SEQ ID NO: 52207 - DNA, 1053 bp, Homo sapiens
agctaagggaaaaacaaattgcatagcctgtgaggaatatgcctcttttcacctgggcctccagaagtccacgtgccctgggacgatttttacatcatcgcttcctgtacttgcagatctaaagaaagaaaaacgcagggccacacaaaatcccttttattccaattataaatattggaataaaataaatattggaataaatatcaaatgtttcatggtgaaattagtctttgggtttgctttaaagtactttagtctaataaaaaaaagtgggagcggggagacaaatggaaaagttagcaaaatagtgatgcttcttgaagctgggtgatgcgtaccttggagttcatactaccattctctctctgtttgaatatatttggaattttttcataataaaaaacttcagagacctcatgagaaacaaatcttcggctgtcttttcatacaggagtcatactcattatttacatccggcaattaggcaaggattttagatacaggaaagtgtgcacagagttcctctcctgcaggcaatttactacagcctgttatttttcaattgcgcaagttaaaatgaatgggtgctctacaagaaataattatcacggaaccgctgcagttttctttaaaaaacttacacatccaagggattcattgactccacattcattcaacacacactttattgagattactatgtctcaggaacctacaaaattaaagcctggtgctgagatccagcttcctttcacccaatgtatgacctgattaagttttttagcctgtcttcctcttgtctgtaaaaggaaggctgctatgagaattagatgagacgatgcttgcttgccaagtaactaacacagtacctgacaggagctaaacaaatcatagatttccccacccacccattccctggggatgtcatagtctactgggaaagagagaggtgtcaatccaacccccacagaattcaacagttccttccttctccacaaatttgactgatgatagtatgaacgcttccagaaatgaaagcccacaacctcacaa

SEQ ID NO: 52208 - DNA, 1049 bp, Homo sapiens
gcaaacccaccttcccagcgcccatggggtaggattcgtgtgaggtggaccagccttgaacgagatcctagtggctccagaaggggttctgaggggtcagggggtctaggagcccacgagggtttatatgttgaggggtatccctgtgtttatgattaccctgtgctcagagactcacagtattatttcatccgcctcacaatcatctgtgacacaggcattactatcctcacttcatagatgagaaaacaaatggagaaatagctcaaggccacacggtaagagggagagcccaggtttgaacaagtctatctgattccaaagcctaaggtccttcttagcactcttcagcctgtttagataactggggaaggggagggtgggtgctctcccagaagcatattcattcagtaaactcagagcatctattttgtgccactctgcacggtactgaacgtacaaagatgatgaagtggtctctgtgggccttgggagcccatgttcaaggcaggaccattggaaaacagcatccctcatgcttgacccggatggggcaggacattgatgaatcgtgatggagggggtgactatgggatgcttcaaaaaaaaggcttcctggaggagatgacatttaactgaagcacatggacatttccaagaaaaatagagtaaggcagggatcaagaggcagagggaaaaccattagcaagaattcagagtccagaggccagcagaggagacacatggtatgtgaaaggactccactgagatgcctgaaagtgtgcacaggtgtgtttttactcaaaaagaaacaagcctgacagagtctcctcattccccaccttccccaggtgaccaacaccaagaaggagactcgctttcagtggttcttccagagggcagagatgccagatggtcagtatgacccagagacgggaacgggacttctctgcattgaagaggcaagtgtggctccagcttcagggctcactttctcctttggctgcaagccagggagggccaagagctctgggctgggagtcagggca

SEQ ID NO: 52209 - DNA, 1047 bp, Homo sapiens
tggagattccttttctgtagggaattgtatgtgcctctaactaagtaccttcaaggagaccttcaaagaggacttggattctagcctggctgccagggacttgctcttgcaagttctctgtactcaggttcttcatctatagtatgcagagttggaccagatgaccacaagggcccctgtcacatgcccccatgtctcatcctcccccagcggctcacggcctcagctctgtccagaaggcataaagcctatgcctcaagccctggaggaagtcagggtggtgtggccagtgcagacccagtgccagagagcccagataatggcaccattgaaggtgtcaggccagaggggaccctaaggaggtagcaggaggcagctgcctgtgcttcctgacttggccagggtctgcttggggtacaggctcaccagaagcaacctggactccctggctcccaggcctctagtgcacaggaccaaggagctcctcccagagcctctgctctcctctctctgccaggtccaaggtcatcctgaaagaacccggcctcgaggatttgggcacctactcagtcatagtcactgatgccgatgaagacatctccgcaagccacacgctaaccgaggaaggtaatgcacctaccccgctccctgccacctccccagagagagagtcccaaacacaaatgcccacacaggtcagcaaaaagcaaccaaaatgagtaaagtggcaatttccacagagaagtaggccctcacccacccattctttccatcaatagatatctgttgagcacctgccacaggccaggtaggccctggatattacatcagtgaactcaacagacataaatccctacccagtgaaatttacatttttctggtctctcttttattttcccacctttttttttttttttttttttttagacggagtctcgctctgtcgcccaggctggaatgcagtggcacgatctcggctcactgcaacctccgcctcccgggttcaagcaattctcctgcctgagcctcccaagtagctggatctac

SEQ ID NO: 52210 - DNA, 1032 bp, Homo sapiens
ataaaaagagaactaggaagatcatgcacctgccatccatcagtccatccatgcatctgcccatcagtccatctatccatctattcatccatctatccatccatctatccatttattcatccatgtatccacctgtccatccatccatccatccatccatccatccatccatccatctatccatccatccatgcatccatttattcatccatgaatccacctgtccatccatccatccattcatccatccatctatccatccatccatccatccatttattcatccatgtatccacctgtccatgcatccatctgtccatccatccatccatccatccatccatccattcatccaaccaaccatccatccatccattcattcaaccaaccatccatccatccatttaacaagttacagcagcccctatctcaaaaagcttagtttcagggagccatgaaaatcagtagagaaatttcaaggaaagaaaactgagattaaagataaggactgaggaaacctatcagatttggtgacttttgagtgagagagagtgtgtgtgtgtaaggatgaatgagtgagtatgcttttgtgctttagtgaggaagcagagatgctcagaggtaaggggagagaggacttttaggatacacttctgggcctagggaagaggtcccaaagcccccagcaggtcaggaattcatgcaccttgattgctgtgggagctccttctggcctctccccatgctcctccccttccccagcctgtcagacccatgtaactcagccttctcattcagcccatgtttctattttttagctaccctccctcctccagctcaagttcaagctttcagagacacacagacctctgtctccctgacatgggatcctgtgaaagacccagagctcctgggttattacatctactcccggaaggtggggacatctgagtggcaaacagttaacaacaaacccatccaaggcaccaggtacgtctgcccacccgtatcagtctgttctcacactgctat

SEQ ID NO: 52211 - DNA, 1078 bp, Homo sapiens
gtttcccctgttgcacattattattattattttattttattttattattttgagacagagttttgctgtcattgcccaggctgcagtccagtggcatgatcttggctcactgcaacctccacctcccaggttcaagcgattctcctgcctcagcctcccgagtagctgggattacaggcacatgccaccacgcccagctaatttttgtatttttagtaaagatggggtttcaccacgttggccagtctggtcttgaacttctgaccttaggagatccacccacctcagcctcccaaactgttgggattacaggcgtaagccaccgtgcccagccacattattttttaaacattattcttggggacaacagaagactgtaaaatcccagctatggaggggagcatgacagtggagttatactttcgaaagaaacactgaggtcttctaactatgagtcatatgccaagttcaagtcagtaaacacttagtgagtggctaaggcgtggcagataagaaccaggagaggggctgagttgtttagggcatatgaaattgtgtttgactgagccccattcagcaaaggtttgcttactcacagttcattgagcacctactatgtgccaggccctgagcgagtcattagagttgtatccaagaagtaagatattcagtgcacaaaaatgatgatattgtgattaattcatatcaaagagactgctatggtttgaatgtggccttcaaaattcatgtgctggaaactcaatccccaatgcgacagtgttgggaagtagggcctgatggaaggtgtgtaggtcgtgagggctctgccatcatcaatggattaatgagtccataaaaagggcttgtgagaatgggttctctctctctctctctctctctcctcttctgtcatgtgaggacacggtgtcctccccttcagacgacaaaacattcagggtgccatcttggaagcagagagactgggtcataacctgaaggcatcttgaacttgaacttcccagcctccagagctgtgagaaataaatttctgttctttgtaaataactcactctgtggt

SEQ ID NO: 52212 - DNA, 1903 bp, Homo sapiens
tcctctgaaggggccttggaaatcagacgaccccaatcccatcgaggctttctatcttcttgccaaaaggaacttctttaaggtagttctaagagctgtcttaggcagagagttgggtttctctaaagggacttgtttgctgggttggaacagtcccaagtgggaaggttacagtgtggtggttaagcatgtgtactctttgtagtgggcttgacctaagttcaaatccaggctctgtccctgggtgatctcagacaagacattcaatttttctgggcttcattttcctcatctggaaaatgggtacaagaatgctttgtagaattctggaaagagttaagtgtgataaatgctgtaaaatgcttagcataaagctatggtctgaagatgcgttcagtaaaatgtggttcctctcattcagaggcagttctaaggctggggaagatgagaagtgatttttggtaggtcacctcttttggctgggaggatgcatgtgccttcctgcccacatctgagatttaagatcctgactgactgatgctgatcttcaccatgatgtccttcttggggtccagaccttagagaaggtagggtgaggctgggatctgggctgctttagattgggttcagggagctggcaggagaagccagaatcctttaaacacaggctctccttttcctgccaccctcagaggtgagtgggcagaggcaaggattgtaccatcttttttctaactgctcctcaacagacttttaagaacttgaagatctgtgggcagacagcagtgctaggtcctgactgcagaccggattctatgttctagctagcccttcagctcttcatgttcacagcacaatcacttgggttaacaggcacatttcttttgaatgaatttcccggggttgacaatgtattgacaattggaccgcaatgagaataagagcaggagcattggtactgacacctgggttcaagtcccagctctagcacttatagctgtgtgatgttgagcaagtcccttaatcctcatctgtaaatagtggccaacagtagtatccacctcatggggttgttagaggatttgacaattttagaatagtgattgcttttaaggctggtggagaacacaccagtaacaccattgtcatttcatgtagaactaaccaatcaatgagcattcccaaacctcttgctatttttccatactttgaacgcgcaaaaaaatcttgacatgtgtctccatcccacttaaatttgctggctaaaactgcggaggctacagacagaatctattcattactgcacgttagggggtatgtgttctgaagctgggttacttgaacagaaaggtttcttgcttttctcctccctaatggtttggatttgaagtcagatccgctgacagttgaggcttctcagtttggggtggggtgagggaagccagttgcctgctgagtaattgcaggcggactccaagccaccatttgagattacagtggcagagcctgggggctcagctgcccctactggtaaggggagggcacccggcgcttggcttgcaagttctgagctgctgttgcttctgcggcctcgacattctcctaaaaagtgccaagttaagaggactggccatagcttacagcttgggccctcatggaatggccaactctggccaggccttgatatagtggcaaaagtgggacttgcctgtcactctaaattctgccacttaccaacagcaggatcctggtgaatttgtttgtcctccctgaccctcagtctgctcatctgtctgtaacacctacctggcaggaacaactgtgagctcccaaatgtggaccagagctccatccgcgcccgcccggtggccaggccccgggtgtaaggcggcacttcgaaggc

SEQ ID NO: 52213 - DNA, 1043 bp, Homo sapiens
gacaacttcttcagtagaactcatgatgggttatctggaaattttattcgtatcacattgcagcttatcattggcatttcccattcattacacgaattctctttgaataagtacgcactatgaaagtattttattgaatccactctgtagtcttgaagatcaggatgatggccttcatgctgtggaagagggaactaaggcccaggtcaacagcttctacatggcaacatttggaatcgatccagctccagagtttgtgtccattctgctgccccacactgcctaatggtggcagaagaggcagtttcatgttttcaaagctaataactctgaattcctgggcgttggcctgcggctgcccattcacggaccttcctctgggatagcctaaatttgactctccttacttgcattcagtttcaggtctgtgcggctgctaaagaacgacccagtcaacttgcagaaattctcttacactagtgaggatgaggcctggaagacgtacctagaaaacccgttgacagctgccacaaaggccatgatgagagtcaatggagatgatgacagtgttgcggccttgagcttcctctatgattactacatggtacgtctaccccctctggacatgccccgttttgactgaatgggtgtcttcacttcaggcctcatggctcagcagcccaccatgaccaccccagcccctcatctctgggcctttgcacaatgctgttccctctgcctggcaccctccctttcccatggctaacccctactctcaacttggggtctcagcttaaatgtcacttcattcattcactggagaggaggctttcttgtctgggtgccctcagcaaccaccatcgtcgtccttgatgccatcaagaatgcttagaggcttgctgtttacacatttatttcttccatcttctgcacgagactaagctcctagaggatcattactgagtcttcagcacaccatacagcctgccacacagtctgtgacacgtgttgaccaagtggacagtgcctgacccactcgttgc

SEQ ID NO: 52214 - DNA, 1028 bp, Homo sapiens
ctgggggtaaaggggggtctttggctagagtgcaaggcaactgacacactggcctttgatccagtgtaatgtttaggtccatccagcatgcacgaaataagacactgtagcagcccaattggccacagggatgagcagggaggtgctgagaatggaaccaagcacaggctcagggttaagggagcaacatctgttttatccattacagtacttattaaaaaaaaaaaaaaccctgaaagtttaatcgtttatttttagccaaagtcaaatgtctctgtgtcaaaacgtccctacttcaaaacaactgtattgagtcaaccctagcggggtgtgtacaaagtggggagggtggaagaaacgtgtatctctgagtacaattaacacatgtttaggaaaagatctggaaggatgtaccccaaactgttaagcgggagaggggtacaggattataggaattttttttttactttatacatttctgaagagtttgaatcttttgcaagagactggtgttgcttttgtaatcagaagagctaatgatatttttaaaaattagttttgagtggcagggcgcggtggctcacgcctgtaatcccagctcttagggaggccgaggcgggcggatcacgaggtcaggagatcgagaccatcctggctaatatggtgaaaccccatctctactaaaaatacaaaatattagccgggcgaggtggcgggagcctgtagtcccagctgctcgggaggctgaggcagaagaatggcttgaacccgggagacggagcttgcagtgagccaagaccgcgccactgcactccagcctgggcaacagagcgagactccgtctcaaaaaaaaaaaaaaaattagttttgagaaaggtccccatgtacccaaacccactgttcctggcagtggaggggactggccctgagccagctgcaggcccaggctgggttatgagatgagctgcaatgcctgtttgaatttttcaaaaggcttcccagcagaggccctacagggtcatttgtga

SEQ ID NO: 52215 - DNA, 1046 bp, Homo sapiens
cgattaaactttcagggttttttttttttttaataagtactgtaatggataaaacagatgttgctcccttaaccctgagcctgtgcttggttccattctcagcacctccctgctcatccctgtggccaattgggctgctacagtgtcttatttcgtgcatgctggatggacctaaacattacactggatcaaaggccagtgtgtcagttgccttgcactctagccaaagacccccctttacccccagagagaagtacactcagccccttttctttctccccaggtactaccatggcatggaatatgagacggacctcactccccttgaaagccccacacacctcatgaaattcctgacagagaacgtgtctggaaccccagagtacccagatttgctcaagaagaataacctgatgagcttggagggggccttgcccacccctggcaaggcagctcccctccctgcaggccccagcaagctggaggccggctctgtggacagctacctgttacccaccactgatatgtatgataatggctccctcaactccttgtttgagagcattcatggggtgccgcccacacagcgctggcagccagacagcaccttcaaagatgacccacaggaggtgagggcgcatccccgctcccctatagcatagatatgtgtgtgcatatacagaatgagagaagatagtgaacagatcagagctttggaatccatgggggaaagcatcctagagctgagacgggattgccatgtactattgtccaagttgtacactgtacaacctgcatagctgtaatgcacagccctgggctgaggcttcccagagtgaatgtgagcatttattctcttggggctgtgtttctctgcagtcgatgctcttcccagatatcctgaaaacctccccggaacccccatgtccagaggactaccccagcctcaaaaggtaacttggtctccctggaccctcagacacctgggcagtgggcaggaggctgcagacagagccccacactgtccccagagcatagcaggcaca

SEQ ID NO: 52216 - DNA, 1045 bp, Homo sapiens
atagcttcagtgacctattgtattgaagagaagaatgttatgaagaaacagatttcgtaaccattaaaacgttcatgcttagggcacacaaagaggaggcttctgatatctgaccccaaatttgattgcagccccatggaattctcacggcagcacttgtggtgctcactgtgtgccaggtgcggctctgagcgcttcccaggcatcaccgtccttacccttctctacagccctgggaagtcaataataatgtctccctggatctgtggggtagaaatggaggcacagagaagttaagaaacctcctgagattgcacagctagtaagtggcagagccaggatctggactgaggcacctgttcagaatccacacctttccccactagctgctccgcctctcaagcagccgggactgagcgcctggcagccaggagtgggctgggttccctgttacagctgtcctccgagagactgcacctacccccttttccaggcacggtcccacaacaattcaatggcagggtcaagaccccagagcctgtctcctagtgcgcttccatactggagagtctgagcatttccttcctttaagggtacagctccgcactgtttcttcaggaatatttatacaaatggaccttggtgtacaaggcatgtttagtgtattgacttaggacaatgaggtgtagacagtggcgctgagaagagcggccagtgctgacagagcttggcacaggcgcagagcactgtctgtgtccctcctctctttgccatcttgggagctgcgctgtggccccgcagcacaggcggctgtgtgaacctgttctctcttggctctcctcactctctcaccaactagaggccctcagtaaggagatgaccactcagggtgaaggcccctgtggctaggttgacagtcaacctgtgggggttgagggtgggccagtctccacacctgtgagcctgggagaggggaagcccagggcaatagccaacagagagcctgagtttgaaccctgactctgcctcctgccgggcgtgtcat

SEQ ID NO: 52217 - DNA, 1049 bp, Homo sapiens
ccaggctgacagtggttcaaccctgaatcctaaaacttgcctttcaagtctcattttgtttctaactgagaactctatggatgatgatctcaaaaagcctttgtctctgggaaaggatgcgttatcttggtcttggaaatttcaaatgatgagggttgggggatggaagcattattccaggtggacgggatagaatccagcctctgcctggattagcccagggggatttggaaagcctttctaccatccttgaggatggtaactgagcttcctctgacagtgaccaaaggatgctgtatccttcagagctaaggcaagacagagagtctgctgttaattctcaaatccagcgaaaggctggacatctctaaatctcgtcttcctccacctcatgtgcatgcctgatctcaccctgacactcctgatgccgcatctgtgatagcactcgtgttgccttcacatggcaggctgggccaaccctgggtggaaggttctgacatttgtgttttcagaaatgtacatctgccttccagtcatctgtgcccttctagggaagatgtgcttgatatgttcaaattggatctactctgaaaacgaaacttggttttggtcctgtgaggactacttgtttgtccacctcctccaccaaaggaattaggaagttaagagaaggggaagaatatggaggataggagagggtgatgatgctttagcccattaaggaagaaaagttccccttactcttacaaaaggtgattgcaccacttaaaaaaggataggtagaaaatctggccattttatgtgttatttttttcctgcataccagtgccccctggaaagatggggatgctcatttcagagacagcctcttcacctgtcctccgtctctccattacagagccacaagccaagcttgagttactggttaatttccttgaagtcaatagagactctctgggtcctcatccccatgcatatatgtctgggagaagcaagcattctccaaaacagggctgttgctttcttcctggccgcatatgtgactgtct

SEQ ID NO: 52218 - DNA, 1021 bp, Homo sapiens
gccagcatttgcaaaggcacagagctaagaggagctgggcaaagaaaggaaagccagggaaggtggtgggagatgagtctcaaagctaagtagtggaagctgggcacagtggctcatgcctgcaatcccagcactttgggaggccaaggctggaggatcacttgagcccaggagttttatatcagcctgggcaacatagcaagacctcatctctgctaaaaattaaaaataaataaattagctgggtgtggtggtgcatgcctgtgatcctagctactcaggaggctgaggtgggaggatcgctagagcccagagagccaaggctacagtgagccatgatcatgctactgcactccagcctgggtgacaatgagaccatggctcaaaaaaaaaaaaaaaaaaaagataagcagtggaggccgaatcatggagggtcttgaatacctggctaaggagtttaaagtgtatccaagaggacgtgggagccactgatggttcatgaggaagagaagggcaggaccagcactgattgaaaaggagggcttgttcagtgtggaggaagaatcagaagggggaataagttaccttctccgagcctgcaagaacaaaaaacaaaaagcagaaattaaaatcaggtttcactgctatttatatatttctcctttcccaaatgatttttctaaagctgggagtggaggcaggagggagaaacagaaggtgagcagggaggctatttagatgtgtcaaacccgggtgatcattaataatttgggcatatatatgctcccaaacttactctgcccccttccttcccttttttttttttttttttggtatgggccttttaggcttgggccagccagctttcttgagatgagtgaataaaagcgtattgtaatttcatgtctgcttcagatcatggggacagtgccacccaggaactgctgctgaggcctgggaagctcccttgccttcgggtttggagcagtggcatcatcccaccaacctgagccatgaaagg

SEQ ID NO: 52219 - DNA, 1810 bp, Homo sapiens
gagccgagatcgtgccactgcactccagcctgccgacagagcgagactccatctcaaataaataaattaattaattaaacagattaactcatattattcataaaacaataattagcatttgcattttaactcccaagacttcagtactgaaacaacattttatacaagccttaaagtatcaaatctttaacaccaaaacaagataaaatactctaacatagtatttaaagatttaaagaacaagaatcacccattaaaataggagtagaacaaaaagttgcaagggacaaaagagttctttttgctggaagtgatgcttttgtcatggttattttgtttgcctctgcaggagagaaatatgaacttcacgcgggaacagagtcgacacccagcgtggtggttcatgtctgtgaaagtgaaactgaagaggaagaagagacaaaaaaccccaaacagaaaattgcccagacgaggcgccccgaccctccgaccgcagcgttgaatgagccccagacctttgattgcgcgctgtgaggcccttggttgtggtgcgaggcggctgccctggtgggctctggccatggcgctctgtgcctgcggccgatgcgttgctgcgaacagcataggtgagactctgccgagtgaggtataggtcttctcaccacgcctgtactgcagacacggtcgtgtagagtagcagctgatttgacctgtcccagattttaagtgatattccaaaagggactttacattaaaggagaagcccccaagatgtggccacccttaaccatttttaaatagtaacaaattaggaaaacagctcccctcccctccagccatgtaagtcctcctgattctgtatcacatgagacaccaaaaactggaaatgtagtcacacccagtacagtaccatttttatgaatttaaaaatagtcttataattttaattgtttgtgggtatttttctactggtataaatagcttctaattaataaatcgatcaaaggttgttactcagtatacatgaaattttttgcaggaaaagaaaccagaaatacagaataattcatagaaatcatggttctcaagtatttgttcaattagctttggggaagaaatgccaaatccactttgaggatgagtcttacgacacagatccacccacatgttgctcttatctggaatttgggacaaagcaatgcacaggccctcattcctgatgtggcgccctccagacatggctgcccaggaaggacggccactttagaagtgggacgtatcaccagtaagcttgaatgattaggatcgcaggtggctactgcattctgccgttcgtgaccgtgttctagcctgtagaccacccagctaccttcattcaccagtttttatccttcaccttttccagtatcttgttaaccactagttcttgagttttttggctatgatgtgtacgtttatgtatgtcattcatggactttcaactagaaaaggtaatgataaggttttctgaagaccatttgtaaattgtccatttaaccatttttcagcttgctttgaaacaaaagtcacacctactatttttctatgaattagggaatgagggggagatcattcagttttacttttctttttgttgaaattttgtacccggattgcagttggcacttttcctaaaacagaattgtttcccacttaggtgtcagaatgtacctttgaacttccctaagaagcagcaggatctttttaactctctctggtctgtttagactttgaagtcccttctgtagaaaagtctcataactgagaaggc

SEQ ID NO: 52220 - DNA, 1035 bp, Homo sapiens
attaacattttcccctgattcacaatgaaacaacggcattctgacgaagatgatccatacaccgaggggagtttaaaagacaaataagtattcagcgaattgtaggacaaggttcataaatcttttaaaactttttaaatagtgagtttctgtaacatggacttacagctccagctaggaagcaactattgccccatcttttgttcctttatattgtcaccccaattataaataatttgtttcttttagtacaggaagatataaatgcaaatgtgcaaaaaaaggaagaaggaaagatggaccaagttcacctgtttggtacgtacagggtccacagctctgcagaaaggggagaaacctggtagacagagggcctgacgcaccatagcattgagcacattttccactgcttaattatgtgtgagattttcccttttaaaataaatctatggtctgtgaaatagtctgtataaaaatatgaagccttgaataggccagtcatagcagttccgtcttgaatagaactcaattttacaagcacggagtgagagtatcattccactgcaaactcttttatttccacaacatattagatctcattctgctttagtagagttacctcttaagtacgactattagtcatttcattaatatgaaaatctgggaaggcccacataaaataccaacataattgctggctaccaagataaaattatttaggcagattccagccccaatggttcaatgataacaaaactacaaaacatgggacatcaaattcattaataaaattattaagtcacctcttccatcgaatgatgagatttttcttattcactgtttcccatcagggaaaaaagaatcctcccacctcatgcctttttttttttctgatgccaggaattagtattcattgcctctttaagaggccaatgcaaaaaaaggtagaaaaagccctagcccaggagttgggattgccagttgtagtccctgggttgccttgctgggggtgcctaagtcagtgccataacctca

SEQ ID NO: 52221 - DNA, 1101 bp, Homo sapiens
ctggggctgagtcagcgtctctacccacttaaataacagcgtaaagatctttcactaaattcgttatgtggtctgtctggatgtaaacctatatatttccttttgaaacagaatcatatcctgcagactcttggcactcctgcatagctttgaccgaatgttcactctcatcgtaatggaagatttctatctatgcagataatacatgtttttaaatactgttttctgtttagtcctcaatcttcctaactcaaattggggactgaggagagagaaaggtggttacccctgttaccgtgccatattcttcttgctgcttttcaaccccacgtgattgttgattgacggttctgctataatgtgcgtgcccttcaagtttcagaaaactttcccaatcatttcacttcaatcttaattgaacccaagagtcaaagttattattttctccgaacgtgtttgtgatcttctgttatattttggggcatgttacctttatggtatataagctgtagtgcatactctttgtattgcaaaaaactggtcagtaatttatgtacatgtattccacattttagtgtgcttgaagtgacaatccatagtttgtagtagtttgttatttgtcaactttaccctgtgttttaaggacatctaaacattccttgtcctatcaagatgacaaaagcagaatgtaatttttttttggaagcttcgtgattacctgtaacaagttctgtttttaaaacgaatacaaataaagttagtaactatttttaaatcagtccattgagttgagtttttttgtgtgtagtattttcaatacgcatcacttacatttagctaataagacagagaagtgcaatattgtgtttgttcctttcacaagagtcctgttgaacattaatgccgtgcagtgccagagttcaaggtggtgagtcactgctcactctgtaaataaccactgcactttcagctcttccccaagaaaccttttaccctggtttcccctttggttaaaaatgatttattccgggtaaagacttactttttgtctcggttaaaaaaaaaaaatctccaaaatgtggaactataaatgacagtaga

SEQ ID NO: 52222 - DNA, 1006 bp, Homo sapiens
acatataaaatttattttttgtatgatcaaattatattcttttatttccccttatacgtctccagaaagcagagtcagggtacatgcttccagtatttgtcatctcaaatacttatgtggccagctcatacaacctagaagagagatctctgagagaagaggtctgaacattcctctattatctgtaaattacaaacaaatgtttaccacagtgctcaagaccattatcattgtcattatcattactacgtttaaaaaatatttctccaagtacaaaaatagtcactttgaaattccttcaacagaacagactgcaaaaaggatccccaagggttagagcatttactaaaggctgagggatactgccaggcacacgacggacacccatatatcacctcccatttattctgatgtcactgaagggaccgtccaggcagttccaaagcccagggcatccgtacctgttgtacatcttcagcaggatcagaaccacggtgaagatgatgatgacaaccaccacaacggcagcaacaatggctccagaacctacagaaaggagagaagcagagaccgtgaatgtgcaaactgaacgcagaccaggagggcgccctgctgtggcacctgacatcctcactaggtcaagggaggcaggagagaaggcaacatcctgggacactcccagttgaccccaggacagtcacatctggagtggctgtgcacccctgccccgagctgcgcttgaaggaccctgtccttagcacatcatctgccaaaactctgccttaggcaaagtcctggttcttatcagctccagcatgcctcaaacttctgggaaacaaacaaacaacataccctcccctccttttgataatgcaaaagtagcatgtgatttttgtagaaaataattttgaaaatataaatatgtgcaaaaaagagggggtcgttgaagaactcactggcccaacaactgctgatcgtctgcatatctacattcaccaatgtgatc

SEQ ID NO: 52223 - DNA, 3207 bp, Homo sapiens
gtggcacagccatataagaattagcagattgtggctgggcgaggtggctcacgcctgtaatcccagcactttgggaggccgaggcgggcaaatcacaatgtcaggagattgagaccatcctggctaacacggtgaaaccctgtctctactaaaaatacaaaaaattagccgggcgtggtggcgggtgcctgtaatcccagctaattgggaggctgaggcaggagaatggcacgaacctgggaggcggagcttgcagtgagctgagcaccactgcactccagcctgggcaagagtgcaagactctgtctcaaaaaaaaaaaaaaaaaattagcagattctactatgccaaacaaaaaaactaagctaaaaggaactttggtagacagaactctaacttgagcatttttttttaggattgtgaagttgtacttaattgtttctatgtttcatcaggtggacatgagcaaagtaaatttggaggttataaagccttggataacaaaaagagtaacggaaatccttgggtttgaagatgatgttgtgattgagtttatattcaaccagctggaagtgaaggtactaatatacaaatggctcttgtttctgaatatgtgatataatttgtgaatctttggaaactgaattttttctatggagtgcaaatatagaagggttattttacaatgtttgttgtgaaaagaattcactttgtaaacaactattaaggctggaagtttagtgaaggtgcatagttttgaaagctacacaggtgaaaaatcaaacttattgtttgtaattttgctgttacatgttaagttactttgacagcaattttctaatgataatgtgatttatgatttaaaaggcctgaaccaaaatggaagttattccttgcgtctgaagtatagcaccatcaccttattaggtcacagcagagtgagtgtcccaatgtcgctctgacccaactcccttgatgatgcagtgtgtgtttggaggtgagttgtgtaaagtggccaaacatcaacaacaacaacaaaaaacacaaacaggaaagagcaattgggtaaagctgtacactgctcttttaaaatactattatgagatggacatttatgtgaagcatgaggggcaattctgatttgattggatattgtttttaaaggaactaaggtctttgtagctgcatgtcagctagtcatcagttacattttagagacaggatttttgtttatacttaaacttcagacaaattggcagcatataattgttcctttatacatgagataatatgatgatataactgatgtttaagaacattcttattgtaagacagtttctgttttgccacagcaacccaaaggacagttaagatatgtaccatatgacctttttgcatatataccaatgtgaatttacttttacattaatcatttcccccaaagagttcaccctatgttttgacagaacagttggcatttcaactgataaggtatttctagttttaaaataatttggtgtttgtattttgttttgaatatttttaaagactaattttaagaatgcactttctataaagtatatgcatcttagaaaaccaggaacaggggagaaagttttttaaatgatgattgaagatagattttattggagaaatgctttactgatgtgtattttagtgcattttaaaaacctaagtatctggtagtattccccttgtagtgagcatgagattaaagtttagaactttttaagacaattctttttttgtggttgtgtactcattattgcttgttcgtcttttgcaatttagataaatgatataacattaaactcaaggtggttgagttgcagtagggagtcggaagcaagccaagggaacatctttctctacaggggacttggcgattccaaacccccaaggttccaagaagaaactgaagacacctggaatctgtacttgctttgtgctattgagctgtgcttgttatacagaccttgttgcttgaccaacggatttagcatttaaaaacccaattatttttgagaaatcttgacctcttagcactttgtggacagttgagaatttgaggcattgttataatagattttccttatataaaactcaggcctttagcttagccctcagaagttacagactgcatgcataacttgttagttttcataactggacaatagatattttatgcaaagctatctgtagtgttagggagcagtttatgtactttttccgtttctcattgggggaaaatttccaggcaagcaaatacttttcttgttagtaaatactagaatttgtggatgtttcatgatggtttttaaagttaataaatgtaaggcccactaacagccacagagtctaaaaatacttacgaaatccacaaaggattaacaggctgctctgatgcttttggtagagtgagagagaatttggtaatctgttagagattatattgctgagaagctactagggaagactatttgtaaaatagtaaggactatatatatgtctaagcccctatggtagacttaaaaaatactaatttaaatgagttttaggttggttgatttgttggttggttggttttgaagtaacctgtttttcttcctgtcgtgtctttttgcagaatccagactccaaaatgatgcaaatcaacctgactggatttttgaatggaaaaaatgctcgagaatttatgggagaactgtggcccctgctgctaagtgcacaagaaaacatcgcgggaatcccttctgctttcctagaactgaagaaagaagaaataaaacaaagacaggtaataaccttttcttttctgtaatgtcgatttgagagtattggccaggctgccgagacaccttaggtagtatatgactcagctaggatcttcatgtagttttgctttgctgtactgtatttaaacattcagttttggttcactgctcctccctccaaccaaacattgagtttagaatgtcattttcccagtctagtgatttgctagatttttacaaattcttaatatgtgagtgcatgtagcttaaaagaaatttgaatttaacactgaaaggtaagcataaggatttttggtttgttgtttttttgagacacagtttcagtctgtcacccaggctagagtgcagtggtgtggtctctgctcactgcagctttcacctcctgagttcaag

SEQ ID NO: 52224 - DNA, 2143 bp, Homo sapiens
ccacatccaactcatttttgtatttttagtacagacgggattttgccatgttggccagacttgtctcgaactcctgacctcaagtgatctgcccgcccttggcgggattatagacgtgagccaccgtgcccagccagcataaactcttaatatgggcaatacagatgaactcccagaaagaataaggtcaatgtgaaagtgattttcttttttattttattttttatttttatttttatttttttgaagtaagcttgaaaacatctctttagttcaggtcttagagattaactttcagtgaatatttatttgtaaatgagtggcgataataccagtcttaatgcgtatctgtagtgtaggtgaagaaagaacaggtctggttcaaaagaagaggccgatgaaatgataatagcattggtgtttaacacacgtagaaagtagtcttcagtttgttctcaaatgttcaactatgtgtattttgaaaacctggtctttgcagattgaacaagaaaaactggcatctatgaaaaagcaagatgaagacaaagataaaagagataaggaagaaaaagaaagcagcagagaaaaaagggagcggtctcgtagcccaagaaggtatcatacaatagatgcataactgatgttttacaggtactttaggtcttaagaaacttccttagttaaaaaggaatctaacagcgctattcaaggaatttgttccatcatgcagttttcatggtgacctgtgccttgcctctggactaaagaaatctgtcatattttgtttgagacagataatttagccatgagtgtctcgcagatgttcataaattatccaactctaaattcctaaatcaaaactttaaactttttcttccatattgctttagttcataacagttaatttgggtttttaaaaatgtactctgactcactttttctttccatttcctttcttctaaaaagaaatctgtactcgaaatctgtactcattagccgttcatgtaatacttacctaattccctgttctgcttttcttagatggttgtactgaacccaaacttcagatcatttatttgttttcttcttccagtgagactattgttaggttcacatttttaaatccacggctcagcttctatatttgtggtgaaaggtgagaactccattaggctttttatttttagggttctgcttatttctttcataaatgtctgctggaattagtaaagagaagaggtaatttctttgtccctttcatttatatatttgatactaaaatctccttatggaagtaatatttatagagctaagcacaaattgtcatggtggtaactacttgactattgatgaagtatgtctgccattttccttctgtgtgaataagagaaaaacccttcgagttaggcaggctactgttaagaaagagggcttctcctctcgcaaaaaagctatcttctggatgtttgatgtatatttctcttttctgaagaacatgttgctttaatggtattagtcatttttctggcatactgaggctcttcctgatgaactccattgtaatctgtccgcatctaaatgttttatgtttgggagtttgatttgttgtcaaggattatcattgtttgctttaaagcatcctctttgcctctgaaaagttggtcttttgatctctgggaatgattaagaacctaagtctagagtcccaagttagtgcttttctcccttataactgatatactcgagaatgttatctttcatttgcttgtctttctcttccctgtcaagtagattaggttagcatgtcttatttccatagggaaacatctcagatataaacagtagtgtaactaaagattaatcctcacttctccctttgactcctctcttccaatccatgttatttaaaaacctgaaaaaaattactttcatcctagacgcaaatccagatctccttcccctagaagacgatcttcccctgtcaggagagagagaaagcgcagtcattctcgatctccccgtcacagaaccaagagccggagtccttcccctgctccagaaaagaaggaaaaaactccagagctcccagaaccttcagtgaaagtaaaagaaccttcagtacaagaggctacttctactaggc

SEQ ID NO: 52225 - DNA, 1058 bp, Homo sapiens
ggtgaaactccatctgtactaaaaatatatatatatatatatatatatatatatatatgtacacacacacacacaaattagccgggcatggttggcacatgcctatagtcccagctactcaggaggatcacttgagcctgggaggttgaagctgcagtgagccaaaatcatgccagtacactccagcctgagtgacaagagtgagaccctgtctcagaagaagaaaagaaaatgtacatggttggaattattagttgctctctgggtttcagtgataggtacatacatacttatgtgtcttttggagatagagacaagtctgtgaattttgaaaagttttagaaatactttattacatcattgtgtaatgatttagaaggctgagtacaagaaggcaaaaaaaaaaaaaaaagcttttgtttccacagtgacattctgaaagttcccaaacctgaacctataccagagcctaaagaaccttctccggaaaaaaattccaaaaaagaaaaggagaaggagaagacccgaccacgatctcggtcacgctccaaatcaagatcccggacgcggtcccgctctccttctcacactcgacctagacggcgccatagatcccgatcaaggtgagttgtggctttaagatcaacaaagatcttaggttttatatactactctactgggtacaattagataaataatttcaaagtggtagaagatgtttagtacaaatattttttgaatgtacacagagaatttgaggacacttttctgtgtaccataaaaatctacataaatggaaaattttgatctttgaaatttattttttagatgtggccattgagaaaactaagccaagaaattcctcactcctggtttattcaggacctaattctctttgttatggcagatcgtattcacctagaaggcggccaagcccaagaaggcggccatctcctcgaagaagaactccgccaagaagaatgcctcctccaccaaggcatagaaggagtagatctccagtaagacggtaagattttttaaatttggaagtgtcaagt

SEQ ID NO: 52226 - DNA, 1030 bp, Homo sapiens
ctagacttcaccaagaaatcatactaagtaagagaattggccaccttctctttggcttttaactggcttctgaaaagtagctgattatagggccagtaagctccttttaccagtattaaagtaattcatttgctgttatactttgagaaaagtatttttatgaattttttataaaattctcagaaaattctcattatagaagtaatgaagcttataagtaattcagacagaaatagcataacttggaagttttccataatccgtgggggaatatatctatattccatagatataattgctattactagtttagtgtctggttatttttcaaaaccccaactgtaccagtgttcttttttttacatcattctaaaatgagcataagataaaatatttgaatcttggatatatcactttaaacaaaaattagtggctaagtctacccaaagtagagtcctagtgcactggtagcagtttttgtgccttcttgcaatacgtttcacctggcttgggaagaaatgccgatgattaagcttccagttattttggacagaattttttgtttgagtcttttaaagttcttttcagggaaccaaatcaatttggaaataaagaggggaaaaatcaagtaagctctgtaaagttactttgtttctgcagtcaggtttttcagagtcccatattttgaaaattttctttggggaggggttgttaagatatattgaactattactactgttgcaaagaattgatgtgttgtgctcatagaggaaattagtgaggtaaatggtcagtcaattttcaggcatcacacttttctaattcccttttaggagaaaagtaatgctggtgcttcctagtacaagattagtggaaacagctatttcttatactggagttttgcaaacagcatgtttaaattgtgcttactcagccatttagcagtcaatattttacagattgtttaagattccctttcagccagtttttatctcacacttaaggtagggtttctttttttcaggttctc

SEQ ID NO: 52227 - DNA, 1029 bp, Homo sapiens
atagcattcaacctgacaagttttataactggagagagaacacagacagaagtatttatcagattaagttgtttatattaatctcagaactagctgtttcctggcctaggttatggttttttcccccattcttttggactcatttatgtgcttagctacataaactcaaaagtcggattaaaatagctgtatttttgtgtaaactgttcatacctgtaaggccgttctttataagtgtgcaattagtgaatatgaatactttattccacagaagaagacgttcgtcagcatccttgtctgggagtagctcatcatcctcttcatctcgttcacggtcaccaccaaagaagcctcccaagaggacatccagcccccctcggaaaactcgtaggttatctccttcagcaagtcctccaaggcgaaggcacaggccatcacctcctgcaactccaccacccaaaactcggcattcccctacaccccagcagtcaaaccgtacaagaaaaagtcgtgtttctgtgtctccagggagaacttcaggtaaaggtaaaaatcaaacacatatgaaacatggtctctctttctttggctacaaagcgtagtcagttattgccccctgctcactctcaaagtatgaaatagctagataatatttgtatctaatactctctgtaggtttacttataagcctacctctttcctgctttaaaatcttggggcttttttatgtgtaaaagggttttgtttttagcaatgccctgtggcattgcgcaggtggagaaatcttttaccagccgtgggctgtttgagttggggtaacatatcaaagtttgcgttggcatgataagggatcattttattactatgagaccagttaacttttttttctcctgaagatttttggtttgatatcttaaataagaggacttcatattctcttttagttctttcttggtcgcattgcgctcccaagcaaaggacatggtgtcctcttaaaagctgatttgtttttttaatttaggttctagg

SEQ ID NO: 52228 - DNA, 1106 bp, Homo sapiens
gcacagatgctaatttcttgtgttttggcatatactttttgcaaacaagacaagagtggatatgtacataggaaagaagtaagccatggtgaaaataagtatttctgtgggttttgggacagggcttccgtgttcaaacaacctacccaaagagaggcactacaggcagtgtagtcagtctcccctgtgaccactggagctgaatattggtttgacctacttggaaataacctctccccaccaccccgctaaatagagccagcatctcactctgtcactcgggctggagtgcagtggcccagtcatagctcactgcagcctccaacccctgggattacaagtgtgagccaccacacccggcccagacaaccttttatattaaactgatcccagccctctgtgatgaaatttcagagctagaaaagaccttaacagttgtcatcaagaaacagattttcaggttagttgacttggtcaaggtcaaccaactaggaataaaacttgagttgtcattcccagttaaatagtgaatacttttcacaactttcctaccccagaactcttctttgattgctaaaggtgagaaatggagggcagggttgaaattctttagcttctctatctggtagtatgatttcagaaattactttgcagtttctgctgcttagaacagtaacatcattgaaatgtaatagatattacagttaatattttccctagtggccactaatcagggctttagggctctgctcttgatagtgggcaaatggagtgggagggaggcaggaaaagtgttttggggaacttacaggttaattatttggaatacagtatacagtcatctgaagggatcttaggggaaacatttgtaattactgacatttcataaattggcattatcttagtacataaaatagtgcttgaaatcagtggcacagtcagcgaagtatgttaacatgatcaatactggtggtgacggtgtggtaattttgatttatttagattagcttggccacatacattgtgctatctggacacttaaatggttattttactattgttggtcacagagtaacttatctttataagtgatcttttgggcaggt

SEQ ID NO: 52229 - DNA, 1044 bp, Homo sapiens
tgggcacagtggcttgtgcctgtaatcccaacactttgggaggctcaggcaggaggattgcttgaggtcaggagttcaagactagcctgactaatatagtgagaccccatctttatttaaaaataataataaatttttaaaaattaaaagaaaagcatcttgtatagacctttttttgtacgtaagcttttttccactcttattcttttttagtgacaaaacataaaggtactgagaaaagagaatccccttcaccagcaccgaagcctagaaaagtagagttatctgaatcgggtaagtttgttgtttttttttgtgattttggtttgtttgtttttgtttttcttaaagctgattttgattttttgcacatttggtcatccccttctgcttgaagattaagtatagggtaagagctaagactctgaaggcagacagacttgggtggaatcccccattccagaatttaactgtttctgttttaattaacttatctgagcctttcttctttcatctccgaaatagggacagtagaggtttttgacagttaactgtatctgcttgtaaaatgcttggcaccagcctgacctgtagtaaatgcctaaataaattttattatatttggtgaagatagtctaaatcagcctgtgaattggcattttaaactctttttaaaaaaaatatatagtagttgtatttttgatccaaccaaatgaaggtttgagagactattttcctattcaaattgcaaattttctatatgcttaactaaagaaacactttctaaatgcatccatctttcagaagaagataaaggtggcaaaatggctgcagcagattctgtgcagcagagacgccaatacagacgacaaaaccagcagtcttcatctggtatggatggtgatgaaagttttttttctacctgtatttcctattaaaaaatacttggtatataaacatctgtgtgtgcagcatgagtacttacttgcctacatagaaatctgtctgaggaggcaggattgtttctttttttggttttaagtc

SEQ ID NO: 52230 - DNA, 1826 bp, Homo sapiens
atttgcattttttattgtaagaatataccaggctgggtatggtggcttaacctgtaaccccaacactttgggaggctgaggtagatggatcacttgaggtcaggagttcgagaccagcctggccaacatggcaaaaccttgtctcaactaaaaatacaaagattagttaggcatgatggtgcagacctgtaatcccagctactcaggaggcacaagcggtctttctgccttggcctcccaaatgctggggttaaaggggtgagccaccgtgcccagctcaaacttcttagagtatgccatcttgattggattacactgtggaaattatttctatgtcttatttaaataatatgcttggctttgaaatcattgatcatatattgataatgattctgttcagaactgatggcctgtatacatgcttgcttaccctagtgaacactccatccacctagatttcagaaaacttggacagattcaagcacaaacctaatgtaatatttttttaattttgtaattatagactctggctcctcctcctcctcagaagatgaacgacccaagagatcccatgtgaagaatggtgaggttggcaggcggcggagacattccccttcccggagtgcttctccatcaccacgaaagcgccaaaaagagacttcccctcggtaacatctttgcttcagtgatgttcactgatgttctgtaattgtgatgaaatttgataacttgggattatttgagaatttggttaactccttcaagtatttggatgtggttggatttttgtttgctttttagggtttctgttttgttttgtttttgctttattggtggttattaataattaatttagaattggtaaattttaaaccaccatgtcatatatgtgtgcatgattagaaaaataaaccaaactattatagcagtaactcctgaacatctttgaatatttaaaaatgtctccattaatggtacttaatccacccaagtaaataatttagtgaatggaattcttgacatttgtttttctccactgctctcaggatgcagatgggaaagcgatggcaatcgccagtgactaaaaggttggttagacactactttgtaaattagggttacatgtcaaaaattgtagtgacttaatttcctatttaggtgacctcatctcattcttaaatatatggtggctgtggctgtgaatgtgcagatcctaagttgttttggtttgagtattttttttaacacattagattaatgatagggagaattatacatgagctatttggtttagacccttatttgaacttagatttttaatatctggttgtgctcttttgtgataatttgcatcaacttacatcaagcagcacgcagatttttaacagtatctggatacttttccagagataggattattgctccttagatttggggggagggactttgtatttgtggtgacattagggagggcaaggaaaaactagggagaaactttagaaatattaaaagtgagaggatcacgaggtcaggagatcaagaccatcctggccaacatggtgaaaccccatttctactaaaaatacaaaaattagctgggagtgttggcgcgtgcctgtaatcccagctactcggaaggctgaggcaggagaatcgcttgaacccaggaggcggaggttgcaatgagctgagatcacgccactgtactccagcctggcaacagagctaaattccctctcaaaaataataataataataataataataataataataataaataaaagcgaatggaaggctttggccctgttcagtctttccagtac

SEQ ID NO: 52231 - DNA, 1044 bp, Homo sapiens
cagtgtccaaatgctcattcagagaggataccacataggagacctctttaaagtgcagacttcctaaggtgaccataatagagttttgctaatacagttacttggttattatataataactgatgttcagttaatacagtgcaagattctgttttcaaaaaacgttaattttgtatagatgttaaaagattgacaaattcacatcttctgaaaattgcaaatttttgttaatcaaaatgtctttttttcttttttgtacttagtcctgcagacagtgtcctgtgttgcagtcagctgagataaacaagttttattgatatttaagtgagaatataaagatagcatgttcacttataaatatattccctttgcctagtgctaactacagtatagccaaacctactgattacttttcatcctgtttctgtattttgttgagcctttcagcttaattatgtatctttttcctaggactccttctcctcccccacgtcggcgctcaccttctcctagaagatactctcctccaatacagaggagatactctccttctccacctccaaagagaagaacggcttcacctcctccccctcctaaacgaagagcatcaccatctccaccaccaaagcggcgggtctcccattctccacctcccaaacaaagaagctccccagtcaccaagagacgttcaccttcattatcatccaagcataggaaagggtcttccccaagccgctctacccgggaggcccgatcaccacaaccaaacaaacggcattcgccctcaccacggcctcgagctcctcagacctcctcaagtcctccacccgttcgaagaggagcgtcgtcatcaccccaaagaaggcagtccccgtctccaagtactaggcccattaggagagtctccaggactccggaacctaaaaagataaaaaagtaaaaatattttatgcttttccattaggaatacttacatagctgtttatatttggaagcttccccccacccccatataaaaggaataagttatgaatatgagctttt

SEQ ID NO: 52232 - DNA, 2735 bp, Homo sapiens
tgtgtgtcatgaggaagaaccagtcatccccactctaaagataggagagctcagatggtagctagagacatggcattcatacaggcatgtgtttagactaatggctggtaccatttattaaaagtctgctacatgttaggcaagtattatgggtgatttacagatattctcatttaattttcacaagagctttatcaggtagggattattacacttattttaggtaaaaaggtctcagaaagagttcaacaatttgtctaaggtcaaatagttcaggagctggaattgagctcatcctggagatagcccctgacttttgaatacttttcttggtgataattggccttgggccttccccactcacaccctccaaagcctttcggaaatcttgagatttgtccattggggatttgaggaaataaaatgttcagttggacagaatattaatcagattgattataaatgctgggtgttgtttttttttcttcctagaattcagatcaggaaggaggtggaaagaaaaagaagaaaaagaaggacaagaaacacaaaaaggataagaagcacaagaagcacaaaaaacacaagaaggaaaaggctgtggctgcagctgctgcagctgctgtgacccctgcagccattgcagctgccacaaccacattagcacaggaagagccagtggcagcgccagagccgaagaaggtatttatgaactctgtatatggctgtcttgcagtttacgtacagatagcaaagtcattttgttttgagaagtagcaaaattgttttttctactaattagccagttactctgagataaaagtcacgtaccatacagttcacccatttaaagtttgtggttccctgggttttagtatatcagttgtgcagcgatccccacactttttttttttataaaggtgacttatttatttaaaatattaactatccacagtggccattatatttgcatacagttcagtactcaaaagatttgtgaggttggtttttttttttgtttgttttttaattttattattattatactttaagttttagggtacatgtgcacaatgtgcaggtttgttacatatgtatacatgtgccatgttggtgtgctgcacccattaactcgtcgtttagcattaggtatatccctccctgctccccctaccccacaacagtccccggtgtgtgatgttcccctcccacactttgattctgctctttactcggcatttcccaccagggtctcaagacttaaccgtgtaaattctgttttttttaggagactgaaagtgaagctgaagataaccttgatgatttagaaaagcacctgcgtgaaaaggccctgagatcaatgaggaaggcccaagtgtccccacagtcttagggggaaatgtttgttatgatgtaaattttatttggtttgtacgcagttcaatttcaaaattgctaaaatgtgtttgagctttagactataacatttgttgtaataattgctaggttgaagttcaacatgtaaaaaaagggggcatggatttacattgcaaaaggtgtccacagtgtattagtgacattctttcattgacagctgacataattcattgagtgaaatattttaagccaaaaaaaaattccctttttaaaaaagggggtttaaatactgttggcatttttatggttcctttaaatgccctagctattcccagaggggtttttttgtttgtttttttggttttgattttctttttgtttttctttcttcttcttatttttttcatttgagtcttagctcccatttaagttatgcttctgaccttgtatggtctgtaagcttgcccagaaataagaccactgttttgaactaccacaaaagtataaatgaatattttaatgccacaatctttcctgttgcctgtggagtctctgctgaaatgaatcaggattcgagctctaggatgagacagaaaatgaaagcatgttgtttgccaggacactgtgggtttatattgatgtgtaacaagttgatttggaacactggactctcattctgttattctggttttgttttttttgttttgttttttttcttttgtaaaggcaatgagctagtcccagaaaggatccttcagttacatacaatttgtttaatgaaatgtcatggctctgttcatatttttgtcttgttcttccaattggtatatacaactttcagagcctcttgtatttggaaggctggaagggcccagactttggaatagtgtcttggtttcactgtttttgttttgattttttttttgttttgattttttttaaactaaagctatataaagcttgtggattaaacagaataaatttctaaatttaaaaattttgccactcttacttagtagtgcttatgtaaaccttttggtgtgttgggagttgggcaggggaaagaaaaggtgatgaaattaaggttttaccatctttatttcaataattactgtggtgagtgctataaagggaatcagcatgtgattggaacatttagaatactggtgggagaagtccaccaggcaaagagaacaggattgcagtcagacaaacagtgtctgtgtcttccctgaggcagaaggagcctgctggcatgttaggaagtgaacaaaggctaaggaatgactggaacaccctctgtcaggggcggggtgggggggggggggttgtgtgtgtgtatgtgcgtgtgtgtgtgc

SEQ ID NO: 52233 - DNA, 1790 bp, Homo sapiens
gttactttgagtggcagatatagtactttgagatgcgtagaatgtaggaaggaacctgaaatacaagaaaggaaggaggccgggcgcggtggctcacgcctgtaatcccagcactttgggaggctgaggtgggcagatcacgaggtcaggagatcgagaccatcctggccaacatggtgaaaccccatctctactaaaaatacaaaaattagctgggcgtggtggcgcgtgcctgtagtcccagctactcgggaggctgaggcaggagaattgcttgaacccgggaggcagaggttgtggtgtgcggagattgcgccactgtactccagcctgggcaacagagtaagactccatctcaaaaaaaaaaaaaaaaaagaaagaaaggaagggtggtgggtggaaaacagcatggagaagggaaacaagtgggccagagatgagttaaaaaaaatttttactgagtgaggaataggaaggaatttccataaactcaaaaaaagtgcatccatgaataatctgtaaaacatgatacttaacggtgaaactttagaacagtattaaacttagaataagctactatcgggccgggtgaggtgactcacacctgtagcattttgggatgccgagatggggagatcacttgaggccaggagttcgagaccagcctggccaacatggtgaaaccctgtctctactaaaaatagaaaaattagccaggcatggtggtgggcccagctattcgggaggctgaggcatgagaatcgcttgaaccggggaggcaaaggttggagtgagccaagatcaagtcactgcactccagcctgggcgacagagtgagacttcgtctcaaaaaaaaaaaaaaaaagataaagctattatcagttatggctctattcagtattctattattctattggaggagctaatcaaagaagacaagaaaaattaagtatctgaattaggaagagatcagtgattaatgccctgcttactattaatttcatctttcagttagaatagcagaggggcgtgtgcagttttccaaacttgagtcacttgcatcccctttctgtttttcatatttgtgttgagaaccactgaaaatcatccttcctaccactagttgtaagcctttctcattgggcttggtggcagagaatcagggttcaagtcacagttctttactccttggttgggtgaccctaggcagtttgttttcactctttaagccttgtttgtctcatttgtgaaataagaaatgttttctgctacccagtgattcaacataggcaaactttgcactgatacagatcaggttttttgtttttttttttttttttttttttaatgagatggtgtctcgctctgtcaccctggctgctggagtgcagtggcgcgatctcggctcactgcaccctctgcctcccaggttgaagtgattcttctgcctttgccttccgaggagcgcatgcaccactacgcctggctgatttttgtattttagaagagactgggttttaccatgttggccaggctggtctcaaactcctgaccttaagtgatctgcctgccttggcctcccaaagtgctgggattacaggcttgagcctctgtgcttggcccctagaccagtttgtttgaaaggggaaaaaaggacaggtaaaatgtggtaaagggcattcttgatctcttctcaaaacctacgtgtgggaaatgcaaatgggggaaatacccttgtaaatatagttattttgaaagcagtggaccaggtgtggtggcacactcctgta

SEQ ID NO: 52234 - DNA, 2156 bp, Homo sapiens
ccttggcctcccgaagtgctgggattacaggcgtgagccaccgcgcccagcctaatagtatattatttttaaatgtgggctctattagtaggatcagggagttctgtaaatccttgaaattacagtaaaaaattctaatgtgaggctttttttctggaaattcctaaaccaaggctaagaaccactgttctaaaagaagtaaatagtggaattcttagagtcaagaatactttatataagcaaggtataaaagaagggcttgggctagatgatcacaaaggtctcttctagttattattaactatgacttaaagaatgtaccggcatgaactaagtgctaatactgagttaagtactatggaagatataagaaattattaaacagttaatttctttaggtttacaaattttattggaaagaaaacaatacaagatggtccatgcttaaagagtcaagtggggctcacattaagtagggctaggagacatggggaaagatggaaggaggcttaaacttgaccttgaaaaaggaggtgaataggtgggttcggaatagccaagaatgggaatgtgagttttgacattatgtggaaactccttatgcaggaaacaattggtagattgatacctaagaaggaaccaggagtgattcagatctatagtgccagggagacaagttatttaaaagttgaggatgagacttttaaaacctaacttgggtttttgttaatgtatacattttcctaacttttttcattctccccacactttcctgtgtttttggattgctgtctgtttaataacttttcagtggcacttgggaaggtgcaaatggattgtacagatggactgttttgacagtttaaagtgggaattctttatattgtttcaaggacaggcttcaaacttccccccgtctttgttttttctaacagaaaaaaatgaaataaattttctataggaaatgatgctgaaaactgttctggtaattaacaaaagctaactcaatattcagacaatattaccttgaatctaattgatttgccattcatttgaggtttccggggggaaaattcaggagacagaaatgaatgtaaagtatgaagttaatgaaaacctattattttaactttttgcctgagctgttcctgaagacctaataatgctacttttggcaaaggccaaatttgatgattttggtttaatgtaaaaacctgtgagaaaggagcctagaatggggaagaggcaggaggctttgagcctaggagactgagcacacgaaaagcttaacagagtatgaataatgataggaaagaggcaattgggagaagaacctggctgtcaggaaatgtcacagttggtttgggaagatgcctgcagaggtgcctagaagccagtaagtaaggatggtgagccatccttttccgcttcctgtttcgttagagctgtggagcctccgtgttctgatgtcccctgagtagggaattgtgagtccataaaaggaaaatgtgttaggcaggatgggaagtgtgattaaggcatgagttaagattttggtcaagtagaggagtaagctaggatgggtttgcctgttttagacgcttgcatagagaatggaaagggactttctgaaggaaaatgacattaggtcatggttacctattgtccaaggatgatttaagacatgtaaatgtaatttagggcatcagctagtgaattttctcatggcttttaattatattgtctatttcgagacttgcctcttatctctcagtggtcagttccagatattggtataagaaataagaaataacaatgataggcccactgccatggctcacacctgtaatcccagcactttgggagaccgaggtgggtggatcgcctgaggtcaggagttcaaggccagcctggccaacatggtgaatccctgtctctactaaaaatacaaaaattagctgggcgtggtggtgggcgcctgtaatcccagctactcgggaggctgaggcaggagaattgctttaacctgggaggcggaggttgcagtgagctgagattgtgttactacactccagcctggacgacagagtaagactccgtctcaaaaaaaaaaaaaaaattataggctgggcaaaatagtgagtcctcatctctat

SEQ ID NO: 52235 - DNA, 1076 bp, Homo sapiens
aggctggagtgcagtgacgcgatctctgctcactgcaagctccgcctcctgggttcacgccattctcctgcctcagcctcccgagtagctgggactacaggcgcccgccaccacgcctggctgattttttctatttctagtagagacggggtttcaccgtgttagctaggatggtcttgatctcctgacctcgtgatccgcccgcctcggcctcccaaagtgctgggattacaggcgtgagccaccgcgccctgctaacattagtgttttgaaaaagtaactattagaaccagggccaggaacggacctgagttcaacatgcatatattttgtacctttaagcatcctttcataggtttctttgcttttcttgaagttgaaatacaagctgtttcttgaagctgaaataaactaggagtatgacaggttttctttctctttttttggtaacaaaattattacttccaacttacatgtgaataactcattcttatgaaaagatttagttctcattataatatagttgtaaaaatgtcaatcacttgtaataacttaagtattgaattttaccactgtgcagcatagctatttatttgtgtatgtgggagaagaaaaaagagaatctgaacaaatattgaagaatacaaaaccaaacaatcagatgaaagctgaggtaattaagaactttttttttttgaaatggagtctcactctgtcgcctaggctggagtgcagtggcgtgatcttggctcactgcaacctccgcctcccgggttcaagcgattcttctgcctcagcctcctgagtagctgggattacagacacccaccaccatgcctggctagttttttttttaatgtttttttttttgagacggagtttcgctcttgttgccgaggctggagtgcaatggcacgatctctgctcaccgcaacctccgcctcctaggttcaagcaattctcctgcctcagcctcccaagtagctgagattacaggcatgcaccaccacacccagctaattttgtatttttagtagagatggggtttctccatgttggtcaagctagtctgtacc

SEQ ID NO: 52236 - DNA, 1266 bp, Homo sapiens
gtgatctgcccgccttggccttccaaaagttctgggattacaggcatgagccatcatgcccggcccttagtctttttcttaataagtttgcatgaattattatttatttatttttatttttatttttttatttttgcttgcatgaattattgagaatttatatataatattttaatgctgttcatgacagaagacttgaatgagtgaaggatgagcactgatctgatatgtaacatgtattgaattaagtgagttggtttaaagaaaatttatttaggttttataaaagaaactcagattttgcctatatcttctttagaacatttgatctttggtggaagaaagcaggtcatgaaagtatgacatgaaatgtgccatcacctagaatggatattgattaaatggtttgaaggtagatcctcctcttgtgctctttaggagaaatctattctaaaaatgaaagttatttttcagtattaatttcttccttcaatatctatgtaataggtaagatatgtccattttatagttcaagtataataagaaaccagtctttgcctaggaacagttgagcacagtataggggatcataatagaagcaaacatcaattgaatactttccatgcactaagtgctggagaggtaaaggagtaagaatgagccccttgtgttcaaggagctctattataaccaagtagacagtcagatggtgagtaaatgagccatggttgttggtggtaggttcttagcaccatctttttcctatacaatacgtgacttttttttttttgtctcatgcacttttttattctagctgaaatagaagcttaagaaatgatttaagtgggaaattaaatgagataattgatttagagatgagttaaatgtttgtgttgtattctaacagtttaagggttgctagtattactgactctattacactgcttattatcagttgtttaaagaaacttttgaccaggcatggtgactcacgcctgtactcccagcattttgagaggccaaggtgggtggatcgcttgagtccaggagttcaagaccagcctctgcaacgtggggaaaccccatcgttttgtgttttgcaaaaacacaaaaatctgggtgtggtggcacgtgcctgtattcccagttgcttgggggctgaggcaggaggatcacctgaaccttgggaggttgaggccacagtgagtagtaatccataatcgtgtcactgccctccagcctgggccacagagtgagaccgtgtct

SEQ ID NO: 52237 - DNA, 1236 bp, Homo sapiens
tgtgccaccacacccggctaattttgtatttttagtagagacggggtttctccatgttggtcagggtggtctcgaactcccaacctcaggtgatccacctgccttggcctcccgaagtgctgggattacaggtgtgagccaccacgtccggccaaggctcacacttataatcccagcactttgggaggcgaggcaggtggattgcatgaccagcctggacaacatggtgaaaccctgtctccacaaaaaatgcaaaaattagctgtgtattgaggcacacgcctatggtcccagctacttgggaggctgaggtgggaggattgcttgagcccaggaggcgaagtttgcagtgagccaagatagtgctactgtactccaccctgggcgacagagcaagaccctatctcaagggaaaaaaaaaaaaattcatactctggtatcttctggcatttcacagaagggcatctggattcctgccaaaattgattcttttgtcttttattaaaaataatctttcaagcaaatttgagattcaccactaaagccctaaatttgtttttatttactttgtgttttaactctctctcactgcaggtttgttgttgttgttgttgttggttttttggtaagtacagagactacaaatttaaaaaatctttcattaaacatgtctttactaagtgcctactaggaactgctctaagctctgggaagcaagaaaatgtaccctcaggtgtcagtaatgaatgagctataaggaaggcgtactatacacaattatcttagatgggataatattttccactagagttattgtaactcactgcctgggaggccttttcacttctaggaagatctggttttcctatatttagaatagatactgttcccattgactgttttctgttggatttcttaaatgcatgagatagaagaagtatatatggaaaagcatttcatatttaattgaaataatatatacatttatggagtgctttctatgtgccaggcactgtgttgactacatctatgaaatattaactcatttgattgttactcaataaaatgtttgctgaaggaatatatagaagcttttatttttttccgtgcacaggcttaatttcagaggaggttgggaggaaaagaagaactaaaagatcacatgattgggaaaaagcaaatgcctaacaagaagccagagaaataggtcgagagggtgatgcaaatgactgggct

SEQ ID NO: 52238 - DNA, 1133 bp, Homo sapiens
agagtgagactctgcctcaccaaaaaaaaaaaaaaaaagaaaaagaaagaaaactttagcatgtctgtaattggtagatataatctctatcatttatttaatgataattaaaaatagcggggcatggtggcacatgcctgtggtctcagctactagtggggctgaagcaggagattgaggctgtagtgagccactctgattgcaccactccactccagcctgggtggcagagtgagactctgtctcaaaacaaaagaaaacaaacaaaaaaacataatgtaagaatcatgaagtgactttaaaatctttattttataataatgttataagttttctgaagctacttaatttatcactatacagaataaacagatatataaaaaatgatcagtaagtttttgtttccctactaaagccagaataatggtcatgaggtaatagatagcattgggtgcttactatgggccaggcacagtgtgccagccgtttgcatgtgttagctaatttaatcctcatataaactttgaaataggtgctatcaatactgtttaacacatgagaattagagagatcattgtttgggtatggttgcagggccagtaagtagcagtactgtgatttgtactaacgtctttgggatttcagaacctgaatcaataactttgtttatgttatttttctctatttatttgaaacttgaatgctttcctaacagaatttcttatgttctgttttcagtcaccctgaaaaaaaaattctgagaatatttaaggatatttctaaaacatactaacaactagtgagcctagatggttcattagatgactttggttgctttcagttctcttggtaaaatttgaaaggcaactaaaatttccattacctcacctcgttgcattttgggggcctggttaattagtattttataaagcactttagagggtttatttataaacttgttaaggaacctgacttgaatgtcttttttttttttaaggcagagtttcactgttgcccaggatggagtgcagtggtgtcatcacaggtcactgccaccttgacctcctgggctcaagtgatcctcctcctttagctccctgagtagctgggacttgcagtgccaccatgcccag

SEQ ID NO: 52239 - DNA, 1036 bp, Homo sapiens
ttttaaatttaaaaaattattatgttcttctaaagactaagggactattttcttcatcttttatatctaccccctaccacaaacctttatatataggagataattcattaattcagtaagcatttattagtgttttttggcaaattggtgtgcatagtataggaatataagcatgtaagagagaatatattaaatattttctgttattgtgttctatattacctcatagtaaaataccagagttaaaagtagtattcagttattgaacttgagacatgtaattggggttttgtaactagctactcactatatagctattggtctaaacctaacagattggtttagagaactagaatattatgtaactggaaggccaggttcaagtcctatgtgtatcctaattgatctgctacctcatctgtcaagtgggtgtatttcttggaggtgatgttcagtccagtttgtattattttatatgccaaggtagccttaggcttggcttaagcttaggcttaggcagaaagttgagccctgagattccaacgtcagatccagagaattaaattctcataattagaagcaatctattagataacaaaaatagagccaatacaaattcttcatgataatggaggcagtttgccaaagaaagaaaaaatatttcaggagtgaattctttgacccgaaagaatatattttatttcccaggtgagctcctgaaagaaagtttaaggaaagattttgtttgttgtatctaaaataaagcagacacagaaccattcttcttcttcttttttttttaaagccagtcaaatttatagaattttccttcatcatatttgagtaacctgtgcattgaaatccgaagtaaaatatttcagtaagaaacatcctgctatgttatactcttcagatatttgaagttttaggccagcaaagaagatagacaagaattctgaatattaactttcacagctgaaatacagtgttgaatatataatttttgcggaaactaattttgtaatgtatatatata

SEQ ID NO: 52240 - DNA, 1044 bp, Homo sapiens
gaagatggagaactttgtgagacctattttttttttttttttaaagacggagtctcgcactgttgcacaggctggagtgcagtggcgcgatctcggctcaccactttaagggaatctcctgcctcaacttcccaagtagctgggattacaggtgcccgccaccacgcctaactaattttttgtatttttagtagagatggggtttcactatgttgaccaggctggtctcaaactcctgacctcgtgttccgcccgccttggcctcccaaagtgctgggattacaggcgtgagccactgcgccgggccttgtaggacctaatttttaaagactattgtacgctttatggtttttatttttaatgaaactattatgttaggtaattgatcataatttggtcatttactgaaagaaacagcaacagataacctttgaaaactactggaaggtgaatcatctctcccattcaacatttgaatgacttcaattcacagtgacttagactaaagcaagagaacatcaaatgtactgttataagctgaactactaactcagaggaggaaccactggcaagcccataaaactgaaactcacaaaaccatgatttattgggagatgtttatgtcacttttgagaaaatattaaacaggtgcttttttatttgtagtaaggtcatggagtatattttgagtttcattgtattctaaattgaaattttgtacttttagggtattctgaaattcttaagtgattcagattagactttggatgctataggtaatgcaaaggcagaaaccatttcttctcttattcatcaccagatctctggtgtttcgtataggtcctcacatggctggtgaatgaataaaaaaaaaaaagttttaattttaaaagattgatatctatctgctcttgaagataatatataaatgatggacaataaaagtgagctgtaatgtatttagaaactattaggactgaagtggaaactagattaataatttaaaaaacactttatttggaaataatttcatacttacagaca

SEQ ID NO: 52241 - DNA, 1565 bp, Homo sapiens
ctgaattaatagaattattagtgaatgtttttctaaacctgttatcagtatacactttactcctaaactgttatcaagatggtaaaaattatagactctatatttgggccaggcaaagtggctcactcttgtaatcccagcgctttgagaggccggggcaggtgatcacttgaggtcaggagttcaagaccaccctggccaacatggtgaaatcctgtctctactaaaaatacaaaaattagtcgggcatggtggtgagtgccttagtcccagctactcaggaggctgaggcaggagaattgcttgaatccgggaggtggaggcaaatcacgccactgcactctagcctgggcaacagagtgagactccatgtcaaaaaaaaaaaaaaaaaaacacaaaaacaaagacaaacgaattatggaatccatatttgaaatcttttcatgggtactattttttttgaagtattcctccacagattgacaataaaattgacattaaaagtagacagattaacaatatttaatccaaatcagtaaaattctttaactggttgaactgggacaaagacaaattcttagtgacaaggggtcttggtgtgtgtgttttgttgagtccatgattaatttgttcaattagtgacttgactatcagtcaaaccagaatatagcaaatctagtaaagaataattaatagtagtaaagcgttctgaaacaaataattctggttctctggtgttaacttttgtgaggttttttgttgttgttgttatatgtttatatagtgtccagtagtgtctttgatatgtgtgaattaattttatgccctgaaaatcagcaccttcaaaaaggaactcgatttttttttgttattgttctctttctggagaaaaaaggagctccatttaaaagataaggcctacatacctagtacttttttcttcgttgggcaagtcaacttgttacagatgggtcatcttcaagagccagctccggtgttctctagctatgctgcactcatttcataccaagcagctggaactgagtcaccagcccagcttcctccaattgttgcaattgtactgaactacattttaatagaaattaagccactcaagtctcttaaaatattagctcctataggattcctccttttcattcgtttcttttccttttggtttttgtttttatttccttttcttcatctagaaaaaaaatgggaaacaacagaataatttatttcatctgaaagactaccatgatacatgagggtaaaaataatacaccccaaaacactggagaatatttgcaccctgttgcaaggcatgagttctgtgcactttgctcttgatgtcacgtaagggaaatatttgaatgagttttaatcaagtgttgagtatttactgaaggcctttttggaagtaaaccaaagatgtcttgaaattttttgccattgcctattggctcagtttcatttatctcaaactgcaattcttacagtgttacatttctgtgaaacatctgtaaaatgagcctttgtgggtcaaacagaacacctgaggcctg

SEQ ID NO: 52242 - DNA, 1045 bp, Homo sapiens
ccaagtagctggaactacaggtgcgcaccaccatgcccagctaatttttatatttttagcagagatggggtttcaccatgctggccaagctggtctcaaactcctgacctcaggtgatccacccgcctcggcctcccaaagggctgggattacagacatgagccaccatgcccggacaatttatttattttctttttgagacagggtctctctgtcgcccaggctggagtgcagtggtgcgatcatggctcactccagcctcaacttcccaggctcaagtgatccttccacctcagcctccctggtagctggtactatagacacgcaccaccatgcctggctaattttttatgttttgtggagacaggatcttaccatgttgcccaggctgggtctcaaactcctgggctaagcagtgtcccacctcagcctcctgtagtgctacgactacagacgcaagccaccgtgcctggccaactttgagaatttaaagtattattgttgtttaagagtaaaaaatgatctgattttgaccaatattttgcccaacaggaagccagcagacctgcagaacttggctcccgggacccacccaccatttataactttcaacagtgaagtcaaaacggatgtaaataagattgaggaatttcttgaagaagtcttatgccctcccaagtgagtatcaaggaaaatacgtatgaaaatattgtcacttctttgaagcttgtgttatttgtcagtagagatctttctcgcagcattaatttggaatgactaggactctcttctatgtttcttataattaatgctacacagatataagaattggcttccagctaggccaatcagccatactaagaaaggtggggatttgtctaagctgtagaatatgtggtagaaacagatttgggatgtgtctgataggtcaggaaagactggttatttgtggactgtaggtctcaaactgagagagaagtttaaagaggagaaggggtggggaaagacacattccaactgaacccagtaagaatgtcttagcagg

SEQ ID NO: 52243 - DNA, 1009 bp, Homo sapiens
ttttaattttgtttgtgattaatttaaattcatattcaaataggtacatggcactagtggctactgtactggacaatgaagatagagaacatttccatcatcacagaaagttctcttggacagcactgctctagcaatctcattccaagactcccattggcctggcagaaatctctgaacaagtcaactgtttccccagcattctaatttatcagatggaggtggagtgcacatgccctgtggttgccaagaatattaatatgtgaacaaaaacatagtgcagagctttgtctcgtaaggaaaaaacagtttttaaaaataccatagaaaacaaatgatggtatttcttatagtaataactattaaaagacgtctagtaactgctagcatggtggtttgagagaacttatgctaattcatctttgaaggatctataatccatatcactttttctatttaggtacttaaagctttcaccaaaacacccagaatcaaatactgctggaatggacatctttgccaaattctctgcatatatcaagaattcaaggccagaggctaatgaaggtaaaaaacaaaaacttgaattaacattgcaacaaaaaaccccaaacaacaacaggctgttattatgacagtgattataaatgagtactttagagtccagccattcccataagtaataaaaactgtctttcagagttggtcagaaattggacaataaactggaataagtccctatgttgctatttttccatgtttctagctagtagcacagtatatagtaagtgtgtgataaaatgcttcttgaatgaagtttatttcatcttattttgagaagttactgtgaagggagctaggcaaagaattaatggtgcatcagaaacagtggattgtgtggttgtggtggtttagcatagattggttgagcttaatttaaactgtaactaaatgtttattgttgagtgcctgcagcctagagtcagtctgaggtttttttttttttttt

SEQ ID NO: 52244 - DNA, 1133 bp, Homo sapiens
ttctgctttgtattttataatatggattttcatttaaccatttccatgttgatagacatctagattgtctcaagttttttttttttcttcactataataaacaatgctgctggtgaatgtccttgagctagattccaaatagttcaaaaagtttgtgcattttaaattttgctctattttgctaaattgttctccaaaagtctataccagtttatattcccacaaacatgaaagtattcattaccctacacttaggaccctggtgtgtgttaatctttgtaattttgctgtgttctcttagacaagaaagggtgttttgactttcataattacttttaaactgattttgttgctctgttgcacttaaaaattttttgagagctttatgaaatagcttcttagggataccagcattactacatcggggtattggagaataatagtgctacttattagctataagacagggagctactttgtgatggcttgctactgccttctagtggttaattttgacattttctttatatttacatactcctttgtgatgattggtcttgaaaactgtattgtgtttattgaatgatgctgtttagtactttttgatatttctgtttgtgtttgttttattggccataccttatgttgatacatataattgtatcaaactaattcatcattctttgttttcattaatatacccttgttatgacattcttaactatgaaaaattactaacaccgtagtcaggtatagcaattcgacttcatcagaagtgctttgctaagtacaaaattatagagaaaacagtcattgtaatgttatgctagactcttaattttcttttgaaaaaaatttatttaaatgagacaaggtctcaccacattgcccaggctggtcttgacctcctggactcaagcaatccacccagcttggcctcccaaagtgctgagattacaggcgtgaaccactgtgtcttgcactgacgaatactatgttataaaccttgtaaatttaggatatttgatttttatatatataattcaggaaaaacattaatttagagcaggtctaaggttaaacatttgctcaaaaacttgtcaaaacactcaaatagcatttgagacaataat

SEQ ID NO: 52245 - DNA, 1324 bp, Homo sapiens
gccaaaagactcaccaagtaaaatcgcgtttgtaaaagagatgtcttcatgtcttcccctaagaatacgcttttcctaacaggctactccttcctgtagagcagaaattgtattttgcacgaacatgcagttattgaagattaggatcaaggatagacaaggtatagtagttatcttaaaatatacactcctaagcagtattattttaaaatcctttaccctggctacctcccctacccgggttcccctctctttaatttggagacactccaccacaaacttttcactttagaggtagcttgccatctctcaggagccctcaccattgtgtccattcactgtgtatagatggcagaacttttgaggtgcaatgtttaattgttaaaaatagtagccacgactttatcaggcagccccaaactggtgcataatgcatggtacaagaaatatttatgtattttttggaattttgtaatatttagtaagagtatatgaaaggattgctactgtatcagaaatattgtttcaatttagtctatcctggatatgtactaacgaatattaccaccagagaagagagctttctacaaaagtcactacagattttgctatattgctttgtagatagatttttacttttgcctaaaagcatttatccttcataccaattgtaacatctgacaccatgtagaagctaaaagtttagagggagtgagggttttctcaagaccttcctcaagcattttatctttagaagagaaactgatgggcacctgatactctgtctaaatacgtttgttatatgtgttttgccctgtgccattcatttggaactttattgcattctttattttaaaaagcttgtttttacgtaatcatagagcttgctatttgtacatctgttgagcaacactacataactgatttttagttgacttagctatagcagtacaatgattagtaatgtaaaaattaacacagaaattaacctaaggaatgaagggtgggtttgtcaaaatatcaagtaaatttttgtttctaaagtacatttaatgtagatgacctaaagaatgcgttatccatcctatataaaagaaagataaaacacaggtcaccaattttctcatttcaccccatttaccttgtatagaggattgttcattcctttgggactaagttatagttatggtgagtgtgtatttactgtagttttgcctgatctcactcattgcacttcctggagttaaattttccaacagccatgttgaggaatagcactctgcatgtttttgttttgtttttcggggttttttttaattgaagc

SEQ ID NO: 52246 - DNA, 1319 bp, Homo sapiens
catttttggtaatttttttatacctaatttgtataggaagtgctatttctcataggctgtttcttgaaattttaagtttattgctttaaaatggcagtgtttctcccactttgatatgctaacatttagtaagcactggctttatgaaagcggctttttataagtatactgcattttttgagcctatcattaattagcttagtatgaaagataagaaaatctccatgttgtatccatttggctcaggaagattctttgccttacctttcttagaactctttattgcttatcaaaagtttgagtacccgcttggtttttttttggtaattaaatattgtatgatttatctggttcaaggaagatgcactattcagttatctattgagaaattattttgcagtggttttagtgggtgaaaatgtcccatctgcaccagtacacaggcaggcattatcattcttcacctactttttaaatagtggcaacttgggattcattctggtgattctgaaccttgcctcatagcttaaagtataaaaaagattcaagagcagtgaggtttgttctttccagtgaatggtggactgagtggtgcgaggtggagggctaacaagaggaaagaactacattcttcagaatacagtgatgaaaattcattttgaaactcaaatattttcattttggatattctcctgtttttattaaaccagtgattacacctggccatccctctaaatgttctaggaaggcatgtctattgtgattttgatgaagacagaattatttttctctgtagaaacacagataccactttatcagggaagttagtcaaatgaaatggaaattggtaaatggacaaaagctagctagtaaaaaggacgacccagcaacatgctttaaccccattgtatgtttgtggaaagagcatagtttaacatcttgagaaatttgggacataaagttttcatggtagacagttcatgcagtatatgaattgccataatggaaataatctgattttatttttacaactaacatccattccccttcatttaaacaccttttgtgttttacttcagtgaggagattggagtctgaatggatctgttttccaagagattctgagaaatttttgtattcagcagttggaaagctctctattctagttgataaaacttcccttttttgatgtagatgcagatattctatacagttctgttgtcttttactaggactgtaaacttttgtgataaaattcaaataagattttatttcttggtaattttggctttcacaatttatctttaaatccttgagca

SEQ ID NO: 52247 - DNA, 1033 bp, Homo sapiens
actgctgtttttcttttgccaccgacgcgcgtaccgtttcacgatgcaggaccgtggttacatgcgtaaaggaaaaaaagaaaaacgcattttgcaggcctcgtcgtgtttttcaaagagccacaggccgccacaacgaagaacgacgccgcgaggcctgcaagatcctgaaacttgttttgaggggagagcagagaggaaaggggttgttggccccaggctacttagggtccctaggagactcccttccgcctgtccccggtttggcacaggggccaccgaggctgggaccaaagccgcgcagggctgggagcagcaaaggccgccggccgggcgtggacgacgcgcaaaatcccgtgtggggtggaggctcttgggtcagaataatgtgcgggacgagggaggtgagtaacctctttggggcggctcccagtgcggcgtcaccggccctgagaccccgcggcccccagcccggggttgcagaagtcacaggcccgaagcagcaagagctggggaagcccggccgcggccagcggggaggaggagcgaaggggttgcgccccagcgtcagggagctacgacccgagagagggcggcaagggcgccttccgtgggacccggacgttctaagcaaatttctagcatttgccccgggctcccagagctctcgggggccctgggctgtggcactggggcctcctccgcggggtggcgccttccgcccctccccgttgggcggcctccggcaggccccgttcctccccgcgaacgccaccgaggtgcccgcgatgggggctccgccgattggctgtgcgacgcgtcgctccgccagccccgccccgcgggccccgggggtactaaccccgcgcgggcggccgcggccccgccacttgattctggaggatttgttctggggctgcggccgcggagtcggggcggccgcgggcgagcttcggggcgggaggcggcggcagcggcacagccccgcgcgggccccgccgcggcccaggcagccgggacagccacgaggggc

SEQ ID NO: 52248 - DNA, 1027 bp, Homo sapiens
aaaggaaaaacttttgttcctgcattttgaaaaggggtcctgtattttctttttgcactgggtcctataaagtaggtaactggccctgcctgaggattggagagacatgcaggacccccagaaatacagtgcaggcatcgggggagctcagatgagctgccctgttgagtttctgcaagtgagaggagggagcaacggctcctggggtctcctggggttccagggcccaggcaaaaagaggaggctgcagtgtgaggaccctgggacatggaagccccgcccacaggtaccctgagctcagctatgctgacccctcctggggtggccccatgctctgagccaaggcccacccttctgccaagcagggtgccaagggccaaggccaaacccccgctccagagaggcctggcccagagtggcaggccagaggtggtgggtgggctcctgacggcctccctggcccaggccgcgtggatgataggctgggtgaggtgggctgctggccttggctttcacacacatcacggggaatgaaaagctcacagaggccactgcagagtgcaggaggccaggtcacagttcagtcagtgatgaaggccagtgggggtcagtgacaacttggactagaaatcaagctgtggtcaaggttgggactcagtttgtggccgcttggggagtcaggttggggcctctctctgtctcgttcacatccgccaagtccttggtgtgggtgctgggcagggtctgagtcacaggaggtgctcagtaaatgctcctggaggaatgaataaatgagtggtctgctcacggggggcggggcatggctggagtgcagccctggacgctggacgatttgcactttccatttagccagacttggattcaaatcttggctctgcttcttacaccctgagggggatatttaacctcctttttgctgtttcttcagccatacaatggggagaataacagtacctccctctcaggctgttagagaattcactaagacaaacctgaagtgctcagc

SEQ ID NO: 52249 - DNA, 1050 bp, Homo sapiens
ttggtgccactcaacaggcaggaaggcagcagctctcattggctaaatctaccccttctggtctcagggccccactcctagatacgccctgcgtatgtctctatggcctgagactccctctgttgcagaagtcgagagagcatcagtgtctgtccctcaaatagtgccctggctaatgcctgatgtgccactattgttgccatttccttttgctatttaaaaattgccattgttaacatccaagttgctctagacactatctcccaaaatgtgttccaggaaacattaatctctcaagatgcatagaaaacaaaaagaagagggagggctccacagtcaagcaagtttaggaagcactgcaaatgctagtcctcttttggagagttacaagtctagcaaaggctctgaggaatcctgcaatcgagttggagtttctttaatccactccccagacttacttcattacagaaccctccccttatcttggcagagcatccattaatatgctgaaagcctagtataccagggaaaaccctttgggaaatgacattttaggggtttgagtccctctccttcccccaagcctcaactgtggtcagaagctccaattatgaggctggtcaaagccagtgaagagaggaagggtgactccagccttcagtgacaggtgaatgtaagggtcacagtcacagtctcacccagaattgaggaagggaacatggatccatccacgcctagatgcaaggagggcgtcatgccacatggtgagaagagcatgtggggtgccctctagcccccatcccacccaactctggtagagcagcaacttagccatggaagaaagttctaacacccttgttagagctggctctcagaagcccgaacactgaaacctctgctccctgaagatttcttctgcaaattcacaggctgcctagtgttctggcagaagccccaagcaagacaatgcaggcctggattctgctcctgcttttcctagtggcctgctatgtgacccacggaaggccttcaatctgtctgtgctggtac

SEQ ID NO: 52250 - DNA, 1038 bp, Homo sapiens
acaccccccacagcatccagagcaatgccaggtaagtgcatgaacgcaagaagatccagcttttttttcccaaacaagtctatgggtaggcccagatttaaaaataggtagctcttctatattctatatatatatatatatatatatatatatatatatatatatatatattaaacacattttatatagcacaaaaacataaaatagtatttctatggattataaatgttcatggtggaaatttaataaatgttaaaaaaaatgtaatgatgaaaataaccatccccatgcaccccctctcccatcctctgatcacccagggaatgccattgctaatgttttgttggatttcattccagtcttttttctacatataacagtcctggccacttactacatatagagtttgcttctctgtgcttattactcaggagttgggagccttttctcatagccttaaatgttctttgagaacatgatatttaatggctgtcgggtgtttcacacctattaaggtcggagctgtgaagagctcagctgcccagaggacctgagctcagtagtgagaggcttgtggtgtccttggaggctggaaatagaccatctccatcacctctgctctcagaactcccactctgttctcaggaactgtgcggtatctcctctaaccctcctaaacgacgacaaggaaggctctacagagacagagcctctggaaggctcagagagacgaagtgactcactggaagtggccagcacacacagtagaggaagatgcctattcccaagcctcctgcagttatttatttatttatttatttatttatttatttatttatttattaagacggagtcttgctctgtcgccaggctggagtgcaatgacgtgatattggctcactgcaacctccgcctcccgggttcaagcaattctccctgcctcagcctcctgagtagctgggattacagacatgtgccaccacgcccagctaatttttgtatttttagtagagacggggtttcaccatattggccagg

SEQ ID NO: 52251 - DNA, 1063 bp, Homo sapiens
caattttgaattttgtaaattttcttctttccccaggattgaaaaacgagacaaatatagccggagacgtccttataatgatgatgcagatatcgactacattaatgaaaggaatgccaaattcaacaagaaagctgaaagattctatgggaaatacacagctgaaattaaacagaatttggaaagaggaacagctgtctaatcccttcaagaactgtttatagaagcttgagaatggggtaaaaatttctgctagcaaaatcaagttctttttgaaattttatcagtaatccagaatttagtagtccatgccttctcactcagcatttagaaataaaaatgtggtttcttaaacgtatatcctttcatgtatatttccacatttttgtgcttggatataagatgtatttcttgtagtgaagttgttttgtaatctactttgtatacattctaattatattatttttctatgtattttaaatgtatatggctgtttaatctttgaagcattttgggcttaagattgccagcagcacacatcagatgcagtcattgttgctatcagtgtggaatttgatagagtctagactcgggccacttggagttgtgtactccaaagctaaggacagtgatgaggaagatggcagtggccaccggaggactggagcagtccctcctcatggcggcctgtgaccaaggtcggggaggagtggagctatccttccatgatctgatcatgtacagttccctttttaaaaagcaataaatgcttgggattagaatttctaacatttttagtctatcatttaaaacaaacatttgtatatatacatttgtttatatacatacatgcttccattctacaaacactgaaagaatattttattatgggaaattccatacacccaatacccctggtgagtcccatatacccagtaccctgttcaacaatcattaactcatggccagtcctgcttcatctttatttccatttactttcttcatgactcttattttgacgcatatactagatatataatttcatctataattattttagtat

SEQ ID NO: 52252 - DNA, 1104 bp, Homo sapiens
gtctttcattagttttataaaggcagtttcagcccccaaacaaggaggggccctgtttaaggaagggactatgatcatccttgcttaaaagttaaactataaattctcccatggttagcttggtttatgcccaggaatgagcgaagacagccggcctgcgaggctagaagcaagatggagtgagccatgttagatttctctcactgtctttgcaaaggcggtttccaggaacagcgtgcagaatagggggctatcaggctccttttggtcatttcttcctagccgtccgattctgagctcttcccaacccttttcttggcgacttacctcccgctgtcctggcccacgctacttttcgcggctgcgcaagaccctacgcaatccaaaatatttcatagctaaaagggtcccaacttccggagacctcccggaaggggcggggcttatggtagcccattcgtacgtatcggcccgtttgtctgaaggttgacggaagtgctctatcttgttgccggaagtgggaagagagaaaggttgtgatggcggctatagctgcatccgaggtgagttccacccaccgtacaccgggggttttgttggtgagggttccggggagcggcctggagagaggtggaggcgaagtctagtttcgcttcagggaggctcagacactgtggggtcaagtcggcggtggaggccctaggcccagcctgtggggaccggcggggactcggcctgggcagtcctgggagaagctgagccggctctgcctgaagccagttctccttgtcgcaggtgctggtggacagcgcggaggaggggtccctcgctgcggcggcggagctggccgctcagaagcgcgaacagagactgcgcaaattccgggagctgcacctgatgcgggtgagtagtcttggaggccggcttagatccgtcatctggccaagcctgtgcgcttttgtagaggggacgaggaagccacaccactgcgtctgacagaccaacagagcaggatcatctgagaggaaagctctgttcggtggtactcaaccctggcagcacattgggatcattctgagaacatttgaaaatataactgttcac

SEQ ID NO: 52253 - DNA, 3643 bp, Homo sapiens
gatgcatatggaaccctcgcgcacacttggggtttacagtctctcaaacactgtggtactttctatctgcatttagtaagggggagaaaaaacaagtataaagtggaccagcgcagctactagtgttcaagggcaaccttagtttacctattataaaacaagtgacttaatatatttaataccacaaaataacatatttattgtgtaattctgagttctcttgggaaataactaccagattaatgagtattttaaaatctctctcttttttttttagatcgaatggagctgttagaaatagcaaaaaccaatgcagcgaaagctctaggaacaaccaacattgacttgccagctagtctcagaactgttccttcagccaaagaaacaagccgtggaataggtgtatcaagtaatggtgcaaagcctgaagtaagtattctaggtttgtcggaacaaaactttcagaaagccaactgtcaaatctgattagccacttatatcttagactatactttttgggaagtctagagatgtatataatgtgctaaattcaaagtagcaaatctgaagataggcaatgtcaaacccatgaaaatgggagattaatgagctttatttggccgtgcatggtgcctcatgcctgtaatgaggcagatggcttgagtccaggagttcaagactagcctgggcaatgtggcaaaaccgcgtgtttacaaaaaatacaaaaattagccaggcatggtggtgcatgcctgtagtcccagctgtttgggaggctgaggcaggaggatctttgagcctaggatgctaaggttgcagtgagccaagatggcaccattgcactctagcctgggcagcagagcgagaccctgtctcaaaaaatacatttatttttttcattttcagttaacagtgtactcttataacaccgttattagctggtactttggtgatttctattactagtttttctaagctatttacagagtgtttgtagctttcatttgcagcattatgttcccacaaattctgtactcagcatatacagtatagtttatctgctctatttctgtcttatagaaatcatgaatgtggtctgcagacattgatgaagaaaatctgttggtaattgatacatgggctaaagcatcagaggtttaatttgaagtttatgttcacacactgaaaacttagtttttttgttggtagatccatgtgcatgctagaatttgggacaggcactatttgcataaagtattaaagtcaatttttaaactaagcaaaggtacacgttgtaacggtggggcatctgtgaaaaagatgtccctttcataatatatgcaatatattccagatgttttgagagattacagaagaggaggcctgcttcacttgcagataagtttattataattctccagaaatgtgcaggatgtgcattagcaaattgcactgtacttttcactccagcctgggtgacagagcaagactcccgtctcgggggcttaaaaaaaaaaaatgctgtatctaaatgaatctgtgtaattgggcccagatgtgggtttgctcagtattagtagacaaggtctttgttcagacgattaggtgcctaactggcaaatgccttagtttcttaaaacgtattttctgatgtggctttacatttcaaaagtgaacttgattcaacctgagaaaactgattaaaaaattagtttaaatttgccagcagggaagtaaaataattatgggaagagtgtcttaagcctaatattaaatcagttttgttaaggggaaaactcaatagttctgttacttaggctgttagatccaagttgatttttgtgtctacagctaaattttgtttacaattaggctattttttaatataggatttagaaaccaagggtatgtgttttaaaattacactttttcttaacctgtctagctgtcggaaaaggtaacagaagatggaactcgaaatcccaatgaaaaacctacccagcaaagaagcatagcttttagctctaatgtaagtatatccaggcattgaacactcaaaaattggatttaggatgtatttttgcatctttgtgtttttatctttgtggtgatagttgggggcctactgacacactttttaaatagaattaaaatcatttgtttttgagccacttttataagtggccattataatgggtttgtaatatatataacattcacgttagttccgatattttgccattcttttaagtgtccccccttttttattgaaatattttaaagggaaatctttagaatactccttaatcacaatgttttaaaataagagtttcaaaaacgaagcctcaaaatcattataccttgtgtatcttgtgtatgtccagtgtctccctgctgccccagtatcttcacttcactttttgaatcaagctacaattaaggttcacactatgtgtttggttgataatccttttttttttgttttgagacagagtcttgctctgttgcccaggctggagtgtagtggtgcaatcttggctcactgcagcttctgcctgcctcctgggttcaagcgattctcctgcctcagcctcccgagtagctgagactactggcgcatgccaccacgcccggctaatttttgtatttttaggagacagggtttcaccatgttggccaggatggtctacatctgacctcgtgatccgcccgtgtcagccttccaaagtgctgggattacaggcgtgagccaccgcgcccagcaattgataatatctctaaggctcatacatgggattatttaatgtacttttttttgtgaaaaaagtgtacaatgtatgtttgggaagctgactgaatttgttcttttacagaattctgtagcaaagccaatacaaaaatcagctaaagctgccacagaagaggcatcttcaagatcaccaaaaatagatcagaaaaaaagtccatatggactgtggatacctatctaaaagaagaaaactgatggctaagtttgcatgaaaactgcactttattgcaagttagtgtttctagcattatcccatccctttgagccattcaggggtacttgtgcatttaaaaaccaacacaaaaagatgtaaatacttaacactcaaatattaacattttaggtttctcttgcagatatgagagatagcacagatggaccaaaggttatgcacaggtgggagtcttttgtatatagttgtaaatattgtcttggttatgtaaaaatgaaattttttagacacagtaattgaactgtattcctgttttgtatatttaataaatttcttgttttcattcttagtctttattgtatatatataacctaatggatctttatttaatgtagagatataaggtggtgtgtgttgattaaagccctgttaatcccaagtccaaggctgactggccctacctgagattttgagaaatgctgaatctcaagtccctaccctagacctgctgaattagaaactgaattttaacaatattcccaactgaggtcaatacttcaacttgaaaaattgccctaaaaaatttatggaatactgggcttcaaggcaagaaactaagccagaaagaggaggaatagaatgcctcattaagctgtaaaatc

SEQ ID NO: 52254 - DNA, 1475 bp, Homo sapiens
tccccgcccggcactgacgtccagccccgcccgtgcagtgaggccagagcctggtgtagccccacgcggggccgttccatcttcgaagttttctggtgactgggtcggtcccgcaattatctcagatcaggggggaagccaagggcaacgggacaccctgatgtatcaaacacctccccctggagccccatcgcgcatgcgcaccctggaggcaagcgctcgaggcacagggcgcggcttggggagggaggaggcagggcggtggttgggcaagagaagagccgcgcccaccacggaacatctctgcgcatgcgccgggggccagcttctggtacttttgacgcgtctgctaacgtagtccctcagtgcgcatccggacgtaggaggtggaggttgtggaattcgccgttcgaaagcagggactaaaagccccacttcgtcttacgttccgaaaggaaggcgtctgttgagcctttctctcagtcgtgagggaggcgtcgacggcgtgcggtaagttttctgctgacggggtctctcaggaccaccgcagtggtctctcaggagtgagggacgggaaacgtgccgggccccgcgtttggggaacgcagcgtttcgcttcaaggccgcggcctcagggcgccgagcggggtttctagggctcggttcctgtcgcggcggtcgccgcccgcgccgtggctccgcctcccggaggttccccgactgtggcttccgggtggccaggcgccggcttccgcgactcgacttgttttttctctcttggttttttaggaagtcctgagttgaggcttgcgggatcctttccggagaaagcgcaggctaaagccgcaggtgaagatgtccaactacgtgaacgacatgtggccgggctcgccgcaggagaaggattcgccctcgacctcgcggtcgggcgggtccagccggctgtcgtcgcggtctaggagccgctctttttccagaagctctcggtcccattcccgcgtctcgagccggttttcgtccaggagtcggaggagcaagtccaggtcccgttcccgaaggcgccaccagcggaagtacaggcgctactcgcggtcatactcgcggagccggtcgcgatcccgcagccgccgttaccgagagaggcgctacgggttcaccaggagatactaccggtctccttcgcggtaccggtcccggtcccgtagcaggtcgcgctctcggggaaggtcgtactgcggaagggcgtacgcgatcgcgcggggacagcgctactacggctttggtcgcacagtgtacccggaggagcacagcagatggagggacagatccaggacgaggtcgcggagcagaaccccctttcgcttaagtgaaaaaggtgggtgggtcatttacctttccatttgtggtaatgtatggtggcagtatatgagtaggctagggaaccaacgttgctgtgtagtttcaatattagttcc

SEQ ID NO: 52255 - DNA, 1111 bp, Homo sapiens
gtccccgcctcctggagctgaacccgcccctctcccagaggtggagctgcggggggcgggaacaggcacggagaaaataaacaagactaaaaagtcctgagtagcgctgtgtggccgcaaacctgaacccaccttttgcaccacgcgggacccggcactcttcctgccacccacccctgagagggctgcgcggccgaccccagtactagaaaacactcgtcacctcactcaagacgggtacgaaggccaacggacgccttcctttagaacgctcagcacacagagcaacttctcacgcctactctcaaatggcgtactccaaactagcactcccgacgtccagctgtgaacccagagcggcggaaagcccctgaacccagcgcccgggcatgcgcagacgcgttgttgtggtgggcgtggctccctccggacccggcgccccgccctccgccccgtgtccgcatgcgcgactgagccgggtggatggtactgctgcatccgggtgtctggaggctgtggccgttttgttttcttggctaaaatcgggggagtgaggcgggccggcgcggcgcgacaccgggctccggaaccactgcacgacggggctggacgtaagtgtcgggcggggagtgggggtaagagagtagcggccgcaggctggagaggcctcggagccggggccgtctgacgggctggtgcccacagcacaggctcgttgccgccaccctcccggaagccgcagacccgggctgagccgccgcggacctctcctctcctgggtccggcggcgccaggagaaggcgacggcgtccagaccccgccaagacggagaggggaccgcgccctcccccgggacaccccaggatccctggaaaatcccccgatcccccacttcacagctggacaagccgaagccccgagaaaggagcgtgacccggccagctccctcagcgaggggtgccccggctaaaggtggctcccccatcttccagcggcgtccctcgagacctaaaagtcccagagtttggagggcggggtctggcttgagcgtaccagtcgtcgtgcaaagaaaaatggattcggggtggggccattgggatgaaccgaaaat

SEQ ID NO: 52256 - DNA, 1101 bp, Homo sapiens
tcgcccaggctggagtgcagtggcacgatctcggctcactgcaactttcgactcccaggttcaagcgattctcctgcctcagcctcccaagtagctgcgattacagacatgcgccaccacccccggctaatttttgtatttttagtagagatggggtttgccatgttggccaggctggtctcaaactcctgacctcaggtgacccacccacctcagcctcccaaattggtaggattacgggcatgaaccaccacgcccggcccccaaaccattttttacattaaaaaagatactaaatgaatccagatattactttccaaagttataatgtggaaattcatcaaaaactaaatcaaatattctgaagaagtatgtggaaccaaaataaagcatttgtaatttcacttttatctaattattcctgagctattaattatttttcgggcttgaagcaagtaaatggaagtacttatttaattgtttgtttgtttgtttttaagtgacctgaaaaaaatgtctggatttctagagggcttgagatgctcagaatgcattgactggggggaaaagcgcaatactattgcttccattgctgctggtgtactagtaagtgtcattgattatttgggccttattttttggtgcgtttgtgtttatgggttttgaattctgcaggatgttttaaaatatgtactatttattttatctttgaccactttgaccatgttgatattttgttgtttgtggagagttattagttccactttaagagtttatggtttaaaatttgattaacaagtggttgggttgttttaactgcatggtaaaaatggcataataaaacatttgttcattatatggattatatctccttttaatgagtatattaaggtacaaggaagtgtttaagacgcagtcaggtcaaaaccagtcaatagatgtgattgcatttctccataatccagttaactttcttctcagtctcagggaaaaaaaagtgctcgctttggcaacacatacactaagattggaataatacagagaagattagcatggccccttaaaatttttttttaaaaagcaaaaacaaaaaggaaactc

SEQ ID NO: 52257 - DNA, 1050 bp, Homo sapiens
gcagaacctcagagctgttatttcacaccaagaagatagctaaaattctgtgaacaatagttgttctccatattaatttgaatgcttttttcttgattttggggaatatttctctggaagtttatcatatatcaacaggacacttctgtcagttggaattggagtcacttttttcctttccccctccatgagataactggtttctagttcaccaaattagattacaaggctttattatgataaaaattaaataatgattgaagtaggcttagagaaaagttatgttaataaatataaattgctctcagatttaagggtacctaatcagttattaggccatgtgcaaattacatgtgggaaaaagctagaacatttttgaaatgtattaaaagggatctcctcacttaaataccttgcttttagccagtgagatacagaattgctatgatttctcattggtatcacctttgttttagttttttacaggctggtggattatcatagatgcagctgttatttatcccaccatgaaagatttcaaccactcataccatgcctgtggtgttatagcaaccatagccttcctaatgtaagtgtcatcgtaattggcattacttacatagcttgccacaaaataaaaatgtttcaaatatagttgcatagatttaaaattctaaatattatcagattaacacactggacatgatttaaaagtcacacagtagagatggacttatacagaaaagcagcagtcctctttattctttttgtgtacctctccactccctcccagcttctctcagctattcttttattttatacccccagggtttatagctttatatttaagtccgaaactgtgtattttgtctaagggataattctttcaacaatatttattaagcttttatattccagactctgctctaggtacaggacatatagtagttagtaaaacaggaaaaatccatgtctttttgtcatttaaaataagtgcaaaggagaaaaaatagagaaaggagatatgtgcaaataagtgcaaaggagaaa

SEQ ID NO: 52258 - DNA, 1272 bp, Homo sapiens
tcaaaaaaaaaaaaaaaaatcagacatataatggttacatagtaaacactggtaactttttaaaagtcacatgtgtattcagtacttgaaagttaaggttgttgggaatatggtggttaatagcacagttgaacataatggaagaattcactaccttagaatgatcagtttctgttttgatacatttcgtaccaaaatttcttctacaactcatcaattattcttcgttgtttgtttcacaccattctcgaaatctcacatactcttttctcaaattcagggagtcatgtgatatttcttgttttattcacagagggctggtttttaagtttggccgcactgaagacttatggcagtgaacacatctgatttcccacagcacaacagccctgcatgggtttgtttgtttttttactgctcactcccaaccttttgtaatgccattttctaaacttatttctgagtgtagtctcagcttaaagttgtgtaatactaaaatcacgagaacacctaaacaacaaccaaaaatctattgtggtatgcacttgattaacttataaaatgttagaggaaactttcacatgaataatttttgtcaaattttatcatggtataatttgtaaaaataaaaagaaattacaaaagaaattatggatttgtcaatgtaagtatttgtcatatctgaggtccaaaaccacaatgaaagtgctctgaagatttaatgtgtttattcaaatgtggtctcttctgtgtcaaatgttaaatgaaatataaacattttttagtttttaaaatattccgtggtcaaaattcttcctcactataattggtatttacttttaccaaaaattctgtgaacatgtaatgtaactggcttttgagggtctcccaaggggtgagtggacgtgttggaagagagaagcaccatggtccagccaccaggctccctgtgtcccttccatgggaaggtcttccgctgtgcctctcattccaagggcaggaagatgtgactcagccatgacacgtggttctggtgggatgcacagtcactccacatccaccattgaaggaaaggaaaaaagggcagagacttgacactccagtcttagacaggggacaatttctttgtagttgttctgataataaactgggttccatgttgcatttcatctgtgtactgaaccactagcctaatagaccagcacggtcaactagaatgacaaacattagctactgggaactcttgttgtctcttcctcttcagaactcttg

SEQ ID NO: 52259 - DNA, 1751 bp, Homo sapiens
gtatttccatttctctgtacttgaacaaatagacccagtttacaacctgcgccataatagctactcagtgtgaatcgatgtgaagaagtgaattcatcgtttaatgaagatttatcatcttactgatggcttttgaaatttgaattttcttaccctaaaggttaattgtaaatactctttgcaagttattcagaggttcatctgcaaaattttaaaaaccgacagtgcattagccttaaatcttcttatgcttctctgttttgcattctttaagttaaatgttaataaaagacctaaatgtatttctaactgtctttcctggttggagtatcatatatcaaatgagcgtttcaactcacttatctgtttcttggtttatattatggagtattggactgaagaacaagatttttttttttttgcccaattctgtttttaaagagatttagaaaaatttcctgttatttctaaagcaaacaggatgagtggactggttataaactagaatgcttgaggattcatgaatatcaaatttctggtgatcatcaaatttaagtctatgctaagttgtttttcacaccatctattgcccattttgtttctcaacaacatgtggccaattttggattcattaaacagagagccttgttttttttctggggccgtgttgacagttttgataaccactgtctactgtttcatagccaaacctttcatggacttactattttcatgttctcagtctgtacaactttctgagccttggcataggaaggaggcagctgtggtgaaaagcgcactggactgcaggaatcaggagacccaggatcagactcaaaatcccagctctgctgctttaggcagacagggcatccacagctttgagccccagttctcccaccttcaaatgagttttgaggactaaaggagatatgtacagtttgtgaaatgctttataaatcctagtgtagtttacagatactatttaccatgttgttgctatcacagtttaacgtgtggttaattttttaaggaggcaggaaatactgtaagatttggtgcaactgtaaacaaaagttgagtagccaaaacaaagggtcagttgctgtttggtcttgctttaaaaaatcctgttgtggactcacttttaaatcatgggctgcagtccaacaactgttactgaggtgactgtcaaatgatatcatttattgtgagtatcatggctgtcttggaattctgtttcggggtgagatgcaaggaaaattaattttagacattatgttaatgtaatctgcatttatacatataaaacatcatttgaaaagtgaaacatgctatagaaatattttagtccagttaataattaaaaataggagaaaggaaataggaatagtgatcttttcatcttactaggggctaaagttcgatgtagttttaaaaaaatctgacccagcccagagcctgacagagtcgacattcagtgttcaataaatgttgagtgagtaaattaataaatgaatataagctagtccatttcattcatgaagtgcctacgttgttcagggaattgcggaggatacaggataacacatggctcattgtcttcaaggagtttacagtctagtaggccgtagtaataccatcttaaatttgtacagtggtttagagtttccaaagaactttaagttctgttcaagtaaaaatatttctgttgtgctaaattttagcttactgttttagtggttcatctg

SEQ ID NO: 52260 - DNA, 2344 bp, Homo sapiens
tggtaggctttaactttaacaatcctggacctggcacgaaagtgatagattctgtattgttttagaggagtgttggggaaggagaaattgaaatgttttcactaacctgtgcagtgaagtgtttattagctaaactcttctatttgtggttttcacaaaatacactttaaaaatcggccacactgggatgaaaaagcactttcctccaactttcattatgattcttcctgtctgagcagtcttggcagtttagtttcattaggtgttttgaaaatccctttaaattgctgctgggttgaggaggggaacaggagagaacgtgattcacttcacattatttgcttaaaagcttcctgttttatcattgatagtctcctttttcttcacatcgattcctcatggcctctcttgaacctcactagatttagagattgatcttaatggtaggtttaacaaataattatttacattttcttactagttatatgcttgtatatatctcatggacccagtccatgttctgtaagcatttatgttcctagaatctttttctttggccatttctcccagatctccccactgatactgttaaccctttggggttttatgtatataaagtgcactttgttttatctgtttctaggctaccatcttgtggagtttggagggcaagtagaaatttcacaaacatagttaagtgaaatactgtaattaggttacttttcttcataaaatttagtgtgctcttcagatatactgattagtttatccccaggcttactagatttgggcataattattttacttggctcttgctcaagaattaagtccagaagaaaaagaagttggctgtccagcaagctgcataagtaggatggtacatacaacagtagatacacatatccttgttagactttttccactgtggatttcttcagatgcttaagtagtgacttttcaaagcctctcaccttgcatcctggcaatggaagcttgaaaaaagttaatcaacttttagagaatattgaggctctgtatctttaatttgacatttaaccgacatcaaattgtctcagctgatgagccttccaaggcacttgtcttccctggcctttgaagacagtcatagtactgaccttgattgctttatatttttttctctgctgcctttaaggatgatatgcccactttgagtcatgggattgtggcaccaaaaataatgtatccctcaccccatctcctctgttgccttctctttttcagagcttttgcatttagtgattaaaatggtgtgactactccactttcatatatctgttcatatcactgatgagtttgagctgtttaggaccgatctcccactcagcacagaggagtggctagaaataatctcattctgtttttgaatcatattgttacgttgttcatcttcaaaacacttttttttttttttttgagacagggtctcattctgtcgcccaggctggagtccagcagcgagatcacagctcactgtatccttcatctcctgggttcaagagatccttacacttcagctgaccgagtagctgggaccaaaggcatatactaccatgcctggctttttttttttttttttttttttgcgtttttgcgtttttataaagatggagtctcgccgtgttgtataggctggtcttgaactcctgggctcaagtgagccactcaccttgacctctcaaagtactgggattataggcatgagccaccgcacccacccaacacttttaaaaaccaaataaatagctgagtactaaaatcagtactttgcctatcttgtagcaagaatagttgaacattaaagagaatgaatactatgttcatgtccaaagtaaggattcctgtctcagaaaagagagatactgtctgaggcttgagtcgtcttgctcagatgtaataagaatttttggccgggtgtgatggctgtaaccccagcactttgggaggctaaggcaagaggattgcttgagtccaggagttcaagactagcctaggtaacatagcgagacctcatctctactaaaattcaaaaaaattagctgggtgtggtgtcacattcctgtagtcccagctacttgggaggctgaggcgggaggatcacgtgagcccaggagtttgaggctgcagtgtgccatgatcgtgtcactacactccagcctgggcaatagagcaagaccctgtgtcaaaaaaagagaattggctgggcgtggtggttaatataatcccaaagtgctgatattataggcgtgagccaccataatcagcccccaatttaaaggaaaaaaaaaatctagaatggaaatcg

SEQ ID NO: 52261 - DNA, 1015 bp, Homo sapiens
actagtattctttaatgttaaagtaaccgctactttttatatggttgattttaaatgtttaaaatttccttttgtgaatttgctttacagttaccaagttatctcttagcagtttcaataattttgtccaacatgtgtttaacaatgtgtggttgaaaataacaggttctaagatgtatcttttattttgttttatttttccctttaggccttctcagtattttttgtttgtgtagcattcacgtcaaatataatatgcctgctgttcatccccatacagtggcttttttttgctgctagcacatatgtatgggttcagtacgtatggcacacaggtaagtcttaatgatttcttagatggatagaaatcttagattcaaatttttaaatgtggttatttctttgaatacattatttagagttgagtttaatgtggacattttaaagttttcttttcttaataggttataatataccttcaaaaatatatatcttttttcgttatttgaatacaaactttaagctgttatgatttgatattttaattacaggcattgcaggtaccagctctcactctgaatatatctttttaaaaaaaaaatagttggactgatttctatgtaggtatacttgaagacagccatgtgccaaaaaagaaaaaaaaatgttcatggaatttcatcattgaaaggaatgtcatttagatgaacccttaatttggcaaaagaatcctcacagcatccctgacacgtggtggttttacctctgatggaaaacctacagtgacaaggaacttacctactgttcctggtaccctactctgtttttgggcagctataaaataaagttattcctcatattaagccagaattttcttccttaaattttgacccagtatgtcttcactgtttttgggctcgttgatttcttttttaaaaatttctatttttttttaagatggggtctcactatgttgcccaggctggacttgaactcctgggctcaaatgatcctc

SEQ ID NO: 52262 - DNA, 1620 bp, Homo sapiens
tgctattatctgtctttaaaaattttatctaatagttaagaaaatggaatctgattggtttaatttgtatttctctaatcagtagttaacatctttttctatgttttttagccatctgtattcttttgtgactcgtaaattattttctttagttagctttttattgatttgtaggagctctttgtatgtcagggctatgaatcctttgttttacatacattgtaaatattttttgccaggatgtttgtcttttatttttgtcagcgattctgtggaatcatttgtcatataaaagctttcagtttggatcagtttgccttttaatttagtttaggtgaaggtcttaatgaaagttactgtcgtcaaattagtctcccaaacaatccatctgttagttactatatcgtttattaatgcttgcctctctgctgctttctcacagaaaggggagtgtgtttgcctacagtgtctctctggatcctctttgtttatattgaagcagccattagatttaaagatctcaaaaactttcatgtagacctttgtcgtccatttgctgctcactggtaagtattacataaatgtatgtgtgtgtgtgtgtatatgtgtgtatgtatatatatgtgtgtgtgtgtgtgtgtgtgtgtgtgtgtgtatatatatatatatatattttttttttttttagacggagtcttgctctgtcacccaggctggaatgcagtggcacgatcttggttatgcaacctctgcctcccggcttcaagcgattttcctgcctcagcctcccaagtagctgggattacaggcgcgtgccaccacacctggctaatttttgtatttttagtagagacagggtttcatcatattggccagactggtctcgaactcctgacctcaagtgatccacctgcctcagcctcccaaagtgctgggattataggtgtgagccagtgcacccagccagtattatatatattctttgtctataattcatttcactgtagaatgttaagttcaactgtaaatttattcttagaaattttacatggatccagaaagcagtacagcatggttggaaagaccatgagcccccccttttcaggcagatgagtgaatcccagctctgtcctctgacagcttgtgttgccttgtcactgcctctaagccatggttttcttacctgcctcactgggtcatgggaaaaaggaactgaagtgatacatgtattcaacttaatgccaagcacataggtgtctgatgaatgttagctatgtttattataatcaggtaatgattccagaaggtcttgatgaaatatatggctaattcatgaaacttaaaataatttagaatttccttagcctatttataaaagtaagagaatattattaataatttttgaatgaatattatttctctttatgttaatgaatattaagatattattcatttaatcttaaccatgaaacatttttgaaaaatgagcttggttcttatttagatctattgtggaacttaccacctaatgtatgtttctcctaaacacaccaatttttactaatatttatggcagaaaccaaaataaacagtaatcaactaaaaaaatactgtttccag

SEQ ID NO: 52263 - DNA, 1209 bp, Homo sapiens
ggaggctgaggcaggagaatcacttgaacccgagaggcggaggttgcagtgagccgagatcacaccactgcactccagcctgggcaacagagcgagactccatttcaaaaaaaaaaaaaaaagggtacaggtatctgcctaagttctaatgcataaggcagtttcttcaatatttcttcaaaggcattattagccactgtatctgacagtcactgtggtgactccttgaattaatttgaagaatgccaacgtctaatgggaagtgtcgtcttacggtctagcagtcctgttgttcctgggggttttgttctgtgtgccagttgcttctgatttccacagtagacattacatttatttgtgtgtctagtgaatgctcttctcaactaccatcatcaattagaatttatttttaatttttaagccataggtattctcatgtgcttgaggcacatgtggttcattttaaacctacaattactggctggattgtcttctttctagtattgggtaccctgtggtaactttggggtttggcttcaaaagttacgtaagctacaaaatgcggttaaggaagcaaaaagaagtacaaaaagagaacgagttttacatgcaacttcttcaacaagctctccctccagagcaacagatgctacagaagcaagaaaaagaggccgaggaaggtaggtctttaccctaaagctgttggctcaataggctagtcattattttgtctcttggtagaattttcttttctggaaaagtagctaggattttgtttttttctgtctaatggtgttcctcctcagggtcattgttttatttggtcaatgaaatacagatggtgaatgaagttttttacatactgtctgaagactatgtgtttaaatatgtttattttattattttaaaatatatttatatcttttttatattttaattctgatttttttttaaatttagttttttgagacagggagggtctcactctgttgcctaagctggagtgcagtgataacagttagggaccactgcagcctcaaactcctgggagcaaagtaatcctccctcctcagcctcctgagcagctgctaccatgggcacgtgccaccatgcctggctaattttttttaattatttttttgtagagatgaggtctcactgtgttgttcaggctagtctcaaactcctgatctcaagcaatcctcccac

SEQ ID NO: 52264 - DNA, 1626 bp, Homo sapiens
ctgaatagagccaagatggataggtcgtgttctaaatgcttcatataatgtaatgcagattttaaattgaaccatttctaatggaatctctctcatgggcatttgaccaatagaaatagataattggcagtagctagtttccattggtttgaaagttgaaagtttgaggtcatgtttttatttaatatatttcaaaattttctttttgtgtgatgtggtgcaaaaatatctcttcaagtagaccttaataaattggaatgtgtagacccaatacacaaaattctttctgagtggtctggtaaatgatacagacttccttattacctcaacactagagtccagaaaaaggatagatgtcctgtatcctaaaattattcctcttcttttgtttcatttaacctctttcttttcagtaaagttattaacagttcgtttactccaggcacttaaaaaaatatgacttcttaggatctgcctttgtcctctcacctcagtgataggcgagtttgatttgactaatacacaaagtgtgacctaattataaaaccctgatcttgttttcaagactagacctttagtggccatcattttcataaatgatgatgattttctaaatgtagagtttctcaaatgtatttggattttcttctattttttcctacatcttctagtaaactatgaggatttgcttcttgattagcgtataatgagtgtgcaaactaatgtgaatttcttaagtgtagataatagtttgttgaattaatctgtgttgttaaacaactaaatattccggtgggggctttttgtttgttggtttgtttttggtattgtagcagccaaaggattacctgatatggattcttcgatccttatacaccacaatggaggtatcccagccaacaaaaaactctccacaactttgccagagatagaataccgagaaaaagggaaagaaaaggacaaggatgccaaaaaacacaaccttggaataaataacaacaatattctacaacctgtagactctaaaatacaagagattgagtatatggaaaaccatatcaatagtaaaagattaaataatgatcttgtgggaagtacagaaaatctcttgaaagaggactcatgcactgcttcctcaaaaaattacaaaaatgccagtggagttgtgaactcttcacctcgaagtcatagcgccacaaatgggagcattccttcctcatctagtaaaaatgagaagaagcagaaatgcactagcaagagcccaagtacacacaaggacttaatggaaaactgtattcctaataaccagctaagcaaaccagacgcactggtcaggtaagtgcacatgctgcatccttactaacactttccagtaaacttgacatactcttgacatactcccatatgggcctgtagggattgtttgtaatcagatattgtgactagtgacgtgtggtgttttacatgagtttgttggccaccttgtgttattgtgttgaagcattgatttcagctctttgcagtgttctgaataatgagtgacactgattacttcccacatgtgacaaattgacctgtaacttgattcttctagtcgtgttgtaaggcacttctttggtccttgtc

SEQ ID NO: 52265 - DNA, 3004 bp, Homo sapiens
gccaggctaatttttttgtatttttaatagtgacaggatttcaccatgttgcccaggctggtctcaaactcctgacctcaggtgatccacctgcttcggcctcccaaagtcctgggattacagatgtgagccaccgtgcccggccataaaagaataacattgttttattacattgactggctcagacttaattttactatattttatatggcttatgttaggcaaacacaaatatgttcctttcacctcagatctttaatttggaaactgagatctaaactggagcttttttgtgtgtatgtaactcaagagggcaattgaaactctccccttccagtaagttatattcttctttctctggcttgctttaggcagccctttaggcagtccgtttattctaggagggaggctttccagcattataaatggtatgaactagattattaatttgttttaattttctgattggcagttaaactaagcgaggtatatttgggttctactaatacaggctctagaggtttcacagcccccaggctacttttggaagtgtgctatttgctgttgcctggctggcatccatatccatttgttaggacattctggccattgtgcccagcagaaaaaacacgtggaagagaactctcctccagatgcccatgggagaaagaccaattagtttaccttctatttcagaggaatatcccacaaattcactaaatgctatacacaaaacatctgtcacagctatttaccatcctttctcctacacatgtttttttttttttttgagataggatctcactgttttgcccaggcttgagtgtagtggcgtgatcacagctaactgtagactctacctccccaggctcaggttttcctcccacctcatcctcctgtgtagctgggactacaggcgcatgccactatgcctggctaattttttaatttttttgtagagaggagatctcgccatgttgcccaggctgacacaagtttagtaatagcggtcaagctattactaaatgatggtttgtgatattgattgactctactatctgatctgcttttagtagagaagttcaaggacccagatggctaattgtccagtaagctggagatgatgacatgggtccagtgcccccgtgcctacacctaaggagtatgctgcttcttgtggtcactaatgcgtactctgccttgacctacagtgtcccaggtattactctgttttggagaactacttactatcaaatgactaatagacaacattatatttaagtaggtttataagctcccatggtattattttcaacttttaatgttataaaaaataaggggatcgatagactggattaagaaaatgtggcacatatacaccatggaatactatgcagccataaaaaatgaagagttcatgtcctttgtagggacatggatgaaactggaaaccatcattctcagcaaactatcgcaaggacaaaaaaccaaacaccacatgttttcactcataggtgggaattgaacaaggagaacacatggacacaggaaggggaacatcacactccggggactgttgtggggtggggggaggggggagggatagcattaggagatacacctaatactacatgacgagttaatgggtgcagcacaccaacatggcacgtgtatacatatgtaacaaacctgcacattgtgcacatgtaccctaaaacttaaagtataataataataaaataaaataaagaatactatgcaaagaatataggtttttaaatcacaccttggttggatcctggaccttctatttactgtctgagtggccttgggcatattatttgacccctctgatttccatttcttggaaagttgagataaaactaatagaatagtgctgttgttaaggtacaggcattcaataaatgttggttctcttccttcccccccctcaaaaaaaagggtgatgtaaatatccaataatgggagaaatttaaaataaattatggtccatccatttgataaacttttcatatagatactataaaatcatactttcaagccatattaaagaatatggggaagtatgtcaaagcatttcatgaataaaggagaaagcaatttaatgaaaaacaattttttctaatatacatagaaaaatgatttaaagggaaaataaccaaattgttaacaatagttgttatcccttgatagtattgggcatttattttttctttttattttcatacattttcacatttttctatgatgaacagcaatgaaagagtttaaaaggaaaagcctctatctgagcagattatccagcttggttggaggaggtcttatcttacttcctcccacccttccttagccgtcgcctctgtttcctcatttgacttcatgtatgttttgatccatgtcaataagattgtgactgattcaaacctgacatgtttgagttgttagctagagagtgggtttgttatccagatggagcagcctggactcagcagtctctaagaccccttctgatgcaaacatacagggctgacagtatgtacatgcactgtttgcttctgcaggcatacttggggtggtgcacagtttcaggccaacaaacttccccagggatgctttagcgataaaactgatctctccttttttttttaattttagatttaggaggtacacgtgcattcatatgcaggtttgttgcaagggcatattgcatgatgctgagctttgggcttctattgatcccatcacctagacagtgaacatagtacccaataggaaggtttttcagcccttgactgcctccctctcttcctccttttcaagtccctagtgtctgttgttccagtctttctgtccgtgtgtccctaagttgatctacccttttctaagtgttgaagacaaaatttgaaaaccagtactatattaactaaccagtaactctactgtaataatatagattaattgcaacacattctacagctatgtc

SEQ ID NO: 52266 - DNA, 1552 bp, Homo sapiens
tgattttttaatgatttaattttttaatgacaatcaaatatgaatgtactgtaatttagccacccttctgttgactatctaagtgcttctgattttttcttattacaacagacaagcttttacataagatatgaatattaatgactgctgatacacacttgtcaaatctgactagattcctttatggaccttactaaaatgactagttcttggcactcacagctttattcttgaagaactttaagaagtcagtaagtaccctatttccctaaatgaccagttgtgtgaaagtctctagaattcttttctgtctctctttgcattcctttaggaaaattaatgtgtttgccttttgtgtttgacagattatggagcagagacataaagtactttgtaacatggcttcacctagtaatcaggtcatcaagctcttgcttgtttttgtacacttatgccttgtagtcactacagtgacaccagaggcagcttcatgtcagtatttccaaatctgtggtttatacctgctacactgaagcagggtcatgttagtgtaggcctcacttaagatgggatatatctaccatattcttaaaatacatttttctgtgaatgacccaagctacctgtcctgtcagtgtgagtgacctggaaaggagagagggaggagttggtatagagggtaatcagtatttcttctgaggacagagctttgatttatgagctcaactttctgcacagacagctgtgtggtccttaaacaagtcttgtcttgtatgattaatgtgtaccaggggaactcctaatggaactaggtactaatcgagatgaagcagttgctcttcattaattcttttcatgtgcacctgccttccttaaaagcaaatgcccacttacccctgttcccttcagccactatttaaattaaaaatcagatggtctgctgtagataggtttccagagcctcttatgtcgtaacactgaccctgttccattgtgagcactgaggagatagacacagagtgaagattagtgacatgatctataaggattggaagaaactttagaaatacagtcccagcttctaattttgtagcacagtccctggcttcaaagaacttatagtcttgttagaaatacaatacagtcacaggaaaagattaaacatcagaacagcagcaacaaaaagaagcccagcacagggcgatggtttgatgccaaatgtgaaacactaacatggagagctttagggttttagaaggagaagagatattgggcaccgtgtgctggagagtttaatttttgttgttttttaactgagccttgaagaatgggtaagattgaaaaatggaggccattcctcccaaagaggtaacatagtaaaaggcagaaaatgtctggaaaacaaggagtgggtcattttggctgatgtgaagggtttgttagaaaacctacctttcaattagttggctgtataatttggagatgactttttgaagccccttctcctacagagcaagcagcagggtaaattctgtattgcagagcctagagc

SEQ ID NO: 52267 - DNA, 1023 bp, Homo sapiens
tagataataggattcagaggtagcttcacaactcccttagaagttgagtgctatcttttgaaattatcagtaaagtgagtaggaaaagttgcctggacctgatgtgtaataatttagaaccctggcttgttcagttggacaaaaatggacatatttattgtacatataaactccagctttgccatgggccctgtctgtgtccaaagtggtgatgccacagggcaggcctttgtaagggtgaaaactggttccacaagaattaggcaagaaggaagtgcatttatttcctgactaagccttattaaagcttggtccagatgtatctggcccattattttttttttaaatgagattgtagctcttctggagaaaactactcttttatcccttaaaattctatagtctagggaagagtgtggcccttaactcagataaaaggggtttgatgttttcctccattctctctatccctgtctgctgagattagtttcaaggcttataatctattacttctgcctcgttttcttcctgatcattgcttttaatttaggtttcagctaatgacattttaataaaatcatattaatacatttggcgattttgcattaaccttttaacaccacttaataaaaacttctttgtacttcacactaataaattatatatctgtattttacctataaagtattgaacttcagcaccaaagggttaagtatgccattaagacaaatagtagttatctgtttaataaatgcttctagcactcaactatcttgattcagttcaatttgctaacacatacttcttttttttttgaaatggagtctctctctgtcgcccagactggagtgcagtggtgtgatcttggctcactgcaacctctgcctcctgacttcaagcgattctcctgcctcagcctcccctggtagctggaactacaggcacaagcccagctgctttttttgtatttttagtagagacaaggtttcaccatgttggcagggttggtctcgaactcttgac

SEQ ID NO: 52268 - DNA, 1366 bp, Homo sapiens
ttagtttgctaatctaaagaggcaaatcagcagccatctgtaagtgtgtcaggcctagaaatcctagcccaaactgggaggaactttagagttatcagccgtagatgaggaaactgaggcctggaagattacacaccttgtgcagggtcagagagttggcgccagagctgaatgtagaaccctgatcctaaactctgttactaaaccaggcttagcccctattttcacctaaaaactcaccctttctactgaaaatgcaatcctcagactgtgaaatcagcttctgaagaaagacaaattacctaacacattttcagccaaatttctcaaagaggatagcctgacagcattgacctctttcggaatatattctttgggctacttaggagtgaatgagagacagtatggtgatggtataaatgccgatctgtaattgtttagagcagttctgagagtacattcaactggaataactctggcaatagggaaagtgtggtgtgatgtcgacttgtgacccttccctggggagcaagctgtcaggacacccagcggtgcttttggaacaaaaggtttctaggccatgctcccaggcactggacaggaggactggctacttgcacctgcagggtgactgtcagtgttttatgatttggggttttgggggttttttaaagttgcctaaaggtagatatgtaaataaagctgccctatgtcaggcaacatttattgagtaagcgttgatcactgtggagggctctggggatttagtgcttaataaaacatgtctctaagacttagtctttggagctgacagttccaaagagatcaccattgcccttcagaaatcttggttctgttggtatgttgaattagtgacatgaacaagaatctcatcagagcaaactgactttacctacttgtgagtttgtatcctgatggaaaaagcctcttctaaataaatattgttattcctagtttgtggtaggaagagatttaaaaaatgaaagtaataactacaaaattattgagatccagcctctgtagatctaatttttctttcattctcaactgcagctcacatggcagccatccttgacctgaccttcagcaccactctccacagtcctatctaccagatctgttctatcctttcctactctctccccagtacaagcttttctcagaagccagactaatggcttgcccgcacatgtctatggctgttcctgcctttgagttttttaatacatttctcccctcatttagaatgtcccctcctcttctacttctccaaatcctatccaaacatcagggcccaagtcaatctctacctgctctgcaaagcctttcccagtcttctctcctc

SEQ ID NO: 52269 - DNA, 2534 bp, Homo sapiens
cttgctgagggcatgaaaagccaccagaagggagcctttagtcttcagccaccctctctgctgtccctttctcctttatcagcagctcggatggatattcacaagcaccatactcacctgtcactattcataaacagggggaagttgaaagttacaccccagtaggaagaggtagggacccaggtggaatcattcaacaaaattaacccagttgcagacaggagtcctcatcatggcaggaactgccagcggggtcctttttctgccattcacccagcagtccaggacccccaccaggtccctcccagctctgtgggtgccctcacctagatgaaaatgctgcatttctcattctcctaggctggaacaagacattaaaaagttaaaggctgacctgcaagccagcagacaagtggaacaagagctccgcagtcagatcagctccctttcgagcaccgagcgagggatccgctcagaaatgggccagcttcggcaggagaacgagctgctgcagaacaagtacgtgcacctttcaggcctttggccgtaagcccggcagcttcactgcttctcctgttgccaggggttggagcacaagatttatggtgacagagacctgctgagaggtttttaaataaaatgtttaaaatactttatttagtaccagatattcaacatgtttataaaatctataaaaacttatttcattgccacaaaacagtttattaatattactgtttttgtcttctctcatttaataacttcttagtttaaaatagttattgagtttttggatagtaaaattgacaagaagtagttctgtcacattttgaaaattttgctcctttgagtgaaaatttctagaggatttgactatatttacttttatttccagaactaaaagatgacattgaactttgattttatttgaaaaggcaggcagaaagccaggtcttctgtgtgaattcatttaggcttttgattagttcattctggaattacttcttaactcagtgtaggtctgtccttttttctttttttaaatctcccagcaatgtgtgcccgtggtagtgatgatcattacaggctgttggctttctgggctttccctgttgaaagaggagttcaacatttttaaggaatgtaactcaaaagctagggcattacaggcaaataacctctccattgcctctgaccagcatttgtggtggttctagcattgatatgtagagaacatcccagtgataaactcacctcatgctgataggtaaagctgggggtggtagtaagcaggaaatatggctgaaatttctatctgaaattaagcatcctgtgactctaaaagaggatttggggacactgtgagcaaacatcctgagctggaaaggaaaagctgtagtaggctacagcaaaattgtattcaggaaaaataaaaaccttcccctttccaccccttaccttagtttcactggggctggtcccatcagtggttctttggtgggactgaagttctttcagggtgctctggaacattagaattagttctacaattatcttcccctctgttcaaaatttgttttaccctgttttctggatgaccttttgtagatcacttacttgaacagagcagaggctaggtcttaatctctgttttgtaaggcagcttgtttattggtgtttaggaattattaaagaataacagtgtgttttcctcaggcattctgggcattgacatttttgatttgctgttcaaacctcctgtttaattggccttaaggtgataaagagatgtttctcaagggtttatagtgggcatttgtaattttaagactttatatgacaatcatttccatataggttacataatgctgtgcaaatgaagcaaaaagacaagcagaatatcagccagttggagaaaaagctaaaagctgagcaggaagcccgaagttttgtagagaaacagttaatggaagagaaaaagaggaagaagttagaagaagccactgctgcccgggctgttgcgtttgctgctgcatctaggtatgtccatgtcacctgagtgtttaatccaaggttggctttcctttaccaacaaagacatgggaatttggtgccttgggcaggattggacgtacagcaatcatgcacggatggattgcttttaagtactgttttattaactggtttaaactccatgtgtgcaagcttgcactatcttataacagctttatccctcagtgacctcatctataaagtgggatgagggaatcaccatgtttcccatacctgggaggcaaagtactgctcataaaaaggtttccagtcactttttgtcagactgatgattactaaatgcattgagagattctatctggaagttcgttccctttagagagctatcattactctccactcttaggtatatgtgtttctgaagtttttatcttaaaatggaagaaagataaaatcttggttgcccaagcactgtgtactggctgctcaaatggatatcagcaaactgtcaaatgaaatgg

SEQ ID NO: 52270 - DNA, 1097 bp, Homo sapiens
ctggtcttgaactcctgacctcaagtgatccacctgccttggcctcccaaattgctgtgattacaggcgtgagccactgcactcggccaacctatagtcttttttaaaattttatttatttatttatttatttgtttttgagatggagtctcactcggacgcccaagctggagtgcagtggcacgatctggactcgctgcaacctccacctcctgggttcaagcaattcttctgcctcagcctccccagtagctgggactacaggcatgtaccaccatgcccagccaattttttttgtatttttagtagagacggggtttcaccatgctggtcaggttggtctcgaacccctgacctcaaataatctgcctgcctcggcctcccaaagtgctgggattacaggcctgagtcacagggcccagccccaacctatagtcttttaaatcactttatttccttctcttctttttcaaaaggggagaatgcaccgaaaccttacggaatcggatcagagaactagaagcagagggcaagaagctcacgatggacatgaaggtgaaagaagaccaaatcagagaactagaactaaaagtccaggtaaggggggaacaaaagacttcccttgtatttgaattccacttttatgctaaacttgtgctctgtgttgcagtgtagagatgatgccttttaatatagatcaaatctcattgcatctgaaaaatctctatgtgacaaaaagatttgaagttctaatcttgtccagctcatttcaagtcatattaatgtagccagattctaatacaaaccagaaatgttgacaatcccttggtatgttttataccaggatttaacttgctgtagattcatttaactttttcaggttataggccagattagtgtcctttgaaacttacacacctccttttagccccaaccctctttctattgccaggggactgaccctcctgcatggctctgagccttgcagattgttgttcatagcagtgaatgataggaaaggtgctagtgctatggacgtagcctgttttatgggctgtgtatactttagccaaatatttgtcatttaaactaatgtc

SEQ ID NO: 52271 - DNA, 1094 bp, Homo sapiens
ctaaattctctgtaataagtttggatttttctgttaaaaagaaaaattcaaatatctgtatatattaattgtttacattaaagtgggcttattctgcagtatgccctgtcaaaataattaacatttttacaattattaatgcaggttgagttttggcaagttcgattacagcattatgataatttgcacgtggccagcaaggaaaaatgttttctgtggttctgaattaagcttataagaaaagtgttttatttggaagcagattccattgttttctagacacatgcccagcacagtcaaatgatcatcttctaaatatttttgtatgtgcttattgccatataaacacatttagcacttgcctaaacccatgaaacaccagattttgtgttctagtggccagaccaagaatagtgggatttaatttgtgatttcaggctaatttatagacatcgatgccaaaactaccttgtagcattgctgttttgatgatattgataggagcttcggaaatataaggaaaatgagaaggacactgaggtgttaatgtcagccctctcagccatgcaagacaaaacacagcacctggagaacagcttaagtgcagagacgagaatcaagctggacctgttctccgcactgggcgatgcaaagcggcagctcgagattgcccaaggtaggagaacgtgggcccctggtgaggtggtgtgactgataatgcacagggatgcacaggccagacctctcctgagagctctcaaccaaggggcatttcagttttctcttcaagagtcttggtaagtgcccaacattgaaatataggaaccatcacattaattcatttgcagacatattttgagatgagaacatgtcaagtgcagggcatacagagaatagtatgatttctacattcaaggagctcacagtgttgttgaagaagtagagaactgcagaggcatcaaaaggtgcttaggtataagtatatacggggcctgagggaacatagaaagagtcagggacgaaactagtctggggaattggagagggcctctccccaggggagctgatgtctgaggtgggcctgaatgatgagg

SEQ ID NO: 52272 - DNA, 2126 bp, Homo sapiens
gtactgcctgccgatgaagaatggtttttacatttttccatggctgggaagaaaagatgacaaagatagtaagtacactgtatatggcccacgacacctaaaatatttactgtgtcccattacaggacaagtttgcctgctcttataaatcactgaacctggagctgttcacactgaaccgaatctacttagggattggcccctggggacattgtgttgggtgaggcctcccttttcactaatggtgggtctttgatcttacaggacaaatccttcagaaagatcaggaaatcaaggacctaaaacagaagatagccgaagtcatggccgtcatgcccagcataacatacagtgccgccaccagccccctgagccctgtttccccccactactcttccaaatttgtggagaccagcccctctggacttgaccccaatgcctctgtttaccagcccctgaagaaatgaaggccagctgtgtgttgtgcccaaaaatttggttaccggaaggcattgcaaaggagcgtctctggcagtcaagataaaaaaacagtttctattgtattttgtggaactgtatctgttgtcatttttaaaaaggggggaaaagataacatccaagtctgattagaactgcccatcagtttttcttgtaaatttttagaagacctcacagaactttacagtttatttttctcggccaacacattaaaaccattcttggatttcaagtagccaactttgccttttatgtattcttacatagtttcctcttgaagaaaaaaaaagcagagtttttgtttttcaaccctttatgtttgttttgttttattcttaaataagcaagcaaaacctgcacattggattcacgtgagatgataatgaaaacttttagtttaagagtgaagggttaagtaacctaacagagctttgatgttatagctgcattaaagaaggtgattgtcaatattacagaaaacaaaaatggattgcccctccaaggaccaaacagattcaaggagcatcatttaagctaagaagagacctaagtgatgaaactagctgtaagaatgtaacaggggttgtgtttgaaatatttatattcccatcggtgtgtttagtcctagaaaattgctagcagcagtcttcttcacagtgccttgggaaaagacatttcaagaggaaacttgataattttaaactcttttccccctttaccgtcatctatcctctatctgtatcaagctcactgcggatcctgctgtaaaactggtgggtagctgggctgtccgttaccaccacagctacatcttctgtttctttgaatagaaagcaccacagtgttttgcacttgcctccagtaaagtgccctgggaagggagctgggcagtgtttgtggacgagagactgtaacgatggctaataaaagctgcgggtctaggtttttttttttttgttttgttttttcatttcatttaactgtgctttctccacttttcatcattttgtgtttgatgatttaaaagaagcttgactattcctcagctcttgtgccaaggagggttttttttttttaagactcttaaactcaaaactctgcacaaagatttcagtttcaaatgtgtattatacatgggtagaaaagtgtttgcacaggcaacttttggaagtgtttaagaatcagggtgggggtggcgggagggaccgggtgggggcaatgcaaaattgtatttggaaactaggaaaaattaagaaaccaaataaattggttttgcttccttgccatggattctggaaggacatagttcttctaaaatttcctgttaattggcatgtacgtctcatttaaagcaaattaagtaggacaagcaagtcagtaaaatagaagtattaaaaagaatcatcctttaaatcacagatcttattttgagattaaaaaaaatacttctagctttagccaggtgtgcatgttgctgccattttgcatttttgaatcatcttgtgtaattgtcaccatgaaagtgttactcagaattgtcatagattttctcttctttgtgcaaaaacatggaaaattgtcactgactttgttttgaggtttcccccattttgctgccttttgggaca

SEQ ID NO: 52273 - DNA, 1059 bp, Homo sapiens
gtgctgggcctgggctgatggtaagcaaagtgctacccccatttccacccaggcagcacggggccaggctgctccctcccccatgaccattggcatcttggagtgatccttgtgcaaggtttttgcttctggggcagcagggctgctggggggcatgtggctgtcttggtttgagtttctggccccttttgagccatgagcagcctggttcctgggaacaaggaatgtgaaaaactgggcaaggtagcatccactcaggataataaggcagacccgaaggccagaggcagtcaggaggggtgggcatcccgcctgggcaggcctgagcagtccctccacctaatgctggtcctcggatccctgcagccaccccaggaagcagggcccaccccactcccagtccctgcccagcctgggcttgcagctacctgcacacatccacctcttgggttgtattcagtttaacttacagcttgggacttcagggcaaaaaggtaggaatgtatgcaagtgaacaatcagatttatgcaactacagtctaagcttgtgtctccagatttccagcaggcttaaataatggcgttttcatatccctgccacattgggtgtccagcccttgcttgggtggatagtgatctgacttgggctggtaattagcccatatttttagttcatgggcaattctcaatggtaactgggtctattaaacttgattcagatatgacagcttaaattgtaaacagctgcgaagagtttcatacttaattaccatatttaagttttgccataaagtgcctgtacttccatcaaaaatgtaaatgttggagacattcaaatgaggttttatactttcgtgaagtgtaattggcacggatcagtcagtttgtttaggaattttaaatatttttttaaaaggagttttaaaggcagtggccacaggtccatttctcaattaaattgagttgtctgggggagggcagggagcggggctgaggctggtgaggcctgaacttgtagacttgaaagaggctggtgctttcttctctcagccagggctt

SEQ ID NO: 52274 - DNA, 1042 bp, Homo sapiens
tctcttaagggaagctgctataatttacttgactctcccctattcttttggacatgtaggttgtctccctttgtaaatttatttttcgaacagcacggtgttgacacagttatagccaaagaatcttccgtgttccctcccacagcttgttccccaccccacccccacccccgctgctccctttaccagccccttctcctctttcctgggcatgtcctgactgagctggggcacagagtgggtgctctggcctctcccgggggtgggtgcaccgctggctgcccctgacttttctgagctgtttgactctcaaggggaggtgctttgatctgaggttactccacctcccctgcaccgggggcttccttcttgggccatgtgccctgctgttccccactggtgccccctcgcgtctgaccctggggcgcgccagccctcacccaggctctcggctcacacagctctgccttccaggcttgcccagtctcggacaaaccctcaggtcctggacactggcctgacagcccaggacatgcattacgcccagtgcctctcgcctgtcgactgggacaagcctgacagcagcggcacagagcaggatgacctcttcagcttctgagggcccggggccagccggacacaagcggccctgacacgtgatggaccaaagccacctgctgcgggggagccagttctggggcccgcctgccacctctcccagccctcagcattgtcagcctgaagatcagagctgcagccagtcaggcaggggagagatttttcttttaagccctgctctttctctgagaaccaaaagatgccttgaatatttattcagtgacttctggcttatgctcagaagccagtctgcgtcaggcacgtctcctgctgcgtgacatgtgcagtgctgtaatcggctcccgcttgctctcctggagcaagctctgccctggctgtgggtatcaggactgtgaccaaagcatttctagtcccttctctctttctaaggacccaaatttccctgggggcatcctgcttcctg

SEQ ID NO: 52275 - DNA, 1037 bp, Homo sapiens
ttgaaatctcaggttgagtgacagctggaacttgcagtagctaagtaaggggcattcatttctccctttcttgttaaggaactacgctgttgaatactcacttggaccacccatagctctttctcaaagctgcttctgagcacagtggctctttttgcccctctcgacctcccagtagggcagtgacccccagtgaaattacatataaattgcatgcatgcagtttttcatggggcatccagaggtgccatcagattttcaaactgatcccccaaaggattaagaattaactatcatcttcctcagaagagatactctctgtgtttgcatttagatggtggtccatttccgaatgccaggggctggagagtcatggcaggaaggaagggctggctagtagggaacttgattctccctctctgtgtaagacaatttattttgccagcagagtctgggatgatgcttgctggagtggctggagggtgggaagaggggtgaggattctgtgctttgcaggtgggtataaaataacatgatgggagaaggtctaagttggtgaccagatgtctggatctttctagctggtatctccttgcacccctggtactagctggaggcatgctgcatatacttggagttggtgttcagctagccctctcttactaatcttgaagaagagagggctggtttctgttgttttgaaacctattgtctcttcaggcttcctgccactgaccacgctctcacgacaacctgaaagatgtagagtgggttttggtttagttgttaacagttaccattcctgctgtcccaccccaggaagaacgcatatgatggttgctggagaatgtctttatttccttcacatttaaattctatctgcgtcatgcccaggggtagatcattttagaaaggtgcctgttttcacaaaagggactgttgctttcctccctggtttgtttatttccagacatggattgattaaatccaaggaacagagggggagctggcatcagataaaaaaaggccctgttctt

SEQ ID NO: 52276 - DNA, 1040 bp, Homo sapiens
cctgctttggtgtctccaccctcaaagagaatagaagccacagagaccacagcctcagtgtggggactcagttgcgggtgtttcctcccctagaaggctgttgcctaagatttgattgagagctccccacacttggcaggcaggtggtcaaaacagttcttactcacaagggggtctgaatttcttaacttggaatcttctttaattaaaggctacaaccagggcaattgtccatctgttttagtggtaacttttacagaagaaactttgctatattgattagtgcccgccttgatagatgatcaataattgtgcttttatctggcatcttcttgggagtcagctgctgccaaggtgaaccttctgggcaaacaattgtcactaaatagcaaccattttcaatggccaaataaaaggaagtttttctctcctccttccacctctgccatcttcttaagcatcatgctaaacacaaatcattcttgctggcctcgtggtcgccataaaatccactgtgcaatgcagcgatgtcctgttggggctgatgggttgtatcactaagactgtttgcttcccaatgtttgttctttgtgatctcatcttattttttatacaacaaccttgtgttgtagctactatttaagtataatttattaatacatatagcgaaatgcacagatttttttttttttttttttttttttgagatggagtcttgctctgtcttccaggctggagtgccgtggcacaatctctgcacacagcaacctctgcctcctgggttcaagcaattctcctgcctcagcctcccgagtagctgggattacaggcacctgccaccatgcccagctaattttgtatttttagtagagatggggttttgccatgttggccagactggtcatgaactcctaacctcaggtgatccatccgcctcagcctcccaaagtgctgggattacaggtgtgagccgcacccagccaaatgcacagatcttaaatatacagtttgctgtattttcagaaatgcagaaaaccgtg

SEQ ID NO: 52277 - DNA, 1066 bp, Homo sapiens
attttgtctttactcagtgaccacaagcacacaggggccaaatagataacaccatgttcctctcagtttctgcctggaatcctcgacttgaacggtagcattcacttgaaaccaagccccgaccattgaagggagagtcatttggcaaagttcctgctgaaactgccatccacttatgtctaagtggcattctggctccagccatccttccagatttccccgatatctgagccctcactgctgccaccagagccgccctgcttcttggccctgcctgggtttgaagacagctcctcagctgggctgcatgtctaaggaggtcttgaaggctcgatgccacagcagtccctgtctctggcaacaagtagccttggcttttgctgtcttgcccaaatcactctgagctttcttcagtggtgtgagcatcttgaagaatgaatgttgaggtctgcctatcccccagggtagcaggtgagatggggccggtgcatgtctattccagttcactgttgcagaactgagaaatgtgcggggactttctcctctgtgttcgctgcgttttcagcagccagtgctgggcacttagccttcttgcataggtgcggaaagctaaccggagttcctgttccttcctccgtgctggtccccgcagggcttgtggtggaggaccctgtggccatctcaccaactacaccgaaacgcatctgacttctgacgccacgcccgtgtgcggtgcagcctccctgctgggcccaggcctggccgcttggagatggtgccctcatcgtcctgggccttccaggctgcagagggtgcggggagcactgaggaactgcatagatggctgtgggaggtggtggcttttaaaaaattgtggtaaaatacatataacataaaaatatatgttagccattttaaaatgtacaactcaatggcactaggtataatacattcacagtgttacgtgaccatcaccactgcctagtttcacaactctgtctccccaaatggaaaaccatacccattaggcagtcactccagacccactacccccagcccagtccct

SEQ ID NO: 52278 - DNA, 1051 bp, Homo sapiens
ttcagctgatgggatggtgcttacctacattgggcgagggcgggccttcctaactcaacccaccaactcaaatgttagtctcttccagaaacacccttgcagacataccctttccagtatcctgaaaagaatactttcccagctatctgggcatcccttagtgcagtcaagttgacatctaccatgaaccatcacagggagaatcccttcgagaggccacctgcatctctgcattccttggctcatggccaccttcctccatcttcaaagccagcagtggtggagtctttttcacatctcatcacttggacactgattctcctgcctctctgtcctacttataaggacccttctgattgtactgggcccaccccgataatcaggctaatctccctctccccaagtcagctgattagcaactgtaattccatctgaaaccttaattccatcttaccttgtaacccaacattcacaggctctgaggattagaacatttgggggccattgatcttcctgccctaggcaaggggggctgtgtgtgtttgaggtgatgggcaaaggccctgtggctgaagcgtggtggggaaagtccaagaggcaggtaggtgttttgaggctcagtgccatggggctggcggttggaggctcttacacagaggaatggcatttaatggtttgccttttcaaagggtggccctggtagctgtttggagaaaggatgggggtgacatgcggggagagagggcagctggagaccattacagacagtcagatgacagccagaggtgaacggggagggggaaaggaggtgagtcagagatgtcatcgccagaaatcctgttgaatagatttgggtggggaggaaaggagacttgagaggacttggtttctgatatgagccagcagcaggatgacagcgctgtctcccgatgcagggaagacgatgaatgggaagcccggggcaggcggagcacctgcgaacacttagtggagtatgctgtgcccaggtgctgtgccgagggccttggcattgtaactgatccttgcagca

SEQ ID NO: 52279 - DNA, 1079 bp, Homo sapiens
tacagatgttacacctgccgctaggctttgggggaatattaaataagctagctaaagaacatggactcagccgggtgcagtggcttacacccgtagtcccagcactgtgggaggccgaggcgggtggatcacttgaggtcaggagttcgagacaagcctggccaacatggtgaaagcccatttctactaaaaatacaaaaattagctggacgtggtgacatgtgtctataatcccagctgctcgggaggctgaggcaggagaatcgcatgaacccatgaggtggaggttgcaatgagccaagatcgcgccactgccctccagcctgggcaacagagactctgtctcaaaaacaacaacaacaacaattaaaaagaacttggactctggggccagatggtttgcatgtgcatgctgctttgccactgcatgaccttgggcgagtttcttaacttctctgggcctcagttttcccatctataaagtgggaacaataatggtaccgccttcacaagattgttttgagaacaaaatgagttcacacacatgaagtgcttatattcatgcacagcacataggaagcattcatcaagcgtcagctgcgatgaggatgctgcaaaacccttagaacagtgtgtgctgctcccattttgattggggtgggcgtccaagtcccctggacccaggaagccacatgaggacttcagggctttcccagccctgattccccctgttttttcccccagccctcaaatgcccatggcagaaatcttgggtgagccaatcattggtaggctgtgtacctctcacaacttcatttaagcagcttacactggaacttttaacaggaggaggtggggaaggttagggttcacaatcttggaataaatcagcctcctgccaatggccaatgggggtcagctggccagccttgaaagtacttaacagatatccatctttccaataaatctgtgtagtccgtgagaaattcatcctcccttggcagcaggggaaattgtcaaggggcacagagtcctggaatgtcaccccagaagggttctttgatggcgagtccaacccc

SEQ ID NO: 52280 - DNA, 1031 bp, Homo sapiens
cccattccttgcacatacattatgccaggcaccatagctgtattcactctctttctaaaatatatatatttcttaattaattcagacggggtcttgctgtgttgcctgggctgatcttgaactcccatgctcaagtgatcctctcaaagtgctaggattacaggcgggagccactgcgtccagcccatagctgtattccctttgtctgcctcacagcccttataaaatctaaattacccatcttatccccattgcacagatgaggagattgggatttggcaagtttgaggacttgcaaagtcttaatcccagttccgctggacttcaaaacccaagccataaactaccatgctgccatgtctcccagtgaccacatacagtggccgccaagaacacagtggggtaggggaatggtctctgggttggtgtgtgccacgtcctgtacaccactgcccccagtggaaggccagggaaggcatgtgattcgtggtcagggtctgcagcctcccatctctaggcatcatcatttattagacatcagctgagtactcaggggtcgaacagaagactcagatttccctcttttcttccaccataggaacatcttttatgcgtgcctaataacctaaaaacatctacagttcacccttgaacaacacaggggtaagaggcaccaaccccctgcacagttgaaaatctgagtataacttttgacttcccagaaacttaactgcttattagcctactgttgactggaagctttaccaataataaaaagttaatacatattttgtatgttctgtgtattatatactgtattataataacataagctagagaaaattaaatcttattaagaaaataaaggaagagaaaatatattcactgtccattaagtgaaagtggatcattataaaggtcttcatcctcatcattttcctgctgagcaggctgaggaggaggaagtgggggttggtcttctgtctcaggaatggcagaggcagaagaaaatctgcgttggctgggtccag

SEQ ID NO: 52281 - DNA, 1020 bp, Homo sapiens
agaggcacgctccctgggctctcccaggctctgagggtcggggctgcagctcttccttctcctccaaggagcaaagccaggcagctcctcagggcccatccccccaaaacataccagagtctacagctcaactcactgaaatggggaggaagcaaaaccctggagggaggatcccagggatttgaagcagttaaacagaagcacaggctttggcaccagggggcctggttcaccattttctggctgtgtgacctggggcaagtgaattcacctttctgtgcctcaatttcttctggaaaaataggaattatagtacctacctcatagggtagttgtgaaaatccaattagttaatacactgtgaagggcttaaagtagtaccaataaatagcagtggctgtcatcatgattaccattatctttaccattagtattgtcaaagctgcccagggaagcaggagagttgggtggcatctttgcgtgccagtgactgcctatgtagcgttggacaaatcactttcctcacccttccctgggactcagactctgtgaattgaacagtttggatgaatttgtgctgctcttcgccaggaggaagcatcagaattgcctgcagggcttttgcaaatgtagacttccatgttccgtctccagaaattctggttcattgggtctggagctggcccagggatctgcattaaaaatagcatctctgttgatggttctgatgcacaacccaggttgggagccacagttaaccgggttaggatcctgaagtgattggtccccttccctcactcccattagctcaggtggtgttttagcaaaggggaagctcctgccctctctgtgggtgctgaggctgttgcctgggtgggggtcccactttactaggtgtggcaggtcaccagttccacaggaagcagtggtggctggagaacagccctgaggcgtgagtggagccggcacatctaggagttttcattcagctgatgtttggtgaaagtgggatctgtaggc

SEQ ID NO: 52282 - DNA, 1049 bp, Homo sapiens
ctcatctctattaaaaaaaaaaaaaaaaagccaactgcggtggcatgtgtctgtactcctagctattcaggaggttgaggtgtgaggatggcttgaacctgggaagtggaggttgcagtgagctgaaagtgcgccactgcattccagcttggttgacagagcaagaccctgtttccaaaaaaaaaagtaaaattcttggtttaggttttggcatgaaggctgtattagacacataaccatgatgatcatggaggctgctagacccagctcagattactacccagtggactagctggatgaccttaggcactagtcatttaaattcctcctctgtgaaccgggtttaacaacactgctcagggtggggataaggaacaaacagactaagtcctgcctgtggatagactttggaaatggatacttcatgtccttgtcgtagtccagggcactggtggtatttcctctgccaggtgatttgagaactcctcacgggtccccagtgagaggcggtgagcgactgtgtgaaggaatgagacagcatgggaggtggaggaggttggtgtctgcacccaccctgcccgagaacgggacagtgggggatacgtgcaggacaaaatggccttgcccccgactccaggctccagaggctgggggtgagcattctctacccccatcccaaagctatggcagaggaaccctgcagcaaaaggacacggagtgcccatggtattctgtgtgaaagtcactgaggccagagacagctcttcacatcctgtgttgctcaggccttccccaccctgtccccctgtggggtctcagccccagttctgggcagggagtgtgggatgcttaggagcggggtacaggctgagcctcagccaccctcacgggaatccatcctgggcccctggccctggccagacaagctggcagattgcccagccacatccaaaggcaatgcatgctctgagcacagagcctggccgaggacaccagagagcaggagagcgtgggggccgtgcagacacatgacaaggctttgataacac

SEQ ID NO: 52283 - DNA, 1035 bp, Homo sapiens
gggctgttaaacagggcggtgatgtgatcattatgctcatctttcatgtatcagcctccagtaagagcattctattgggttccaggaagaatccctaaaaaatatctttccttccagaggcttcaagaaacctttgcctggaaatattcagcctcagagcacagtgctatgtcacccaggaaatagctatcatgggaaaattcaaggaaaatattcctgctcaaggaaaaaaaattaaaacacgacacacgagaaacagaccagatagaaatggagaggtcccagtccgtaaatgggttttatgccgccagaagacctcatcatattagacgatctggttttaaacaataaactttgggtaatggggatgtcactttaattcatcttcctaaaaaacccatgtggcaaaaacattccagttgctattgctacattgcaaattactccaaaacttgggggcttaaaacaattattttattatgctcacagattgagtgggtcagtaattcagaaagggcacaacaggggacagcttgtctctgtgcagtcatgtatagaccctcagctgggaaggcttgaaggctgaggctgactcgacagctgggtggtagtattatctggaagctttttgagtcatgcgttgcaattgatgctggctgttggctagaacctcagatgggactgtcagtcagaaaactgatacatggctctctacatgttttctccttgagagctagctatcttgggcttccttacagtatggtggctggttccaagatccaacattctgagaggcaggaagtggaagctgccagtttcttaaggtctgggccttaaggtcaagccaggcacagtggctcacacctgtaatcccagtgctttgggagactgagatgggaggatcgcttgaggccaggagttcaagaccagcctggacaacatagtgagacccccatctctacaaaaaaattttaaaagttatccaggcatggtggtgcactcctgtagcccctgcttctcgggagttcaaggatg

SEQ ID NO: 52284 - DNA, 2032 bp, Homo sapiens
cattcccaaattcagttgctgctgtttttggtcttctctgagctgtcttcttctgaacaaaatgttttataggttgactctcaaactttctcttacttgccttttggaccaaattagattcaagacccttattgctagccccctcctcccacttgtgtcctcagatcagaaggagctgggtcagtgaataagaatgggaaagtaccccagtcagcaaaggttcagatatgtcaccaaccaaacgcagtccctcttgtttttgctttgaaggttgaatagtcagtcttggctcttatatttagcttaatcaccagtaaaacaccttcatgatgaatgtatataagttcactaggatttcaagcaactattttccaggtatctaggaccctcttatatgatgtatcagataacttgggcctacttcagtctggagttggttttgttcccatgagtttcttatgtgaatgttttgctctaattctggctctcataaaaaatcatctcccctgaaggggagacccggtggtaggaaatcccaagcacaccttttctccagaactatcaagggtcagaatagccaagagtcatcagtcacttcccctgctgaccctctggggaaatgctactaagaaaacagggccagaaggcagaagcttagccaccagaggccaactctaacagactgatggtcctttactttgcccatactttatagctatttcaggaaatagtaaagcattctagttaatagatgagatctggaaccagctagtttggttctgaactctggattcaccgcttacttgctgagtgactagtgaccttgggcaacttgtataacctttctgtgcttcaatttccttatctgtgaaagggaattgtaatggcacctacctcgtaagattgttgtgaggattcaacgagataatgtattcaaaagatatacagcactacacaggaaagagtaagtactcaagctattattgtgtctctaggaaccggagtttattgaaggaggaagaccctgctgtgcttatctctgaggtcctaaggaggaagtttgctctaaaggaagaagatatcagtagaaaaggaaattgacaaccctcagctctgcaaactcagtctcatgctcctggaataccttcaatagctgccttcctcaccgcagatgtttctgcctcttaaggatagatcttctgcaacagtcttgctgacaagctagagcttggactgaaagagaagagctggattatatatttcccagacttcaaaccctagcagaagctaaggcttgtgatttgacctgagacatttgtttcaggtaatcgtgtagaatgaagtatcttagtttaaagggtaagagagaagttgtttctggtttttccttgcccctgtgtgaaaataggtcctaaatgactgacttcactgcattagaccctatagctggtctcacaagacactttgtgcccagctgtcactcactcagcagcttccttgcagcagagcagggctgaggggaaggggctatgaatgtttgtatacatgttcacagggcacggaaaatcttatgctgctccgtcataaacctacaccaatgcccagcaatcaccctcctcacttccttgtctagatgtagaggtcaggctgctgaaccagccaacacatgggctactgctgggaagcctgggctgttttttttcttaaacacattttatattactgaacaaccaaatctaccctccacggccctgaggccttatcagttccactgattaaaaactttctcttccacggactttaagcccggtaggaaagagagaggaggagggggaaagagcaaaccatctttcttccaggcccttgactgctcctttgggctgggccaaggtttgtatgtaccacaccatgcatgactcagatgccctcaggtccctttctctatggtatgtatactgcttgtgtttgggttgaagcactacctgacattaaaggaaggacttggagagagaatgcatttgctgtgtccatc

SEQ ID NO: 52285 - DNA, 1148 bp, Homo sapiens
gtaatataaaatgtgtttaagaaaaaaaacagcccaggcttcccagcagtagcccatgtgttggctggttcagcagcctgacctctacatctagacaaggaagtgaggagggtgattgctgggcattggtgtaggtttatgacggagcagcataagattttccgtgccctgtgaacatgtatacaaacattcatagccccttcccctcagccctgctctgctgcaaggaagctgctgagtgagtgacagctgggcacaaagtgtcttgtgagaccagctatagggtctaatgcagtgaagtcagtcatttaggacctattttcacacaggggcaaggaaaaaccagaaacaacttctctcttaccctttaaactaagatacttcattctacacgattacctgaaacaaatgtctcaggtcaaatcacaagccttagcttctgctagggtttgaagtctgggaaatatataatccagctcttctctttcagtccaagctctagcttgtcagcaagactgttgcagaagatctatccttaagaggcagaaacatctgcggtgaggaaggcagctattgaaggtattccaggagcatgagactgagtttgcagagctgagggttgtcaatttccttttctactgatatcttcttcctttagagcaaacttcctccttaggacctcagagataagcacagcagggtcttcctccttcaataaactccggttcctagagacacaataatagcttgagtacttactctttcctgtgtagtgctgtatatcttttgaatacattatctcgttgaatcctcacaacaatcttacgaggtaggtgccattacaattccctttcacagataaggaaattgaagcacagaaaggttatacaagttgcccaaggtcactagtcactcagcaagtaagcggtgaatccagagttcagaaccaaactagctggttccagatctcatctattaactagaatgctttactatttcctgaaatagctataaagtatgggcaaagtaaaggaccatcagtctgttagagttggcctctggtggctaagcttctgccttctggccctgttttcttagtagcatttccccagagggtcagcaggggaagtgactgatgactcttggct

SEQ ID NO: 52286 - DNA, 1084 bp, Homo sapiens
cacacttagaacatagatatttagcattccgtataaatcacgattactgttttcaaccagaggctaatgagtgatctaagtttatactcttgagttggaaattatgcagtttttatattccttaaattgacttttaaatttacttaaatgatcaatcagaggaattctgaacaaagcttggtttaaggagttacgcccatgtagggcaaataggagcaagtgcaagtatagttgaatacaacaataggttctgagcaatatctaaaccaagaggacaggatgaggcttgtgtgcagtggtgcagcacagttcatcttggctcctgtctctggcacatagcaggtgctctgggatctttaaaataccagttctgaatagatgggaatataaagagggcctgagggtagaaacttggcataatgatacgaggtgtcctacaagtggcagtgagcttttgttcatctaagacatttagggagggaaactggcctcaggagaaagcaagggaaggatcaacaggcctgaaaggatgcctcatcagttaccacccatcccatggtggccctgacttcctatcagagggcgatcctgagcccctgccttgtgacaggcttaagtcacaggaaactgaaggggatgcatcttaccacagaaatagaagctctggcttttctatttcaccttgacctttggagaagcacttagtcctgggcccccattttctcctggataaaatgagatggttgggggagatcagttaagtaactttcactcccccattctttgcatctggcttggagtgaagaggaggagcggtggcacctacgagcttctggggaagtgtctctgggtatgcattcccgggcccggcattctctgccatcacgggagtctgcgtctgtcccagtggggccagcctctcccagcagtacttccaatagattggcctaataaggccagagtggtttgacaagcagttggggctgtcaccaaggagcagactccattccttttgtcttgaatggaaaatgaggcttgtcccttcctgaggattttgtacttgggccttatggttgactgggct

SEQ ID NO: 52287 - DNA, 6895 bp, Homo sapiens
gtcttaggcacccatgtgggtggcgcactagaaggggcactgctctgtccgagtgctgcccttggggcgaggcgggcatgtggctctacaaggtggagtccaggcggccaaagtttggaaaggtagggaaggacccccccgccctccgcctgctccgccctgcccttgttctcgagaatggggagctggttcggacctagtccggggtccactgccacgccctcttccacggcgagaccacccccctagtcccaggcccacacctggggatgctccccaggcgccctgcaacccccggcattgtcctcctgccctccgggacaggactacacttcccgaggtgcttcggggtcccggggggcggcgctccacgcgggttgtggggggcgggggcggcacgtgccgccgctctcggccaatgcggagccccgcgcggaggtcacgtgcctctgtttggcgcttttgtgcgcgcccgggtctgttggtgctcagagtgtggtcaggcggctcggactgagcaggtgggtgcggggctcggaggaggcggcggctggctgaggccagcaagagggacgcggtcggcgggaggggctgggccgtggcagcgaccccctgctgcagggcggcgggcggggctgcgggcctcggaggggttggtgggcgggggtcgctccgctttgtgtgtggctcgggcggagcctcgcctttgtccccgctctccgggggcgcggctgttcgtgggcagggggctgggcgatcaccgggcgtccgctccggggtgccgtcgaggagacaatagggggcgtgggccctcgtttacctccctccctccctcccttccctgcgggccccgccgggttccccattgtctgaagggacggggcggtgccccagggaccagcggctttaggaccaaactgcgggcagccagggccgcgaccctccctgcgaccgtcccctggcgaccgcagctggtgattgaggggcggcgctcccgggccccacgagggttcttctgtcttcgcggccggacgcgcggacagcgtgggtggcggcaggttgggcatggggacggcgggaggcggtggcgagctcaccgcgggaccacccgggggcctgttcccggggcctgccccacccgctgaactgtgaagggggtggtggcggcggcctggaggtgtttttggcgggagttggggggggcgtccgcgcagggggagtcaggcaggggcggagttacccggattggaccgttagccccgcccacccctccccttcccacgcgcgcgggctccggggtgttgagttcggggagattcgaaaaggcgcggggaggaagggggcggggccaggggccggagcgcaaggcgtgctctgattggccgggggcgaccggtcctcttttcctcgcccggaccagggccacgcccatcctgggtccggtgctgcgtctaattctctgcttttcttaaatcttgtcgctgcctctgattttaattcctagcttttgggaacctgtcatcctacgtttttggtactagctggcgtctacaaaagtcataatgttaaaaagatcaacaagagatacagcatttttcatgacataacggcagcaaatataagtcaaaatctagaggttcataaacattttgcttgctgttgggcaaggaagcttaaacctgagggacaataggagttcaacattattggttactattagcttgggcgttttcttatccaccacgtcagacacagacaaagcaggggtgggtatttcatttgcacaatgagttgtaggcagtattaagatggctccgggggcactgttgagttgaatctggaatatcttcttacagtttcggtgaaatgttaaagagtttatgggggaaaaattcttcacccttgtgactttgtctgattttaaaaatccaagagttttatgaccgagaaagctcagttaacttgattttctggaaccaatatcatattcaggtcatatttcccaatgtttatttagtagattttgataatttttttcgtggttaatttagacgtctttattccacgtatttttctgacgatgtatgtagatgtgatgtgagatttttttgggttgatgacatatagaaaggcaaagaaagtgattgcatgtttttgaaaatcattttcaggactttccttatcccagttgattgtgcagaatacactgcctgtcgcttgtcttctattcaccatggcttcttctggtaggtaatctatttggaaaatctgaaattgtaatgggcttatgattttagattgagatggctcaggtcttcgcctttgatttggcacttatgttttggtcttaccaaaacctattttatgaataggagaagaatttaaaaatgattatcacttgaatgtgccgagagctcgtaattgtttattggacagtttggcttagtctgaagcaaaattgtggagtttgcacaagtcttttgtttatgaaagcgattgtcagatactgatgtctcaaaacagtatttattaatccaaaaatgttgagctttgtttttctgggagatggtttttattttttttgagacagggtctcaccttgttgcccaggctggagtgcagtggcttaattatagctcattgcagccttgacttctggagctcaagtgggctcaagcgattctcccacctcagcctccatagcatctgggactatcgacatgggccaccacacccacctaatcaaaaaaaattttttttgtagagatgggctttccctttgttgcccaggctggtctcaaacttcagggctcaagggatcttcccatgttggcctcccacggtgctgggattataggcatgagccatggtacctggccttgggaaatggtatttagataataatatcttgcctgcaaatacatcttcccctagtgtcagtagactgataggaataaaaaggggaaaaaaaacacaactttcctcatcagccctagtttaatacattaaattgatttgggttttagaaaattatagtacagtttattagaacaggagaatcctggttttctgaattataaatataatcaattctagatatccaggtgaaagaactggagaagcgtgcctcaggccaggcttttgagctgattctcagccctcggtcaaaagaatctgttccagaattccccctttcccctccaaagaagaaggatctttccctggaggaaattcagaagaaattagaagctgcagaagaaagacgcaaggtaaacgaagcaattcacagaaagcaggatattaatttatgtaatgggcagatcaattttatttctataacaggaagaaaacagaattgtagctacactgtgattattacatatgccagtgactggaaggaaataccagtcctcatttattgaactcctgttacatgcccgctcctttgtttatatttttctcctttaatacatggtgttgcctcaaataatggaaattagaaacagtttcaggaatgttaagtcgtttttctgcagtcatacaactagtaagtgttggggtcagaattcaagccctggtctatcttaaaccaaagctcatgcttctctcatgcttcctctttgaaaagatttgttgccagatgattctttggcactttggttttgttttttgagagctgtacaataacattttaaattgctagtgtgattgtgttgctcagctggtatcatggtagcttttctcttatctaaacaattctattataaagtaactatctttaaaagctaatcagaagaatcaataaatattaatatgctagttgtagaaaatttgggaaatacagaaatttataaatggaaattaaaagtattcattatcccgcttccgagaagcaaccagtgttaacattttggtgtgtttctttccattcaatgttactcattaacaactgtacataacttttcatttaactccctttctcaacaaccctgataggattgattttaaagctggggcaagtgaggcacaaaaggtaaggtaataaccttccccagaccagcatagtgatttgtagtatacacacacacccgcccgaagagcctcagtgcttacactaaggagtcgtcttctatgcaatagtgtgagttcatggagtaggaggaagcaatacaaccaaaggttggacagtggaaagctttttagacatcaaccctggccctgtagtcattagcctgtgctttacatagtaactggctaaatataatgaaactcccatcatgactaggatttggcagaagagaatcaatagaaccagtgtcagatgctctgtggttatcctgcaagtcagtggttccaatgtgttttgagaacaagctgttctgttgaaggggtcataccaaggtatggtctggtaattaatgcagtttcctgagacaaaagctaataagccttttccttgaaacaaatttttctgtcttaaatagtaatctacagacttagtcttgaatttcctatcattgttttatcagttatggttaaaatttttacaatgagctagttttctttgggtagcttttgaagttaaatagtgaaattctttacaataaaagtgccactcgcaagtacatattcctcaagtcatccagataccattaagcagtaaatcttacaaggatttccttaaggactaattgggtaagatttctgaacagataagcacttttccaaagttaaatacaaatactagaaaaagaatatcattttcacagtattttatgatagggataattcaggtcctaattttggtgttatttaaagggaccttattttctgccccttttcaatccccttagtaaattatttttattgtaattttaacttatgctgaatacattttattttttgaggcagagtctctgtcacccagggtggagtgcagtggcacgatctcagttcactgcaacctccacctcccgggttcaagcaattcttctgcctcagcctcccaagtaacttagactacaggcacccgccaccacgcccggctaatttttgtatttttagtataggtaggatttcaccatgttggccaggctggtcttgaactcctgacctcaaatgatccacccaccttggcctcccaaagtgctgggattacaggcgtgagccaccacacccagcctgaatacattttagagtgcctagcctattaaacttttttttccagtcccatgaagctgaggtcttgaagcagctggctgagaaacgagagcacgagaaagaagtgcttcagaaggcaatagaagagaacaacaacttcagtaaaatggcagaagagaaactgacccacaaaatggaagctaataaagagaaccgagaggcacaaatggctgccaaactggaacgtttgcgagagaaggttggtttcttactttgtaaaagggttgagcttggagtttgatgcaccaatgagttggcttgaactaagtgctttgataaaaggtgtttggtgtctttttgtcatccattttggggcttaacatattaaatgaaaggtatattttaagatggaatattcagtaattcccagcataattgcacagtccttggaagtccagtaggcagcttgttaggttctacaagggacccaggagatttgatgatgatgtctcagaacttaaattgtgtggttcccacaggctgtaatatatgcactgaggttgtgttgggcctctttgaggtgggggctgggggtcgtgacttgacaggcttttttttttttttttttttttgactgatgacaccttacccttcctttacaggataagcacattgaagaagtgcggaagaacaaagaatccaaagaccctgctgacgagactgaagctgactaatttgttctgagaactgactttctccccatccccttcctaaatatccaaagactgtactggccagtgtcattttattttttccctcctgacaaatattttagaagctaatgtaggactgtataggtagatccagatccagactgtaagatgttgttttaggggctaaaggggagaaactgaaagtgttttactctttttctaaagtgttggtctttctaatgtagctatttttcttgttgcatcttttctacttcagtacacttggtgtactgggttaatggctagtactgtattggctctgtgaaaacatatttgtgaaaagagtatgtagtggcttcttttgaactgttagatgctgaatatctgttcacttttcaatcccaattctgtcccaatcttaccagatgctactggacttgaatggttaataaaactgcacagtgctgttggtggcagtgacttcttttgagttaggttaataaatcaagccatagagcccctcctggttgatacttgttccagatggggcctttggggctggtagaaatacccaacgcacaaatgaccgcacgttctctgccccgtttcttgccccagtgtggtttgcattgtctccttccacaatgactgctttgtttggatgcctcagcccaggtcagctgttactttctttcagatgtttatttgcaaacaaccattttttgttctgtgtcccttttaaaaggcagattaaaagcacaagcgtgtttctagagaacagttgagagagaatctcaagattctacttggtggtttgcttgctctacgttacaggtggggcatgtcctcatcctttcctgccataaaagctatgacacgagaatcagaatattaataaaactttatgtactgctgtagcaactcctgtgaaatgactaaagggaaccttaattatttctaaagtagcatttgactcgggtggttaaggttggcagatacgtcatcttgtatccagaggctgt

SEQ ID NO: 52288 - DNA, 1086 bp, Homo sapiens
caccatgttggcctggctggtctcgaactcctaacctccagtgatccacctgcctcggcctcccaaagtgctgggattacaggtgtgagccatcgcgcctggccgtctctgtgctctggacactagccttttagttggatgacctgagtgcattcacattcctcacaagtgcacaacaaacagcctggattgagtttgcatttaaaacacatctgtcttacgcatttattgactttttggaagtaaattttcatttttatatttctgcctgttcgtttcatcttacacatcgtgagccttgattccagcctgtgtttggagaccttagggtcaataagagattttagggcatcattcttatcacctggcaagcagggaatggacccatgtctcaagactttaatggcgcctgactgcctggtcctcagcccccttcccctgtcccctcataggcaccatgtcattataaaagcttaagatgaaagatgatgggaagcccaccatggcacgattgggctccctttaaaagcaatacccgttgagctaagatactcactgttagaaacctgctagcagacatggaaatgggaggtaggaggcacttagactgaaagaagatttttgaggacttactttatgccaggccttctgctcctgctttatcgcgtgtaattctagagacagccctttccagtagatacctttattattaactgcattttacaggggaggataccaaagcgtaggaaatttaagtaatttctttaaggttatctggttatcaagtggcaaagccaatatgtaacctagactggccaattccaaggcccatgcccttagtcacttcactatgctggcggtgactctggtgacaattcagagtgataagttccatggccacagtaggcactcagtctttagactgtccacacggaggacagtctcctaactttgacaggagaggaagaacagctaggaaagggggcttccttgacaacacaatgtttgcctttaatcttagtggagggttcacaggcaggaaagggcgagggtcttctggacagaaggcataaatgcttgagtggg

SEQ ID NO: 52289 - DNA, 1115 bp, Homo sapiens
ggaggatcacttgagcccaggagttccaggttacagtgagctctgaccgcaccacttcagcctgggcaatagagcaagatcctgtctcaaaaaaaacagaaaaaagaaaacaggctgatatgtctctgagaaagtgaaatcaagactgggaaggcaaagaagccagtcgtgtgaagatctagaggaagatctttccagccagcaggaatagctaatgcaaaggccctgcagtggaaagaagcttgctgtgttagggtgggaggagcgtagtgagtgagggggaggcaatttaagctgtgatcagagagagaagcaggggccagatcacagggtcatctggccagggtaaggaggtgtatattttattctacgtatgatgggaaactgttgaagattttcaacagagaaatatcagtcttacattttaaaagatccttctggctactatgtgaagaatggattgtagcaggacaagactgaaagcctagaggctcattagagagattctgtttcagagtcaatgtgaaagatgataaatttacatcaggattgagatagtgggatggagagaagtgattggagtcaggatatgtcttagagttttcaggatttggtcatgtgggaggtgaaggaaagagaggaaatccaggtttttcttcttatttttttccctctgagacagggtcttgctctgttgccctatgctggagtgcagtggtacaatcagctcactgcagcctcaacctcctgggctcaagtgatgcctcaacctctcaaatagctgggactacaggtacatgctaccatgccctgctaattttttaatttttttttttaagagatggtgtcttgctatgttgcccaggctggtcttgaactcttgggctcaagtgatcctcctgcctcagcctcccaaagtgctgggattacagggatgaaccaccatgcccagcccaaggtttttcatttgtgtatctattatttgagtggaagatgattgtcctttattgagatggagaagaatagaggagcatttcaggggtctgaggaaggaaatggcaaaatcttaaggcccataatattgctcttggtgacatggttttgctgttggcacc

SEQ ID NO: 52290 - DNA, 1027 bp, Homo sapiens
tctccgtcttttcctgctaattccagattacctttaagatcttagtttggatgtcattgtcctagggacacccatcttgacacctatattatattaggttaatttttccagaatgtgctttcataagacaatctatacttctcagcatttaacataattgtaatgaattaattacttgtgtaattattctttaatgcctgtcttcttcactagattgtaagccttctgaaggcagagaccacatctgtcttctattgctctggcttctaggacagtgcctggaaagtagttgtttagccataagtatttattgaatgaatacaagggctgtgctgtgctaggttctcattcattcagcagacatctgtggagcacctgctctgtgccagccccttggcatgagaggaaggtgggacataccaagattaacaaatcgaggaaatcgcatctgctagaggagcaggaacatagactcctgtaactgtagcccatggcaggaagtggagagtaaatatggagatgaagttagaaaggcaagtaggtggtttttgatgctgctttcttgttcaataaattgagtacctgctgtgtgccggggctgggcattcagtagtgaagacgagagaattcctaccttcaggaagattatagtctagcagggaaaagaagcaaagaaaccttttcctcctaggccaacaggtatttatggagagagtaggtgagcactttgaggtggtccttttggtctaagaatctgtattgagacttcacacttcattagacctgggcgaggcagttaaaaatactctcattaaccagagtgaaattccaagggaaaaggaagggaggataaggaacattgtttcctctcattgcatctgtggttaattcaggctctgaaatccttcccatgggtcatggacctatggtttcctatcctaagttggaatatgtgcagttaaatacctaaccattctcagtgtgccattgtctcatttgattcccacatagccctctgaggtgcaca

SEQ ID NO: 52291 - DNA, 1001 bp, Homo sapiens
ggctggagtgcaatggcacaatctcagctcactgcaaccttcgcctccagggtgcaagtgattctcctgcctcagcctcctgagtagctgggattataggagcccgccaccacgcccagctaatttttgtatttttagtagagacggggtttcacttggccaggctggtctcttgacctcgtgatccgccctccttggcctgccaaagtgctgggaatacaggcgtgagccactgcgcctggcttagcttcccattttctgttgtgttcactcttcctagggaagaaagggagaagaaataggtgattaactgccctgagctgctcaggggccgatggtggttctccagaggggagaaacacatgtccccacccatacctatactcaggctgcccttgggataacagctttggggcagccagatattctatagcccatgtctctgctaggatcttgtcgcctgcctgttagctggaatggcccctttaagacaaaggactctggataccccttgatcatcttctcccatggcctaggagccttcaggtaagagcttctttcccccagaccttgccatactccttgcctggtgacagctgctgagtcttagcttattctcaaagggcaaaaaaaagacatttccatctgctagctgtcttatctcccatctgcttcgtcccatagcattgggttcaccttccccagaaggcctttttcaagtccttttcaccttgtggagcctttcagcagcctttatatgctttacttctcatggtccagcatttatataaataaacacttttagctttcctcctatgtgatagcccagaaatgctagaaggagcatgagctttgtgatcagagcatcatttatttatctattttatttttatttttttcagacagggtctcattctgttgcccaggctggagtgcagtggtgtgatcacagctcactgcagcctcaacctcttgggctcaagcagtgctcctgcctcagc

SEQ ID NO: 52292 - DNA, 1017 bp, Homo sapiens
tgataggaacatgcttctgggtggccatggggattatagcaagtgaaatcgtagtcgtgaaaatgtggaccagaacacagtatatactcagtaagcgtctgctgcatgcatacgtgtctgaatgaaagaaaagttcatccagagacatttctaatcaaagtctagaccagaggttctcaaactttgctgatcagaaacacctgggaagcttttacaaacgaattgatcactagaaataggggcccccagaatatacatttttgaaaagcttcccaggtgattgtgacaataggttcaggaacctaagatctagattctctatggaccactgttgcaggcaagtcactggttgaaaactgctagaataggtgttaatccaagagctgccctaaagtagtctaagattggttaccagataatggatgtggacagtgatcagagatgataggaggaaaggttggaaggacctgggaaagcttcacagaggactagagatttcactgggcctcagtggatggagaggcttctggacaggtactaccatgaactatttagacaaagtgagcaaaagaaggtagagacacatagactgatttccttggaaaattccatgacttttattagaaatgactctggatgctttgtgtaaatgtctctttggcaaaatttgcaactcagattggatttttccatctctccatcctatttggacatcagtcaatgtgagtccaggaaataaagattcatttgcgtgttagcttcactctggccaattagcttctgtaatttttatttccaaacaatttagttgatgatcttcccagaaactttccaggagcaccagagagttctgctgtcttctgtttggccatttccaagtccgcttatcctgattcctatcccaagtgctgttctctatgcagagtgagacaaaaatctgttcccataagaagcttaaggactattgtcctggttccccaatcttaaaacctgacttattggctcttgactccccag

SEQ ID NO: 52293 - DNA, 1046 bp, Homo sapiens
aggagctcaggattgaaatccccaccctgccacttcttagctgggtcaccttaggaagagttcatcccctctctgagctttcctcatctgtaagaaatgacaggtaaatctctgccttggagggtggctggaggactgagagacagaggctgtgataactcatggccagctgtgagttgcagtacttgctggttggattagcaattgaggaaactggtttggaaggggttaaatggagaccctgcctcccagccaggagcgaatcagggctgggaggggaggagccaggctgctgctaaggaaagagatcaggatgggccagttgccgactggagagggatgggaggagataccatagggtttggggggcttggcacagcggccctggcctctgcactgtgatagctccaagccagatggtgcaaggcagctgctgggctgcggggaagaggggctgcacttcctgagctggtgcagcggcagagtggataaggatcaggaccccgagccctcctggccctccaaggcagggggacaccggctgcacccaggctgtgacctcagctgacgccgatgatccacatgggatgcagggtctaattttagctccagccacaggggccacagcccagaagcgtctgccagcgggcacaggggcagccagggctgctcaggcaaggggaggagtgggaagaccagcccagctccctccagcctgtccctggccaagccgcctcctgtgggagctctgactggtccccatggcctggcagacagccctcctctcagttgagggcaaggtcaaggggtgcagccaggagggcagggggacacggccctgcattctggacaggggttgcgtcagccagagcagtgcccaggggcaggggtccctgctgggagggaaaaggctggcttggttgtccaaaggccgagaaggcagagtcctgagagcaggggggccaggccagcaagctgggtcccacctggcctcctcctgcctggctggtgactcactatctgaccttagacaggcggcctggtct

SEQ ID NO: 52294 - DNA, 1083 bp, Homo sapiens
agtagagaaagccatctctggagagatcaaggagggtttcccagaggaggtgatgtttcagcttagacattaagacagcgtagaagaaggccaggtgtggtggctcatgtctgtaatctcaacactttgggagactgaggcaggaggatcacttgaggccaggagtttgagacagcctgggcaacacagagagaccccatctctaaaaaaaaaaaaaaaaaaagccagcacgtgcctgtagtcccagctactccagaggctgaggcaggagaattgcttgatcctgggaagttgaggctgcagtgagctgtgatggcaccactgcactccaggctgggtgacagagcaagagcttgtctcagaagaaaaagatgagtaggaggacttcctcaggctgacaaggcagggaggggccctccaacgtgagggagaagggatcttaaaggcacagaggatcaagggaggttaaggctcagtggtgcagttgattcagccttaacctagaggttttcaattcattagaggttgacttaagggtgaagggggctgtacctggttggcttctgctgtggcttttcatgaggtgaagggtgtcctgatgcttacttgtggcttcttccaaggagggcctggtggacacttaagcatggagggaggacaaagaaggctggggtcccctggaagacccctaaagcagcagctctggggtggttcagataactcagggtcaggagctggcaaatctctgctctagtcccagctccactcaaccctatctgtgaccctgagccagtccttgggtctctctgggcctcagtttccccatctgttcaatggggcatggccccgaggctgcctaagtactcccaggtctgcttcttggaggttcaggctcagagccaaacaggctgtaactgaggagggtcctagtaccctctgggccctagtcatgagtcccacactgagcaggcctgtgtcctggtccctccctttatccctcccctggctgggttgcaggcaatggtcccctgggtggacaattgccaggctggctctgaggaggctgggactcctgccctcccc

SEQ ID NO: 52295 - DNA, 1085 bp, Homo sapiens
cagtatgggcgcgctggggccagcctccccttggacgtcccgtggctcaccacctttgcccctgcgagtggtagaacatttgctgaggattaggcccaaatacagcccttccagagctggcccaggagctggaagagcagggtcacactagctttatacccgctgagtccccaccctggctgtagtcagatgggaggctgggaagagctccattcctggagtggggcagaggtcaggagggggacctggtttacaacacagctggggtaggcaaagtcctggctgggcctgggggacactcagtccagccacctgcaggtcctgttcatgccccagttggtgcctggctgagcagtcagtctgaggggccctggcatgcctgacagtccttcatgtcctccgagtagtcctcgatctggatggtcacggtgtggaagtggaacttcccttggaggcggctgctggctgtcttcagcacagcctgggcgtctgtattctgagctgggggccgagaggacacagcgggggaagccatttactctggccctttggaaccatcaggagcccaaatctcataccccatccccagcagaacaggatgggggaccatgaacatggagaagcccccagattccattcctctgccaggtagcctcccagcccagacctggctcatgcctgaaagagctggtaaagcactggccttaaggccaggaatctgccacctactgccatatactagctgtaaaagcctgggcaagtaactttaccacccaaccccagcctcagtttcttcatggataaatgagattgtgctgatcagatggaataatgcgtatcaagtactcagcatgaggctgggcttgatgcatgggcactgtgagcatctggggtcacctggacccgttggggatggcactaggcctttggctgcctgtctcccaccccaccctgagtgtcccaagcactcaccaatggcgatgtggacagacagaacaggctgggccaccgtcagtgcccagatatgcaggctgtgcagggcttctaccccctccaccgacagcagcagatcacgaacagctgtg

SEQ ID NO: 52296 - DNA, 1121 bp, Homo sapiens
agatgaaagcgataatgatgaagatgatgatcgtgccctgggtgggtccaaggattctcaggatctgttctttccttctttccattcaaaaatatatttattggccaggtgcggtggctcacacctgtaatcccagcactgtgggaggccgaggcaggcagattacctgaggtcaggagttcaagaccagcctggctaacacagtgaaaccctgtctctaccaaaaatacaaaaattagccgggcgtggtggcatgcgcctgtagtcccagctactcaggaggctgaggcaggataattgcttgaaccagggaggcagaggttgcagtgagccaagatcacgccactgcactccagcctgggtgacagagcaagattccgtctcaaaaaaaaccaaaaaatatatttattgagcacctactatggagtaggtgctgttttaggcaccaaggatactgtggtaatcaaaggagactgtcctgccctcatggagtgtccattttagagggagaaactgacaataagtacattcataaataatttcagtgttaagagtggagaggaaatacaacagagtgatagggcagagaccttgggaggtgaaggcagcctcagacctgcaggccaaagaggtcttctttgaggggatgacacctgaggatcaggagccagccctgcaccaatgggcaggcgtgggaggggtagtttcctttagtttcccctgtccttgccgtcctcagggacccccaagggcgttgacttcacagctgttcgtgatctgctgctgtcggtggagggggtagaagccctgcacagcctgcatatctgggcactgacggtggcccagcctgttctgtctgtccacatcgccattggtgagtgcttgggacactcagggtggggtgggagacaggcagccaaaggcctagtgccatccccaacgggtccaggtgaccccagatgctcacagtgcccatgcatcaagcccagcctcatgctgagtacttgatacgcattattccatctgatcagcacaatctcatttatccatgaagaaactgaggctggggttgggtggtaaagttacttgcccaggcttttacagctagtatatggcagtag

SEQ ID NO: 52297 - DNA, 1089 bp, Homo sapiens
ctagtcctaataggtgacctccatctgcgacctcagtgagcccttggctttgtctccacttccatagaatggggttgacccttcaccagtctggccatgggcacagccacggcaccaccaaccagcaggaggagaaccccagcgtccgagctgccttcatccatgtgatcggcgactttatgcagagcatgggtgtcctagtggcagcctatattttatacttcaaggtcagagctgggacacagggtggtgggggtggcaggggagtgtagaccacctgagtatactctctaccggggtttcttttcagattctagctccctcccagttctagggaaaagggtggggagaggaaaggaacatttatccaatacctaccaagtgtcagcacttctgatcctcacaacaacctgaagggtaggtggtagtgttttctgtagctcagaaaggttcagtgacttgcacagtgtcacacagccggtaaagcatagagccagattcaagcctacgactgtgtgttgtcaaaccctgggcaatgcccatcacatagaggcagggagctgtagtggaaagaggcaggcatttgctctgaagcttggctctcctccttgctagccatgtgacattggatgagtttgcttgctctaatggagcctcaatttccccatctgtcaaatggggacggatggcggatcagatggtatctaagatgcctttttgctctgtccatgtctcagctccttgagaaggaggggtgggaagggactgccttattctgaactgtggtctgtcctttctgctcttgcagatgtgaaataaagagcagaaaactgggaggcagggccagggcgaggctcatgcccacccagcagagagagcacctctccccagcagtgctgggtgggaggggagaagggaagctgaggtgttagatggtgaactccaggtctgccttcctgtcttcctgcagccagaatacaagtatgtagaccccatctgcaccttcgtcttctccatcctggtcctggggacaaccttgaccatcctgagagatgtgatcctggtgttgatggaaggtaacctgggctt

SEQ ID NO: 52298 - DNA, 1028 bp, Homo sapiens
tttcatcatagcattggctattaaccccttgaatccccgtggctcacttgctgggtcccatccctgacccactagcctggtgccggggggagaccaatttctggaggaagctctgggtacccagtcttgccctaagcctgcctctgaacaggctgttcttgtttatgacccccgtcccagcagaatagtgattgctcatccctgcatgtgatttgagagggccagtctttcaggcctggaggaaactcaagccccaccagccgcttggcatcggaatgctcagctggtcccctcctggggctcatgtgaccaagatctagctataaatatcagaggggcctcagaccaagacagaattcgggcaccaggagaaggaagccaacaggatccgacccggtgttttgtgacaaaggcaagacccccaggtctacttagagcaaagttagtagaggaggcagctaggcgtggctctcattccttcccacagaatggattataagtcgagcctgatccaggatgggaatcccatggagaacttggagaagcagctgatctgccctatctgcctggagatgtttaccaagccagtggtcatcttgccgtgccagcacaacctgtgccggaagtgtgccaatgacatcttccaggtaagtgccgggtgcagcttcatttggggtccccaggtggctacttggcttccctgtgatgaaacccttctcccttagacttccaacctggacagcctctttccccttggaagtgaacccctgcagaggcctctggacagggctgagagggggctgggaggcggctctggctgctgcggttcttctccataacacaagtttcccctccctgccctgcccacagctcccccacccctgccctgagcactgctgttgactctccaatcaagagtcaaatgcctcaagtgataagcggggtaggcagggacaggagagagaaaccagacccctggggctggagccaggtcctggtggcaagaggcccagagctttgggaggagg

SEQ ID NO: 52299 - DNA, 1033 bp, Homo sapiens
ttaaaatctaaaggatagaatgctttcctaaaacagaacattagcctttaaggttaaatagactttacattgtatctaagttaatctttataaagcactagaatttttggtcaaaagtcaaaatagtattagaatattgaaattattgatagctttcataatctcagcttttttgaacttccacaatttttggaatatgtcataatttttttccctgtttcaaatgtgttcagaggaaatagaatgtaaaacatcacaaaaaaaattgcagtacataaaatttctggactatgttagttacttgatctggaagtttaaaatttggactaaaaggttttattgaaataaagcctcttaaaatgaaaaatcatatacttttaacatcacttttaagctaataaatataagaattcttttggaaattagaggtggaaacacactggaacctcatgataattgaccctctggatcaccagattagtttaatttaacagatatgtccaaggaagttgagctatagggagtaagaaaaagcatcatgataacgtctagtcaataacatggcacttcagcagagattcatagatgatggtatgcccatgcatcatttgctcttcaaatatctatgtgcttggagccacagtttcctaagcgcatagtttttggtcctgcctcatgtaaaatagttaatgattatcatttacttggaaagattttacctgtgaagtgaaattctttcattgggggtaagggtatgaggtgatcaggaagtttcttctggaattttatcaagtccttgtattctaaaatagccaagcaaaatgatagtaaattctttgtctttgttctttcagtcagaggtatttattaagtacctactgtgtgctcagcactaaaggtttgttgataaaatgacaattaaaaaatggcatttagccaaaggccttttcagccaggagtaagaaaagatggttagtgatatttggaaatacctggatatttgctagaggaaaaatgaaagcaaaacttcgta

SEQ ID NO: 52300 - DNA, 2030 bp, Homo sapiens
agctgcggcctcagggatccgcacgaccccagcccgacccaaacgccgagttcgaccccgacctgccagggggcggtctgcaccgctgtctggcctgcgcgtgagtcccggacgagcccggcctggggcggaggagggtccgcggtaccggccgggagatgtgaagttgaagccccaggcagcgcagagtcttctctcttgggacccgtgggtccgcccgcctcccgtttctcagacccggatcctggcgtcagggacaagctagggctagggagataggtgcacttgggagactatcacctcctcactctccttctcacttccattcctacaggaggtacttcatcgattccaccaacctgaagacccacttccgatccaaagaccacaagaaaaggtatgaaggagtaaggagaggattgatggatgggtgctcagcagatagggctctcacctggtcagctcccaactcctgtttttctttctcccaggctgaagcagctgagcgtcgagccctacagtcaggaagaggcggagagggcagcgggtatgggatcctatgtgccccccaggcggctggcagtgcccacggaagtgtccactgaggtccctgagatggatacctctacctgacatggcctgaagatgcagggcagaggaattgcccatggacagtgacgcaaggactaggctgggagggagcgtgccaaccccttttgcctctgggtttggggagcggagggcctcttcttggtgccctgccccaaataaaggaactggacaaagagaacttgcctccaactctaacttccaggccgctgtctcaaactcctgccctggaagggcttctctactactttctgtacaccaggcctagggtgtctactccccacttggtctatctctgccttccctctgaggtcctagcatctgaactggagcacccagatggaggcctgatgcagtgtggggtggcgggagtgggatcagattactctgtcctgcttctgacagagactgatccccagaaaagaaggcttctgagattgcacccccctcccgagtcacctacccccagcatccaagtgagagtctctcttcttcgttacggggcccgtggcacccgccgctgccccaccatcttccagacggcatagcaggagccacccaggccgaggacagctagcactgtagccacaactcctgccagcagactccggggctctgccttcagctcaccagctacctgcatctggaggtgcacagagggtgtgcctcaggggtcagttgagactgccaggaaggtggggagtgggaaagggctgagtagatgtagctaggggaaggagacatggacgccggtcctgccccagggagattccaccccaatccctttcgcctcactgcccatctgggcctgcctgctcaggcggcagggaacgtgacagcctggctgttgggggtgtcaacccagctatggtagggggaggaaggggtcagtcgtgccagaaaccgttgatcaggggtacttacctgtaacacccggaagtaaccaggggtcaagcgtcgaaatcgcatggtgggcggcactggtctccctggcggcctgtagggtgggagcggacgtgaagaccagtggtcttcatgacaccaagaagtggaaactagggtagaggggtctctgaccttccacatacgcaagacccaagctctcagaggatgctcacccgcgcctgcctgcccaggtctggcagggggcggagcaactggacctttaaatctggtcccttcccccactgcctaccatcctgccagccttagaagcagctgtcaaaagagatcagcatcaggcttgagcggcacctcccccactctccgaggaggcgggtccggttaggcaggagaggccttggctggcagtgctcaggagtcccaggcctggaccaggtactgggcgggcctccctcagccctggtccaggccccatcgctaccttagatgattggatgccaccaatcagcattatcgaa

SEQ ID NO: 52301 - DNA, 1030 bp, Homo sapiens
tgaggctgggtcccactcagcctcggtgagtggggggctgccgggggtaggaggtggggataaacaacagggcgtggagctcagacagaaaccctctgtgctttccaccctgcctgcagcccagccctgctcaagctgggagtcccctccatggagacacatcacctgcagccacccccacacagcgcagcccacggacctcctttggctctctgacaggtgctgggctggagttgggagctgggctgggggctggggtgggcacatcctcatcctgctcttccctcccacagacagcagtgaagaggcactggaaggaatggtacgggggctgaggcagggtggcgtgtccctcctaggccagccacagcccctgacccaggaacagtggcggagctctttcatgcggcgcaaccgagaccctcagctcaatgagcgagtgcaccgtgtgcgggcgctacagagcacactcaaggtcagctggggggctctgggcacagcaagggactaggctctgggcttcaggctttggtttgcggctgtcacctccaccctgggcaccagactccagactccagactcagctccggaccctgggcttagcagctgacagcgggctcagctgtggactgggccaggctctgggttccgagtggggatttgagtctcacctaggctcctcgtgccacgctggccaggtgctggcttccaggcaccggacctccggagtgaagtctggcctcgggctctgcccacttccctgggtgatcatggtcccttagcccctcctctccacacaggcaaagctgcaggagctgcaggtcctagaagaagtgctgggtgaccctgagctgacaggagagaagttccgccagtggaaggagcagaaccgggagctgtactcagagggcctgggggcctggggagtggcacaggctgaaggcagctcccacatcttgacctctgactccacagaacagtccccccactccctgccctctgaccctgaagagcactcccatctctgccc

SEQ ID NO: 52302 - DNA, 1048 bp, Homo sapiens
agtaatttgttttaaagtttaaattttttaaaaaactttttaaaagtttttcagctttgtctgttgactgacaagattttttttattccagtacaaaggactaagttaaaagtgaagtcattattgccttttgttagtttaccttgtgaatggcatttgagatcctggaacatacatctcccagtttggttgccgtttctttctgcctgatacttttgatgatggtgctctctctgcttggtctcaggacaggccgagagcttctggcatagcattcaaactcaagaaagcttgctacttcaatttttacttatggaagactattctctccccagatttttgcagctcaagtggcagtcctcctttccagcccatcaaaagccacgtaaccattccaacagcccatgtgatgccttctactttagggacctctcctgccaagccaaattctacacctgttggaccctcttcctctaaactccctttgtcagggttggctgaaagtgtgggaatgacaagaaatggagacctcggtgcaatgaaacattctccaggcctatctagagatctcatgtatttctctggtgctactggagaaaatggaattgagcagtcctggtttccagcagtgggccatgaaagacaagaagaggcgaggaagtttgatattcctagcatggaatctaccctcaatcagtcggcaatgatggagacactttattcagatcctcaccaccgagtccgcttccacaacccaagaaccagcacaagtaaggagttgtacagagtgttgcctgaggccaagaaggcaccgggcagcggggcagtgtttgagcggaatggaccacattctaatagcagtggggtcctccctttgggactccagcctgctcccgggctctccaagcctctgccctctcaggtgtggcagccgagtcctgacacttggcatccccgagagcaatcttgtgaactcagcacttgtcggcagcagctggaattgattcgtttacagatggagcaaatgcaggtagaggtctatctttcc

SEQ ID NO: 52303 - DNA, 1037 bp, Homo sapiens
cacgcctggctaattttttgtattttttattagagacgggttttcaccctgttgcccatgctggtttagaactcctgagcttgggcaatctgcccaccttggccttccaaagtgctgggattacaggcgtgagccaccgcacccagcatattttcttttaaaaaatccttgtgctgctgaagagtgggaaggaagggagcagacatattccccttccttggttggtgaggacatcctagctcctggtttgcctctgttgctagataataaaagataactgaccttttcttagaaactagagcctttttgaacagggagtgttcagttggcagaagccttcctggcaggttctttccagtcatgcctcagagctaaaattatttcataaacattgggcctcatcaggctgagccaagttgggctttgactacagacccagctgattactgctcaggtgttttcaggcgtgtatgggtcaagatcaagctcatctgggcctacttgcctttcagcttcagaatggagccatctgccaccatcctgctgcttttggtccttcactgcccatcttagagccagcacagtggatcagcatcttgaacagtaatgaacaccttctgaaggaaaaagagcttctcattgacaagtaagagggcaaggggtaccacagagccagactactctcccaggccccattgaagacacctaatggagtcttcccaagggcaaagcattcctcctctgtttaggtccatgtcttgcctcatggtggaggtagtttgataagcagcctagtcgtgtatatataactaatataatagaccagttatgtatttctttaggggctctagggagtgcctaagggggtagccagttcattgcttctgatcttttcctcatttccccagttatctttctcatttgttcttcttccttcagaaaatagtgatatccagaatctaagatcttgcttacgtaatagggattgtacttagtaggggctcatattgtgaggggttagcatcaggaccctgacc

SEQ ID NO: 52304 - DNA, 1026 bp, Homo sapiens
taagaaccaggtgaaagtccagatgcctgggtgtgaagacatacttggaagaaaggtagatagtaaggtcctagagttgggtgatgttatgagaagtcttaattttctagccctagccaaaggagagagaggcaaaggtaatgcaggatttagagctattctctctctttttttttttttcccctgctctgtcacccaggctggagtgcagtggcacaatctcggctcactgcaacctccgcctcccgggttcaagcaattctcctgcctcagcctcccaagtagctaggattacaggtgcctgccaccatgcctggctaatttttatatttttagtagagacggggtttcatcatgttggccaggctggtctcgaactcctgacctcgtgatccgcctacctcggcttcccaaagtgctgggattacaggcgggagtcactgcacccgggcattctcatttttatcctccatatctaggagcagctgaagaagataatattctcactgagatcaatggttgtggggctttagagtttgaaaagaagcctgctttgttgaccaagcttctgcaatttgggcatttgaatgttggatatttgacaggttatagcactggctttgctacctaattaaggcagtatcctgtctcatagaatcagaatgttaagagtgggaagtgccttaaataaaactagttaattcttcgaatttactgattaaagaattgaaacctgagaaagaggaagaccttgcctgagatcatatagagaatgagtggagggaagccaggctttgagcccaggtcttctgatgtcttgtcctaggttccttccagtatacaatggcttaggtattgctttaaggcagtggttctcaaatgtgagtgtgcatcagaatccctggagcgcttgttaaaatacagattattgggacccatccctacagtttctggtttggtgggcctaggagttaggcttaagacattgcattgctaacaaattacatcatcaggtaatgctgatgc

SEQ ID NO: 52305 - DNA, 1048 bp, Homo sapiens
agatttcacggttcacattaagccttctctaatagcctggctaacagagttggctgagggactggcttgagatagagttcctaggggcgggagcatcttctctggttcttgaacagaaacttggatgctgatgattcagaaccagttgagggttggcttcctctccagtgctagagccctgtgggcccaacctacccacaggaagaaccaggcctgatactgatagtgggagaagtgctaaaagcctgttggcaggggtagggttggggaaggagggacactgcctatgactcacccatcccttccacacccacacactcatgcacagatactcttcctctccctgggcctgagttaatgtgcttacccatctgtctgctcagctttcagtgcaaaaccaggacttgattgagaagaatctgacactccaggaacacctgcgccaggcccaaccagggtctccaccttcaccagacacggcccagctggcacttgagctgcaccaggagttggccagttgccttcaagatctgcaggctgtctgtagcattgtgacccagagggcccagggccatgaccccaatctctccctgctcctgggcattcactgtgagtcctcagaccagtctggggcccaggaaggagggtccttctttctcttctctcccccatcctgctttcccatattcttgtggtaatatgtagacagagtacatagtcctggccactgccctctggacatttatttgtttcacaaagtaggtgttcacaaatctgtttttggaaacaagctatggggtacttgcatgcaggacaaactaaaagtggaccttcagcagcaaattaacccactgtccccagatgctttttttaaagtgcatgtcccaagactgtgggttcaagatactgcctatccatactgcaccctccacatgaaaatgtctcataactaacattctcttgaaatgctcttctccccagcagcacagcacccagagactcagctagatttgcagaagccagatgtgatcaagaggaaactagaaga

SEQ ID NO: 52306 - DNA, 1045 bp, Homo sapiens
gggatggatccatgttcattcccacttcacaccttggtcctgctgattagagagctcatcagaggggcctggaaaggctgagcaagtaccagtgacaatggccatttaagaattctcaggccccatgtgccagccttcttgggaactgagctggctttctgggttttctcatgcctggtcttactgcttcttcctcagggctcttgttctcccagaagcctcagggtaatgtgttggttagcacgtaactactaggattggggccctagggattatagccaggactctaatctgcctaccatgccatttaacaagagatcccactctccagctgccttgtgtccctagggtcctggccatgtgtttagtgtgctaaactttctcctttgttctcaggccttccaggtagtccccttcctggacttaagagtgcaaactcttctctgtggttctagccttgggcagaattatatcccagagaccacagagcaactgtcaagctgcttaccccctcacccagggctacagcctgtgcccagccctctaatttgtgcctctcttgtgttgggggtggtgggggttattcctttccctttcctgctctggcctccttgaaagttcagagtacccagtacaagtcagctttaaagtacagcttttagtgtttcctgggttgtttctctggggctttagtgagggacctttgccctctggtttttcttgcctcctggtttagggagcatctcacacttgttagtatctggttgttgggccagccgtgcctcctctagatctggagccaggccaggcaggggccacgtgtgggccagtcagccactacaagatttttgctaagctttgggctgttggcagcatcttggacctcatgcctgggcctgaatgaggctctttcttaagtgtttttacaagtttgtgttttatttatggagtgacttatcccttccattcagagcagccccacccagccagcccttcagcctctgggctcctgctgcttaaaggcagagccgcctggttggtctcc

SEQ ID NO: 52307 - DNA, 1008 bp, Homo sapiens
aacagacttgagagtcagccccggctcccttcccagttcctcctctcaccaagtggcttgggacgagtcatttttcatctctgtgggcctgtttcctcatgtgtaaaatggaactaaataacccctgcctcagcctggcgtggtggctcacacctgtaatcccagcactttgggatgccaaggcgggcggatcacctgaggtcaggagttcgagaccagcctgaccaatatgatgaaaccccatctctactaaaaatacaaaaattagccgggtgtggtggctcatgcctgtaatcccagctactcaggaggctgagataggagaatcgcttgaacccaggaggcaaggttgcggtgatccaagattgtaccattgcactccagcctggacaacaagagtgaaactccatctcaaataaataaaaataattacccctgccttaagcctcagggttggcgtaaggaccatgtgtgcaaggtggagttgggcacagtagcaaacatggacagggtgcgtgttccaagctggctcttaacatggttacttcttggagccttacagccatcctaggaggcagatactactgtcatccattctagaagagaatgctgcagcacaagcattaaatgacctaaggtcacacagatagaagggaggaactgggatttgaacccagaaggcctcgatccagagctgggagctctgccctgtacttttcagctgccaacccagtgcctgacacagatctgggatcagatcctgcttctgctgcttactactgtgtttctcacaagccatgtaactttctctaaccctcagtttcctcatctgaaaaaatggaggtgattatagcctttatagataggcttgataagaagtgggaatggaatatggatagtaaacccctagcacaaaataagtgctcaataaaagacagctgctgttattatctagcgttgtccttttccccaggcagtcagttaaggagacattaagaccactgccca

SEQ ID NO: 52308 - DNA, 1150 bp, Homo sapiens
agggtgggtgtcgtggggagagttctcaagggacccctggcatgagtgagaggtgaggccctattgggtggctgcaggtgctctgagaatgtctatcctggatctaggccagaggcccacaagtgccgcaccctgggccctgctgtggcgggctgggctcaggcttcaggtaggcctgccatcttgttgcagggcagccttcctcctggccaggggggacctccttgctccttgccaggtggctggtttctggacctggctctgtggattcctactctgccctgtttggttgtttgtgctctgagtgcctcaagtcaaagtaacttgtgaaaaaccctgccctccatcttggaggccctggccatatctgtggtccctccgtgcgttctcttccttcttttgttctttgattttttcagcatgggcggggggccttgattcggctctttctgccagatgaatgacgtttttcgtcgctagcagcttctgttcctgggacatctctccggcgtccccgttcctctctccccaggtgccaccctgctccgcccaggggcctcaggctcacagcctggcccccgctggcctgcctgacactcggctgattgctctgctctccctctgttggagaggctcccacaggcgctggggtggaggcctgtggagggtgagccagggccgtctgtgccgagccagtggggtgatcaaacttcctggagcctgggactcctagggaggagggccggtggggccatgaaggggcttggcctcaggctggatcgctcactctccccctctctctgccagcgtcacagagcatgctgtgccaggtgcttcagggtctgtggagacatgaaagggacagtcctgctctggtcacacgccactggggccaggtgttgggcctcggggctgagagctctggtcagctctgaagttctcccttcccccccaccctctgcatctctgagctcctcactcctcactacttccctgttcccctgagaatcctcaccctctcatccccctctgaaatccccacttcccctacccaagtcagtccctgcctccctccatggctccacctctccctgccagcaccccacacgcctccctccttcctctcaagccccacactcctgagtctggg

SEQ ID NO: 52309 - DNA, 1033 bp, Homo sapiens
cacacaccaccatgcctggctaatttttgtatttttagtagagacagggtttctctatgttgctcaggctggtctcgaactcctggtctcaagtgatctgcccgcctcggcctcccaaagtgctgggattacaggtgcgagccactgcacccaggccctcagcttttcaatgtgatgttcctctggcctggattctcctctgtgtccactgtgccccagtgagctcacctgcactccatgtgtagacagttcccaaatgtttgtcaattaagatgcatttaactataagtcaaagaaaacccttcctcagccaacaagaacattaaggaagttttgttatcccacatgcaaagaaatcctaaagaggcagctccaggggtgttaattcagtgactccaagacatcatcaggggctcaggtttctccatctttccactgaacctgccttgacatgtcagcctcatgtggttgtaggatgatggccgcggttcctgcttcatacatagaaaggacactgtctaggggaagaaaaggaaaaggcctgcttcttcctgtaggtttctcttcttttccattttcatacttttttttttttttttttttttctgagacagagtccctcactctgttacccaggctggagtgcagtggtgcgatcttggctcactgcaacctccgcctcctgggttcaagcgattctcgagtagctgggattacaggcacctgccaccacgcccggctgatttttgtatttttagtagaggcagggtttcaccatgttggccaggctggttttggactcctggcctcaagtgatccacctgccttggcctcccaaagtgctgggattacaggcatgagccaccgcatgcccggccctggctactgttttctacagcaccccgcattctggctttgtctggcagtttgcccgtggggtatttgcctcactcctctatctgctgttttgcgtaccaactggacactagatttggaggtttgattagatcgagggtgaaattcttggcaatgc

SEQ ID NO: 52310 - DNA, 1128 bp, Homo sapiens
tgctaaagcctatgctttggaagccaatcatggaaggattcctggaggagttaatatttttccagcccttttatgttttctcacactgaaccctcacaaaagccagcatttggggattcccatccccgagaggaaactgaagctgaggaggattaagagacttgcccagggccacagtccctaagagccaggattcagagcagatgggtcaagggtttcttgggtacagtagagtccctgtggggaggaacaatgcctgatgacctcctggggcctcagatggcccccaccatgagcctacaggtgattggaccccctagcccaggctccaaggtggtgctgtgggccgagagccgcctgccgcgccagacgtggagcatcagtgaatcgggccacatctgcagccagatgttcgaaggccagatcctggacgtgaagggtaaggtgggatgtatggggaagagggctcctgagggggctgagagccatggagtcccagctctctctgactatctccctatcttttaatccccatcccacccccaggaggccggggctacgaccgggaccacgtggtgctatgggagccggatgaggacagggcatcccagatctggactatccacgtgctttgaaacttttcccctcaccctccagccctggaggcttttgctgggatgaatgtttttatagggtttttgttgtaacataagctattttctaatatgctgccaggtacccttgtctctgtgcaccttgatatttcggggtggggtggggatttgttcacttgccttcttccctgacgctcaggctggcttcttccctccaggccccagctttcgggttcagatgttaggcctccttctgccatcagagggcgccctgggaccagactaactggggagtgtagtctcgcgcagccacccaaatgaagtgttgtgagagcaggctctgagccgggtggggccctaggctgtgcgggcacagacacaaactgagcctttcggtccctgtccttagggaacgcacagtcccacagaggatcctgacaggtagggtgatgcatccatgagaagggaggaaagaagtagagggactcacacagcaggaacatcacccccacaa

SEQ ID NO: 52311 - DNA, 1011 bp, Homo sapiens
gccccagcacttttcagagccttccattttcctgtatggactcgagtgcttcgaggggaaggagatcgagctcagcagggaggtgcggagcctgcaagccgagggcttcaacaaccatgtgctgtctgtgcggatcaaggggggcatgtgagtgctgaggggaggcatgggtgcggtggctgctggtggggatgagtcatggcaagacagagatcctgggggtctctggcctctttcccctccccacttttcccccactcccctccaagccaggaaggagggagaagtgcggactgagaagggtcactggctctcagggcttagaccccagcttggtgggcttctcaggatccttctttaccctgaaaaccccaaatctacttcccagcctccctctccgccctgggaaccctattccaggcagaggaatccctccatgggagaagaggaggtggagaacgttttgacgtctgtgtctcctcctccacctgtctgtctgtctgtgtgtctgtgctcttctctgtgtccctgacacctgctgggcccagttgggtgctatgtgaacacagtgacttccggggccgccagtggctggtgggaagctgcgagatcaccaactggctgacctacagcggcacccagagggtgggctccctctaccccatcaagcaggtgggtagcgtggctggagctgagcgtgtctggggctgagcgtgtctgggcaggcctttctggatgagtgtctagctgtgtgtttcccaaacacagcatttgtgtacttttgtcacaacttttgccacatcgtcattcctcttgagccattgtctacttaatatttttctctagattaactctctttttaaaagtcttttaattaatttttatttcttaaaaaaagcttttttttctctttctttttcttttttttttttgtgtgacagagtcttgctctgccacaaaggctggagcgcagtggcaacatcctggctcactgcagcctccacctcccgg

SEQ ID NO: 52312 - DNA, 1045 bp, Homo sapiens
ccaggctggagtgtagtggcgtgatctcagctcactgtaagctccgcctcctgggttcatgccattctcctgcctcagcctcctgagtagctgggactacaggtgcccgccaccacgcctggctaatcttttgtatttttaatagagacggggtttcactgtgttagccaggatggtctcgatctcctgacctcgtgatctgcccgcctcagcctcccaaagtgctgggattacaggcgtgagccaccgcgcccagcccactttttcttaatttattcagctccaatcccctattgatggacatctgggctgcttccccccttttctattgcagaagtgccataatgaatagccccctgcatgtgttatttcatgttttcaaatggtgtccttgggatggattcctaggtatgagattgctgagtaattactcatggagttttgcctaatattgccaaattcccctccataggggcagtatgatttcattcagtcttttcttaggtctgacctcattccctgctgctgtagtgcctgttcatcccacctcccctgggacaggggatcatgatcaagtctgcattccctcttctgtatctcaggggaacctgggcaggccaaggacaggtaggctcagataccctccatttcttccccttccctagctggatcctgtttgatgagacgaacttcgagggtgaccagcacattctctctgagggcgagttccccactctcacggccatgggctgcctcgcctccacagtcctgggctctctccagaaggtatccctggtgagtttccatgtctggttccaggcaatcccggaagcagaagttgctgctgtgggacttctggacacagaacctgtgtgctggtgcaggggttgattccagtgtttttagaactgccccaggtccccttgactctggggctgtaaagccagtttagtttgctagctcttcattgagcacccactgagagaggacctggggacatggaaagaaatcagacacagccctgcctgtaaggaacccatgatcc

SEQ ID NO: 52313 - DNA, 1597 bp, Homo sapiens
gcaaggaggtgggagggctggggggtgccacattggcctgatgctgggcagagccattcctgagctggctgggtgtgtttgggtccagatgactcctgacagcccctttcccccaggctgtggtgtatgaggccccaggctttcagggccgcagctgggaagtgagccgagacatctacaaccttcagcagccagaggacagccagagcccccacctggcctctgtggggtccctgagagttctcggaggctggtgagaactcaggacccttccttctatttcatcacctctggcctttacccttgggagtggggagtgacctgggctgcgtaggggtggggacagctgtctcattcatccatgggcctcctatgactgaacctgcctgtctgtcctcctgcttttcccagctgggtgggctacgagaaggagggcttccggggccaccagtatctgctggaggagggggaatacccagactggtcacactggggaggctatgacgagttgctgacctccctccgggtcatccggacggtaagcaaaggcaattggcccatccctctgcctctggccacagccagacctcccccagtacagtttgtggagggaagaatttgtaccccctctccgtgttctccctgtaagtgttcccagaggtctagcctctcttcccctgctgctcttctccaggtcgtactgacagcctcacccctaattccccgggtgggctgtgaccctggggtctgggcactcccaggggtttcggtttgtgggcgggagagacctgactgtccctggggacccaggacttcggggacccggccgtcgtgctatttgaggccatggacttcgaggggcacggcgtggaggtgagcaaggcattgccggatgtggagctggtgcaacacggccccagcacacaggccatccacgtgctcagcggcgtgtaagtgacccgggctccgggagcggggcgggcccgggcgagccgggggcggttccaggagaggtgcaggctccgtcccagctgactcgcgccccgcccttcctgcaggtgggtggcctaccaggaggtgggcttctccggggaacagtacgtgctggagaagggcgtgtatcgtaactgcgaggactggggcgctggcaacagcaccctcgcctcgctgcagccggtcctacaggtgcgtgccggccgcggggggcggggcctccccggtggcgggacctggagttcgggtgcgccccgcccccacgcagaggtagcgggctggaggacctgcctgggcgcttggggcggggccttagaagggggcggggccgagggcgcggccgcggggtggacggtactgaaacctagagaagacaaggctaggggccggcaccctccctaattctcgattcggtccctaccttcaggtcggggagcacgatctgcacttcgtctcaaaggtaaggcagggactccgcagggagccgctgggctcacgtctctcccctcatttcggacctttcccctccccgctgttctcggccccactccatcgtcctccttcccctcatctcccctctctgcctccagattcagcttttctc

SEQ ID NO: 52314 - DNA, 1045 bp, Homo sapiens
caggagaatcgcttgaacctgggaggaggaggttgcagtaggctgagatcgtgccactgcactccagcctgggcgacagagcgagactctgtctcaaaaaataatgataacttttcttagcgataagatctctctgtcactcaggctggagtgcagtgacacgatcatagctcattgcagcctgggctcaagtgatcctcccacctcagcctccagggtagctagggctacaggcacacaccaccatgctggctaattcttttaattttttgtagagacttgtagagtctttttatgtcacctaggctggtctagaactgctggcctcaagcaatcctcccacctctgcctcccaaagttctgggattacaggtgtgagccactgcatccagctctgagaggctccatttagacctacacttgcacacagacctgcccctgtgctctggagaccatcagcaggtgctcatgcccatacacacgtgtgcacaccagctaacatttggtcacaaatctccaaggtgacagcagaaagttgatgagccagcaatttaggttataaggcgagcattttgggtgtggtggcatgtgcctgtagtcccaattacttggagagttaacgcagaaggatcacttcagcccaggagttcaaggctacagtgagctactgcacttcaacctgggcaacagagcaagactcagtcttataaaataaattaaaataaaaagataaaaagttaggccaggcacagtagtggcatatatccataatcccaacattttggaaggccaaggtgggaggatcacttcagcccaggagttcgagaccagcatgggcaacataacaagacctcaaagtacaaaataaaaactagctggggctgggcacggtggctcacacttgtaatccgagcactttgggaggccaagacgggtggatcatgaggtcaggagatcaagaccatcctggctaacacggcgaaaccccgtctctacaaaaaatacaaaaaaattatctgggcgtggtggagggcacctgtagtcc

SEQ ID NO: 52315 - DNA, 1038 bp, Homo sapiens
tccggtggtcctgggccaccagctacccataaagaccatggaaaggaagttgcttgctgcctatggcccttccatctttggaggtttgggactggatctggaaagaagaaattgctaatcccagatcgtgtaggttgacacccaggccgggcagggaggggttacttaagggaggttggctttaggaggtgtgggggaggggaaaggaggatgtggggattaagggttggagcctgaagggatggcattctttgggggaggggtagagaagggagatgctggatggactagttggaggcagcagggacgtctttgagcacagccttcagtgaggaacaaacaagggaaatagacgcagggagatggggagccaccacttactgttggggccatggggtcagtgggctacttgaacatctgccaagaggacctgcagcaggatactgagctgcccctttgcagcacccttattcccccaaccccccattagacagctagtttcccactagtggcttttctcccttctctgtctcatttacatatgtgaatgataacccacaggaagtaattgtgggagaaagaagggaattggcctttttagatctattaaatcactttattacaggaaccagctttgaatggccctcctcagcagggtagcaagcctcccccactctcccatttatctgatcacaaagagattaaaatctttcctggtctggggactggacagctcccccaactttgggaggctggaataaaagagtcagacccaacgttttctcatctcccatccaaaggctgccagatagggaggggctgaggggaatgtatcccctcatcttctgggttccttggtgatatacataccccaaggaaggtgttttcttgttttgtttgtttgtttgtttgagcaaatggggacttgggcctcagcaggcttcaccttaggatctagagcaattgggaaactattggatggcatagagcaggcattgagtctacaccatgctgggtcagatgtgctggcttggaaat

SEQ ID NO: 52316 - DNA, 1930 bp, Homo sapiens
ggctggtgagaaggtaattgtcctaagatagcatctaccagagggagggggtcagggagcccctttgcaaataaagaggaagggggaaaggcaatttaaaaacattttcttttcctttccaaagttggggttattaggatcccaatgccctgttaactaatgttcttatgctctctcccaaatgctgtaatatcctcttcaagagtagatgagtggggggaaaagcccacccccagccaaaaactaagcaaaacgacaacaaaacaaaaagcaaagagatttctataacaactcttttccttaggtacacatctttagatctagaaatctgcctgtctctagagttagggaaatagatagcaagcccttaaattagagtttctcgacttcagcactattgacatgttttgagcaggataatttgttctggggagtctgtcctatgtattataggatgtacagcagtattcctggtctctacccactagaagccagttgcatcttaggtatgacaaccaaaaacatctccatacattgtcaaatgtccccttggagtcaaaaatctcatccctgcttgagaaacacagttatataggaaagctggaacaagaaagctaaactgtcaactattttcctgagattcatcaagaattcaaaaatcctcattttgggccattttaagagttttggcttaactcatgtttcctgtggctcaatttgcaaactctcaagatttatagaaatttggaaataagaaaagttccctgctttcccatagctcctcaggacccagatatgtttcaatctcaaatatgtttaaattggctttctggctaaaatgctatattagaagacttggagtcaaaagcccagatttgaccaagggaccaagttgggttaggagaaaaggttttcaatacctagacaactgctgaaattgccctgtagccaggtggccttctttttctaaaagccatgagtgaggaggtggtaagagcaactttattcagggtctaggttaggactgctgggtttggtgttagggttgcgggggcgggtggggaaatatacggaatctttcctcctggtttgtaacactgcacctctgattactcacctcatgtctagttattgaggtactggtcttatacccttctctatgtaacccataagctctttgaagggaggaacttagctgcctggttaattttctagtatgcatttggtgggctgaggaatgaataagaaaaggggcatcttgaggaccttggtgaatcagaagtacacttagcagtctggggtccatgttggcagagatctttgttcagagaaaaagactagagatactgaggggtgtcaattgtagctgctcgctttctgggctgggcacaacatagaatatggcctgggcacaacatagcactatgaaagtttgtggagtgaatatgggtagatcaccactcggagcccagagaggttcctctcgtttttgttgacagagtggaagccacggatttagtggtcatccatgagttatttctgtcttaataagaaaaggcagcttaaaaataaattgactcgatttttcagaaagttggtagagaggtaggaaggttcatgaagacattgtggaatcttctggggtcctcttctttctgagacatgcttctagacaatgtcttttttttatttttatttttattttttgagatagagtcttgctctgtcgcccaggctggagtgcagtggcacgaactcggctcactgcaacttctgacttttgggttcaagcaattctcctgcctcagcctcccaagtagctgggattacagatgtacaccaccacacccagctaattttagtatttttagtagagaagggttttcgtcatgttgtccaggctggtctcaaactcctgacctcaagtgat

SEQ ID NO: 52317 - DNA, 1034 bp, Homo sapiens
ttactgaggtattaagaagggatcagaaggcctaagtactttaactggagagattccttccctgttatcaaaaaaagaaaaagaaatgcttggggtgggcgcggtggctcacgcctgtaatcccagcactttgggaggccgaggcgggtagatcatgaggtcaggagatcgagaccatcctggctaacgcggtgaaaccccgtctctactaaaaatacaaaaaattagccaggaatggtggcaggagcctgtagtcccagctactcggcaggctgaggcaggagaatggcgtgaacccgggaggcggagcttgcagtgagccgagattgtgccactgcactccggcctgggcaacagagccagactttttaaaaaaaaaaaaaagaaaaagaaatgctgtctgttgtctgatgccacattccccaacacagtaggcccatgtaggctccccacagtcctaacttgaagaaattgggaaaggatgatatgggtcatgccttctctccccctcccctttaaaataatttatctgaatcaataattcaggattggactgaagagacccaaggggagggggtcctgtttggttctatccatgaagtgggcagtgcgcaagccagagaagggagatggctgctgatggtgactttggcaagactgcctggggaaggaagaattttctatatctagttctctcccgtgaccataaccccaacatagagaggaaggaagaaacagttgaatgtggggaggagggagagggagatgcaagagggatctgctccttggaactccaggaatctgaccaccagaaccagccagtgtcaactctttgtttcctggggctgggctctactgggggagctcaggccatgcccctccccctaaggtcttttctttttggaggggatggggaagggggcggggccctgctttgtgtgtggttgggggtggaatgggggtggtacaagaatttcaggcgcttttcagatgcaggccctgggaggctggctctgtggggctgcacgctgatt

SEQ ID NO: 52318 - DNA, 1027 bp, Homo sapiens
tttcaccatgttggccaagctggtctcgaactcctgacttcaggtgatcctcccgcctcagcctctcaaagtgctaggattataggtgtgagccaccgtacccggccctctgttctattttattaagaactttaaacctgaatagctacaaaaatgtcatggcatctgcttatataattacgatttttgttaatgtactggtagactttgttgttcttaatcgtagtgactctttgagtcagtttccttaccagtaaaataggagtaccatcacatttgattcctaccctacaggaataagagttccttgtcttttggtataataatggaaattaatgttaaaatttactgcatttcccttcaccagagtaagctgcacatggaagggttccggagcttgaaggagggtgaggcagtggagttcacctttaagaagtcagccaagggtctggaatccatccgtgtcaccggacctggtggagtattctgtattgggagtgagaggcggccaaaaggaaagagcatgcagaagcgcagatcaaaaggagacaggtatggattggaaggcagcttatataggttgctaagggcatccccagtctcccaatcctgtcactttttgggtcacactgcaaaagacaaagggaagcctgtggtccctggcagcatctggaaggctgagcgcctgcaataggtgtgggcaagggcagtaggtgaggaggccactgggggtgacttagtgctacttgggacaagtaagtttgctctgtggtctctaagcctcaattgttaagtgaggcagtgatactaacatcctaggatggttttagaattaaaggagatcatagatttgcaaatggtgggacaagacagtattatctatatctgttgctgctttaccaggtctgcaaatggctggtttccttaatcttgcttgggcttaaagccccttagctctgaacagatactataatttggcttctttaatttctcctatattaagggtatggaagaatctctcctatcc

SEQ ID NO: 52319 - DNA, 3940 bp, Homo sapiens
aatagtcctccttttgcaagtgggaagtttggtctctgggaagggaagtaagtgacaaacctgtaccagagcccaggtgtcctcattcgtgggaggcatctggcctcttcttgctcctttctcttacttttacgatcttgctttgtactaggtgctacaactgtggaggtctagatcatcatgccaaggaatgcaagctgccaccccagcccaagaagtgccacttctgccagagcatcagccatatggtagcctcatgtccgctgaaggcccagcagggccctagtgcacagggaaagccaacctactttcgagaggaagaagaagaaatccacagccctaccctgctcccggaggcacagaattgagccacaatgggtgggggctattcttttgctatcaggaagttttgaggagcaggcagagtggagaaagtgggaatagggtgcattggggctagttggcactgccatgtatctcaggcttgggttcacaccatcaccctttcttccctctaggtggggggaaagggtgagtcaaaggaactccaaccatgctctgtccaaatgcaagtgagggttctgggggcaaccaggaggggggaatcaccctacaacctgcatactttgagtctccatccccagaatttccagcttttgaaagtggcctggatagggaagttgttttccttttaaagaaggatatataataattcccatgccagagtgaaatgattaagtataagaccagattcatggagccaagccactacattctgtggaaggagatctctcaggagtaagcattgtttttttttcacatcttgtatcctcatacccacttttgggatagggtgctggcagctgtcccaagcaatgggtaatgatgatggcaaaaagggtgtttgggggaacagctgcagacctgctgctctatgctcacccccgccccattctgggccaatgtgattttatttatttgctcccttggatactgcaccttgggtcccactttctccaggatgccaactgcactagctgtgtgcgaatgacgtatcttgtgcattttaactttttttccttaatataaatattctggttttgtatttttgtatattttaatctaaggccctcatttcctgcactgtgttctcaggtacatgagcaatctcagggatagccagcagcagctccaggtctgcgcagcaggaattactttttgttgtttttgccaccgtggagagcaactatttggagtgcacagcctattgaactacctcatttttgccaataagagctggcttttctgccatagtgtcctcttgaaaccccctctgccttgaaaatgttttatgggagactaggttttaactgggtggccccatgacttgattgccttctactggaagattgggaattagtctaaacaggaaatggtggtacacagaggctaggagaggctgggcccggtgaaaaggccagagagcaagccaagattaggtgagggttgtctaatcctatggcacaggacgtgctttacatctccagatctgttcttcaccagattaggttaggcctaccatgtgccacagggtgtgtgtgtgtttgtaaaactagagttgctaaggataagtttaaagaccaatacccctgtacttaatcctgtgctgtcgagggatggatatatgaagtaaggtgagatccttaacctttcaaaattttcgggttccagggagacacacaagcgagggttttgtggtgcctggagcctgtgtcctgccctgctacagtagtgattaatagtgtcatggtagctaaaggagaaaaagggggtttcgtttacacgctgtgagatcaccgcaaacctaccttactgtgttgaaacgggacaaatgcaatagaacgcattgggtggtgtgtgtctgatcctgggttcttgtctcccctaaatgctgccccccaagttactgtatttgtctgggctttgtaggacttcactacgttgattgctaggtggcctagtttgtgtaaatataatgtattggtctttctccgtgttctttgggggttttgtttacaaacttctttttgtattgagagaaaaatagccaaagcatctttgacagaaggttctgcaccaggcaaaaagatctgaaacattagtttggggggccctcttcttaaagtggggatcttgaaccatcctttcttttgtattccccttcccctattacctattagaccagatcttctgtcctaaaaacttgtcttctaccctgccctcttttctgttcacccccaaaagaaaacttacacacccacacacatacacatttcatgcttggagtgtctccacaactcttaaatgatgtatgcaaaaatactgaagctaggaaaaccctccatcccttgttcccaacctcctaagtcaagaccattaccatttctttctttcttttttttttttttttaaaatggagtctcactgtgtcacccaggctggagtgcagtggcatgatcggctcactgcagcctctgcctcttgggttcaagtgattctcctgcctcagcctcctgagtagctgggatttcaggcacccgccacactcagctaatttttgtatttttagtagagacggggtttcaccatgttgtccaggctggtctggaactcctgacctcaggtgatctgcccaccttggcttcccaaagtgctgggattacaggcatgagccaccatgctgggccaaccatttcttggtgtattcatgccaaacacttaagacactgctgtagcccaggcgcggtggctcacacctgtaatcccagcactttggaaggctgaggcgggcggatcacaaggtcacgagttcaaaactatcctggccaacacagtgaaaccccgtctctactaaaatacaaaaaaattagccgggtgtggtggtgcatgcctttagtcctagctattcaggaggctgaggcaggggaatcgcttgaacccgagaggcagaggttgcagtgagctgagatcgcaccactgcactccagcctggttacagagcaagactctgtctcaaacaaaacaaaacaaaacaaaaacacactactgtattttggatggatcaaacctccttaattttaatttctaatcctaaagtaaagagatgcaattgggggccttccatgtagaaagtggggtcaggaggccaagaaagggaatatgaatgtatatccaagtcactcaggaacttttatgcaggtgctagaaactttatgtcaaagtggccacaagattgtttaataggagacgaacgaatgtaactccatgtttactgctaaaaaccaaagctttgtgtaaaatcttgaatttatggggcgggagggtaggaaagcctgtacctgtctgtttttttcctgatccttttccctcattcctgaactgcaggagactgagcccctttgggctttggtgaccccatcactggggtgtgtttatttgatggttgattttgctgtactgggtacttcctttcccattttctaatcattttttaacacaagctgactcttcccttcccttctcctttccctgggaaaatacaatgaataaataaagacttattggtacgcaaactgtcatccccttgtcagatgtttttgcccttccgataactcccactttcttggattgggactcagaagtttttctgttcagccagtttgttaggaatgaatcttgaaagttcagtcctcttagcacctcattacagtggatttttgtttctagttaaggcctcttgtcctttccttggaagcttccacattcaagaggggattaggggcttggcatgcataagaatggggttgcctgtgccactggctgggatgaaaggatggggccatggcttggggcatgagaccctaataatactttgtcccct

SEQ ID NO: 52320 - DNA, 1517 bp, Homo sapiens
tcccctcagtttgggtgacggaaggggcgtgtcgcagcgcccaaagatgacgtgttctgccagcgccacgtcatgaggaagtgccggcccactgaagccgtggggacgcgcccagcggagctaatcaggtgccactgaactgaaggggtgaactagaggagaagagggtgactgggcggggagcagctgcgggagaagcaaagggacgactgagggaataatcaggagaccactgaggcgtgaagtactaggcgtgcgataactgaaggagttagtaactgggagcacagagttggaaacagcttaggggaagatggagaaggaagaaacggggaatgatcaagatgtgggcaccatgatgtggcaggaaaccgacttagatgttcagaagaagtcagtgcagatacggaggaaatgggaatgggaagaagtctgcaaagccaggagaaccgaggaaaggcttttgcctccagaggtcacattgcgttataaaactctgggtggtaaaagattataggcttagaccagtgtctttggattctaatgctggctgctctccatagtccatctgattccccagaagtcagttatagctcttcgcaaaccttggtgacttcttattttctttcttgtttatccaagattacctggctggtgtttgcttgttctggagtgatcttctgactggaaaagaactatgtcatggatcaaggaaggagagctgtcactttgggagcggttctgtgccaacatcataaaggtgagcaatggcccagagcaccggttggccttctggtcagttggataatcttatataaaaacctgttattaaagttgatgatgttaagtgcaattcatgatgttaagtggaatttagcaaggaaaccaaagagtcttagaatggtaacttccaggtctacatttctggtagacttttgtcctaactctgatattttctggaagcccaggcctcttaatgtcactgggcagcctagactgctaagtattctttatagagaactgaaatttgtttccctggaacattgatccattgttccatgtactgtcttcttgatttaaataggttaatctttgatatattctttgatctgtcagtagagctgggcccggtcactcacgcctgtaatcccagcaatttgggaggctgaggtgggcagattgtttgagctcaggagttgagaccagcctgggcaacatggcaaaaccccgattctccaaaaaattaaaaaaatagcagggcttggtggtgtgcacctgtagtcccagctactcggaaggctgaagtgggagaatttcttgagcccaggtcaaagctgcagtgagtcatgattgtgccaccacactccagcctgggtgacagaacgggactgtctcaaaaaaaagagttcagaacaagactctgtctcaaaaaaaaaaaaaaaaaaagagtttgggctctagacgcagacaaacatgggtgaaattcctgttcttttttttattttgagatggagtct

SEQ ID NO: 52321 - DNA, 1097 bp, Homo sapiens
aactgcagaagcatggggtgtgtatccgggtcctgggcgatctgcacttgttgcccttggatctccaggagctgattgcacaagctgtacaggccacgaagaactacaacaagtaagttctcagatttccctatagggagctgtttcaatctttgattccctgctggctttagggagacgtcctgggctttccttggtctggattggtgcaaggggcaatgagagagtaggttgagcagcttagagactttctccgtctgcagggcacaccagacatgattctgcaataacatgttatatgtgtgtatactgacacatacacatagtttctctttcctcctttctctgcccagcccccaccaaataagtgtgtgtgtgtgtgtgtgtgggtgtgtttttacttgacagggaatgggatcggaatacagcagttcttatccctgactttgaagacagatccttcaagaaattcttgttctgttccactcctttaacctatggataggatgaccttgggaggtcatacagatgtacaggggaatagagttcaataatccaaactctgtgatgtgtagctttgaaatataacgtgtattttggcagtggacttgttttacatcaaatctccttcctattttcctttgtttgtgccaatatcacagtagagtcttcctctgaaagccggtgtacagtagaaggggagagggttaggacggcaataggagctatttggtggctgggcacagtggctcacgcctgtcatcctaggcaggtggatcacctgaagtcaggagttcaagactagcctggccaacatggtgaaaccccatctctactaaaaatacaaaaattagccaggtgtggtggtgtgcacctgtaatcccagctactcgggaggctgaggcagaagaatcgcttgaacccaggaggcagaggttgcagtgagtcgagatcacgccattgcacttcagcctgggcgacaagagcaaaactctgtctcaaaaaaaaaaggagccatttagtatttgtcttattataaaactagttacatgtttattccaagaaaacttggaaaccacaaaaaactcataatttca

SEQ ID NO: 52322 - DNA, 1112 bp, Homo sapiens
tcagacagggtttatctctgtcgccagtatggaagccatctgtgtataggttaacttgagcaaagaggggatgagaaagctaaggagagtctgtctgtctatctgtgtatttatctatttagagatggtctcacactgtctcctgggctggagtgcagtggggcaatcaaagctcactgaagcttggaactcctggtctcaaaggagcctctcaagtacccagtactacagacgtgcaccacctacccagctaactttttatatttattttttgtaaaaacagggtctgactttgttgcccaggatggtcttgaactcctggcctcaagtggtcttcttgccctggcctcccaaaatgctgagattacaggtgtgagccactcagccctgcctgttaaggagtgtagagtgagaagaagaaagagcctaagatggcatttttgaggaactctaccctttactggctgggtagaggagaataagctttataagcaaaaacacagaaaagcaggaagaaaaccagggcagccagcattacataagccaagaaaagagggagtttgttggtgcaagttgggaaggggtagggcacccatggaaacaatggtgtcaaatgctgtagagaggtcaattaagatgtagagtgaaaatcagctgttgttaaaacaattaagagactggtggagttagcagaggtagagagcaggcaggaagatgagacagaaaaggggtatagaaatagaagcatgttttcaataaaattcttagtttggaggtactttcgtagttcattatatttttgtgctttataatgaatatgtttcaaatattcttgtatgtatgaaataaatattaaggcacaagggttgacactagaatgaaagaaagccatttgacaagcagatctaatatgcattatgcctaggactctgatcttgactcctagtccagcatgctttaccctcataccacattacagtaaccactaccttatctcctgcttcttgtccagcaagtttttccatatccttctctgtcctgcatggtttagtaacttgcctctgtggggttagttatgcagacagggtgtgggttgggcagtatcaccaggg

SEQ ID NO: 52323 - DNA, 1036 bp, Homo sapiens
aggagttggatggtgatagtgagaaatcaggaaaattccagctattagaagcataggacctaattgtaattaacgcactgactttgttataaatgcaggtttgtctaaattcgaataatataaagtgtaacgcctcaggccctgattagcccagtctgagcacaccaagcttcaggagttggtgggttgagacattggcctcctgaccctggtgatactgcccaacccacaccctgtctgcataactaaccccacagaggcaagttactaaaccatgcaggacagagaaggatatggaaaaacttgctggacaagaagcaggagataaggtagtggttactgtaatgtggtatgagggtaaagcatgctggactaggagtcaagatcagagtcctaggcataatgcatattagatctgcttgtcaaatggctttctttcattctagtgtcaacccttgtgccttaatatttatttcatacatacaagaatatttgaaacatattcattataaagcacaaaaatataatgaactacgaaagtacctccaaactaagaattttattgaaaacatgcttctatttctataccccttttctgtctcatcttcctgcctgctctctacctctgctaactccaccagtctcttaattgttttaacaacagctgattttcactctacatcttaattgacctctctacagcatttgacaccattgtttccatgggtgccctaccccttcccaacttgcaccaacaaactccctcttttcttggcttatgtaatgctggctgccctggttttcttcctgcttttctgtgtttttgcttataaagcttattctcctctacccagccagtaaagggtagagttcctcaaaaatgccatcttaggctctttcttcttctcactctacactccttaacaggcagggctgagtggctcacacctgtaatctcagcattttgggaggccagggcaagaagaccacttgaggccaggagttcaagaccatcctgggcaacaaagtcagaccc

SEQ ID NO: 52324 - DNA, 1077 bp, Homo sapiens
taggtgctttgttcacttggatatgctcaatgaccagagaatctacatttaaacccttaagttcagcattactctctgcatttttaagcatgtgcagcaaaaattcagcactctttttgggccactgaccttgtgtccagccccactgcttggcctgggcacacctgccagctccaccattgtaacgtcggaatggtacgcactgtttctgtaaagtgacatctttcaggtacttcatggcttttcgtatatgcatacccttgatggcctgggcagtttcacgaatattcttaaagtaaacacgaagattggaacctcttgatttgcatgatatcatgaggttctccgggttaagtgaatagtgaaccattttcacagattacctcaggccgcttagggaaagagcaaatgggcccattttaaagataagagaatgagaaattatatggattgtacagagtctcacataacttggagaattaagaccatgctgccaagacaagattgtcagattaccagagaaatctgaaccagagcccttcttattgctcaattataagtgaatactgtttcctctgtgatgatgatacggaaaagaaagctctctctgtggtttgccttaaaggactgagagagatgagcaacttggctgggtgcagtggctcacacctgtaatcccagcactttgggaggccgaggcaggcagatcacttgagctcaggaattcaagaccagcctggccaacatggtaaaaccccgtctttactcaaagtacaaaaattagccgggtgtggtggtggctgcctgtagtcccagctacttgggaggctgaggcaagagaatcacttgaacccgagaggtggaggttgcgggagccaagattgcgccactgcactccagcctgggtgacagcgcaagactccatctccaaaaaaaagatgaataacttgcctaaagacacacaactagtaagtgtagagtctggttttgaacactcagcccagatctttctgctttcctgaccatgcgtccagaaacatgttcccaccaagaaatttttgtcttctggaccctttc

SEQ ID NO: 52325 - DNA, 1974 bp, Homo sapiens
aggacttcccctagttatgtgctctccagggaccaagttaacaggggatagagacttgagtgtttgcatattgtttaccatgcttgcataggtatggccctttatcctgaaggggagggactagtaactgcaaggcaagcttccaacccagaggggctagggtccctggcaggttaccaaggcaagagcttacgctcagggatgcaagacagaagtcccattccttgaaaagcggcacaatgaagttttcactatagttggattcgcaaagccagcgacagatgaggaatggacatcaaatattatgagacacagcctagagatgcttctccagattttagctttccccagaagtactctggccccagcctgtttgggagtggggatggaccactctgatccattctgtggatacagttggtttccccatgacacaaacataatagtacttggaaatgacctacctgccatagcaagaagtcactcagccgcacttctccagaagtccgtatcaagatgtcaggatgaggagagcggttggtatagaggcacttatcaagcagagactcagagatatcactaagatgagcaagaagagacaaagagaggcacacatcctgtagtattctctttctgtagtgttctcatggtgaacttccatatataggcttctcagtttatacaataccatcaaatacactagccaatactacacagaaggccctcaaaaaatgtttgctaaattaatgaatgaatttaaatcttcacaactacataaggtatttcttttttttttttttttttagagaatacaatgtaaaattcttttctcttttttattttttgccttttttgacatgttctgatacataaggtatttatttatttatttatttatttgagatagagtctcacactgttccccaggctggagtgcagtggcacgatctcggctcactgcaaactctgcctcccaggttcatgccattctgcctcagcctcccgagtagctgggactacaggtgcccgccaccacaccctgctaatttgtttttttttttttttgtatttttagtagagacagggtttcaccatgttagccaggatggactcgatctcctgacctcgtgatccgcccccccctcggcctctgaaagtgctgggattacaggcatgagccaccatgctcagcagatacataaggtatttctatcctcattttatagataaggaaactgaggctcaaagatgaataatttgctgaaagtcatttagcctcaggcctaaaaccagatgcacccacaaaaatatctgttgtcttttgctaaaaacatcttgttttttaaaatacatacatacatcctatggcccagtatttgatgaaatactatgcaactgcattctaaaaataaagataaatctaaatgcactgatttggaaagatgtccaaaatctaatgttaaatgtaaaaggcaagtttcagagaatatatagtataaaacatacacacacattcaaacattcacacgtgcatataagtatacataaagaacaaagtctaaaaagatacatcatactattaacagtggattggataagaagtaaggaagaaaagactatttctttttactttatgtacttctgttattgtttgaatttatgtaaataactttttttggccaggcgtggtgactcatgcctgtaatcccagtactttgggaggctgaggcaggcagatcacctgcgatcaggagtttgagaccagcctggccaacaaggtgaaaccccatctctaccaaaagtacaaaaattagctgggtgtggtgccgcatgcctgtagtcccagctacttgggaggctgaagcaggagaatcgcttgaacccaggaggtggaggttacagtaagcccagattatgccactgaactccagcctgagtgacagagcgaggctctgtctcaaaacaaaaaaaaac

SEQ ID NO: 52326 - DNA, 1016 bp, Homo sapiens
tactttaaaggaataatggccagtttctctgagaagccttttcctcctgagtctttaaaagataaaagacctgtagctcaaatcctattcctacctcttactgattatgtgtccttaactaaatcatttctgtttgcttacttacataagggaggggctaataagacttccctcattgggttcttgggaacattaaatgagttgcagcatgtaaaatgttcgcagtgcctgacaagtagtagatactcagtaggtggtagctactatcatcattatcatcatcttattaggaagtgcctggtatatagtaaggtggttgtcaatcaatgctaatcttttcttccatcccatcccatctggccagccctgaactctttcttacctgaagcacgctatggttcatctggaactgcaggatggcctcgaagaggttccaaaatgtatactctggccacagaacgggttggaacaccaggcaggagtgagaggtctgggaaaggtagggaggagagtatgatttagtaacatgttgctgggccgcatccctggtcagtcctccagggaaaaagcaggctaagcaggacccagaagcccagagatgacaatgttacaggcatcctgagctgtagctgcagctgctgctggccctgattcattcactagtagggggaggcgtcacttgaggcagccagatcacctgcctgtggtaaagcagaactaaaacgagactagatcaacatttccaccaggatttttctaagagccaattttaggactatgaaataacatctggattatgttattggctcttggcccttagagggcatctggaagacatactgtctgataaaggtcaccaatgaacaaatggtagctgccattgttatttttaagtaccagcagcagggcacagtggttgagagcatgagctctggagccagactgcctggctttgaattttggctccaaccatttaccatttatttgagcaggggtaatttcacctggcctgagat

SEQ ID NO: 52327 - DNA, 1063 bp, Homo sapiens
ctcaaacccaggtattctgggaccatctaacttagagcaaacagccctacccctcaaggatattgttgtacaatgaagtgtttaaagatgataattactattatcataatcattagaatatgacggccaggcatggtggctcatgtctataatcctagcacctggggaggccgaagcaggaggatcacttgagcttaagagttcaagaccagcctgggcaacatagtgaggacttatctctacaaaaaataacaaaaatcagccaggcatggtggtgtgtgcccatagtcctagctacttgggaggctgaagtaagccaaagttgcacaactgcactccagcctgggcaacagagtgagaccctgctaaaaaaaaaaaaaaacaaaaaatagcacgtgattatcctaatcatcatcattattagcaagtgcctggtatatagatttcaatgaattatgtacaagatacattttagaaatttttccatcaaaaaagggtaaagttttagtttttagagggagctttggtcatatggaaaaatctgatattcattccccactgacagtggataattgtgcctttgctgtttttcttttcactaattctaaacttcttttaatttcctcatattctgagactaagtaattaaatacatgatcaagtctttgtgatttgatttacttatagcaggagttatggacttgggattcaggggcagatttcagcagttatgtgaacccccttaaagtattctatgtgtggccgggcttggtggctcatgcctgtaatcccatcactttgggaagccaaggcgggcggatcacctgaggtaaagagttcaagaccagcctgaccaacatggagaaaccccatctctattaaaaatacaaaattagttgggattggtggcgcatgcctgtaatcccagctactcgggagggtgaggcaggagaatcacttgaacccgggaggcggaggtttcggtgagccgagattgcgccattgcactccagcctgggccgcaagagcgaaactccgtctcaaaaaaaaaaaaaaaaaaagt

SEQ ID NO: 52328 - DNA, 1114 bp, Homo sapiens
tcagaggagaaagcaagtgtggctgatgaacatcacggagcagtgaccttcatggacagacagaatttgagctggccctttaaccaatgaggaggattcaaacagaggtgaggtgtgtggggggcagggagaatattctggcagtgggagtaatgagcaaagatgcatggaaccgaagagcctgttaaggccagagtaagtccacctggagcactggggtttgagaagttcctaaggcctccctcacctctctaaggctctctcttactctgcaaaaccgggataagagtacccacctcactgggttgtttgaggaaaaatgagataatgaattttcagcctactgcttggctattaactgttagctgttctatcaccgccacttgtggactgggctaagtagtctaagtttctggcagaacagaaaggatgggggacgctcagcaacagagggaggaaatatggagctagctaaagccacttcatgaggcgcaagcttcttccagatggcatcagagtgcatgccagcaatgggggctgtagcccaggcagagcctggcccctgtctgccaggaattagcagttcattgttcagatagcagagttgggagggtgtctgctcgtcattttacagaaaatgacagcgaggctgagatggctgaagttcccttggcttctccactaagataacttcttgagaggacaatgtgaagtgtatctcgtgcctgtgtataagctctactttctaggggtggaaaagctggtggcctgtatctggatacctgtctatccagcttccacatggtctgaatctaccctttcaatctcagaggtgtttccagttcttctcaagtacttacccttgggaaatccaagctaacagaagtcctagaggtcaacttttctctccctgaccatttgtctactatccttgtataatgaccaatcagggtaagtgagggcgttaattctttccttagagactttttgtacagaccttatccaatcttggtgcaagggctccaagaagctcactttgagaaatgtggttctaacctatgaatctaaattcctcctgggcattatccctctctgctcttattctctccttggt

SEQ ID NO: 52329 - DNA, 1028 bp, Homo sapiens
tgcaataagtggcttaagagagttgaacctgcttctcagaatgttcataggggggtcatttgctggaaggatcaggctggtcttcatacaggaggcaagtctggagctctgaaaaatagcctagggagtggggaggatggtaccctcagaggaaaacctggggagatcaaaggaagtgacccaagggacatgtccccgacaagaataggacctttcttgcagcggagaatagacaataacaacttgtaaaattgctgtttctgtctaagagcctgctaatatcctagagaggattttgcatatgttatctctaatccttaaaaccactcttcaaggtaggcacaacccccactttacagatgaagaaatgaggttaggacaggatttgcccaaagacacaaagccagttgatgggggaatcagaagtcagacccacatttgtttggttccaagagcatgagaaaaactttaagaagtacagacgcttccacacaaaacaaaccaagatggacccagaattgccactgccctgcctgtacaacatgagcaccacccactgcatacctactcccaagccttttcaaatctggtacctactttccactgttccacttcacttggcccaccctgtgccccaccccctacctcctccatcccagtttcacccactcctaaaaatgatctccccaccccaatccccacttttctctagcagaaggcccgagacatgtatgcagaggagcggaagaggcagcagctggagagggaccaggctacagtgacagagcagctgctgcgagaggggctccaagccagtggggacgcccagctccgaaggacacgcttgcacaaactctcggccagacgggaagagcgagtccaaggcttcctgcaggccttggaactcaagcgagctgactggctggcccgtctgggcactgcatcagcctgaatgaggctggccacctgccactttgccctgccctctgcctccagggctccactccccttccttttcttggtgaaag

SEQ ID NO: 52330 - DNA, 1658 bp, Homo sapiens
atttggttggtgttgctggctggtacttgccggtgtggggcacctgaaatagagttgctcaggcagacagctcttcaaaggcactaatcctctcagcagctctgcagcaagtcctggcagagggaggtaagggaaaggacacagctttgaccctcacaagcagaggacctagaacaagctttgccatgccaagaataaatcatctagggcctacttagggagccaggtcaaaaagctgagagaaacctcgaagagtggagtgggaatcagagtttgagatggtgagggcagggagcagagtcagttggaagaagtgtttggttctgctcagtcctgttgtgttacaggggaggcctgtgctggattcagttcaccagggcctacaggcccttctgttaccctgaaccatggagggggccagtctcatttgggagtggagcctggccccatgccctgcaagaggaggagaaaagcttgtgtgggctgagtcgacaataggtaattggattgtaatcgcccgcctggcttccgcgcaccattgggggtgctgagtctttcagtgagcaatcagtactgtgtggtgggagagggtagagattcaatagcaaatcccaggtggagagccaagggggaggagcagcagatgggcaaattttctgtctctcccaccccttttttccttacccaaataactgcctgcctattagttatttactagcagatccaaggtagagccaaatcttttgtggaagctgggtggaaggctaaaatggaagggtaaagagctagggttttggggagaactcttccctgaaattctgtgtgttgaaggatgtgctggtggaaaaagaaagtgcatctaagagacaggcagctgatgagttgtggccctttgctctccaaaccctattggtgaccagacctaggtttagtgtactcgtgggagactttcaccctcaatcctcctcaggagcctgtcccaggcagcccaaaggtatctatggccagcaaacctggcctggggggctccccagccaagcaaagggaacaccattcattatcaggaaaggaggtgcctttcaccaagaaaaggaaggggagtggagccctggaggcagagggcagggcaaagtggcaggtggccagcctcattcaggctgatgcagtgcccagacgggccagccagtcagctcgcttgagttccaaggcctgcaggaagccttggactcgctcttcccgtctggccgagagtttgtgcaagcgtgtccttcggagctgggcgtccccactggcttggagcccctctcgcagcagctgctctgtcactgtagcctggtccctctccagctgctgcctcttccgctcctctgcatacatgtctcgggccttctgctagagaaaagtggggattggggtggggagatcatttttaggagtgggtgaaactgggatggaggaggtagggggtggggcacagggtgggccaagtgaagtggaacagtggaaagtaggtaccagatttgaaaaggcttgggagtaggtatgcagtgggtggtgctcatgttgtacaggcagggcagtggcaattctgggtccatcttggtttgttttgtgtggaagcgtctgtacttcttaaagtttttctcatgctcttggaa

SEQ ID NO: 52331 - DNA, 2071 bp, Homo sapiens
gctgcgcgcgcctccctctcccgccctcgacggctgccatagcaacggcgctgggctccgcctccggagggggtttgtttgcgccatctgcagctgttgctcctgcctgtcgcggtggtgcgggctccgctgccctccccggctgcgctccggtccagccctcgcttctcggggtcggcgagccggagctcctgcgcgcgcttcgttcttatacgaacgtcgggctcactcatttatgtcctagaaaagttgtgtggacgactgctttaattttcatttttagcactctaaagtttgggaagtaattaagaaccacctcaaaatctgcagttttttgttcttgtttcttataggctgaaggggatgctaagggagataaagcaaaggtgaaggacgaagtaagtcattctctcttcaagggtcaaagccttggactagcagaggccactggactcggtgattaaccgtaacctgtgtcctgaatttacactcctataatctagagcaaattgataccaaactttcaaagcgacttacctgtcctatttctaactttctcgttgtctttaatagccacagagaagatccgcgaggttgtctgctgtaagtgtatgcttttgaattttcgtgcttgtccctgaaactaaaaaacatcaaaaaacaattccctttgcttccatgaattatggttagtgcctggttttgaatcattgcctctacttgggactcttgcccctttgggttttgctggttctgaaattctgatgcctgtagccaaagtgggacatttgagtgggcttctggaaatccaacattctagaagaaagccaaccacaaaaacttttgaggaggaggagaaacttctctacccttggtacttttggttggttgtgggtggttttcttcagtccattgtactgatgttcactttttcctctcttcctgccaaaaaaagaaacctgctcctccaaagccagagcccaagcctaaaaaggcccctgcaaaggtaagtgctaacattggaactgatcattttcacagaatgaggactgtccttagtgccttaacttaattagcataatggtgcctccattaatggaggttataaactgtgtggatagcttacctcgtccgtgtcattcataacgttggtttcctgatcaagaattctgttgttagtttataggaaaatctgcatttaaatattaaataccccagggtttaaactaatttattcttctgttacttaggaaattctaagtactaaagattatagcaaattacagataatttagcctagttttgatcagttgttcttgtcaaatgggtgagggtttgtgttttatcttgagtaaacaatcctaccttgtgcagaactttgcagaccataccttggtaatacgaaatggggagaaacagttctattttttcccctttttcagaagggagagaaggtacccaaagggaaaaagggaaaagctgatgctggcaaggaggggaataaccctgcagaaaatggagatgccaaaacagaccaggtataactgctgtttcaccctttgttagatttgttcattcagttagttgctgatatcaaaaatttaattgcccttttcttgtatcactccaaatgtaccatttggtccagtgtgcttgtggctttcctgttaacttaaatcctggattcttgaaatctctactgtcagctgaagggcattgtgttttatactacatgaagttttcaagctaggagtaacctcaggtctcttattctggtgttcttcctacctcaattttacagtgaggcccagaggagaggtgacttagcaaagttacctagtaagtcattctcagaagaaatactgagtctcagtacctgaaacctgaactttggcctgggagcaaagtgatgctgtaggtggaatgtgaacacagatagttttgaaatctacgcattgcattaatttgtctgttttcttttaggcacagaaagctgaaggtgctggagatgccaagtgaagtgtgtgcatttttgataactgtgtacttctggtgactgtacagtttgaaa

SEQ ID NO: 52332 - DNA, 1051 bp, Homo sapiens
gaatccaggatttaagttaacaggaaagccacaagcacactggaccaaatggtacatttggagtgatacaagaaaagggcaattaaatttttgatatcagcaactaactgaatgaacaaatctaacaaagggtgaaacagcagttatacctggtctgttttggcatctccattttctgcagggttattcccctccttgccagcatcagcttttccctttttccctttgggtaccttctctcccttctgaaaaaggggaaaaaatagaactgtttctccccatttcgtattaccaaggtatggtctgcaaagttctgcacaaggtaggattgtttactcaagataaaacacaaaccctcacccatttgacaagaacaactgatcaaaactaggctaaattatctgtaatttgctataatctttagtacttagaatttcctaagtaacagaagaataaattagtttaaaccctggggtatttaatatttaaatgcagattttcctataaactaacaacagaattcttgatcaggaaaccaacgttatgaatgacacggacgaggtaagctatccacacagtttataacctccattaatggaggcaccattatgctaattaagttaaggcactaaggacagtcctcattctgtgaaaatgatcagttccaatgttagcacttacctttgcaggggcctttttaggcttgggctctggctttggaggagcaggtttctttttttggcaggaagagaggaaaaagtgaacatcagtacaatggactgaagaaaaccacccacaaccaaccaaaagtaccaagggtagagaagtttctcctcctcctcaaaagtttttgtggttggctttcttctagaatgttggatttccagaagcccactcaaatgtcccactttggctacaggcatcagaatttcagaaccagcaaaacccaaaggggcaagagtcccaagtagaggcaatgattcaaaaccaggcactaaccataattcatggaagcaaagggaattgttttttgatgttttttagtttcagg

SEQ ID NO: 52333 - DNA, 1052 bp, Homo sapiens
tggcacaaaagccttgtggtatagaaaaacaaatttgtttttatgtcctcttctccctttccatcgttcagcatagacttaactcccttaagcccagacatctgttgagacctgacccctagtcattggttaccagtgtgtcaggcaatctggactttccagtgatgccactgagatggcacctgtcaaaagagcagtggttccatttctagattgtggatcttcagataaattctgccattttcatttcacttcctgaaagtcagggtcggcttgtgaaaagttgttaaacaacatgctaaatgtgaaatgtcaaccctcactctaaactttccctgttcagagcatcagatgaagacttcattgggttttatagtggctttctgatttttggtagtccattgaagaagggagtttgaaagttgttgtatactgttaacgattgtctgcccatgtcctgcctgaaataccatgattgtttatggaaagtatctttaataaagctggatacagtttggcttggaatgctgcctctgatcttttcccacaagtggggtaacctggtttatccaagtctcttggaacagggtacgttctgctttgaggtactccatgtacagtctaatgatgatctttcactgatttatagtcagcttccaaaacacacagtgctaggtgcagttaggaaggattccaggagtagacttagctgatggtgaaaggctgggagtatggagtgatttctgtacttggttatgcagcattccctgcagtgtttgttttttgcatgactccgaatacatgaagtgtattaaatgcagatttttggtagatctgcggttttggctgggtagctgacaggagcctctctacttccatctgcatttgcaacttctataaaattagcaaattaatagactcatgtcagagagtgtctctgtgaatgtgtacacagttgtccatttgtaaggtagatgacactttgctcctaagtagacctgcaaacaaagacaatggggtctttcctgattcctttagtttggagatgcaga

SEQ ID NO: 52334 - DNA, 1086 bp, Homo sapiens
actgctggcagctcctagccaggaaggaggcaggtgaggggctggtgggggacttttcacagggacctaggatctggactgccctgccctcccttaatgctgctgaaaatgggccgctgggaggcagggcctggcccagggtgcagcccaggtggagtaatctatgggaagcgtgggtgaggattctgcctgggcctcgcttagccctgttgaaagcagtagccttgtccccaggcccagttctgccacgtacagagctttactatgtgccacccactctgccttacgaatgtcaccccactttaattctcacaacagcttctcaagatagggattattacccctgttttcagatgggacaactgaaaactcaggcttatgtgttaatatcagagccaggattggaaccaagatctctctcttccaccaagtgggagagaggctcagggatggggaagggctggagccacactagcccaggtggaaggtgctccaagagaggctccggatgttggcggactctccttatcctgcaaggccctcgtccagtctttgccgagggctggcagtgccagccagccctggcacctggcccccagcctccagcagtgagcagggctgccaatgctgggctcagaacccagctcctggggctgcttcctgcctgtggggcacgtgctgtccttctccatctgctgcccagcttctccagacgctgccctgggcccctctttctaagacagagttgcttgggtgggaaggaatgatgccagttggaacccatttctgacatctcagaactgggggcagtggtctggggccctgggcatctgtcctcatgagcagtgctctctgaggaagagggaggagtgtgggtcttcaacctctaagaggccaaaggactcctaagacaaagtccttcattcagtactctgcaaggtcagcaccattgtccccattcagtcatttatttagcacttaggtgataagtactatttcagacaacaaagtgcagatgtcagcaagacacacctgccctcgtgatacagatgaggaaactgagactttattactattattattttt

SEQ ID NO: 52335 - DNA, 2111 bp, Homo sapiens
gacccaggctctgagtgggaagccagcaccccacaacccccctgacccccctaccagtctgttctccagggctgcctgttcccttactcttacaggtttggcgttccataagaatgacacccaagccagagatccagggagtagaggcagccagactgccttagagcggggggtccctaagtcatccaggccactgctcaagaaacccacacctctaggtacacctaccccttcctccccaccctcagtaggcttgcagccacgtgactttgggttatggtcacatgtctgccacctgcctgctgagggacctcggtgagtcccttaactctcctgagcctcatctgaaaaataggagtaatagaacctgctctggcctccttgctgtctttgctgggttgaactttcactggataaaccacatgctggactctggctgggtgccaagatgttgatgatggacaagccatggccccttcccgagttaacctgcagcatgcttaggttatgggggtagagaggagggaggaaagaacatgaggctgtgtggacaggggtgacatttgaattcagtcctgataaaagatcaggagtttgccaaagtgacaaggcaggaaaggctttcttggtagagggagccaccatacaaatgctggggatataaaatagactgttttcagggtctgtggttgttcagtttagctcaaaaatagggcccaatgataagaatggctattgtttgtaggccagttacatgtcaggtgtatatatttataggcattatttcatttgcttcttgccgccaccattgaggtatgttactttgatccgcatttcacagatgaggaaactgaagccccagtaaatgaactaaccttctaggggtcacgcaggtggtagaagccagaatttgaacccacaaggtcaggttgcaaaacctacattcctagttattgtgctgggcagttgaagatgatggccttgatttctatgctaaggagctgggacttgattctacaggcagtggaagccacagaggggtttggggcctggtacatagaaggttctcagcaaatgttgactgagtgagttgagtgcagcagttgcacttgattttaggaatgatgagggtttggagtggggaaggctgtggggcagggagctggtgggtaggctgttctgatcatctgcaggaattatgtcaagagtctagaatgctgggtgaagtggagctcagtctacaaaagcatccctaccacagcccagcccctgggccctgaccaacccatcccttctccccaggctgctgagagatgacagtgtgtgtatggatgtgtgcatggaggggcctgtagaacatttggcccctggggagagattaggggcattaaaggggctcagggggcaggatgtcctgggagtggcaatggggagctgttccaggggcagggagattatgtaatgggtagagcacagctgtgcctacccagctgtagccaagcagggctacagctgccccatggacccagctcctggctccaaagtccagatccagacctgttctagagcaggccttcctagctgttgggaacctcctgtctgcctcaccacactctccctgttctaggaggggtggggcaatttctttcagcttccaaacgcccagatagggtaggttacttgcctcacatcacacaggaaacagatgggctgggtttgacacaccccagcatatttaataaccacctgagagtgaagtctgggggctggaaaaggcaagactgaccagaggggggctctgggctctgggctgtttctcagctgacctgtttggagcacctcctggatttgggaccagattttgaatccccactcaccagttgtgtgaccataggcatcatcactaggtcccctcagagcctcagtttccttctctgccacatggggccagggcctacctcccagggctgtcatgaggattaaatggtgccacaggggccaggcgcagtggctcacacctgtaatcccagcactttgggaggccgaggcgggcggatcacctgaggtcaggagtttgagaccagcctggccaacgtggtgaaaccccgtgt

SEQ ID NO: 52336 - DNA, 1055 bp, Homo sapiens
gtttgtatctggtagagctggaagccacacatgacccttcccttctccctgggaggaggtgacatttgaactaagtcttcagagatgaagtgtttgccaggcagacagcatgagggtcagaatgctggtccctgggaatattctgcctgagtcatgaggcgccattgccagaatacttggtccctgtgcctacaccatgaaagtggaggtggagggacccacccaggactcctgccctaccaccatggcctccatggctattgggagcacctaagggtgggggtgccccacagagtctttctcccaagcgtgtaagttctgacagtgctcccccaatctcctttctcttttccagaatggacagacctcaggggaagaagctggacttcagccgtccaaggtgaggaccatggccagcaccctgagcgaggggctgtgggggatcctgtttgcatggctttggaggaggttgagggctccagcctctagcccctttgcccaactcagccgtccttctcagggcccaccgaatccttgtggcaaccctgggcatagaaatcacttgttccaaccttcctattttgtaggtgaggcgactgtggcccagaaagggtcaggagcagaatccaggtcagggctctggttacctgtcacccaggccaggatgcccctgcagtttatttactcatggaatttgggctggctctaaggagtgatgggaggggctcaggccagctgtcctgctccttttggtagagctgcgcttgccaagagcctggaagtgagcatctgggcacgtgagctggaaagggggtgctggtggccgctcaaggctaaccaggcccattgcctggcatgtggcactcatggcatttcttagggcttccacttcccagtgtgagggtcattccctcacccctgctatctctgcttcccctgggccccttcctgtagccccctagcccctgttgctggttttgtgttttgccagaagcaccaggactaggtgacagtggtgtgaccttggggaggttccttgtacactctgggccttg

SEQ ID NO: 52337 - DNA, 1209 bp, Homo sapiens
gaagtccctatgcgggggatggggcagggaccaagggatgtgggctggtggctgtcctccccccgcccgccaccagaggcctcagggcccacacagccttcagcaaaggcagttctgagactgtttccttcctgttgccccttctggtaccctgctggccacagaggctcgtgtggactaggccccttggtttatctcagcccgtatctggagagtctcctcccacaaagtagctacctctctaccttctttgcatctgagggaccaggggttggtagggagggtgagctttggggcttccgagagctgccccagcctccaaacccctgtctgaggaagctggagagcaatgagaggcttggctgagggaggcatctttcacaatctcccggcagccatccacccgcagagactctgcaaggacagggaaggggaagtccgtgtgtgcgtgggggcatgtgtttctgcataggggttgtctgcggacagggtttccgatcatcggcctgagtgtgtgtgtgtgcatgtcagtgcctgtgctgtgctggtatgagtgatgaaatgaggccacgtagaaaggggctgggcctggtcaacccctgccccatagctgcctgctcctcctctcagacctctgtgaggtccttggtcaggctttctgcccgccttacccatcctggggcttgggactggcagccttcttcggggcagctgagcagggcaggaccggaggggggccactggtgcctgctttctgggctgccattgtgggtgggcatagccatgggaaggatgctatggaggggtgggacacagtatctaagctctggactggacagtcggacagtggcctttgctgacttttgccccacattctctcaggtcctcccctcacgtggatgtttgcgggtgctgatatgcccactgtgacactgcgttatcgccttgtgacttttgtctctgctcttgtctctcctccttagagtcagaggacatagggagaggtgtgcccctgggccttccctggggtcatgggcttggggtctgcagtgtcccctcctctatagaggagcctgacccatcatctgcccctcctccctgcagagggggaagtgagaaggaggggggccagagaccctgccttctgggccaggaaggctaaaaaaagcagaagtaggaagagtaacggggccctctggtcaccggctt

SEQ ID NO: 52338 - DNA, 2657 bp, Homo sapiens
ctctcagctactgtctgggtccccctcaggtcttggcataggaggaaaatcctagggaaatgggagatctcagaggtgggtctgcaagaaatacgagagtcctctcctgagtggtgggagtttgcagattgtctcccctcatctctttccccaccccaggtacagcagcaagaacccacagctctgcccttaaccccttcctggggatccctgccctgctgcctgcccgtgtgtctgccaggtgtcagacctatctgccctaggtattgtcagtctgcttggggctcgctgactctcccgctgtctctctttgctgcctacctctgtctgtggttgggttccaatctctgtctccacttgataagtgcctgacttcaccttttgggtacatgtcacatgttaggtgcctgttgttcatgtccccttctgtctctgcctgttgggtttatgtcttcatctgtctctgcctgttggatacctgtccccttctgtctttgcctgttgggtttgtgtcaccatctgtctctgccttttggatacatgtccccttctgtcattgcctgttggttttttttttgaaacggagtctcactttgtcgcccaggctggagtgcggtggtgcgatcttggctcactgcagcctccccctcccaggttcaagccattctcctgcctcagcttcccaagtatctgggattacaggtgcccaccaccacgcccagctaattttttgtatttttagtagagacggggtttcaccgtgttagccaggatggtctcgatctcctaacctcgtgatccacctgcctcggcctcccaaagtgctgggattacaggcgtgagccaccacgcccagcctgcctgttgggtttatgtccccttctgtcattgcctgttgggttggtattctcttctgtctctgcctattggagatgtgttcctcctgcctttgcctgttgggtacatgtccccatctgtctttacctattgggtatatgtccccatctgtctctggctgttgggcttgtgtccctatctgcctacacacattggggatgagtctctgtccacctctgtctgttagatatgagtcccctcctgcttccccttgtcaggtacgtgtctccatctgttttctattggatatgaattcctcctgcctctgcctgttgggtgcgtgtccttatcctccatccctgcctgttgggtatgtgttctctcctgcccctgcctgttggatgccattctttctttttctttttctttttttttgagatggagtcttgctctgccacccaggctggagtgcagtggcgctatctcggctcactgcaagctccgccttccaggttcatgccattctcctgcctcagctcccgaatagctgggactacaggagctgaccaccacgcctggccaattttttttttttttgtatttttagtagagacagggtttcatcatgttaaccaggatcgtctcgatctcctgacctcatgatccgcccgcctcagcctcccaaagtgctgggattacaggcatgatggatgccattcttacctgtttccacctgttgggtgcctgcttctgcctgttgggtgtctctcttcgtctgcctccacatatcaggcacctgtctttgtctgttgggtacctgtttgctattgggtacctctctgctgttgggtaccagtctgctcagcagctgcattggcaggggactttccctttgtaggcccacagggaggatgggggaacggccagagggcagccctcaggctctgaggagagggggagagagaggaagggaacgtggtgagggtgtaggcctggtgctgggaaaccacaggccctgagtgattggctgccctgggccaggcccagcccccgcccttaccctgcacatccgccttggtcccggccaccactgcggcagccccggactctgcctgctcctgccatggtgccgtggccctgctgggcggatggagcaggatcccaagccgccccgtctgcggctctgggccctgatcccctggcttcccaggaagcagcggcccaggatcagccagacctctctgcctgtccctggccctggctctggcccccagcgggactcggtgagtgtgcccgaatgtctggtcctgacctggctgtgtcccttgcagcaggtgcctgggaagccagcttaacataagctggctttgggctgtcctggcccaggcctggccctgcagggtgactggaccctgcccagacttgcttcctggggaagtgaggaggcacttcagggcttcaaggcaatggcagcagattggagggagggtagagtcctggaaaggctaggacctggcaaggggcttccagtaggtttgtatgagggaagtttgggaagttgagccatgcagtctttggccttaactctgacctgccccaggccagcacttacctagttgatgggggagtttgggtgactcttgggtctttgtgcacgtcagccctgtcctgctgaccagagggatcccctcatcccatcctgaccaggaacgaaggcccagctctacctccccatatgagaacaagcctacttcctattgtggcaacactaaaacaacagggggagggaagccccacgggcggacctggggcaggtctct

SEQ ID NO: 52339 - DNA, 1050 bp, Homo sapiens
cacactaagcaccattcagcattgctacggctaatgtcccagaaccttgagacaccccatgagttgagctgtgacaccccagaaagggaggcaggccactcaaagccgtacttagtggcacagctggaactcagctcagggctcctgcgtccctcccaggcctgcccagacttttcagaactaaagtcctctccatgtgtgttgtgaccctgtttcccactccctacactgccctctgaccacaggctgcagtccaggcaggctgggagccagtgagtatgcccattatatagagtagaaaactgaggcccagagaggggcaggctgtcacctgcggtcacatggccaacactctaccccaagtctcctggcccttccctggtgctgtctctactgagccaagaccttaggtcctgggggatgacccctagcactctagagccaggggtcagccacaatttttggtctcctacagcaactccatgggaagaacctggtttttagtgacggctacgtggtaaaggagacaattggtgtgggctcctactctgagtgcaagcgctgtgtccacaaggccaccaacatggagtatgctgtcaaggtgggcctcctgaccacgtctcggccaaggctgctgggttgggggcaggtccccgtctggtggggagggatggtgcctgagctctgcagatgtatgaaaggtgtgtggccgagacctcctggcctgctccatggccagaaaggaccctggaccctgtcaccctgacactgccacatgcaccccctttcttcaggtcattgataagagcaagcgggatccttcagaagagattgagattcttctgcggtatggccagcaccccaacatcatcactctgaaagatgtgagtgggggtccttaagactggggtggggaccaggaactcaactctcaggatttgtctcaggattgccattcctttgacttctcatcctctttccagtggtcatgtggaggggaaggaggtcccttggtcccttcagtctgcccataccccaagggccctcctt

SEQ ID NO: 52340 - DNA, 1367 bp, Homo sapiens
aattgcttgaacccgggaggcggaggctgcagtgatctgaggtcgtgccactgcactccagcctgggtgacagaggaagactccatctcaaaaaaaaaagacttttaagattttgacctaagtaacaggaaggatggagttgccacaaggtaagattatgtgatgagtaggttttaggggagaattgagagttcagttttgacaggttaacttagagctacctgtagacacctacacagagtcagtagcagcagcaataagaccatcatttcagccccttccccttctctcggatgccaagtccatgcacccgtccctctgcaccctgtctgtgtagctttctaatctctggccgctgacctgggccactagccacctccccacactgagaactgaccccagccccctgcccctaggttgtgcacagggacctgaagcccagcaacatcctgtatgtggacgagtccgggaatcccgagtgcctgcgcatctgtgactttggttttgccaaacagctgcgggctgagaatgggctcctcatgacaccttgctacacagccaactttgtggcgcctgaggtgagtggcccagcctcctcagctgtaagagtgagggggaattggaggccttgtgccccctcccagaggccccacattagccgggactccagtctctgtgaccttggcccagctggcaagggaagatctagcctgtgcctgggacccttgtcctgcccttgaggggagtagcaggaaacatctgtggcgactttctactgcccccccagactgaccacctcccctgccctgttgccaggtgctgaagcgccagggctacgatgaaggctgcgacatctggagcctgggcattctgctgtacaccatgctggcagggtgagtgcccctggcctggacccttccccactcctgcagccctagcacttgggctgagtggtgcttgtctgataggaatggctcagccagccccgccccaggatggtctggaaatagggacatgctcctgcctccaggagctctaccttgggagtaccccatctgagggggagacacagtctcccaccgcagccccagccccagtatggaggccagagtctgtacccagaccgtgcgggcttttctgcagatatactccatttgccaacggtcccagtgacacaccagaggaaatcctaacccggatcggcagtgggaagtttaccctcagtgggggaaattggaacacagtttcagagacagccaaggtgagtctgtacggcctgcgtgggcttatttggaggagggaggcagggtcccatcctagggcttttcagcagttcatgaacagcctcatttctccaagcggatgtt

SEQ ID NO: 52341 - DNA, 1073 bp, Homo sapiens
tccagtctgatgggggaggcaggacccatgaccataaaggaccactgaggctggattaacagtgggctaggctgggcgcggtggctcacacctgtaatcccagcactttgggaggctgaggtgggtggatcacgaggtcaggagttcaagaccagcctgaccaagatggtgaaaccccatctctactaaaaatacaaaaattagccaggtgtggtggcaagcgcctgtaatcccagccatttgggaggctgagacaggagaatcgcttgaaccctgggggcagaggttgcagtgagccaagattgtgccattgcgttccagcctgggtgacagagtgagactgtatctcaaaaaaaaaaaaacaacaaaaacaaaaccaaaaaaagtgggctgtggaacactgagaggggctggcctacccttggggcatggatcccctccccgctacatctcccaccattgtgacctgacctccccacttctctttcagggagccatggctgccacgtactccgcactcaacagctccaagcccaccccccagctgaagcccatcgagtcatccatcctggcccagcggcgagtgaggaagttgccatccaccaccctgtgaggcaccagggcattcgggccacagggcggtgctagcttgacacagtcagcatgcttcccagagggagcaggccggaaccacagggccagagggagctggaacccgaggggccggggaagctgccagcccagaacacccctaatgagggtgtgagaagtgccttctccttccccaggatggactcttctcggctcaggctctgctggtggaaagcgattcactgtataaacttttttttatgaaaaaaatggcatcaaccaccatggatttttacaagatccatttgcctttctgggagcagaaacagccattgcggccccaggaggggaactgagtcacgctggggctctctgagactctttagagcagctttgggatcccaccctggggacccccacgattggccacctgtagccatctgcacacacctccgagacagtccagtgtcacctctctcaga

SEQ ID NO: 52342 - DNA, 1019 bp, Homo sapiens
actgttcacaaatgtcgaggtcagaaaacagaaagaaaagactgaggaactagtacagattaaggtagacaaaagagacatgacagctaaaggcagtatgtgatcttggatttgattccagaccaggaaaaaaatagtcttatatcatatttttagggctcatgcctataaccccagcactttgggaggctgaggcaggaggctctctctcaaggccaggaattggagaccagcctaggcaatatagtgagacctactctctacaacaaaaatttataaattagcctgatgtggtggcacatgcctgtaggcctagctacttggcaggcaagaggattgcttgagcccaggagtttgaagttgcagtgaactatgattcagccattgcattccagctgggcaacagaacaaggctctgtctctatcaaaataataatatttttaggacaactaacgaaatgtaatatggactatgaattagttgatagtattacatcaatgttaaatgtcctgatttttatatctatactgtggtaacataagacaatgaccttgtttgtttttttttttgtttttttttttgagacggagtctcgctctgtcacccaggctggagtgcagtggcgcgatctcagctcactgcaagctctgcctcccaggttcacgccattctcctgcctcagcctcccgagtagctgggactataggcgcccgccaccacgcctggctaatttttttgtatttttagtagagatggggtttcaccgtgttagccaggatggtctcgatctcctgacctcgtgatccacctgcctcggcctcccaaagtgctgggattacaggcttgagccaccgcgcccggccgaccttgttattaagaaatacactcaggggtaatgagtctcgaatatatctcaaatatttcaggaaaaaatgtgcatatatttataactatgtatgtaaagagagaataataaagcaaatggagcaaaatgtaattaatttatgaatttggataa

SEQ ID NO: 52343 - DNA, 2190 bp, Homo sapiens
tttgtcctggcagccctgcccccttccttggctgctctgccgctggagttaatacgcccagaaactccgcctgatcctccaggcctcaaatccagtccgcgtttgctaagtgccgtgcggtcggggacggcgataagaactctcctgtgagggagagctagcgagactttagtccggtttccatgtcaacgattcagtccatatttgccatcaggctgttggccgaggtgctttcgcgagggtagcgctgtcctagtcctagttctccaatctgcgccgggattcctgagctgcctgggtgtggggttaaaaggcaggggccgtgggggaaaaaactccaccgaagggaggacccactgcccccagccggggtctcgctgctcgggccagccacgtgcccagctcctcccctcccccgctttcccgttgccactgcccctagggaaagctgatgggccagtttctaaaaaagttccctcagcccaacatttcctgggatcgtggtgtggggctctaaaagtaaaagtggaagagaaccctagtgaattaaaaaaaaaaaaaagtagagaaattccacattatctcctccaacccaggtggatagatttttgtgcactttaccttattgctagagaaaaatggtgactgttttcaaaacagcttgcccacgtgtagggaaggagatttttggcgctttccatatttcacagccattgaagaaaggggatgagggctttctttggagagaaatccattctagcttccagattttcactgggctccaggtttcccattacaccccagctctaaggaaaatggcagagtaatggcatgtaaaaaaatcctcatttgtgtgcaggactcaggactgtttgccagctcaggggcagttgattaaatagccaagctctatttatgaggcagcctataatttggtttctaggacctaatgcaccggggagagttgttgcccctgaggactgtgagtgaaaagagggcactggcccataccagtcagtcggatcttcttggtaggctggtttggttcttggcttgaggccgggggaggggagaagaataaaactgtgggattttttttttttttaaatctcatcactcttagattaacaggaaggttttgcctttctggtgtaggatgcagtaagttttcttggggagagaaatgagttcaggctttggaattattcatagtgaccagggacattgccagcactcccgggtcctgcataatctaagataatgctcctgtggccatgaagtctccctttacaaaatctgagggggaaaagagatcctggtgtctaggaacactggcctgggcctttcccaaggcagccttgggtctggtgaggagctggaatcccctctggcttttgtagcctgtcatatcagaacattccaagtcagcctgaggaagaaaaggctgctgctgggatttggtggggcctgtagatcaggagaacactggagctttctgtgtatgtcgatcttttcagataaacctggccttctacccaactccagctcaatcggggtctcttagaatgtaatggtaaactttaaacaatctttacgctacaggatagaaaacaaatctgacaagcatccattttctaagtgacttgttggactgtgccttttcttcaaggagaaaatggtttccattttctgcatctctcttctgtaatggtttgaacactcaggttcctgcagtccctggagcctcttctgtgggttttcagtattagaaggtactgtctttggagactggggctacttgtcatggtaggctaagttttcttaagagggagtgagaaacggtgtttaggttttcctgctgggtaactgttctatgctcctaaagcaacttcagtggcctccattttaagttagtggtgagatgatcagttttgacttcaaatccattttgatattctgatcccattgttgaatgtgctcacaacttgatttttttttttttaaaggcaagtagaccgaaggcagctttggtgactccacttctttttaaagtcaccctcctctgccctctgactttaagtgacaggcagttccctcccctctctttcaattctgtaaaatggggataatccggacctcatgcccccagagccttgtaaggaccggctaatgagggcaggcgagtgggaa

SEQ ID NO: 52344 - DNA, 8738 bp, Homo sapiens
tggctcttctctcttaaaatggctgcctgtctgccttcctctccttccctccttcagcctttgtgttgggtttttccagaggtgtctgctcctctttttcctctcccctggtcccttcgaactccaggggtcttgatgggggtgcggggcagagtgtgcggggaagggcctggccgggggtgagggggtgagggggcgctgggggctcaggttaggagtgtaggcagtggtaggagcccaggagttgaatgaacgtttctttgctcacctgccgctcctctccgtcccccggccttcctctgggccgccccccatctgtgctttcaaagagggcccctagagctcgaggggacctcgaggggagggcaggggactgcttgggagctgctagaggccggctgcggttcacctagggcagcccggtccatctcctgtcttaggctccgccggcccagtggcctgggcttctccctggaagtgctggtaaacagctgagtgattggagtagtaagtgcagattgctttggtttgggatttgaattatggaggtaaaatccttctgtcaaagccaggagacagttggtcttaggttgacatcctatctgtgatctgattggctccccatctcctgctcttggccatttataattgcctctgatgtaatggtacaacaatcctgatgagctcataaacttttacactctgcttttctgccagtgataacccaaactatcgctgccactatctgccttttattccagagctgaaattggctgtgaccttgaggagggaggtttaagtagcaatactgtatcagcaagagcaaagcctcagacagcctgcccttgttacattgtgcccaaacaaaagaggaggcaatggcattttgcttgtaccttggatttattttgcttgttatgttttatgcagcctgaaatgaattctgtgttgtcagaacagtagctgagttttttctctacaatgggtttgctgtttgttttggttttgtgactttcctgatggtataaatgacttctttgatggctctgaagatgcatttatcttgagtaattttgacactggttgctttgcagaattgaaatgattttactgggctttttattgagtggcaaatgtgggatctttatggggggccagaaaacagtttttgttattttttttagaactgggagctttctgaggaattttatattaggttcaagcggtctgttttaaggaagactggcctcattctttgtttacatgttgaatcttgttaacactttcttttgttaattgaactttggaatagcagcttaatttaaagggaagctggtgtctttcatgatcttgagggactttctcctaaaggcttggtttggtgaaattgtttttttcctggaataacaaaaagtctagttttctgttttgtcatcagtcattttagagctttgaaatagagactggccagtttattcctttgcattttaatgtatgttccactttttttcttgtcttccaagatatgaagatacgacctagaatgacacttaagatttgcttagaaattgcaacttctgagtaccttgttacactattctatcttgttttattttgttgcttttcttccatcttcatcatgctctgtcagcagtgcttttggtcagggatattgagtattctgtggagtcatacatgttttcaaagagggggaagctccattcatcccctcccaaaccccttgcgcttttgtgctaggaggaaattttgttcacttactagctgtattcccagcccatcctagagctactttactactcttttgagctggggattttgaaattagctgtgttagatggtgggcttggagctctgtgccttgattctacatcttccatgatgttctgcatctggacaagaaatagggaaatgttacattgtttttctagtgtctggaggaaaagttttgtcttaaaagacagcatcctcttgtctctgggtcatcctatagtctgaacctctttcctctcattccccttgttttgtttggttttggctgaaaattttacttttcttgaaaactattagaataagtcatttggggtagtaagtcagggttcatttaaaagcaaaattgattggaattctgctggtttggaaatatttagtcaaaggttttaaagaaaaagccaactcttttggtataatgatttttgtttttcagtcagtaaattatggaacactttctgtgtagatgataggagaatagatacagtccctgtttggatgcctgtctgtgctgcctttggatgaattttctgatctcttttattatcactagacccacacaacatagattcctaattaatttcagctcagttgtctactccccagagacccagggaatgggctggtgagcattcagttgtgtaagagacagtgcagcttccacttctgtggactgcttcaggtgtgtggtagtagtctaggtgagggttgtaggttcagactttgttctgaatttctctttgctacttgataaacctcttttcagaccatgatgctctactcttcaacattcttaaattaaaaagtcttgctctgtctccatcttttcctggcgcagtcttagattaagaatattttgcagagacttaattaacacagctaaggtgataacgttttcatttgactctgcgcttatgaaataaagtttaggtaagtgtgtgtattgtggctatgtctttttcacaggacctgggaagatcttagacaaacttttactttattccttttcataagtagtgtatctcaagtgttgaatcccggtactgatgaaatagttttagattacttacacacatgaagttgatttaaggctttttattgggacgctttttagcaataatactttgagagtaataccagtttaccaaggtaaaaaataaaatacaataaatagtccaggaacaagttggattttattgtagaagtttggttgttagtttctactacggaaacatcaaatgatatttctgactcctgggaaacagatacaggaatcctagatttattatgggaatgcctactggcagaaattctaggctggctgaaatacaggactcttggagctctctcaagtaggagggaccaggaaaaccacactgagatggcactttagttgtgggggtttcatgtttctctactgttcatgagagagctggggtgatgaggattgagatggtggtgtgagaacagagaaagcagccaggaccaggtttggcttcttgtgtattgggccctgtgaggactttttaggttcctttctttgtgtgtgacatgagtaaccatgacaagcagcacctgctgaaacaggatgtcttggattgcattaaacattaatatgttggattgactcctgtaggtgtaatgtctacagtagaccttttgcaaagaggttagtgaacttttttagaatgagggaataggctaacaaagtaataggcagggctctttcctgttcccatccctcaaaaggttgtattgattggcttcaactctcaaaattctagaagcaactgaagcttgtaaatatggtaaaaatgtggtattcaaatatattggcaccgagtagttcttttctgccagtgagctgtaatacctggggcttgaatggagtcctgattcctgtggcttttatctctgggtttttccttgtttagattggtcattatcattactgacgcacacttacgttgttattactgatgcatacttgagttgtgtgttgcgttagtggtaaagagcacaggactcacaacaggaggaggaaggaggaggcttaggttccacatacagctccagattaagctgtgtgaccctgggcaggtcatttgctttctctatttttcattttctccctcatcaataaaatgaagttggtctgcatggccttctcactctaagatgctacatatctgtgcttccatagctggcttgttatgaaggcagctttctgtacataaatcaggggtcttgagaccatctttcttcccctggactgaaggaactcaaagctattttctcctgggattcacaggaacaagctctgaacagttgggtgccattgtggtctgtagacttttacagaaaaagctctaccagactgttgccttgaaactgttaatctgtttgtcattagtcattccacctggctggtggttttaaaacactaaatagtcgttggaaagttaggtagatttcattaaagcaagacttgaaaaatagttgcttcaggatccccaggaggcttttgcacttggggttggggtgaggaatggatattcataagttcagtgttgatattctgctgcttttggggaggggtagggagagagagggagcattaagctctccagactcctggtgtttgggcaggtctaggtctggtttgggcagttggttgtaatctgagtgcctggacttgccctgtaagttttgctgagagagaagcaaatgttcctgagactggaagaggaaaagctgcgtttcagggtcaatttcataggtgcatttgttgtttctcatcgctatggtttaaaaaactacatggtgtgctttgcacgtggtcctggaaatgctattctttctcttctccagcacacctgaatttccattctttctcttcctggcttagtagtttagaagtgtaatttaggtatattagaggaaggaagcttccctttataaaggagggaaaagggtagagggaacagtgtttgataattctgtgcttgacacagcatcttctatcgtctctgaaggaaccaaatgtttcagagctttgtgtaaatacttgctgagctgtcaatatgtacccaggaggtttctgtagtaagatgtaaactgttctatagaatgtttgacaggcaaattaataaacagttttcaagcaaagataatgctagcctcctcatgtggtggagtaaaataacattggggaaaaagacttggggataggaaaagggtagtgctggggggcagtgagtgtggagataagaagtgatctaaaaaaaaattgaaatggaaagatgctgccctggtagtgaaacctctgtggccctggctgcgtgctaagttcagggcatgtggtatcctgttaaagtcaattgcagtttcatagtgaaaatagaagtttggaaagaagatcctgactgtcaatagtaaggtaagtattaccccagacacttggcttatgagactttgaggtttaaagggtagcttggtgagattatttttggcttgggtttgcatttctggaatattagaaaggagaaaaaagatactgcaacttgagtgtgatctttatcctcaattttgctgttgtgctggggattataagtccactacccaatggcctgggtttatttatacagtttttactggacttctgtgtatcacttatgataaaattaatatgcctttacactctgttcctgggtcagtacaaagtccaaatatttggggactcactacatcttacttgaaggattatgtgagtagatacagtctttgtttttgaaattgccattttaggattaaaaacatatctgggttccttcagtgacacattctttttatggaagaagaagaagaatctatgaatattttagctgtctgtctgtggtcctcttctttggtagccttgtgagatgaccagatttgccttctcagaatgtcttttttaactagattcattgattctgacaccagttttctttataagaagtgttttttacaccagagtcctggaagtgcccttttgacttagctgtttatatagtagcagggaatatgaatgtaattatggtcctgactatgatttttaggttcagctaacttactaccaaaggctatcagcttgttttaatacaaaacacaaaaacttggattggcactgacataggttgcttaatattgcatggtcctttcccagtatgttggtagtgagggtattaggaacttcagacttattgctgagagcatagtttctaagtcagagagatcaggaaattccaatggggatgggaaatagccctatgtgattacaccagctaggtactaggaagagatttaaaaggtagaaacaatatctccttcagaggcatttagttttcttaggaaagcatgcttatgtgcacacatctggaaaacttgaaaagcaaggtttcataaatggatgtagaccacactaattatgtgagctgaaggaattagaggaaaaggttcaatcagtttggcagggttaacctgggacagcttttcagaggctttttttgtgaagctaaatgttcaagaaacttagaatactaatttgccttttcataatgctattcttaagttccatgggcttgatagaatccacattgcacatccatctccagaccagtagctgtctcagtgttccaatgactttgagaatttggactctaaccataaaactccctgaaagagtggttccagggtcttagtggttcttgtggtcaggtagagcctttggtacagactgttaagttcttggctagttcaggggcacttttctagtaaatttggatttggaaggtcatgtcaccttcagagttgtgtgccctggacagctctgtagtaatggtggttcaactttgttggtgagtctgtcttggcagagttagttgacctttcttaaaacaagagccacgaagtaagtatctgttgggactcttaggctgctatttctgaggagctgggagctgtgttcaagtcaagttgcttgtgttagaccttatattgaggttgatgggttaggtaagcctgcacatatgcagtctgcccatttattcatagaaatggcctttaatactgtttttggccgggcgcggtagctcacacctataatcccagcactttgggaggccaaggtgggaggattgcccaagcccaggaccagccttgggaccaggctattaacatagggagaccccatctttacaagacacaaaaattgctggatgtggtggtacgtgcctgtagtcgcagtttacttagaaagctgaggcaggaggattgcttgagcccaggaggttgaggctgttgtaagccatgattacgccagtgcactccagcctgggcaatggagccaagaccttgtctcaaaaaaaaaaaaaaaatttgttttttattaggttactatggccaagcagctaacaaatgctgctcaccaatgcttaatccttgtggagcctctggaatatagtgattttggtttctttacctgctggtcgatctgtggttgggccttggcacttcaccggtcaaggatcatcagtggatgcttaacagctgaagatgcatggcatgtccagtgccaggccactgtaatgcttctacctggagaaggattggttacactgctccagtacagaagtactgcagacctttttttttttttgagatggagtcttactttgtcacccagactggagtacagtggtgcaatctggctcattgcaacctctgcctcccaggttcaagcgattctcatgcctcagcctcctgagtagctgggattataggcttccaccaccatgcccggctaatttttgtatttttagtagaggtggggtttcatcatgttggccaggctggtcttgaactcccaacctcgggtgtgatccacccaccttggccttccaaagtgctggaattacaggtgtgagccaccacgcccagccttttttttttttccccccccctcaagtaatggtccatgacctgctgaaagtactggagtcttggataaacattctggtttagaaataccttttccactttttttgccttgccattttggcattttgcaaaagtgggttttcagttactcagaattgggcaccatagttaacctcctatggattacaggtgtttaggggcttgaactctgatcattcccaggttttagaggaatccaagttcgggtgaatattgacttagtagccttgagtattcttcctgaaattacccctcctctccatttaaatggatgaaattagttttttactgaatgtgaagggacatctgaatgaacttctgtttgtttttgttagtcacttgtgcatagctggaatattatcttgggacaggttgagtctatttcccagtggcttctgcattttctaagggtggactggaatgggaagaagtctaatgccaagaatgcattccaacatgctgcagagtaggaaatttgatccctaaaatgttgacttagtgttggtcatggtacatattagaaatcacccagtaatccaggacagatttttgtcaccctccaggaagttatgttgatataaatactaaggggctttgggtactgagctaagtgctctgcaggcccaaagcgctgcttgaattgctacccatatgaagaggaaatgtgccatgtgcctttttttctctcttttgcatttgggcttccttatggctttgttgcttttatgttcccaagtctgcaaagttagatattagacttcctcctcccttggcactggcagattcatgattttccatggctcatcactagcagccaagatttttgtatgcttttctctcttaaacttgttcgttttcagcttgcttgtttataggcatctctgttaaaaggaacccttcttttccccttaagatctagcaccaggggtgct

SEQ ID NO: 52345 - DNA, 2529 bp, Homo sapiens
gcgggtggatcacaaggtcaagagatcgagaccatcctggccaacatggtgaaaccccgtctctattaaaagtacaaaaattagctaggcgtggtggcggatgcctgtagtcccagctacttgggaggttgaggcaggagaatcgcttgaacctgggaggcagaggttgcagtgagccgagatcacgcttgaacctgggaggcagaggttgcagtgagccgagatcacaccattgcactccagcctgggcgacagagcgagatgccatctcaaaaaataaaataatacatacacacacacacacacacacacacacacacacaccacttgttgttccagcttgagaagtggattagtgcagtggttctcagtgtggtccctagccaccagcatcagcattactaggtcctgttaagaagcacagacccttggccagtcctatcgaatccaaaactctgtcaatatgttctaacaagtcctctaggccattctgatgaacactgaagtttgagaactactagatttatacatttacactcaactgggctgcagagtatatccagattacctgaggggctgcttctaaattataccatagattgatgttttatgtctatgtgccctcctatgaaaaaagtattaatgaatggagaaaaggttaaaatgcttgaggctaggggagtgtgttagtttgcttggactgctgtcacaaaataccatagacgaggtggcttaaacaacaaacatttactacttgaagtcctggagggtgagaagtccaagatcaaaatgctggcagatcgggttcttggtgacagtcattttcctggcatgtaggcaactgtcttctgtcttcttgccggtctaccaccccaattaatgccctcttagcctcttatgtctcttgctcttttttttttttgagacagagtctcgctttgtcacccaggctggagtgcagtggtgcaatctcagctcattgcaacctccgcctcctgggttcaagcaattttcctgcctcagcctctcgtagctgggattacaggtccacgccaccacgcccggctaattttatttatttatttatatatattttttagtagagacgagatttcaccatgttggccatgcaagtctcaaactcctgacctcaagccatttgtccacctcagcctcccaaagtgttgggattacagacgtgagccagcgcccccggctcttgctcttataagggcactaagcccatcatgggggcacaccctcatgacttaatctaaccctaattacctcccaaaggccccacctcctattaataataccgtaacgttggaggttagggcttcaacattaatttcagggtttcataaacattcagccagtaacaggagaagaaagaaaatacttttgagatggacctttactagtgcagtgataagttctagtcacaaaacacgtctgcttgtttataggacttgggggctccctgccttccatttctctttctcttagttcttcggcaatatggcatgaagataatctggacctgtggtcctgggattttgatgaaggtgggaaaggtattttaagatcttgactggcagggcatggtggctcatgcctgtaatccaagcactttgggatgctgagctgggcggattgcttgagcccaggagttcgagaccagcctgagcaacatggcaaaaccctatctctacaaaaacaaaaaaatcagccaggcatggtgatgcgcgcctgtagtctcagctacgtgggggctgagatgggaggatcacttgagcaaggaaggctgaggctgcagtgagccatgatggcaccactgcactccagcctaggtgacacagcaagaccctgtctatatacagaaaaaaaaataggatcttgactgtggtggtctccaagtatggccaatacagtacacttttccaagaaagtgattcttgaaaatgccacttaaaggtcagtgttggagcactaattaaatgccatgatgtcccttttgcctgtgatggctgtctgatctgagaacagggcgttgggtgatttggtgttctcacagtaagcctttattgacctctctccctcaccccctacttcttagtggccagtctgagttttgctgtgaattcctttccttgtgtctcttcttgtgaagttttagtaaataaaccctgtaagtaggccgagagcagtggctcacacttgtaatccccgtgctttatgaggctgagatgagaagattgcttgagcccaggagttcgagaccagccttggcaacatagcaagaccttgtctctcttaaaaaaaattttttttaaattagctgggcctggtggcatgcacctattgtcccagttacttgagaggctgaggcaggaggatcacttgagcccaggagtttattggaggctgcagtgagacctgattgtgctattggactacatacagcctgggcaacagagcaagaccctgtctcaaataaaaataaaccctctaagtagattcctgaac

SEQ ID NO: 52346 - DNA, 1077 bp, Homo sapiens
ttttttttggcagagtcttgctttgttgcgcaggctggagtgcaatggcgtgatcttggctttctgcaacttctacttcctgggttcaagcaattctcttgcctcagcctcccgagtagctgggactacaggcgcccaccaccacacctggctatttttttgtatttttagtagagacagggtttcaccatgttggtcaggctggtcttgaactcctgacctcaagtaatctgcctgcctcggcctcccagagtgctgggattacaggcgtgcgcccagcctgtgaagatttttagtatctgctttcctttcttggaaaagcctggctaactagaggcaggaaatgtctatgtctgattaacaagttcctaaatggtctctacctcttctcatttcccactttattgtctttggtctggagacagattccttcatctgtttttggggttctgttgacccagtacagatttgtaacattgtttttctttacagtttgtgatttcaatcctctgctttcccaatgccactttgaattggcttctttaaaactccaacataaaacctcaagtgaccaatatgtggtctcattatggtattttgggttaaaatgaaattaagatagctgggctcacccagccaaacacatttaccaaagggaaattttgaggcatcatagactgtgaagtggttagggaaaaagagagttaaatgttggctagtttagaatgccaagtgtccatcccaacttggttatactggccagagatggcaaagaatagagacaataaggttctgaaaagacagctggtgactggtatggccctgtatactcctgggataaatcatgaagtgagggtctcctgtacatacttgtatagtttgtatagacagtggtgtagatgaggttggtatgtaccagcatacttttggaactttgagaagaactgtagaatttgtagtactctggttttccatccagggaattgctgaccttaaaacctgaggatttggatgcatctataatcttttttgtttgtttgtttgtttgtttgtttgtttttgagacggaatctcgtt

SEQ ID NO: 52347 - DNA, 1708 bp, Homo sapiens
tttataggaagttatccattgaggcatgctgggctagagttcattgttcctcagcaaggctcttctgttttgtttttgtttttgttttacggggagatggagtcttactctgtcactcagggtgaggtgcagtggtctcagctcactgcagccactgcctcccaggttcaaaccattctcctgcctcagcctcccgagtagctgagattacaggcatgcaccaccacacccaactaatttttgtatttttagtagagacagggttttcccatgttggccaggctggtcttgaactcctgatctcaggtgatctgcctgcctcgccctcccaaagtgctgagattacagggtgagccaactgtgcctggccaggaaggctcttctttttgtggtgctatattgcaggacattggcatcttgctccccgggtaataaatgccagtagcactatagagttgctgtgacaaccaaaaaaggcgctttcatacatttatttccaaacacttctcagtggttggtattgccccggttgaatactactggctgtactgtcaggattcttggaaggagctttgaacaaaatcctctgggagaacagactgaaagtaggtggtgcttgagacttggactggccaacccttttggtgtctgacttgtgtgttcatgttttttaagtaggtattttgaaactgctctcaaccccattttgccatttctcctattgagggtgcagagagagaagtattgtgtgtgtgctttatgaactggcactgtaacaagcatttcacatacttaccatttgaactgttttgtatctttgttaaacagtttttaatccctgtttacagatggttctggtgctaagagataaagtgacttgctcaaagtggtgtgaaactatacttttttttctttctcaaaaagtacagcctaaatttatttgattgtcagttaacctctagttgatgactttggacttctggtcttaagtgtatgggacagacattaattgttctacaaatttccaagctctactgccagaaacttagcacttgtgtaggatgatgatagctgccattctggatgctagaggatacagcagtgaattaaacatacacaggacatatagattgaacaagataaataagtgaatcatatatatagtatgctagtgatacatgcttgggagaaaaagttaatcaggaaccaagtataggagtgtgcagggttaaaatcttagaggagttcaccagggaaggccacactgaagtgatatttgacatgaaagtgagctatactaatatctgggtgaagaaagtattccaggtagaaggatctatgaatacaaaggctctgaggctagaggatgcccagctgatttgaggaacagtttttttgtttgtttttgttgttatttatttttgttgttgttgtttctgagatgaagtttgctctgttgctcaggctggagtgcaaaggtgcaatcttggctcaacgcaacctccgcttcccaggttcaagcagttctcctgcctcagcctcctgagtagctgggattacaggcatgcaccaccacgcccagctaatttttgtatttttagtagagacgcggtttctccatgttggccaggctggtctcgaactcccgacctcaggtgatccacctgcctccgcctcccaaagtgctgggattacaggcgtgagccac

SEQ ID NO: 52348 - DNA, 1148 bp, Homo sapiens
tactgctgccttttgagataaaaagttgtaaagaaggggacgtttaattttatgagatgacattttggttcttgtttcatagttttcttggggtcttactattgttttggtcaccctggtttgtttttgtttttgtttttgttttgagaccgagtctcactctgtcacccaggctggagtgcagtggtgcgatctcggctcactgtgacctccacctcccaggttcaagtgattctcctgcctcagcctcccaagtagctgggactacaggcgcgtgccatcacacccggctaatatttgtattttcagtagagaccaggtttcaccatattggccaggctggtctcgaactcatgatccgccctcctcggcctcccaaagtgctgggattacaggcgtgagccaccgcgcctggcaacccttggttttaagcagtacctgaaaggattttttccagagaagttacttggtttccttagtggcttttgtaatttgtttgaaatagggagaaattggttaagtttagtcttaggaaaaagtgatcttcatcattttaggaagagcattttctctggaaatgatgatagccacctgttatggaaaatgtggctaatgaaagtgccctggatgaagagagaaggacttatcatttgttgggattcattagtttgatgctgtagctgctttatttgaagggccctttctggtgccaaagaagtgaagaagcatcagtcacttggttgtggtttttctggcatgcctctttttggtagacagctgtgaggtggttattatggttgtttctcataatctgattgagttttgctacatgattcaatgactcttccccttttggtctccttcttctaaccttagtgagttttctcttatcttctggtctggaaggatagagatatggtagtctatatatctctaagcccagaagagaatgaggcctttgtcttgttttacatcactttctagatgttcttggtttgacatctggttgcaagcgccttcctggaggtttgatcaggctagtgcttcaggggatatcattggaatgggctaagtctgcaaaggggaatgtgtctgatcttctagaatggtttctgtaagcagaatggggtagatagaacttttcactg

SEQ ID NO: 52349 - DNA, 1441 bp, Homo sapiens
tgacctggggctgttttctgctggggtccttacccatctgttctctcggctctttctgggttatcaggcgccagtccaagtcctcccaggcagccagcttcatggccagagattacgagcactaaccttcctggcaggggcggtgtggcttcgagtttatgcagattagccatgtgtttctcacttcaaggcgttccacaggaaaagccttttcctgtgtttggctctcagtgggcggttcccagcttactgtactgggactcagcaagcagcaggcatgcaccagagggatcacagtacactggcccccctctccattccacctccaatgctacgtcaccacaacacaaccactcgcgctctcatactgttggtgtcattcattcggtgccaagattgctttaaaaaattcccttggccccagttcaaacaggagtacagctgggatgtgttagattttaggcagtctgccctcaatttgagatgagttataaatagcagtgccgacttccttaactaccgctctctgaggtaaaatgcaggttaattactgtgggaatcaattaggggggttcttttggttaaagagccagggatgcatttttttaattattattattaaaagtcatataacaaatctagccaggaataaattgaaagcacaaggagtaataatacttaaatgtccaaaagccaaggttatagctctaggtttacactagccccaactagttagcatttaggatgataaaatgagtagtggtcaagacttctcctctctgatggacacctttttggcagctcctggcccaaccctctctgttcttattcttgctggcccttggcactgttgagtactaaatttagctccttagggttgccgcctggtcacttctttctatttccttggattggaactggagctttcctcagttggacttttatttaaataaaattatgaagtttctctttcctggtgccactgccacgggtggtacatttttgtgaatggtatatctctgcttagaagttttgagttcttggctctgtcttctctgctctctcctcggtcatggtcagatggagaatttgcagctattttaatctgtgagtttcacaaagtggttactttgggttataagacattcagcccaggtctaccttaaaagtctagtctgttatttcagccgtttttgggggtcattttggttttccttgatgcaataagaagttgtaagaggttccagtagccagctagtctggagggtcttgtaattctattggcttggagcaggggaactccctatgcaaggggtctgtctgctagctgtttgttctgaatatattcggaaggacaagctgctaggcatccttgcctttgatgcccctaaactgcatcttttgatacatttcatttggcaggcagtttataacatggcca

SEQ ID NO: 52350 - DNA, 1169 bp, Homo sapiens
tggaaggaggtggtaagtggtagatggagatgaggagttttcttatggctctttcccccttttttatttttattttttatgaatgcaggagagtatatagcagggggcccgactttgctgatcaaggggcagcattttcctctcaattatgtgtctctgtggcagagcctttgcttttgaagtgtaatcacagtaatctactcctgtggtttcccattgaaaggatttcctctgtctttcccagagtggaatctctggctttttgcagctagggtttggagtttccatcccctgccttgtgcctgcagactgctgatactggcttttgtatcttgcatgtagggatttttctggtctgaaattgctactttccaataaaactgattagtgaatatttaaggccccttctctgttacgagagattgggagatggcatttcatctgtaactgcaaatcacaaatatttcacgatggttttaaatgtcataagtgtgagttatgtccctgctcacctccccttctgatttgagcagatgtctaacttttacatgagatcagaataatctgattgtttgaactgaatatatatttagtttgccaaataagctgcatattctgttgatcataagccttttgtgatgggagggagtcaaaaatctgacgaccagaaaaagaaagcatattaattttatttttagaataaaaatttctttgatgtacatttatttttggtctacaaagatttcctaaagttgaggtgggacattccttgaaccctttatagcccccatgtaagtagctgtactcaattgggagcgcaggcctccgtgtgagagaggaaaaggtgacttgtccttagccttttgtttttaagcagtgtatatgaggatgcccctgcagttctgaaattctctctggtataaaccttttttttttttttttttttgagacagagtcccactctgttgcccaggctggagtgcggtggcacaatctccgctcgctgcagcttctgccttctgggtttaagtggttcacctgcctcagcctgctgagtagctgggattaacaggcgtgcgccaccacgtccggctaatttttgtattttagtagagacggggtttcaccatattggccaggctggtctggaactcctgacctcaagtgat

SEQ ID NO: 52351 - DNA, 2051 bp, Homo sapiens
cattgtagagggctttagagccaggtaaaagcactgttttatcattactgataatcgctaccatttattggacatttaaataccaggcactgtgtgaagtgtgttatgtgcatttaaagaactgatgtgttcaaggtaggatggtgagagaggtaggatttggacccaagtctatcaaattactacactaccctctatgtaataatactgtgcaggatttagtagttaggaagtttggaactattattgaccagggagtggtggaagtgatttgggaacagcattgtcctagaactgctctaacataataagccactagccacatgtagttatgtgaatttaaattaattaaatgtaaataaaaataaaaatttagttcctttgtcatatttcaagtgttgaatagttacccatcacagaaaatgttattggccagtgcttctctagatcactggttcttagctaatagtatacaccagactcattcaaagatcttaaggaggttggagaagagcacaagcccttccagacccagtaaattggaatctctagggagaggcctagccatttgtgaagcttcacagaaaattctaatctgcagccctggttaatagctactgctctagaagctctatagtaaccatggtaatgactgcccctcatgttgtggggagacctagactgacagagatacccagagcaggctgatctctttgttcaacaaaatagtctctccagttggaggccacatggacagcagctgcagtctgtgatgagatgaggacctcagtgtgatatgtggcatgatatggccatgtaagcccccaagctctttacaggggagaatggtgatgttttggctccattgccaggtgtattggggaggaccgtatgctatttattaattgttgttaaattcgaacttcctaagtaaccctaaaatctatgtagctctaaaattatgatagggaacattattggagcttctgatatggatgaaagacttgggcaaaaattgtttagttaggattgttggcaacagtactttaataatattgacatgtagtagtgatttgggacacagttttactatgactttgtacagtttagaaacatgggggaggagtattcccatcatcactcaccaatttagctgagatttcagatatagcctaagaaataactctgcttctcttttttccctttgatattaagaagaacagcctctgtggcttattgtcttacctgttttctttcatgaaagctctacttcctctactataaaacacttaatagcattattaaaaaacaaacacgtacagagaacgaattgtttggatctccccttcctttattttggaggttttgttgttgtttaaggtcttaacagcttaaattatagaatagcttattaattattgaataatagaactggaaggaaccctagggataacctagaccagtcctgggaggtgggttctagcagtctgttttaacaagcctttcaagtgattctgatgcatgctaaaatcaatgaaccactgaactccttcatgtgacggttaatgataggcctagagtatcagtatctatttcacccccaatgtaagagctagtttttaagttttatatcagacccatgcctactctccatcttgtgtgtgtcttaaaggtgcttagagaaacttccccctccccgcacaccaccaatagatataggtagatatttctggcaggggaaagtgtgctctggagtgccagtaggataaaggcatatcaaaaagtgaatgagctggttgaacctgttgctccacaaagagctggaaagaaagctgttgcatcaaatacctgtgaattgaattttgagctttcattattggtgctagctgtacctctctgtcttcttgctcttttttttttaacttccatgacagcctaccattgaatcttcttgtctctcaaagagataaaagttctgttcttcttatatcttcaaactcttgaatattaaaggaaatgagcttttcagttgagatgcacaagactcttaa

SEQ ID NO: 52352 - DNA, 2020 bp, Homo sapiens
agctatagaatcagaatgtatccttggcttccaagcctcttgacaggaatgtagacctgttggctcagttaattacagagtgctactaacaaagccaaagctataggcaccgttccatgtgtgctccaaggaaaactacttactccctggtcacaggtacgtatctctttttctcttgacctgactggccagcttatacctagtgagtggtcatctctgaatgagatgggatgaaaggcagtggctgaacatgtaggcactgctactattaggaaaaccattcatatcatgtgccctggtgacggaagaggccctttatgcttctgaatacctttaacatatctgccttctggttcaaaatgaatgtgactgggagtagaagaaaaggggaagattaaacagaaaagatgttaacagcattgatacaaatgttaagatttccccttatccatctctttttgtcgaaccattcacatcattatctctttattgtcatttttgtattgacaaagttttctatcatttatctttgagtgatactcatactgaaaatagggagagaatataaaacaaattttacttctaagactttaaagcaaagtacgcctttaatatagaaaattgtctcttttttccaatagaggagagatgaggtaattttatttattttttttatttttttgcctgcttactaaatatatccccagtgcctaaaatagtgcctggtacaagtaattgagtaggctgtcaaatattttttttgaatgaaaactaaatgaaagagagaaccaaagtagcttagtgattttcacactgtctgaattactaaaccttaggttttcagttggttgagccaggctgctattgactattcattgtggttagggtacagattcctaacacttataaaaacagtctaggccgtgataaaaagagttaggctcactggtagaaacagctgctctcaaacttatgttgcccaaatagtaaatagtgtaaattttcagtggataaatgtagtccacttgtaaacaaaccacctaaaaacccagcttggccgtccttcctggctcagtttaggcagggtgagagaaaaaccctgggcctcctaagtatgaggccttgcatgcttgctttctatactcatcatcagtgcatagcttctcacaaaacacttcatctttcctcatgcaggagagtcagtgctaaaagtatattttcctttcctacagattcctccttatggacaacaaggccccagcgggtatggtcaacagggccagactccatattacaaccagcaaagtcctcaccctcagcagcagcagccaccctactcccagcaaccaccgtcccagacccctcatgcccaaccttcgtatcagcagcagccacagtctcaaccaccacagctccagtcctctcagcctccatactcccagcagccatcccagcctccacatcagcagtccccggctccatacccctcccagcagtcgacgacacagcagcacccccagagccagcccccctactcacagccacaggctcagtctccttaccagcagcagcaacctcagcagccagcaccctcgacgctctcccagcaggctgcgtatcctcagccccagtctcagcagtcccagcaaactgcctattcccagcagcgcttccctccaccgcaggtaagatatccctgcctcctgcccttccctgtgtgtgactacagacagcttgggggttagtgtcatgagaactttgctgtacagagtggttctctaacgtgcacttaaagaccaattaaactctgggtaaacatgataactggattgattgaactaataaaggcataacctccttaactgcataaagacctgtagctctccttaatgatgaagaaatagggcaatggaaagttgcatagatggataagaaattaaagataatgggactggtttttttattttattttattttattttattttgtaaatcaacatcagaacttcagcatctaagtg

SEQ ID NO: 52353 - DNA, 1602 bp, Homo sapiens
aatctagtcatctagtaagatggtgggtagcaaacccaccatgacaaatcctgcttcagttaggaaatggaaattcagccacatacccagataagaatcttttggaattttgactctacttggatgtaaagcctgtgtcttcatttattctgacctgagagaaatggtttcaggatctctaagaaataggcagaaggcgggaactctcttcatcatgaagcctcccatggattcccctgaaggtctctgagacacctcaatagggcaaggtctgcagagtcccttagtacctggtgttcaggcttctgaggccagaatgcagataggacgtctgagattgttgactttctcaactgaggaattgggggaaggaagtgccttaataaagtgatcactctttgttcccttctcattagtgtctgttgcaatccttttctgcatcctgaacttcattggaatgtgctttttaacctgattcagtcagaatgtgtaaccactccctcatcatctgtggtctgtggctaaatctgggtgaggtgctattgtgtcaagaacccaaatcggtggatttctgtcagtgctgtaagttgcttcattccaaaaagtttttgcttgcttctggtgaccttttgatagatctgtatttggcttctttttttttttttttttttggtcctgagaaggcttgtatccagagatgctacatgccttgtaagggttgggaatcttaagaacttcttatctgacccactgaagtgaaggtgaaggtgttggcagccttttaggcccaggggatggttgttcctgggaaggctatcacaaggaacattcccacgtttgggctttttctaaagattcatccaaatgggtcatttgctcagtggtagaagctccatgtgggaggtaagctggctgggttattggcatcttgttttttgaattgctttttatccctttgctacttgggcaggcatcaaaaagtggttattctttgaaattttggtttgatgccagatttgcctacgcaggctaggaagcagccccatctgaagaaatgacaagttggattccctacaagagccctctcctttcttaaccagtcgtgttaaaggatccctaggtttgccagtgcattgcttcactaaacaaatgtttatgaggtacctattggcaccagagcagattccaggctggctggagagcagcccctcagatttcacattgctctccttactcattcacgttaccttcctggccctaaaggcattatgattgtgacccttgaatattacaaaaattaaattttgaggagtctgtgctcagttattgatgccaagccatttgggtgctattatcctgatcatgttatccctatatttaaacctctcaattatttttttgttaatcttagaataaaatccagaatttttttttttttttttttggggggagagagagtttcacactcttgttgcccaggctggagtgcaatggcacgatcttggttcactgcagcctccacctcctgggttcaagtgattcttctgcctcagtctcccgagtagctgggtttacaggtgctcgccactacgcccaactaat

SEQ ID NO: 52354 - DNA, 2349 bp, Homo sapiens
gctggagtacagtggtgccatctgggctcactgcaagctccgcctcccgggttcaagcaattctctgcctcagcctccctagtagctgggattacgggcacccaccaccacgcctggctaatttttttgtatttttagtagagatggggtttcaccatcttggccaggctggtcttgaactcctgaccttgtgatccacccaccttggcctcccaaagtgctgggattacaggcatgagccactgcgcccggcccagcttctgtaacttttcttactgagacacatttgtaaatttacattttggtcttgaaagtgtacctaggatagagtaatggaaaatggatacaggattgaaagctgtgatctgaagaggttagctagtgcttcacaaactttagcgtgtgttaagaatcacctgaattactgcctctacctgagaaattctgattcagtaggtgtgggctgggacctaagaatttgcatttctaacaagctctgaagtggtacagatgctgccagttcagaagaccacaattggaatgagactgaagtaggtagtcacctttaagggaaggaaaaaaaattactagactaggaagccacagcggtaactagaataatagtggtgatttacactgtagtttgactcttgattatttggaaggcacactgtgggttaagaatggtagaaagaaaagagacttgaaagaaactagacttcctgtagctgtggcctcagtgcagtttattcctgggtaacggagcccttgccctgccagtaccaccctgggagctcctctgctctatggtgctcatcactggatcccttcctttagtggggccaaacttagttggtcaccaaatcttagtctaccacagaaatggtttttgcttttgaatctggtttcccctctctttctccactgccttttgttttttcgggtccctgttatctctcacctggtgtcttgccacaaacttctgactgttctgtttcttttcttcctcttttccttccaagtctgtcctcagcataatcaccagagtgatcatcttaaaaaaaaaaaaaaagaaaaaaaaaacctggccaagttatgttaatgctttaaaacctggctacgtgttgtctgtagatttaagtccaagtgtgacatacaagtaagtttttttgggatctggaggatgaggagagatgtaggtaagtttcctgtccctggagtaaaacctggcacactttttgctatgggtgttatgtagaagacaaacagacatttgacaagggttgaacttgtgtgacttctgaggtcatttgaactcttgggtccatgattccgaatatgatacgatgattcctaaaggatcctcctgtgtttcattagtaaaatagacataaaacagaagaccatgtgcctgtatgttataatgagtgctgtcagagtttggtgaagtcactgatccatttatgtctcaatagttgaaggaagaagtcatgttgaagttcagtcagtatgagctagatgtggatgtatttaagtggttagttacaaagggaaagtccagcttgaacagaggccatgcagggatggggatgaggtgcagtatagatacttgggggctggtcagcttccaggggtgggaagtaacaggaaggaaagctagatcacagggatcctgctgagcttaagccatttagatctgatcttatgggcttgcagataggtaactggggcaatcatgtgataaaactaatgttttacaaaaatgatccattagtttgtagtatgctttgaaaacgggagagtcttaaagcagtggaataagttaaaccgtagaactacttctggcaagaggtatggagttctggtccttctgtctcatttgcatagccacctgctcccacatgtggaacatgcaggaaagaatacaggactgagaataagtgggttctgtgtggtggaatatttaaagattttgattgactggtgggcagggggagtctcatttttgaggaaaagttaaattccatatttattttgtggaatataatatagtaagatttctgaaaacaaatgtccagtttctagttggagataagaaactgaaacttgggtaagacctgagtctggatacaagtttgcgagttacctgtgtggtagttaatagttaaaccatagaatgaaacaggcctcctaaactggagtttagagatagaagccagatggagctctggacgatgccggaggccatcaggtagaagcagccaacagagagttggagagatcggagaaggaccaggattgtgtaatatttctggaagccaagggaggagggacgaagtcaaatttata

SEQ ID NO: 52355 - DNA, 7170 bp, Homo sapiens
gattcttgctacctagttgagctttgggagctgacgttttgttgtttaggtttattgagaggagtgacaaatcctctcaataaatgctttaaaaattagaacatttggctgggcacggtggctcacacctatagtcccagcactttgggaggctgaggcgggtcatcatgaggtcaagagttcaagaccagcctggacaacatggcgaaaccctgtctctactaaaaatacaaaaataggcaggtgtggtggcaggggcctgtagtcccagctactcgggaggctgaggcaagagaatcgcttgaacccgggaggcagaggatgcagtactccatctcaaaaaaaaaaaaaaaaaattaaaacatttgaaggattttaattttacacagtttctgttcccttttgttcatttcatgatagaaggagagagggcccacagtccttatctaggtttttgatggttgattttcaaaaagataacagaaatgtcactagcgattttggtaaccagagaagcagggtctttctgaggttggtgacctgttttctttatagctgaccatgtatctgtgcctgctccccttgaattatagcccaggtgctctctcagagtctcgaaaaggaaatccccaccccctctgtcatatctgcccagactgctaagagcagcatgtaccctgtgcatgtagccatcccttctctagaacgctggttctctgggctggactggccaatccgcttctccatcttagtcacactgttccaaccctgatactgcctgctgactgcctgagcctgtgctgcttgcagcagattactgtatgcttgttcctgggcccatttcctgtttctattctagtcgctggtggctcagctctgcttcctgcctgtgtgtctcacacagattcctcttgctggaaccttttgtttccttcggaacagcctcaatctttgaaaagcaactgagccttaactctagtatgatggctcttgagtcacttagtcctacagaggtctggctggaagtacctcttccccattaagcacaccgtttgaattttaccttgtttttcagtttgtcgtcagccctgctgtaggaagttaagttgggccaaacttgtcctcacttattagtacacagagctatcgggactggtatgtcctgattcttttgtacctggagcttttaaatgtatttcctactactcaagaagacacttggtatcctctctggcccaagcttccctgaagcccaggtgatacttattttgagttgggcaggttatgccatcctcagcagaataacaggctgcagaaaacatagggatggaaaagaaagcgtgtgctgactcaaccctccatcctgtgtgagcaattcaaaccccccacccaccccctcagagcttagggtgagagagagaaagtacagtgaggttgtaaaaagggaagaagtgaaggaggttgtcctggacaaatgtatttaaaggcctaaggctcccccctcttgcccatttcctacaaaaaatatgcttcgtgaataaatcttttttctcttcctttacagccactcttttgggatcatttgataatactgagtcagaggatttctgtactggaccctaggtctagctatgtttaaaagagagagatttaatatagggaatttgggcttacaactggaaggagtgagggagcttgctctaggcttggcctccaagaaaccagacccagatttaacctagatttgacctaccaggggaacgtctatctcggagctactattagattgattgctcttgaatcatacccctaaacctgtggtccagaatcagtaaactggaatcaagaagcagtagctgctgccgccagaaccagcacccagttaagtggaggatggaaccaaaatgctcctgcagaaacaagtaaaggagacagaaatatggtctctgcttactttgatctaatctcatgagtcagcttctcattagcagaagctgaattgtatccaaaaccaagggattcttggaaatttcgtttttaagctttttaacctctacaattagagaaagaatagaatggaggctgcatgaactagcccaacagaatatttacaatactgacaccccattcccgtctcccctcccacccccaactttacatatgacgaacctaaggcccagaaagggcaagagacttgtccagggtcattcagtaaatgagaacattggattctctgactgctagtccagtggttctactgttgcttttactgttaggaccaactcctgtacaagaccagcaaaaagatcctttaagaaaaggccgcaggcacggtagctcacacctgtaatcccagcactttgggaggttgaggcggtgagatcacctgaggttgggagttcaagaccagcctgaccaacattaagaaactccgtctctactaaaaatacaaaattagccgggcgtggtggcatgtgcttgtaatcccagctacttgggaggctgaggcaggagaatcgcttgaacctgggaggcggaggttgcggtgagtcaagattgtgccactgcactccagtctgggcaacaagagcaaaactctgtctcaaaaaaatagaaaaggaaaaatgccatattcagaaaatggactttgccttccgtattctctttggagaaagggaaggagttatgaacagatatgaggttgagatttctagatttctaggcaaagttaatgatactacagcttctggatttagttctgttctccagaaggatataagaagcatttactctgaaaggaagaattctcaaaaactagaatgtcctgatattccttagtcatcatggatgaactcagttgttgtagtgacagtggctcaccttcacctattcccccttgccttttcttttgctgttggtgcttttctgtccaaaaagatcaaccaaaatccagaaaaccagcccccagatgtttggttgcttagctgtttcatgtctgcccttggggagacttgggtcttttgaacagaaaatgagccaagtccacccagaaatactatctttgtagaaaccactagggtcctttaagccaaggtgagaatctgtttcttcaaacttggcccagaggggaggacctgtaggtgtggagctatgttaacatatctggccaggcgcagtggctcacgcctgtaatcccagcactttgggaggccgaggtaggtggatcacaaggtgaggagattaagaccatcctggacaacatggtgaaaccctgttttagtaaaatacaaaaaattagctgggtgtgggctgggtgcggtggctcacgcctgtaatcccagcagtttgggaggccaaggcgggcaaatcacctgaggtcaggagttcaaggctggccaatatggtaaaaccctatctctactaaataatataaaaataagctgggtgtggtggcaggcacctgtaataccagctacttgggaggctgaggctgaggcagggagagaattgcttgaacccgggaggcagaggttgcagtaagccaagatcgcgccactgcactccagcctggtgacagagtaagactccgtgtcaaaaaaacaaaacaaacaaacaaaaaaaacaacaccatacctgataaatcaagcgtagaattagccctattgtttttttctttgtgtctacgacatactagaaagctgtgatgaaatcgatatgtattctgttgccatccctctggggaccagtgcttggtctcctaatccccctactcgatggcctgaaagtgtttcatcttccctgcctgttatcagcatagaattggttggtattgtgacataatctgattgccttgaggcagagcttacctccaagctgctagcttccttcccatttgacctttcccaaagaagctaagaatccatgccttgttgaaggtgggaactaggggttgaaggcttaatcttgagagtcagcgaacctgtcccttaaggccagctttgatgtgggaagaatattgaatattgtttactgagatggagatgggtggaggtaatttttcctgacattttggggaaggtaagagaaaccaaatttagactgaaagggatcagtggccaggtgtggtggcttacacctgtaatcccagcagtgtgggaggctgaggcagtaggattgcttgaggccaggagctggagaccaccaccctgggcaacacagcaagatccccatctctaccaaaaaaaaaaaaaaaaatagttggccatggtggtgcatgcctgtagtcctggctacttgggaggctgaggcaggaggatcgcttgagcccaggagtttgaggctgcattgagctatgcttgcacgactgcactccagcctgggtgacagagcaagaccctatctgaaaaacaaacaaataatataggtcaatgttcagaggaaccattatcaagaatatttggatttttatccctcttattttctagaacttgattatagctcccttgtgttcagagttgttcttttcaaagtcctttgaggttgtattctggtttaagattctatccatttctcactctcagatctgtttgttccaccctctccccctaaatatttggattttatatagaccagtaggctaaggtagggaagaccactgacaagtataaatttaagagtttacaaaaccaaggaggccatccagcccctagttctaagccatgttcagcacagtgccaactttgccttccctggctgtccttgcttgctttctggttgctgtaattctgaggggcaaccaggcttgctgtagagaggagagccagatgatgtggaagcctaaggcaacaccccctccttattacacttctcatacccagaactctgcttgctttctgtgttcctttcctctcactcccctttcctgccctctttactcaagttctaagattatagctgatgatcttcataatagaacaaactctgtttggttgaccttcctaacagggaatgcttggctttgagaaagtagggggttcctaacttctttgccttctctagctttacagtgctcttacttcctgctgggattagaacagccctattccataaatatgcactgctcttggctgctgtaactcaggcccagctctgacccagattcttttttttttttttttttttgtcagatttgagtctattaactagtgaccctcaaaacacttcatacatttttggccaaaaagtggttactgactggataagacagaagcctttggggggcagggtgactggtcgggcaggtaacatggtattatacaggcctgatggggactgtgacaaactgaaaagcagggtttcaaccagttagcggcctatgggagttccagaatcatcatcatcatctttttttttatttttatttttggaaaactctcggccaggcgcagtggctcacgcctgtaatcccagcactttgggaggccgaggcaggcagatcacgaggtcaggagatggagaccatcctggctaacacggtgaaacctcatctctactaaaaaatacaaaaaattagctgggcatggtggcgggcacctgtagtcccagctactcgggaggctgaggcaggagaatggtgtgaacccgggaggcagagcttgcagtgagccaagatcgcgccactgcactccagcctcggtgacagagcgagactccgtctcaaaaaataataataataataattctctggggtctgtgggtctgtccctgcagtgtcttgtggactgccccgtgtagctttggctctctcttggatttactccctttgagctggtgcctagaatttctccgggggtaggggacagctgtgaggagcaccttctcatctatcctttgccagttctcattgtgtttggtgtttgttttatttgtttgttggggggcggcggggagcgacaggggaaatgttgagcagaagcactcgatgtgattaaacctccggctgagcagatctgtaggagtagaatatcgacccctggaaaatcaatggctgctgcagtgacccagccgctgtttgcaggggctaccaccacaggaatgcaagcagcccagcagtctttcttctccccacctttttacctcagcagtgccctcagcctccacccagagggtcagacctgcctcaagagattttgcagaggtgggttagaacagcacgttctcgtattttcacaattagattgaaatttctccagtgacacagagccctgcctctggcagcctcctttccagacattccttttctgcactgctgcagttctagcaacagctcttaccaagttgccaaaacccattcggggttgtacttctgagttttaaacaggagaatcaattctcttgataccagcacccaagagcccctcccttgtggaggtctagaattcaggtactggggtataggatgggggaatagagattaagggaaagaaagaggactaatagaggttgtgtctaaagaggatgcttttgagtagataattcattgagcaacatttatcaagcatcttgtcgtttgtgtgtctggcatctttctggtcactaatagcctgatcttgctctggtcccacaggctagtggagaaaaagggcggatagaacacagtgccatcagtcctgtaacactgcttctagaggagcctcagaggaactctgtgccctgcctatagggtgagagtagggaactagtcctgtgacttgggtcaaaatagatggtttaatagaatggctagcagatctctgcttggagcatggaggcttctgattcctcactgcctccacaaaactgttttcatcttggaagttcccaaggctaaaaaacaattttagcctttagttgttgtacctataatgccaattctactctggtggttgggaaaccagccagcctgatgtgtgtgaaaggagagctcagttgccctattgttggagcacctctgtggccagagggttgaagcttgcttggcttttaaagcctctagaaaggagccttcccgtcttgtagcttggagagtggggtccctaaacaaaacccaaacatcctgcagtttggaagggtggctgcagtgctgggtgaggaggaaagtgtgagggtttgaagtggcctaagaggaggcca

SEQ ID NO: 52356 - DNA, 1941 bp, Homo sapiens
gctgttccaaaccatggaggtagtccatgtaggtgatagggcttggtcctacactaaaagggtagtgtcaacctctgcatcttttcttcccgttccttagtacctgcttaattaacttctgacctggaattaccaccgggtgtgaaaggcagcctattctgtgtgttgattctttcttggcatttcagttaacatcagcaagcctgctctctatgcataggtggcagttaatctgttggattgagaccactccgtggaataatgtcacagcagttctgtaacttttggagtccctaccagtctggggtgggtcaaatttctctttcttacatttatagcaaagactaaggagaaaaaaagaacttatgactgaaactttattgtacaagtgttcagtagaggtagtcccttctcctctgctaccctcaacaagttgttgcttaaggaaggttttatgaaaagccaagtctcccaaaaacttatttgccttaagtaattaattttgtctcagtttttcttccttagagtttaaggctattgcctcctctcctaccttttccttttcttcatgggttatgtttcccagtctcttctgtgttcttcaggatttcctcccattcttcagcatgagagcagcctaggggcggggcggggataagggactgacaaattactagtgtagatttggtcattatggaattttttattcaagtattgtcatttaagtggggatggctgagctgcaaggttcccagtgcacacacttactacaggcatgtgcgtaggatttacctggttctcatgacgggtggtttacctgccagtatcagcacaactcagcaaaagcttttcccaactaaatgggtacaagaactccatctgggattccccaaggatttagccagatttatgggaaaaccctaaatctgagcattgccatgagcctattctttatacttaacctgttgccatttaacctgctcagcaaaatgaactgatgtcatcctcatgtggctctattgggagataatttaaacttccctcctctaaccctgatctggtgtcttcctgcttaaaaatattcttcagtgggcagccaattcatcttagaacttgcagttcttcctgtgagagtaccagcacccccaccgtccctaccccacaaaataaggtatggactgtgtgatttcaggcatggttttgttgtggtgtgaagagaaggtgtttagctgctgagttctgtttgttagcagagcctgacaaactcatgctggcactcactagggctgggcaaccaatcacagctgggacggttatcgtcatggagtccctatgggcttcctctatcaggtcacatcccaaaataacattgggcagtatttcaactgaagaaatgaaggctttcagggctgtagccagcctggagtgtgagattctgtgtgaaatagttggatctgctccagcgcttttgatctgcatggtagatgagcaataaaatgcacaaaacacattggaaacacgtgaggaaattctcctggccctgctgcttccttggaactggtagggcactgagtgggctgatcctcacctcccatctctcagcaggattatacttggaggagaacaaacccgggaaaagaaatcttcccattaaaggggcattgctacagttatttccgcagtccttccagaagatgcctgttaggtgtgctcttttgggagaattgagaacctgagagtcctgagatgccaagggcatccctcaccagggagaataggggcttggattgcagtggcgtgatctcggctcattgcaagctccgcctcctggattcatgccattctcctgcctcagcctcccgagtagctgggactacaggcacacgccaccacgcctggctaattttttgtattttttagtagagatggggtttcactgtg

SEQ ID NO: 52357 - DNA, 1019 bp, Homo sapiens
attgcttgagctcaggaatttgagaccagcctgggcaacatggtgaaaccccaccactacaaaaatacaaaaaaaattaaccaggtgtctgtagtcgcagctactctggaggttgaggtgggaggatggcttgaacccaggagacagaggttgcagtgagccaagattgtgccactgcactccagcctgggtaacagccagaccctgactcaaaaaaaaccaaaccaaaaccaaaatggtaatggtagtagtatctataaccaagacttgtagaaaattgggtaactttgctaagtgtctggcatatagtagatgcttaaatggtagctgtagttaatcgtaaatgatttacccctttctatgctaacattttggctcttaaaattatttgaaaccaactatctgatgctgaccagttgccatctaatgaaaatgacagtttgagaggttggcctcaagccaaccaaatcagagagataagaagattaatgctcttccttccctagtatttttctatacccaggcatcccagccaggtgggactactgttgacagtggtttatttagcactttttctccaagaagctcagggcactttaccaaaagtgacagctctcctgaagaaggggaagccacctctttgccagccacagatgcctccagagttctgagaccccagccccaagagctacagaggttttctttaggctcctaggatccctcaggtggaccaggggcattctccttttggatctatggtgagcctggttttttaactgaaagtgtggctgaaaggacctcctcagttcttgccctgagctgataggagtggttggtgggttttggttttttggttttttttttttgagatggagtctcgctctgttgcccaggctggagtgcagtggtgcgatctcggctcactgcaacctccgcctcccgggttcacgccattctcctgcctcagcctcccgagtaactgggactgcaggcacctgccaccacacctggctattttt

SEQ ID NO: 52358 - DNA, 1050 bp, Homo sapiens
ccacctcagcctcccaagtagctgggactacagctgcacaccaccacacctggcttatttttgggggtatttttagtagagacagggtttttgccacgttgcccaggctggtctcgaactcctgggctcaagtgatctgcccgcctcggcctcccaaaaggctgggactacaggcatgagccactgcgcgtggcccagtgtgtttctttaagagaactctttatttaccatttaagtatcagggttttcatcctttcttcaattacagttagttcccagcctgaagtaatgttgctagagaatgaacatggggcaggggatggagttagggtacattttctggggtgaatatttttcatattgagctcctgtttgctaatactggagtttgttgacctagagtgaactctttattgattaactgaagacaagcaaagcctacaaacaaataccaagttctcactgaaaaacataaaagctgggaaaaaaacagaatttgttcaattggcaaacatttgttgattactgttatagaccaggtgttaggagtgtagtcccagaccttcttggcagttaagaaattgtctttctcatccaatgtctctctttcttacctcctaccccttatgttgcaaagtatggtgacttggagtgagtccttggcaaatggaggctgtgataatctatagtaataatcatcattgtaatatataatagaaggagaggggatctataaatgtttcccaaacttgttaacattctcttgtagctcctggtgccatcctggcagcattttgtaaagttttgctattagaaaagaactaaagcctcactgaaatagttgctttcttatgactgtagaagttatgactgggaaagaagacaaaagtgctagatctgcttctgaggggatagaataggagtcagcaaaactcagtcacaccattgtttgtatattgtctgactactgttgcactatagtgtcagagttgagtagttttgaaggaggctttatggcccacaaaggtctaatatatattccacctggtc

SEQ ID NO: 52359 - DNA, 1051 bp, Homo sapiens
agtttgccatatgtaagttatagtatgatgactagggccgggcgcggtggctcacgcctataatcccagcactttgggaggccaaggagggtggatcacctgaggtcgggagttcaagaccagcctgaccaacatggagaaaacccgtctctactaaaaatacaaaaatttagccgggcgtggtggtgcttgcctgtaatcccagccactcgggaggctgaggcaggagaattgcttgaacccaggagtcagaggttgcgatgagccgagacgtgccattgcactccagcctgggcaacgagtgaaacactgtctcaaaaaaaaaaatttttttttttaataaaaatagtatcatgactaaagaacgtgtgtgatgtatttgctcttggttgtttaaggaaaatgctaagcaagtagtaggattattgaaagtagaatctttctgcctaatattactaatccatgttcttatatatatgttctaggatctatctggttcaatagatgacctccccatggggacagaaggagctctgagtcctggagtgagcacatcagggatttccagcagccaaggagagcagagtaatccagctcagtctcctttctctcctcatacctcccctcacctgcctggcatccgaggcccttccccgtcccctgttggctctcccgccagtgttgctcagtctcgctcaggaccactctcgcctgctgcagtgccaggtaccctcaagtgctgggctttagggagagggaaaggtgactgcccccagtaatattaaggagccctagtcttccactggcagagaaagcatctctggctcatgcctgcatagtttccccttagcatttggagaaggagattggaacctgttggctggatctctttgtgtgtgatactgggaggtacttggcctcttcatgagccatttctagctctgaattaacttcctagttagaattcccaggcttagccatgatatgcttatgttgttctttgtctggagcaggcaaccagatgccacctcggccacccagtggccagtcg

SEQ ID NO: 52360 - DNA, 2052 bp, Homo sapiens
gctgagacccagcagcaaattgtgaagttagagtgggcttggccgtgttaatgtctccatttcacagtacttgtctgtgttttgatggttgcccccttacattttgcctcatttggtcggcagttgctgaagactcaatgttcggtcttcactcatcaagtcattcattttggtttttgtcattgttctttgtcttttcaaacctccatttagtagaaacagctggcatgccctggttaatggttcatgtcactctgaaggtgcctaaaatgacacaccactatatagaaaatcagatagagactccatgcaagtggctgctaaagaaaatgtagatggtaaagtcccaggataaggatggagagcatttgttcgcattgtataaagctaataactatatggatgctacccacaaataggttatatgcagaggaacccccagatgccccagtacagttccccccagcccggctcagccttatctccgcgtcagccttccggaggacagatacacacaggcatgggctcctaccagcagaactccatggggagctatggtccccaggggggtcagtatggcccacaaggtcagtatactacccagttaggagtagatacgggtgagaggagaaaacagttccttgtctgatatgttgccatctagcttgtaaccttgtgagagaagggctgtcctttgcctttaatccacccagcccaggccctgaagtagggcaaggcaagattccatttgtctccacttattctgtcaccatgagaaagtctttcaatttcactgagcctctgtttcatttataaaaatggagattaggtgtttactccaccattgagcacagacaatttatacatggtagctcttggttattatttttttattaattatttttagtgaataagtcataatggaatagatctttgctcaaaattgcagccctaggctgatcaaaagttgagaatcttacacagagcatggaaatagaaaggaagttatcttcttctggaagttgaaatgcctgtgtggcagcaaagccagccttgctctgacctgcctttacatgcttctggaatccccccctttttctcatggcgataaaggctaccatgaagttgatctctttcctaaccaaaatattgaatgacattgtttggtgttctagagttgagagatattagtgagttgctagtgagtgactaaccaagtcttgtcttcctcccctcccaggtggctaccccaggcagccaaactataatgccttgcccaatgccaactaccccagtgcaggcatggctggaggcataaaccccatgggtgccggaggtcaaatgcatggacagcctggcatcccaccttatggcacactccctccagggaggatgagtcacgcctccatgggcaaccggccttatggccctaacatggccaatatgccacctcaggttgggtcagggatgtgtcccccaccagggggcatgaaccggaaaacccaagaaactgctgtcgccatgcatgttgctgccaactctatccaaaacaggtaaggcctgggaagcagagagggtgtcagtgcaagaaaatgtattatagacccactcagattattgagatgcttctggacctaaaccagggggggaaaatgggtgtgtgtgtatgaagtgttaattcttacataccttagatgggtctgaaatttcacgtgactaaacatcatatgtaatgagctttataaaagacaggtttttggccgggcgtggcggctcatgcctgtaatcctagcactttgggaggccaaggcgggcagatcatgaggtcagaaatcaagaccagcctgatcaacatggtgaaaccccgtctgtactaaaaatacaaaaattagctgggtgtggtggcgcacgcctgtaatcccggctatcgggaggctgaggcaggagaatcacttgaacccaggaggaagaggttgcagtgagccaagactgcgccaccacactccagcctgggcgacagagcgagactgtcgaaaaaaggggttttgtggg

SEQ ID NO: 52361 - DNA, 3780 bp, Homo sapiens
tcattctcactagggatttcttcaagagtcacatcacagctaaacttactggacttgagaatttttttctcttttacagggatggcagccagcccagagatgatgggccttggggatgtaaagttaactccagccaccaaaatgaacaacaaggcagatgggacacccaagacagaatccaaatccaaggtagtgatttttgtcttgactcctttcaactttgtgtcctatctttttcagtgataggaaggaaaaagaaaagagagtgacaagatcccagccttttatgacaccggactagatagtctctgaaaaagctgctgttgcctcctcttatcatgaaaggtcccagaataatagctcagtgagttgggtctgggttggtctaagggatcctggtaaataacataatattctcacagctgtttgttatgggggaaatgccagacactgcagcatcaaactctctgtactgtttggctggtgccctctgtgaaaccgtgcctcctatactcaagcattgatagatggggtgtgccatgggcaactagttgctcttctcttcctgaaccttactcatagcagcaggaatggtaccctgtgttctgtaaagaaggagataaggcagatgaggcttgagtccttggcttcccttaggttggtcctgggtgtactgttaggctgtgcggtagtaaagggtcctactcagcatttgggtcatttgtaatatttctgtccttggccatacctcactttccctatctgtatacatagggaaaataaaaatcatagctgttaattcctgtgagtcttcacctctggctcccagcccttttgaccacgttcctgtcttgtacaggataatatccaaagcccttcaaccaggtgggaaacctttcctttgtttagaagaggcaaagagtttcttttcattttagtccatcccattgcctcaagatcatgttgtgagtttttcgatttctctaaaacatagtacctaagtatgttcaggctcctgggtagtagtgtgggagcagtagtggctttgatgtcaggtggacaaggatttgatactcagcctgccacttaaaagctgtgagatcttaggctttgcctcctggtgcctgcttccttatctttacaaatggggataattttataatacctaatatataaaggcatctagcacagcacccagtacataacatatatttagtgttagcttccttcctttataggaaaaaaaaatttggttctcttttggcccttcaaccttatgaaggtaggacaggtgttagtaaccaccccagagtaagaagctttaacactgctccagtcaagagacttctgagacccttagcacaggctttgaatctgacccattcctatgaattttgacctgaaccttccagaaatccagttcttctactacaaccaatgagaagatcaccaagttgtatgagctgggtggtgagcctgagaggaagatgtgggtggaccgttatctggccttcactgaggagaaggccatgggcatgacaaatctgcctgctgtgggtaggaaacctctggacctctatcgcctctatgtgtctgtgaaggagattggtggattgactcaggtgagtgggcgcctgacacttgactgcccctgtggtttccacaaacccctttctaggtactcactggcttcatgtggtaccatgcatcccacagggacatcatcccctctcccgctttctgagtctaatattgatagaccggggagcacaggtttcccagaagataaggcaggaagcagagacctccctggtagtatgaggtattagcagtaagtttaccgtgtatctatggtcccactgaggtgtaaagctagggaaagtctgtgggcattctgattccatgggaggcaatttggcatagtagcaaagacaggatttggagagatggacctggttttgaatcccttcttggccacttataacatatatgaccttaaggtgtgtaaccactctgaaccttaatttcattatttgtaaaatacaaacagtatgtaacagtatataacccactagactgtcaaaagttagaaataactttggctttcagcaaggtttctgccacataaatcggcctgcaagatggtacagaggcagccagagtagaagtagatcttcccattcctggaagcttcccagtagagataggatttcaggaactgcttagtagaaatagtttataataaaggaagaagtagtaggaaattatgtgtttagttattctgtatgggaaacttaaatgaaaacctgaattggacaccacccagagcttgtgcctactctgataccttacaattttgtagactcagcccaggaagcaaacaggtgaggcagcacagacagacagcagactgtgccttgcagacttccctcctgtgtatgttctgtagtcaccagaccagaagcctgctgttggatcagtttgtggctgagctcggggaggtgtggcagggagggatttattccaaaccttctaaatcagaagaggaaaacagctgtcaccagcagaaaagaaagtggttggaatgaagccagccaacagtcagttatgaattccttctcccttcaggctttattcccctcccccacaaaggaaaacaaaacaaaataagacacgtgcatactgccacataactggcatgagaagcaaagccacggaaggcttttgaggtgactccatgcatattcctgccattctccctgatactcagatctcatagtcaagccttccctgtctatagggaaagggagcattgggttaggtttcgctcacttctgattgggtgggcttcagggttcactgaacctaggatgaggtacagagagaattctaatgcctgagcctgtcttccagattggaaaaggatgcaaacctttaaaatgccgtgattgtaactgaacttttataaaggcagtgataattcaggggcaaaagagtgctatttataagttagtttgtgaaggctccaagaaagcaaagctgaatcttgagcttatctaaaggattagtagggtttaggtggaagagtggccaatccagtagactggcctagatgccacggagatgggagagagtctagatatttcccaccaaggccatctccaaccatgaagacttagctcaggtgttacccactctaagaagtattcctagtcacctctgcccctctaggttgtccccctctgtgcctctttaaactcttctttctagtatcataggtatcatatcagcagacattacaacctattgaacttcctttgtgtatagggacttgaaaacccttgttcccaggccttgggggaacaggcttaccatatggtagatgaataagcataagaatacatgaagaaggagacctgtccagctagagcagaaagactaattgtagggagcatctggggaatgggcttggtcagtgtgccctgaagctgagggaaggaggcagaactgtaggttggctgctcgggaggtacaaaagtcataataaggccccgggccaggcgcagtggctcacacctgtaatcccagcactttgggaggccgagacgggcggatcatctgaggtcaggagtttgagaccagcctggccaacatggccaaaccttgtctctactaaaaatataaaaatcagtggggtgtggtgacaggcacctgtggtcccactacttgggaggctaaggcaggagaatcacttgaacacgggaggcggaggttgcagtg

SEQ ID NO: 52362 - DNA, 1060 bp, Homo sapiens
cagctcagactagagccctgaattccccagggagctgagatggtaatgaatgggaaggagggagtggggaagggttatgaatggaactccctgatgggagtggctctgctcaccctcctttctgagaggaggctgaggcctagggtgagcctagagagggaagaaggccagggtgcctggaaggtgggtgtaaacacatgtgccctggtgttgacctctgagggtgtaatgagtgcctgagatgactcatcagctggggaggcctcagcagtgggatatctactgctgggaatggtaactattggaaacattaattactagtagttttgtactcatcagcttagaagaacatttgaagttgaggagtgacaccatgctggatgctttagaacaggagctcctagactcctaaaatgcatcccagatttgggacccccttcccacccaggacttgggaggctctgactggagctcatgcaccagcattacagggtttagtaggttagacaaggtcctttggcggagtgaagagaaatagccagggaagctggcaatgactcagggaatcaccagcatggtgatgtcatggccacatcactcctcttttctacacgtaaaacaaaaacaaagagctacaaaaccctcagattcccgtctttatgacctggccttgtagatcctctgctaagaagggtgatcaggctttaaaggccttaggaagaactttcccaaagagattctgggtcgttcgtgtgtttgtgtgagagttaaacactgtcatgccaagcaaactactcaacttgtatctctgtccacagcgggatcaggatctatgcaggggccccagactccccagtcaaccagcagttccatggcagaaggaggagacttaaagccaccaactccagcatccacaccacacagtcagatccccccattgccaggcatgaggtaaggccaagagcaggggcagatggttgggaggatggctgaagataagtgcatgggaactccttgcagcccaaggtggtccttgcctctgccttcccagccagtgact

SEQ ID NO: 52363 - DNA, 1050 bp, Homo sapiens
gtctaagaagctcactttagatattttggcattcttctctcacctgactggccagtcctgcctgaagagccacgtcctcaatctcttctctatttggagttggaaggggctagaaatagaccttattttgatttttaggttttgtatatttttctacttaagcaagggaagggaagaaagagtggtggttgcttttggaaacaacttcaaaagacaatttgttaaggtgattcccatgttttcttggagtctgtgtccaccaagcatctggttgtagccatcttggcatctgtgggctttatgtccctgagtgcagagtattaacttcccctctgcttgtctctgccttagaattacaagcggccaatggatggcacatatggccctcctgccaagcggcacgaaggggagatgtacagcgtgccatacagcactgggcaggggcagcctcagcagcagcagttgcccccagcccagccccagcctgccagccagcaacaagctgcccagccttcccctcagcaagatgtatacaaccagtatggcaatgcctatcctgccactgccacagctgctactgagcgccgaccagcaggcggcccccagaaccaatttccattccagtttggccgagaccgtgtctctgcaccccctggcaccaatgcccagcaaaacatgccaccacaaatgatgggcggccccatacaggcatcagctgaggttgctcagcaaggcaccatgtggcaggggcgtaatgacatgacctataattatgccaacaggcagagcacgggctctgccccccagggccccgcctatcatggcgtgaaccgaacagatgaaatgctgcacacagatcagagggccaaccacgaaggctcgtggccttcccatggcacacgccagcccccatatggtccctctgcccctgtgccccccatgacaaggccccctccatctaactaccagcccccaccaagcatgcagaatcacattcctcaggtatccagccctgctcccctgccccggccaatggagaaccgcacctct

SEQ ID NO: 52364 - DNA, 3477 bp, Homo sapiens
caacagagcgggactctgtctcaaaaaaaaaaaaaaaaaaatacacacacacacactctcacacactagcccgatgtggtggcaggcgcctgtaatcccagctacttgggaggctaaggcaggagaaaaatcgcttgaacccaggaggcggaggctgcagccaactgagatcacaccactgtactccagcctggatgacagagtgagacttcatctcaaaaaaaaaaaaaagtgttgggattacaggtgtgagccactgcttccagcccctagatctaattcgaaagcccttatttttttttccatctgctctactgttcagccaaagattgtgactggagaggagtgttttcttctagaggtaaataaatggcctatatattatccaaggtggaatttgggtctctgtagcaccagcttggaccagtgtttggagagctgaagcctcgtcccactccttatgctgcaagatccatggagttccagccccctggacttgtggggagcttggagaagagagccatgaacatctgcccacatggcattctcttctcttagcttaagtcaccatgcctaagcttgggttccacttggcagtgagatggagagagtgtcctaaaagagataatggcaatgaccaccaggttgaaaactggcctggtgaagaaaagcagaagattaattgggaaaagagaaggctaagagatgattggccctggtgggtgaggtgcaaagctgttggctagtgttcctggagataggcttacgtgaaggtaggttgggcagaagaaagaactttgtgttgggcatagaagagattaagatgaacaatttgctctgtggagaacctttgggaaaggagcaactctgcctctcccaactgatacagaagacttggggaggtctctcaagtcaataattctgttcttaggccacttttctcccttaatttatttcctgttctttctctttttagctcccagggttgctagagctccttgtagaatatttccgacgatgcctgattgagatctttggcattttaaaggagtatgaggtgggtgacccaggacagagaacgctactggatcctgggaggttcagcaaggtgtctagtccagctcccatggagggtggggaagaagaagaagaacttctaggtcctaaactagaagaggaagaagaagaggaagtagttgaaaatgatgaggagatagccttttcaggcaaggacaagccagcttcagagaatagtgaggagaagctgatcagtaagtttgacaagcttccagtaaagatcgtacagaagaatgatccatttgtggtggactgctcagataagcttgggcgtgtgcaggagtttgacagtggcctgctgcactggcggattggtgggggggacaccactgagcatatccagacccacttcgagagcaagacagagctgctgccttcccggcctcacgcaccctgcccaccagcccctcggaagcatgtgacaacagcagagggtacaccagggacaacagaccaggaggggcccccacctgatggacctccagaaaaacggatcacagccactatggatgacatgttgtctactcggtctagcaccttgaccgaggatggagctaagagttcagaggccatcaaggagagcagcaagtttccatttggcattagcccagcacagagccaccggaacatcaagatcctagaggacgaaccccacagtaaggatgagaccccactgtgtacccttctggactggcaggattctcttgccaagcgctgcgtctgtgtgtccaataccattcgaagcctgtcatttgtgccaggcaatgactttgagatgtccaaacacccagggctgctgctcatcctgggcaagctgatcctgctgcaccacaagcacccagaacggaagcaggcaccactaacttatgaaaaggaggaggaacaggaccaaggggtgagctgcaacaaagtggagtggtggtgggactgcttggagatgctccgggaaaacaccttggttacactcgccaacatctcggggcagttggacctatctccataccccgagagcatttgcctgcctgtcctggacggactcctacactgggcagtttgcccttcagctgaagcccaggaccccttttccaccctgggccccaatgccgtcctttccccgcagagactggtcttggaaaccctcagcaaactcagcatccaggacaacaatgtggacctgattctggccacaccccccttcagccgcctggagaagttgtatagcactatggtgcgcttcctcagtgaccgaaagaacccggtgtgccgggagatggctgtggtactgctggccaacctggctcagggggacagcctggcagctcgtgccattgcagtgcagaagggcagtatcggcaacctcctgggcttcctagaggacagccttgccgccacacagttccagcagagccaggccagcctcctccacatgcagaacccaccctttgagccaactagtgtggacatgatgcggcgggctgcccgcgcgctgcttgccttggccaaggtggacgagaaccactcagagtttactctgtacgaatcacggctgttggacatctcggtatcaccgttgatgaactcattggtttcacaagtcatttgtgatgtactgtttttgattggccagtcatgacagccgtgggacacctcccccccccgtgtgtgtgtgcgtgtgtggagaacttagaaactgactgttgccctttatttatgcaaaaccacctcagaatccagtttaccctgtgctgtccagcttctcccttgggaaaaagtctctcctgtttctctctcctccttccacctcccctccctccatcacctcacgcctttctgttccttgtcctcaccttactcccctcaggaccctaccccaccctctttgaaaagacaaagctctgcctacatagaagactttttttattttaaccaaagttactgttgtttacagtgagtttggggaaaaaaaataaaataaaaatggctttcccagtccttgcatcaacgggatgccacatttcataactgtttttaatggtaaaaaaaaaaaaaaaaaatacaaaaaaaaattctgaaggacaaaaaaggtgactgctgaactgtgtgtggtttattgttgtacattcacaatcttgcaggagccaagaagttcgcagttgtgaacagaccctgttcactggagaggcctgtgcagtagagtgtagaccctttcatgtactgtactgtacacctgatactgtaaacatactgtaataataatgtctcacatggaaacagaaaacgctgggtcagcagcaagctgtagtttttaaaaatgtttttagttaaacgttgaggagaaaaaaaaaaaaggcttttcccccaaagtatcatgtgtgaacctacaacaccctgacctctttc

SEQ ID NO: 52365 - DNA, 1018 bp, Homo sapiens
tctcagatagggcccaactaccctaagcatacctagcaagggcaggctgcggcatggaagtactgggctaggcgtttgggtgacctgggtcataatcctggctcggaaagggcgcgtaccctttggcgagggatgcgggctggtaccgtgaggtttaagaagcagaaaacatgacagcctctttaagtagccctgggtacgtcacttgaccccagtgagcctcagtttccatatccataaaatggcgatggtaattatactagcctcacagtgtctgatgagatctctggagcctatttatctcacgggaaaatttttgaagagtgaaactagttgatctgtaagtgtcctgccagttaagagtctgtgatttggcaaaggggttgttgggaagtgaggtgggcaattagctgagagggagaattgactagctttgtttttacttggtttacctgtaagcaaagtgtgggctacacacatctgtagtcgctgaggctagagcttgactcgagagaggaaaggaagaatgcaagcatggtcaagtggcagaggtgggttaggtgcttttctgatcccagcttctcttctgcatgcgcgtgggaagccaaggaagaggaaaaaagagtgaattcgccctaggatagggaaggagtagccgcgtgaggttgagtatgcccatttccgtgatttctctcgattcagcgagtcatacgttggaaacgtttagattcacaaactatcgttactgtctggggctttcagaagcttgcctttgaaccgaattttcgtgagccaaccggtgtggaattgggggcccctcccttcctccaggcctcctggcgatggagtaagcagcaggcgcccccttgtgccaaggaaagagtactgttgccattggccaacttggctccctttctggggaaattttattttcctgtggcttctgtgactttgtcgtcttgctcttgacatgagatatgatgggaagaatacttggggcactgatttcatatctaga

SEQ ID NO: 52366 - DNA, 1053 bp, Homo sapiens
gatttctgtgaccttagctttccagctacttgcttagctgtatggaactttaccaacgacagttcagggcttcacagtgacacctactgaacccatttgctgtcaagatgctttcccctcatctgggaagttaggtggttggttaagtttgtcatagtaattctgagaggggaggttccagtgacgaatgctttcaagaatttgctttcactcgatgtgtgacattttcctcctttggggtttagaggcctgagggagctcaatcctggtagcaacacccctgaattcctggtggtgaaaggatgtggccccaggacccatcccggaaggaggtgctgaggtttgcagtcagctgccgtatcctgactctgatgctgcaggtcagtctcccatcctttgtcctgaatgtgctattgctacatgactggactaggcagtaagaagtgtccccatctcctttccacctctcaggtgtgcccctccatgtggttggaaccacagagacatagactttagagctgaaaagttgtcaggaatcttagaaacacggtctgttgatcttgttttacccatgaagcagcagaggcccagaaaggttaagtgacatccccaaagccacatagcaagatagagaagggctggagtttgaccccatgtttcctaactcctgagctagtggtctctccaacagactgtgatgttccgtaaccagagatgcttatagggtgggacagctcaaagtattgccctgtgtccccttactaggagactgagcattgtgtcagttgagtgggagaaacgtggcaatgtgcaagtcctaaaaccatctggatatgtaatagttcctcctattcccccgagtgcctgcccttcctgcctcacccacacacaactctcagtgcacttgcccgtttgcagctcccttttccctccgaggctccccttgatacacattttaataaaatatcacgtatatatgaattatttgctgcctagcacagtgcttggtgcctagctcagtatgttcataaatgaatgaatgttgttgaatgt

SEQ ID NO: 52367 - DNA, 1008 bp, Homo sapiens
gttgtctggttttgcactgtccccaccagtccttttatgcagctctgcttttctgtctcagccctgccaatgtcttcctggcagctggttactcagaagctttgtttgccctcctgacattcagtgccatggggcagctggagaggggccgagtctggactagtgtactcctctttgcctttgccactggggtacgctccaacgggctggtcagtgttggcttcctcatgcattctcaatgccaaggctttttctcttctctaacgatgctgaatcctctgagacagctctttaagctgatggcctctctgtttctgtcggtgttcacacttggccttccctttgccctctttcagtattatgcctacacccaattctgtctgccaggctcagcccgccccattcctgagcctttggtacagttagctgtagacaagggctaccggattgcagagggaaatgaaccgccttggtgcttctgggatgttccactaatatacagctatatccaggatgtctactggaatgttggctttttgaaatactatgagctcaagcaggtgcccaattttctactggctgcaccagtggctatactggttgcctgggcaacttggacatacgtgaccactcacccttggctctgccttacacttgggctgcaaaggagcaagaacaataagaccctagagaagcccgatcttggattcctcagtcctcaggtgtttgtgtacgtggtccacgctgcagtgctgctgctgtttggaggtctgtgcatgcatgttcaggtgaggtggattcctgactgggataaggatgtgaatacaggcaaaaccccttggccaaggacagggaaggcagctaacatctcccgtttgagtgatccatactgaatttattcattcaatgactatttagggttattctttatgccagactctgggtcagacctctaaggatgaaacataaataagacaaaattgcggccaggcgcggtggctcacaccc

SEQ ID NO: 52368 - DNA, 1084 bp, Homo sapiens
ggagacagatgatcaacaagtgagcaaataagtaagcaagaaatgctggccagccagcaaaggccccgatggcagccagcgtggagctgagtagttcctgggggctaggcactgttttaagctctttatatgcatgatcttatttaatcccccagtaatcctatgaggtaggtactgttgtcattctccttttactgattaattaaatcaaggcaaaagagggtccaagatcacaaagtaagtagaagagctgagatgagacctcagtctagagcacctgctcttaaacattcatatacacttattcattcactcatcaaacatttattgaccccctactatgtgccaggcacttttctagatgtgatacagcagtgaacaaaactgacaatagtccctgtcctcatggagcttgacagttgaggaggaggaaagagacaataaataacaaataattaaatatctaggatatcagacagagaagaaaggagggaaggaggatgaaggctacagggagggtgtgtgattttacatagggtggccagggaacatcttgtgaaggaggtgacatctgagcaaagaagcaccggcctgaacagatgagggcttgacggtggggttatctagggaagagcccagtaggtgttggggagtgggctagtttaggtcaggtggtcaggggagacctctaggaggaggcggcactggagatgagtgtggtagaaatacggggatctgggaaaagtaaggccaaagcccagagtggcaaacagcctgggcgtgtgtgaggaacggcagtggctggaaagaccctgtgctcccaggcagcccaggtggcccttgattcctttcagactgctgtgtgggttccggggtggcggggtactgggccaggtccctaatctcagcttgctgcaccccagctcttcctgctgagaagtgacgtggctacttgcacacctcgggggtttccggtccgtggttagctccttcccctaacagcatggtgttcacacaggcttttaaacacccagctggccctgaagacatctagtggcctgtaaatgtcagagccctgctgcat

SEQ ID NO: 52369 - DNA, 1062 bp, Homo sapiens
aaggctggtctcgaactcctgacctcagacaggtgatccacctgccttggcctcccaaaatgttgggattacaggtgtaagccaccacgcccagcccacatccagctaatttttaaaaattattatttttatagagatggggtctcacactatgttacccaggctgatctcaaactcctggcctcaagcaatcctcctgcttcagcctcccaacgtgctgggattacaggcatgagccactatgcttggccttccattttatttatttagcagatgatggcacagagaagttgagtgatttgacccacctcactcagccagtaagtgattggagtgagatttatacctacatgtgtttctggctccaaagcctatgtccaagtcagcaaggaagcagtgagtggggagccaaaagctgggactctggggcctgtgggacaggattaggggtttggtttggagtagtatcaccagctttggaaagagctgctgctgggggttctgcatcctggagggtcatggcatgaacagttggtcaggagcaatgtcagtggctcctgggaggctagcactgtgctcagggctgtggaagcatctcattcagccctcaccacaatcctatgaaggtatgacttgacccatctctattttacagataaagaaactgaggtggccaggcgcggtggctcacgcctgtaatcccagcactttgggaggccaaggtgggtggatcatgaggtcaggagttcaagaccagcctggccaacatagtgaaaccctgtctctactaacaatacaaaaaattagccaggcatggttgcgggcacctgtaatcccagctacccaggaggctgaggcagagaattgctttgacctgcaaggtggaggttgcagtgagccaagatcgcgccactgcactccagcctgggcaacagagcgagactccatctcaaaaaaaaaaaaaaaaagagagagagagagacagggtccgcctttattgcccaggcaggtctcaaactcttggcttcaagcaatcttcctgcctcagcctcccaaagtgct

SEQ ID NO: 52370 - DNA, 1022 bp, Homo sapiens
ttttcctcattgtgttactcactttgttcctccatctcctgaacctcctgtaaactgggacataggtctaggcttgatgagatgcaaataaacctcactggctgggcgcggtgcatcactcctataatcctggctgtttgggaagccaaggtgggcagatcacctgaggtcaggagttcagaccagcctggccaacgtggtgaaactctgtctctactaaaaatacaaaaattagctgggcgtggtggcacactcctgtaatcccagctactcgggaggctgaggcatgagaatcgcttgaacctgcgaggtggaggttgcagtgagctgagattcacgccactgtactccagcctgggcgacagagtgagactctgcctcaggaaaaaaaaaaaaaccctcactaagctttctgggagtctccttctctgacagcccttcttagagtgggtaaggccggcaggtgtatgaacagaggcagtctcagtacatggtggcagttcctaatatttgtccctgccttaggccagacattttactccaatgtttgttcctgggaacctgttaccctgaggcttctcctggactggccaggcagcagtagctttcccctgctggggatccgggccctgggctgccttgggcattccccatctttctctcctccttccctcagacaacacaggcagttctacataccggccaccccctcggacccgggaggtgctgatcaacgggcagatggtgaagctgaagtactgcttcacctgcaagatgttccggccaccccgaacctcacactgcagtgtctgcgacaactgtgtgggtgagtaggaggcagcagggagggatgcagggattcctgagagagactgagtcgtggggatggggggcatcaagcatggggatggcgtgggcagggtctgaaatacccagggctgggcagggggtctggttcacccagatttgccctgactcaggagggcccaggggaggggccctcagcataaccaggagtgttt

SEQ ID NO: 52371 - DNA, 1399 bp, Homo sapiens
tgtgagtctttgtgccggcactgctctggatcctggggagtcagcatggtgtaagaccagcacagcccccctcgcccatggagcttacagtcaagtagggctgattggccaatccagttattataaataagcataaaaacacacatgggcagagtgtgacaaaagagaagtgatggggcagataacaggggccccctcccctagtctgggattggaagagactttcttaaggaggtggctttgcagctgagacgcgaaggagaagttccagttaaccaggtaaagagacgagagaatgtatcaggcagtgggaactggtacacaaaggaccagaggcaggtgtgtccaaggcctgggagccagctggtgctgcgagagtgaacggggtaggaaagccccagccatgggtgaggccgccaaatgcctgtgctggctgcaggccagcccacactaacccatcgccccttgcccttgtccagaacgatttgaccatcactgcccctgggtgggcaactgtgtggggagacggaactatcgcttcttctacgcgtttattctctccctctcattcctgacggccttcatcttcgcctgtgtggtcacccacctgacgttgcgtgagttgtgggtgagggcagtggggagtggaaggggtcagccagcaagctcaagggtcagcaagcttcagcagtcactgtccctctgagcttgtcctctcctgtttctttctccccaggcgctcagggaagcaacttcctctccactctgaaggagacaccagcaagatatcctttgtcagctagaggacactccagtgggaactgaggtcccttcactgggtgggtgccctgcctcatcctctaatcagaagggaacagcgtacagctcacatgtgtcctccagaatccaacatgccagctcttctgttcacacccaggcaagagctgatcctaaatggggcattgtggggccgggggttcctcgtcttcaggggcctggaaaagagtatgtcccttaagatgccaagctccctggaccgtgtcgtgcccaaggctctttgtgattggaaccctcagttttctctgccgtccatcaccctgaccttgtctggctcttgagtggggtcctgacccttccgaggggcccaggaggtgatcctgctaagaagtggggactgggccacaggaaggttccaaaacttctcagctctctggggaaacagctccatggaaggataggtgagacaggccaggtgtggctgggaggctccccaccctccacccattgaagtccttaactgccctcaccgtgctggagttggtgatctgcttcttctccatctggtccattctgggcctctcagggtttcacacgtacctcgtcgcctccaacctgacta

SEQ ID NO: 52372 - DNA, 1031 bp, Homo sapiens
ctgccgtccaacccctggcctagagcctcagtgttgggcagagccctcatgtgtctcccttgtgttttggaagcctaattgaccggaggggatttgtgcagtccgacaccgtgttgccctcacccatcagaagcgatgagccagcctgcagagccaagcctgatgccagcatggtaggaggccacccctgaccacggctcagtacttgccacctgctggcctgtctgaccctccgcactcacctgccgggaccctccctattccatccaagggaagcagaactgccaaagactcaagtcttttcatatttatttcccatcctgcgtggctttccctgaactgttccgtggctgtgccctctgctccccaaacccaggttcccacagccttgggccctaggtaccccagctgatcagtgccaggagagaccagagcctctggaggctacccaggggaccacaccaagtccttgcctgtgccgggcgagccctgtgtgagtgaggctgtgaactgagcgtgaggcctcccaggtgggggaactgcttgggccttgctgagccagggtcctcagggtgaagcaggactgaggagtggccagctctggatagctggctgtggagaggaagcctccatgggctgctttggtctgtgggctccttcattcccttggtgataatttccctttattctgtgggatttttggtggggttttccccccttttttatggagttggccaataggattgagttggggctccagtagagaaggcagggttggtggtgggtgggggcagcctgtatcagacaaaggtaaatcagccagccaggcacccacagcctcagctcctgtgcagttcctgggcagcacagtggaagtgggagcctggtccttcccctgcccatggagagctctttaagggatcccagcctgcccctccacttctctcccaagccaggtcccggcatgggtgggttatgctcatgctggcaatacttgaaacgggtttattaatgctgggtattttgcacaa

SEQ ID NO: 52373 - DNA, 1123 bp, Homo sapiens
atgtgtgccctgtatgaatgtggctggctcccatatcccctgggctgccccctgccccatcccctttgagtgtcagaagcactctgagccaaggggacagggggcacgtgcactggtcacgagaaaaccctgggctcccactggggctcagcccagcctcctatctttccttcttctatggacttcagacagccagtgtctggggactctgccactctacccccagccctacccaccagcccccaggtgaggcttccagctgggacctgcccagacaggctgagcctgggcgtggtgggtggggtgatggctctggggagcggctgccatcctacaagccacaccccctcctctgagctctgaatatgggacccagtgccaggagctggaagacaaggtgtttctgccaaacggggacctccatccagagaaaaggaagaaggtgcagggtgggccaagaggcaagtgaaggttggcctgagtctgggccggaaactcagaggatgtttctcctctgctgggagctgtagtttcttatcaaaatagatattgttccaccatccccctccttggcccttcaagtgggctgaagcccttggaaagtgacataggaagtccccagatcttgcccttctcactccagaggctagtggtcacagacagctgggaatggcagccacagagggtcccctctgggagaaacagcttcaccccagcctcagggccctgggccatcactgcagtggccctgggaggtgaggaagaagctggctagaggagggggctcccacctaccttttatttaagccagtattctttgttcctgcttgtaataaaacttcagtttataagagttgctttgctttggtttggtttttgtttgcttttcctttgctgaggccccaactgggagccctctgttctttcagacaaatttggttctttcctggggagactgtgagaaggcaggcagcccagtgatctggctacattttccctcacctggctggagctctgtccgctggaggaagagcagagagggctgcggctgagcccccatgggcacgtgaaaagaggccatcctgtcccctctttgtcccctccaccttcccctgcctcaggg

SEQ ID NO: 52374 - DNA, 1042 bp, Homo sapiens
ctcttatgtcctggctttctgtccccgctgagctttctctcacccgcccgttttctctcctgcttcattgcctgctgcctaagccttggcccttctctcgggcagaggcaggtgctgtggcagcacctctccccaccaccggggcccctgcaggccgcctccctcctcccaggcctgctaaccctctctcttctccttctttgctgtcctgccggggatctccagtgtgtgcgggggcttaaggacctcctgaggaccgctgctctctgcctctccaggaatggcctggggggagccaggcacccggcacctccacctgcctaacctgtggcccatctgccaccatctgtgcctacagggtctgccccccagcctgcccggcctgtgtgctctctaggacccccatagggggcaggggctggcctctttgccccattcccgctccatgccggccagagtgtagaaagccataacgcagccatcagcacaataatgtgactctacgctgatatgctccctctctcctccactgacttccccttcccggatttgtgaggtgtcaagactaggaatctggccttagagcctgcccctccaccccctcagatcaggcatagccatagtcaagcccagcaggtttcctcaggagctgtctggggtgttgatggtggatgacgctgctgaacaagtttggtgactgttctaagcacaactggcttgatactgttcccacggcctgtccacctcccacccccaaccctccaccagagtaggtaggatgtagggagggtgcgtgcctcctttgctctaggcactgagggaccaagctagccgtgcacagccccatacacttcaggggactaaaggaaagagctgagccaaggaaaatcagctgagcccagggctgggggctgcttgtctgctatcctgtaccttttttttttttaaccaaaataaagattcccctcttcttgccataccattggctgtctggtggcgcctttactttggggcccagggatgggacctgcagtgggcgtgt

SEQ ID NO: 52375 - DNA, 1013 bp, Homo sapiens
aggtccaaagtcagggtctctaagtcagattccagtcccactcccagcccatcgccaagaactggaagagagacaggaggagtgtcacaggggaactttattgagaggaaacatggtcacacccagcagacatgctttccctcaatctcggtcttgcactggcgcgcgcgcacacacacacacacacacacacacacacacacacccatctccagcccctgccactgtccagttctcagccacaaggcgggacactcctcaattcctacgatcagaggcagcaggggcaggagggaggcaagaggaggggagaagtagcctggtcctggggtcgggaggaagcgggtgcggagagcaggggtgggggcatgaccagtggttaggtgcgctcaacagctgcaagaagagtgggatccccagccccaggtggcctcagctctgccagtccctctccacggagccctttggagcaagaacagcgcctaggggagaagggtggggcctcccaccccatactagtcctctcggcagggtgggggactggagggggcagggcggggcggtggcgggcaacactcagctctggggctcctggggagcctcgcccccctcttccccggcgttgtcggccgtccacagtgtcaggttgtctcgcagcagctgcatgatgagggtgctgtctttgtaggagtcctcgctgagggtgtgcagatcagccatggcctcgtcgaaagtggtcttggccagagagatggcctcctcggggctgttggcgatctcgtagtggaagacggaaaagttcagggccaggcccaggcggatggggttggtgggcggcatctccttcttgctgatgtccatggcctcctggtaggctgaccgggctgagtcaatgatgcgcttcttgtcgtcaccggtggccacctcggccaggtagcggtagtagtcacccttcatcttcaggtagaagacccggctctcggcgtccccggcctccttgatgaggtggctgt

SEQ ID NO: 52376 - DNA, 1054 bp, Homo sapiens
gttacagtgagctgagattgcaccactgcactccagcctggtgacagagcgagactttgtctcaaaaaaaaggtgtacttcaaaaatgaaatacaaggctgggcgtgttcactcatgcctgtaagcccagcactttgggaggctgaggcgggcggatcacctgaggtcaggagttcgagaccagcctggccaacatggtgaaacccctctctactaaaaacataaaaattagctgggcatggtgttgcacgcctataatcccagctattggggaggctgaggcagaagaattgcttgaacccaggaggcggaggttgcagtgagccaagattgtgcctacattccaacctgggcgacagagcaagactctgtctcaaaaaaaaatagtaagttgtgtaaagaaaaatattaattatataatatggcagttcctatgagagtgtggcaaaaatcaagagggcttggaagttttttctttgctcttgcaactggctggatgcagttcatatatttttcaaccagtaggtggcaccccaacctaattttttgcagttgtaacctggtggcagaaggggcaggactgatggcttgggcaagactgttatgccaagttttatttgcatgtatttggactttctttttttggagacaaagtctctctctgtcgcccaggctggagtccagtggcacaatctcggctcactgcaacctccgcctcccaggttcaagcaattctctgcctcagcctcccgagtagctgggattacaggcgcctaccacatgcccggctaatttttgtatttttagtaaagacggggtttcaccatgttgttcaggctggtcttgaactactgacctcatgatttacccgccttggcctcccaaagtgctgggattacaggcgtgagccactgcacccggccacatttggacttattaacacatatgaagtgcttggtattttagagtgcttccacacacacaatcctcattagagatagacaggatggggagaattaataagccattgcccgtgttacagtgaggaagcaga

SEQ ID NO: 52377 - DNA, 1030 bp, Homo sapiens
ttttggacagagccttcatcctttcttggaggaggaggagggatagatagcccttaggggctctaggtctgatggtcaggccctggtagggtgggctggtcagaagctcaggctctagtaagggtttagattttagaagaggaaatgacccgggtgggggaaatagccaagtaggggagggaagacctgggttctaatcctctctctgtcatttgttggctctgttacttttctgcaccacaatcttctcatctgtatgattggggagagccatggttcctacttttggggagctcccagtctaatgagagagatacagaacactattaaaatgaataagtcaatcttacgagggggtcctagaaacctgattcttcccccttctttgagagggacgcttccataaactgagctctgtttcctcagatggtggagacaaggatgcccgagactctgtccaaatgcgtctggaacagagactccgagatggacaggaagatggctctgtgatcgaacgccaggtgggcacctttgagcgccacaccaaggtgagttagcactgtgcccaccccatggacccctctcttttccttctctactttaattccttctcccatccccattctccctgctcccagcaggagccccatttcttgagtcttgtcccttcactctgcagggcattgggcggaaggtgatggagcggcagggctgggctgagggccagggcctgggctgcaggtgctcaggggtgcctgaggccctggatagtgatggccaacaccccagatgcaagcgtggattggggtaagtgtgactgagggacttccctgggggcccaagcctttcagctatgccctggtttccctcttcccactggttttggcatggctgctgggtactcgtgcgggatgaaattcaaaacagttaagaggaaaaagtggatctgggccaggcacggtggctcaagcctgtaatcctagcgctttgggaggctgaagtggtaggattccttgagcccagtttgaaa

SEQ ID NO: 52378 - DNA, 1104 bp, Homo sapiens
gtcctggctggaatgcagtagtgcaatctcagctcactgcaacctccaactccctgggctcaagccatcctcacctcagcttccctagtagctaggactacactcacacatcaccacacttggctaatttttgtattttttgtagagatagggttttgacttgttgcctagactggtcttgaacctctgagctcaagggatcctcccaccttggcctcccaaagtgctgggattacaggcgtgagccactgcgtctggccccatcctgacttttcttcagcacttgaaggcctacagggtttcaagctaggagtcattgtatcattccacaagtcccgtcaagccaagggctagtgtaggattccaaaggcattctaagacccatttcctgccctcaaagagcctaaaatctccctgaagagaaagaaccagcatctggagatgctgcacctggatgtggccacccgggtttgcattgctggctctgctgctccctcagtgtactcttttggacaaagaactttttactcccctgaacctaggttttgtcatctgtagaatgggaataatggtacttatctcatagggttgttgcagtggttaaaggagctaagctatgggaagggcctgacacaccagagacaataagcattattgtccattctttctttgtgatatgacataaaaaggcctaaccagtgtgtactgattagcattgggagttcagagactggtatgagagctgtgggcctaaatgtggggggcttcatgtaggctgtatgacttgagggatgaggaggatttaatcaagtggagaagagaagggtgtgggagaggaaagtgggtatttcaggcagggaacaacatggccaaacgcgcagaggtgagtcaggcttgtggggacaggagcaaactgttgagaattatcgggctggagacgtgttggtcaggggccaaatatgtgctgcttcttggagaaatctgaaggaatggcgctgaggctagccacacatgcctcctgtgccctgagcttccctccctcggggcatgaggtcaggaagctcaggcaaatcacctctccctgccttttaggacgatgaccgg

SEQ ID NO: 52379 - DNA, 1135 bp, Homo sapiens
actcccatgaagctggccctagtcaagtacgcagtgaggtcgatgaggaggaggctgtcctgtggtaagtcccttctaggattggaagagatgagtaaggctactttcagcttcactgctctacaagctgggggggtcgctagcaagggagaggggcaaaacttgtccctttttaacttccaaccctgccagatttgagtccagggctttctagaagtctccacggcatcgggtgaccatagcaactcatgccaaactctcgggcccacggctccgcctaccgcttcgtggacgcgcttgttgattggctccgaatgtcgaccaatggtcggcgaagcgggttgcttgccgcacggtcaatggccgcaaaccgggaggaaggcgggaagagaggaggtggaggcgggcctgggcagccgcgcgcgtgcgtgtttccggctccgctgcggaaggcggacgactagagtcgttgggcccggcgcgacccgcaggagcgtagagagcgcgggactagagtgcagagctccgggacgtggatcggagccggcgcgatgggcggagagcaggaggaggagcggttcgacggcatgttgctggccatggctcagcagcacgagggcggcgtgcaggaggtaacggcccgcgcggcgtcggcccacccggcggccttggccacgctccttccgcccttctctgccttcgagggctgagacccaccccagcggctcgcgggcttctgggatgcccctacattctcactgcgcccagcttccggcctggccacccgccagcaggtctcacccggttcgcatcagtcccgggcccccggcgcccctcagtagtagcaaattatcgcatccctgagcttaggatccccctttagtttcacatatgcccccacccccgtttccactttgatggcggcttccaaggagcatcccttagtaagaaccgtcgcaaatatcgtgatttggatccaccaaggcttggggcgagccgtcgaatgtgtgtggtaggggagcgggctgatgttagcacgtggtcttgttaggccttgaatgggggaataggaggcctgtgttcacgattagtttccaccacctaccaacttggaacctttacatctctccaagcc

SEQ ID NO: 52380 - DNA, 1015 bp, Homo sapiens
cctcccaagtagctgggattacaggtgcccaccacctgtaatctagctaatttttgtgtttttagtagagacggggtttcaccatgttggccaggctggtcttgaactcctgacctcaagtgacccgcccacctgagcctcctgaagtactgggattataggtgtgagccagtgtcttgatgggctttttactttctggagaggaaagctgggcccaggcttttcatgccctggatgcagaggagtgttccatacgcttaggctgcttctagcatcacaaggaaagtgaaaggcgcacacacacacaggatatgagaaatctgcttcatggtggaagtgactaagagaacctgctggggagataatctcctcagttgggaagctcagaggaaaaatagtcaagtcccaagttccctcctagacaaaacaagttgacttgtgtgcagttgaagggctcccaaatgcagctctactactttaatcttctccccctctttcagcttgtgaacaccttcttcagcttccttcgacgcaaaacagactttttcattggaggagaagaagggatggcagagaaggtaagtgttggaaaccactgtcctttgggcggctctgtctcttcagaagaaaagctcacctggcctttctttggcataatagtaactttcagcagaagcgaaatgccaaaggtgaggaattggggaagggaaggaagctgtcatttcttcaagctccactccttgctcagccctctatctaccttatttcccatgacttttgcagttctacaagaggggcaggtgttaactatccccattgaggaaattggctcaagagaattttgcaccttatccaaagtcttgagctgagctgtgggagaaccagggttgaaaccagtctgttgtaaacctgtcctctgccccgacacagtgcctctcagttccttttccaatgaggaggttttatttatttatttattttctgagacagagtcttgctttgtcacccaagctga

SEQ ID NO: 52381 - DNA, 2175 bp, Homo sapiens
gtgctttgcaggtattgtcattacaaccctatgagatagatgtattttcctcattttgcacatgaggaaaccgagtttctgggtgcagtgctttgcccttgcacccagcaggtagagagtggggctggactccaggctgtgggacactgtcccctgctctgatgcctcatggcctttcttccctctccagcttatcacacagactttcagccaccacaatcagctggcacagaagacccggcgggagaagagagcccggcaggaggccgagcggcgggagaaggcggagcgggcggccagactggccaaggaagccaagtcagagacctcagggccccagatcaaggagctaactgatgaagaggcagagaggctgcagctagagattgaccaggtgaagggtgggcttcccttctccacccctcagatcccccctggcactgagcagtggggtcctgttgccaactgctgtgctctttgccccagaaaaaggatgcagagaatcatgaggcccagctcaagaacggcagccttgactccccagggaagcaggtgagatggactgcagggacttgggatgagccaggagcttggaacttacaggaaatctcctgcctactgctttctctggaatacccttccttatcctatcccctcccctcctggctttgggaatcttccccatactttaagatcacactcagagacattgaaccaaaggatccaggttaaaaaaataaaaacctgccaggcgcagtggctcacacctgtaatcccagcactttgggaggccgaggtgggtaaatcacgaggtctggagttcaagaccaacttggccaagatggtgaaaccccatctctactaaaaatacaaaaattagccaggcatggtggtgggcgcccgtaatcccagctactcgggaggctgaggcagagaattgcttgaacccgggaggcggaggttgccatgagccgagatcacgccactgcactccagcctgggcgacagagcaagactccgtcccaaaaaaataaaataaaaaccgactgaccttaacctgtttatggcaagaaaacccaatagccagagagggcagtgcctattacaggtcccatctgaggttggctgggttctgtgggcccagccatatcctttgtcacatggtataatattaatagtctgagctcctctcagactgagatcagaaccaagttttacctggttcccagtggaccaaggcttgggggtctgcccctctgtggagtgggcagggaccaggtctgttttcttttgtggctgtatgcccagtgctagccctgggcttggcccagtgagggttcaatctgtgtcttgtctgtcaagtaagtagctgagtgtccctgattgtaagcaggatactgaggaagatgaggaggaagatgagaaggacaaaggaaaactgaagcccaacctaggcaacggggcagacctgcccaattaccgctggacccagaccctgtcggagctggacgtgagtgtcagggaccagaggtaaagcttagggggccagcctggggtaccagcagcacttagtggcctcttctgactgcctctgccctatgcagctggcggtccctttctgtgtgaacttccggctgaaagggaaggacatggtggtggacatccagcggcggcacctccgggtggggctcaaggggcagccagcgatcattgatggggagctctacaatgaagtgaaggtggaggagagctcgtggctcattgaggacggcaaggtggtgactgtgcatctggagaaggtatgtgaggcccagcccttctagcctggggtgttgatggaagtagaagggaggatgtgtgcttagtttactcaggagccatgctgggggcattgtgggattatcttaatccccatgacaacactctttaaagtagatctgtctctattttattttcttaaagacaaggtctcactctgttgcccaggctgaagtgcagtaacaccttcttagctcactgcagccttgaacccttgggcccaagcaattctctcgcctcgtcctcctgagtagctaagactacaggtgtacaccaccacgctcggctaatttttgttattaaatttttttgtagagaccggggggtctcactatatttcccaggctggtcttgaac

SEQ ID NO: 52382 - DNA, 1072 bp, Homo sapiens
gtgattcctggtgcacagagcaggccacctcccaccctctggttgttctcttcacagatcaataagatggagtggtggagccgcttggtgtccagtgaccctgagatcaacaccaagaagattaaccctgagaattccaaggtgagccctggctggttgggggagcttcagcaggaaggtgaggggcctcgttgtttccagagcttcaccgattcctgtcactgcctgccctcagctgtcagacctggacagtgagactcgcagcatggtggaaaagatgatgtatgaccagcgacagaagtccatggggctgccaacttcagacgaacagaagaaacaggagattctgaagaagtgagcaattcagagacggggttgggggaccgtgggtgcctgggggcttagacttcggtgacagcagtgagtggatcactgcgctgcctcaggagctgccctgccccctttccagccatgtttatggctttatggctttggcttgcctactcttgtcatttgctgaggtcatcttgagggcaaggccggctcatggtgcatgataggagggaaggggtaacaggcggtcattgccacctacaggaaaacaatgccagtgttggtgcctcagcttccagcctcgggactcaaatgcgtctcagataccctgggccctgctcctgcccagcctggcttggtgttgctgaggtctaaagagattagacttgacacgggggtgctgggagaagggacagctttagaagagaaggatgagctgtttcatcttgcttccgtttctccaggttcatggatcaacatccggagatggatttttccaaggctaaattcaactagcccctgttttttcctccctgaactcttggggctgagctgcaaccacccaactttctttcccactcttctctgggacttgtgggcctcagggcttggggcaggcatgggactggcccaggcacacaggtcccggggcatcaggagaaaggctgggtcttgggaccttgtcctccccagttggcctactgttacacattaaaacgatttgcccagctccttctgt

SEQ ID NO: 52383 - DNA, 1082 bp, Homo sapiens
atgtgactaggactcagcctccatcccttcaggtgctcctagccagatgggggagactccaggtcaatagaagctaactttacaatgcaatggtggtgccatgtccttctagacctgggtcagagatagcacagaacagggagctgtcggcgatggtgaggaagggcagcagagacttcagagctgggctgggaagttggacttctggattcaggccctggactgtttgttgtcaattctctttgctgggctcagtgtccccatctgttcaactgggatggatagattaggctgctgctctccaacaccctctctggttccagactccaaaggggacaggtgccttcacctggtctgtacagctgcctccacagcgaagaaagtttcttggaagaaatccacagctggcagcttctaaagctgttgggatgtgtgcagggatgggggcggggagagggggagggtggtgtcggttgttgccttggggcttttcactgctgctgagttgtcctatggctcaaaaattggaacctttctccctctacccccctgcaaggctttgcctgtagtggcaatctgagtggctagagattctgttcttgcttgtacctgtactaaagggactcaccctactgtaaggagccttcccagagctacaggcagggaggccttttattggttgtgtaaccttggacaagtcctttgccttctctgggcccagaggattgaactagacaatctgatttctccagctgcagccagagggcctgcatcaggcggcagagcatgtgagttttgtaagcctgctggctgacggcgtctgtcagtctccctgcaggtctcagcagcagcctggagcagagtggttgtggggagggccttggcatgggagaaaggagggtgcagccactgccccctccatggctggaaagtctgattcaggaggcaccaagctgccctgcagtacttgggtgtggtggtatctggtgaccgtctgccaaactggctgtagtcacacctgggaaggagacaacagcgactggctggctgacacagctggccccatggccctgacgcagggg

SEQ ID NO: 52384 - DNA, 1216 bp, Homo sapiens
agtctctggctcagctgtggtcccacccaggaagggagggagctgaggcctcccttgagtaggccctgctttatcaggggacaaaccaggggtaccaggcacatggctgggggagggactgctgacccaccaaggtctcacactcctcctgccagctctgtcaccctggccaccacccaacctgtccttactcagagctgcgggctgagggcatctctgagtgtctctgcctggagcaggggtggtttctacggtgacagtgacgtgactcagagcttttcgaactgtgctcccacggggaccactgggcccctcaggggaagctgctaggggaaggactggccgtggctccagaatgtgctgcctttttaagttttgtttgttcacactcctatatatgattgtttgcacagagggcgctcctgtttttaaaacattttgaaaacccctggctgaacagtgctctgcctctaactccctcctcacactccagaattacccttcctcatctgtgcctgtctgtccaacccctcccccacgtctctctgcctgctgggctcttaactgttgctcgaagactgtgacatcagaagtaactcccactcctaatcaagagtctctccagcctcacagatgctggcctcttggcacctgcctagctcttgggcctgacctccagtcctgctggcctgctcttacttcccccaccctgggtttggcccctggaacctttcccttgtgtgtaccacaccctgcctgctgtggagcccattgtggaggcggtgggggggagaaggcctcccctgaggatcccctgtcccctggggctggtggattgggcagaatcctgggcccccagagacctttgcccacacacactccttccccttgtccctggggcactcccccaggattgtgcaatagtcagagtgtccctttttgcaggggactgggccatgggtcctcggcccatctgtccatcctcctctccatgcaagtgctgtttgggcaggagtcaccatgcaagggtgacatcgacaaccacgtaccaagccaccgcagctgctgccactctgctgcctgtacagaagaaactgaatctttttcatattctaataaatcaatgtgagtttttaatagagtcaagggctgctttctggggacgagggtctttaggagggagggtggcctgagggcgtgaagtacttagttcaaa

SEQ ID NO: 52385 - DNA, 1258 bp, Homo sapiens
agagatccacacacaggtactggagtgcgggctgggcccttggttgcagaaggaggaacagggagatagggagcagctgggcctcaagtctctgccccccatcagccccttctccctgtgccagtgcccaggggctccctctgccccaggaggccgccagggtctagccataggaaggtgtggtgtgagcagctgggagcctgaggagggggcatcatgccatctctgcctccatttgaaacctatcccaggcataggtcccaggtgggattagagaagggggctcagccggacacaggcaaggcttcgagatacccagagtcagggccgctgggttcgatgagtggagtgtgggcgccacctcctggctgctcatggaaccacagggctggacccagcagggctgcagctacgggagggagtggggctagtcagaggtcttggtagggaaggcgccccacagcgaggcttgacttggccctgggcccctttcagttcctggaccaccttctgacaggcatcgaagacatctgtggccactacggtcaccaccactggaaggacaagtaggtggcaggcctggtgggcaggcagggaggggcaggcaagggtctcctgggcctgggcatctccccactcctggaagctggcgccatccgtctccctcctcctcccaccaggctcaaccggtttaataagaaatatgtgaagaagtgtctgatagctggcgagcgctccaaggagccccagctcattgccttctaccacaagatggagatgaagcaggccatcgagctggtggagagcgggggcatgggcaagatcccctctgccgtctccaccgtctccatgcagtgagtgctggggcaaccaggcagcttctgctcccacacaccggcccctcaagcccggttggaggtggccacctggggggcggggtcttctgttgtcctgttggggcggacaagagagctgtgggctcgcaccaaggacctgaggctttggcgcccacctgggtcatccctagggtgacttccttctggccaaacctgggaggcaccaggatcccaagaatcttggggacctaaccgatgccctattgccccaggaacatccaccccaagtccctgccttccgagcgcatcctgccagcactgtccaaggacaaggaggaggagatccgcaaaatcctgaggaacaacttgcagaagaccaggcagcgggtgagggcctgctccccagcccgacccccagggta

SEQ ID NO: 52386 - DNA, 1050 bp, Homo sapiens
agtgatgggcatgacgtgcccaaggtcaggcagtgagaggcagacttgatagcaccagatgtggctaacactgcatcaggtaaggctccgagcacttgattcgctgatttagtcctcacagcagtcctaagatttggtattattatcctcattttatagacaggaaaactgaaacacagggagatgaatttgcttcctgtacacaactcaggagtggcagagccaggattccagtccaggcagtttggcttcagggtcttcacagagcttcccagggcccacccttcaccagtggggcacgtggctggcccagagcaagcccctcagccccaggctgaggttttgagcacctgcttggcactagggtttctctgctaccgtgtggcctcttcttgtggccatggttaacggaggggacaggattgccctgggtggaccccagggaaccgtggggccagggccctctcctcccacccaccagcctgcacaccctccccaggtcctgtatcacctctttgaggagtttgccaactacgaacacgtgggcatcgtggacatcttcctcggcttcctgagcttcttcgtggtggccctgggcggggtgcttgtgggcgtggtctacggggtcatcgcagccttcacctcccgatttacctcccacatccgggtcatcgagccgctcttcgtcttcctctacagctacatggcctacttgtcagccgagctcttccacctgtcaggcatcatggcgtgagtctgcgtgcagcaggcagtgggcttggcggggtgggggcgggggctgccagcttggattccccaggctcgtaggttcacggagctcccagggcccagccttgagctccagggatgagacatgaactccaggctccagacctgcttggtagccatttaaatggccaagggcatcagtggcttcctagaagaggagcacttctgcagcgccccctggggtccaggaatcgggagagggcatttcaggctatgagcagatgaagcaagaatgacctgcatgaaggcaagcccagggta

SEQ ID NO: 52387 - DNA, 1034 bp, Homo sapiens
gtgggatctgggtgttggggttcaggtgagcactgctgtggagcttggggcatggttgcatcaagcaggtaacagacccagccatttgtggacccatggtcatgtctcccaaaggcagtggcagcggtggtagtgattgctggtgttcattgggtgcttcctgtctgaatgtgtattgcctcatttttatttatttatttagagacagagtctcctgtcacacagacagtgtcactcaggagtgcagtagcacaatcatagctcactgcaccctcaaactcctcaaatgatcatcccctcttagcctcccaagtagctgggactgcaggtgctggccatcacacccagctaatttatttatttatttatttatttattttgtagatatggggtctcattatgttgcctgggctggtctcaagctcccgggcacaagcgatgctccctctttggcctcccaaagtgctgagattacaggcgtgagccactgtgtctggcctatgttgcctcatttaatctatacagtaactccatgaggttgacacagttatattccagtttttttgcgatgaggaaactgaggaacggagaggttacataagcctgatatatgatatagctgaggttcaaatccgtagtctgagtccaaagcccaagtgcttaccactgtgttactctgtttctctatagttccaggggtaatagcaccaggccagaaaggaggactttcccctctgtgccgactccatgggcccatgtggtagaccatgaggacccatgaatcccctcaggccaggaatgagtttagcccacggctgagtacgcacctgctaagaggctgtctgccgctggagccctgtcctatcccccagacagctggggccaggccgcaccaggcctggccagtgctctgcatctccccttgctgcctggcccaagtcaggtctttctggagctcttggcataggtgtgagtgccccatttcccagagagtaaagccagaggctgaccctgagctgcctggtctcaggtct

SEQ ID NO: 52388 - DNA, 1104 bp, Homo sapiens
ccattttacaggcgaggaagcggaggctcagagagttaacagagcagccctctgagacccagcctgtgcacctctcaccaactgcgctcctcatccccggcccatccccaaccttctattctcctggctcctccgaaagcccatggcctcccgttctctcgccctccgcaggtttccatgtgatccccactatctcaagcatcgtcccggagagctgcctgctgatcgtggtggggctgctggtggggggcctgatcaagggtgtaggcgagacaccccccttcctgcagtccgacgtcttcttcctcttcctgctgccgcccatcatcctggatgcgggctacttcctgccactgcggcagttcacagaaaacctgggcaccatcctgatctttgccgtggtgggcacgctgtggaacgccttcttcctgggcggcctcatgtacgccgtgtgcctggtgggcggtgagcagatcaacaacatcggcctcctggacaacctgctcttcggcagcatcatctcggccgtggaccccgtggcggttctggctgtctttgaggaaattcacatcaatgagctgctgcacatccttgtttttggggagtccttgctcaatgacgccgtcactgtggtgaggaggccaggggccatgcccatgtccaaacggtacaaacccaaatccaggcccaccagtgaatccctcatccacccgctaataacagtaataaaaacagctgaggcacattcccgcttcccgtatgccaggcaccatgctgagcccttcggcatggattatctcatttaagtcctcatggctgccttaagaggtgcttattattctcattttccaggggagacacaggcccaaagaagttaaataacctgttggagtatgaaccagtttgtgattgaaccaggtctgactgactccagggcctaagctcttggttttgctaggttatatgctccctccttgacttgacttgctttttgttttttaagagacagggtcttgccctgtcttctaggctggtgaactggtacggtcataactcactgcagcctcaaatacctgggcctgagatcctcctgcctcagccttc

SEQ ID NO: 52389 - DNA, 1113 bp, Homo sapiens
cttgtggtgcagagcagccgcagggggctgggagcctccatcaattggaagtttggtgaggtgtctgctcagcaagagtgtgtgtgtgtgtgtgtgtgtgtgtgtgtgtgtgtgtgtgtgttcgttccagctaccacctacactagatagaatgaaaaacacttctcccatcccccagcctcttctaaaaggagcgccaactctgaactgtgtcagagggtttggcctgtggctgtgcttggagatgttgaattccacactttcgtgcctccttgttctgggaggactggacgtcctcgaagaaggctgtgtggcttggagtgtcacagactgctggggtagaactggacatgtgatcattgacaggtcactggctgtctctgtctccatttccctgactatataatggagaatttagatgctctccaagatccattccagctcttacgactctggttcttactctaactgcctcttcccatccctgatttcaccctggtgacatcactgctgctgcatgtttgggccctgaaagttttgcctcatctcttggcatcctgggatcttgcctccatgcagggcttttgtcagggtaccaggggccgcagccatccttctgtgcccctttcaccacaccgggtgtcagcaagcatcctgctctttgtggggactctgcagggatgcagagtgagcgcagttggtggagtcagggcgttaggagagggacaagccagcgcaggtccaggggctgcttcccacttccctgagccgttgctcctgaaggagcctcctcttgatgacagaatcccttcctcccccagccctagaagtgctttccaataatgtgccacctacccacaggcagggagccaaaagtggatctcagacctttctcctcagcctggcccggcccggccctcccctcaggcccagagagcccatcagggcctagagctccttcagctcactgagcgccagagacaaaacaggaaagccagggaaaccagctccaggaacatggctccagccccaggtactctggagctggctgaaggagaaggaggtcgctgtgctgtagtcaggaggcccgggacccagtcctggttggcctgg

SEQ ID NO: 52390 - DNA, 1046 bp, Homo sapiens
ctgaggtcaggagtttgagaccagcctggccaacatggcgaaacccctcctctattaaaaatacaaaaattagccaggcgccatggtgggtgcctgtaatcccagcccctggagaggttaaggcaggagaatcacttgaacccgggaggcagacgctgtagtgagccgaaatcgcgccactgtacaacaagagtgagactccgcccccccaaaacaaaacaaaacaaaacaaaacaaaaaaaacctcccatccccacagcagaaactcaatgaataatactttttttttttgaggtggagtcttgctctgtcaccaggctggagtgcagtggtgcaatcttggctcactgcaaccttcccctcctggctgagttaacttaggagagcttcctggagagggcagcctttgaagataggaaggatttcatgaagtctttactaggccactagagtagaagcagtgggagacttcctggagaagagctcatggaaagaaaaacctaccgctggccctttgggaactgctttgggcctctttagtcctaggctcacacgccccttagaaacaaagtaagaataaagccagggataatacagtgagtggccaagaacacagactctggagccagactacctgggtttgaatcccagttaccagccatgtgactttgatcaagttgcttaacctttgtgtgcttcagtttcctcatctgtaaaataaggggatggtaattgtgacttcccagaactatggtggagagcaaatgggttaagagtgtgccgctgtaaactgtagagtgctgggctttcattgggaagtattacctttcattgctgcagttgagactggttgctggggcagttgaagagggagttaaagaaatggaatcattgtgcaactaggaatcccttgggacctggccgagttgcagccccagagcagtcctcaggcctggaagtagggcgacagagccctcagtgtgcccctgggtccctggtgacctggcactatgggccaaagagacccctcttcccagcactcccct

SEQ ID NO: 52391 - DNA, 1053 bp, Homo sapiens
tgtaacccagtgccagggttgctgaggctgtgatcctctatcacaacatgcctgcctccggaacagcctctcttgccaggtctctaaggcagttgctgctggctcaatcgctgcttattactccaggggccgcccaggccccccagcctgcctgacctctcttttctcagtcgtttcagtgcacaaggtgctcctgtgtctagtccctgttctcacttgtttacagacaagaaaatggaggttattccatggtatagtgatttacgcaaagctcatggttactaaagggcagagtggggtctggacctggggttttggcctccttgcacggtcttctcttttccatgactcagatagtccagtgtatgctgcttgtgttttctgacagctttttacctgctttcccatccagacctgatgttcccagagggtgagaccctttctctccaacatagtaggaccccctgaaatgtggattgaaacaagcaagaaatagaagtgctgtttggaagaatgatggggaaaaacacagagagagactgattgcccgggtatggggaaggatgcttgcccaggtacttggaacagatttatttatggctgtttttgtgggggaggcatatttattgcagacttgaattctcttcctggtgatcctgacaagctgttttctttgaagcagcatggcccaaagaactagcagttcagagaactgggttctaataatgaccctgccacttcccagctaggtagccttggacaagttacctctctgaacctggatttcttcatctgtcaaattgggggtcaggatgtgagatgaaatgagagggggtgtgtataagccccctgcacagagccttgcatcagattctccaagtgtccagtgtttgtctcctgggtgctggagagtttatcttttttttttgaaatggaattttgctctattgcccaggctggagtgccatggtgtgatctcggctcactgcaacctctgcctaacaggttcaagtgattctcctgcctcagcctcctgagtagctgtgattagag

SEQ ID NO: 52392 - DNA, 1224 bp, Homo sapiens
ggaaaggcactttagaaaatgtccagggctcaggccgggcgcggtagctcatgcctgtaatcctagcactttgggaggctgaggtgggtaggtcacgaggtcaggagttcaagaccagcctggccaagatggtgaaactccgtctctactaaaaatacaaaaattagcagggtgtggtggcaggcacctgtaattccagctactcgggaggctgcggcaggagaattgcttgaactggggcagcagaggttgcagtgagccgagatcgcgccactgcactccagcctaggcaacagactgagattctgtcccaaaaaaaaaaaaaaaaattaccagggctccagttcttctctccccttccctagctgagggacttccaggcagtgaagtatgcccaacatcctctggtctaagaaggcagtggagtggccatttggatggggcgggagatgctgacccaatagggcacatagcacccttcccgtcctaactacctctaaacctgggcctcagttccctgctcccaccaggctcactcccatccccaagaagtcaagccaggaccccactccctcacctcttagtcagatgaagtcctggctttgagtagtctcttacacttcttctagctcagtgtttgggtctcctcagcttcaggaaaataaagagggggcccccatacttatgagattacaacctaggttgacgtcaagaatcaggaaatgggccaggtgtgatggctcatgcctgtaatcacagcactttgggaggccaagcacaggtgggtcgcttgaggtcaggagtttgagaccagcctggccaacatgatgaaaccacatctctactaaaaaatacagaaattagccgggcgtggtggtgcatgcctgtaatcccagctgctggggaggctggggcacaagaatcgcttgaacccaggagacggaggttgcagtgagctgagatcacaccactgcactccagcctgggcaagagagtgagactccgtctcaaaaaaaaaaaaagaatcaggaaacaaaaccctgacgggcttgggctaggcctttgcctcacccaccctgctccctcccaggaagcatttggcatgataagatttccatggtacggggccaggtgggtcccactctcccgggtgtttagctaccacgtcacagtgcagtaccaggtaccaggcagtggaaatggctcctggtgctccagcgtccg

SEQ ID NO: 52393 - DNA, 1134 bp, Homo sapiens
aaaaaaaaaaaacaatgagtgtgcttagctcacatagaggggagaactggagaagggcacagagatgtgaatgacacagagccacagatcatgcagaaccattgacctttgcttctaaaactcattgggatgtttccaacccttccacctcacccccaaacacgcctcactcacctgttttgctgggcagagaagctaactgcacctgtggggcactgagcacctgtgatggctgtcgccctggtataggcagtgaggacagagctacctaccacttactgagaccctgccagtgcctggctttgtgctcagggcttcgcatagtgcatcattgccttctgcactatgtgacggccccgaagggtgcgagtcatggtatctagctttatttagcttacagctactttaggaaagtgaaacagggaataattaagtgctcgaggattgctgtgctgttgcctcaaagaacaggagacctttaggaaggggagaaatgtggctggaatgaacatggagcagagatctttgtgcagacaccttcaccagacccttctaagagggagggaaggtgaccaatcaggcaatggccgtgacaccggttaaggctctttgcaggctctgagtactaggtatgggcaggcacctgttggggagcccagccagctgcaggaaaagtctgggtgaggagtcagtgagaaataagacagtaggtgggcggggctggatgaagcatctggaactccagaggggtgtagacttggccagggctcctcagactggtggcaaacacaaccacacctgtcaaaggcttgcctcttcactccatcttctccaacccgggtgattcccgggcctcctgaatggtcttgcggctccactgctgtctgcctgcaggcagctctccccagagcagccgcagggagctttgagacctgtaaaccagagcatggtgtttcccctgctgaaaacctttcaaatgcttcctgatgaacttgggagaaaatgcaaggaaagtgtggcccacccctttctccacttcatgccccactaccctttccctgttccagtcgcaccggccttcctgtgtccctaacgcacatctgccttgccaggcctgttcctccatacagctgt

SEQ ID NO: 52394 - DNA, 1052 bp, Homo sapiens
gagaaagcacaggtgggaaattgtgtggttcaggctggatgcttgggggaatcagaggagaggagagatgagggaagcttcttgaaggaggcggccttgagaggtgggccaggggtagaagaggaacatcattcaggaggggttgctaagggattctggtgtaggtgagaggatggactggatgatctgttgttctaggatctaggtttctaagattgtttctgagtccatgataaagtttgtggagctcccaaaatagtctgcagacagttgtatatatgtgattttatcaagggagaaggcccatgatagactcagattttttttttttttttttttttttacacagttgattgtcagtgtgtaagccacagattctgaaggttaagagcttctgccttttgtgtggtgggaacttgaagaagggtagaggactaactggtctgggatgaatccttggaggaggtggtacttaattctgggatgagtggggtttgcctgtgggactgcagaataccttccaggcaaggagaaggaccccagagtgagtaagctgtgtcctgagagaagggaaggggaaatgagtccttaaagtagagaaaaacttttctaagttggaaatcaaagcagatgcaacatgctccgcctacactgtgcagcagggaaggtactggcttctttatgccctctgggtctgctgggttgccatggtgagcccagctcacacacagtaggtgactcaggccacctgcccatttccctaaagcggctagggcccaggcacacctctgaggctctgctagtggggaagcaaccacctttgaggcagcagacgcaagagaaagcctctgaaggtggacaggctttgaggatgcagctaggaagccctgactggcctctgctgtttcctggactgaaggtccctgttctctgttctcactctgcttctaggaatgaaagtatagaatattctaattctagaatgttagagatggaaaaatccttatcatagcttgtaacccccaggcccaaagggaaatggagatgttttg

SEQ ID NO: 52395 - DNA, 1011 bp, Homo sapiens
tctagaactcctgacctcaggtgatccacccaccttggcctcccaaagtgcggagattaaaggcgtgagccaccacgcctggcctgttcactttcttatctgtgcctggcacagagtaaaggctccataaatatttggggaaggaatacatgaatgaatatgtgattgacttcagtgtaaagataggatccctgcaaagccctggggcagacaagaaaccagtttgactgctcagagaggagggagagcaaaggttgcagaggctccttggcaccagactgccaagccaaggagtttaactgagctcgctgggagcgacactcacagaatgatgccttaggcgccagccagtgtttaagtggtgctgccttggccacctccctcggcttggctctaatggagggtctgcaagggcatcttctctgggccgggtggggtctctctgggaagatctggatctgtttggtctgccctcaatttgtgtaagtaaaagtaagataccagagcttccttggggagctgccgagagccctaattgaattaagcttttcctgggaagattcctcaagccgtaaactgcactgtgactgtgaattaatgagaccagtggctttaaaccatacaagaaggcaatcttgttaatttatagttgtacctggacagatttacttatggcttctctttgctttaatgtgtgttgggaatgggtgggctgggccagaatctcctttctatggcagatttatttttataatatgaataaataaaacatgtcaatggtaaaaacaaaacaacaaaaataaaacccaacagtacagagggtattgaggtgaaagggaaaagtccccctcattacttctctgaccacccccactgtcatacattccagaggttaccactgttaactgtcttgtccatcttttttagaaattctccatgtatatattgagtatgtgagtgtgtgtgcatgcaaggcaaatttagttttcataaagccattgcataaaggaa

SEQ ID NO: 52396 - DNA, 1250 bp, Homo sapiens
ttttgtttatttttgagacaggatttcgctctgtctcccaggctggagtgcagtggcgcaaagacggctcactgcagcttcaacctccctggctccaggcaatccccccacctcagcctcctgagtagctgggaccacaggtacaggtcaccacatccagctaagctgccacttattcatatctagtttagaggttgtgaaaggtacttgcacagctagaaaacattggggtttaagcccagatttgtctgacttcagagcctgtgttcttttcatcctcatgccctgattccaagggccttttcagtttagaaattcaatttttcccataatcattttgaattgggggagatttaaagactttagtattttgagccttggctgctttctgtggatcacttcttgggtttggggaaaaagctgacccactccaagtcccactgtgaagcaaataacctttctcagaggtggcagcatgcagaaaaatacaggagtgacggggaactagagctgggggcctgaggctgtctctgggaatgccagcccatacacagcctcctttcctcctcaccgcctctcccacctgccccctttcctcctgaggcagggagagaaggctcgctcagcacacccaggacctgggttattcctgagtcatccatcgcctgtgtgggcctcattttgcagcactcgctccccctgcaaatgtctgagtcaggcatgtctccccaaggttgtctgcacacactgcactgggccaaactgtctctttagatgccgataaacatcaactgatactttaaagcagcccgtgattatatgttggtattttaatcttatgggctaatctaattttaactgaactaagttttgggttgggcctggatcagtgggctgcccgccttccctgggatcatgctgacttcattttcttccccctaaagctcatctaatatacagagccgattttggggtctattaggccagacctgagccctgagtttttatactacttgccaagaatccagagttccccccaaattaccccagcaaattctttcctgaaaagatatgtccttaagcagttctaactgagattcaggatgaaaagctctgttccttcccaggcccccttccctgtcccttgggaagcacttacccctaagcccagactggccttgccacagtgctgagcctgtttgagaccaggccacagaaggcggaggagtgatatcacagctgtgtgttag

SEQ ID NO: 52397 - DNA, 1259 bp, Homo sapiens
agaagcccagataggactctaaaaaggaagcgatgacctttttctctttgggaaaatagcagactgactgcagaacagtgggagggaggtcagctggggactgggaggaaggcttcaggtaggacatgtgtctctaggagtgccaaggcacttagagggcttagttggtcagattgcccagacttcattcagctgagcaccctcgaagtttgcctttcctctccttccaagccagccccatggcgtccagccctggtacaaaggaaagacgtagtcagaagccctgggttctgctcctgatgctgcctctcagtacctgtgtgaccatgaaccttgaggttcatgcacctcattctctgaacctgacttgcctcatccttaagaccaacgtagaggctgaacgtgggaatgcctggtagagtgcccagctcactgtagtaactttcagggccgtgcagattcttccccttttgggaggtcttcccagcccacagcagtcactttctctttctctcccaaacccttttcccttattgtttatccataacagtggcattaggccttgcctgccctgtgacatctcctgtgttgaacgggtgtgtgtgttttaataatagttgccacttagtatctacagagtagtgtcaggcactttataaaagcaatcttatttaatccctactcaaatcacatgagataaaagctgtctctgttttgcagatgaggaaatggctcagagaggttatcttcagtgatgtcaaattgctatttattgtctgttcgagtcttggcatagcctgctagaggggtgcagctgcatctcctgcctctggcattcccgcagcagatgcacatggccctgcactgagaagcgcccagctcactgcacctgcactcaggaattgtaggactccctctaggagttgggcacatgtcgttggtgggagccctgtccctgccttgagaaagctgtaggtgttctgtgtccagctgtgcacctgtcctttgtttttgtgagtcttcttggatgcacctgaatcctgcattcaggaggcctatcccttgttctctgctagcaaccctgcctgctatctctcttccggtgccctctcagccatcagaccagagcttgcttcttccctgcttgggcagggaagtgccaggtaaagggtggtctcctttagccacaaggggtggctgaccttatgacctcccgcctctgagcagaaaggtgacaggctgcttttggttaccctcag

SEQ ID NO: 52398 - DNA, 1061 bp, Homo sapiens
caggaagtgttcaatgagtgacagctgcccctgttaatattttaaccacctacagcaaatgcatccctacctcagcctcctacaaccttcctctgagctgaaggattacaaatctctcaaacctaggctgccaccaatgtccttccttagggtatcagggtttccatgtgtcctatactgttcacttgagctggtcatggcgggagggaagatgacaccagctgccttgtagggataagggtggggggctgaggccatgctccctctgcactctcagatacccaagagcctgggagctgattttggggtcttgcctattctctcaacacccctgcgtgggtaggagttccgttggagccctcattctgtcatctatggcagctgcttcccttgcaggttacccctcctataagaatagaaagtgctttgcagttctccttcctaccctaaccatggagcagagcctcgggtagactcttgcagagactggggtgggaggagcagggtgggagctgaagttctagaatagttgcttctgggttctagtctacctctgactcagtgggtgacattaggtaagtcaccttccctctctggaccttttttctctccccagcagtcaggaattcttgcttgtccttggtggggaggggccagtggtgtgaagaggatttaggctattgggaaaactgtgggaatgactccaagccttaggagttaggtgcattccccaccccacattgtgctgtggaccccgcatgaactctgctttgttccatgttcacctgactcccaggctagtacttattccagaggagagcctcactgtaactcagctcaccactggcatctcctgcaattgtttacccatgttcctgacccagaatgcctggcagaggcccgggagcccataaagcaggtattcatcttgtctcctgaccagggacacaaaaggcttcttttgtccctttatatcttatagctttttttggttttggtctttgcaaggcgaatcctgccatctcctctgtagattaagtctgtgaataggggagatgggg

SEQ ID NO: 52399 - DNA, 1038 bp, Homo sapiens
aacagacaacttatttgctctcagagtattggtctccctgctaggcctgagcactctgttctgctgagtgattgggggagcttactggagcctacattgcccagaagtccctgaaagtggtgttcagggggactttgacaactgcctttgcattttcagcttgcccccagctggctgtggaaggcatgaggtcctgggactctgctgtcccctctgcctgagatttgggtttgggaatttggcaggaaaccttccagctctcccaaggacatgcaggagctgagcggtgctgccgggctggtgtgaggcaggctctgggacatgcagcgggagggaagtggtgcctctaatttgacagatccaggagctgggttcctggtgcagggctcttgtgccaagctggtcacagtagcagagccttacatggaactaagccatcagcacctataccttgatggcagttagcttcctggagagaaatcaaggactggacaaggggaaccatgtgtactgattctgacataaatgcatgaccttgaatagctgaggcctttttctgcaggtctccctcacctgtgaaatggttaagactctcaatttgaccacaccaattgagtcatgaaatgtcgtctgatttgctgtaagaagctgaagtgacagtgatgtcatttgactgtgtgagaccaggaggagacctcacaagtgcaatctataaattgcctcctgtccccgatcccctcacctgcccaccacacctggcattacattagggcattcagggctggcagacacactttgagtgtcagtggctgctggtgggatgacagcatgactgcagagaccccactctaggcagtcagaagtttgtccctgcaggcctggtatctctagtgctaatgaggtcagcttggcctggcctgctttgtcaccacccaagtgctgtgcccgggaccctgggcagctggagagcagagatggtgtcatggcaacaatatcagtctagaagtcaggaaaacctggcttctcttcctacctccc

SEQ ID NO: 52400 - DNA, 1619 bp, Homo sapiens
gttgctgctggcccaccgcgagccgcccccagcccgcgccgaggcgccttcccgccaggccgcctgccttccgcctctttccatttccccggaatctcagcccggcgcgcctggacccctgcccctctctgggtggagaagctcccggccgcttcccggtttcactccttctcagcctgggctcccagccccctctctccttttcctggactggctctcacccccttcggtccccttcctttagctcaggctccctaccccttcctttagcccacagcccagagtcccagctcctcagtcactttcctcagccaaaggtcccagccttccttcttcctttcctttgcactatccctatcctgccccttcctctatccctagggctcagtttcccacatccgtcctcccccttcccaggcccggagttccagaccttttggtctcctttcgtggtcgttcctgggtccttgccccctttccccactttggagttccagattgcaaacccagcctccctccacccccagaaaattgcttccatggaaatgcctctctaaaacatgaacttttcctagagactacgccagtctctcttcccacttgctgaccctttgctacctatgtgcccggttttactctcatttgggtaaggtcgaggctggctctggaagcagcaccatggttctgcggtctggcatctgtggcctctctccacatcggatcttcccttccttactcgtggtggttgctttggtggggctgctgcctgttctcaggagccatggcctccagctcagcccaactgccagcaccattcgaagctcagagccaccacgagaacgctcgattggggatgtcaccaccgctccaccggaggtcaccccagagagccgccctgttaatcattccgtcactgatcatggcatgaagccgcgcaaggcctttccagtcctgggcatcgactacacacacgtgcgcacccccttcgagatctccctctggatccttctggcctgcctcatgaagataggtaagtcccgtttgctccgatgctgcggccgccaccagactggtgagcttcttgcctcatctcgcaccatttgaggctgtccaggagtaaggatctgaactacccccataaagtaggcagtctccatcctgccaccttggtccttctcaggctccagttctgtggcttctgatctgtgatctgaggcttcccaagattggagccagcactgtgcacagaagagagcaggattagagaatgggatgcctctgatcctaggtcccttcagtaaggcttccacgactggcaagtctcctctggctgggccagacccccaggggagccaggcaccccgctgtgtgtgagacagaaaggagtgtcttctggcgagtggcacattctgctctgtcaacagcaaccagtgcaatttatgacaggcttcactggagcgtgttccaggatggagtatatttctacttggcctgcttgaggagtttaagcatagtggagacctgggcacaggaaacttacaagtgtggtggaacacaggggatccccatattcccacctttccttcatctccagaatgttatctgtcagctttgcttgt

SEQ ID NO: 52401 - DNA, 1027 bp, Homo sapiens
acatgccacacctggtaagggctggcaccattccaccgacccagcacagagacctcttgggcagggagttgcagggtggagccttatgcaaaattccacaagttctaggttgagtcatttcttccaccacacccactctgctcactctctcctcccccagtgagataagtccagtacatcggtggaggaagggggctcagcagcagaagatggggaagacggggcttcaaggctaaaccagaatattgtgccaccaggagaattgtcaattctctcttcaacgagccttcttgaaaccacacatatgcccaggtcagaagctgggaaaaggaagttggatagaaaaaggagttgaaggggaataaatgtatttgtgtagttttttcctgccagcaatagcagcaatgagagttcaaggctagaattaattagactctcacaccccaattaagccagttttctccatcctggttgttaacaaaaggctaacattattaaacaatctgttctgtgccaggcactgtatgtataacttcatttgttccttatggcaaatttgtattagtatacccattttataaatgagaaaactgaggcttggagaaggtaatgatgtgtccaggtttacgcaactagtatgtgatggagctggcaaagagcaaaaccaattcaagtcttcagaagactgcatgggtttaaaagtgctctgggggaatttcatctttcaggggagaaggaaatggttttatagtaaaatccttattcctttcagggtattcagtgcctatttctgacccctgccgtgactggagtggtcacagcatggagagaatctctgacctcaaagccatgcccttctttttgcccagaagggtgcgtcgccatatctgcatgtgtccctcctcacttcattcaggtctctgcctaaaaatcagagaagccttctctgatcaccctatccaaatgacaacctccatgtgtagcctcataatcagtctaatttgtcttcatagcacctaccacgcct

SEQ ID NO: 52402 - DNA, 1121 bp, Homo sapiens
gtcttgaactcctgacctcaggtgatcctcccgcctcggcctcccgaagtgctgggattacaggcgtgagccaccgcacccagccaggaggagacttttaaaatgaaaattaagatacagctccacccaaagcactgtcacaaagtcctggttctgtgaatgtagagtgtgacaggtggtcaggaaaagccctgcgacatcttctagctgtgtcagcactgaagtgatgcccacatcttacacatggaaagtagatcggagtgggatctgttagccagatcactcacagtaagggaatggtccgctattacaagggtttctatcctctatgacaaagattttaatttaggaagagaagatgcagggttcatagtgagccacaaggtggcactgtgagaggagggcacacaaagtaccgaattagaacctctggacgtgaaggattagaagagattttacagcagagaaatacaaagtaaacgcctccttttacagaagagatatgaggtccagagaagttatccaagttgtagagttttgtggttaagccagtaccagagacccaggtctgtctgtttctaagtgtggtgcacttaacctgtaatgctcaccaaatcacatctacagattcccacccattgcatggtgtgatcttactcaagtcactgatgtatttctgggtctcagtcttcctgaccatagaatgtaggactagtctagatctggttttctttttctttttccttttttttgagacggagttttgctcttgttgcccagactggagtacaatgacgtgatctcagctcactgcaacctccgcctcctgggttcaagcgatttttctgcctcagcctcccgagtagttgggactatgggcgcatgtcaccacgcccagctaatttttgtattattaatagagacgggggtttcaccatattggccacgctggtctcgaactcctgacctcaggtgatgtgcccacctcggtttcccaaagtgctgggattacaggcgtgagccaccgcgcctggcctcatttttatatttttctttttttgtttgagatggagtctcactctgtcacccaggctagagtgcagtggcatgatcttggttca

SEQ ID NO: 52403 - DNA, 1951 bp, Homo sapiens
aaaccccatctctactaacaatacaaaattagctcagcatggtggtgcaggcctgtaatcccagctacttgggaggctgaggcaggagaatcatttgaacctgggaggtggaggttgctgtgagccgagattatactactgtactcccgcctgggtcagagaggaagatcctgcctcaaagtaaaataaaataaaatataataaaataaactggaggctgagagccccaaaatgaaaggacagagttggagtctgctcctctactcactgtttttttttttttttttgccagtctttgtcagaaaatatatttattattgatagtgagtgaagtaaagatgtgagtattcactatagaggttatatcagccaaggttgccttcatattgataaaaataccttatctcacttgtaatcataaacattattccagtagaagaggtacattttctctcctttttgtcttcttgcctgtataatcaccataataagttacaatgaaatagcttttatataatcaaaggagaaaagaaagagagacaaaaccaacatgccacagcctagacaattccatccagcactgctgcctccagatctgttttctggctttctccacccagcactgctgcctccagatctatgttttgtggctctctcctcaccctactccaattaatttagcccccgaccccatctactttgttagggtggaggttcaccaaatgatggggcttgttcagaagagaaacattttatggtcagtggaagttgagtagaaagtaccaaaatgtggagagggctgcccttctcttttaatcatcataagagggtttgctaatactgaagagtgtcctttaatgactgatccctgatcaaggctttggcccttcaaattgctgctgttcaaaatgtgaaatgattctgctgaatccattcttggtgtctctctttagtggtcttctcattagtggtcttctcttcaaatgggttgttttctcactaggaaaaacaatgttccatctctggaattaacgttgatggtgttttgctcattctgaaagtttttatcctcccttctcaagcatggccactctgggtggccagagtggagcatttgaaggtctggtgggtgttctcacggtaacactgaagaattttggcctgcagatcagcacagactggatgagactcataccgcttgaactttgcttccacctcttcagcagctttctgatattgttcagtggtgactctgaagaactctgagttcctcttctccagtctagccagctgttcgttgtagaatgcatcctgcttctttagcactcggtctttctcttccagctgcctagccaggtgctttgccttagcgcgttcctcctcgctagatatcctctcccgaaggatggctctggttaactgctcattggcagcaaccctctctcggtccagctctttggctgctttagtcgtttctcatcttcagattctttcttggcttgctccaatgccagctcctcagctactcttcttttcaattcttcatcagaaactgaggcaccataagcaccagaataccgctgagacttcgaaccagatggagaggattccttcattcgatcaatcacattttctgaaagccggatgcccttcaccacggtaatgttctcattctcgtccgcctcgaaggtgacccggcgggtgctggtggtcccacccatggctccggttcctgccccagcggagacctagcgcggaaccacgagcacttcggggcccccgcgcccacacgcgcatggaagggcctggattcttttcccgcacggcgggagcaaggccacggcccctactcactgtttcaatgaattatgtaccttggtatcctggacaaggtccccaatatgaagcaactatgttgtctgggtaagtacccagggttcatcatctcaca

SEQ ID NO: 52404 - DNA, 1074 bp, Homo sapiens
tctctctttctgtttttctctctctctttctgtgtgtgtgtgtgtgtgtgtgtgtgtgtgtgtgtgtgtgtgtccacagcagatgccttcagtggcccatcctggcaccaaacaactctgccaaggtgtttccaccaggcgactgtagcaccccgtatacaaagggcctctgcttgggaacgggctattcagtacccacttcaaagggtaaataggaagtgaggagatagaagagagactgcgaaccagcaggatccacttcttggactgaaagccgcagtgggacgcccctttgccagattggttgactttgcttggtggcttgggctctctctcctctgcgggtgtactcccagggtttctagaggagaggtacaggggcctgtaactaatgtcttaatagccgaatttgactgttttccccagagttcttttcttctgtgactttctttaacctcctgaagtactggtagagcaacgttatagtttttctctcaagttggtgattttaggagcctggtagggtggctgaagcttccccattcattccaaggatggggtagatgatctgggtaaagtggcagtgaagtcttccctttctaacaaagcctgaaaccgttttgagaagaaactattttgagggcagcttctgactcaaagacgttacgaaatccccacctaggacaccggtatgcccagtggtccctactaagcttttctgtgtcttttagagtcgttgagtggccagcttctgctcactgtactgaaggaactacttaatgctatttctgtcttgagttctggcttattcttccttgtgattcttatatctttagcgggattgaattgaatttttgctgttgagtgtaatagccagatcctctgtaacagaccagggagtaactagttgggctcctttgggccaagtctgagacttactgaggtttcttcattgtaggttgttgtatttcgttggcaggtgggaaatgaccttttccgtcatagtttgtgatcatgctgctttaaggctggagtcctgctctcctttccttttttgacctatatgggagcact

SEQ ID NO: 52405 - DNA, 1027 bp, Homo sapiens
taaaagttcagacgagctgccacagatgcctactgagcaagtgaaacttgatgtctttctagctttgccttgttctaactttaaggatatgctaccattatccttcatacttatacacaacctgccattttccgatgaagcataacatatttcttccgtgtttgttccaatgcttgttgggatgtgctactgttctccccacccacttcacccattccagaggtttttcaacactatggagcagggccagcccaccatgccacaaatgacaggcaagggccacttcactgggtgggctgttttaggggtggaattaggtcttgggagtcactttattatccatcctccaaagtttgatgatttttttcccccaggtaattaaatgtgtattttgtggacctgggcttggctggaatgctcaggggtcctgaagatcctattatagcttccttctgttgaaccattaagaaaagatggcgaaagtcaacataactagagacctcatccgtaggcagatcaaggtaagcagcccagacttctgcaccagatcatgagatcttttctttcccacagattgattttacagatgaaaaaactgaaatctatagtctgtgacttgcctaaagtcacgtagctagttagtggcagacccaggactagaatcaaggtctctttctctccatcttgtattgtctaagaacatggatttcatggagactctgtccacatacttgtgcctgggctgctgagattaatgcaggctggcaagggaggggagctgtcaatgtgttgtgcagatacatacacatccttgtgttgggcaggtggtgcacaagagcaaatataacttcttcatgttgctccagctgccaagttgtatatgtaagagatcctgggagagtattagtcccagttcagcttgtattctctttgaggctctcctgtgctaaagcctgtcctctgcagtttgtatgtagaagacactctgatacctgtgagataaatggatgactgggcagtcaagttc

SEQ ID NO: 52406 - DNA, 1080 bp, Homo sapiens
gtactgggattacaggcataagccaccatgcccagcccctgaatccttttagctttgtccatttgtggaagttttttgtgtgtgatttcattagactgagtggtcctcaaagacaggggccatttcctagaggcatggaatcagcaggggttttttttccctttgtgtgcaatatgtgtcctaaagatgatgcccaccctgtccaacctaaatatggaactattccccattgtttccaatttttcttctttcctttttaaaaattttttgctttctttaaaaaaaaaaatgaacggcacaacttagtgcttaattatatactactgtcttctattcttctctaatccttgccccagaataatacaaagtcctgtaggccagttccttgttgtcttctttagctcctgtggtgcccaggaaagagctggatatataataggcacataataaatcatatttaattgaatcaatgaaatcacgaatttgtttctgtcccctaggagcggggtgccctgagctttgagcggcgctaccatgtcactgacccctttatccggcggctgggcctggaagcagagctgcaggtaagagatccagtttgcaccttagatgcagatggcctgctgtccattctctgcctgcagaaatcctcttggccttatcaaggcataaacaagtgtttctctgcaggccatatctgacagttacttctccttcagtagacaactaaatctgaatcaagatcagcaattgacatagtcacatataaattattatttttttattttattttattttttgagatgaagtctcgctctgtcacccagtctggagtgcggtggcacgatctctgcttactgcaagctctgcctcccgggttcacaccattctcctgcctcagcctcccgagtagctgggactacaggcgcccatcaccatgcccagctaatttttttgtatttttagtagagacggggtttcaccatgttagccaggatggtctcgatctcctgacctcgtgatccgcccgccttggactcccactgggattacaggcgtgagccaccgcgcctggcctta

SEQ ID NO: 52407 - DNA, 1068 bp, Homo sapiens
ggtggtagccaaacccaggagatgactgttttggatgaatcgtgagttgattcacctctctgtccaacaaacagttgggtagaactcagtggtcctcatccaggctgtaggctaagagctcagcttcactcctgcattcttgctaagagaggttggtgatttcctaatccatatgtgccctcagcatgttctctgagctcctactatgtgctaggtactaggaacacaaagttctatcactctgagttcctgtgctccagaggagcctctccagacagtgggtaaagtggtggacatagttcagcattaaagagataggaagcagtgagtcttgtgaatggtcaggtaaagggctgtgggcatcaagaaaagttgggtcgctttagctggggagcagggaagcatcagaaagacatggcgtctgaatgggctttaagtgtaggcaggcttagacaggagatgaaggagaggaggggcctgtgggggaaggacattccagggagatgaaatggtgtgaacaaaggcatgggggtgggggactgactgaagagcttgtttgcagaacagcaaatccatttggctggagcagagggttcggaaagggactggcaggagatgagtctgtgaggtagcctggggccggcctagggagagcttggaatgcagagcggtgacgttggcctcgattcagtgcatgatgggcagctactggagagttctgagcaggagagggatgtgccgagggctgtcctttcagggagattgatctggcagtgagtctaggaagggtgagccctggggccagcctgctctctacccccatccccacatgcctgccagtgacccctagaatgtcacattctgtcctgggccagtctccccagggctgccatctgctcctggatgcagtgggagctgtcaccctctggctcctggctggtctctggtctggctctccccaggagctcagaggggcaccttgcaggcagtaattgggtttccaaacagtgcctgctccttcgtcagagccactcatcctgacgcaggccacgccattgaagcagctct

SEQ ID NO: 52408 - DNA, 1013 bp, Homo sapiens
tctttaaaaataaaatattgggacaggcgcggtggctcatgcctgtaatcccagcactctgggaggcagtggagggtggatcggtaggtagttcgagaccaacctggccatcgtggcgaaacccgtctctactaaaaatacaaaaattagctgggcatagtggcacgtgcctgtaatcccagctactctggaagctgaggcaggagaatcgcctcaacccgggaagtggagtttgcagtgagccgagattgcaccactgcacttcagcatgggcaacacagtgaaactccgtctcaaaataaatagtgaaataaaatcttaggaaaatgtgcacattaattcattcagtgttcttctaacacatgtgctaagtgacccctgtgttcccagatagttctaggtgatgcgaatatacagtgatgaataaaggagatatggtctttagacttttgagagtttaagtcatagtggaaggagatagacagtaaacaagtaagctaataaaagagcacctgatagtgatgagtgctgtgaagaaaataaaatattagtgtgaaaataacaggggccgggcgtggtggctcaggcctgtaatcccagcactttgggaggcccaggcgggcgaatcacctgaggtcaggagttcaagacaagcctgaccaacatggagaaaccccatctctactaaaaatacaaaattagccggggtggtggcacatgcctgtaatcccagctactcaggaggccgaggcaggagaatcacttgaacccgggaggtggaggttgcggtgagccaagatcgtgcttttgcactccagcctggacaacaagagcaaaactccgtttcaaaaaaaaagaaaataactgggagggatactcaggaaatgtattggttttcttaaaacctgtcttgtgatcctaaactctctttagcctttcttattctcaaaaacaccatctgtggcgtggtcctctgcggagaatggtagcagcgtgaggtggaggcaccacaa

SEQ ID NO: 52409 - DNA, 1050 bp, Homo sapiens
aaggccccacctcctcataccatcaccttgagggttaagatttcaacatatgaacttggggacacagactttcagagcatagcacccccaatttcattccatatccccccaggatcccccatggcaccagccacctcaccctgtgtcacagttgactgccacataacacttgccccagatctggcttactgtacatctcagcacccagctcaggcccgggcacagggcaggcctcagaggacgtgcgtagagctgagggcacaaaggagccaagcaagtgtccagagcccttctctccccccaggtactggaagttggaccctgctcaggtctatgctagcgggcccaacgcatgggacacggctgtgcacgacgcctctgaggagtacaagcaccgcatggtaggtgggccagggcggcaccggcactccccaggtggggaccaggggggaggctcccctgcagcccatcctgaccagcccttctggtgcctccagcacaatctctgctgtgacaactgccactcgcacgtggcattggccctgaatctgatgcgctacaacaacagcaccaactggaatatggtgacgctctgcttcttctgcctgctctacgggaagtacgtcaggtgagctgccctcctgcctgcccacccacacactgcccagaggctgctctcccaaggatcctagaaagaccattcctagcgtccttcagtcagccaggacagttggaacagatgccagttggagccgtggtggttctagagtgacgagctgagggcctgatggagagggaggtggctgtgctgaagtccagctccacctgggccccaaatgcagctctggctcttgcctgctgtgagaccatgggcaactgccttggtctctcttagccacagctgtctctggtgaaatgcaggcaatgattccggctcctcagggaggcttctacggatccctgtgctccggtaaagtgagcagatagatcctctcataatgactgccccacaggtcccttcctaggcagagagattgagtgagtcgccca

SEQ ID NO: 52410 - DNA, 1240 bp, Homo sapiens
gtggctttggtgaccctgcttaagcattcccaccgtgtcccagctctgctctaggactgcctcccactgcggcccctcacctgacttcagggtatggggagggagggagccagtgctccaaggccagggggctttgctcatgagagatgtcaggcttcctggaggcatcaggctttgagccctgctggggtccaactgacctgggaccaggtgtcgcgcagagatgtgcctcattctgtgcctccttctgtgcctcctaccatgttccctttaactgtgcctcagtgtgggttagggaacaattttgttattgtattaagtttattcagttaattcacttgaggaactaaccagtttttactttctgtctagaatgatgtacatgtagtagagtaagccataatgctcccaaagtgccttgttttctctgatacaaacatatttataaggacatattcctgtgggttcttgggtgtgtttgccacatcaagattttagggaaggggggtatatgtgtagtagggatgccgtttgaaaacaggcactcttcccctgaggatgggaaaggagctcttcagttggagatctaggcagtgggttaagccagacccctaaagtgaccctttcctcttctgccctattcttctcagaccctcagaaagacatccaatttttttaaatccctgtagctccaagcctggtctcatttgcttccctgccaggctcatcgtgtgtataccacatttgtgccccactgacctgaaggttccatgtaactgtatacacatgaatacttaaatgccaacatttaaaataatttgataaagtctttgtagccactcagccacctctggtgtttgtggtattgttttaatgggacaagagattagaaggaaatgacactaacagccacaggtggtggccagagctcaggaggggctccagtgtgggtgggcctaaagggcaggaggcttttgggtgtggaaagtgcattgtgtgcagaggtggagaaggctggaaaccatttcagtttaggaggagacccaggttggaggacctgcagacccagatacccagtccccttctcaccatgagaaagggggtgtgctggggcctcaggagacaatctgctggcaactgtttgcatcaggcaggagaggagtacaggctgaatgctgatgctgcgcccaacatctggccggcatcttgtctgcctctcagacccaagcaacttacctta

SEQ ID NO: 52411 - DNA, 2670 bp, Homo sapiens
gaatgtggtggctgctccccacttcaaagccttatgagaagtcctcaccagcctgaaagtgtgtaaaccagaaaggacagcaggctgcctttcagacacacctgtgacatcagggccatcaatttcataaactcatcttcttctgcttttccataacaaccttctttttctctatcctttccaataccacttacccattggtggccactccctcttacccagttccagatggattccaaggctgaggacacgccttcctcacccttctgtctctttgccactaggttttcagctgcgcagggttgaggagcagcgggaacaagagaagcgggatgttgtgggcaatgacgtggccaccatcttgtctcgtcgcattgctgttgagtacagtgactcagaagatgactcctctgaatttgatgaggacgactggtccgattaactctttctgcctgctgcccaccttctttttctttccttcctacctgccttctttgatgccaaccccaacagacccgtagggggagaaaagggaggaaaaaagtaattttaaggggccaaagctttccctgaagcaaccaaagatatatccaagtgcttcctccaagtcaacatgtatttcctctccccattttcaggccctgtggggctcctgaggttcagtagctgggatgttccctctttccttcaagtgcctgttgcatattgaaaggaaggagaaatcccaaagcagattcctttgatcgggtttctgttggagatggggcttcccttaggagccatattcaactacagccttctaaaacctgtgccctcagccacttcgaatgccagccaccttctggttctaaaacggggagtggtctgaatgaacacagctgacccctttcccgcgcactgaaagggcagagtaggccgaagggtccaagggccagactgcctcaccctctgccctaatcagcagggtgggcctgccttttgctaagcgatctctatgcctgggatgccctttattccaggaggcatcaagcctctaaagaatgtctcacctcctctgcccaaaaatgatgcctttctgtaggctggtgttgttgcctccctcccaggatccctttggtgagtatggtgttcaggatgcaccaccaccacctctagataccttcaggcaacacagcccagttttaacctctagtatccatgaccaaactatccctgacacatgaggacaggggcctcttctggctgtcaggagcaaagcctgaagacttggagctgcaggactggaagaacagtggagccccgtgggtctcaccctttaaggatgctgaggcctagagatgggaagtgacttgctcaaggtcacacaattggatagtgacatagctagagcgcagagttcctgattccaagtcacctgtgctttctgggaccaaagaatgggcacctgctggagtccgggcagagctttctcagttgtattgctactccagacctcaccataggttggggtcccagtaggaaggctcagggtctgtgccagccctgtcggtgctgctcagaccttcatagcctctcttgtcattctttgttgccccttttctgtcaccagccaaccacatagccttgggaccagcctctctgggggaccagaagtagtgagagaaggaaggggataggcagctttgacaggtgctgctttcaattcctctgcaactcctcccccttttatttccccaatttaaacaaagattctgccaactgtggaaacttcagtccctcaggctggcagccatgccagtacctgcctgggggtggggggtgcctggcagccatgaagcaggctgaaaggcagaggggctccaggtcctgtttccagctcccctcactgcacatggtgaagctcgctccctccctccctcccttcccgcttttcccagagctaatacacaggtgctattattcagaaaaaaactggtcagctctagccaacagtgaggtttcttttcttctgccctaactattgtgtagcctcttatgctgaaatcggcttctgctggcttctccggctttcagagccctgaaacaaagagaaacaggatctgtccctacccagcacagcaaatggttgtagtaattgccaaagccctcataaagccctccggcttgaggagagagtgtatagtcatgggttctgcctctgtgcccttgctggccgcttctcctctgccttctttcctggaactcagggtgtggggactgagcctgtaggggacagcatgccgtcttgctgtggccactcccaagtgtgccctcttccctctttacacatcaggtgtctctggcacaggacttggcactaagctccatgctgagacaccaggctatgtgggcccccaccttgtttcccagcctgcaccttagaagccgaaggtgctttcatcagaaccctaaaatggtcgttgaaggcgcctgggccgcagcccagcagtagttggagaggcaggcagagggcagtggttctcccaaataggagacctggggcctggccaggccagggtttgggcctaatggctttgactaaattacccccatcctccttgcccggaaaagggagagctagagccactcactgtcattctgctctgaccttgaagggggcggtgttggcct

SEQ ID NO: 52412 - DNA, 1400 bp, Homo sapiens
cccgggttcatgccattctcttgccttagcttctcgagtagctgggactacaggcacccaccaccacgcccagctaattttttgtatttttagtagagacagggtttcaccatgttagccaggatggtctcgatctcctgacctcgtgatccgcccacctcggcctcccaaagtgctgggattacaggcatgagccaccatgcccagccttttccttagctttaactcatcatgaaatgaagtggtacaatctgctgtccatgatatagttagcagttaccttgcccagttgtctaggaacctagcatagagtcacttcctcttagtgcttctggttagtttcactgctgtgtcaaatctccagaaacaatgaaacaaagggaaaagggggatgaaactccaaattcgtccattttgatatttgtgcatgtccctggcagaggtgtacagtggaagtgttaggcagtaatgactgaaaagagatctgagaattgttcagattgcactgttttctccgttacttttgtcctttctgatgcctgataaatgagagctttgaaaggtgcacttttctccttgggtacttcttaattagaaattgagtatgttgaggacccctcggatggagacctaaagctgtgctgtcctccttctctcccctcattcttcttggccctagaaaccattaatcccaaatctccttctgcttcccaaatcacttcctgctggtggccctgtcagatgcagctaaggctggaaggtctgtggaaaattccaaaatggctgcttttctaaggagtagctgttagtgcagggtagatacaaaggtggaaaaagaaaaccttcagcttcacacatggcctgagaccttgcagctgcagccgagcaaatctgatcccaggagaggtgtagctttaatcctctttcaggcctgggtcaggagtctggtggcacattcatttcccatctctgcagattctcggattgagattcattctctctcaagatttccccacatgagcactgaagatgcattcacctaaatctatatcccactcaggtgtggtcagcctggcttgggtttcctgccctctccaatgctggtgaatgttaatagcctgagaaacagagcctagtgtgtgggtggtgtttgaatttttattccagttctttcttgcatgcacccttaaactggctccaggattaaactagcaactgccatggaccatccttcttagggaaggggagggagggtgccttccccttagagctggaaaggcagagggggccgaagagatgtctcagctagcctgtacctgatagaggaatctcaagtccacttcttgcaggtagttttactcaatctgtctatcctcctctactggtgggaagctcattac

SEQ ID NO: 52413 - DNA, 1136 bp, Homo sapiens
gcatgaatgtcgccctggttttttctctaaatacactgcatcatggctgtcagagaaccatgccagcccatgctgggtgtctaggaatgataaaaggaaagagttgagttgttcttgcttttagaaataactctaccatgaaaatcttgacttttaaaaatcttgacacttctgacacttgttcttcgtggattaagagctctgctttaaagagtgatgaagatggtgaaaggaaaaaatgaacctttttctctactgggaaatcagccctgagggtaccttcattaccttcacctcccagtaaagggggacattttgttccacggaccaatcctgttcagacaggcacttgtcataggttcaatgactctaaggccagaagcttatgtgttcagaatgccagctacccatgtgtgtcttctttttgtggagtaggaagatgaggatttgccttccattttcctgttgtccaggcggtttggagttggggcttcatggttagtctatctggacatgcctgttggtgaacctataaagagacgtgccaaggctccagggctccaggccttggggattttccacatcagagcatcttttgattcagttagttttctccaactctgttctccctgaggtctgttttagatgagttctttagaccccaacaatggtggaaagagggggaggtggagcagagcaggccagattttgctagctgatgcttggtgtatttgtgcttgtttgaagttttgttgttgttcacccagaacaaattcacccaaggcccagtgcactgagggacaggttttcatgagacaagccctagcacgctactttaatcgtcagctcatttggtttgataagagacctggcagaaagaccacatttactaccacatagcaccctgcattcatcctcagcttgattttgcaatccagtgcctccttggccttcgagctctccagaggcttgctgacctcaaaatcagtctgtgtgccagtcacgtgtttgcagctcactagcctctgagacttggcttcacatttgtcacaggacagactttgggattcaggtatatctgcacctgacactggggagagaatttaaaagaactgctgggtttgacaaggccaaca

SEQ ID NO: 52414 - DNA, 1002 bp, Homo sapiens
tagcaattagagcttttcaaaaatgtgaatgagttatccaaagaggaagtggggttcccgttgctggaggcatttgagtgtgggattgagcaaatgtttcacccggggatggtttggattagatggcctctgggtcacttcaaacccagtaattctgtaagttctgtagttattgtatgttgtctaggcagattatctcttagatacgcatccatgaagatgggtagaattttaatgaagaacttggaaaatgttctacaaagaccttcctgttccttttcattatagaaagaaaagaaagataatccaaatcgagggaatgtaaacccacgtaaaatcaagacacgtaaggaagagtgggagaaaatgaagatggggcaagaatttgtggagtccaaagaaaagctggggacttctgggtaggtaatgcctttgtactgttggtagcattctttgaaggggctggggacaacagtctgacagctctggtgtgacacctttcacaccccctgaagtctgtctctgtggcttagatcaataccactgttaatcagctactttaaagtgcatccatctggtgatgaaaatttgctaaataaatcaagagattcagcgatttaaatgaggtgattggagtggtctggaaaagaaagcccatggctcctagtgcccttactctgcgagatacacatctaagggccccagaggaaagattggaaagggaagaaaagtggtcttgggaatcctttgcctccagagcattgatttgaaggtcatgcctaagaactgggcatttcactctcagggctggggagggctaggcaagaaagctgttcacatcaccaaagcaacttttcagtcagcctttgtcagtcatgggagagaagctagccaagggactgaatgcagacctcatagacagtgtgggaaaggttgcttggccagtattgaggctatatatctctgtggagaaataagaggtgtcagtctgaccccatttcc

SEQ ID NO: 52415 - DNA, 1050 bp, Homo sapiens
catacacatgaactcccacatgtgcacacaggtttccggtgggtgggaagctactgatgctttctagagagtccttggggaactggtgggaaaagaggaaccagtggtagaaatcccctctgatgtaccaggaaatccgaatatcctcagggagatctctgtggccatgcagatcatcagaagtaatcaggatccctgctgctatcacctgtacttgccctgacaatgcacattcatctaccaggaattgaaagtaaggctaaggttcttaaaaagtctgataagtagagaggtgccattcgggggcattgaaatgctggtatgggagaggaggtatgcaatcgattcaaatgacttcttgattccttggtgtaaaaactgctaactggtaggtgtttggaatattggatttggttgggagctcatctgtctactgacagctacttgtcttcatttctatcccagggacgatggaaaagaggcactcaaattctacacagacccttcatacttctttgatctttggaaggagaagatgctgcaggacaccaaggatatcatgaaagagaagagaaagcatagggtgaggggaaaggggcctctgttctccacatcagtaggcacgattgtggagggggataaaaaggaagccagtgttatgtgaagtaatcatttcaagtggctgcttgcttggatgccaggtgaaactcttaaaaaaatgtgtccacaccaagcacaaccaagatgaaagtacaaatcataccaaaaatgtgtttgttccccccagtgctattaacaattgagtatattcaggctgagttttagaaattgacttttctattcaccatttatttctcttgcaatttgcacctgactctgctggacactcaagctaggctagtcccttctccactagttttgcagctcatttctcagagatcagcacaaggttctgcagtgtttgatttgcaacaggagcagtttaatgccttcgctacgggctgggcggggctagggtggggggatatatgtaggttttgaagattctcc

SEQ ID NO: 52416 - DNA, 1050 bp, Homo sapiens
tttcatataagccaggtccatcttggattccatccaaggaatttagttattatagaaccaaaaggactttgttacaaggcggtcctacagcatggatcatggatcccaggggcaacattctagcaaggctcccacttacttggaaaccactagattaccagatgtttgggtgtgttagtggggccagcctcttggcctggctgctctgggcccaaaggggtctttccaaagcttaaggagtaattcgcattcttccaaatgagcatcgttcactttgttttgaacatcctttggacatttccttctgtaaggacctactctgctgtgcctggacttgaaaaagaaggtagccttatagacaaagcccctctcctctagtggtttggtagttttgtcatcctgcaaaaaaccactgaagaggggcagaaggtgaatatttatcttgcttacacccatatatatctttggagcaggtaaaaagtaattacagatagctggaggcagatgtcttctatcagacatgtgtacactgcaaggtagagtgtgtgtgtgtgtgtacccacgtgaaattcaaggacaccagtcagattcagggagccttctcacacagatataaagtacatggcatctgtccttcattttacttgtaaaattatgtttgccccttggctttcaaagggaccagcatagcaggacagaggtttgactctgcagcctccgttattgagtctagttgggtttgggcagaggggttgtggggcagaaaggggtcatacaactgataatattgtagcgagtataacatagggtttgtgtggtgggattgcataaacaaatgatattaggagaattttattcttcagttaatggtatttttctttttagcatacagtgtcagaattagcgtggcctctcagttatctgaacttggcctaacagaaatgagtggtggtgtatctaactcaggagaagatttaatatagaaattattaatgtttgatttggaagtgctttctgtgttgtgataggattggagggtagggaatagaa

SEQ ID NO: 52417 - DNA, 1673 bp, Homo sapiens
acttggttcctgagatgtagatttgaaggattgtaacctagagcagactttgaaagttataggttacaagccgggcatggtggctagaacacctgtaatcccagcacttcgggaggccaaggtgggcggatcacttgaggccaggagtttgagaccagcctgggcaacctggcaaatccccatctctaccaaaaatacaaaaattagtttggcatggtggtgcgcatctgtaatcccagttactcgggaggctaatacatgagaatcgcttgagcccaggagatggaggttgcagtgagccgagatcacgccactgtactgcagcctgggtgacagagggaaactctgtctccaaaaaaagaaaaaaaaattataagttataaaacataaaggaaccttcccacctcttaaaagaagttgtatatctctgctatggcttgttgataagctcagggcccctcaaagataacacaactgatcatagttgttcactgtattttcaaggctccattgaggaactaatttcctatttttcatgttaattttagatacgtagaacgtcctctgaactcccaatctgtttttcagaaccgttttataaggtacttttacagaacagcaagaggctaagggctataggcaaatgtgtagtgtttattttatttggagtctcgctccgtcacccaggatggggtgcagtggctcggtcttggctcactgcaacctccgcctcccgaggtcaagcaattctcctgcctcaacctccccagtagctgggattataggtgcctgccagcacgcctgtctaatttttgtatttttagtagagacggggtttccccatgttgcccaggctggaaatgtgtagaaatattatcttttcttccaggcttaattttttgcattacacctttcagttttattcagcctgttttgagtctcatgactgttcacgtctgtcaagaagactctattagttatagaacatatgcaggcttcctaaactatgaagagtatttctctgtctctaagagcagtcatctgcatatagcccaaaccgtcttagggtatgtgtgtgtatatgtatgtgtttgggggttagggaacacgatctttagtagccagtttttgtgaccatttacgttacttctatgcactagtgacttggtttctttgctctttccaggtaaatatgcagaggacatttttggagagctctttactcaggcaaatacctttgcctctcgggtaagctcccttgctgagagggtcgaccgactacaggttaaagtcactcagctggatcccaaggaagaagaaggtaagaaagctgagctcagcatttgcaggctctgctgagcagttttgtagaattttttttccctgatttatttaaaaaaaaaaaaacgtgaggagagaaatcacagagacctatagagttctgctttgaaatcacacaagcctgagtgctggaaagaacctttttagctccaccacacccccatgcactcctttctcccattcccccaattccttctttctcaaatttcccctccctcaatcgtattttgctaccataaaagtacttggaagattcattcctcctaaggagaggcctgctagatctggccacatagtaaacctttgtgttgcctcattttgttcagtcgtga

SEQ ID NO: 52418 - DNA, 1059 bp, Homo sapiens
acctacctcagggatcatctcagttgatccagggcttagagaaacctagatggggcatcatgaagaagtgaaaccctgccagtgcctgtcttacacaaaggaacactgacagtagcacaacagcagtgcagctgacgaggaagcacatcaaggctgcagagacctcactgctttttaaaggcataatttctgcctctctctgtctctctctgagaaggccaaatgggtggaagtcaatcaatcacacactggttccttcttcataggacaaagaacatctagctaatgatgcttcttatttccacttactgaagttacgctctctctcagctatttttccagggtggtgttgatggatgccattgctcacactcccacttgtgatcagaccactcctatcttggggaagctgatctgagggccaaagtcaccttatgcccaaggaaacaagattttcttacattgtgggggctaactgatcctttattcatccaataaacttgtgttgaacatattttatgtaccagctgctgaggggatactcaacaagaataagaataagaggcaataataagaaattgtctctgccctccaggactcataatctacaaggggaggcagaaataaataattcctaagaggagagaatgggaagagagtgagaagggaacccacatttgttgattgcctactttatgccaggtttggataagatcttgacatagattatctcatttaatcttctcagtaatcctatgagattaggtggtggtattcccatttttcagataaagaaaataaggctcagaaaaataaggtaacttggccaggcacagtggctcatgcctgtaatcccagcactttgggaggctgaagggtgtggatcacttgaggtcaggagttctagaccagcctggccaacatggtgaaacccgtctctacaaaaaatacaaaaattagccaggtatgttgtcacacacctgtaatcccagctactcgggaggctaaggcacgagaatcgcttgaatccgggaggcggaggttgtagtaagctgagat

SEQ ID NO: 52419 - DNA, 1576 bp, Homo sapiens
aatgtgtaaaatttttactttatattctctcgttcagtcaatttacaaactaaacttaagagatactggcattagtagttagctatacttttttttttttttttgagacggagtcttgctcttgtcacccaggctggagtgcaatggcgcaatctcagctcactgcaacctctgctttccgggttcaagcaattttcctgcctcagcctcctcagtaactgggattacaggcacccgcgacacgcctggccaattttttgtatttttactaaagacagggtttcaccatcttggccaggctgctctcgaactcctggccttaggtgatccacctgcctcagcctcccaaagtgctgggattacaggcgtgagccaccatgcccggcctagtggttagctatacattaacagccatttaccaaggaaggactggaaaagttaatcctgatgtatatcaatcactattggcagcttgatttcattgtggagattatcaggtgacagtgttcttttttgatctttataattggtggcctagaatctgatctgtcctggttatgaacaccccagggataggatctgtaccgtccagtgtctgctgaatgggctgttttctaaccatgcctccttgcctctggagactcttgttggttggagcagtagttggcactttaatgtttctatgctgcctatgtacctcaggcagcagtcaccagtccataatttctaaacttacatagcagatcttctaatagcaaaccttaaaaagggcaagggagagaggacttaaaaatgaaagaaaaaaaaagatagggagaatgaagattttttttaaagctgttttagatcagggtaagaccaaaaaaaaaaaaaaaaaagattcacacagccctagtgtgcctggaatttgtggttgagtaatactttcctgttatttcttttttaggttgtttttcaccattcagaacattgcctgaagcaggtccaccatgccgttagtaacgaggaacatcgagccaaggcacctgtgccgtcagacgttgcctagcgttagaagcgagctggaatgcgtgaccaacatcaccctggcaaatgtcatccgacagctgggcagcctgagtgagtgcctcagagagcctgtgctttgccctcaggggtcgttggtgctctttatttagtttccttctcctcccgcgttcctatttctcccccatctgccttccctaggtaatgcgaaaatgtatcctccctctcctccccaaagagaggctcccttttggtgtagcttcttctcttcaaccttctttatctaccaccaccctctaggttccctcctccctccccctccacctgcttcaacagaaatctgtgggaagggtggcaggaagggctgcagcaaaaactgcagacggaatgacagagcagaattctgtgtgtgtaaagtgggaggttcacagagcagtatcttgggtcggggaatgtgcctgtaattacacgagctgttcgatgtagcctgactttgttgaagcctcaaatgtgccaatagtttttatctacccaacacccccaccccttt

SEQ ID NO: 52420 - DNA, 1029 bp, Homo sapiens
gctcttttctgacgcttttgataaagaaacatacattttatcacttagtgagtataactgtataaaactaaagagagcagccggtggggctgaggggctggactcacccctgcaactgccacctgtctagtttctcagttcatatttgctagctgtggtagggtgggcctttacatttctactttctccttctcagcctgtgaagaatttcccaattggtcttcttacttccagccttctgcccaaatataactcctgtgcttatgcagaatgatttgtctaaaatgcaaatgtgaccctgttgtccttccataattcagtggttccccaacatccagtgcactataccagtaaggtgctactgatgatagaggagcctttctcaactggagttccatgaaagaattaaatcttaatgtcattaggcattcattatatgtaatatattaacttttctccagtacgcgtagaatggtgctagttatgtacagtcttgaggggaattgagaaaactgtcactctaatcatcctttttgttctgtggttcagatgaggaatccagttatgaaagactggaagaaagagatagtatatgttcttcaggaggtccaggatcacagctggaagcagcctccaggaaaaacctgccaaattcctttgaaggctagagttttgtctttaaatttttagtgtaaatattgcattccaccatataatatgtctatggttaaaagtatttttaaatatttatcaatgaggggcccgggtatggtggcttacacctgtaatcccagcactttgggaggccaaggtgggaagattgcttgaggctaaaagttagagaccagcctggacagcatagcaaggccccatctctataaaagataataaattagccaggcatggtggcatgtgcctgtagtcctggctacttgtgaggctgaggtgggagcatcacttgagctcaggtgtttgaggttgcagtgagctatgatcatgccactgcactccaacctgggcaacagagtg

SEQ ID NO: 52421 - DNA, 1036 bp, Homo sapiens
agtgctgcttgcaagagccaagaaagaaaggttgcagtctagccccatcttctccatcgcatagtatgatagtaaaatggggttagacccttccataaaaccaagctgtgtattggacttttggctgtttgtctgggagaatacatgcccaggtttggcttcctcccaggtacttggagaggaatgcattttgtatctgtcctcttatctcaaatttctgggtaccatcaactggagagcactctcttctgtcattggctataaatttaaaaagaatcgtttaaatatgaagggtattttattggggcttgtgtgagttattgacatatttctagtaatctagtgaatgatttgaactgatttgttgaggtttgatactttttttgttttgtgtgtgggtgttgttttttcagaacagcttagttgtttttcatgttaaactcctgtgtaaatttaatgttcagttgatgacaatggctgaaagaaatctgataccttattaggagtaaagggtaagatttctccatttataagtacaattattcataatctatatttatccaatcaaagtaaaagcccatttagatgggtagtttgaagtatttcaaaccatacaattttggtgatatgggttttactagaaattggcattagattgggaaagtaaaatgaactttgtctgtaactgaaagtcatcagtgaccacattgtagatcctgtgtaatttaagtggatccataacaaggaattgggccaagatggagatacaagaaatactttatgcgggtaaatcttttcctcagagctcagaatactttgcatacaaaatctctgtttcatatagcatctttcaagcattttttagtgtagtttacagctggactagagggatgaattgaaattttatccccgattgcctgtcatcattagattgaaagctagaatccaggtttccaactcacagtttaaatgtattttcttttggacaaccagatggatcctgctaaaaagagagtctaattttggccatttaaaa

SEQ ID NO: 52422 - DNA, 1066 bp, Homo sapiens
tatttcattgaaatccttgagagttgctgaaaacacatgatatgtcttagtactttaaatagaactgttctaatttggagggaaactgctgtacaaacatggcccattgataccttcacagcttatctattcatgccgctcttgccatttctgaattttggaaaaagttctgtgttaatgtaaatataattttatttttctaaatactcatatcttaaaataatactcattaatagattttggtaggaaaactccatcttcttaatttttcatttatataagcttcttccctgcattctggaagacattcttcagtgtatatactgtgtcaaagcccattttcaaggcagttgatagagatttagctatgcaatttatttaccattggtcaccaagaaaataaaaatggaagaaccagaaggccactgagggaaaatgttataacagcatactccaggggctagagaccagagagcaagaagaatgctcacgggtggtcccagggaactatgattgatagtaacagaatagcaattaggtaatggaaagttccggctactgtaccaaagacattcttcatcttttttttttttttttggagacaggctctcaccctgtcacccaggctggagtgtggtggcacaatcttggcgcactgcaatctccacctcccaggctcaagcgatccacccacctcagcctcttgagtagctgggactaccagtgtgcaccaccacgcctggctaatttttgtgttttttgtagagatggggttttgccatgttaccaaggctggcctccaactcctgggctcaagtgatctgcctgcctcagcctcccaaagtgctggttgggattataggcgtttcttctaacaaattttgtcttggagttgtctttacaagtgaagcttttgtgatttttggaatgctatagaattcatctctaggcttcttgtcccactaaagcattagaatttaaaacagaccctttaacatgatttatagcagacaagaaataccagttcagtttgggcaggtggtatttaattgcccctctttgcggt

SEQ ID NO: 52423 - DNA, 1125 bp, Homo sapiens
ccattctcctgcctcagcctgccgagtagttgggactacaggcgcccacaaacacccccagataattttttgtatatttaatagagacgggatttcagagtttcactgtgttagccaggatggtctcgatctcctgacctcgtaatccacccacctcggcctcccaaagtgctgggattacaggcgtgagccactgcgcctggccaaaaacttttctaaggttatacagctgaagagtatatttagcagagctgagatttgaacccaggtcatttggtttcagaattcatgttctgaattataggactattttgctctattcacagtgttagataaatgaggtatatctgtactccattttggctatgggactatgattggacgctgaacatggggctatgttaatagctctgcctcctggttcttcaaggatagggtgatcatataatgtgtaaactggttcacttttaagagtgagagaaaatacttttaataatcactctgggatgattgatgtaaaccaaggtgaatggacaccctgaaaggatacctcttggcagagtttagttttcacaaatgtgacaggacatgataattgcttcattataattgaatcttgtttaccatggattcttatttacataatacaggtgcattttttctttcgccaacagaactcaggcctttacctgattcattttcatattctctcgattttgctaattcttttacttccctccagaccactcaggaaatattctttgtcaaacttcatttcctccaagtctgaaaaataccagcaggaatttctataacacttgtcccattaaaaaaaaaattggcatttaaaaccataaatcccaaaatatctttattaacaggatttctacaaggagaggagctggtaaatgcatctgcattactggactggcagagaaatattactgtcatcaacttcctatagatacttggaaataaccttattgtatggtactagaggctgtgttaatgtttgttaaaaaggattataccagtctagaatcaaagcatatgtgttatctcattgatctgttatacttatttgcagtaacactgttctgaagctgcgtccaattagaggttgtc

SEQ ID NO: 52424 - DNA, 1037 bp, Homo sapiens
ctgggattacaggcatgtgccaccatgcctggctaatttttgcatttttagtagagatggggtttcaccgtgttggtcaggctggtctaaaactcctgacctcaggtgatctacccgcctcagcctcccaaattgctgggattatggatgtgagccaccacgcccggcctaattttgtatttttagtagagatggggtttcaccatgttggccaggctgatctcgaactcttgacctcaagtgatttgcccacctcggccttccaaagtactgggattacaggcgtgagatactaatactgctttaattatggcctttgtattctgcttcattcttgtgtgctcctcttccatttcatggtccgaccaggaatacttaagcagcatccctggttgccaatagcaccccctctgccccagttgtgataaccagaaatgtctccagatattgttacttttatcctggggggatagatttctccctgttgtgagctactgtatcaataggggtaggagtggtggagcaatagaggaaagtgattatagatgtcctcaggtgcatgttctcctttttctccttctttctggttatgcagttcctgtccctgactttggataagaaaatgagaaaaatcaggaggtgaccatttaaaaatagccccattatttttattctgttcaagttttattttatttggtttaaatatattagagcaggacagatagctgaattatttatgcagatctatgtaaatttaatttctaccactgattaagattacatagagtaaagaactactggactattactacctaccttgcatgaaagactgtttctaagaaaagctcatagctgaaaagtttaacacttaaaggataaccagcattgcttatataaagaacttgccagaacttgtcaggattcttgctaatttttgagcttcatggctaagatgtatctcttgatgtccccgcataaacacttcataactccaaaaaacatgtttagaatgggcatgcttttctaagctcagtatt

SEQ ID NO: 52425 - DNA, 1053 bp, Homo sapiens
tccatttgaatcctggtagggttgcctgtagaaaaagttcagcagctattggtgtatatagactagactttggttcagagtggtgccagcccattcgcttcttctcctccatcagagggccacattttcttgggatgggagaaatttcccatttgttcaaatttctttggatttcttgggtgaaaggttcaatagcccacctctgattaagcttaatatccctttctttgtgcaacctgttttttgacttctaatgagtgaagattgtggatttggggtaggcggtagttgggtgcaataacttgctgcccttaatttttccaaacctcagagcttttggttaatcagaatagtagggacggctatgggtattgttctcatatgtcagtagtggagaagaaaattggaagaggaagttactgagaaagagggcgtttcttagcagtggagccagtatgtatttctttgtttgaaattctaaaaccagaaaagcagcaactacaggaggaaggaaggaaagaactgtgaaactttttcctgttcagatatctttaagagctgttcctgtctctatccatgtcccaggctctactttcatagaaaaagtcaattgtaatttgttcagttttcttctagaatgaaataattttaaatcttaaaccctctgagaatagttgtttaaaaatcagagcattttattgagtaaattatttacaatggattattctttttctcagcatattactaatttggtcttatatataaaatatatgtataacataataagaatataaaataaatatataatatataatatacattatataatatgatatacattatataatataatgatatacattatatattgtataaaatatatattatatattatataaaatatatataatatatattatataatatataatatatattatatattgtataaaatatatataatatatattatatattatataaaatatatataatatatattatatattgtataaaatatatataatatatattatatattgtataaaatat

SEQ ID NO: 52426 - DNA, 1058 bp, Homo sapiens
aggcagggcgagcgcggctgggggcgtagcgcgctgagggggtccggccgtttggcagcccgcgaggcggtccgcgggagcacactctgtgcggagactgggcggccggccgacccttcctgtcgctgacggcgactgcgggaggccaggtgagcaacaagtccccttgggtagaccccgctgggaggcgcgggccccggccgggccgctcttcccgagccgtgcagggtctcgggggactgggtgccgggactcctactgcggactggcagaggccgggcgagcggtcagcgcggggtggcgtcttagtccaccccaccccctcagggagggagggagtgacccgaagtccccttcggaaacttggaggggtccacaagtctgagggactatgagtgtcccggcctgacctggttctgccatcagctcgctgtgtgatcttgagcaagtcactttcctctctaggccttagtttaccccctgtgtaaaacgagggtttcgtcggcagatgtatgtacaggagttgggtcccagctgttgtctgagatcttggacaagttcttccccaggctgagcctcagtttccatctctggaccatgaagtaattgaggtgctcgttgaggccccggcctgctaaattgaggaggacactgtgtgtgtgtgtgtgtgtgtgtgtgtgtacgtaccatgaagtaattgaggtgctcgttgaggccccggcctgctaaattgaggaggacactgtgtgtgtgtgtgtgtgtgtgtgtgtgtgtgtgtgtgtgtgtaccatgaagtaattgaggtgctcgttgaggccccggcctgctaaattgaggaggacactgtgtgtgtgtgtgtgtgtgtgtgtgtgtgtgtgtgtgcgcgcgtacaggatagtctgcagagtaaggaggagagttgtctaaaggggctgttccaaggaggacgtgggtgctacccagaccatgatggggtgagctggggtcctcttggttctccaggaatcctagagcctctgagagggaaagttttaatatggttgtccatagaaccggag

SEQ ID NO: 52427 - DNA, 1037 bp, Homo sapiens
agggctcacagtggcatcacggcccccctctgagcctctgcgtcctcgtttgagattctgtgtaggttctcaacccatctgtcacccccttttcacgtcctgactcctaggaccccagaaacagcctgggcacacccctagtgtcacttttcctcaggaaccctggtggttaacaatagctggggggtggtctgtgcccaagtctacattgatcagagagatgagggactgacctggcacccttaagacctttcctggaatgctaaggggatgggtgagggaagagtggaggggaggggagggaagtcattctcatatgataccaggcctgaaagggagaaatacaggaatggaaaccaaaagaaacaggtttgagttccggggctgtttcaaagtccctgaaggaccctgggtaagtcatgcaacttcagaaagactcagttttctcttctgcaaaaatgagggtaatacctgccatacagggttgccctagagaattaagtgaggtatctttgctaacatgttaatttgtcacatttctatctagctgtggcatttttttttttctttttgagactcgctctgtctcccaggctggagtgcagtggcatgatcttggctcactgcaacatccaccaaccaggttcaagcgattctcctgcctcccaagtagctgggattacaggcgcgcaccaccacgcccagctaatttttgtgtttttaatagaggcggggtttcttttttcttttttggagacagagttttgcccttgttgcccaggctagagtgcaatggcgcgatctcggctcaccgcaacctctgcctccgaggttgaagcgattctcttgcttcagcctctggagtagctgggattacaggcatgtgccaccatgcccggctaattttttgtatttttagtagagatggggtttcaccatgttggccaggctggtttcaaacacctgacctcaggtgatccgcctagaagcggggtttcacttggccagactggtcttcaactcctgacctcaagtaa

SEQ ID NO: 52428 - DNA, 1042 bp, Homo sapiens
cctgtaattccagcactttgggaggctgaggtgctgagtccaggagtcctagaccagcctgggcaacacagcaagaccccatttctattttttttttgagacaaagtctcactctgttgcccaggctggagtgtagtgctgcgatctcggctcactgcaacctctgcctcctgggtctacgccattctcctgcctcagcctcctgagtagctgggactacaggtgccggccaccatgcgcggctaattttttgtatttttagtagagacggggtttcaccgtgttagccaggatgatctcgatctcctgacctcgtgatctgcccgcctcggcctcccaaagtgctgggattacaggtgtgagccactgcgcctggccgaccccatctctattttctaaaattattaaataaaaacaattatgattttcattttatcgataaggaaattgaggctcagagaggtgaagtcacctgcccaaagtcacacagctaggaagtggtataatagtgattcaaatccaggtttgtctggctccaaagtctcgtatgacaattcaggccgggcacagtggctcatgcctgtaatcctagtactttgggagactgaggtgggaggatcgtttgagcccaggagtttgagaccaagctgggcaacatagggagacttcatctctaaaaaacaaaacaaaaaaaatcagccgggcatagtggcatgcacctgtagtcccagctatttggggggctgaggtggaaggactgcttgagcccaggagttcaaggctgcaatgagccatgattgcaccactgcaagccagcctgggtgacagattaaaatcctgtccaaaaaaaaaaaaaaaaaattaagttcagatgacaacttgtccagttcatggatgtctgtatcagcttgaacccaaaccatctgctccaactgctgcctcaggctcacttccctccatgctgggaagaccaagcattgtttaccgagcgacttttatatgccagacaatttacatatatttcccattaaatcctcacccc

SEQ ID NO: 52429 - DNA, 1011 bp, Homo sapiens
ctggctggctgactctgccagacaggagggagcgagccagccggtggagggagggaacaagggctgagccagcccccagccttcccagcccttccccaccctcgccggccaagggaaggaggcaggaagctggggttgggggccaggggactgcagtgtctgagaatgaggttccgatagctgggtctgtctgtgggagcatgcacacatatgtgtgtgcatggaagagcacgttggggtggtttgtgagtctgtgtttgcctcaatgtgcacaggtgatgatgctatgtgtgtgggtttgtgccgacatcgggggccactgtgtgtttgtgtaagcacaagggaaagctgtatgccctgagtttgaacgcaggcctgtgtacagagacgtgcgagatctagcagtgtgtgcacatggtagcagatgggcaccacgtcagtgccaataaatctttgtatgcacaaaagagtcggtacatgtgcctgagtttgtgtatgtcacatctgggtgtgttgggagcccctgtgattttatggtgtacaagaggataacagcataactgtgggtttgagcttgtctgtgtatgtgcaagggacagtgtgtgtgcagaagggaactctgcaggtggctgggattttgtgcatgtcttgtgcccaggaaggcacagtactggtggtgtgggctagtccaaatgtccagaggatgggtatgggcgcctctgtgcccaacagactttgtctgtgtggttgttgagagtgactcaggggaacactgtgtgactgtatatgcttggctgtgtgtacagggaacaggcagcacaggcattgtgtttctgtggttgcatttacacagggcggtggcggcggcggtggtggtgatggtgacggtgctgtgctacaggtttgcacttgtttctctatgtggcaaggccctgcgtgtgactgcgtttgtgcgtgtctgtgagcacggtgcgctggaaactgcgtgcttgggtctgtggcaggctgaat

SEQ ID NO: 52430 - DNA, 1043 bp, Homo sapiens
agaggggtggacatctgaccctcacaccttaggacggggagagactttctggtgtggctgtgtatgctgggtcttctggccctgtgtggatgagattgagagagggaggcccagggcatgtttctgggcttgaatgagtgtggctggctgtgtggcatgtgtgtaaaggtgtgcatgatttgggcctgtgaaaatgtggacggtggtggtggggagaggaggttttgaatggaggggggctgtgtacaaggtaggcactagcccagtgcgtcacacagatgcgcacatgcatgtacacgtgtccacacacacacagccagctgtgaggaggaggctggcttccagtcccagggccaggagaactctgctttgggtatgtgggggaggcacagctggggctggaaactctagagtgggagggagggagagaggaagggaggctgaggagccgcatccttgatctcttctgtttctgcagttccggacgccgtgctctgggtctctgtgtgcctctgagtctccctctctctaatgtccggatcttggcatctctgtgcctctcttctccgtcttgggctttgaggctgatcacgtgactggatctccacctctccagcctacttggctgtgtctccctccatgtctctgtctctgcctccatgtctgcctctgcctctgcctccgtgtccttccctgtccttgccaggtggggggaagggggcccagtgctcagggagcaggtgtcggctcactcaggcagcagggagtgaagccgaggagggcaaagagccagcagcccctggacacacagccacactccaggagacgtggggcactcacaggaacacacagtgatatgcatggagagaggggctcctgagggcacttacagggacatagacgtacaaaagtccacacacagccacacccgaaacactcagggatgccagacagatatccacgggccacacacagacacaaaggcgcacacacaggtactcattctggcacacacggacatccagagtcgccgacacacccag

SEQ ID NO: 52431 - DNA, 1023 bp, Homo sapiens
gggagagggaagtgatggtaggaaggcttggtgagaacaggggctccaggagatgggaacggaggggcagcaagagaatgggcgctcaggaaggggaggggtttcagcctagggcctgctgcttagtaaggggtgaggcaggctgtggtgtattttggagaccagactcgggagatggaccagggcctctgggatggaaggttctctgtgcccttagttaagggcagcaaagaccctgcacagtgtatggtgcaggtttggggcacaccctgttttgatccgttcttttcagaggtcagggccctaccaccgccccagtgccacacctgatcccagaatgcatcaaggcaatgtggctctcagatacgtgggtttcgccatcatttattaaacacttccctgaggcgtttattcttcagaacaatctttgaggtagagaaagatgctcacttggtttacagatgagaagacaggttcccagacacagagtaagggactggtccaaagctcacgtggaaagtggcagaagtaggctggcctaggctttaggcccttcctttatttttttccccctttttgtatttttcttctatttctgctttttagagatggtgtcttgccatgttccccaggctggtctcaaacccctgacctcaagcaattctccagcctttgcctcccaaagtgctgggattacaggtgcgagccaccacgcccagcctttttttctttgttaaatttttttcctgcctggtgcggtggctcacgcctgtaatcccagcactttgggaggccgaggcgggcagatcacctgaggtcaggagatcgagaccatcctggctaacatggtgaaaccccgtcactactaaaaacacaaaaaattagccgggcgtaggcgcaggcgcctgtagtcccagctactcaggaggctgaggcaggagaatggtgtgaacccgggaggcggagcttgcagtgagccaagagggcgccactgcactccagcctgagcaacagagcgaaact

SEQ ID NO: 52432 - DNA, 2879 bp, Homo sapiens
ttccactgcctggaaccccacctcctcacccagcacctgcttcaccctgtgttttggggcttggacacgcatattttacagatggggaaactgggctcagagaaggcaggtctgagtttttgtgagaaagaacagtggttagctttccccctcaccctgctgaatcctgggaggagctgggtgggggtctccctcttcacttccctgatctcagagcacagtcgatgcgtgccgctcactcctgcctcttctcttgtgtttctttgcagctttcagaaaaccaacgccaagatccctcccagcgtccacatcgtcctctggcaggagctcctgcccctctgcctcccaccctgccccctacaccccctgcagacccatctccctccaccccctcccacccatctcctccacgcagaagccgaaggtgagccctttctgcacaaaaccagcaattgtaaatactttttaaaaatgtacaaaacttaaaaacaaaacacagttttagaaaaagacaaaaaaaaaaaagagagagagagagcgagagagcgagcgtgtgcaagaggttgcgagcggggccccgaggtgtccagagcccctgcaagtatgcactgagaaatttatctacaggtcgtttgacaaaaatgaacaatatcctatttattgtatatactgttttattataaatcgtggattgtatattgcattctgtaaacctgctgtggtcccgtggtgtgcaaattcgcatggtgggggggagggagaagaacctcttgcgggagctttttttttctttcttatttttcactcttttgggttttctcttctgttgttgttgttgttgttttctgttggcaggacacacccaaagatccaagtttgtattaaaaagaaatgaaaaaaagcaaaaaaaaaacaaaaaaaaaacaaaaaaaaaaaaccaaccttgtgtcttgtgaaagggggagtgagggtggagggaatggaagggacaccgctgggttttgtcaccagctactggttctccagaggagttgaaatacctacacgtgttcctggccactgagttttcccttctgcctgagatctgggttccccctcatttcactccaggccctgcgtctcccctgcctctgagctccccactctgctgccgaggacatcctggcccttgatcatgcgttcagtcccaggtccagggattctgcctcttggacctccattttgtcctaggtcctgggtctcctctgactctccctatattctatcccaagtccaaggtctccccaaatgctgggtttcctctccctgaggaacctccatcatggggctcctgcttctggacccccttattccatccaaggtcccaggtctctgcctcgagtccctttgtgtgtcctgtgtattcatggcctttgggcctcacagttctactctggttcagggacatctctcttggcgacactcattccgtcctaagtcccggaaccctcatggggcctccctttcccactaggattggagtgccccccgtctatgtatctcccatttgccccaggtcatcagtcttctctgcttccaggcccctcattttaccccaacacccccacatctgcttatgcagaacctgggatatgacgaggccagtcaccccagtgttgctctgccctcccctttctgtctaccctgaactccaaatgtttcctccctgctttggtaaactttggaaaaagaaaactcctaaccctgtgcctgcgtctggtgggcctggaagagctgagctgtttcctgatccctgactttggggacctcttgggtgtccttgcccaaatgatgcccactttggcctccctggtctttgggaagcagtttttcccatagacccattttatgtttaagttctgctgagtgtggcttcacgtccctcctcagtgaagctcagggagatgccaagggatcgtgccacggggcctgccctccctgacccagccagctaggccctggcctcaggagagtcagaggagcccgtggtctgaggaggaaacacaccttctgggcacacctgtctggaagaggcaggaggactcaggtcacagtcccctgaaactgttgcctctgtgctagatgcaaaaagctcatccacccaccaagccccctccctacatcccccagactcagagatgaagacattaccccacgcttcctgactgctgacggggaagacaacactacactcaagctaacgatgcaatatgagctggaagtgggggcaagaagcagtgagaccccctgagagttagggaggagggcttctctgaggagaaagcttctacagagccaagcctaaggtgctgggcagaaaagtgagggagttcctggaggaggaagaggatgtgcaaaggcctagagatgcgaaagggtaacaggaggcaggagccacaagcagttagctctgttgggcacacgctgtgtttagggaggggagagggctttggcaaggtcactctgggtaaggtggaggctggttggagcgggtgggcagcatcagagaaagcagtggatgaggctcagataggccaaccgcagagaaacctgtgttcagcctcaagaatcacccgcagggagaaaatgcctgtgttcagcggctgctgaggaagaagaagagactcggggaggctgtccaggtggggcaggccgggcccagttggcttcaagggaatcagagtggggcctggtgagtccggctgagggctcagaggagtggcggcccagaggaggtttcggggaggggaggagacagtggtggattgctcagtggaagggactggggctcaacatgagataggtcttgagaaggggaggaagggcagtgaagggttgtg

SEQ ID NO: 52433 - DNA, 1006 bp, Homo sapiens
aaatcaaggcccagcttcccagcatggtattcaaggtattccaggcttccgtcctggcacccaacctttttttcagccccgatcttcctcacacacaccctcccttaacagccaggagcatgtgtggaaacaggagggagctctgggagggctggctcccaaaggtgccccgtgcttttgctgttcctggcctgggtggccctttcctaccccatctcccacctgtcagttcctatctttcactcagacatcacttcctccaagaagcattccagggtccttctcaggtccaattaatctctcaccctctctgcatccgtgacagcccttcctgggaatgccctccttgccacgccaccaactcctttagggcaattactcatctctgggcaccgtcctcccctcccccacccagtgtctcatcatgcctgggacatttcaggtttttttgtttttttttttttaacttgagttgaagaaaagcatgtagaatagggagaattctaagaggaaaggttaagccctggggaacgggatgggacaatttcaccctgtcatcaggaagtgctcctaatagaagggcagggacagggtgtgtaaataaaccagttcaaattctcagagctcactgggcctgtggacctctccaagcacaatccatccagtttacaaagagggaaaggtcctcgcctgaggactcagagccacctggtcattgaagcacagaaggtagagccaggaagggcccctggggattgcctggttccatggttcttgctctttcctcagcctccacttcagttgcatgtccgacacaaacccatcaggaatgcctgtctttacatatggcatctccagctggagggtggagagtgggggagagagagagagagagagatggaggaggtgaggctagcctcctcccaggacaggtaaggaatgtgaggctctgagaggtggtagagacacagggtcacacaaggctggggaaccccatttggtccta

SEQ ID NO: 52434 - DNA, 1800 bp, Homo sapiens
ttttagtagagatggggtttcaccacattggtcaggctgttctcgaactcctgaccttgtgaatcacctgcctcagcctcccaaagtgctgggattacaggtgtgagccaccgcacccgccccagtccccacaactcttgctgggtctgacatcttaaatggattttgaggttctgtggaagaagctgcactggagctcaaccttcaagaataggcaaggtttgcacacatggagaccgggggaagggcattctgggcagagggaactgtgggcaaaggcaggtcacatcccaatgtggattagaagataaaagctcagaggagacagaatggggaatgtggagcctgactgatctgagagctgtggctgatgggacggggaacagaacgggtcaagcaaggagggggccttggccctgtgcagacatcttctctgggcctctagatggaaagtagagccagacagactggctccacgttgggccctgtgggctaaagatcgaccctatcagaccctggggacaggggtgggagggtatgaagggccctccaaggtgttcaggattctcgagtccctctcccctccctactccctctcaggcctgacctgaggccaagagaaatgtcacaggtcctccaaggttacgcggctagggcctgactgaagcaggaagcagtttccaaggccaccatccagccggggtcagcaggcatgcccgggcctggaccaggccgcagctgctctgggctttgtctcttcgtgtcttgaaacctcgagaggtcacttgatcttgcctgtgactctgagcaagaggccttacgtcagggcccagccagtcctgccctgactcttctgggcacaagttcttccccacactctctgaggccatcctccctctgatcctatctcttgccactcctgcagccatgtttaggccaggccttgttctgagccctcatttcctgaaaatgtaatctctccacgaccataccgactcacccttcttctttcttatcttcccacgtcccagagcagggccacggaactggagggtggtggctgggagcctgcctgtggacacagataggcctctatgcacaacccagttccatcccttaccagctaggtgacctggtgagtcatgtcacctgatgagtcacgtcacctctctgcatctcttgtgagaattaaatgagattacacgtgaagcccttggccaggtccctggtacacagtgagcacgtagtcagcggctggtgatgggtaggtaaatacccgacagaggctgaactccggggcctctgaccagcctgtgtgagtcacacacctccaaccctcgcctcttgtaccttcatgcaggaccatagagccggccctccctcgcctgtgctcctcctaggaaggaggttgtattctagtgtggatttggggccttgggggaggctttgtgatagcacctagttctttgcgttagcaattgggccgagtcctccctggaggacccaaggacaaaatgacccggctcagctagaaatgctgtcatcacagttatgcacaccagtcctctcccccactgcaaatatgaaaaatattttcttgtgactgtaatatgtcatgatttttcccctggcagttgtgccatctttgtcagcataacctttgctgccatagtgcactgcgtttgtgctggaaggctgggggaagtagataaattctgtgttcacacacatgagctagtgacctgcttggggccaggcattgtatccagtgctgcaggtatcactgagcaagacacacag

SEQ ID NO: 52435 - DNA, 1522 bp, Homo sapiens
ttccattccccatgcgtctcattgcaaccagcagagcctcagatctgaagcaggccagggagaaactgcttagggtttaaaatgtcaaactcttgatccttctcactggcggggagatgtctcatggataatccagaaatgtgaaataatccaaaaaccgttcctcccaggctctgggtgggaaaatggacgggtgtgggggctgggtgtttgggcaggtcacagctcagtgaagtacataatggaaccacccagtgaggcctgaacgcaggaggaactgggatgccatccagccccacattctggccctgctccccactcagggctgtgagttaactgcgctgtcctcaaaccaatgcattccattgttctagagacatctgtccagcacccactagaagccaggcattgggggcaccacagtgaacaccacaaatgaggtactggtcctcagggggcttcccatttagagggaaagacagcaaacagtggcattaagcatgtgttgattccagctgtgggaagcactgtacaagagaaaaaagctagaagcttgtgagcgcacacagcatgctgaccggaccttgaagctgaggcctgaggaatgatggggctgaacagctggcggggagggggaagaacattctgggcagagggaacagcagtgtggaaagcctggaggcaggaagggactcagctttaagaaactgcctatgggaaggcagtaaagctaagtgaggggatgaggcaagcgaggccagatcatgcggggcattagaaggagtctgaatttcattcccagacacgtggggatccactgaagagttccctgctggaattccccaggccaccgtggagcagggctagtgttgaagcagggagaccagctgcagtagtccacacatgcagtgatgatggcccaggccaaggtggtgggacggctgccccctctctctatctaagatgacccacaggctctagggcaaccccccagtgccaggggatgatcaaaatcaccacgggaatgagaaagagttggagatacagagaaggagagtggcaaggaaaaagttcatagagggagttgccactctcaacagagggcttaagcagagaggacaaggacacgctcattcaccaatagcagtgagcagttttgacgccaggcactggagaagcagcagttgagcttagtttcccaacctgagcccctgtgtgtccatccagtgctgggtactggggagacaaagcaggcatgacccctgtcctccagttcagcctccaccccaggaaactaaaacaagtacacaaaaaacctgaaaacacctggcagagagtggcaggtgcccagaggcagtgagaaacaaagatttgctggacagctgggtgttgtggtcagaagtcagccctctgcccccttgatgagaaaagggacatttgtgctgggccctttatgtaacgctgcctcactgacccttcacagcagactatgaggtggggtgtgtctccccaccacaacccc

SEQ ID NO: 52436 - DNA, 1059 bp, Homo sapiens
tccagggggccagcctgggccacgcagctgcagcccaggcccacctgagctgccgggacctgccgctgggccagccccactacgattcccccagctgcaagggcacagcctattggtaccctccaggctcagctgcccgcagcccgccctatgaaggcaaggtgggtacagggctgctggctgacttcctgggcaggacggaggccgcgtgcctcagtgcccctcacctggctagcccaccagccacgcccaaggccgacaaggagccactggaaatggcccggccccctggcccaccccgtggccctgctgcagccgctgctggctatggctgcccactccttagtgacttgaccctgtcccccgtgccgagggactcgctgctgcccctgcaggacaccgcctacaggtacccaggctttatgccccaggcgcatcctggcctgggtgggggccccaagagcggcttcctggggcccatggcggaacctcaccccgaggacacattcaccgtcacatccctgtagtgccaactgaagtgccgactggaccgcgaggttttgttcctgggtgagtctggggatgtgggcgcagtgggcagaggcctgggggtgggaagaggacatcagagcttaggcaaggacagaggtatggagtgcaggaagcaaatgcaggatttaagggcaaggctggggactgagagcagggtgtagggattcaggattcgctgttgcggacagtctcaggaggagatggggtgcttgggctgggaactcagcagggggcttgaacgttcgggggggtcttgtgaattgaaatggccagaggactacacactggatggggccctgtagtttggtttattaagctttcaattatttgttcatgctatgtcttgggcaggaagtgagtatttcccaggaaatacgctgataagggtgggcatttgtatcgccctgtgtgagacaggtgaagggagaagcaggttggacggtcgtctacccagggcctatccagaggaccagccctgctggcacccccatttccctgggagcttca

SEQ ID NO: 52437 - DNA, 2685 bp, Homo sapiens
ctgcttcactctagcctgggcgacagagtgagactctcttccaaaaaaaaaaaaaaaagtgaaactgggcccatgaggggctcactatacacatggtggtttgagaaaggctgggagtcagcaaggggatggggcttggggtggggaggggagcttggtaaggagatgagacctcaggagggaggggtccaggagctcatcaaggatatgggaagctgatgaggatgtaggtgttcagtaagggacctcctgctcttcctgcctggcaggtcctggtcccggcttctcgcaccctcatgtcagccccggccccgcccggcggcctgcggaggacaaggtcaggatgcgtgtgaagccccagggcctggtggtgacttccagtgccgtgtgcagctctcctgactacctccgggaacccaagtactaccccggcggcccccccaccccccggcccctgcttcccacccggccccctgccagcccacctgacaaggccttctccacccacgccttctccgagaacccacgcccacccccacgccgggaccccagcacccggcgcccaccagtccttgccaagggggacgacccgctgcccccacgggcagcccgtcctgtctcacaggcccgctgccccacaccggtcggagacggcagcagctcccgacgctgctgggacaacgggcgggtgaacctgcgaccagtggtgcagctgattgacatcatgaaggacctgacacgcctctcccaggacctgcagcacagtggtgtacacctggactgtggtgggctccgactgagccgcccgcctgcaccgccacccggcgacctacagtacagcttcttctcctcacccagtttggccaacagcatccgtagccctgaggagcgggccaccccacacgccaagtcggagcggcccagccatcccctctacgagcctgagcctgagcctagggacagtccccagcctggccaaggccatagtcccggagccacggctgcggccacgggtctgcccccagagcctgagccagacagcactgattactcagaacttgctgacgccgacatccttagtgagctggcctccctcacttgcccagaggcccagctgctagaggcccaggccctcgagccaccatcgcccgagccggagcctcagctcctggacccccagccccgcttcctggacccgcaggcactagagccgctcggggaagctctggagctgccacccctgcaacctcttgctgatcctctggggctgccgggcctggctctccaggccctggacaccctgcctgactccttggagtcgcagctgcttgacccccaggcactcgaccccctgcccaagctgcttgacgtcccaggtcgccgtctggagccccagcagcccctggggcactgcccactggccgagcccttgcgcctggacttgtgctcaccgcacggcccccccgggcctgagggtcaccccaagtacgccttgcggcgcactgataggccaaagatcctgtgtcgccggcggaaagccggacggggacgcaaggcagacgccggacccgagggccgcctactgcccctgcctatgcccacggggctggtggctgccctggccgaacccccaccaccaccgcctcctccaccccctgccctgccaggcccaggcccggtctcagtcccagagttgaagccggaatcttcccagaccccagtggtctctacccgcaaaggcaagtgccggggcgtgcggcgcatggtggtgaagatggccaagatccccgtatcgctggggcggcggaacaagaccacatacaaagtgtcttccttgagcagcagcctgagcgtggagggcaaggagctgggcctgcgcgtgtcggctgagcccaccccgctgctgaagatgaagaacaatgggcggaacgtggtagtggtcttcccacccggtgagatgcccattattctcaaacgtaagcgcggccgccctcctaagaacctgctgctgggtcccggcaagcccaaggagccagctgtggtggcggccgaggcagccactgtggcagcggccaccatggccatgccagaggtaaaaaaacgacggcggcggaagcagaagctggcatctccccagccatcctatgcagcagacgccaacgacagcaaggccgagtactcagacgtcctggccaagctggccttcctgaaccgccagagccagtgcgctggacggtgctcaccgccccgctgctggacacccagtgagccggagtcggtgcaccaggcccccgacacccagagcatctcccacttcctgcatcgtgtgcagggcttccggcggcgtgggggcaaagcaggcggttttggtggccggggtgggggccatgcggccaagtcagcccgatgctccttcagtgacttctttgagggcatcggcaagaaaaagaaggtggtggccgtggcagccgctggggtcgggggcccgggccttactgagttggggcacccacgcaaacggggccggggggaggtagacgctgtgactgggaagccaaagcgcaagagacggtcccggaagaatgggactctgttcccagagcaggtgcccagtggcccaggctttggggaggcaggtgctgagtgggccggggataagggtggtggctgggcccctcaccatgg

SEQ ID NO: 52438 - DNA, 1314 bp, Homo sapiens
ggctagcctgaccctcagtaagggagggagggagggggcttctggtgggcatctccaagtgggtgccaggagccacggcccaaccacactgttggaaattggacttggaggttccagagtctgagccccttttctcgtttgtgagggtgtcacccactgtcctccctgtgagggcaacagtgctccaagttcttggactagagagatcctgacctgggaggggccaggtccacagccaggcctgggagagagcaaagtaggtgggaccagtaggtgggacaacgaggagcagctgagtcctggagcctgcagagagagaaggaacagtggatagagggatgttccacctgggtgggcaaccaaagggccccttcctgtgccattttgtgacctcggacaaagtctctttccctcttcaagtctcagtttcctcatctgtaaaatgggaggggcatgagatggcactagaaagtgtccccactggggtagctggttaaaaatacagattcccagatgtcccttcacatctatgagtcacattcccctggactagggcctgggtatctggaatgttacacagctcccccaggcccaggctttggaagccaatgggttagataattttaaggttcctcccagccttaaattagaccacggcgctagaaggagcattttcagaagtggctgaaggattgttacaggagctgggagtggaaggaggctttggacttaaggcagaattagaaatcctgcctcttagcagctatgtgacttcaggcaagttacacatacactctgagccagtttcccctgtaacatggggataataaatcatgcctcccaggctgctgtgaggattcagtgggtcacagatgtgtaggtgctttgtagattgcaaatcgctgtcccccaaaggggagtagagaagtgtctctttctactttatcctgtccccgagtcagctctgcagtcttcctgtggggtgacagcatgggtaggtggggagaatctacatgggtctgtggcacataggtcccagggatccagtactaggtcagagccaaacattaggcagtgaacaaggtcagtctttaagaccctcacagtgttggggtccattcagctccctgctccctgagatcccggctcctgggatcagccatggccctgagtcctcaggcttctttgggagtcagacatgcctggatctaaatcccagctctgccctgaccagctcagggagtcagtcggtaaatatttatgtagcattcatagcccaggccccagggtcaggtgatacagcgataaacaaga

SEQ ID NO: 52439 - DNA, 1031 bp, Homo sapiens
tgtggctccatttgtgctttggaggtgggttgggcaagccttgagctgagctgggctcagcagtgcccagccttgtggccaaattgctgaagtcacttcctttccagcagcaactttccaggaggaggagttcttcagacctgggcggggagcgggggggcgtggaacaaggagctctctggggaaggaggtgggcgggggtgagaggctgcagggaaggcctagtggggctggaggaggggagtcctccgggagacagaaggaaagacaaggacgggagtctggaagggccaagggcaggaggggaggggggcggagcagggcgggaagcttagtccctgggtgacctcggagggaggaagggagggccgccggcagggtgaccctcgggtccagccagagctggcggtggcgcccacacacctggcacccagggcagggggctggcagggggcggttctggggcagacctgcttgccaggtgccctgttccagggaggaagggggtgggcgagggttgcacaaaggagctctgtgtggctgggggtagggtggggtggggtgtgcactgctgtgctgtgctgtgggggggccctgatggccccagggggcggggcagggccagctccccttgggggcatcagtggctccaaggggacacctagtggcgagggagagtagtgcatctagttggatggctgttggtgggaggtggtgactagaagctgagaggaggatagattagaagtcaaaaattagaactgatggttgggactaggaccgttgtaggaggctgcaggggagggcgctgaatctctggacaccaaagaagtttgatttacagaagcccaacctaaattcagacaccagcttaattgaatgagatggctgtttgttcttaagggcataacttaacctctctgtgcctctatttaaatgatgccaaatgagtgacagctgccattattattgccatcattgttatttgtattatgatattgtgcctgggatcaggttgaaagaagatattc

SEQ ID NO: 52440 - DNA, 1575 bp, Homo sapiens
ccgtcgcaggctgttgtggggagtggcatgtgtgattctctcatgctgttgggaagttgtcagtaacttgggagctcgtgtctcactctaaagagacgacatgttttctggtgatacggggctggcagctggtggggccttcccatgcagaccacagagccccaaagggctggccagaggaaatgcttagggccctgagcagagggacaagtgggagctggggggtgctcagtcccgcatgatctaccctctcacccatatgtcagcccgtgggactgttccccagggggagggacccagcattcttcagatggtgtggagaagggcctttagggccagggcaggtgtgtgtctgtgaggtggggcaccaaggcagggtttgcatgggaggcagggggctgtgtccctgagggcctggggaccctatttcctgcctctcctgcccctgaaactgttaaactaattaaggctctggagccacaggattaatcggggcagctctgcgcgggccgggagctcaggtagtcagtcgatcagtgcaccggggaggatattggatttctgaaccgcaagtcagcactattcgggcctgttatctctcccaggctcgggggtcaggaggcgggaggcttggcgcactggccgcccccgccgagccagcttgggcgcgtccactccccctgcccacacatcccagctctggcctgtctactgcccacacaggcctcccctcggcccttctccccggcccaccctgcctctgcttcgctgcctctttctcaggctcctgcagaaacccctggtccctgctctctcctgcctttcccatctctgcctggctcgcttcccccgtgcctctctcccctctggggctcttccttggtccttactggcctcagactcactctgggcctgagctaccccctcccctcagcctctgacaaggtctcacccgcctctctctaccttcctctccatctcccttcttccatgagcccctcatcaccagtccgtctctgcttttgtgtttgtgcgtgcccgtcttccagtttctgtctttctctgtctctctgtctctgtttctctccccatgtctctgtgtctccctgtgtatctttctccctcttcctctctgtcttttcctctctccctctggcacgctctctctctctgtcttttcctctctctctcttgtgtggtctcggctggtgtctgcaaccagaacaaatctcccccagccaacaccccctgaacaaggaggccagagcagctaatgggaaacatgtgattctgccttgcgcctggagcaccgtgaagggagccttagtcccagcccagcccctgcacccctccttgctgtgttccccccaccacactgtcctctgcctcccagcagctcccccagcctgtgtgggcactgttggaagttcatttacactgggtgggggcctgacgtttatctgctggggagtatcaggttgtggaggggctaagggcagctttgctcctgaagttcccccccaacactcagggccaggcagaccccatgcagactcctcccacccaccaccacca

SEQ ID NO: 52441 - DNA, 1034 bp, Homo sapiens
gctaaactggcccaagaagctctctagagaacaggcctcactgattcttgggatttgtcccttcccttgctaaaatgatggcaagttcagactgtgcctcagtttccccagatggtatagggatactatccttgcttcatgtctgacttctttaaagtgctttgagttcctggaacaaactcaaagttatgaggaacaaggaaagactagagtgactcccgccccttgctcaccagcgccgggggacaccagacagaatgtttgtccagggcatgggtggaatcagggtcctgtctccttaagggttgggtggaggacagtgcctcgcctcccttcaagactggcagcccctgctgtctggcccgccctcccagtctgggcagtggcctctgtccttcctctctcgcccctcttcatggaatgagcttggagtcgtgggcaaacaggccctggggtaggggagtcaggcctcacctctgggtgtggtgaggcctggtcaggcagaccgttctaggatcctggggtctgggcactactcaccaaggggccaggcgggggagtaggggtgcctgggggaggcaggttgcacgcaaggcatgctgggccccctcggcgggtgggtggggggaacaaagctggcatcgaggcctcagctaaaattagccgcttccctgcgcgggagcgagcatgcctgccagccgcccagatcgccgctgcctcggcaggccatctgtcgccacgctttactcagtcccccagggccccccagctccagccacccccaggggctagggggactctgctctgaggctgtccgtggccaggactctaggctcttgtgctgtcgtgctgtgtgacctcaggctaggcctttccctctctgggctcctgtaaaacgaggggccctagacactgacatctcaggtcctctagtccttccaagcaccaggtgctgctgctggtcatgatggggtgggaggtggggtgcctccctccccttagagccactcctcttgtccaagctttgggccaag

SEQ ID NO: 52442 - DNA, 1032 bp, Homo sapiens
caacaggcccccctccctcgacagctctgctccttcttccccccaccctagcagccaactgccccagctgaaaccagagccgatgcatctgtgagcctcatgcccagacccacattccatttctgtcctctgtccccccccagttctggcaatgacatccctcctcctcctcctcctccacccccctccctcctcacctctgcctactgctgttccccccacactctaacacttagtagtgtcaccccctcttcccaccccatctgagtgtgtctcaccctccgactgtcgctgtggggctctgggtgtgtcagtccctctgtctgtctccagctcccgggtcgctggtgctctgtgcctccgcctgtctgtgcagactcctcaggttccttctccatctcttcccccctgtgcgtgtgtctttgtctctgcatcatcctgcctgtctctctcttttgtctttttctttctccttgtctctctctcttcctgagtctctttcttgctgttttccttcctctggcatggtcgccctctctctccctctctggctctcgccccctccctccagatctttttctccttctgcctctttctgccctgtttctcttgcctcagtgtccttcatctttctgtctctcttcctggatctgaatctctgccttgatttctcccgccccctgtctttcttctgactttgtccttctaaatacatatctttctttcagagctgggcctttcagttctccttactctatttcctaccaggttgtttccttcccaggcctatgaagattggggagctggtgcagggggcagggctccagagtcaccccaaaggatccctctttttagtaggggccagatgtcctggaagccccactgggcttatgtggttgaacctgaaatggagggtgcaaggttgaagagcctacagagagtgtggcaccaggaaacaagagtgtgagtctgcctttccagggttttaggggatgggctccatccatctagtctaccttccactagcccagg

SEQ ID NO: 52443 - DNA, 3012 bp, Homo sapiens
tgcgttggtatgtgagctcccccaggctggggggatgggagagtgggggggtctgtcaccttatagccactcatgtggtcagctcagacctgaccagtcacattcctgcccaggagggctggggcttgaggcagaggggcaggggcaggggcctggagggggctggtttgcaggaatggaaagggggagccaagaagctggggcaaggggctgctgggcagtattaagatacataaagcttgagtccatctcctcattcctctaggcctcaatctccctatctttcctcccagtttgcaccccctaaaaccttccagtggtgcacatgcctgtgacacaggtacagacctggtcccagttctaaacaaagagaagagtgtggccaaggcagtttctgacatgcagggcagctcagggacttgttggtagcctgcagtgtgactttctggtgcttaggggaggttggctaggtttttggctgggtcagaggatttgagatctagggtacggatcaagctgtgctagacagtagaaagagacctgggcggggacccaggaaacttggttctttgcccagccctgtgcctgactcctcatggcctcagtatccccatttgaagggtttaggccagtggtctctaaaagccctcctgtcctgttagtcagtagccctgggtgagggatgaggggtggggggcgatggtctggaggggtgtgggaagctgccagctcaagggggagtttgcaacgtgatcccagagcgaaaatagcccaggtcattttcagctgcttgggcggaggtatctgatcccggcagggcagcttgggcagggggcagggaggagcattctgtaaagctctctgggaaaccagaccctaggatgggagggtagggaaaggttggcatgcccagctgggcttcctgagacccgctgggggcccaggaatggaaagatgaggaatgcagagggttaacaggaggtgaaggctggactccagccccctttgggtcctggcctggctgaggtgaaaggtcagctccagggagtctaggcacagctggggaaagagtaacccgatccttctccctagccagactcagggcatcacagtgccgcctcccccaggaaaggtgctttgacatccccaggaaggagtttgtttctacttgttctcagcaggggttggggctaggggagggtccaggcctgtcgggtcagggagagagctacaggccaggcgccccaaccaatatggcagtgctttgtcatccgggggtcaggggaggtggaggtgagcctgctggaaaggttagaggtagcctgttctggccctgctgtcacgctgccccatttatgactcctgacggccagcatcagggctggggaagcttagaggtaggagatgttcttcccttctccaaacacactgagtagtgagagaacccgcctggtactagactgtgacagcgaggtatgtttggggtggagaattacacctcaactctgagatagatggctttgctgtctgcagttgtgtgtgtggtggggtgctagggtgtaaggtggtgtgatgggaggctgagatgatgcgacatggaagaacatggggttcaaatccttgcctgtcttaggcaggctattttacccaagcctcagttcccccatctacaaaataagactaatagtactcaccatgtagggtgatgatgaggattggcacagagtaagtgctcagtaaaaagtaaccttaacaagccttattggatgccaaggtcacacacagtgtggagccaggattgcagctggcagtctgactccagagcaggggttggtgagctatagaccatatgagggagaagacagtttccagaatgtgactgcgtcagtgtccccagggctgtgcactgggcgatggggggtagtatccagatgatttggggtgggatggggtgagggggctttgagtatgtggcaagtgggcgggggggttcagggcagggctcttcttacggccgatttctggggctttcgccagccccccgcgccccaccctggcaggctttgtgcgggtgtgtgggtgtagctgtccctggagtgcggctgtaggtatgtttgagaaggcgcaggcatcccgagaaagaacaagtcgccttttgtacgcgtccagccccaggctgggctgggcgctctctgggggatcccctgtttccgcgcccagctccccgcccacgaagagcgccccggcccggcccggcccgccgcaggctcccacctgaggggcgcagcgagcggagcgccccctcccgggcacccgcgccgcggccgggggaaagggtccggggaagagggcgtgtccgaagccccgaccccgcccctagcgacatcactccaggtgctaccaatctccgggagcccggcccgcgcggcccgccccctcgcgggcaccgctcctggtgttcgggacgcgccgtgggtggagtcggcgggaggtggaggaaaaggcagggccggcctaaggggcggggagaccgttgaaggcctcgcccttccaagtctgggagaggctgaacacgcgagcgacctgagaccgagctgctctgctcccgtgaagctcctcacaagacctctctcctggagtgctccaccttccagcccacctgccccaagatcttgccaagtaccactttctgcaggaagccttcctagaacctaccctgcgatcttttctgattacccgcaccctctaggaccctctgtagttaagggcagtaccagcactactgccagcgctagctgccatccactgagcagtttgctcagtgtacccccacactgctccatggaatggcttaccggctgcatttctgcgggctgtccaccttgtactatcgggcccttctcacccacagggttgggtgtgcctctggtcaggcgttacagacaccggcccgcctcagaatagccaccactgcatccagagtcacacagagcaaggaggtaggagcatcaa

SEQ ID NO: 52444 - DNA, 1031 bp, Homo sapiens
aggggggcggaggtggcagggatcagtgggcagcttagcctgccaggtagccccagaggcggcggcggcggcgggaaaactcggaggcgggctcttcgggccctgagaagtgctgggcctgcggactggagcttcttgctccagccagaggaatctgagggctgctaggagggaggcaaggcagtcttctcccagcatgcagcacccccgccccgcctcccaactgcggagccgatgtgggggcagatgtgctgggaaaatcctggataattttcccgacggcgacagtagctttctttgagagcatttctgcaccttgcaggccccagagtccagagaagggccccgggatgggaggggcttcattttacaagagccctgagaatccaggagtaggtatgtgacctctcagggctcactcttggcactatggcttggggaaggaaagaggtctaccctgccctttgttgggcaggggaagggacgctttcccacaactttgttcccttccagcaccatttggtgctctgtaaactgatgaaccttttggcaactcagcaggcatcttccccatctgatggtggacccttctccccctgccagtggcccttgttcagttctgtttcctgcccccacctagcatactctcaccatggtaaacaaaagcagtcgggataggcacgcttcacctatgccacagttgccactcgctggctgtgtgaccttgaacaagtccttttactcctgagtttccctttcctcacgtgaaaaactagataacactagataggccatggccttgtggtggggctcaaagttacacaacatttcaatcagttagcatagcatctgcacatagtaagggtgggaaatgaagggcacccgtgtgacatccagccccatcctgaggaatagaggtagcccccaaaacatttgaattcccttcccctgcaccaagcctgtgagatttcacttcccaaggtctctgtcacactagtctcctcacagtgctccttttgccttccactggg

SEQ ID NO: 52445 - DNA, 1052 bp, Homo sapiens
tttgtgacaggggcgctgtcaccagtgcaaggtagggtactggtctctgtgttcatgtcatgacggtgggtgctggcgttggggggtgtgggcaggcggtgagcactgggatgcactgtatatatgtgtgtgtgtgaggtgctagactcaggatggccagtgcctagacagggccagggtcacgggtcaccacatgcccaaaagcagcctccactgttgtaagggtgacactggtgtgatccccccatgtccctacgggtagatggaggtgggaatggccccagtggagctgttgagaacagcccctcatgcctggaactgggaccagagcagaaggggtccccagggactgcctgaaagggaggagggaagcagcaatgcttgtcctgcctgtgtcagggtgaacactgtgttcagtggttaacgggttctggaaccagagtttttctgactttaggctctgacattgtgtgacctttggtgggtcacttaaccttcgtgaacttcagctttctcattaacaaaaaggggataatattacctactttatggaggccttataattgagttagcgcatgctaataatgcagggcaggtgccctgtgttagcagtgaccattgggtagtcgctaggcacaaataggtggtcagtgaaaacgcattgttcagatgtccggacgctttccctgcagagggccttttcagaccccttcgttttaataaggaaaacggaggcccccaattgtgacagcgttttgcccaaggagaggcacacagcaaacaaaacctttatatggcacctaccctataaagccgggtagctcaaccccaatttacaggtaaggaaatcgaggcctgtgattggccgccggttcacggtggcgctatccagttaggcctcagtccgccgctgcggagggagcgccgggccgccagtgctctctgcaggaggggcgtgcaggtagcgggcgccctggagccactgcccgagccaggcacgctattaataaccccgccactcagccgcgtccgagagcgcaggtccggaccgc

SEQ ID NO: 52446 - DNA, 1433 bp, Homo sapiens
cactccagcctgtgcgacagtgtaagactccgtgtcaaaaaaaaaaaagagaagccacatatgtaatttaaaattttcaagtagccacattaaacaaagtaaaaagacataaaaggaagtaagtggaattaattttaacaatttatctttctttttttttttgagagggagtcttgctctgttgccctcactggagtgcagtggcacaatctcagctcactgcaacctccacctcccgagttgaagcgattctcctgcctcagccccccaagtagctgggattacaggtgcccaccaccacacccagctaatttttgtattttttgtagagatggggtgtcaccgtgttggccaggctggtctcgaactcctgacctcaggtgatccacccacctcggcctcccaaagtgtgggattacaggcatgagccactgtgcctggcccaacaatttatcttatataacccaatatatccaaagtactagcattttaatgtataagccttataaaaattattaatgaggtattttatatttaaaaaatacattaagacttcagaatctggtgtatattttgtacttacagcacattccagttctgactagccacactcacatgtggctagtggctaccatgttggacagcacagatttagaaacaggcttttctttgggaccagggtccagaggagttatgagccagaataatctggaacaagtagggttgtactcgccagaggttacacccttagcagacttgaactgggtgtagtctgactgcctgggagaacatctgggctgtgggctggggagtcaggggttccctcccctggagtcttaactccctggcctcaggtggaatctctgttggggctctggcctctcagggtattcagtatcacctctgagcactggcccccagttcctgtcccttatcccagtgtcacctcagtcttgtctggcctggcaggtcagggggaggggagcagggtggcagctggacccttgagagagcaggagctccacccctccgagccagctgctgccagccttcctggactgactctgtggaaacagggggcccagagacagaaataaactgccaggtttccggggcggagtggggggcctgccagtctttgtgcttccttgcttgggagtggggggagcaggaagcagctccaagccctgtcctaggctgttccccctgtatgccatctcccctcacccccagatgcccctgcccccatggctctgaggctaggctgagtctagaatttgatggattagtgaaacctaggggcccatagtctgggactgacacttgggagcagagagtggtccttaggactctggtcccagcttggtgcccatttctagaatcctgtcctgggggcccctctagctgccgcacggcaggagctgaacagattc

SEQ ID NO: 52447 - DNA, 1113 bp, Homo sapiens
taatcccagcattttgggaggctgaggtggacagatcacctgaggtcaggagctcgagatcagcctggccaacatggtgaaacctcgtctctactaaaaatacaaaaattagctgggcatggtggcatgcacctgtaatcctagctactcgggagtctgaggcaggagaatcgcttgaacccgggaggcggaggttgcaatgagctgagatggcaccactgcactccagcctggcgacagagcgagactccatctcaaaaaaaaaacccaagtttttggttggttaaaatgttgtgaggtttataaacctgtgaagtccatctatggaactaagctagatgatcaatagtaataaaaatagcagctagcattaaatgcttattatgtgccaggcactgggcagagcaatatacctcatgatcttgttaaagctatacaacaacctgtgaaatagttaccattttacagacgagaaaactgaggaggcctagagagatgaagtggcttgcccagtcagggttggaagttaagcctgggcttgtcagatccagaccctgagatcttaaccacaaaggttagccaaggattctaggattcaggaagaagaaatggcagggaaggggacaggtatgggagggttttcaaagaaagccgtggagatagcagagcaggagaaaagggaagaggggtagtggtgccagctcagctctgaggagagacgacgcatcaggtagttggaggtaaggggctggagatgcggatttcatttagagccccctggcctggcttccagagggcttggtatctgtcccacatgacccccagctaagtgacctgctctggagcctgctgggaaggggtggaggtggggccactctatctcttggcctcattatattttgcccccttgttctggaagggcttacccctaactctttgactcagcctccagtgctgtctctggaatctaccctccctcccacatcccaaggccatcaagaagggcccatgggccttgatctctctaggggagttaagaagtagagacaccctttccatcccagagaggagtcctggggcccatctgccgagatcagagtaggatttggaacc

SEQ ID NO: 52448 - DNA, 2469 bp, Homo sapiens
ttaaggatcagtggggttccagttcctgagctgagtgaccttaggcaagtcatacaacctctatgagcaaggttcgtcgtgcaaggatggggtagtacaggtgttgggcttgtagtagctgctcaataaataatagccattattgtcagttatcacttggacatggggggacatcagatgaagagatttactgagcatcttctgagggctgggtactgtgccagctgctggggcccagactcttttcttagtctacagaaagctcacctgataaccatatcacacagacagcagagagtgagtcttcaccttcacctccaccccagaagcttaaaggaaattgtcagggttctgggtggctcatggaggaactggtattgagctggctggtagaatttgggcagggagaagttggggaaggagcttccaagcaagctaggtgaacagcaaggccgagggcaggaactgaggttggttgaggtctaaccagttgctgcgtaggacagaagggaaagttgtggaacgggcctatggaggcgaggcctcagaggctaggctgggagagggcagcatggaactgagccgccctctgaaaatccagtgttgtagtgtgacatggaatgtaccccttagagagtcagcttcaggctctcctactaggtcactgggtgaccacaaacaaaatgccttgtcttccccggcctcagtttccccatctgtgcaatgagccgattagtcttgtgtaggagggaattctggcatcacgtcctaggggttggttggtctagccaactgggtcaggcatttttctggcttgggattctgggcctcagcagtactttcttccagagcatcctaagccaaaagtggaggaaagtgaggggtcctcagagatggattttggggcactccaaatgaggggccagggcctcagcacagaagaggggggtcttgccgagacctgactccaagccccagaggggacccagaagagaggaccagggtgcctcttttcttctgctctgacctgtgtggtggtagatgtggcccagtgtccaaccccccgacctagagggtgtcaggacccttcctgcccactgactggggagcagggcttggagtgccctggggataaggagccaggaggccaatctggggtggcagagccaggtgggtgcctatgggtagctgggctctgcctttgatatttggggttgccgggagttgtggtgtaaggcaggttttggtgacacacgcctccagcccaagctgccctggatcctggcttcaagggcccctttaagcatctcacctgtgaggtagggctaggagagaattaatttcctgtgctattttaattttgctgtatttaatctgctgtttattttaattaattaatgacgggtaatcgcctatcataacctactgccgctggctcctcttccttttcaaatgggtggaaggctgggccaggtgattgccgggttagctgtgggggagagggaggtccttggaggcctgtccctctccccttctgcctgtctcatcccaggggtcctctccaccaggggtcctctcctcccatctcacctgtggctcctcctttccctccctcttctcgcccaggtctgcttcagggccttggaagtagtgactgtggcaatgaggggcctgacctgaggcccctgcctgtctctcaagaaacagtattttgatgtcataggatggtagttggaaggatggggagcttgccttggatggcgcttaggcacccttggggaaacttttgaagttgggggtcagtttttaacagcagctcctttcccctctcccccaccccagtgcccagacagcatgcccatccacattgtcgggcctgtgggacaccagcatgtcttagtatctatggacatatccgggggtatgatttcagttattcattaatccctaggacagacctccagggggattaaccccttgtatagaggagatggctgaggctcagagaggctaagtaacttgcccagggtcacatagcaactaagcagcagggcctgaattctggccacagtctgattgcatggaaagagttaacagttggaggaaggggaggggaagtggcttgaggactagggtggggggattaggtcagaagactgattaggccgggaaatggggtcctctgcctctggaggatgtggggaggaggagggggtccctgccacaaggggcttctcgaaggtgtgcagtctctgctacctcttcccgtttccttgtgtgtcttcagttatctgtttggaacaggggctttgtcactagctctgtaccctaccacaggaacctttctagagctaggtggagctcaacttttatttatttaacaaacatgtatatagtgtttactatgttccagatactattccaactttataaacagatcttcacttaattattattgcagccctttta

SEQ ID NO: 52449 - DNA, 1490 bp, Homo sapiens
tgtctacaggggcctcctgcgttccggcccctccattttgcagatggagcaaccgagtccagaggggtgcaagggtggtcaaggccagccagctggggagccccctccttcctgccccattctgctgtcactcaggctcttctcagcctcagctcagctaagagcagggcctgggggggggagggcgggggatgtttgggaaagtggttgcggctgagaggttgccatggcgatgctgcaggatgccgagctgaagtgggggtcccacagggtctctggggcccccagctccgcacccctgtggtcttctcctccccatctcctgtcccccacccagatgtctgtcaggcggctccggtgacaggctgggtgggtgacaggtggtgcaggtgatgggctgggtgggtgacgagctgggtgggtgacaggtggtgcgggtgcgaggcaggcaggtgacaagctgggtggtgacgggctctgtggatgacaggcagggggtgtggttggcgaggatgctgtctcctggctggtggcctgttgcagccccctaccctcatgcgtgtgcacacacatagactctgggctcagagcttggggctaagatactaatgaggcttattacttgtggaggggcaggtgcctaggctcactaatgagaggcctttaacaaataggggagacagctagggggcttcgaggaattcggctggcccttctgggctgagaccctgggggtcctgacctggctcaaggatgaagctggatcgcctccagccaggtcggggatccctcttcccccttctccctggccactggatttatgttaatactaaccacaattatgatcgctaccattgttcaagcacttattatgtgtcaggcactgtgccaaggcctttgcatgcattttctcatttcaactcaacagtcctaggagagaggcactattaccccattttacagatggggaatctgaggctgagaaaaggcacaggacttcatataacaagttactggtgcagctagggcattaatccgggtctgtatgtccctagaacatgtgctcttaaccaccccaccagtaaaactcaggtcttggtgcagactccagatcctctctcagggactggaaaatgggcatgtggtggaggggtgatcaccataaactcttcagctctgacttgggtggctgtgaggactcctccaggtagctgctgtgaccttaccccatctgggccagattctggacagagggcagggcctaatgctaaggggggtgagccgaaaggtggtcacctgggatatctgagccactttctgcattgtgcagtgggaaggctgaggcccagagaggagcagtcaccacccaaggtcacacaccctgtgagctgcagggccccgtgggatcccaggtctcctggcctcttgaaagggcagggctgggtgtggtgccagagcggggaggctacctcctcctgggccccacccac

SEQ ID NO: 52450 - DNA, 1492 bp, Homo sapiens
ctaacacacacaaaccctgcagccccatcacctctctggggtccagggactcagttacagctcccaacaccttctaaatagacaactgccccacatacacactcacagctctaacacctctaaaacacaactgctccacctacaacacccagcccacacacttccacacacacactctacatacagataccccccgacatccagctacctcacatgcacatacccccaaacacacaaccaccacatgcttacccacaacctgcaacacctccctgacaccaggaacctggttacagccctcatacctgtgcatgcacggacgatagcctgtggcacatctctgatatcagagacccattcttcccttcccacgtatggagggacctcaggtctctaacgcctccccagacccttgcaggtacccaattaaaatcccaataacctttccagagacactccccagctcctccccaaaaccacagtgcatcctccaccaaccacaacacctttccaggcacatgttcacagccctagtacttaaccaaaacccacatttttatgaccccccaatacatccctaaacaccccaacacacacacaatcacacacacacacacacacagctatcacaccctcagcatatcaaccccctatccaaccccaacactgccagatacacccaggacccagctacagccctgctaccttcccactgactcataccctcaaagccctgacacctccccagacacacacactctgcccacagcccccaacgtttctcccagctatagctcagcacttccccaaacaccggtatcatcccctatacctttccaaacatacagcctccccctacaacacacatacactcactgcttcaaacacccactcaaacaagaacaccctctgtagccacaacatttgcctcaaacacacagacatggcttcggttctagtatatctctaacagatcaggccccgaagcttctaatacctcctgaaacttgtgcacactgcctcctggatcccggcacctcctcgacaggcagtcctaatggcccggccccaccgcttcccagacagtctcagctccggtacttttcctcagccacctaagggcccagggacacccctacacctctccaaacaccccgataccacacctgtacacaaagacagcctcagctagtcacaaccctgcacccattctgtgctccgcctgcaccccacggcaccctgtcacataccccgcctaatccttctgcagccctcactcccaccgttggcacattccagcacaccctctcccccaccttgttcccctagacagcctcagcctgtcacacacattgctcactcttgtgtgctctcgctctctctctctctgctgcccaggcctcccgctcttcccagagcctcctctgcctggggaggcatctccaccccttcaccgccccaggcctttcattcctggacagtgaggctggac

SEQ ID NO: 52451 - DNA, 1016 bp, Homo sapiens
cctgccacctgccccccacccccatactctaacccggctggcaaggtggggaggcagaaggtcctctcagtcggtgagagcccttctggaaagcttcagggcctgacctggacacagagaaatgcccagtggcttgggtagtggggagctgtctcaaaggtggtgaggcatatgtgtataaacatgtgcttgcatgtgcaggtagaagggatggcgagtgtcctcatggagtgtgagagagactgggtgtatgtgagatagggtacgggtgtgacagggagctccaaggtgtgtggagtgtgtgggtgtgtgtgtgagagtgacttgtcaggtatgtatgtgtggatgcacgtttatgtgataggtgtgtgtgtaagatgggtgtgtgtaactgtgggttttgcagggtggggtatgtgtgatgggggtacatatatgaaggtttaagggcatggggcaaactgcatgtgtgagcgtgcagtggcaggcatgcatgtgggaaggtgtatgagtgcgtgtgagtgtagggactatgcagatatgagggtgtagttcaggtgtgaggctgggagcctgttgcctggattggagcagtgttttccaaggcctgagtgctacctgaacaggaacatccagcacaagcacgtgggaaggggcccccggcctggaagttgggcactgacccacacagatgcacaaggacagacatacccgcccctgtcctccctcttcctctcttctggcgtcagtggtttttaaaggagcctccgtgaggactgtttgctgtgcagttcccccacccccagcctgtgtctcttcaaacgcagtgctgccctccaggcagctttgtggaggctcctgcctcgaccatctgaaggcagatgggtgggcttggatccgctgctgccccccagggagcgaggaggcagctctgctccttgggcctgggcacaggctgagacagatggactgcctgtctcaacacccccgcacaggcaccccataccataggggtt

SEQ ID NO: 52452 - DNA, 1026 bp, Homo sapiens
tcaatagttggagtaatccccagagactggtgaacttctggccccagagctcccactcttcaggggttgcaaagaccagtaagggcataagctttgggggaccagtggctaccagcccaaaccagtgagttgtccttcttcatctggctttggggcagatgcccaggtgggcaggcattgccccctccccaggaatcacccacaagcccaaggtgtagtctggcctttctagtctggtcagtgcctaactgtgcccaagccctcaggaacgttcccctggtgggcgctctcctccgcctgggctcccagcccacgtgccgatatttattttctgtagtaaaatccatttttaatgccgttacttttgaaataatatagagagaaacaaatgtgatgtgtttaagttgccctctgtgagtttttaatgtgatctatggctgaggtagtgatggaaggagctgttgggcttggagaaatttggtgtcataaagaaaaagagcttgctgtttattattgttgctgggctggggggtctggaacagggtcgtgggggcagggagcccctaccaccctcaggcgctgtgggacagcatagcttctcagtttcaatgcgtgagggttctggggttattttgcattgctccccagcccttgatggggcctttggggaaggggtttgggagctgggggactttgttacccccactgcatgggcttagatctgggctgggaggcttctggaaccccctgctgagctaagtggaggtgtacagtagggaagttggacttggattcaaaaggttaaaagatggggtctccacctgattgctgtggttgtgctggaggcttgaggggcagactgcccctggcagaagacatttgggtagggggagctgttctggactggcagagccccagagggacattgttgttctccaatcagcctggagcactgactttgaaccactcccacctctatgcttctgttccccattggacaggggcttcctccaggcaaacctgatc

SEQ ID NO: 52453 - DNA, 1018 bp, Homo sapiens
ttgctaaggaggaccctgggaacacaaacatgaataagacctgtccctgccctggaggaggagttcatagtcaagcagaggaggaaaattataataataataactcacttattaagtgtcttctgaatgtcagatgtatttacagccatcttttcaatttaatccagtactgagcctggttctgtgattagccccatttgtaggtgagaaaactgaggctcaggggttacatgatgtaccaagagcatgcagtgtatgtgacagagctaggatttgaacctagatcttacaccaaagctcatggtcttttcactagacttcattgcctctaggctttgggaagagagcctctgtggagtgtgtgtgtgtgcgtgtgtgtgtgtgtgtgtgtgtgtgtgtgatccttcctcctctagttattggtagaaagattccctggaaatcctcctatgctgggtgacctaaaggaaagaaagataaggcaatcaatgcagattgagaattccctgtgtcctgccctgtgctgggggttgctgaatgagagcagtaagatggagagaagccaaatggctgctcagaggggttgtcataggggtgggagccttagctccacagaaaaagtctcaggggccaaggcttcccaagggccacagtttctggctgaccaaactcacaagagcctgatgtataagccagaggccagtgattctgcctgccatgaaataagcagagaagagcacggctctggagctgtagtgcctggtgtgaatcctgcctccaccactcactagctgtgtggtttagtgcaagtttttcacctctcgaagcctcaatttcctcatctgtgaaatagtaatcaaatgatcaatacatgtgagctctctctgtcactaccatttgcaaattgttgactgtgtgccaggcatcctgctaagtgcatgcatgctgcgattttatcctcgcagatccctatgaggaggagtttgttgtatcttcatgttgctaatgaggaaactga

SEQ ID NO: 52454 - DNA, 1121 bp, Homo sapiens
tgttggaacaggtggagcagggctaccacatgccgtgccctccaggctgcccagcatccctgtacgaggccatggaacagacctggcgtctggacccggaggagaggcctaccttcgagtacctgcagtccttcctggaggactacttcacctccgctgaaccacagtaccagcccggggatcagacatagcctgtccgggcatcaaccctctctggcggtggccaccagtccttgccaatccccagagctgttcttccaaagcccccaggctggcttagaaccccatagagtcctagcatcaccgaggacgtggctgctctgacaccacctagggcaacctacttgttttacagatggggcaaaaggaggcccagagctgatctctcatccgctctggccccaagcactatttcttccttttccacttaggcccctacatgcctgtagcctttctcactccatccccacccaaagtgctcagaccttgtctagttatttataaaactgtatgtacctccctcacttctctcctatcactgctttcctactctccttttatctcactctagtccaggtgccaagaatttcccttctaccctctattctcttgtgtctgtaagttacaaagtcaggaaaagtcttggctggacccctttcctgctgggtggatgcagtggtccaggactggggtctgggcccaggtttgagggagaaggttgcagagcacttcccacctctctgaatagtgtgtatgtgttggtttattgattctgtaaataagtaaaatgacaatatgaatcctcaaaccatgaaatacccttgaaccttcctttgggagcgggggtggtcaatagggggtgaacggacagatatggctacaggcagcagcaggggaagctggagagggccctaatgcctaccaagcacggggcatccaaggtgtggagttttagaacacccagagtcccactgctcatctgcacgtgagtttagaagacaagcagctgaagatacattaaaatgtccccttcgttgctgatatggccttcaatctgtgtataataggtttgctaattctttatctgagttcatcagatttgccattcatcacaggcgcaa

SEQ ID NO: 52455 - DNA, 1022 bp, Homo sapiens
aagaccttgtctctactaaaaatcaaacaaattagccaggggtactggcacgcacctgtatagtcccagttcttgggaggctgagaccagaggatcacttgagcccaggagatcaaggctgcagcaagctatgattgtgccactgcactccagcctgggcaacagagtgagatcttgtctcaaaacaaaacaaaaaaagcaaagcaataggaggcaaaaatatgcaaataagcatagcaatatcccaatgtagaaagccagccccagagatatagacatgagccaatgggaagagaagcactgaggggggacatactgtgaggcagactgaacggtacagtaggtggcccagttccgcctttatcccttacagggaggaccccaatctaggcccaagagggaaagccacgtgcctgtatgagcgtatgagcatgtgcatgcgcgtgtgtgcacagggtggtgcacctggcaggggtccttgagtgaggcatgccccattctgtagcagggaacctggaatgggctgtgtgttctgcaagaaattggagccggtggccacggccaaggaggatgctggcctggaaggggacttcagaagctacggggcagcagaccactatgggcctgaccccactaaggcccggcctgcatcctcatttgcccacatccccaactacagcaacttctcctctcaggccatcaaccctggcttccttgatagtggcaccatcaggggtgtgtcaggtgagtccaaggggtcggaggcaggagctgcctggatcctgggagaaactgagggaagaagaagagatgcgaacttgcccttaggagcctccaggaggatgtggcagatacaaccccgctttcaagatcacatgggctgagggagtctgtacagccctcccatcagaaaccacagtctgcaggggagggtcaagaagctctactcccagtctgagaggggcaggatcctgtgacagatgcaagtgacaaagagaaacttcttgcccttttaggtgcca

SEQ ID NO: 52456 - DNA, 1068 bp, Homo sapiens
aagaactggtttttaggagatggtgactggggactgtgagggagctgagcatggcttgatagaaatcctgttagagagatgattataatgttcaaaatcatgtgtgtctgagtgtgttcgtctgttaacctggcaggcaccccatgtatatgtgcatgtgtatgtgtgtgtgctattgtgagcttgggcttgttagagcctgtattggcgtgtgatggggttggcacgcacactcatgcaaatatatgctgtgagtgttattgtgtgactgtgctggtgggtcaggtgagtatgagtgtgaaagagagctggtgtgggtggtttgccctatgtgacgggggttgtgtaagtgtgccaggggtgataggaaggaaagtgaaggcagaagtcatgctggggcagagcccaggccttctggcttcctgaagagggcaggagctgggcagctgctgacagaaacattggcagagacttcatcttccttgtccttctgtctcaccctcaggtctctgacccctcccaaggatcatgccgcagccccactgacccaggagtaggggcctaaggggtgagtggggtagactgagggctttcagggtcaggaaacagggtgggggtggccttcctgaaccccacaactcctcacagcctcctcctcctacaaggaccctgttgctaggtaacggatgggggagccagaatgaggcagcttgagaggctgaaggctggacccacgacaggaaatggccttgatccccctctgcagtgactctccaggtgcagacacacagcctcacacacactcacacacaaacatgcgcagatatatagacatacatgcagagatacacacatccagagacaggcacactgctcccacacagagataggtgcacattcatagacacacagacacagagacacccactcacacagacaggcacacacatactcacacagaaacacatgcacacaaacacggtcttacagacatatacacatgcagccaaacacatacacagagacttttatacactctcgtatacacacaaacctgcacacacagac

SEQ ID NO: 52457 - DNA, 1187 bp, Homo sapiens
caccaactatgtgctaggcacccagctcttatcttctctaagtcttgctttctctgtctataaaatgagataatagtacttacatggtcattgtgaagattaaatgagctcatgtatataaaacccttagcatatccttggctcattaaaaatattcaataaacatgttatttttttttttcaaaggagttgatttaatttcaggtgatacaaagtttagggtagaacaaggaccaaagagcagactctggcaagattctgagctggttttacttttaaattcacagttatggtaggaatgacttagtgaaaacaactaaagagatgatgagccactgtaagattttttttttttttttacaaaagtttattcttaaatgtacaacagctccaagataacactttattccagctatacggggcaaaagatgttatggcagggaatagagaagtttaaatacggatgaaataaagggtcaccatctcctcaggcacaaggaacagcttgcttttcgccagatttcttaattccacctgtggccaagggccccttccccgcggccttcgcttttagctcctcgagtttcttctgctcctctttttgtttctgcttgaaagccttgtcttcctcgtccatctccttggcctgcttcttgggctgtttcggtggcttcttcttgccaccttcgtggccggacatggcacctgccgccccttccgcagaccctgccaccagaaacctaaacatgttatttttcaattcaaccagcaaatactgagagatgccatctctgggccaggccctcaagagtccagtgggaaaggcagatctggaaacatatatttatgaataaagtgcaggccaagctcacacctgtaatcctaatacattgagaggccaaggtgggaggattgcttgaagccaggagttcaaggccagcctgggcagcacagcaagaccctgtctgtacaaaaaaattaaaaattagccgcatatggttgtgcacagctgtagtcttagctactcaggagactgaggcaggaagatcatctgaactcagaggtttgaggctgcagtgagctaggatcatgccattacgctccagcttgggcgacagagtaagaccttgtctcttaaaaaaaaaaagtccaaacaacagagtatttgggggacaaggtggggctgg

SEQ ID NO: 52458 - DNA, 1070 bp, Homo sapiens
gcctcaaacctctgagttcagatgatcttcctgcctcagtctcctgagtagctaagactacagctgtgcacaaccatatgcggctaatttttaatttttttgtacagacagggtcttgctgtgctgcccaggctggccttgaactcctggcttcaagcaatcctcccaccttggcctctcaatgtattaggattacaggtgtgagcttggcctgcactttattcataaatatatgtttccagatctgcctttcccactggactcttgagggcctggcccagagatggcatctctcagtatttgctggttgaattgaaaaataacatgtttaggtttctggtggcagggtctgcggaaggggcggcaggtgccatgtccggccacgaaggtggcaagaagaagccaccgaaacagcccaagaagcaggccaaggagatggacgaggaagacaaggctttcaagcagaaacaaaaagaggagcagaagaaactcgaggagctaaaagcgaaggccgcggggaaggggcccttggccacaggtggaattaagaaatctggcgaaaagcaagctgttccttgtgcctgaggagatggtgaccctttatttcatccgtatttaaacttctctattccctgccataacatcttttgccccgtatagctggaataaagtgttatcttggagctgttgtacatttaagaataaacttttgtaaaaaaaaaaaaaaaatcttacagtggctcatcatctctttagttgttttcactaagtcattcctaccataactgtgaatttaaaagtaaaaccagctcagaatcttgccagagtctgctctttggtccttgttctaccctaaactttgtatcacctgaaattaaatcaactcctttgaaaaaaaaaaataacatgtttattgaatatttttaatgagccaaggatatgctaagggttttatatacatgagctcatttaatcttcacaatgaccatgtaagtactattatctcattttatagacagagaaagcaagacttagagaagataagagctgggtgcctagcacatagttgg

SEQ ID NO: 52459 - DNA, 1030 bp, Homo sapiens
caccttgcccagcttcccctacactaattctaagaagtccagagctggatgcttttctttgtgatctctgcccatatcttcctgcaggcaggagaggagttgatcttgagaggtaaagacaggttgggattaaggcaatgttgccaaatttgtgaggatccacacttccttaacattcagaaagccagcccagtgcagattctggatcaggagagaatgagatgcatttgcatgtttttgtttcatttcaagccagtctaaatgcatacttttagtcctcactttcctctcccctcctcagtggtacttcctcttgtgagctgcttgggtcctaatatccagagtgtcccatctgtgttggtacagtgggctgcttctcaacaaagtgttgggaccaaccatttttctgttcctccaggcctgggcatcctgaagtgaaaccacctgacacacttcctgcgatctttgaaatcatctccatcctgaaaactcctcccattcacagttctccttcccagccagtagtggatataggagcagaccagcatataggcttaccaggactgattttgtttatttagagggatacaaaacattctttcccattgccttttttgttaacttgctttcagactctacaaggtttttagaactagtttcactgatttttaaacttcttgaattgaaccttctggaatgcttaatttaggtagtcagattacatggggggaggaaccataaagatcatctttctggccagctttactgttctctcataagctagtctggccattgtgaagaaagggatgtggcacaggttgtccatcacctctgccagggcatgtgaccctgcaaaaactacttcaaggaatgaactttttgaacaccctgctttataaaggcctaagccaagacctatggctttagattcatttctgttttgtgctcatttatgatccaggctgtgtttgaatgacctggaaaaagctcgttcgtatcttccagtttaaccaaccagtccttaatgttc

SEQ ID NO: 52460 - DNA, 1044 bp, Homo sapiens
tgccattgcactccagcctaggcaacaagagtgaaactctgtctcaaaaagaaaaaaagagaaaagagagagttagtgaggtcagtccctaacacaggatagaaaggatgggtgttgtcaactatttattggtatggggggaatcctctcacaagaagcaggaagggtagggcattaagaggtttggggacaacaaaaagttacttacattagctcattactctagttatgggtttaaatagactctattcagttgaagaaagacaggtccttagcaggtattgaaacagatgtgagactgcagctctaagggtgcttccagatctgaaactagtggagactgtaataggtcctttcagtactttctcctgcacaccttgttttatgattttgcatttatttttgttatgcagtaattccatccattcattagttatgagagcattgattcattcttcctctgacagtcttctcatatgcttcatgtaaactgagaggagggtaggaatattcttgtcgattatttatgtcttccagtcctagccatagaaatgtttgacttggtaactgtgaggtagtttgtccactggttaggcttgctatttggagtttcttcctgtgtagagaaatgttggctattagatgtggtttaggatataagaacagtgagtcgttactatatatagggagttgagaatgagtattccagtgtctgcttaggaaaaacaggtttgtgttttactttaaagattgtcctgggaaaagtaaagagcgttctttgagaactctctagagaacaggatttgaccctcttggcagtgattccttaacttgctttgagtctgaggcacttctgactggccattgaaagctatggatcctcactctaaaaaccacccattatatgtgtagacaagattgtacatataattttggggttttgcagatttcctgaaactatcccttcttttttttttttttttttttttttgagacggagtttcgctcttgttgcccaggctggagtgcaatggcgcaatcttg

SEQ ID NO: 52461 - DNA, 3299 bp, Homo sapiens
gatctactgaagtaatataatcatataatcagtttttctgcaacatagtaaaagttcagtaattggtagcaactattattctcaaatattcagaaatgttagttcaggactttgtgtaattttcaggaaagctttagagaaaaagagggtgtggaattccctggttttgatttagatacggatctgcaggagagccctggatttcattaatttgggtgaccatttagctctctgaaagcaatttttttttattgcacagaaatttcttctggttattctgccttgtttccctcagattacagagttgaaggctgattttcagtaccaggaatcgcagatgagagccaaaatgaaccagatggagaaaacccacaaagaagtcacagaacaactgcaggtgactgactctgcttattttatgtgctaaaattgtgtacctacctggtatacctagctgattgtattttaagtgatcatctcttagatttcttttttttctcaaagtattaacaaatcatgttaatcccccttttaggttttttttttttgttttttttttgagacaggttctctgtcgcctaggctggagggcagtggcacgatcatggcttactgcagcctcaacctcccaggctcaggtgatcctcccacctcacccttccaagtagcgaagaccacagccatataccaccataccccactaatttattttttaatttttttgtagagatgggctctcgctatattgcctgggctagtcttgaactcctggcttcaagcaatcctcccacctcaacctcacaaagtgctaggattacaggcgtgagccaccatgcccagcctgtagatactttgtattgtttcactcttggatgtgttctgatcttttcccctcaaaaacagtagaattattaagtatgttctttgatttttgaataaaccagatgtgattccagatgtctgaattatagattctgtttatccagctcatgaagtcacttcacagtttgtattgcataaagcatccctttgtaacagtgggtcccaagagattgaggtacactgattaacctctggcaaatacttttttctcctgaaccaagtttcaagccctagagcttcctgttgttttccacctctagaattgttcatctctttctgaccctccacattgtctgccttagcatctgcacttactctgcatgaaaaatagcttatatcctgtttgaaacatccttcttgcactgattttttttttctttaggccaaaaaccgagagctcctgaagcaggcagctgctttgtccaagagcaagaagtcagagaagtcaggagctataacctctccatgacagacctcaaggaggctccctagcaacagcaaatggagttgtccagggttagggttggagacctggctgttctgtgggaattgcaagctttcttaagaaatctctattttattacagttatccttctttgtgcgattgcagtgggctgaatggaaacacctggtttgtgctgtgttagactgcatgcttgagtgtttgggatttcaagctcgctctctttctctcactattaggacttttctttttcttcttcctcttctctctattttggttctattctttttttttcttttttctttttttttttttttttttttttgtggtggtcactgctcagtgtaatgtgcagaatgatttgttttttgtttttttttttttttttggtccttcattgcatcctgccatacccatgagcaaacagtttggcattaattatatatcactgccaccctctgaactttgaaaactgccatcttcagacttggtataatggaagaggctttctctctccaataaaccttttgcttcagggtatactcttcggtttttttccagatgtattatgtatgaactttgtactatgtatagccagagttttatttattttttaaaaaagaaactttttcttgataaaggaataatggtggtctagctagttcttgtaaaagtgatgcctcttgaaaaaaaaacagtcctattcactagcttttagtaaaagaatcagatcttttctttcttgttaccttggagtcttaaaaactgattgctaaggtgaaacaattcaatgcataagtatggagctaagtgccttttggaggatttcttggaagagcatttatggagatacttaagggaggtagcaaagatttgaaccgtctgtctttttaagtaagggcagaaagcaaggttgtccaggttgtactggacacttctctccccacccctttcctgattgttttatgtgattgattttaaattctcacactgccacttctttaaaaaataaaatcctttatttgcttatatcagttgtcatactgggctgctgtcagagaatgtttttttacatgaatgaacagattaaaaatggaataatatggtcgggtgcggtggctcacgcctgtaataccagcaatttgggaggccaaggcgggtggatcatttgaggttaggagtttgagaccatcctggccaacatggtaaaaccccatctgtactaaaaaaatacaaaaattagccgggcctggtggcatgcacctgtaatcccagctacccaggaggctgaggcaggagaactgctcgaatcccgggaggcagaggttgcaatgagctgaaatcgcaacactgcactgcagcctgggcaatggagtgagactccgtctcaaaaaaaaaaaaaaaaggaataatatttgaactacagagcatttttggggtcagcatgagctgctctagtaaggactcttgagtctgggaaaagtggtatcactataccttctccccactcctcacccacccgagcccatacactccctgcttttcatggatatgtattgaaaacaggtgcttctcagaagcactttgcctcaaccagagttatgtatgccctgcctatcttcccttcttaaccctgtaggaatatggatttacttttccaggaaaggggatagatttacatttctaggcatactctcaggtcctctatgtgatgtttgtgaaaggaattagggtgtgtcatgtgtgccatgaaacaacaaaaccaactaccctagaatcatttatgcagggggtactagagttagaaataataatgagggcagataacatttgtacctcagtctaccaaaaaattatagtactaaatttaacttctaggcgtttcctggaagcagatgctctataatttgtgatagcattctcataaatggagtcctacacataattggacaga

SEQ ID NO: 52462 - DNA, 1029 bp, Homo sapiens
tgcagtacagaaaaaccattaataattagtgtggtgtgttagcccatttgggctactataacaaaataccataaactgagtagtttataaacaacaactttatttccatgatctaatcaccctccaaaggaccccatctcctaatattatcacctcgggaattaggatttcaacatatgaattttgcagggacactaacattcagatcatagcatgtggtttcactgtcgtctcagaaagcctttgtagaaatggctggatagtagaggaaaccacaaatgaaaagagtactttttgtatttctactactttaagttccacttaatatactacatattctttcctcttcaattccccttcctccctactccttttgtatttttaacaggtaaggcttctttgttttggagggaagagccagaaactcaggtataaagagcaggtaggaagccaaggataaggctagaaaagagccagctttttaaagcaagagcatgggattagatgtttggaggttgttccctagggtaggtaggaagctacgcttttaatgcacatttcatctaactgtctgtgcctagattctagtcagtggactgtggcagtcaactcctggacaataagagagttcagtatgtttaaactacttgatttaggtgtgggcggcaattgttctttttatatttttatcagaactgctgatatgcttttcttctcttcccaaagagttaaaattcccgatctgtgctttcttcagcaggctattgaagcagattctttctgctcagtgaagataccttgaagtgggtttgcctgggtaatatttctggaattttgttgtgaacctgggcatctagggactcatttcttcaaatggcccttcattccctacgttatgagacactctgagaacaaagtggttctgtgtataaccctctcaagaagtgacaacatcctgaaacatatcttttctctcttaggcaacagttacaacactccacaaatcagctcgccaaggaaacaaatgaa

SEQ ID NO: 52463 - DNA, 1120 bp, Homo sapiens
actgcactccagtctaggtgacagagtgagatcccgtctcttaaaaaaaaaaaaaaaaaaaaggtagcaaaaataaaaatattataaggaccttctttataccctttacccagatttacctcttgttaacattctaccccatttgctttattatgtattctttctctctttctctatgtgtatctacataattttttatgaatcatttatgggtaagttaaatacttcatagcccccaaaaattcattgttttttctccaaagaaaaggctagtctcttaccaaggtagtaactcgatttcatggctggatagtttggatagtggtagtgaaaccaggacatgtaacatcagaaatctgttcaatttgcagtcttaaaacatctgagtgtgttaaaacatcctctgtccttccttttgcagatagcatagaagccaatgtggaaagctcagaggtgcacgtcgaaagagccactgaacagttacagcgagctgcttactatcaggtaaaagcgggtaccaaagaaagtcactctgtgttgcagactttttaggccatcagagtacattgacatattgagaacagctacagcctttgcttaggtttaagctaaaggaaagtagtcataattgcagtcccagttccatttttattattttcctttgcagatagatctacaaaaaataatcacaccttgaataaacttatcagaaggctagtaactgcaaagctaaccctatacactaatatgatacctaaatctgctatgaggctgttttatatcccgaacagctgaatgtatttcaattaggatagtaagaagtacagttaaagtagaagacttcatagattctttatgttgagtgttgccatagaggatggacatagaatcaacttcgactgctatttatatatgaataaataaggataatcattctggaactgttcctgtaaagtgaaatccttctacatgttagttgaaactctggtttttttacttatccaagtctttatctcagtgtacaaataatgtgaatgaagtctttctcacttcccttcaatttggtgttgcatggctttttagaaataaatagcatttcatgtccttcgcccactttttg

SEQ ID NO: 52464 - DNA, 1731 bp, Homo sapiens
aaactgatcacaagaagacagcatatatcagaacgtcctgtaatcatttagttagaaactaactactaactagtctttggaattcgtgacctatggagacagtaattatcaatttattgattctattgatttctcaaattaggaattaacttatgtggattttgcttcctcttgtattctgattgcccttcatcccaagtgtttactgaaaattccattctagatattcttgttttgacaaatgacactacagtctcgtaatattgtcttttatgtatatacaaaatttacctttttactagcatctgagatagagttactttctggtacccagtatattggagtctgtcagaaactctataataggccaccagtttttattatttaacatttttatttgaatttctaagaagcctattctctatctattttgaaagattttggcactatatttaattggaaggtaaaatattgtacatgtgatccagagtaaatgagaagtctctatctgagctggtcagttactggagtacatgttactaatctgggtttaaagtttacttcattatctgctagtgtcatccacagcagttcatcctcatccacactaagccatcctgttagcttttaaaggaagttaatttaattaacattaatatactctatgggctccctctcccacctgtctgcatagaaaggcagaattagacatagcatgctttggaaaagcaaataggaattgttgggaatgatttaatcttgttgttgttgttgttgttgttcacttgtggttctacattcctggtgaatgatgaatgttgctgtcaaagggctgccccctaccttataagggttgctgggcatttgaaggcaggaagatttttaaagatagattgaggttggtttaaaattattcctgtaaaccaacaataaagcaaagaagaggttcatttttgtaaataacactggtttcaaatagtgatgttagacttaacctaatttataaacaagagattaatatctccatgcatagttttagacaaaaaaagatgtttcaataaaattactgtcttgtaatataaatgttgtccacttcccttttccacaggcctagaacagttaaagggaacataatttgtttaggctcccacataaatgtgaatctggccaacaactttggttcatcctttagtgaattagaggatttggctaccctgagtatatttatattcatttcttctgttctccttctgttattatacttaatcttctaaactaaactaatgtgaacagtagggaagcaagggcccaaatgcataagtttctttgcactgttgcacttacttaatacaaataaatgttttttaaagcttttgtagtatgtttttatgagttaacatcctaatgtggtaggtattaggtaatgtgctgtcatgagaaaaattgagacttccaagaaaactggacaccaggtgagggttggtttggagacggaataggtgtagctgcctttccttgaaaaacagtgtgtagagatggctgagtgcaatggctcacacttgtaatcccaacactttggaaggctgaggcgggaggatcagtatatcggtacgtctgagcccaagagttcaagatcagcctgggcagtatagcaagaccccatctccattttttttttaatgattttttaattaaaaaaaagaacaacaggatagagctgttggggtggca

SEQ ID NO: 52465 - DNA, 2442 bp, Homo sapiens
ctccaagccccgcatccctctgtggttgctgcatccctcgtgcggcacttgtctgtctgccacagagaatacgagggtaggttagcgccatccctgccctcagggagctcccagtctgtggcactagtaggcattagtaatggttggcatgaaccctttttatcccttcgaaagttcttgggaataatgaaataatttaatttggtctttgagtagggtacaagttgaataaatatgaattaccttacaaggaaacgcttctgaattaagagtttttttctgctgtagctcatcgcagtgtattgtttgttgcttgtctctgtctcccgttgtattgccatcctcaagggcaaagactgcatctttgtattcccagctcctaggcctgagtcaggcacatagtaggaattcagaaagtatgttttggatgtaacattcctcctttttcctggacaaaatggccttttgtccggtgcattgtcctttccatagaggaggggttggggcaggattgtgagatgactgtgttgaatcttcagttagctagacaaggatacgttttttcatgtgcaaatctaaaggttctagtgaggtggttcttttttctaacttcaaattagcaaacccaaaaagcaagcaaatgtgtggctattttctggatcgctttgcacttttgtagtagttgcttcagtctacaaattctgtatccattttgatccctcgctgtattgatttcaaatttgggccgagatagcaaacatagttagaaagcactgtttttgagatcacctaccctttccttaggatctggtaggtaccaggcaccgttaggtgctttgacatatgagtctcccttgaatggtatggctgtaggatatagaggaaacgtcccctaatcatgctgttgtagaaagacctgtttcaagggtaacatattcatttggtacctggtttcatggggcatgattttgaattgccctagttccctaattatgcacctctgatttggtttcagagctcaggacagtactctttgcttactctgtgatgagactaatcttgatgagccccaaacagcaactaatttattcggtctttatatgatattggagtaggggtggatttcagattcaaactccaggtgactagaccaccccagctatcgtacttgcactctctatgcagttctttctctgaggtgaagatccagtgttaaaatataggtttcttggtgctgctctaaatacagatctactaaaatctgttgcagagcaattgaatcactagggaagtaagtgtcaaacgtagaatggagctgtaataacagtgaagtggatgacatttctgcttgaacatgaactaattataggctggtaggagagctgcaatgttgaatgggacaatggttgtaaatagcatttataaacccatcctgaaaatgcttttttctatttttatttttcagggcaggtaagccccctcccggtttacatctggatgtagtcaaaggagacaaactaattgaggtatggaaatacatgtcttacttttttggctgccacactaaagatttttgccagtgactcacttttccaccccctctcctgtgctttgttttccagcaatgctactttctttcatcctgattttttttttctgttaaaagcacatggtgacatcacacatttaaagcttatgtctaccacagacactcaattttttgtgacttctctcaaatgaagggttttaataggtcatgggtcctgtgggccccagtcaaactggaagccctgttagcttggttaattccctctccctgagtacatggagttgtgtaaaccgtgcaaggtatgcagtaactgaagaaagtgaatgatatatattgagtttaacttctaagttaattttaagacattcaggcccaactccttataagaagtatggtaaactaagacatttactcaaaaagataatggaattgtggtgaaattcattaattgattctttcaaaacatgtattgagtgtttactatgtgccagttactgtgcttggcatacagattgcagcagtaagcaaaaccaacataatttctgtcctcaagtcatccagtgggagagacagaatcacaccaaaaaattacataattatatttgaattaagtactataaaagtttagcagaattccagcttttatacaagcctctagagagaacaccacataggagttcaagagaacatgagtttttattagctattagtttgcgtaaattttttataatccttacggtattatttatttaccaagagatggatattaagcccactatgaccatgtagctgtgagtctcccatattagaccaattttatatttgcttgctcagctagaatttaggttcaaggccccattattgaatgcagttttttcattgtggttttttgg

SEQ ID NO: 52466 - DNA, 1210 bp, Homo sapiens
tacttatcttttctctcccattttataacatgcagaatgccaacaggggaaaatattcagaatctatagtaggattttggcttgctttggcattgatattgcacctgtttcagccaagctctttcttgtcctggggaaaacctaagcataactgccaccaggccagcaatttctatattcttttgacttggagctggagagggaaaactacagtgatgtccagctcctgctttgggaggcgtggcttctgctgggttggagccattcttatttgacccagaatggagccaagcctgtatggcagcagagaacggtcagtggtatttgttatctgggggaacaacaggtctgaggatataagaaacccaccgaggagattcaaggctcagtgagggagtttccttctcactgtaacacatgatggatgtggtggacccagtgccattttcattttttaaaaagctggagtttctgaccatgatcctgactatggcatttttaaaataaattaaaaacagacaaaaaagcaaaactgatgtgctggggggaagctgacctgataagagagttggcgatcatactcttccttctaaaactcaggttgtttttgttttcccccttacgtttctgatttggttattcccagcacacggcactttcttgggtcacattcggttggaacctcacaagcctcagcaaattcccatcgattccacggtctcatttggcgcatccacaagggcatacactctgcgcgagaagcctcagacattgccatcggctgtgaaaggagatgagaagatgggtggagaggatgatgaactcaagggcttactggggcttccagaggaggaaactgagcttgatgtaattccctgtttatgtcattgttttgtctttggggaccctggtttttggagtatacagctgttctatgtagctggaaatgccagtgacttagcagcagggggttctcttgagtccagtaatgggcctttggcaatctggtgtggccagctgtgacagctctcggagagccacattgtatggatttggttgtgtatcaccaggcctaacaaggaggctgagtcccagccactagtctccttgagctgttttgtgcaccttcactggctgttagaagctaagactggaagctacatttctctgtcccttgactgcttagagctaatgctgtccaatatggtag

SEQ ID NO: 52467 - DNA, 1053 bp, Homo sapiens
aggtggcccagaagaaagaggacttccattgcgttcccccatgtgccagatgctacatgacgtctgctctttaatcctcaagttaccctctgagtggtttcaattcccagtttatgtaggagagaaagtgtgccttgtcaaaggtcacacggggatccacagcagggccaaggtttggacccagagccacgcctgtgacctgtagaggcagaggtcttggcgccccaccacgctttacagagtgtgcggcacagctccctgatcagcaccaagattccaacgcacagaggggaaaagttgtggttccagggcgacagcagtgaccgggcccagagtccctccactgggagccaagacacgggctaaggtctgtcggttctggaaagtacccttttcagcactggcacaaggcctgtgtttcggatgtttcagtccagccattgtcagaaaatgacttcccacgctcacgccacagataaaagcccctgctggggctgagaccactcaggagtcatcttgtaatttccactgccacctgctgcctaccacacgtgattaaatacgagtcacccaagatcccaaaacaagagctggggatagtaaaggacttttgatctgtctcatcccctcccgttctcagcagaccacggtagttagaagctcaggctgtgtggtcagacccaattgcaagctctggccctgccacttgttggctgtgtgatctcaggtaaactatttgacctctctgtgcctctcaccttctcaactgtgaagcaggacaccggtgtgtaactcagaagcactgtgagaattggttgggacaaagcatatcaggggcctgccacagagtaagcaggtcacagaaagcagctgcagaggatatcacaggtctactggtgagaaaaaggacgctcggaggagtacccagcacaggcagagtaagtgaaccggaacgtaaacttagtctttctgaccccatgcctggctctctcccgctcatctgtgattctgtttggccccgtttagcaggtcctctctggccttggagcaggt

SEQ ID NO: 52468 - DNA, 1050 bp, Homo sapiens
tgaagccaagttcccacattaatccatgttaaccacatgtggttaaacccctgtttaccatatacagatctatcaggcttggtgctacagagatgaggaagacagtccaggcctcccgggggcttagagcttgggggtgagagtgggggtggcagacgttaacaaaatctcccatgcagtgtgatcagcattggcactgcgctgctgtcaccaaggttgatggcctcggattcccctctgcatccaccggtgggacagctggggttgcaggattgagaggaaccctgccagctgctctgcatcccaaggctctgaggctgagggagtcacgtgcgagatgttaggtccaaaccagcccgccctaagtagcaagaatctagaacctgaaggaagctggtgcagtgtccatcaaatcagtttccacaaagctactccccgtctgcagctcagtttctgtgagacttgcccgaggtcttttagaggcttaaaatggttggctggtgtcggattccctgagaagcagcagttaggaagcgtggttcctccagcacttagatggttttctgaaattgctcaagtatttcttcataatcatgttcatcatcatctgcaaaagagtccgagtcaatgaggatctttagcgttaggcaagttccttcccttctgtagggcagtttcctcatctgtgcagggaaagaggtggcctggatgccctacggtctttgctagcctagaaaccacgatttgttctgtctcaacactttgcaaccctttcattttcctgtatgctgcagggagggtagtatgttggggactgaactcattttccttgccaaagccctagagcccatgggaaagacagtaggaacctttctacctgagcccaccccatagaggcctgtccatcaaactgggaccatagaagggtctgtccctggacagggccaccagaggcaaaggaagcagcaaggtagggaggggagacacaaggacaagggtgagcagcgcccacagggactcacctagatcctgcctttggggcttagcggg

SEQ ID NO: 52469 - DNA, 1227 bp, Homo sapiens
gttactgtccccattgtggacatgagtgtattaggctatctgtaccttattaaacaatcagtccttccaacacccttgtcctgattccatcttagacaagcagcctcctgattccagtgtagtaaaccaatcaaacaaactgacttatggtgcttgtgatagttatttgttactataaatcaattgacctgccaggcctagatagataagaaatgctcagggctgattccatttcctgtcctgtaaaattaggataataattcctatctcagagttgcgtgctgatgaggtagagaactgctgttacttaggtgctctgtagattgtggctattaaatacgttactgacactaaccctgaggaccttgaagggtttgaaggtttcagagtgtttcctttgcttcccacaactttacttccctgagagggaccaacggggtttcagtgtgtggctggaaaagggggacttttaaagacagtggtttctactaggagattttgtgtgcaagtgtgactacagctttagatccttgttttcctgcttagactgtatttaagtgaggccctgttgtctttcctttgcacaatttgggagagggatccaagacagccctaatagccattgtctccatgaataagctctgttttgctattttactggcatttctccctgtgagagctttctatgtgcagaatacttgtgaattcttagctaaggtagaaagttgggagataagcgaagtttgcatatttggccatatccaaaaggcagtttccttctgaattggcctgaaaatgaccttttttttttcttctttctttctaggcaagctgtggattttctgagcaatgaggggcacatctattctactgtggatgatgaccattttaaatccacagatgcagaataactggatctaactgggtacctgagatattttacagctggacctagtttcacaatctgttgtctccagctctgcatatgtctggccagggggcttctaggaagtaggtttcatctatcaaatgtctcctctgacttccttttgaaacttactgctcttctgttttattttgttttgtttgaagctcagagggagatgggcaattgacagggatgcaatccagggtgggatttcttgaggaagttacaaataagcttgttacaacatcaagatagatggaattggaaggatgctaccaggagagtacttacatagtgct

SEQ ID NO: 52470 - DNA, 1426 bp, Homo sapiens
tcccgcacgaccgtgggtgggaaacaccgaagccaaaactccgctacagccctttagatgaaggcgtcgtctgattggtgatagtttggcgcgaacctgagcacgccgaacaaaggaagtgacggcagaagtcgcgcacttgacgagggtgggatcacacggcgctgcgtcgcggtagtattgttctgattggttgatttcttgcgataccgctctgccagccccttgcttccgctagtgcggagggttttgcccttcgtaaagatggccgcggaggcttttggagccaactgggagcgcagtacgcgttttctggagcatgggcagaggagacaggaacaagcgtagcatccgtgagcaccgattggctgaagcgagcaccccgggagctgactggctccgccattcgcgggaaggcgtttgtggtgccagagaaaagtagccagagcggcgcagtggcggccgcgttctgtggttttccgctattcccccagacccgcaccttctcggcctctttgcggagaatcgtgaccaagatgtggaacagtaatgatgggggtgcggggtggaggaggaagagaatcgcaggaggttttagcaagagggcgagcctagggtccgagaggcgtgtggtagcgggagaggaagggcgggagcggagctggggcgtttgggggtcacccgcaggaaggcggcgaggaaggttagggagactcgggcagtgtttgaaggggcgaagcctccgggagcctgcgggtttctcggaggcgtgggacgtggcacaggcactaatcctgttgttcaaaacaggtggattcgaaagctatggcagctcctcatacgggggagccggcggctacacgcagtccccggggggctttggatcgcccgcaccttctcaagccgaaaagaaatcagtaggttgaaaggagtatttagttttgttttatcctgtcctgaagtccctgagtcatctatgacagaaactttatgctttgaaggaagatttcaacgtgaactgatgcgataatgatctattattatctgcatctcttataattaagtgctgtaagtttcagaaatgaaatcttgccaaattttccacctcctgtttccctggcttttcccgtcgttggccttattttgaaattgatcagtgtagctaatgaatcagtcttgtgtgaacgccctcaacttggtttttaaatttatttttattttttaaaatagagatggggtctcactatgttgcccaggctggtctccgactcctgagctcaagcgatcctcccacctcggcctctcaaagtgctggggtaacaggtgtgagccactgctcctggcctgaacttatattaatagtctcttttacattcttttttttttttttttgagatggaacctcactctgttgcccaggctggag

SEQ ID NO: 52471 - DNA, 1102 bp, Homo sapiens
tgccttaacctcccaaagtgctgagattacaggtgtgagccactgtgccaccatgcctggcaggaatatattagtgatcacaatatgtgtggaaaggttaaattttccccattataaacaaaggctcagtttggataaaaaataaaaatgtgggaatatgctgtcaacaaaaagacccatctaaaatagaaaggcactggtttttaacccctttcacaatcacatcttcctgggagggattggagcccagagatccccatcatttaccatgtgatcttaggcatgttgacctccagaccttagtttccttatctgtaaagtgggataatgttcccagggctctgcggagaacactgtaacaatgcatgtgggagggataatgatttgcttaatcagccatttacactttagtatgaatgtgtttcacatcctttcctgagactgtttagatcaggagaggtggggaaaagctcaagagcatctgggagggaaagtcaaggagtgagggtcaggggccagcctttatctgcaggctgtccactgaatgtcctgtggcctgggtggggccctggctatccaaccctgagatcaaaagaagtccagtctcccaggcccagacacagcttcttggggccagtgatgttgacttgtggctctaggtgacacaagaaatgggggaggaagtgattgcaatagcagagggtgaggaaatcctgggcgtcattcttgttttatcgagaaacaggatgaacagaggccagatctgctcaaccctccttcagtaagcagtcattgaaacaacttgtgctggccaggtgcggtggctcacgcctgtaatgccagcactttgggaagctgaggcgggcggatcacctgaggtcaaggagtttgagaccagcctggctaacatggcgaaaccccatttctactaaaaatacaaatacaaaaaaaaaaaaattagctgggcgtggtggcgcatgactgtaatcccagctgcttgggaggctgaggccagagaatcacttgaacccaggaggcagaggttgcagtgagccgagattgcaccattgcactccagcttgggcacagagcgaaactctgt

SEQ ID NO: 52472 - DNA, 1101 bp, Homo sapiens
accaccatagccagctaattttagtatttttggtagagatggcatttcactatgttggccaggctggtctcaaagtcctgacctcaagtgatccgcacgccttggcctcccaaagtgctgggattacaggcgtgagccactgcgcctggcctgttttcaatttttgtagagatggggttcttgctgtgttgcctaggctggtcttgaactcctgggctcaagtaattctctctcttagcctcccaaagtgtagggattacaggcatgagccaccatgcctggcctattgactatgatttaacacaaatgtaaattataagattttgtagtttctactacacttgcatgtttattgaatttcctaatatccaagatgccattgactgaaagatgcatcattatgtataactaagaaaaaacagctaccaattataatctgacacagcgctttctcatggccacacctcacttttagagatggtactatgagaacaaattggaagagatgaaatgaaggtattatctagctgagaattctaaaaacacaagtcaagcagaacactcccatcttatagataactaaactgaagtacagagaggtcgagtaagtggcctaagaagaggaagggactgaaactcgagattcagggttccacatcatgtgttcttcctgctgtgttcaactttacccaccagagtcagctgtgaacactggtcctcacctcatcagcacagccaagtggttgacaacacaggcacgcaaggcaaacaaatccagggccctgggccaggtgcagtgatcatatgcctgtaaacccagcactttgagaagctaaggctggaggatcgcttgaggtcaggagtttgagactggcctgggcaacatagcaagaccctgcttctacaaaaaataaaaaaaaattagctgtgtgtggtgctgtgtatctatactcttagctacttgggaggctgagacaggaggatcacttgaccccaggaatttgaggttacaatgagctatgatcgtgccactgcactgcagcctgggaggcaaaggaagaccctgtcatgcagggcccaattctagctctggtatggttt

SEQ ID NO: 52473 - DNA, 1055 bp, Homo sapiens
atacttgctgactgcatggatgagtgaaactcctaaggcctcccagagtgacgcagaccctttccctaacagtaagatgatctggaatcaacaggaattgggaacactaaattaccaagtggctgatgacgatcggactcatttagacctagttttccccttctcatcatctgctgctttccttctaactaggaaactttctgctgggaatgggtttagggactgtgatgaaagaacccactgctcttccctccaaagtctaagcaaagttcagtcagattctatcaaatgtgggtttcctatctgtgtcttttcctcatctgtgctatcgctcttccccttgagctctgatggccagtggccaacagaaaatgattaactcccccgagtgcttttgcatatatattttgatatttcaccctttcttcctagatactaaagtctatgctgctttgggaaatcatgattttcaccccaaaaaccagttcccagctggaagtaacaacatctacaatcagatagcagaactatggaaaccctggcttagtaatgagtccatcgctctcttcaaaaaaggtaccaacaccacctgctcctatcaagagcacttactgtatgccagggtctgatcttcgtcttcacaacaacctcttagaataagtactgattttatccccaatttacagataaggaagccagggtcatacagcttagaaaaggcagtcttgggagcagactccagaattaactccaaagcccttcctctaaaccccacgacactgatgatgctcctaagttcatatttattgagcctttactgtgtgcgaggcactgccctctcagcctggtcctagacacttcacaacaacccttggaaggagtggtttcatttccagcaggtttgaaccttgccaccactgacaccatgggctggataactctgtcgcagacaactgccacgtgtgttgcagaatgttgcaaacactcactagagtgataccctcaggaacacccccagctgtgacaaccaaaaatgtctcagacattgcccagtg

SEQ ID NO: 52474 - DNA, 1098 bp, Homo sapiens
catagcagggcagttcttcgggcaccaccacaccgacagctttcggatgctctatgatgatgcaggtattcaacctggagggcaactgccagctccctccctccttctctccccagacccgctcagtcctgctgtctctctcctgacaggtgtccccataagcgccatgttcatcacacctggagtcaccccatggaaaaccacattacctggagtggtcaatggggccaacaatccagccatccgggtgttcgaatatgaccgagccacactgagcctgaaggtcaggagtcctgcggaggccagaggaggagggtgggaggggcttaaatgcatcaccaccttccctcactctcagcttatccaccttcccctgaccactgagcctcaggaaggttgagctccttccacccttctccagctcaggatcagaaccctggaggcacctgccaccgagtcagggcagtgcctcaccaagtcaccttttcccctggatgactgtcacagcttcatacctggtctccctgcctctggccctgccctgctatggcccatccgctacacaagagagaagaaactaatctcctatagcaccactttcatcttgtctccgtcctgctcaaaaaccttcagtggctccccagtgccttcaagataaagttgtgtctccttgacctagtactcaaggcttcccacagtctgacttcaagcccattgtccacattttccgtacacagacgaggctccagcccctaattctttgggcagtccctcacctcgtaggatgagcttgtggttgttgagatgaaaaatattattcctttatttatccaacaaaatgcattaagtgtgtgccattggccaggccctgttctaatctcagaagatatgtaaatttaaaaacaaagtcacccctctcctggacctgacatcttacaggagagggacaataaatatgtagaattaattatagtactgagagaagggctaaggagaaaatcaaaacagtgaggcgacagggtgacagctatgggaggtgtgtactgtgttagataggtgggaaggggaagtgtccacataaggtgccatttgagttct

SEQ ID NO: 52475 - DNA, 1002 bp, Homo sapiens
atgcatacgggcagctcctcttaccccgtctgcagtggcctgaagcaggttcataaatgtacctggaacccgctggactgatgaaccctgcagagtctagccgtgaacatgcacctgggtcctaggagtctacagttcataatctctctcatgcttagtgttgctctttttatgttgcttttatctattcattatgtaaatatttactgagcgtcttctatgtgtaccctagcatggtgggacctggggtaaacctggggtccaatcctgctaccactgaatacctgtatgaatacctgtatgaccctggccaagtgaattaacctctttaggcctcagtttcctcatttgtgaaacctaggtaataagcgcagttacctcattcgattcagaggatgtctgccaagcacaatgggtgcacagctaagtgctcaataactactagtggtcatggtcactgctctaaagaacttgggggcaaatgcaaggtgcaggatggggatggaagcagacaactgctcacagccggtctaccccaaaccctttttccaggacatggtgacctacttcatgaacctgagccaggcgaatgctcaggggacgccgcgctgggagctcgagtaccagctgaccgaggcctatggggtgccggacgccagcgcccactccatgcacacagtgctggaccgcatcgctggcgaccagagcacactgcagcgctactacgtctataactcagtcagctactctgctggggtctgcgacgaggcctgcagcatgcagcacgtgtgtgccatgcgccaggtggacattgacgcttacaccacctgtctgtatgcctctggcaccacgcccgtgccccagctcccgctgctgctgatggccctgctgggcctgtgcacgctcgtgctgtgacctgccaggctcaccttcttcctggtaacgggtaacgggggcagcgcccaggatcacccagagctgggccttccaccatttcctccg

SEQ ID NO: 52476 - DNA, 1042 bp, Homo sapiens
gcctagcgggcttggctgggctgggtcggtggacccctgggctggcggcgggagcagagcatcgagcggcttttagctggggttcgggcggaggacctgggacaaccgcgggcctcgctcctccccggacggggcgggacggggaagtcccgcccaccaggcccaggccccgggccgccccgagggctgcgcccacctccttcctgcctcggcaaccccgggccctgagggcaggccccaaccgcggaggagcaggagagggcggaggccggcgggccatgccctggtcgtcccgcggcgccctccttcgggacctggtcctgggcgtgctgggcaccgccgccttcctgctcgacctgggcaccgacctgtgggccgccgtccagtatgcgctcggcggccgctacctgtgggcggcgctggtgctggcgctgctgggcctggcctccgtggcgctgcagctcttcagctggctctggctgcgcgctgaccctgccggcctgcacgggtcgcagcccccgcgccgctgcctggcgctgctgcatctcctgcagctgggttacctgtacaggtgagtgcttcgccccgggaggggaggagtgtcggagcccagcacctccgtcagctgggtcacctgtacaggtgacacgccatatgccgggaaggggactgggagagggaaccaagtcctgtgggcgcctggcctacaggtgagcgtgcagccctttacggaaagggaatcccggtagactgccttcattctagccctagctttcctggcacaggcgaagaaactgaggcccagggaagaaagggaggcgcatgggctttgaagtcggacctctcagggatccacttctggctttgccccctctcgcctcacttctgcatttctctgagcctcagtttcctcctgcgtagaaaggaggtagtcaccctgagacaggtgtgacgggcaggcctgttgtgaagagtgagcgaaagaatgagaaagtgcctcgcacagtgcctggcctgtaatggcaggggctgcggactcagt

SEQ ID NO: 52477 - DNA, 1026 bp, Homo sapiens
gctctgcggcttgtgtactaccactggctgcaccctagctgctgctggaagcccgaccctgaccaggtagacggggcccggagtctgctttctccagaggggtatcagctgcctcagaacaggcgcatgacccatttagcacagaagtttttccccaaggctaaggatgaggctgcttcgccagtgaagggataggtgaacggcgtcctttgaagcaggatcagacccagccagcagagatggagagtgactctgttggcagaaggcaggcgaggataagctaacgatgctgctgtggcctctatgcactcagcaagagcgggacgcctgtgctgggccgggcaccagggatggtgctgagtcgggcagaggcctcctttcaaggagttcacagtgaacaagatgagaagggctgggccctggagggtcaagagccccaattatgtacaagacactttgggaggaaagaagactaccttttccccctgccattggtatagctggtgccccaaaacttccacctccctccctggctacctctaaaatgactggtataggtgctgccccaccccttagctcccctatcctgggctaggaggccacaggggctgtcctctagaattcttccttccctcccccacaccattcattcaattcatgaaacaaatctttgccaagagcagtttatgtgccaggaacatcattctgtccttgcaacctggaacaagaccagctaccagcctagcttcatccgctacttgcaccaaccagtcccgggttagatcccaaatgctagaagccagggatgcccaactctgggtggccccagtcagaacctctgggatctcagtgaagctggcctggcctctgctcctgctctcaaggggctgcttttcaaccaagagccttgtgagcctggtctgagccttgcacagccactgagtattttttttgccttagccagtgtacctcctacctcagtctatgtgagaggaagagaatgtgtgtgcctgtgggtctctacaa

SEQ ID NO: 52478 - DNA, 1067 bp, Homo sapiens
tggaagagatcagggacataaaatctacctctcaaaatcagtcaaggtccacgaacagagagagggctggcttaggtggggtttctcaacctcgtgtttgaagtttcaggagctggtgagccagcgtggggtagacagctcagctggagatcagaatccagatctgggctgacttagtgcatcctcttcaacaccagctctgctgctgggcccagcaggagtggccacagacacatttagggccaagaagtgaatatagttgcctggtgaagaaaggtctttttgctgggagctctgagaggttaagtgatgaggtgcctcaggggatgtggatgtggtgggtgatggtgctggggaagtggaaccttttgctgttctaggaggtccatggtttggagaaacgggacagaaaagtcaattgagatagagaagaaaatgttctagtcactgctgtgatgggatccaggatagtctcagctctgttactattctggtggagacacaaaaaccaggataagtaaaacatttagtatatcagatagtgttaagaagtgctaaaagaaaaagggaaagggatagggagagagagtaagtatttgtgtgttgggggtgggaattacaactttgtatagaatggctggggaaggccttcctgcaaaaccggtaagctggttagcagtgacttgggtgtggcctataaatgtcacgagaaggagcagaacctggagtcactggtagcttgaaccactgtggtggaaggaatgatgcaaacagaattccaccggatgaataagcacttgtaaccactctgttggcctggaactaaagatgacccagagatgaagggtgggggcagggagaggatctgagatgatgctggtgacttttacatacaagcaatggttagaggcagaaaggatcctgcagatcatcctgtctagtgattttcaggcttttgaatatcatgtacctataaaatggccaacatggttgcaacttaattttaacaaaaaagggcattaaaaactaccaccatttggctgggcatggtggcccacgcctgtaat

SEQ ID NO: 52479 - DNA, 2243 bp, Homo sapiens
tttgtgaggctgcggagtggtacccccaccatgcacgcaagcacacacacacagatacttccctctccacccttttgggagctctttattttagaatgtaacttgaactcacttttatcattggcctttttcctcttactctgacttcctagcttagctctttccaaaaggaacttgaacttggccaagagaggtaaggaggctgagcagagcagtctttgctcattcctggttgttgccaccctcatttaaatggaagagagaaaacaggagcttcttggctgtttgccaaaatgaattgtccagggaacacagtgctctctgtaattaccctgcctttttctccaccccaacacaaaaatctggaaaggaaaataagtgggtaggattaagagctgttagaagctgaggaccaaaggacactgtgggtccattcatcaagggggagaccctcttcattagagtcctcatgaaattagccaaatgatgagtccttccctagctgggcatggtgggttctctttttttttttttttttttttttgttgttgttgttgagatggagtctcgctctgtcacccaggctggagtacagtggcatgatctcggctcactgcaacctccgcctcccaggttcaagcgattctcctacctcagcctcctgattagctgagattacaggcgcccaccaccacgcctggctaatttttgtatttttagtagagatggggtttcaccatgttgaccaggctgttctcaaactcctgacctcaggtgatctgctcaccttggcctcccaaagtgctgggattacaggcatgagccaccatgcctggccaggcactgtgggttctacaggatgggtctgtaatgtcacggtgagggctctctctagtagtagatctggagtgaggtgtgtcttgggttgaggaggtggcttgactttcgaatgtaaaactgactgtgccttagcatcaccctgtccagtgcccctggggcagctggtagtgtccagaagaatggacacctgctccagatttagatgcccatctgggcttttgtttgatttgcggcgttcctgtcttctgtaaagctagtgagttgtcccaagagactgatgccacagcttgttcgcagtttacacaaactcagctttaaaattccaaatagaatctgacttgcaaactctagctgcagcatgtggagcttctagatgtttactaccttgaatggttgtcagtgtcactgaaccacaggggagaggagtatggggtagagcaatggtctgggccaaggaatggtgagcttagggtcttcctctgactccttactcctcaaggaggcagttagggtccctcttaagcaggcttctatttcttaccactaaattggtttcctttttcatccagaagttagaactccccagatattcacactataggatctgaattccgagattctaaaatatcttaaaccacaagagagaaaatctagttctgcctcagccccagtcagcaggccatctgtcccttcctctcctctgagtcagacagctctggcaagcaaggctccttggctagttcctaatgcactgacaggagccctcccattaaggacgacttctactcaaaatgcgactctccctctgaacttcagatgcctctgttagcaggaaaaggcattgattggattggatatatttatgtgactgcgggcatttgtggctgtagaatccgtgaccgtaatgttatatgtaatgggaactatcttataaacttgaaaaaaataaagtttttattttctatagtttgctcctgtgtcttttctgaataggatcagcacagttgcccagctgtgtggggtcctaattatggcttcataaaaattctaagagttcattagaaagatgtcaccctttcagtaactgggtcatttcaccaaaaaagtaagaacaaaccatttggtataaatatacatgggaaaatattttaaaataatttgtatgggagaatgtattgtttctaaaatatattgcttttaaagtttagaactggagtgagaaaagatttcattcacttccaaatatgctgaaatttattaaggagagaaatcagtaccttgctgcactgcacttaaaccacaaaagcgataaaactgacaaactgataccaaacctcatttgatttgccctgatttcctgtcacatcaactactttttctcatttcatttctctgatttgggt

SEQ ID NO: 52480 - DNA, 1111 bp, Homo sapiens
catggtggctcatgcctgtaatcccagcactttgggaggccaaggtgagcagatcacctgaggtcaggagtttgagaacagcctggtcaacatggtgaaaccccatctctactaaaaatacaaaaattagccaggcgtggtggtgggcgcctgtaatctcagctaatcaggaggctgaggtaggagaatcgcttgaacctgggaggcggaggttgcagtgagccgagatcatgccactgtactccagcctgggtgacagagcgagactccatctcaacaacaacaacaaaaaaaaaaaaaaaaaaaaaaagagaacccaccatgcccagctagggaaggactcatcatttggctaatttcatgaggactctaatgaagagggtctcccccttgatgaatggacccacagtgtcctttggtcctcagcttctaacagctcttaatcctacccacttattttcctttccagatttttgtgttggggtggagaaaaaggcagggtaattacagagagcactgtgttccctggacaattcattttggcaaacagccaagaagctcctgttttctctcttccatttaaatgagggtggcaacaaccaggaatgagcaaagactgctctgctcagcctccttacctctcttggccaagttcaagttccttttggaaagagctaagctaggaagtcagagtaagaggaaaaaggccaatgataaaagtgagttcaagttacattctaaaataaagagctcccaaaagggtggagagggaagtatctgtgtgtgtgtgcttgcgtgcatggtgggggtaccactccgcagcctcacaaacctgaagcgcagcacaacagccgtggcctttgtccaggacaaaaacccaacagctatactgcatagggggagggtttgaggcctcagagtaaaacctagagcttcctaagatcaaccatcaaacaaggcagagcagcatctaggcaactatgctgaatacagaccaagggaaggcctacctcacactacatctccctcctcccaaccccacaggaaacaaggccaaagaggcagctaagtaaaggagcactgacttcagctactcagcaaaaacttactc

SEQ ID NO: 52481 - DNA, 1930 bp, Homo sapiens
tctctctctctctctctctctgtctttatccatggaatgctggcgagaacacaatcagaaccaacagctgcaatttttgctaagagtgagctgcagccccgtgttcatctccatacagaagcagggacagttggatagagagaacaatggactcactgcagctacagtgcttttaatttttctgtgttttgtttttgtttttttgttttcaaaaaatgaaaaagaaaaggaaattcctggggcagagttgcactcttagtccatgaccagattgagaattactgataacttgtggtgatcagataaatgcagcagacttttatgataacatctcttgcagtcttagagtctccttagcttagaatctcacttatttccagcgaatgtgtatgttatttttataggtaagggtctgatctttgacgcaggtttcccccactttctttttctagcaagaaggggtgtttaaagtcttgaaaatagtaattgaaatatctaaaatacctccctgtggcagtagcacctctatagctgctccagtggtctgctctctaggatgatacctttcctgttcttctatctcctagctggtgaactgtggggcactggacactgagtaacttaaactttggcatttcccatctagaagccttagtcttctttccagtcccttttccctttagtcaaatggcacaaccctaaaaactccttcagcttgactgtcattcagactgtatcacaggaggcttagcttccaaactggagagaaggaactaaagtgtcttatgaatttcagcttcttggctcttgagaccgaaaggttctacctattccccctgcagagaagcacccatttcccatcagatgctcgtccctgcagcttcttccttcttggtcatcataatgctaggttcttacccctttcctgccctctgcacctcatgtccacctccaggcagctctggccagtccccgggtattagacccaagaattcaaatcaaatctaaaaacatgcttataactacattttggccaaaactgccaatgtatttgacttcctttgtggaagccctaagccatatgaaggatgtcccaggtatgtatttacccagatctctgcctgaaactgaagagcagattgctgtatttaaattttcccatggaaaaccctgcttctcaaatcccattctaaagtaggaaaccagaaagactttgctgattgtggggggaagggagaaacagacaggttttcacattgttgccaaggctggtcttgaacacctggcctcaagcgatcctcccacctcggcctctcaaagtgttgggattgtaggcatgagccactgcacccagccagactttcctgatttaaatgagagtactgcatcattccctacttcatggcccaaaacttaatcctgggccaaatgcaggagcatctctcgacctctgggcagattggtgggtgcccaggcactagtcacagccttccagcccagccatgattgttggatgccccatccctccaagagcaatttgggcatctactcaggcaggataaaattccctagagctgaggaagttcagcctctcccaggctacacagagagagatgatacaagcacctcagattgagatgcaggattggtccgcagaaggaggcattgttgaccaaccccagctataattgcttgtcaccagagattctgcatacccatttccagagatgttgcagcacaaagaggcaagactccttccaatgccaggccacccagatagcaagagagagaggctggtatacacattccttcagaactcattgaaaagcgctcataactcgtgattttaaggagtaagtttttgctgagtagctgaagtcagtgctcctttacttagctgcctctttggccttgtttcctgtggggttgg

SEQ ID NO: 52482 - DNA, 1034 bp, Homo sapiens
ttattattagttgaatggtttaatgtttgaactgaattgaggcataagacctggactacagtcctccactgaatcatttgtgagattaatatgaatttactcagcaaacattgattgaatccctcatatgaatgtaaggcatgacaattctattgtaaaatattagcactaaaagagacccaagtgcacctaagccaagccttgtattgtaagtggccagctgagcccagagtgatctagtgtctggtccagttgactagtccgtctgttttgaagtgccactgggttaaggatgtcaaagatttgcagttacatatctgcacaacttctgtgccaagtaggacttctgcgtatggaagtataagttctggccaattatgttacagttatcttagatttgtatatttatatattacagtgattttccagcagatggcagtcaaatgtcttgaggaagaggcagctttatcttatttacacaggaaccctggtgctaagtcactctgttgggcaaggggaaagaacaagaaggttaatagagcaggatgaagaagaaagccaaagttaggaccttgtttaactgaagaaggtggcagaagcagggagataaaaagagcaagggatataacttctttttatttatacaaataaagtatctttcccacagcagtatgatctgtgtatgttttaggtgttggttgcagatgggatttgagttttgatacactgccatgtttctcaaaactgtctgcagttctgagaaatggatttaaatcacccatttcccaaggtcaatttcagtgatgcagtatcttggttacaactacaaggtatagtaagtaaggaggttccagatatgacaaatgttgatgccatatttattggtcactgttctcagttctattctggggctgttctctcactgaaagacgtaaggcctatacccaggactgtttctgggaaatgaagaattggagggaaatggctttttgtttgttattgtttctaacaagaaatcagggccttgtgttttc

SEQ ID NO: 52483 - DNA, 1260 bp, Homo sapiens
tctcaaactcctgagctcaagtgatcctcccaccttggcctcccaaagtactgggattaccggcgtgagcactgcacccagccaacacaaagtaatcccatctcttttaaaataaacgtctgttctactcaacagacaattcttcaataaattaatagtgccccgagctccagtacttttgtctaaactccataatgctttaatcttccctcaacttcatatgttgataaattaggacatcatagtttttattcagcaaacatttattgaaaacctactacatgccaataattattgccaattgtatttgtaatgattttctagacatagtcctcactcaggaactgaaagttctgtgaagaatttgacctgaatgtgttcctgccccccaggtcagtgcttctcaactttagggggcataagaatcacctggggagcttcttaaaagtggagattctaggacttcactctcagaaattctgattcaagtaggtctgggatggacccaagaatatgcatttttaaaaaacttccccagaggattctgatgcaggtaccctaagtggtatcagaggagtacatccatcagttaggtagtgggcggcattttatgtcagtagtagcatgggcttggtggaaagaaccttggattagaagcgggggaaaaaaagaagcagaaaacctgggttatttctagtctctttctgccactcactaattgtatgactttgagaaaatcatttcacctcacttttaaaacatgaggagattgatttagatgacctcttctaactcctgactttgaagttagaaatttcagtcattctcggttttgataccacactaccagcgtctgttttgtctataaaaatttattgggcacaacctacgtaaggatactggactagatcagagagatgcaaaggagatgtgagatgtggctcctgccccaagagacctgcattgtaataggacttacagtctggtgtaggacataagaacatttgaagtgtaagggagcttgtgcttattcccatgagctgttggagaaatgaaatattgagataggagtagaaacaagggatgggatagttacagaactcatgaagactgggatgtgaatcaggtcttaagaggaattggacagcaaggggtgtgagagtgatcacccacacataagagattccataaggcatttcattatcctgccactgtatatggtctttttatagtatgtcatgatggtaatatcacttctac

SEQ ID NO: 52484 - DNA, 1047 bp, Homo sapiens
caggtgagtcatttttcagcctctggagaagatgggctggaggaattggatttagctgtgatttcattgatattattagtatgagctgtgaattgaatatatatccttttaggcctttaataagaagaattgaagactcaagttgaaacagaaagatgtttcaaatgttttgtttttaaccaagtgtaaatgtagctatcccacacaaaaaagcaaaacgagtgtttgtttcctttgccaatgttgtttatctccttataaatctgttcacttaaaacacatctattttcagtttcttctaaccttttacataatatctttaatatcttttaaccccatcaatcctctagcttcaagcacaaatgccagcctgatatctacttcttctacaattgccaatattccagcagcagcagtagccagcatctcaaaccaggtatgatgctacctttgttcatcctgtttgatagagttcatccagcttgctctttcttctttccatggtcaatttgcctatctaagaaacaaccaggaatagtatgggctgtggagacttttttctggataccttcagaactcggaccctggatggcatcttaggttactgtctagtttttgttgttcctctgctgggtctctctagaatatggttatgtctgtttctttactgtatttgtcttcacttcctactctgcccctactagaatgtaagctgcatgaaggtagggatttatttttctgttttgttcatttacatattcccagagtatagaaaaatgcctgccacttacatcaaaggcacttgataaatatttatggaatgaacaactcattctttatgaattttttgtggtctattcttgatcactgttatgttaactatgcttaggagatcactggtaacaccttcagtgttctagagttttttatttttgttttgatttgttttctctacagcaattatcatcaccactgtctccttggatcttttcctggctacagttaacattactattctggttattatactggttttgcttttttttt

SEQ ID NO: 52485 - DNA, 1737 bp, Homo sapiens
aggtcaggtgttcaagaccaccctgaccaacatggtgaaacccatctctactaaaaaaaatgcagcattagccgggcttggtggtgcatgtctgtaatctcagctacctgggaaactgaggcaggaggattcttgaacccgggaggcggaggttgcagtgagccgagactaccattgcactctagcctgggcaacaagagtgatactcatctcaaaaaaaagaaaaaaaggatatggagaaggtaggacagaattaaagatcaataggtgaaaaagaggattgtatgccaggaccagggccagaagaaaactgaactaaaaatggacttgctggggaagataaatgattaaatcaattctttattttatttcccaccttaaatcacctgtgttcagttttattgcaggcctgcctaggataatgtactgataacaaaatctggaaaccattcaaaattcttttcctacaagaatggttaaaaccatttacagagtcagttaccctgtatattgtcatgttttgatgcttcctcttaggaaaaaggatggcttaagccacagtaggaaagaaggtgaatattggttgaaagaaaataccttctgtaaagctataaaacctatttcatttagttgttatgtttaggaaagtaagcccttaagagtcctttagttcccctgaagcaaaacgtgctatagaaaataaagttactctggatagttaggaaatttgtttttgtttttgttgttttaattttttttaatttattttttgagactgagtcactctgtcgcccaggctggagtgcagtggcgcgatctcagctcactgcaacctctgcctcccgagtttaagtgattctcctgcctcagcctcctgcatagctgggattacaggtgcacaccatcacacctggttaatttttgtatttttagtggagatggggtttcatcatgttggctaggctggtctcaaactcttgacctcaggtgatccacccacttcaggctcccaaagtgctggggttacaggcgtgagccaccacgcacctggccatagttagggaatttgaaccctagcttagctgctgaccctgaggaagaagcactggatgaagaattgggagatccaagttgtcattttggttatcttccattatttttgctgctgtggacaagttactttaattcttctttgtcctaggttcttcatcttaaagctggggttgcagcaatagctgtaactgaacttactgtcttctggattgtcttctaagccgagtacccttagggaaagggatgaaaattatctaattttgaccagagcacttaagtttctattgcatttgttctcctgccctgttctcaatggaagttttcttactaattttctctctgggggactttgttaatggggcaggtagtcagttagtcaggtctacctgatggtgaacccatatggtgtgtgtacctgcagtaggaaccatgtctaagtgtgtttatgataaatgaggacaaggagtttgagaacagtactgataatatcagttacattgttcacctgagaaaagtcactggttagtgctagtcattgagattttgattaaaaccctagtagaatgaacctatgacagaagaagtataaaacttaacccaaattacttgtctttatttttattgttttatgtgaatggaaatcagcattttctttcttttttttcttttttcttttcttttttt

SEQ ID NO: 52486 - DNA, 1058 bp, Homo sapiens
tcccatttttgttaaaaagaagattagtgaatacatagaagaaatctggactgagtgtagtggctcatgcctataatcccagcactaaaggaggctggggcaaaagtatcgcttgaggcctggagttcaagaccagcctgggcaacaaagcaaaaccctatcttatttaaaaaaaaaaaaaagaagaagaagaaatcatctgggtgactcttctgcaaactgttaatagtggttaagtctggatgatgggattatatatgactgtattttttttctaaattatgtatttctgtaatgtttttaatttataaaaataagcaggtatgtctttcctaatcggaagaaacaaaagtaacaaaataaccagcttaagaaggcagagaagtatttaatatattttagaaaaatttggtccttgtttaatgggtaagtgaattttaaacttatatggaatgtctcctaccttgacagtttggataaattatttatcactgtacatgaacatcaggcactctttataacagatactccagttgggtgtcaataactctttttttctgaatcctggtcaatttcccccagtcattgaaatgaatttatatacatattgggatttgtggcaagctttttgtttctttagcctcatcccctaattctttgaaagtgttatttgcttgtgatatattacaagtgggagattcaataattttctcttacaagcaaatttatttttgttttaagatttagattttaaacctactggctgatatttgaaagcataaccatgctcctcagtcccagtgtattgtttgtaattggtccaatttatctgattcaggtgcattgtggccaggtatgaaacctgaaagtggtttaattcagactccatctccaagtcaacacagtgttcttacctgcactacagggttaaccacaagccagccaagcccagcacattattcttatcccattcaaggtaaataggcatggttgtgtgtgtgttttaaaattattattattgtttcttgtttttaatctacctgtatctccaaacaaac

SEQ ID NO: 52487 - DNA, 1600 bp, Homo sapiens
ctctgcctcccaggttcaagccattttcctgactcagccttccgaatagctggaattacaggcacgcaccatcacgcctggctaatttttgtatttttagtagagatggggtttcaccatgttggccaggctggtctcgaactcttgacctcaagtgatctgccggcctcagcctcccaaagtgctgggattacaggcatgagccaccacacccagccatttccttcttgtcaggatgtaagcagcatacttgctcttgtcagatatagaggctattatttgtgtttcatatgctatctgtttttaccttccccaaggactttggtactatagttttcttgccaccacttgtgtgtcatcacggtcttccctttttatccttcctgtcagtaaagaaacatcttaccattttaaaacataaacactgctcccccgacccccccctgcccctccgcccttggctccacatctcttactagttatggaccttctctttgttctgtgacatatcagaacttctgcaagagttgccctcacttgctttttcacctcccattcacttttccagcctctcaaatttagcttctatcctcactcttccagtgaaactgctgtcgtcaaggccattagttattttcatgttgcaaattctagaatacgtttctcctcacattctccctctcagtacttttcctcccacctttctcctttgatggcccttctttggtgggcctcagggcttaattctaggctaccatgtttcctcttttgggattctccgatccattacattactttaaatatcttgtacatggttaatgaattccatattgatatttccagtctgacttctcccctgatttcatttgtgtatcagactgcctgtttgacatctttactggaaggaaaatcatacctaagatcttcaaaaaagaactttcgattcctttagcccccgtgacatacactcttctcccaaacttgcccatcttaggaagtggtatcactctccgtctagttgttttcctcattctctacatcaaatccatcagaatgtcctgttagttttaccttcagaatatatttcaaagtctttgcctcatccccactgttgctattctagtccaagccagcatattacttacttgattcttctatagtataatggatattatatcttgactctttataatcattttgtggttcccaagtactgtgaagatcaagtctcattcattctctagagaagtgaaaattggcctcagtctcctaggatgttgttgattccttccagaattaaattaaattggaggaagataagggtttgggttttttaatatatgtgtcaactgagaaccattatgtagaattcaaataaacttaccttacattctttgcaatggattgtcaaaactttagatctaattgacatcttcatttttgtcaaaatgattagaggtgaatgtgatctccaataattatttttaaatacctcaaacaatagcattggacaagctcttctgtaataaactcacaggtgttgatttgtcttactcttgagcatttgagttggcccctcatctacttttgatcaaggttc

SEQ ID NO: 52488 - DNA, 1132 bp, Homo sapiens
caaccaccattctactttctgtctgcatgattgtgactgctctaagtacctcacagaaatggagtcatacagtatttgtccttttgtgattcatcatgatgtctttaaggtctatccatttgtagcatgtgtcagaatttcctctttttaaggctcaataatactccattgtatgtctgttccgcattttctttatccattcatctgttgtttgtgttgttaatagttctgttgaatgagaaggaggtatttgttgtgccactttatggacttggatgttgttgggtttttttggtcattttattttagagcagttgttttttcatggtgtattcattgttaagcaaaatttatgtttatataactttgaaaataattatattttgaggcagtatgtcatttctctaaggataataatttaaatatttaacaagtgctagagttaactcactgtcttggtgctgttgtttctatttattctctagatgctcagttgagtatgtaggggatgttgctataacataatattctaggaccattgggttttaggaactggtccagtggatactggatcatagcaatatcaccaacttctaaaatataagatctacaaatagtcttcaacagtgggtataacagtgaacctcatacttaaccaggtacatgtagaagtcaaactagttattgatgtcaggaaaattctggttcagttttatgcccttcccctggtaattctatgtaagtaggtgtgagatggggtccagaagtctatttttattaactattcaggtaattataataaatcacccagtttgggaaactgacacaactattccatataatttcttgcccttacccttcaatttccataatcacatcttagtacattaagttctattacaaaaatataaacatttgagtaacaagataaaaatgaaccttacttggggatttagctttaaaattaattacaaatgaggaaaaattatttgaacattcaaaatataccattaaagctggacactgtggctcacacctgtaattccagcactttggatgctgaggtggacggattgcttgagaccaggagtttgagaccagcttgggcaacatgatgaaaccctatctctac

SEQ ID NO: 52489 - DNA, 1008 bp, Homo sapiens
gtcccttaaagaaaagatacttcaatttgaaactaagacataaactagtaaaaccaaaaatgtttgatctttcatagctgtgaatcagttttaggtcacattgactgtgttgttctaagctgagcaaaacaagtgcagggaagatagctcctatgagctttacttattgcactctgtaattctgtatcactagttacctgtgtcatgtagtaggagaacttagcttttgaggctctgtgtatgagctacagtgagagcattgagcatcaagtgcttctgacctttaaacttcttttttcttttgatattctaaattggggtagggaataaagctgtgttagagttggacaactttgcatctaattgtaaccttatgtgtgttttctctccttttcacattctggagtgtggctctaaaataaagttgtgttgtattgcaacacgacagagtaatagaagtagagtggtggtatactggcataacaagtttttggttttcttgttatttgtctattttcagtacttgtgtgataagattatatacttactttagctttgtatgtgagttaggtacagtggttggtagaaaagctaaaaacagctgtgactttaattaaatatacaagcaatcacatcttttgggagaagtgctggtttcacttttgttagatagaaatggagtatttcatttttataatgtatgcagctttctaatttttgtctctttgtctcctgtcagtaggacatggtaaggtggacttagaatcccatttttccttttttgtttgaaaatcaggacagaaagagcagggtctgagaacgtaaagattttgcttaaataattgggcagtacagttagtagaagttcattatttcagaattaaattaggtcctatctttggatgattattttctttagttctaaaagtcaaggtttcactctacttatttatttttattattgagatgcagaagaattgagttttccttgaaattgatgacatatag

SEQ ID NO: 52490 - DNA, 1058 bp, Homo sapiens
cctgggaggcggagcttgcagtgagctgagatcgcgccactgcactccagcctgggcgacagagcgagactccatctcaaaaaacaaaagacaaaaaaaaaaaacacgttaaattctagaactaatacaaggaaactaatactaagatttttacagtaattctgtacttcttttattaccaagttttgcaatattgtgtcttagttatactgtattttcatctcttgctagtaagtatgacttttgattgtatagcatgcaccacttgtggaaaatggtatgaagtcttaataaaagttttaaacattgataaatgctgggactgtgatgaatacttgcattcttatatttagtatgttctgatatttcaggtctttcagggtacaaattattggaaggcaggagaatactgtattgatggaaactagtatttagatgaatgttttggtagaattacataatttgtggtcattagtgcattttatacagaatgtaccagaatgtatgtttgcaaacttcccacacattgtatgttgccagtagaatcccgggggattttgtaatctattctttccttgtaggcagctttttgttttaaaatgatcaaaattattcgtggtcattgaccagttattttgagatagcaagcctggtttttaaacttttcttttcttttcttttttgagacagagtctcactctgtcaccaagctggagtgcagtggtgcgatctcagctcactgaaacctccgcctcccaggttcacgcgattctcttgcctcagcctcccaaggagctgggactacaggcttgcgccaccacgcccagctaatttttgtatttttagtagagacagggtttcaccatcttggccaagatggtcttgatctcctgaccttgtgatccgcctgcctcggcgtcccaaagtgctgggattacaggcatgagccaccatgcctggccagttcttttcttctaaatgtagaaattatttgtgtactttttattctcctagattgaaaagccaagaagacagagaattttaaagatggaaacaac

SEQ ID NO: 52491 - DNA, 1035 bp, Homo sapiens
tttggaatagtcaatgcttcccagatgttcatctaattggtttataccaaaaggttgaattgttatattgatagtaaggtggaaaataggtggactttctgttttctaattaacttaaaaatacaagtgcatattcttttacaaagtgtatggcttaagctctaaactaccctgttgatactggtatcttttactgtcagataacatagcaaataatggaacatatcatccttgatatttttatttagttccatcaacctaagttccagggtagctaattattaaatgtagaagtaatttaggcattttctctgttctttatagtagtatatttaaaaacagccatttaaaatatgggcttcctaaaatttgtctttgctgttttcccatttaagtatgcaatagtattttgaatcagaaaaggaatgtgtagtttaaatagtgccaacttactgtaaataagttaacagatcagcccaaggcagtcagtgcttaatatcgtgaagatcttactacagattgttttggatgcactttaacttattagctgtggttaatgtttgtagcagttagatggttttcattttcttccctagaaaataattagcaatactctttgtaatacatttatttcagcaaatattgtttaggcacctactgtgtacagttacagtaatacatatttaggctatttatgtggctaggtaatattgtaccaggctgatatgtacacttaaattctgaatttgatcttatttgtacatttctgaattaaacgtaagacaacataattagaattaaataaacttaattaacataaaatcatgttctttcgttatagatacaatcaaataattttcacttgggaaactttcacaactgaaccatgaaactctgtagtggtaaaacagtaaaaataaaagtgaactttatacagcacttactatgtaccaggaactattttaagtagtttacatgtattaactctttaatctttacaaccctatgaaataagggtactattctttttttttt

SEQ ID NO: 52492 - DNA, 1057 bp, Homo sapiens
gtgcctctgtcgcctcgctgtttttcctcagcctcatcagtccttttccaacctcggtttcttgccttacgcctcagcgcttctctcagccactgcctctccttttttctcctcctcccttcttttagaacctcttttcccctacccctgatctgggatctcagcgttctttcacctagcgagacggcccagcttctcattgtgctcactcttcaccacgagaaactgagcctctccctagggtcctagttccttgtcccccaactttcttcagctttgatccttcctcctgggaccagtaggtgacagtgcttctcctggggttcttctgcctgtccttagctagaggagagctttgccaaagccccgaaatgggaagacttccccagcctgggggaagttttgccttaaggcgccgggttagactgaactctggtagcttccatagttagggtacaacaaaggcgttcctagttcttcgctttacctcagttttggggctctctcaagagcagctaacaggtggcaggcacacggtactgctagcagttgggctggcgcgatcttgttaattgacaagtcatgaagaagttctgtcagttttgtgttcccatgagaatggatgtgcacagctgaggcaaaaacgccaatattttgggacgttcagctctgttttcggcatggacgcttcttacaggacacttgtgatgatagaggacagaatttgtggagagatcattagccccagatttatgaatttattgtgttgtttccgaaaagtggtctgctgaagagttcactatagtaatttcaaagtaatctttaaacttagtatgcacatatgcattttttcatttttactgtattaagttttctatttgtcttcctcttccttcattagccagactttacttagaattacattacttagaagtacattacttagaatattcttctaacttttgtatttttttttccttaccatttccacctttgtagtaaaactatcattttctcattttgagatttagggcacctttcttaaatttccctagag

SEQ ID NO: 52493 - DNA, 1560 bp, Homo sapiens
gccttcaaaatctgtccagaacctgaccatttactgcctccgttggtataaaccagtcagtcagtgactgtgagtgccctatttatactcttgccttcccacaatctttttttttttttttttttcagacagagcctccctctgtcacccaggctggagtgtactggcctgatcttggctcagtgcaacctctgcctcctgggttctcctgcctcagcctcctgaatagctgggattacaggggcccgccagcacgcgcggctaattgttatatttttagtagagacggggttttgccatgttggccagactggtcttgaactcctggcctcaagtgatccacccgcctcagcctcccaaagtgctgggattacaggtgtgagcctccacgcccggcccccacaatctattaatatagtagcaatgggctcctgttaaaaccctaattagatcatatccttcctccaatgcattcctatttcagagtaaaaaccaaaatccttacattggtctacaggaccctcaagatttgacacctccagtacagctctgctctaacctcaactcctactccttctgtcatccttccccttaaagcacattggcctctgccattcctcaaaactacaggtaggcccagggcctttgtgctttttaatccatctgcctggagtgctcttcccccagatacctgcatcattcatccgctcacctcatttacatctttattcacatgtcactttctcaatgagatcttccctgacactacattaaaaattggaacactaccatcctctttgtactttcccatccaacaagttgcttgtaaatttggcttagtgtctctctccccctgccagaatgtaagttccatgagtccatggatgtttgtccgatttgttcacggatgttttttcagcaccagaatggagcctggcacactgtaggcactcagtaaatgtttgttgaatgaagggctaaattgctcatttactttggttttcctgatctgaaaccctgcaaactgagccaccacctccaccagagggagcccatgagtaatcaatgcaatagctccagaaaagttatgcctaaagcatttacatacatatacactctgtttaaggacaggaatatgttctgagaaatccctcgttaggtagtttcatcattgtgcgaacatcgtaaaatggacttatacacacctaagctatatggtataacctattgctcctaggctataaatctgtatagcatatgactgtactgaatactgtaggcaattgtaacacaatggcaagtatttgtgtatttaaacatataaaaacatagaaaaggtacagtaaaaatattaaataatcttatgggaccaccatcatatatgcattctatcatttaccaaaatatcattatgtgacagctatgattctaaaacagagctacaagaaagcatgcaaattcctccccagagcagaagctgtaccttgctggtgctctagtgtctttacagtcatttaagaataaaatccaggctgggcgtggtggctcacgcctataatc

SEQ ID NO: 52494 - DNA, 1112 bp, Homo sapiens
ctgcctgccaggctcaagcgattctcctgcctcagcctcccgagtagctgggattacaggcacctgccaccacgcccggctaatttttgtatttttattagacacagggtttcaccatgttggccaggctggtcttgaactcctgacctcaggtgatctgcccgcctcggcctcccgaagtgctgggattataggtatgagccactgtgcctggccagctctattctactcttgggttattccagaggactgaagtgggctgggctacaggagggtgagtggatggcagaccaggtttaggcctttccactcattgactggtctcctcacctcaaacttcttttgtacttaggaaagtcgagatggtcgtgtggacagctggcgaaacttccaagccaatacgaaggggaagaaagagaagaaaaatcggaccttcctgagaccaccgaaagtaaaaatggagcaacgtgagtgaccgcccaaggtcacaggcacagaacctttcccctgctatctcccttcctgcttcgaaggactcattctttcctcccacttccaccccaacatagagtagtatttgctttttagtccattttgttttcaatacgatttaatatcgatcagagtaattcttttgtacattgaaatgaggggcttggtttaaaaaaagacctttccctctccctgcccctagaacaaccagtattagaaggtgccaccattggtgctgccttctcttcccacagcctgtaactcagtgttttgtacttcactgaattgtgatggttagaaacttcgtggatagtttgtggaaatcatccaattaaacatactgcttaaaacagtgttgctgtgacttcagagacaagcctggaaggggcaccttaggaagccccttcgcttcagttgctcgcttctgggtgtgctcccttcgaaggcccagataagacagggaacacttgtgagcacacagagcagcatctgatgccctgtggtgtttggcatgtgccccctgtctactgaccaatcagtgtggcatgaggcccacgccacccaaacctttcactttccaaagagctagccgtcctccacccagtaccatgtcctagcct

SEQ ID NO: 52495 - DNA, 1073 bp, Homo sapiens
gtgttaggattacaggcatgagccactgcatgctgccagggagtttatttataatcaagagccttgtgtgtgttcttcctgatgtcctggagtgaaataagcagttattaaggccattgttactgaagccagaaccttttgtggggctagtggctacagctttggtgagtgtatagtactgtagtgtcatcagtaacaaaatgtttaatgttctaaaatatgatttctcttgaacatcagaaatgttagaatttcgcttttgttgcccaggctggagtgcaatggcatgatcttggctcactgcaacctccacctccccaggttcaggtgattctcctgcctggctaatttttgcatttttagtagagacggggtttcaccatgttggtcaggctggtctcgaactcctgacctcacatgatccacctgccccagcctcccaaagtgctggcgttacaggcatgagccgctacatccggccgagttttgtttctgtatgtattttatattgttgcttggtaggtaccagtaactaaaatttgctagttgaggttgtgtgaaatatctttgttttcggatagggttttgtccagagatcttaagaactttggctttataatggtcattctgctgaaataaggtggcctgtgttctcgacatagctttgtcactgaaagagcccaaaacctcagattgctcttggctgggctttagttactttatctgtgtaacaaggatatttatgtctttccccacagccatgcccaagtctgatctgcgtgttttagaatgagacattcatgaaaatgctatgagccctttccagacagccatctttgtagacttctagggaattgatttactatatatgcttgcttctgtggggagatgccaccttgtatggttaattcagtctgtaagtatcatataaatactatgatctggttttcctcctaggaaacgacaaagggaagaagagattgaagctcaagaaaaagccaaacgggaaagagagtggcagaaaaactttgaggtaaatttccaaggtggccagggattctaattccagaata

SEQ ID NO: 52496 - DNA, 3255 bp, Homo sapiens
tggcacaatctcaacctcccaggctcaagtgattctcccacgttagcttcctaaatagcttggactacaggcgaccaccaccatgtctgggtaattaaaaaattttttttttgtagagacagggtcttgctatgttgctcaggctggtctcgaagtcctgggcttaagtaatcctctcacctcagcctcccaaagtggtgggatgacaggcgtgagcctctgtgcctggcatgtttggtctcaactttgtgattaaaacctgaaatgtttcctagttgtacctttaccttttggtgcttgaattttgttaaagatcagtatttctgggcatttaaagagatttgttaattttttaaatgcttttgctaagagtctctttttgccgtaggaccttagagcttttggttgtaacgagacagggcaggctggaagttagtaaatgtttcccttattgacaaccccaacttttctcttattgtagttatccatcttggtgcatcctgacaaaaatcaagatgatgctgacagagcacaaaaggcttttgaaggtatttgtaaatttacctgcttctgagtattagattgtgaatggcagggcctaactgttccttgtcctagatcaagcaaagactgttatagttttgtcttctggtcaccaagaagctgtggttttcagtagagcagttgccatttcaaagcagaatgttgttgtttaagaagtagaccttaactttgctttgttaaaacttttatatgccaacaaagactgttattgcataggatcattttttttctttgaacataaagaattttatcactgaattaaatccagatgtagtgtatttagccttgagtatatatttaattttttccaaggctcttaaggaaagtcattgctatagttgaatgttttttttaacttagtttaacgacagtaaataattaaagtagggaatgctttagagagcacaagtccatttacactgcctgagtatagttcagactttcagagggtgtttgcagaaacagttaatttcaatgttttgcattagctgtggacaaagcttacaagttgctactggatcaggagcaaaagaagagggccctggatgtaattcaggcaggaaaagaatacgtggaacacactgtaagtatttatagtgctgctgtgtttacaggaagtatcagcaagccttgggcaccttgtagaagggtacatatgaacatagtaatgcctactggcacaacctgtggctacttctgtgctctctaccactttgctgtggtggtcatgaatagtgtgtgcctgaagctgtaattcacccctaagagaagaactcagatgaggagtagctggtacactgctcctacctctttccctaccagtcctgtgttggggagaaagggttgttctctccctctcatcacatattgccacttaccccattcttagagtggaaacgtggagcagcctgtgactcttgactcttgatttttattcttgtccctgtgaagggtttgcaacaaggcttggcaaaggctagcaagaggataggcgtaaactttttttaaaataggaggaggtttatgtccatcttaataacagagttgggaagaactcagttgaaggaaactgagttgtagctggtgttatttttgtttgctcttgagggcatacataagtctccaatgtggtgggaaatgtcagtatggctttcccaaggtaagaaaggtcttttaactttttacttgctggggcaagaatcttgaggtcatttgtaagagctgcttcaattgtgattggatgacttttcacatgaagagctttgaaatctgagacaactttataaccataataatgaatccagtttcggtgaggaaaatggataagaagaggagacaaagggcccataactatatcctgcgggtcatgtgttggaaatggcacttgtaggccctatcctggtagaaatagggaaagtgcctgacagtttctccttaaatcattgtggcttcgtatgtctttcacctgtaagaaagtcatccttaggcttcctgaccacagggtggcagtagggcctttctgagcttagagggtacttggcctttgctggtataatagactggttagttcatggagtagtgtcattcttgtatgaattcgtatatttatttatttattttttatctcagtagtggccaatgtgataaaagtatcagttaatatgatatgtggtttaaggaggttccatggtgaaagtgatcaagaatgcagttatagaaatgccagaaaaactacttggacataatgccacagattctgtagcttcttctaaaacttgacagatatatttgctttgctctaaacacataaccacaagccaagaaaggtaaataagtagtctgtttcaaagactttttggatctgatgagttggggacaacctcccgttggtcccctttcatctttcattcttcctggtagattggattttagatgagattagaaaaaggacttgtggttcctaattttccttgattctgttgttcttttgaggagggaggggaggggctctttttttttttaatgaaaactttttgctatacccgtgcctatagaaagttaaatatattgtatgtgtacagcccagtggatattctcaaagcacagatgctcgtcttttgatgaaaaaaaattctttttaggtgaaagagcgaaaaaaacaattaaagaaggaaggaaaacctacaattgtagaggaggatgatcctgagctggtgagttaaatataggaaaagccactgtatcttgtgtgattgtgtctacgaattggtgggttacagagacagaagccaaaagaatgatgaatatatgctatttcacatttatttatttatttatttattatttttgagactgagtttcactcttgttgcccaggctggagggcaatggcgcgatctcggctcactgcaacctctgcctcctgggttcaaacgattcttctgcctcagcctcccaagtagctgggattaccagcatgtaccaccatgcccggttaattttgtatttttagtagagatggggtttctccatgtttgtcagtctggtctcgaactcctgacctcagatgatccgcctgccttggcctcccaaagtcctgggattgcaggctacaggcatgagccaccctgcccggcctctggctaatttttttgtatttttagtagagacggggtttcatcatgttggcta

SEQ ID NO: 52497 - DNA, 1009 bp, Homo sapiens
tctttaaaggctgtgacttatttatctttgaatcctcttgatgcctgctgtggggtcaaactgttggggttaaaattctggcttacaagttgggtaattgggaacaagtcagttaccttctctaagcctcagtattcttatctgtgaattgggtataacagcagtatctaccacatagggttgttgagattaataaatacatgtaaggtttttatattaaaattcaacaaatggtagttttaatttctcaaagcatttagcaaaatgtcttgcacatggtaaacacacaaataaatgtttgttgaacatatcagtgaacattttgttaagataattcagtttgttattgaattctattaatgaagtttttaatcctcataattttaggtgaaacaaatagagaagagagactcggttctaacttcgaaaaatcagattgaaagactgacccgtcctggttcctcttacttcaatttgaacccatttgaggtgagccgattgatgttgctagggcctctgtaatgggggagatttgcatagctgcaggcatacctacatcagaatacatacctaatttatatcatagttaggattgagaaaaatggtggagtaaagtgatggaatctgtatagtacaaaattgagtattccttatccaaaatgcttgggaccagaagttttttggattttggatttttttgggattttggaatatatacatacattctgcttacttactggttgaagcatcccaaattagaaaattcagaatgttaatgagcattttctttgagcatcagttgactctcagaaagtttcagattttggagcattttggattttgcatttttggattagggatatgtaacctgtatatagattgtctttaaacttgggtgattgtaccgagcagaactggagagacagcatgttaaggaaagtgagatggtcacatatctttcatcatcttttagcaacccaaatatataaggatttaatttcagatgtga

SEQ ID NO: 52498 - DNA, 1245 bp, Homo sapiens
tatctaagccagggcacattggacgtcggtatcctggacatcagcatcctggacacagctcccaaaccccgaattcccccattttattgatgctagcaggccagggaagggaaaacttcctttgggctttgaataataacgactttagaattgaaatcgtgggctggaggtggacgccacgcctcattctgatgggtccaagagccgaaatttcggcttctggcactctcctcactcagctctctaaactcctccatcattcctctttccagtcctttggccctaagcccttgctagcggttggctaagaagaaacccgtctcttgctcgggattcgctgtgagctccgggaagcccgcctccgctctcccgtgattcgctactcctgtgttcatccgcccctccgtcgaccagattgggtgcttggccgtccctgccattagcgcgtaacgagagactgcttgctgcggcagagacgccagaggtgcagctccagcagcaatggcagtgacggcgttggcggcgcggacgtggcttggcgtgtggggcgtgaggaccatgcaagcccgaggcttcggctcggatcaggtacgctgcggcagtgtccgctgctccagccccgcgggcggatcccatctttgcttccgtacctttaccagtgtccctgtctctctgcagtccgagaatgtcgaccggggcgcgggctccatccgggaagccggtggggccttcggaaagagagagcaggctgaagaggaacgatatttccggtgaggctcaccgggtcccaagtccagccctggatctcccaatggccttccaatccttaaactgccaatcgccccacccgttcctacctggtgccttgggcgccccatcccccaacagaactcccgggccccaatccagtataccctaacccttgatgtcccgaccgttgccacgtatagggcactcccagttacctgcacaacagtttcaggcccccaaaccgtttccaccggcgggtctccaaaacaacccacggctcaactcctcctttatcattaccatctcccgcgtggagttctcctcaggtcgtgcgaaacacccccagattcttcgcacagtgtctagatccgaccgcccaacgtttgcctcccagcctgactccctcggcccttacccacctgtcaccccctctacgctctccttcctcgccagcacgccttagctttgcaagcctgcatgcattcaggcttctca

SEQ ID NO: 52499 - DNA, 1187 bp, Homo sapiens
tgcaagagaccctttattggccttacagtgggccattcatttctataggcaaagaaagctctagacagattggaataggaaatggatatttgccttttagctacacccctttgtctgtcttcctcattttgttcctttttttttccctaaaggggagtcaagttccctgggttgttcccctcataaggtattagggacttgtgtcacatctctctggagttttctattttaaagaggaatctgaaagcaataagctctttggtcttcttaagatggctacacctcaatttaagatggggtattctttcactagttgaggagtagaagaggatgaccagctagactcccatggaattggaactcctattccttgcttagacattacaggttatgctttgagatctctttggggtgaaggattgaaattaaaccctgagccaccgtgtccttgtagagcacagagtagagaacaactggcagctttgaaaaaacaccatgaagaagaaatcgttcatcataagaaggagattgagcgtctgcagaaagaaattgagcgccataagcagaagatcaaaatgctaaaacatgatgattaagtgcacaccgtgtgccatagaatggcacatgtcattgcccacttctgtgtagacatggttctggtttaactaatatttgtctgtgtgctactaacagattataataaattgtcatcagtgaactgtgtttgatgccttcttctatctggaagagatagacagacaccaatggactgctaaaatggattagaggcgtccctgcatccaggaacccacagacaatgcacagtgtgataagtgctatgaaacaacacgagttggggggataggtgtgacacagacaaagtacccctccccgtctaattagaggtgttcagagaaagcttcctgaaggataaatcccaatctgaagcataaagatcaggaggatcctggagatccgaaggagtcattgcttcaaaagatacaattaggccaggtgcggtggctcatgcctgtaatcccagcactttggaaggccaaggtgggtggatcacctgaggtcaggagttcaagaccagcctggacaacagtaaaaccccatctctattaaaaatacaaaaattagccaggtgtggtggcacgcacctgtagtcccagctactcaggagg

SEQ ID NO: 52500 - DNA, 1033 bp, Homo sapiens
ggctttgagggagggatctttacacagaagccatgtttcctcagtggagaaaactgctgctatctgggaggtttctttttcttatctttttttttttttttttttgagatggagtcttgctctgttgcccaggctggagtgcagtggcacgatctcagctcactgcaacctccatctcccaggttcaagcaattctcctgcctcagcctccctagtagttgggattacaggcacccgccaccatgcccagctaatttttgtattttcagtagaaacagagtttcagcatgttggccaggctgatcttgaactcctaacctcaggtgatccacctgccttggcctcccaaagtgctgagattaccggcatgagccaccgcacctggcctatctgggagatttctgtgtattcctctctcgagaaaagaggaccttcggacggtttctgctttgagtggtggcatccttagaagacagcagggtgctgatctttgagtcaggtgcccgaggtccaagagaagacccaggcgtgcagctcccttaactccctgtcacttcaccacacactccctttcaggagctcattgccttcagatgtgtgtatcttcagaaagttccaagggcttcactctagtactggtagtattgggctcccgaataactttctcggccagatgcagtggctcatgcctgtaatactaacactttgggaggccgaggcagatggattgcttgagcccaggagttcaaaaccagcctgaaaccctgtctctacaaaatatacaaaagttagccaggcgtggtggtgtgcgccagctacttcgaaggctgaggtgggaggattgcttgagcctgggaggcggaggttgcagtgaactgtgatcatgccactgcactccagcctgggtgacagagcaagagtctgtctcaaaaaaaaaaaaaaaaaaaaaaccaggctgggcgcggtggctcgcacctgtaatccaagcactttgggaggccgaggtaggtggatcacaaggtcaggagattga

SEQ ID NO: 52501 - DNA, 1034 bp, Homo sapiens
attctgttggactgtgctatgctaggcactggggtaacaacaaagaactagattcagtgtgtgcccccaagtgtgacaggtgctgtgactggagcttctcattcttggtgagtcccagatgcagcagcctggagactattgagaccttgagaagtttagagaatggggaatcatttctgcacttgcagaaacctgggttgtatcccagccctgctactgccttcctgcctgagtagccagaagtgagttgacctctctgagccttgttcctcatctgtaaaatggaagccctagtagtagcttctgccctaaagtccaggtagtgcatgtgaaattaatgcttagccagtggtaaccagccttgttatgcaccattgttattactgactccccagtccagggaattgggcagggagggctgacttggaggggtcatttcttggcagtggtatgctgccctgcctgcttcctctgtcaggatcggggaagcattcagggtattggagccatggattcaaatctacttggttttgccttcagggctttatactcgcgttccctctggctggaatgctggtccccctagtttttggggtgtgtgtttgtttgttttgagacggagtttcactcttgttgcccaggctggagtgcaatggtgcgatctcagctcaccacaacctccacctcctgggttcaagcaattctcctgcctcagccccccgagtagctgggactacaggcatgcaccaccatgcctggctaattttttgtatttttagtagagacggggtttctccatgttggtcaggctggtctcgaactcccaacctctggtgatccgcctgcctcggcctctcaaagtgctgggatttcaggcgtgagccactgcgcccggcctgtttgttttttaagagagggtgtcctgctgtgttgtccagactgttctcaaattcctagcctcaggtgatcctccaccaccaagccttccaaagtaccggggttacaggtgtgaaccaccccacttaggcccccta

SEQ ID NO: 52502 - DNA, 1014 bp, Homo sapiens
tcctcagtgggcttttggccatctgagaaggaaggttcaattatagtttttggttcccggatacctgagggctggtactaagtctggatcttaatgggaaggggagaactgggcgcctcctatccctgtccagtgagagcatggctctgatttgggtaaactgtaaacaagaccagtgctgagagccacctccactctcagattaacaaaataaattaataagtagagcatccttcctgaaccccatctctaggactaggagaagcagatgtagtgagtacctgatattagtggtttctaaagaggctgcagcatataacaggtcaaaacagttgctcccatcagccttgtacaccctgctcagattccctccgtgcctttctgctttctctgtcttcattcacagactagtatgaatgacctggcgctgctctccactaaatgtgatctggtgtcagggaaacaaaacagacaatttgatgacagtgtttttagaagcaaaagccctgggaattttggggtcataggtgagggccagaaaaaggttcctagactattgtggtttagctttgcaaaaggagtgaccactgggactgggccagttgtatctggaagcccatgggagggggaggtagggttttaagccagttgatcggatttatattcagaaagttaatgtggctactgggtagaggatggataggagaggccagggctaaggaggccgggggacaactggcgaggttgtgagtagtggtccagacaagagggggtggtagttaatgaggtggtggtggtgggaggacagataagcagccaggcatggtgactcccatctgtaatcccagtgctttgggaggccaaggcaggaggatccattgagcccagcagtttgaggctatagtgagctatgactgcaccactaaagaagaggccaggcgtggtggctcattccagtaatcccagcactttgggaggctgaggtgggcggatcacctgaggttggggattcga

SEQ ID NO: 52503 - DNA, 1007 bp, Homo sapiens
agcatctggggtacttggttacctggcttcagggtgcaaactgtggtgtgttcttgtataagttctctgggaccactaagaaggtggcctcctggagatgtgcagcatgatggctatatagttccttttccaggaccctcccatcccgcaatgctgggattcttgggtcccaacccagttcctgaagaactcagcctggagtgagccctctttcttgattacccttccaaacatgtgtatatctcccatctggctccaccatccaaagtatgctagaaaggtgggtttaacacttcagtgtagccccttggataggaggaagaggctggataggtaataatcctctttattctcccttctactacggactaacctcatatgtttcctcccaggagcagagggagagccgggctcggcgaggccctcgagggcccagcgccttcatccccgtggaggaggtaagcttggaaggggttagggatctttggtccctgggaagaaaggacatggcatattggtaggcaggcatcttttcctgttctttaaattgcagcttttaagctattcctttctgatttctgattcatttaattcacaaaacggctttgtgaagcaggcactgtcaactccattttactgggaagaaacaggctcaaagaaatcaagtgctaatagccaggtagtggccaaactttttttttttttcatgctcaaacttttgattcctagatcagtgcctgctttcccttaagaagatagaactatctatctcatccatgaccatacatatattacacgctcttttctgttttaaaagtaatatatgtttattattttaaaaatttccattgtttcagaaagctctgatctcctgtatcctcctgcaccctgcagagatcatcactgttaaccatttgccactgtttactgtgcttttttcaagccaatacttactttcagtacagaaccaaggtcatagtttacaacgtgtttttttgttttgtttt

SEQ ID NO: 52504 - DNA, 1839 bp, Homo sapiens
gagaaactgtacttttactctctgtgcctgatttttcctacctaaaagtggagaaacagaactccagttttatagttgttgtgagagttaaataagttaaaatatgcattcttgaacagtgcttggcacatagcattgtatgtgtaagtactggccattattatataaggtacctaataagtatttattgaatcacttattaaaatatgtgatcctccccattctttctttttggacacggtggtggtttttagtttcttgccattaaaaacccactggaagaatacattggtctctttgatgagtggggcaggagggaaacccatgctctcctcccctttggttggcaggtccttcgggagggggctgagagcctcgagcagcacctggggctggaggcactgatgtcctctgggcgagtagacaacctggcagtggtgatgggcctgcaccctgactactttaccagcttctggcgcctgcactacctgctgctgcacacggatggtcccttggccagctcctggcgccactacattgccatcatggtgagcctctctgggcctgacacttggagaggtggctttgtggtgggttctgtcctttgatctcttttctgggagctttgtgagctgattccatagacaagcagggaaagccctggctttatctaactgtagagttttgggttttttgtttttattttttctcagaaggaaaattttaggttttgaagaaaggcatcgttagtgcttgtgttaggtacagattggcaaactgaggtgcaaaaaggaatcaggtggcctgcaagctggtggcagagctggggttacttagaacttagatttcctgcctcttggggaacagtgagccctacaacctctcccctgatggggtacccaccctgagccaggcacaaaaggaggagggtgactcaggctgtgtccactacctccgcaggctgccgcccgccatcagtgttcttacctggtaggctcccacatggccgagtttctgcagactggtggtgaccctgagtggctgctgggcctccaccgggcccccgagaagctgcgcaaactcagcgagatcaacaagttgctggcgcatcggccatggctcatcaccaaggaacacatccaggtgcagggggcagagaggcgggtgtctgagggagcacagaggcctggctggtgcctggtgggtaacccagggcaggcactgagcagctctgacctccccccttgtcccttccaggccttgctgaagaccggcgagcacacttggtccctggccgagctcattcaggctctggtcctgctcacccactgccactcgctctcctccttcgtgtttggctgtggcatcctccctgagggggatgcagatggcagccctgccccccaggcacctacaccccctagtgaacagagcagccccccaagcagggacccgttgaacaactctggggtaagtcacgggcctgggtcttgatcggggaggaagcgggcatgacctctggtccttaggtagaagctactgcttcccaatctcgtatctgcactacctgctgctatgagagaccatagaaaagttatttgactttgaagcttagtttcctcatctgtgaaatggggagataaagaccctctactcacactgggctgtgagggttaaatgaaataccatgtgactgacactgtgtatatgccataggctcaaagcctgttggttttagcactttaaaactacaaagtttaccttttactctgtaatgtggccttgtatgtttcaatacaaaaatacagatactttaaaaattcctgctcagggaagatg

SEQ ID NO: 52505 - DNA, 2101 bp, Homo sapiens
agttgttttattcatttactcaaacatgagcatgttttagtgaacccatgattttttttcctgcctttctcacttaacagtttataccaaacaccaaaaaattatcccccaattttaaaaaaggtacgtgctccttgtagaaagtttgtgtttctgtgtattactagctgtaaatcatatttcactgaatgggttgagctatacttaatgaaccatcctcttactctagtcactagtaggtttccaacccatggctggccaaggacaggcttcttagaatgtgagttgggctggtttccgcccagccctcaggtccaggcttctctgctctccaacatggttcttgctcctatttctttgtcttccaaatctgccctccagtttccagccagtcattcctctgtctacactgatctgttttgacattggctcccctcactcactagactggggataactaagtggcttctagactcatcatcaacttgctttttggctttgaagaagttagtcatcttctccagggcttaggttgcccatttgtagaatgagtacaagcacctttttacccttatcctcttccttctcctccactgacctcctcctctaccttccatggcctttactacagagtagtggttatggcccctgagctaggcagagctgggtttaaaacccattcctgtccaggcgtggtggctcacgcctgtaatcccagcactttgggaggctgaggcaggcggatcatgaggtcaggagttcgagaccagcctgaccaacatggtgaaaccccatctctactaaaaatacaaaaattagccgggcacagtggcatgtacctgtaatcccagctactcaggaggctgaggcaggagaattgcttgaactcaggaggctgaggttgcggtgagccgagatcacgccattgcactccagcctgtgcaacagagcgagactccgtctcaaaagaaaaacaaaaacatactgaaattaatgtaaaaaaatgtgagctaagctttctgcaactctgaaatcaagttatatctcctcctttaaataaaactgccttgttgatcatgaaaaaacaaaaacaaagaccattccttgctgtattaactagggcaagtgacttcctttctctaaatctcagtttcctcatctataacatggggttgatgaatgtagcagattgcatacaccatccagtcatgtacacagtagtgtagagtagttttgaggattccacatggcacatagttggtattcaatacagcatgctcattctctgcattccttgacgtggtcccctgccaatgtggcggcctgtgataacacgatatcagctgtttctccaagaggaactaggcttcttgttgcttctaccttctgatttttctcaacactctgttcttccctctgtagggtggggttgcggggagggagctgcctttgggaagaaagcatgagtaatgctgctgggacctttccatccagatatgatgactatgattatggggaggtgaaccagctcctggagcggaacctcaaggtctatatcaagacagtggcctgctacccagagaagaccacccgaagaatgtacaacctcttctggaggcacttccgccactcagagaaggtatgacctatacaggcagggcaggatggaagtagacaggccaagccagtggagagggcaaggggttaggacccagtgagagtccccagactgagtctgtcctgctaggtgggacacctgggcctattcctctggattgaagtcctattccactgtgtgatttcagagtctgtttactcacctgtaaaatgggaatgagggtgcctgcttcacattagtggtagcttggtggacctgggttcaaatcataacactatctcttgatagcagtgtgactttcggcaagtcacattatctcgctgagtttttttgtttttttttttgagatgagtctccctttgttgcccaggctggagtgcagtggcacgatcttggctcactgcaacttccacctcccaagttcaagcgattctcctgcctcagcctcctgagtagctgggactacaggcgtgtgccaccatc

SEQ ID NO: 52506 - DNA, 2888 bp, Homo sapiens
gggattacaggcgtgagccaccgcacctggccattttacctttagggaatacagagcttagtcatgataggaatgaatgtgcttgtccttgtactaaactgctcagagccttagcagatgctggggcagctctgtaggaaaggaaatggtgaggtaagtgggtcagggatcaaggcagtctgggaggggtgtgggggtgaggagtgacatcagttgccaacatgccttcctctgtgccccaggtccacgtgaacttgctgctcctggaggcgcgcatgcaagccgctctgctgtacgccctccgtgccatcacccgctacatgacctgactcctgagcaggacctgggcccggttcagctccccacaaggacttctctgtctggagacagccccagacccttttgtgtcccatgcccaccctccccacgctgcagtgggcttgtgtgtgatgtgcagtcccgaagccacaccctcccttttcctcactggaatggacagttcattgcactgactctgggatctcagccctgctcctgggagctggaagagcacttggagatcctaagggaccacacccttcctccttcccctgcccacagaggcagagggcacaggaaagaagccgggccaagctcggaattaatgtgccacaagtgttgtggccttcctgaactgggaagtccctggctggcccccgggggagaggggcaaatgcctccgggactgacactccaggcagctttgccttctctcccctgtcatttccagatttcattacctcctacttgccattcacccatcaatgtgaaagtcagggtcacagctggtctgtgtgtccagttccctaaaagcctgttctgttgggcagcctgaggctgttgcccgaatcctagttcagttttttgacttcctttgccctttttcccttttctccatgcttaatggtgtgaggcgtcaggagagaggccaagtacataaaaaaaaaaaaagcagattatctctagagagtttgagcctttgctggtcacattgccttctgaagaggagggagtattagattataaatcctctttattttggtcctttatgcttgaggttccaacctggagccacagtgtgtgagaggaggaggagagggagaattctgttctcccagagctgcacctgcctcgcagaggccagcaccccactctcctgcctccagtggccctgccgcagatgtctcccaaaaagttgagcctttctagatggcttaggtggcaccatggctcagcaggaggggcgggaggcaccagggttcttgtttggaccctgcccctgggccatggccaggtgaccatggctacattgccaaacctctgactgccacagctgcagactgagagggtgggtctgagtccccacaatgtctgaagctgcccctgggattctcaggccaacctgccaacagcaagcggattttcttgcaagatcagggaccccatttctgcagccagtgtctcctgggtgccttctgaggactcccacccccatcccagtatctcatctgtcccctctcctggggcttaagtgggttgcttccaggcagaagcagccaaggaccgattccaggcactttctgtagcaaatgactgtgaattacgacttctcttgcccttcttctagcagtctgtgcctcctctctgaccagtttggagggcactgaagaaaggcaagggccgtgctgctgctgggcggggcaggagaggagcctggccagtgtgccacattaaatacccgtgcaggcgcggagaagcaaccggcacccccttccggcctgaaagccctccctgcaagaaggtgtgcaggagagaagaggccccggcatggggatctgggttctagagggcatgtgatgactgtaaatgttcactgggtgggtagggagtggtatccagtgttcaagtgcagaaatctttggctttgctaccagttccatatgatgagaaataaacgttcgctgaggttttgtttcatactccctttttatgggctgttctttcaatttcctgaaggtcatggttcaccttgtagcataggcagagagctgtgattgcatcatgggcctgacctgatagcccctgccctgccgagaacttgtgcccagtgattgtaggttgggactgttggcactgaaagtctacttgtcccttggacatccagtcctgtcacccttctgcggctgccctggcactgtggagtaataatgaccatggtgtttttctaagcctggccatgggctgggtacttggagaccattcctctgaatttgcagcaatcctgtaggagaattgagacgggtgaactgacgttgttgaggccacatggctaatcggtgggggagccaggattcccccctgctctgcttgaccctgaggccttgacattttaccttgctgttttgcccactactggacttcccctgtgacaaagaggctgtttgaatctggaaggacccccttgtgtccccaaccccaccacattatgattacctgcttctcatcctaccgcctccagcaccaaggagacaacgccaggaacaaagaggtgcaacccccaagctgtgccagtgccgtttatggctgtgtgaccttggtcaagcttcttaacttctctgggtaccaggaactagttagcttaccaggaaaaccacatcatgtaagagctaagaccactcccgcgggcttcctacttcctataaataccgctgtcagaacactaggtctcttccaggcagcctcccctagtggactttgtgttccccttccccttgaggtatctgttcattttcgcaggattcctatacacttccccttcctctagagtcatttgagagggtgtgggagaa

SEQ ID NO: 52507 - DNA, 1357 bp, Homo sapiens
gccttgacctcctgggctcaaatgacactcccatctcagcctcccaagtagctggaattacaggcgagggctaccatgtctggctaatttttaattttttgtagagatggggtctccctacgttgcctaggctggtcttgaactactgggctcaagtgatccacctgcctcggtctcccaaagtgctggaattacaggtatgatccaccatgtccaggacccatcttaagtcctaagcactagtgtgttaacctctgcccttctgcttctccatgaagtctttttgggctttctcctctcctctgggttgtacaaagagtctcctccagaaaacatttgagttgatggcataaataatggcataaaaccatttgacccaaggaagggggtaattgtgatgagatcttaggggaccagaaacaaactcttttacttccacatagattatacagcagacttgcaattctggcagctgtgagatggagagaataccacctgcttctgagagctagtatgaggaggaaatgaattatacagattcagctgagcatggtggctcacacctgtaatcccagcactttgggaggctgaggcaggtggatcacctgaggtctggagttcgagaccagcctggccaatttggtgaaaccccgtctctactacaaatacaaaaattagctgagtgtggtggtgcacgctcgtaatcccagctatttgggaggcggaggcaggagaatcacttgaacctggtgggtggaggttgcagtgagccgagatcatgccactgcacatccacctgggtgacagagtaagactccatctcaaaaaaaaaaaaaaaaaatacagattcacagaaagtgcttaccacagagcctggcacccagtaatcacacactcaaggggagctgtccaggaaatttgagacccagtgggttaattatcggttaattatcttcagactaaaaccaacactgatttccccagacagcccgggaggggagaaacccaaacagacagttacagttcagctaaaacagagctaatctttaatcttttatggatacatgtaatacattaactattatagcttatcccctcaaggcacctcaacacctggtcaaccagaggctagagttgggttggctgggctaagaggaagggagcaagtaaataggccaattacccttctgcaacagactttcttagggccccgccttgagattaagagaattaaatggctaatgctgcctgtcattcagccagtggggtggggaggtgaatttcttgagtcagcacccaatgaagaacactaggcacaaaattatatgaggtgttttacctgtctctcagcaaacta

SEQ ID NO: 52508 - DNA, 1023 bp, Homo sapiens
gcctcggcctcccaaagtgctggggttacaggcgtgagccaccgcgcccaacccctcagttcttttttcttttgaaacccactataatctctgtaagtcctatcagttccaagagactttctacacaaatacatctccaggttgtcaaacctaaaaagattttcctagagcatggcctatgacgtcaaggatccaggtagcgcccggaggaaagcgccaaaggaggccgccatctttcatacagcagcccggaattttgcgcatgcgcctctgattgtctgtccgcaatgaagctcttcggccttctcggcacccatacgtttgggaacggcagtttcgaggtttgtgagacgtcggcttccgaccggaagtgagaagaggaggaagttggctggttgcaccgatctgggggcttcccgggctcgggtaaccggagtgctggtatctaatcgtcgctcaaaagctcctaggtgcgcgggtggatataattcccggcttctcgagaagacactacagcctcaaggaggtgtgcttctagtgtttaattggatacgtgttatggatgccggcttagaaggacctatataccatcatcttaaaataacttccccttggctctctctctctttttttttttttttttttttttgagacggagtttcgctcttgttgcccaggctggagtgcaatggcgcgatctcggctcaccgcaacctcgccttccgggttcaagcgattctcctgcctcagcctcctgaggagctgggattacaggcgctcgccaccaggcctggctaattttttgtatttttagtagagtcggggtttcttcatgttggtcaggctggtctcgaactcccaacctccagttgatccgccggcctcggcctcccaaagtactgagattacaggcgtgagccaccgcgcccggccttggctctctttaaaaggcatttttaggctagccgcagtgtggtctcccgcctgtagtagtcccagctactcggcttgagcccaggagtt

SEQ ID NO: 52509 - DNA, 1046 bp, Homo sapiens
cataaataaatgaaatatatcagtttgaaaatttgttgatttcttacttatataggggctaatatatactgtgaccaaaaaaatctttataaacaagattgggaggtttaacataaacattacctttatttatctcatttttaggcgactgagtcaaagaccaacaccagaagaactagaacaacgcaatatattgcaacgtgagtccagttatggaaataaagttgtatagattttctttgtatgtttctgactttaatatacataaaagaaaaaagaagcgtttgctacaagggctaagggagagtgttccagccaggcaaggactatttatttccccatgaaggaacagagcttaccaagcttcctttggaagatgctattatggtattgtttagtgtgctgtgatactctagaaagctttgtttcagtgttctcactgtatcctggaactgccttgggcatttgggaggctttgacagtatatgggagatgtgcccaatttttctgttttcagggagctaaggaggtagctgtgcatatggagaccttcctattcctagaatgtgagggctggggcccaaagcaagtcccaaatgcagcagcttttctcttggtttaatcccttaagactttcttacctctgtagttaccaaatgggaccatatatttaatttgctgtctgtgtacataattaatttcctgaaatagcattctaatctagtacatatttcatttgtttttccagaatatagagtgaaatttggccttaaaagtctcctcactgagaaggtttgggcttccttggggctatttgtgagcatgttcagtctgaccaatccatcccctgttctctcagcactacttgggtatacacaacttaataacttagtacattttctagtgtgggagcccttataacgtatcacacaaaactcagtgtgatcaccattgtccattcttagcagttactcttgagcaagaatctgcaggcttttccttaaagcatacatagtaaacattttgggttttgcaggccaaaaagc

SEQ ID NO: 52510 - DNA, 1082 bp, Homo sapiens
gaagcaggtagatctcttgaggtcaggagttcaagaccagcctggccaacatggtgaaaccctgtctgtactaaaaatacaaaatagccggacgtggtagtgcgcacctgtaatcccagctattcgggaggctgaggcaggagaatcgcctgaacccaggagctgaaggttgcagtgagctgagattgcaccactgcactccagccccagcaacggagcgagattccatctcagggaaaaacaaaaataaaaacaaaactataaaagctacaatatatctttcaagattttcaagtattttgattaaactaaaaattttaggtttattatgagacagatgggtatcattgtgttgacctggtgtctgggttgcctgtgaggggttgcagtgacttacaaagttaaacacagtacagaaaaatgacaagttacactgctgtgcaaagcagccagaagaagctgaaacatttttgtctctactccacaggctgccataagaaaagaattaaatgaatttaaaagctccgagatggaggttcatgaagagagcaaacattttacacggtaagacccaaaagacccaatcatatatgtgctaggtagagttttccaaaaaattgttcagatatgaagggctctaatgacatcagtaaaaaggaaaacactcagtgttgattgcaagactgcattcaaagggatgaaaagtaagaagcaatagtaaatgcctaggccaggtgcggtggctcacgcctgtaatcccagtactttgggaggctgaggcaggtggatcacctgaggtcaggagtttgagaccagccggaccaacatggcaaaaccccatctctactaaaaatacaaaaattagctgggcctggtagcaggcgcctgtaatcccaactattagggaggatgatgcgggagaatcacttgaacccgggagatggaggttgtagtgagctgagatcatgccattgcactccagcctgggtgacaagagcaaaactccatctcaaaaaaaaaaaaaaaataagtaaatgtgtattctgattatggcatttcatgtatattatttaatccttgta

SEQ ID NO: 52511 - DNA, 1721 bp, Homo sapiens
cctcctgagtagctgagattacaggctactgttggcaaggctggtctcttaactcctgacctcaagtgatccgcccgccttggcctcccacagtgctaggattacaggtgtgagccaccgcacccagcccttcttgccctctccaccaagattcatttcacagtatccagtgtctccttgtttccctttctcccctttcacgtgaataatgtgctcagttcttaatctccacaaaaatcctgtgagagaggtacttttgttgtccccatttcacagatgacaaaacttagaaagttcatactaacagtctgtggcagagcaggggcttctgcacaggtttgtctgatcccagagcctgtgacctctcctcgctgtcgtcatcctctacactcagggtctatcttcttcacccttcagtctcacacaggtcccacagcacagaacccggcttggtgctgacactaggccagggcgacgtgggccagctggggctgggtgagaatgtgatggagaggaagaagccggccctggtatccattccggaggatgttgtgcaggctgaggctgggggcatgcacaccgtgtgtctaagcaaaagtggccaggtaggtgttggggactggcacagggttggacaaggcctggggttgggtggcttggggcagggcttttgaaccacgcatgttcactgtggaaatggagctggctagtcaagtggggagtggcctacatgagaatggactgcgaggccagacgttgcattaatgagggcatcctgggcacaggtctattccttcggctgcaatgatgagggtgccctgggaagggacacatcagtggagggctcggagatggtccctgggaaagtggagctgcaagagaaggtggtacaggtgtcagcaggagacagtcacacagcagccctcaccgatgatggccgtgtcttcctctggggctccttccgggtaaggctgggtctgaaagtctgcatggtccctgaaagacagaattaattggcggggccccaaagataatccacttccatgcccccatggtacttactggtggggagatgaaagcccacaggtagagctgaggcccagacccaggactctagcttcctcatgtgggcctgtccacgccactggctgcttccttgaatccgatgtcatcaagtgtctgtcctgggaagtgagtgggtcaaggatgtccctgggttgaggctgatccaggaggcctgctgtcttcacccatctccctgacttctgtctccccctcaccttgccagcactgcctcttccacacttcccagaggcttggatggggcaaggaggtgtggaggcagggattgtcgcatctcagagtttccaaggtacagaggagtgtagttgaaaaaacagattgtgggtttttgttgttgttgttgttgttgtttttgtattgttttgagatggagtttcactcttgttgcccaggctggagtgcaatagcgcaatcttggctcactgcaacctctgcctcccaagtttaagtgattctcctgcctcagcctcccaagtagctgggattacaggcatgcgccaccacgcctggctaattttgtatttttagtagagacggggtttcccctgttggtcaggctggtctcgaactcccgaccccaggtgatccacccgcctcagcctcccaaagtgctaggattacaggcgtgggccaccaca

SEQ ID NO: 52512 - DNA, 1172 bp, Homo sapiens
gcaggatgaggacgcctggagccctgtggagatgatgggcaaacagctggagaaccgtgtggtcttatctgtgtccagcgggggccagcatacagtcttattagtcaaggacaaagaacagagctgatgaagcctctgagggcctggcttctgtcctgcacaacctccctcacagaacagggaagcagtgacagctgcagatggcagcgggcctctccccagccctgagcactgtgtcagttcctgccttttctcatcagcagaacagaatccttttcctcttttccttcctcctctttggaattttcctgggacctacagaataaagggggggatggacagggggttttcaaaaggaacatggctcactcagagctatatggttagacgtttctccccttttccctaccttccatggtcctggttggccctggctttgcctactagaaaaccaaaacttcccccctggggttttgtgcccactctctgagaagttggggctccatcaagccccattctagtcatgtgcccctttcctgtccctaacagtccacaggcaaacaaatggtacagtcataagagccatctgtcacggacccacgcccagaggaacgtgcagaaaaaagcagagctacatggctgtgggcaactataagccaaatatttggctcagaacaggtgtccatgggacaaaaaagaacgatcctccacttgaccaagaaaaaagtgattctcccagaagcacaaagcatactcttgcccctcaggtgttgcttgtgtacatcgtacccatccattcggcttcacctgcagccaacggcctggaatcgcaaagagacaccactctgggcagagcagagcagggtatggggtggggagagagggtggagggttttataaacaaacttaacagcaatattgaaaggaggtgggggattgagggagggacagagtgttggagggccagagactagtcctgagatggaaacagcaacttgtacagtggctgagaaaataggatatagttttgatttttttaattgtaaaatattttggagggagaacaaaatcttttaacattttgaataaatttagagttttataaaataggccacttgttttctacacattccctgctttttaagggagcacatattatgtgccaggcactg

SEQ ID NO: 52513 - DNA, 1070 bp, Homo sapiens
aaatacaaaaaatcagctgggcatggtggtgggtgcctgtagtcccagctactctggaggctgaggcagaagaatggcgtgaacatgggaggcggagcttgcagtgagccgagatcacgccattgcactccagcctgggcaacaagagtgaaactccatctcaaaaaaaaaaaaaaaaagagagagaaaatgctctgcgcagtgctagggaaataaatatttattaaatgttagcttgcattaatttattcctctgctagaatttgagctcaggagagcaggaacgttgtctttctgtgactgctgcatcctgtgcgtagcacagtgcctggcatacagggcagactgtaaatatttgctgaattttcttctatgagttactttccagcagggtgtcggggaagctcctatttgggaatgttccctaggggtgaaggtgtcgaggaggatggtgaactgaatgtgggaattcctgcagatattagaattgtttgtacttggatcttgacactatgtggacacctgttgatgggactctcctttcttcctctagtttaatggactctctctttctcttctcagcctcttttcctttctacattcctgcccaccttcttatccttacttctttttcatgtgtccattcttagactttaatcacatttgtgatctaaattgtatatttttttcatgcaggggttatggttttgtgaaattcacagatgaactggaacagaagcgagccctgacggagtgccagggagcagtgggactggggtctaagcctgtgcggctgagcgtggcaatccctaaagcgtgagtcctgcagggaaggtagagagactctagactcccctccagacactcctcttttgtttgctgagaatcagggcatccatacgctggatgggaggctgaaggggatccaattcaagtcacaagtactgaatgcctgctgtttgccaggctgtgggtgctggggttgaactagccccactcctgcagaaacttagagttggggatagagtatgatttggaaaggctgatgtattcagacattactggtgaca

SEQ ID NO: 52514 - DNA, 1028 bp, Homo sapiens
ttacatacctacctgtcaactgagaaaccttgaactcaggctttagtgtgtgaattatcccaagctgctcatcccagttttggataatcccaaactgtcctatgtggataactacctggacaaaggattcctgtgaaggaaaccaatttgaaccttgtttaaaagttgttcccttggtcttcaaactcaaatggtcaaatgaatgcagcagtgttgtagaaacattcatgatctccaaaaacagtcattattaaaatcttacaaatcatatttccaaaaaggtttcacaatttttaaaaaggagtctctcatctccctcacatcatgcaacctggcttgtcctttggcctggctacatcatggcagggatctctgaagacactgtgtccaggggctgccagtgacagtccatcagagcgtcatacagctcctcactctgttccatgaactccttgttggcctcagtcacatccagctgtggcatggggtctggaaagcaagcaaggatggggtcagggaagtctagggacagctgcaagggacctggttcagttcccttctcccagaactctgttctatggtaaggtccctatcctgccagtttctttcaggaagtgaaagcactgccttgcagggttctggggaagatgaaaatagaataatgtatctagagaatgggaaaatggcagctgttagcctgcatctattaaaagctacacctgtgtctctagccatcatgtatcctagattttctggtctggtcctcacttcaaatttgggtttagaaggtctgatcaaagttattaagtccagagcatcatctcaagaactgacaataagtgcatagtggaagaacttcagtcaaatataggagctgaaaggccaagtcctgtatgtatgtatgtgtgtgtgtatgtactttagagaaagggtcttgctctgtcacacaggctagagtacagtggcacacttacagctcacagcagccttgaactcttaggttaaagtgatcctcccgccttagcctc

SEQ ID NO: 52515 - DNA, 1006 bp, Homo sapiens
gacagagcaagaccctttctctaaagtacatacacacacacatacatacatacaggacttggcctttcagctcctatatttgactgaagttcttccactatgcacttattgtcagttcttgagatgatgctctggacttaataactttgatcagaccttctaaacccaaatttgaagtgaggaccagaccagaaaatctaggatacatgatggctagagacacaggtgtagcttttaatagatgcaggctaacagctgccattttcccattctctagatacattattctattttcatcttccccagaaccctgcaaggcagtgctttcacttcctgaaagaaactggcaggatagggaccttaccatagaacagagttctgggagaagggaactgaaccaggtcccttgcagctgtccctagacttccctgaccccatccttgcttgctttccagaccccatgccacagctggatgtgactgaggccaacaaggagttcatggaacagagtgaggagctgtatgacgctctgatggactgtcactggcagcccctggacacagtgtcttcagagatccctgccatgatgtagccaggccaaaggacaagccaggttgcatgatgtgagggagatgagagactcctttttaaaaattgtgaaacctttttggaaatatgatttgtaagattttaataatgactgtttttggagatcatgaatgtttctacaacactgctgcattcatttgaccatttgagtttgaagaccaagggaacaacttttaaacaaggttcaaattggtttccttcacaggaatcctttgtccaggtagttatccacataggacagtttgggattatccaaaactgggatgagcagcttgggataattcacacactaaagcctgagttcaaggtttctcagttgacaggtaggtatgtaaatcagggttctctggagtatttgtaggacctgccatatttgagtcctaacttggtgcaagtc

SEQ ID NO: 52516 - DNA, 2767 bp, Homo sapiens
ctgtggtcaaaaaggagcccagagtgacagttttccttgacggtcgccgttctgtttgttgtaactgatctgcaacattttgggaaaatacagttccattgtacctgccacctttcagctgtagccagagacctttatcaaaatgggcttgtttccacagaacagcagaacggttgggggtttgcatgtacagttaaccagcataagactcgtactgggaaaatccagctgggatgtgacacagcttaactgatagcttaaggcatcagtattgggaccaaaggctggtcagatttgtatcattctgaggaccaaatgatgggaacaataaaattgttcatgacagttgttctcattttgctgtccagatgaagactcttaagatgacagaaggtgatttttctggtgatcgaggacttccggggtaatgacagtgatgaaatgcaggggacctggtaggtttcttttggagactaactgggggctgcctggtgggacagaacagcatgtttccaagggctgtggctggtcatagccatgggatctccaactgcatgcaagagcaacctggaaagactttgacagcgcaggtcagtacaatacctgcaagctgccactcagctttcctataatgtttcaggaccagggctggaagccttccatgtgtcaacttcaatgtagatgggtttttttttttttttttttttgagacggagtcttgctctgtcacccaggctgctggagtgcagtggcatgatctcggctcatggcaacctctgcctcctgggttcaagcgactctcctacctcatcctcccgagtagctgggattacaggtgcccaccatcacacccagctaattttcttgtatttttagtagagatggttttcaccatgttggctagatgggtctcgaacttctgacctcgggtgatccgcccgactcggcctccccttccaaagtgctgggattacaggcatgagccaccgctcctggccagtttagttttcacgctaagctttttgttctgcaggttgcccccaagtttcctggcagtgtgtgatactgaggaggtgagcttgtttctggagctgtgctttaaggtaaagttgatcagcttaatcctcctgatccctttcccatcggatctgaacactggtcttggtggtcgtaaaaggaggaaaagtaatagtgaagctggcctaaatgttgtaatctggtatatggcatgtgggctagtttcagacaggtttcagagatggttggatctctgaaattgtaaaatgaagtataatcttaggctaagggaaggatgcgtgtgaagctctggaggttggtatagtaatagctgacctattactgcatttgggagggatctgtcatagcttccttgcctcttaattaagggtggtgtttttttcttttagattcatgttacatgtaaagctgtcctcatttgtgactatggacctatggagttgggtaagttagtgactacccaaagctttgtcacaacttggtgtgtagctgcaggtagtgctcaactatctgggatcctgtcctaagtagtcaacctaatagaactataaggttacttaggtctgtgtcaaagttacagctttttttttttttttttttgagacagggtctttctgtcacccaggctggagtgcagtggcacaatcttggctaattgcctcccaggttcaagtgattctcctgcctcagcctcctgagtagctgggactataagcacgcaccactatgtctggctaatttttgtatttttagtagagacagggtttcaccacgttgcccagggcagtcttgaactcctgaccccaagtgatctgcctgccttggcctaccaaagtgctaggattacaggcatgaaccactgtgccgggccagaaagtcttagcatcttagtaacatttacatttggcctccctcgtgtgcccttagctattcattaccagagggcaaagatggttagaacatgatttacccaccctaaaatgcattgaaggcatcagagggcaccgtgggccacaaggcctggtagccacaaatgttcagtggtggctggagctcatgatgcattctttggtgggacgtctctcagcattagggagagttgagagtggggtagaaacaaggggttccatgtagcacacactgtatttagaatgactggtccaggatgaaacctaatttgagtggacatccatggatgagaaatgcggatatgggactgagaccagctcctaggaaaatgtctgggtgggggaaatctgggaattagtaacacaatggcttacacttcctttgcaggacaatctctatgggaagcagaaggcaaggaccccggtcattttaggtagaaacaacagcatgctaatgcaaaaaattatgcagtgtgctactgaacttcagaggtgatcaataaaagaagaataaaaagactaataaaagtatatttgtgtttgtatttttttgtagagaccgaactggtctcttcccgagctcaagcaatccatctcccaaagtgagccaccatgcccagcccttaaagagatctttggagattttttatgatgtaggatgaatgctttgcctcaagcagtaagtcccaacacatgacaaggttggacagtttccccatttacttgggaaacacggaagtgagcagtataaagttcacacggagggtctgctttggctttgagctatcttccttaatcctttctgagctgccttctcccgt

SEQ ID NO: 52517 - DNA, 1033 bp, Homo sapiens
tagatacagtagacatttatattgccaacttttaccaagttctgaaggccattgatataattcctgcaggctcatatcccacaattttgcccaataaaatattccatatgctgttagtttatccctaacagcagacattcattttataagaaggtggtctatatgtgccataatcatcattaattaattttcaaagttgcttatgaaagagatggagatgtttgtcttggctcccactaaggaaaaggagatatatttctccacatccagtttgcttggatcctggttggtgaagatgtaccaggccattcaactaaaatggttccatggcaaggatggtgcttgatgccagttgttcatttacaggtagcttttgaaaatggctgcctctcatttcaccgggctcacagctgttgctgatgtaattaaagatctagacactcagatagctgtaagtaagtttgaggctactgtgagcagaacttggtgaatgtgcttctgatcgtgatgacacccaagctgacgtccacagagtcagcctcatgactctaagattcaggagtctcagctgctccagactagggtctctgcatgtacttagattgctaacactcagagaaaaattgctcttgataaagaggagtttacttttaacagctgctaaaagttatgtttattgggcatagccctgacatagacttaagcatgtttgaaatgccagaatgaactagtctgtattcttaagctttgtgactgatttttttaaaggatgtgattgtgctatgacttatttgaatttaacattatttgatactttaaaaataatgcatgtagtacttaactatttttacaaagttctcaaaaatgtcttgcttattctagtttatttatttatttatttatttatttttattattatttgagatggagtttcgtcaacctctgcatcccgagttcaagcaattcttctgccttagcctcccaagtagctgggattacaggcgtgtgtcaccacgcccggctaattttgtgt

SEQ ID NO: 52518 - DNA, 1130 bp, Homo sapiens
cctgcctgggctgctccaaggtggtggctaggggtggcacaagttacacattttcaatttggataggttgtgattcttgtcttccccagtcagatacctacagccgctgagagccggtattccaacgccatgagacgccttctgtcgtgagcagttgacaagaaagacccagcacttactgcaaccggaaggagcggttcctccctcgctcgcgcagccgctcttccccgccactccctcggtgcccgccagcacattcccagcaagccctgagtatatttgcatatcaactcactacatttttttcttctaactaaaaaatcgaaaggacaaattccagattctccttgtgaagtcttcctttcagttcagaagaaatggaattcgctcttcaacttcaggaagttgaaataaagagttgcttggattttgtgttcacctttaccaaaaaatggatttggtaacactgccaccctgctttggtgacagagaaagcaaaaagggcttctgtcgtgagtggcacacgtagggcaactcgattgctctgcgtgcggaatcgacatcaagagatttcggaagcataattttttggtatttgggcagctggtgatcgttggtcccggcgccctttctttactgttatatgttaggcgaaatattacgcgtttggagtaagtggtgctttttgtaactgaaaagagattctgtgtgtgtttttttttttttttagaggctgcatagttatttgtatgaaccgcaggtgacctaattagcaaggtaattcagacctgtatcctagcacttaagaagtggaagtgggataaccctgcgtgttctcgtgtgggaggctagcttaagcaacaaagcaggaaggccccaccaacaaaagaatttaaaaattatacgtgcgtggtggcgcgcgtatgaggaaattatttggcaactgtgttacagtatagcagcaaatggaatagacctagtccctgactttaggagacctgcctcagccccccgaatggctgggactacaggcgtgcgcctccgcgcccagctaatttttgcatttttggtagagacgggttcaccatgttggccaggatggtctccatctcttcatctggtgatccgcc

SEQ ID NO: 52519 - DNA, 1077 bp, Homo sapiens
cccagactggagtgcaatggcgcgatctcagctcactgcaacctccgcctcttgggttcaagcgattctcctgcctcaccctcccgagtagctggggctacaggcgcccgccaccacacccagctaatttttgtatttttaatagagacggggtttcaccatgttggccaggctggtctcgaactcccaacctcaggtgatcccacatcctcagcctcccagagtactgggattacaggcgtgaatcactgcgcctggcccaaccaggctaatttttttgtgtttttagtagagacggggtttcaccatgttagccaggatggtttcgatctcctgaccttgtgattcgcccgcgttggcctcctaaagtgctggtattacaggcgtgagccactgcgcccggcgggggaaacttattcaatggttgcaccgtctcctaatttgagagccttatatcaaggatgtatatttaatatcttacttaaatgattttttttgggttcctatttacttcagcaaatacattgtataggtagcttctactcagcttcattgggtttattgtgggggcagtattttggtcttgccctaagccaaagtccaccggactgtagcgggatgactccaaataactcttatcccatcgctccctcaaacatctacataatagtctccagtctgtgacttagaatttcacctcctctggatacttccctcagtgtttctgcataatttacttgttgacctcattacatcttgtagcactatggatcacccactgaatgcatgagaagaaataaaggggatatcaaggagttttggcctcaagtaataataaagttttaacttggatttttccccccgttttaaacaaaactgtagtttagagtggaaatttcttttttattttatttttttgggggaacagagtttccctctgttgcccaggtgagagtgcattgcgggatctcagctcactgcaaactcgatcctctcagctcagcctcctgagtagctgggactacaggtgcgtggcactgcgcccgcctaattttgttagttttctggcgggcgctg

SEQ ID NO: 52520 - DNA, 1159 bp, Homo sapiens
agaaggcggaggttatagtgagctgagattgtgccattgtactccagcctgggcaacaagaacgaaactctgtctaaaaaaacaaaacaaaacaaaacacaatccttgcttttccaggacgtacagactgaggaggaaaagccaacaaagtgagatgatggttgtgacgggggtactgcaggtgctgagagatcaagaacacaaactcaaacctagtgaaggaattcacagaaggcctccccaaggaagtgatgtttcaagtaaatcacaaaatggttagcagggactagccaaaaaggaagggaaagagaattgcttgaacctgggaggcagaggttgcagtgagccaagatcgtgccacagaactccagtctgggcaacggagcgagaccgcgtctcaaaaaaaagaaaatagtttagcagtggctttgtggagaagtgagctttgaactggactttgaagggagaagatgagggagaaaggcattaaagacatttcaggcttaaggaataaagggcaaagaaatataaaggtacattatgctatgctcagagtacattaggtggctggtatggtattaggacttaagattcttggggtatgatagttgcaggtaagaccagatgagtattttgggaccattgagggaattcagagtgccgtgcttaagtatgtgtgttttaggcaaacaagtgctgtgggagaggtgagatgtggattagatcttctgactacactttttttttctttgagacggagtttcgctcttgttgcccaggctggagtgcaatggcatgatctcggctcaccgcaatctccacctcctgggttcaagcgattctcctgcctcagcctctcaagtagctcagattacaggcatgtaccaccgcgccaggccaattttttgtatttttagtagagacagggtttctccaggttggtcaggctggtctcgaactcccaacctcaggtgatccacccgcctaggcctccaaaagtgctgggattacaggtgtgagccaccacgcacggccctgactacacgttttgtactcaaacttgcatccattgtgtgcctactctgtttgggcacagtcgtagtcatctttacatactcatatattaaaataaatacagtgctcttacctatactctctt

SEQ ID NO: 52521 - DNA, 1032 bp, Homo sapiens
taactctgtcacccaggctggagtgcagtggcgtgatctcagcttactgcaacctcagcttcctggctcaagtgattcttcagcctcatcctcccaattagctgggactacaggcctcagctaccatgcctggctgatttttgtattttttatagaaatgtggtttcaccatgttggacacgctggtctcaaactcctgagttcaagtgatcctcctgccttggcctgccaaagtgctgggattacaggcgtgaatcactgcacctggctgaggaatacctttaactttgagttttgttgttcttggcgggttttatttacccagaaggacaagcatatgccaattttccccaaatgtaaaagagtcaggatactaaaaaatctttagtgaaagccaaatgacattataacatagaatttactataattaaaataccccatggttttgctcatgtcctataacgttttgtggatccaattataaggacattttccagagtgggtttagtatagtgaacttttttctgtattcctaggagagttttttaaaagactgaaactttatgtctgtgaaagtggcaccagatcttgctgcaatactcataatgaataaactacagagggaggaggaatactggtaaatgtgggcaggaccagtgaaaatttaaagccccaattagaatttttgcaacctaatgacttctaacactattaggtttcactaatctacacagtaggctcagcagtgttgtccctatttttccctgaggcctagttcccactagatgaagtataggctgaactggtacttcttgtctccctttgcacaggaaaatgatggactccggacagattgatttttaccaacatgacaaagtttgctccaatacctgcagaagcaccaaatttgatcttctgatcagcagtgcaagagctccagtgccaggacagcagacaagtgtggtgcagacacccacttcggctgatggtagggggtaggaaaccacctgaaaacccattgtgtttttcagc

SEQ ID NO: 52522 - DNA, 1029 bp, Homo sapiens
cccgtctctactaaaaatacaaaattagcctggtgtgctagtgcatgcctgtaatcccagctactcggaggctgagacaggagaagcacttgaacctgggaggtggaggttgcagtgagctgatatcacgccattgcactccagcctgggcaacaagaacgaaactctgttctcagaaaaaaaataaaaataaaaaaataaaaaaagaaaagacatagccaccaccctcagagagcttatagccccatctatccaactgttttgttttgttttcttaagtataggactagagagagtatatcttaattaatatttcatttctttactatttaacttttatgatattaaatatctcgtttttaaattaaattaaaattaaataatatgtaatgttaaatatgtttaatgtttaatatttttattggaggaaaatgactattctttgtagtgagaactatgacaaattgagagaatgacaaattgaggcaatcatcccaagcacctatgctgctgaaggggcgacataattgggtgcccactcagggaagcatctagtattccaaagcttattcccttttttcaggaatggcccaataagaaatcattttgagttaaaataattttgaatttaacgttgtagagatttgcctaagtatctaggtagtgtctcttttttaccctctgtcttatccttcttgtgccagaggacactttgatgttctggaaaggaatagctgatgtagggctgatggaagaggttgtctgcaatatacagaaggaaatagaggagctactcaggggagttcagcagcggctcatccaggctcccttccaagtcacaggtaagtgcactaatcctaacagtagcagtgatttattgaatactcacctccgtaggcaggtcctgtaagccttgcaaaaaccctgatgtataggtattattatcttaattttacagataaggaaactaaggctcatataagttaagtcacttgtctaaggttcataactaggttttgaactcagatc

SEQ ID NO: 52523 - DNA, 1089 bp, Homo sapiens
tggcgtgaacccgggaggtggaggttgcaatgagctgagatcatgttactgcactccagcctgggggacagagcaagactctgtctccaaaaaaaggaaaaaaaaattgtttcaaatttatgtaagtagagacaggggtctcactatgttgcccaggctggtcttgaactcctggcctcaagcaatgctcccgccttggcctcccaaagtgttgggattacaggcatgtgccaccatgcccagcctgatctttgtatttatttatatggaaagatttacaaaaatataacaattaaaccagtagtcattatacatgtaataaatctttgttaaaaatgtgttaaaatgcagttaggagagtcccataatttctggttgtttcatatttataaacagcacaatggagagtggtggaacatatctgttttaactggacaggcatgtcttttgttttaaatagatgctgctgttctcaacaatgtagcacacacatttggcctaatggacacagtcaagaaggttttagacaacagaaggaaccaagtagagcagggagaagaacagtttctctatactctgacaggtatgtataagttatcgctcttcttcggtgatatcatgctaatattcttgtcttcccattttcttgttgacttttgttggggtaacttttttttttttaaatagtatcagattttgcttttaaaaataaaaaaaaaagccgcagatgaggtggattgatgagaaacaaaagaggcacaaaggaaaaaaaaaggaagctgccatcatagtcccccttctgtgtcttgtggaggattaagatgtctcttagattgctccattaattcaataacattggtggcagaagacacaaattggtctttgtcttttttacattattgatactgcatcttttgatagatataaatttagcactttctccattatttgtggtaatcagaaattttgtgtaatcccagcactttgggagactgaggcagacagatcacgaggtcaagagattgagacaatcctggccaacatggtgaaaccctgtctctactaaaaatacaaaaattacctggatgt

SEQ ID NO: 52524 - DNA, 1354 bp, Homo sapiens
atcaccatcaccccagtgggtcagtcattttccatgggcaatattccagtggccaccctcagccagggctccagtcctgtgactgtccacacactgccttctggccctcagctcttccgctatgccacagtggtctcctctgccaagagcagctcaccagacacagtgaccatccacccttcatctagcttggcgctgctgagctctactgccatgcaggatgggagtacactgggcaacatgaccaccatggttagccctgtggaattggtggccatggagtccggcctaacctcggcaattcaggctgttgaaagcacctcagaggatgggcagaccatcattgagattgatccagccccggacccagaagctgaagatactgagggcaaagcagtcatcttggagacagagctgaggactgaggagaaagttgtggctgagatggaagaacaccagcatcaagttcacaatgtggagattgtggtcttagaggattaactggggatctcagggccaggagttatgttttgatttggaattttaattatttgtttatttttatcattgtcccactcatttccacataggacccttttttaaaaaaaaaaaaacaaaatcttattgttgtaactgaaaatgttgggttcttcccactccctcattgaaaaatggacaaaacaagctgcccttccagaagttgagagtaggtcattcaatgtcctaatcatcttacaccaagaaagtaatttcttttaggggaagtgtcaagataacaagtaaccctgtccagaaagccatttccaggctcgtctgtgtgtgtaggcatgtggttttattcttgtaaagatgcattgaccaaactctggaacacagatctgacactggaaggcaacccactcgcatgtggatgctgaagggcactttattttgtatcctgaaaagggcctacagaggccagtacaaaactctcaaacaaaaggaagttgactctgctttgaggggaaggtggcatgccagcactagcttaaaaagggaagtgctagccgggcgtggtggctcacgcctgcaatcccagcactttgggaggccgaggcgggtggatcacgaggtcaggagtttgagaccagcctggccaacatggtgaaaccccgtatctactaaaaatacgaaaaaaaaattagccgggtgtggtggcgggagcctgtaatcccagctattcaggaggccaaggcaggagaatcgcttgaacctgggaaggcagaggttgcagtgagccaagatcgcaccactgcactccagcctgggcaacaagagcgagactccatctcaaaaaaaaaaaaaaaaaaaagtg

SEQ ID NO: 52525 - DNA, 1333 bp, Homo sapiens
agccaaggccgggtgcggtggctcatgcctgtaatcccagcactttgggaggccgaggtgggtgaatcacctgaggtcaggagtttgaggccagcctggccaacatggtgaaaccccgtctctactgaaaatacaaaaaaaaaaaattagctgggcatggtggcacgcgcctgtaatcccagctacttgggaggctgaggcaggagaattgcttgaacctgggaggcggaggttgcagtgagctgagatcatgccattgcactctagcctgggcgaggagtgaaactccgtctcaaaaaaaaagaaagaaatggaaagccaaggatgctgcagctgtgctttggggttcaaggtaatagcttaccttgttccacactttgtcaaagcactcaccctcctaagctaggaccagtccattcatttgaaactgtgcaatgtgatgtaaatggctctggttcttagactgtggctgtcacagggatggggctccaaggccatcattttcattgcatggctccaagagcagggagttcctcaatgaaaccagctgccttttttggtggggccatttttttggctttggaacccaaagcagccactcatttggtgcttcctcttgttctgccctccatccctcaactcttaatggcatctgtctcctagaacccacgctcttcagctttttggctgatttggagaacagtgacaggtgcctgcctgccttcgtccccttttagattcatttataccacagatgtttctgtgagatactgagatcataaaaagctttaggcttggcagagaggactcaacacccccaggctttcctgaggcaccaactagatgtctcttgagtgagctggactccctgggaaagaagcattgtctgcaacattatattataggaaatgtaccaggaatgtcaataataatgctttgggggggggggttattttgttttgttttgtttttaatgttgtttgtatatttagagctgggccattttccgtgctgcgatttcttctctttgaccctcttcagtgtttggggcaagagtggaccctggtttttatttctttgattgcattgtttactgcactaggaaaaatatagagatacagggaaactacagacaaatttaaggaaaaataggtcaaaaaagaaagcacacaccttaagagtgggaggaatatttttattaaaaacaaaacttggacctgtagtttttttttttcttttttatttttaagaaggcacctttcagaagccatgtttcttccaacagatgttggaaaccccatcgagcaagtaaaagttgcattctccatccctc

SEQ ID NO: 52526 - DNA, 1004 bp, Homo sapiens
ttctgaggattcatttttttttcttttttctgttttctgtttttttgagactgagtctcgctctgacgcccaggctggggtgtagtggcgcaatttcggctcgctccaacttccgcctctcgggttcaagcgaatctcctgtctcagcctcccgagtaggtgggattacacgtgtgcaccaccgcacacagctagtttttctatttttttagtagagacggggtttcatgttggccgggctggtcttgaactcctcaggtgattcacccgccttggcctcccaaagtgctgggattacaggcgtgagccaccacgcctagccgaggattcactttcttaatacctgtattttttctctgccctctatcaggaaatcccatgttctgagggttcacctccttaatacctattaatgtattataaaacagttaactgcaaatgtcctaggccgttgagattcccatctctgtaatatcagcaaccatactgtattgagaacgtaatactgataacactctactggcagtaacatgtgcatgaataattgtcttcttccttaccaagaatgtagcagtgcagaatttagggattcttacagtgttaaatattctgaattttcaccccagagaactttggattcatatgatagggaaagttctaatgtaaaatcacctgaaggcgggaagatctcttgagcccagaagtttgaagctgcagtgagctatctacgatcatacctgtgaaaagccactgcgctccagccttggtgacagaacaagatctggtctctaaaaaatagtcacctgaacttcattcagtgctgcaggactggctgtctttcttttctctagtttatgggttcttagattatcagaactatttcggagttaggaaatttttttttttttttttttgagacgtagtgtcaactcttgtcacccaggctggagtgcagtggtgcaatctcggctcactgcaacctctgcctaccaggtgattttgcc

SEQ ID NO: 52527 - DNA, 1010 bp, Homo sapiens
ttcttttgtattattatctctgattccaaagacagttacactgttgtaactaatttaactccccagattaataggccaaaaggaaaactggcaatatatcttccaaaatgccctgaaaggtcaagaaatttataagttctgaacgtatgctgtatgaaacatagttggtagtcctgaataactgcatgcccatatatggatctgattatcacataaaacttgtagaatccctgtgtaaaattttcaacactgaaagtatagaaaccacttgagcaagtgattggaaaaaagttttcacaaaacacaaccagttaatcaggaaaagtagggaaggaagtagaggaatgaactattaataggttcctgctattgaagtagtttgcttacataatcattataacagggagagttggagcatttagaagcataattctaggtagttcttgtaaaacattgtgtaattcaaattttttagcttgagcatgtgggagcctgccagttcaggtacagacattcaactgtgtcttggcataacctgtgatattaagtgcatttgatttttctttctcaggtaagccaaagcttaaatgtctttgtttaaaaaaaatttggctaataatataaatcttagatgagtagatgaggaagggtaacctgagaatctagttcattgtctagagtaagtcatctactttttagccaatttttcattaccctattttggaataatacttcaagtttaatctgttgattataggctgaatttcttatatatgtggatttgggtctgctaaaatttttaaccttacctttgtgagaaattttaaatgtgaaaagggtatgtgtgaaaagacctcacttttgtttttatgtattatttatttatttatttttgagatagagtctcactctgtcacccaggctgtagtgcagtggtgcgatctcggctcactgcaaccttcacctcctgggttcacaccattctcctgcctcagcctcccgagtagctg

SEQ ID NO: 52528 - DNA, 2716 bp, Homo sapiens
ggattacaggtgtgagccaccgcgtccggcctgcacactcctttttatagtatatttgaattgcgtgactaggtggggggaggaaatagcctgatgttaattttttgtgttttgatttgcctttttttttcttccacagaataatgcatatactgccatgtcagattcctacttacccagttactacagtccctccattggcttctcctattctttgggtgaagctgcttggtctacggggggtgacacagccatgccctacttaacttcttatggacagctgagcaacggagagccccacttcctaccagatgcaatgtttgggcaaccaggagccctaggtagcactccatttcttggtcagcatggttttaatttctttcccagtgggattgacttctcagcatggggaaataacagttctcagggacagtctactcagagctctggatatagtagcaattatgcttatgcacctagctccttaggtggagccatgattgatggacagtcagcttttgccaatgagaccctcaataaggctcctggcatgaatactatagaccaagggatggcagcactgaagttgggtagcacagaagttgcaagcaatgttccaaaagttgtaggttctgctgttggtagcgggtccattactagtaacatcgtggcttccaatagtttgcctccagccaccattgctcctccaaaaccagcatcttgggctgatattgctagcaagcctgcaaaacagcaacctaaactgaagaccaagaatggcattgcagggtcaagtcttccgccacccccgataaagcataacatggatattggaacttgggataacaagggtcccgttgcaaaagccccctcacaggctttggttcagaatataggtcagccaacccaggggtctcctcagcctgtaggtcagcaggctaacaatagcccaccagtggctcaggcatcagtagggcaacagacacagccattgcctccacctccaccacagcctgcccagctttcagtccagcaacaggcagctcagccaacccgctgggtagcacctcggaaccgtggcagtgggttcggtcataatggggtggatggtaatggagtaggacagtctcaggctggttctggatctactccttcagaaccccacccagtgttggagaagcttcggtccattaataactataaccccaaagattttgactggaatctgaaacatggccgggttttcatcattaagagctactctgaggacgatattcaccgttccattaagtataatatttggtgcagcacagagcatggtaacaagagactggatgctgcttatcgttccatgaacgggaaaggccccgtttacttacttttcagtgtcaacggcagtggacacttctgtggcgtggcagaaatgaaatctgctgtggactacaacacatgtgcaggtgtgtggtcccaggacaaatggaagggtcgttttgatgtcaggtggatttttgtgaaggacgttcccaatagccaactgcgacacattcgcctagagaacaacgagaataaaccagtgaccaactctagggacactcaggaagtgcctctggaaaaggctaagcaggtgttgaaaattatagccagctacaagcacaccacttccatttttgatgacttctcacactatgagaaacgccaagaggaagaagaaagtgttaaaaaggtaacccacttcttcttattaagatttttagggaaggaggaaccagagagaacagaagaggtattatatagtgaaccgttaataaaaactctgtaaatgaatacagtatcacctaacagttcaaggctttatagaagtataattggttttaatacttgaaccctaatgtgaaggaatgtgagaacattagtagaggacagaaatacggactttgaaaggaaagcaaaaacagtacaaggaaatcagacagaaacagtacatgatgcagaaagaggtgaagaatgagtcaaagagatgcagaggggtaatggaagtgataaaaccatagaaattaaagcagaagattgagtctataatatggcagagaaaaatcgaaatgttctctgttggattaacttggcctagctggggttttgtggttattttcaagagtcaatatgtcatcaccaactcttgaaatcacttctgtcttccctgtgacaattggcggtgtaaaagagtcacttctgatttcctctgtaacaagtgggaatcttgggcagaatgatgaggaatggattcaaactagagttgaatttgaaagagttggtagcgtttgctctgtgagtattgagtgaatgtaaactttaggattataagaggatgataaaactggttggagcagataatgatatattatctgggatttatacttacttttttttggacagggttctctgttgcccaggctggagtgcagtggcatgatgtccgcccactccagcctccaccttctgggctcaagtgatccccccatctcagcttcgtgactagctgggatcacagtcatgcaccaccatgcccggctagtttttcatgttttttgtagagctgggttttgccatgttgcccaggctggtcttgaactcctgagctcaagtgatctgcccctgcctcccaaagtgctgggattacaggtgtgagccactgcagctggcctagacattgttaaat

SEQ ID NO: 52529 - DNA, 1146 bp, Homo sapiens
aaaccaccaaataaaggcttcaattatacttctgtcaggttactttttagtttactctcttgtaagaactgctggcactggccgggcgcggtggctcacgcctgtaagcacagcactttgggaggctgaggcgggcagatcacaaggtcaggagatcaagaccatcctggctaacatggtgaaaccccgtctctattaaataaactacaaaaaattagctgggtgtgatggtgggctcctgtagtcccagctactcgggaggctgaggcaggagaatggcgtgaacccagggggcggagcttgcagtgagccaagatggcgccactggactccagcctgggcgacagagcgagactccatctcaaaaaaaaaaaaccaaaaaaaagaactgctgggatttcaggaagatgcctatgattgcttctaagcccagttaccattttagttagtactgccttactctcctgttggttactattttccttaacatctttacataactgattgtaaactgttcttacaatctttattaggctttaaagaacaagcaggttttatgagaatggggctcatagctcattgagatggtagactcccttaggtgaagtgtttgtgtgtgtacctttgtagtatttacgagattgcagaagctttcatgccagatgggtggtaaccccataaagaagtagggaagtacttaaacttcatcctgaaggtgtcacagctgttttaaagttccatgattgggcagtatcttggcagaacacactgaagcagagccacagccatttttgcctagcattattactgacttgttctgcatgatctaattaacatagaaccttcaagcattagatctgtcaggcttgaaacttagagcaaattttagtgacatgtttgatagatgtgacttacttttatttttttaaaaagcaatatactgtgctttaggtgtggtttaccttgttgaatactgcagatactattgtgtgacctttctgcgtttatttagaacttttccccagttaagtattccctatgacatcacttttgttggcttcatagtattgtcagacttactataatttaccaatccctaattgttgaatatgtcaacaatttgtattttattttttctaattaaaa

SEQ ID NO: 52530 - DNA, 1023 bp, Homo sapiens
ggacttatgagtatgtccaaggccttgggactagtttgggatttgaatttaggtcagtctgactctaacactctagtgtactatgtatgtatgtattctgctttatctgaccagtcatgtatgtttgggttacttccattaggcccatatttttggggggcctgacaactaagtattaatctaaacagtataataggaaagcatgtaatgaattttcaagtcaaaagtaattttgcattaaggtgtttaagtgtttaaaacaaagtaaaagccagtttttctttgtggggaatgttctacttagaataattaattttctaataattctaaataattaaatttctgttgagttattctgtgaagtttttaaattcataaagcatgttcagataatttttaaccatttcaatttttttcttacctctgtaggaacgtcaaggtcgtgggaaataaaaggcagttctacacagactgcagcaacggttgcatctgcatatcctaagaggaaaaaatgaccttcaagagaattaggacttttttcttaatttcactgacttcagagacgattgcagacttgcagtttaagtattggaatttcacaaaagacataggacttaactggaaaatgaaaaaaaaaagaaaaagaaaaaactaaacaaaaaatccctctaggtagtttaggtgaaaaatgtcccttttattttggctttggttgtgatttcagagcataatgctatgtttttttgtctttttactatgtttttcggatttttaagtccgtaagtgcatacagttttctctaatttttaaaccctttcctcctcccattttgacatttgcacttggagaacacttgagttgtgaaggttttgggcatccaccccagaaagtgggaatttgattttatccttccgaactggaagaacatttttatgaagaatttttgtctaggagaatataacagtgttacccaaggttgtgtctttaagggtggttcattttctctgaccttttgttactcaa

SEQ ID NO: 52531 - DNA, 1023 bp, Homo sapiens
ctcagcctcccaagtagctgggattactggcatgtgccaccatgcccggttaatttttttttttttgtatttttaatagaaacggggtttcaccatgttggccaggttggtctcgcactcctgacctcaaatgatccacctgcctcagcctcccaaagtactgggattacaggcacccaaccctgagattttaaaaagaatgatttttaaatgctgtgatctcaggttctccttcccccttgcctggcagatgtctggactttgagaggcagggggctgtgcaaggaaaaggcatgatttcattaacctcagagtcctgggacctcaaaatcaaattggccacacggaatgtcataacatgcacaggaagagggataatcgtgggggtagagcagaaagtctggcttaaatgaacaatttaccatcctctgcaggctatagtggccccattaccggctgggagctgtggggtggaatgagggggtgtctgggttgtgttctactgatttatagttcccagtgcagctgcagaaatcagcagctttgtctctggccaggaagggtgtgtgcagaaagaatcttttcttctgtagtcttttttttttttttttttttttttgacatggagcctcactttatcacccaggctggagtgcaatggtgcgatctcggctcactgcaccttccacctcctgggttcaagtgattctcatgcctcagcctcccaagtagctgggattacagatgtgcaccactacacccggctattcttttttaaattttatttgtttgtttatttatttatttatttatttatttgagacggagtcttgctctgtcacccaggctggagtgcaatggcatgatctcggctcactgcaacctccgcctcctgggttcaagcaattcccctgcctcagcctcctgagtagctgggattacaggtacgcacaccatgcctggctaatttttgtattttttgtagagacggggtttcaccatgttggccgggctggtctcgag

SEQ ID NO: 52532 - DNA, 1243 bp, Homo sapiens
ccccaagggctcggaccgtcccgggagaggcgagaccagggtcgaagggtccagggctgaggggtccagcggtcccgaattccagaatccgaacttggggtccaaaggagtctgggcatcttaaagttcagggtgcagggaggggcgtgggagtctggagagggggtccgggagctcggatccggagctagacacgtccgggtccggccggtcctggctgtctggggcgggggtcctgcattcggtgtccgcgggagagtccctgcaggtcggcgcagcccccggccgccccctagccccgccttgcccggccccgcatgctcctgccgggcccgcagcagcgctggagcgggctggcggctagcagcgggagggggctccggggcctggagccccgcgccccgctccggcccttacgtaactgactttgagtttccggacccaggaaccgacccgccagctggggcgccggctgtgcccgccagggtggcccccccggccgtcgcgccagccccacaccctccctgccaggcttggtctaggggacttccctctgtctgggtctcccgggtctctctgtccggttcaggctcaggttccctctcatctctgggttccctgtatctctcatctgtcgtctctgttttgctgtcttttcctgtctctgtcctctgtctttcctcaagaattgtctcgccctcacctacacttcccggcaggccccacctcttcagggtgggacaggacccctcctctccagctagttggaggcagggacctgtccagaccaacccgagcccgagctcgctccaggagtggggaggagagaggagggttggggaagatgattctaggacccttagctcctgggtccgggaacggacgaccccttctccgcctctggagccctttcctccagaaggaggaggcttggacagaacctggctggggctgggcttagggcaactgggagtccctgtgagagctgcctagtgtctcgtcagggtcaggtcctcagctattgaaggggagcgggaggggctggggaggggccagagccctggcacgcgccccggagcttcagcaagctccctacctccacccagtttcaggcctggaggatggtcttggcaggaggctgggtggggaagggatctgcaggaggaggctcaagggacttctgcatgttggggaggagggtggagatagaatgacagacccgcaagtctaaggagcacctact

SEQ ID NO: 52533 - DNA, 1111 bp, Homo sapiens
gagagaaaggggcagagggagcaacctccaggtcagccagggcccactaggggtttccccagaggggcagccccacgcagctactgcccaggtgcaagactgggcactgaaaggcaaccttgggtatgtggccaactttggacctcagttgcctcatctgtaaagcatggacttaaatgagtgtagacactccttgacccctgggttagtggctgaggtcagcaataggataaagggttagaggagagcttggagtgacagtgactgagtctgtgaaggaagagtttgggtcaggaacatcttggatcctgggccagctgtttgatagctatttcagaggaagagactgaggttggagaggttcaaaggcttgtctggggctgttcagccagtaccccagagactgaagggaaataaaccaagggaaaacccggagaacaaaatccaggcagatatgagctagaatcctgggttggccacttaactaggcttggaggtgtgaagtggcacccctgaggacacacgagagtcccttcacctaactgtcctcatctttaaagtgggaatagtaacaatttctcctttgtccacttcctgggttgttgtgaaggttaaaggagatgaggcatttgtaaaatcaggtgagaatgtggttgctggtcatttttcagtccaaagctgcagttccgggtttgtgtttgtggtggtgggagcatttctgacagctcctctgttgagatgctttatccaggagttgtgctggagagaagccctaagaataacaccaccggccgggcatggtggctcacacctgtaatcccagcattttgggaggccaaggtgggcgggtcacctgagatcaggagttcgacacagcctggctaacacggtgaaaccccgtctctactaaaaatacaaaaaattagctgggcatggttggtggcaggcgtctataatcccagctactcgggatgctgaggcaggagaatcacttgaaccgaggaggcggaggttgcagtgagccaagatcgtgccactgcactccagcctgggcaataagaacaagactgcatctcaaaaaaaaaaaaaaaaaaaaaagaataacaccacc

SEQ ID NO: 52534 - DNA, 1040 bp, Homo sapiens
taaggcccaaattcttagtgtgaaactctcatatttctcccaaggaggtagagtgtacatctgaattctctttgtccatctcccatgaccagtacacggctggtgggagctactgacgtgtttgtcggataaataaattcatgcacacacactgcacccccacccaggcctgctgctgtaagagttttaaagagaaaagataatagaaaacaggagaaggctggacagcttggcacttgagggtcagacaggcctgactttgcatcttgcatctattgtttaccagttgtgtgaccttaggcaagatatctaacctcttggagcctcagttttcttacctgtaaaatggggaaaataaaagaacctacctacctcttaggcttcttgtgaggattaaatagtgaggcacatggtgagcattcaacaaatagtagcaatggttattgttattattataattatgaatattatttggggattataaagatgttcctcttgggacaaaagagaccaggtctgggagggaacttctggggacaggtggtggatagcagcctagtctgacagactcctgaaggcatgtgaagggagggaggtggcctcatggaagtaagaatgtacctcccttttctagtcatctgcttttcctctgtgtcaggccctgtgctgggcatggggcccagagatgaatctgtgtagtccttccccaccttccccaccgggagctcggagtctagttgggaagaagatgcagaaatcaccaactccacctttattgaataggtgttcttatgcaaagggcaggaaaaaagacattcctagtggaaggaacagcatgtgccaaggtacacaactgcctgcacttgggggaatgcagctgaagagacaggctcaagacaatgagtgaggacttgacctatggcaatggagagtcactggatagtaagcagggaggggcagggacaggggcaggaggaactgtccaggtgagagatgccgagatcttgggctggggactgtgccatgggataaggagcagc

SEQ ID NO: 52535 - DNA, 1024 bp, Homo sapiens
actccctctctcttgccctccttttccttgccttgaaagtgagaataagaaaacctgttttgcttgcctcgaagattcagtgataaaatacaactacagacagtaaacatttattgagagctgatgggctaggttctgggggcacaaaggtgactcactcagtgttcctgctccttaaggacgaactgccatgtgcagagtgagcccaggggagcaggtggttaactcaggggcatcaaggggaaaagagctaggttgggctttgaaggatgagtaagagctctctaggtaggcaatggcaggaacaactttctaggtacagggaatggcatgtacaaaggctcaagactgcatactgtgctcaggatagatgagcactgtcgttggtgtggctggagcacaaagggaaaggctggcagtgacaggagatgaggctggtcagggaagtagggcccacgtcaggcagacctttggggatgtcactggctcccctctccttcctgcaccctcacaactgcctgttctgctcagagagacaaccaggaccttcccatgctgctcctccccttgagttcccaccttctcccctcatcttcaccaccccagccagatcaagtggctgcctctctcaggagtcaataacctggctgccctgccagccctgccactgaaaagccatgtggcctccagtcactcacataccctgtctatctcagtttccacctcagtgaagtgggaacagcaggctttcctcccagagaagggcggaggcttcaatgagataatctccacaaatggcctggcccagtgtctgtatatattgggcacccataaacaggagctaattaagccatcattatttagactcctcaatctccttggccccacccactgcttcccctttacctctcctggcagcccgttctagccaagaaaggaaggaaaagattaagaaacaagcccaagtcttcagaggggtgctggcccactgccaagctggctcccctcctgccccttgcccgcc

SEQ ID NO: 52536 - DNA, 1251 bp, Homo sapiens
tgtttccttgttatctaagaggcaggacagcataagtgttgccagtgtatttttgtttttcttgtcttttctgtctcagcctcctgagtagctgggactacaggcacacaccaccacacccagctaaatttttgtatttttagtagagacgaggtttcaccatgttggccaggatggtctccaatctcttgacctcgtgatctgcccacgtccgcctcccaaagtgctgggattacaggcatgaaccaccacacccagccaatggcctgtatttttctgagtttcatcaagtttgtgtttggttaaatgcatattcagatgtggattcattgctacctctatatttgaattttttctttaattacttgaacatggaatcactttattttgtgagctaaacaacaataattccaataacttttcttatgaataactttgtttttttcctctaaataaagcccccaaagatggcctctgaattaatcagttatgggccttatgtatgtgaaggatccaaaattattgaaaagtaattgctagctaggtgcagtggtttatgcttgtaatcccagcactttgggaggccgaggcccacggatcacttgagcctttgagtttgagaccactgcattccagcctgggcaacagagtgaaattctgtctcaaagagaaaaaagaaaaagtaattgcttgattgcatttatcatagcatttagttagaggagaggagaggcagatgccaaatgtatgttattttttgttgttcatttaagtttcttggtatgtcactggtggcttttactgtgcgtcctttttaagagtgggttcatggtgtgtttagtcaaatgcaatataacttactctggagtgcacactgggttagattagtattttgatttactctgctgctatttaatgaatacatagaaagataaagaagaatgctgtagcagtgaggagtattcagaacttggaggtgttagaaaggagaactttgatattttatattgagtgctgatctcatttagaactacccaccttactgacactttgcttcaaatattggttttgggaaaatccgattatgatgaaagtctgtttatacttattttgctgattttttatttaaattgaattgtatccacttaaaatatttgaaaataaattggctagctctttgaactttggagaacagcagccagtataattcaaggagtagcttgaagagactttaatatcccctacccgcta

SEQ ID NO: 52537 - DNA, 1463 bp, Homo sapiens
agcctcccgagtagctgggattacaggcatgtgccaccacgcccggctaatttttgtatttagtagagaaggggtttcaccatgttggctgggctagtctcagactccctacctgaagtgatccacctgcctcagcctcccaaagtgctgggattacaggtgtgtaatgtaatgcctgtaatcctagcactttgggaggccgaggtgggaggactgcttgagctcaggagtttgagaccagcctgggcaatgtagcaaaacccaatctctaccaaaaatacaaaaaaattagccgagcatggtggtgtgcgcctgtagttccacctacttgggggtctgaggtgggaggatcacttgaatctgggatgcggaggttgcagtgagatcgtgccatggtactccagcctgggtgacagagtgagatcgtgtctcaaaaaaagaaaaaaaaaaaaaaagaaccagaatataatcctgtttataaatctttaaatttggaggtaatactttaccatctaaaattgttcttactaataatgatataaactgaattatgctataattgcccttattccagtgaagtctctgttgttacttgtttaattatctggtggtgaaaattacatacagataatatgtgttcctgaagagaaatgcacctctgacataattctcctccttttatttggaggggtgggtgttatatcgataaagacggtgtatattctctttattgatgtccttgtcacataaaggagttcagttaatgtttgttaataataactacttggtatctgtagttgagaggttttaaatagataatttttaaaatgagctatatcaccaaccccaaatagtgttaaatgtaacttttatactgcaaccatagcatcaccctaagggaaaaaaaggagtttcataactctaaaggaaggaaggtattgtggagcagtgaatatattaagtataagtgtttaatattctgttttaaaattttctttaaattaggaaatgggccaaagttaatggattgatgtggattgtgaggctaacgtcagaatactgtatattagccactgaatatttatttctcttgtgtattttggtgggattccttacataggtttggcaacaaaactagaaaataaatttcctttcagtgatacaaaattctgttgggctagctgaattagattgacattagtcaagatttgccagaaacattgtagtagtgctggttaatatagcctggttttgcaaggtggcctcagactgctgttatacttgtgaactagccagagtatcccaactgtgataggaaagtagacattgtatgatgtatgggaaattcatctttgaaaaaagtgagtttatgcctttcagatccatactgtgaatgaatgaatataagagtgaaaacgctgctgacaaagatttggatatttgataacgtatacaattttatt

SEQ ID NO: 52538 - DNA, 1051 bp, Homo sapiens
ttttttttgtatttcctgtaaattatttgaatttacacataattgaatcttaaaattgagaaggaaaaccatgcgggccttttgctgtctcaagggttgcagttaatcagctgacttgagaaatccctgctgcccagggaccagatgaaacatagacaagatggcatgttaactttggatttcttgcctaatctggacacatttgtgtttaaaaaggaagcctggattatgccactgcactccagtctggctgacagggcaagacccggtctctgaatgaatgtatgaatgcatacatgcatgcatgcctgatccaagaacctgatgaattgaaccgttttccaatgaaggtgacattagactaatttaatgataagacaaaactaaactttttttagtgagaaaaacatgctttcaatttatttgtattagttagatctcattttcatcttacgtagttaataaagaatggatggacaccagggtccgaagccaaggttctcaaagttaagcatttatcaaaatcacttggaaggcttgcagacagattgctggacatcatccccagagattctgattccatatgtcaaggtcgagtctgagatttgcatttctagcaagttcccaggtgatatcagtgctcctggttaggggaccacactttgagaactattaggctgaagttcaaggatctgcattagaattacctttggagctttaaaaaactcttgaagatgccagtcagaggcctctgcatctatattttaacatgttccataacaattctaatgcgcaccccaggtgagaactgctgctgtaattatttatagtttattcctccatatttcccaagaaatgctcattcattattcatttcaaaatgttaaaagacttctaatattgtttaggcacatggttaggaaggattcattgttttatactgtgctatttatcattgttgtagagggcaaagtaaaagaaaagtgctaaataacaaagagctattggcacctgtcctggaaaatcagtattaatgctcttgcttgctgca

SEQ ID NO: 52539 - DNA, 1061 bp, Homo sapiens
aacccgggaggcggaggttgcagtgggctgacatcgagattgcgccattgctctccagcctgggcgacaagagtgaaactctgtcaaaaaaaaaaaaaaaagaaaaaaaagaaaagagtttgagaccagcctagccaacatgtttggcaaaaccccatctctactaaaaatacaaaaattagccgggtgtggtcgtgggcacctgtaatcccagctacttgggaggctgagtcaggagaattgcttgaacccacgaggcggaggttgcagtgagctgagattgtgccagtgcactctagccagggcaatagagcgagactccttctcaaaaagaaaaaaaaaaaaagaaaaaacttgaaggagactaaaggtcagggttggaggggaaaataaaatgtggatgctgtcaattaattctggttgtagctatctactagtctttatagaataatataaataaccaatgcttacttagcatttgctgtttactaatatatttacatgtattaactcattttatcttcacagtaacactatgaagtaggcactactaccaatatctcattgtatagatgaggaaactgaggtacagatttcctaaagtcactcagccaggaagtagtggagctaatattcaacccaaatgtcagggtccctttttgtctgctcaaaatcactatgctttgtgaaattaatgcaaagactatcaaaggaaatgcaggttgatctggaggcactatttgaagatagtcagtgatcttgcttccagtactctgttgtttatgtgttttggagctctgtgtgaatgccttttctcctttttacagacatggctggattccgccaaagaaataaaaaagcaggttcgtggtaagtggatatagctctttttatagttctttctttcttttagtaggtcagaggatttccaaccatttctggctgtgagtcagtcactttagaatcctgactactgcagattgctttgaaatcgagataaagccttctcctggaaggaggagattccataatagaaaaatatagcagaggtggatactatt

SEQ ID NO: 52540 - DNA, 1413 bp, Homo sapiens
ctctccctttctgtttctccccttttctcctttttctctctttatattttgttgttgttgttgctgacataacatttttctcttttggctgtagatattatttatgtcttcagcttcggcaggacatagttgcaggacgtctgccctgttcctttgcaaccttagcattattaggttcttacaccatccagtctgaactgggagactacgacccagaactccatggcgtggattatgttagtgattttaaactggccccgaatcagaccaaggaacttgaagagaaggtcatggaactgcataagtcatacaggtgaatatgtctccagggtttgttcggtgtttgttttggcgattagtttaaacacaacatggtattggttcattgtttgcctaagagggatcatggtgccatagaaagagtcagtttcctccactgtttgactttgggcaggttacttaacctctcttaatctaagctttctcatcagagtaataggcattgcattgtagggtgaaaactaaatgaggtaatatatgtaaagcacttagcacagtggctggctcagtgctcagcaaatggcagctattattatttttgtttccttaccttttattttttatcagatttaaagctaattatgctgcattaggtaccttgagatccttagagcaggggtttttaatttgagatctttatacatggatagatttcagagggcccgtgaaactcttggaagtatttttaaaagtctttattaaatttactgactatactgcttttatacatgaaaatgattggtaatgctgggagttatcaagtgatcaagaacaagagtttacagtcagtctgagctgggttgaaatcttgacgttggttccaaccttgtgaccttaggtctttcaattataatgtctctgagcctcaggtttcttatatttctgatggagattatcacctcagagaaactagggggactgctaggtttagaaaaggtattgtgggctgaccacaatggctcgcacctgaaatcctagcactttgggaggccgaggcaggaggataacttgaacccgagtgtttgggaccagcctgggcaacatagcaagacctcatctctacaaataatttaaaaattagccaggcatgatggagcactcctgtggcaagtagctgaggtagaaggatagtctgggaggtcaaggctgccatgagctgagatcacaccattgaaaggtgatgtgtgtaaaatactgaatacaatgtcacaatgtctttcatgtggtaaaaaattcagtaaatattagctaatattaaagtgccagaataatttgtgtttcttcctcctcatacattcattgttacttgagtgacttgctatagcttagttctgtaaactgccttagcatatt

SEQ ID NO: 52541 - DNA, 2065 bp, Homo sapiens
aactccctacctcaggtgatccgcctgcctcggcctcccaaagtgctgggattatagacgtgagccaccgcgccaggcctgatctctccttattttttaaagcatgcttatttatagaagcatgtaactacatactgtgaaatttaaatctgtattcaaattgattgaccctattaatgtcccttagggtagggtaggaggagtgagtatagggaagattttatcataattgctttacttaatgttttaaaatttgtcttcaaattcaagtgatccaaattgtgtctcttaattttatgatttgtgtgtagatgaaccactggactatcagaaagctaaggctgcaataataactattcatgtctataaagcagttttacaaccatcatctcatttcgatcccaatagtaacattcattcattcagcaaaaacaaagtcattgcctatcctagtatctagaaatacgcattattatgattctcgttttatagaggagatggagggagacactggctggccacttacaagtactgaagcctggattccagcccaagtattgtgacttgagttttgacttaagtctgctgtctcaactaagggtcctaacttgcctgtggtaatgtgatccctgagaacctgtttcttcaacagcaaaatgaaattattgtactctttaaacttcaagctcctttccagcttcaaaatcctaaaattcagcgggagtggtggctcacgcttgtaatcctaccactttggaaggctgaggctggaggatggcttgagcctaggagttcaagatcagcctgggcaacatactgagaccccctctgtacgaaaaataagaaaactagctggacatggtggcatgcacctgtagacccagctactcaggagtctgaggtgggaagatcacttgagcctgggaagtggaggttgcagtgagctgtgtttgcaccattgcactgcaccctgggtgacagagtgagaccctgtctcaaaaaaaaaaaaaaaattctaaaattcatctcgtcaataacagtaacaacaacagaaacataaaataggagtaatgttaactagaaaaaaatgtaacttagatggaaaaaaattaaaaactacaaaactttcctgaaatgtttttaatgacttgaatatacagacttgcataaggggctaattttcccattctcctttttttaatcttcaatttcaggttcattaataaatagaattaggtgtgatgcttcagtgcttgtgaaaataagtttgttcatgaaggctaaatcagtagcaaatctgcaccctgtctcctgttgtatacatattttggtggttgttgttccaaggaatcctttgtccttttaattagggtaaagacagatggatttggaagagacttttccttgtgaaatgaagagacccctgcagctttctgtagcttgaggcagtcttatgggaaactggcgtttactgttttttccttggggatgtgcctgcattattgttactgttaagttatacttgattggtctgaattgtgcagcattaggagtgatatttttgtctttgaaagctctatataacagctcatgaacacttttcaaaagacgggaaatttatagaggagaagaaaagactgtcacagcgagtgtttagacagtgagactgactgttttcaaacaaatctaattcattatatgcctggtaatgaagacatattaataacagagaaaacagccccattatctatgtgcttccgtgaaccagtttattttgtttatatcagtgggcaggacaccatctgttaccagaaattttcttttcatcaagcctgccccgattaagagtcctcagttaagtaacatcagctgccctcttgtttaatttccataactcaattcaggggtatggagagaaaaaggcagctataagaggatattgtaaattacaccatgccctctgaggatttaatttggtcatctccttggcaagaaaaattagcgggaggagcttatgtatgtcggagaaaaagagtgaagagaagggggcagaactaatgataga

SEQ ID NO: 52542 - DNA, 1267 bp, Homo sapiens
aggcaggagaatggcgtgaacccgggaggtggagcttgcagtgagccgagatcgcacctgcactccagcctgggcgacagagtgagactctgtctcaaaaaaaaaaaaaaaaaaaaaaagaaaaagaaataaccccaaaccgttaattacccctggtagttaaagtgctgtaatggggtgtgcttaacttaacacttgacagtgtcactaattttggtgctctcttaggttttttagactcagtctagggaaaatagcacaatgacattatactccaaagtaatgctgcttagtgtgattaaaaagaatatcaacaccacagattgatgaggttctgtaaagaacttaatgatacaaagtgatttagcccttagtaaaaataatcaattttttaatttaaaatatccaatgctttgggcattgctccctctattatgctccctcttaatagtctgttttttttaaataattgctccattttctatgtataaaatgatgttactaaaggtatttcaaagctaggcaggagaccttagctattccctttctgctattaatatcaaggatgaatcttgcccttctaccaaacacataggctccacctccctagaggagattgcagtgtgttgaatgttgcagctgaatcctgcatgtgcttgtttataagccagccctgggagtaatttcatgtgtcagttacaatttaaattgggtttattgtaatgttttgttgtgtaataaactgaagaatgaagtgcctctttaagtatattgttcaactaacaaaatcctttgtgtttactagtttggtgtcatatgtggtttattacatgtgtgttttaactaaagattttctttttcttcctgtcatatatgtcatacgttgataacttcatatgtaaatttgtttttaaatgttatttaaagtatttccagatcagtttttaaaggcaaaacaaaaacatgggctattgcattaaataagcctaaattattcttttagtgggtacttttttataaataagtataaaaatatattttcttcatcaatagaatacttaccttaattttcttttttgataatttggatatccatattaccttttcagccttgaaaatgtgatggtaaacacagatgacttttgggagtaatatccttccctgtaacaccctccataagactgcatcatgatgattacgtatcagcgtatttcacaaccagcttaaagatgcagcttatttggaaacaacactattcatagaaacc

SEQ ID NO: 52543 - DNA, 1453 bp, Homo sapiens
gagttcaagaccagcctgggcaacatagggagaccccatctcttcaaaaaataaaaataaattagccaggcatggtgatacactcctgtggtcccagctgcttgggaggctgaggcaggaggatcacttgcgtccaggaggttaaggctgctgtgagccacagctgcaccactacattccagcctaggtgacagagtaagaccctgtctccaaaaaaacacccactgtagcagcaactcccagtactgtgtacagccgacttctctgtgcctcattcttttcatctatagagtgggatgaatcagtctgaatcagttaactgagtatatttattggctgatcatgtataaaatgataatctttcttagatcttttttataaaagagatctaatcttttattagattttataattagagatctagatactgcagtgtcactaagtataaaatacatcccaaaagctaaataatgtttttaaagcatttcttcactccatgatacatggagtttcagcgttttttagtcatatattttaaggtaaccctcaaacagttcaatttcaaaaatgaagataaaacagcttgttacataagaagccaatgaagccaggagcactgtctatttaaataacatcatcacattctttcatcattcatgaaaaaggtcatcattttcttgtggtaatcatgttctgtgtccgtgtgactctctgaccatttcatgttggcatatgctgcgctgtggacatttatttttaaatattttttggtttgccaattttcagttttttcccgcaagaacaacattttaattttttatgcttttctgttttcccccctttcattttcacagaaaaagagagaaagactagatggtgaaaacatttatatcagacatagcaatttaatgttggaggtttgtatgaacttgaagcttatttcagttggttgcctggaaccttctgcattctttgctgatccccttttcttcattctgtgctgcatttggttttgcatgcaattgcatgaagggactttaggtttaaaatgcttttgcatgttggtgaacatgaagatatgcaaacatctcgccttctgattctttttagtttctatctgtcatacttacctggaaaaatatatgattgggactacctctacctctcatggttccattgttttacccacctttagaaaattctacaccattgctaaaagttcctttaattttccaagagtataaacttccatatgtcccaagatgcaaatttgcactattctttcattttctgaattaagagagtgtgaaaaagaagggaattcagaatggacttaaaatattggagataatagaaaaatgacagaagaactgtcggggaggggcgggaagtaagatataagaaggaaagaggggagcctagcatttaataagtagttactataagatggttt

SEQ ID NO: 52544 - DNA, 1037 bp, Homo sapiens
agtaccggggttacaggcatgagccactggacccaacctaaactttaaaaactagatagacctctggcttaatatatagcctctaataattatttaaacctcatcttattccttgtcaatacctgtattttgagtacttgttatgtataaagtctctgagaaaaaaatatgcccagccttcattaaacatgtattgcgtggtgggtgaaataccaagtgctttacatatctttgtctcatttaacatgaagtttttcgaggctggaccctcagatatttcaaacttggcaactggatctctttgttttagcccatatctgaaaccagacctgagtagttccatcttcagagactaggaagaatagtgaaggtcagttgatttcctttatttggcagtgtaacatcttgaaattctaaacatgcatatttcctgactagttcgtcttcagtgcttcctcttaactggaacctgcagtaccaatcatatatttgtcatttgttccatgaggtgtgttatggcttctgagactcacaaagtccctgtgtgtgatgtgtttttccctcagcatttcattgacagccctgagaggggatttctaaataagtgtgtttggaaattaaaaccactaactgccttttgagaacattttatatttaatgaagtgtttggtttgattgctgctaaaattatgaagtgataggcatcaaaaagtgtctaacctgaacacagccaaagtaatttggccatcattctttagaagttttttcccctgtaaggaagttctctcaagttatctgtcactccagcaggtttttttttttttaagcatccctcctcccccttctcctaccccgcccccactaatgctttgttctggcacaaataaggtcgagttcatttttagatctaccgcctcctcctccatctcccagagagaacctgtagcaagttgtctatgacaaattctatttggaacaggtccctttgagatcttaattttactctgtgcccccacaggttttcaacaaagccagct

SEQ ID NO: 52545 - DNA, 1687 bp, Homo sapiens
tgtcttcaagttatatttaccatactatttttggccaagtcccctttttgaaagttgttatatacctccttttacataaacctgaatattatttctaactcatgctttattaacctaagcttcattcatttctccctggaatatccctttaatagcttgcctgtacctcaggttgcccagtattcaaatttgctaggatatatacctactatatacccacaaaaattaaaaaaaaaatttaatctgctggaacagttgaattattttaaattgtcaaggagatatataaggtatttggtgaactcttgttaactcactctcaatcctttgaaggttattgcaagaagtccctgttttgagctgtactaagtgatgaagtgaagctgttagaagctagaaagcctaaggcgtttagtttatgtgcatattgttgacaaagaaaaaaagtcattttattatgtacctctgagtgatttttcagaggtagtaacagtctgctctggagcctttaactaggaatttcagtaataaattcttacatcaaaaaagggctattcttgttttttaaaaagcagaaacagccacctagtaatagagaagtaaaaccatctccaggtagaaatagaaggatactgtatgtttgcaactcaacaagacaagacagccaatggtggaagttgtatgtttcaccatgccttcattaaacagtttgtttatctgttgctatctccatcctcctaagctgagcctaaaataatttcttatcaagctgaggctaattgagttgtggaactaccttcttgggatgagaagttagagatctgctgctgtgtcataatgggaagaagaatcataaattaaggcgtgagttctttatgggttatataactgctaacagctatggagttgtgatacttcacagcttctaagaaaagcactttatttaaagaaaaaaaaggcaagcaaatataccatgttgtatatttataatctgaatgcagattagtaacatctgtcctggatgtggtatgttttctaccagtgcccagtctctgacgggttgcccttgattatgttctttgtcctgattgtgtattgttttgcatctttgtcctttcaactgtaggatttagacaagagtcaagaggagatcaaaaaacatcatgccagcatcagtgagctgaaaaagaacttcatggagtctgtaccagaaccacggcctagtgaatgggataaacgcttatccactcactcacccttccgaactcttaacatcaatgggcaaatccccacaggagaaggagtgagtactttgtccacatgaccaattgtgaaaatggagggaataaatgtttttatgtattaatattctgtatctgagagaaagcttagagctgaaatttggatttggtgcctcactatattcattgctgctttaaggcatttgtaatcaaatatttatttttttttaagtcaggtaggctacccagtgcaattataggagctatttggagccaccagtagatgattagcctctgagaactgtctctgcagctacatgcttctggctaatgtatgtttataaactgaccataagccagtagaggtttatttgtattcaaactgtgccttcagggactagaaagtttactaaatttaggaaggtcaaaataggaaagacattagt

SEQ ID NO: 52546 - DNA, 1629 bp, Homo sapiens
cgcctgtaatctcagctacttgggaggctgaggcaggagaatcgcttgaacccaggaggcagagattgcagtgagccgagatcgcgccactgcactccagcctgggcaacggcaagactccgtcttaaaaaaaaaaaaaaaaaaattggttcacaaagggtactttttgtatttttcaaagtgtgactaaaattggctaacagttctccaaacagagctgaacagtttcacaaataaggctggagaatacctgagtaatgggcagctaaatagagttaccagggatgacaggacgctattgtttcctactcactgtcctctcagcctccattttctgatataaatggactttagttttgtgttctaaatctagagcatgtatcctgaactgagacaataactctgctttctaggcaagaccactgttttcagtgtcagtaggatacttaattttgatgtatctgtagtaacaagagtcataaagggtctagtatttctggttgtggcttgatttgatttagagggtctggctagtcaaagcctaaatgaacaattctgaacaagtaatttatcatattgggccttagtttatggagtagatgatctttaaggtccctgttaactctaaaattctgtaagtctgtgactccataagaaaatgccttgtcgctatttcacccagttaaccctatctgcaaactataactgcgtattttctagaagttttctttttgactctgtgcaagtaataaaagatactcgactactttgaaaaagtaacttggtcctctcttggatgaggctgggtaaatttgaattagtctccatttccaggaaatatcttacatcttttaatagaaacctttcagaaatcttctcagggttggttttgggaatggtgatgtcattctgtgtactttaaagaaataactttttataaactaaacaatatccatgggagtacttgaacaattttagctctatgctattacccctgtaaatgaatagtggaataaataagcactgtattatggtgacctttaatattgggtaattctactttctggcatatcttactttttctttaacaattgggatactatttccattctctggggatacctcttccacctttgacggtattgttgttgcattgcaaggcaactgaattttatataatttgtgtatgaccaggtgaagaaaacttctgtcctaccctcggaaagaaaggttggtgggccagaggtaaagctgctgttatgacttgtgcttctcaatcagaatttgctcttgtcatggcactaagcagataatccccccagaactgaacaacagctgctgaatacctttttttcttttggctatactagtaaattcacacccacagcctttcggcctaacacataacacttccactgctgcagcttttgcagctttcgatttgcttatttcggcgcatggctggttgaaaagctgcatgaagatataaatatgttttcagagagaaaatgaatttaattataccctattctttttatgttgtctttcttctcccactttattttctttcaaaaatcatcataattttgcatcctttcttttcctttttttcttttttgctgaccagtc

SEQ ID NO: 52547 - DNA, 1032 bp, Homo sapiens
gtcattataggctttcccaagaaatggaaaaagaagcaaggaccaggttaaaatttaaaatttggtgtgcgtatatatcttttatgtcacaggctatgtctatttataatatatattttgtaaataagtatatttattgattcactcataataagagggacctgaaatattacaaagctgttctctaccacagaaagtaataatcatgagtactctcttttatctgggaaataaagatacaagagtttcccttaatgaaataacaaattggactatagaattggttagattattttaaatctttttttaaggaattaaaaggaaataatcagaactttatttatacttttataactgtttcagattataattcctgaatttccagttttcatccttatacacagctttttattaattactattgtaaacttcaccctgaattttatttctctttgtattggagttattccaagtccattaaaagtctaagccaatgatacttttcagttttctgaaatgcagcaagagtcctcggagatctttattgagagtcaaaggagaggccatttcttctatcaatagggtaagaatgattaagaggagaatggccaagcccttgtattggatgaagctgaccaatgcagactcaaaagataccatcacaattatcagaggaaaaatattgggcattccagctttgtattacctaaaggtaacactgccaatatttgcaacataaagcgtaaatgggctgggcgtggtggctaacacctgtaatcccagcactttgggaggctgaggcgggcagatcacctgaggtcaggaatttgagaccagcctgtgcaacatggtgaaaccccacctatactaaaaatacaaaaattagctgggcatggtggcacacacctgtaatccgagctacttgggaggctgaggcaggagaatcgcttgaacccgggaggcagaggttgcggtgagccaagatcacaccactgcactccagcctgggtgacagagtgagactctgtctca

SEQ ID NO: 52548 - DNA, 1557 bp, Homo sapiens
gtttatttccatctactccttattgatatttgaccactttactaattttccaaatttatccttctcttaataaattcatcttatccaaatggtatgattagagtggatcatacttgaaaataaaccaagcatctatattttgggcctctctttcagccagtttctttcatgctaacacttgcaatatgaagggaattgtttgcatgggtcaagttttctacttatttacatcttcagtaagagttttgaagggaaaagatgctgactctgttgattaagattagactggatattatacatggaatagatttccagttggcatcctaggacctggtacatttctttctattaaatattataaattttactctgaaacttctttggatataataacccaattcactttctcctagtttcctaagtcacttctgtaatacttcttatagataagcctgtagtacttcctatagataagcctataggacacatgaggcattagagatctaattaattttaagaaggtattatggagcagaaattacacttgtgctttacccagtgatcatgtatttacaaaaggaaaacagggcaaaattaatatgagacatggtctcattgttgcttttattttttcggcaagggttttgaatacagtaaagacatacaaaatttgttgacagagttgccttcccttatattcctcttcacaggaattataaaatcccaaactatagcattctctgcagctttgaaaaagactattatattgtttttattatacatagaaacttcacttttttttcatatactcaaattacaccgtttgtaatattggtactagaaactacaacaacttcttattaatctgttttgtgtggcatgtagcattaccatatctgcttcctctacactttagtggatagtattaataggccactctcatttctgaagctgttactcctcatgccttagtatctccttttactgtagcagaatatgacacaaaaagaaacacattggtgcagatctatgaaagcatacctgaaatggttaagaaggtatgggattagagttaggaagccatacaaagttaggctagaggaagagcagtggctatgatcaacaattataaattcatggaggattccttttggtaaacaaaactcctatcatcctagaacttgaaagacaaaaggaagataaagtagtttgttcccacatatcagaaatgcaggctaaaagccaaataacttgaataatagcctaactaaatgtatagataacattgtggagaaaacacactttaggaattttaaaaatcttttgtgtgtccaggcgcggtggctcacgcctataatcccagcactttgggaggctgaggcgggcggatcacaaggtcaggagatcgagaccatcctggctaacatggtgaaactccgtctctactaaaaatacaaaaattagctgggcgtggtgatgggcatctgtagtcccagctactcaggaggctgaggcaggagaatgacatgaacctgggaggcggagcttgcagtgagc

SEQ ID NO: 52549 - DNA, 1056 bp, Homo sapiens
gaacaagtgactaaatgtgtggggataaaattactacacaggtactcatacatggctcttatgtagcaaaattttagaaaaattttcaggatatattttcactttgatctcttaaaggataagacactcttgtaagcttaactgtggttcttttttttttttttttttttttgagacagagtcttgctctgtcgcccaggctggggtgcagtggcacaatcttggctcactgcaagctccgcctcctgggttcacgccattctcctgcctcagcctgagtagctggaactacaggcgcccgccaccatgcccggctaattttttggagttttagtagagacagggttttaccatgttagccaggatggtctccatctcctgaccttgtgatccgcccgccttggcctcccaaagtgctgggattacaggtgtgagccaccgtgcccagccaactgtggttcttttgatagtctcttcaaatatgtaaatccttacttcaaaaataacctgaaaagaaatagactctggattgcatttgttggagtggcagcaaaatacctataaaacacccatatcctgctttttttttgagatggagttttgctcttgttgcccaggctggagtgcaatggcacaatctcagctcactgcaacctccacgtccttggttcaagcaattctcctgcctcagcctcccgagtagcagggattacaggcatgcgccaccacacctggctaattttgtatttatattagagacggggtttctccatgttggtcaggctggtctcgaactcccaacctccgatgatcacccgccttggcctcccaaagtgctgggattgtaggcgtgagccactgcgcccggcccatatcctgcttttaataatatctggaattcataggtcaaaaaaggggtaatttataactcataaaggcatatatataatcagggtctgatgattctgagacataatccctttgcataaatagtttttgagagaaagcctttaggaaaaaaaatcttgttttcttccccaaaacaaagaaaatact

SEQ ID NO: 52550 - DNA, 1052 bp, Homo sapiens
tgtgctataaatggtaatccaacccaactgttatgtttttcttttatttctgaagactagtacatgttaggtgctcagtaaatatttgttgagttgaaattactgtggctagggcttttatcattgttgtcttctacacatgctttggaaaaaaagagattgttctgtctaatttaactcagcagtaggcaagtttgggtcaggtggtgctggcctaagtaatgtttagttcacaaatagcttcttgatgacagactactacttatcacttgaacaaactggcacaaaattggctcttacttgattatcttaggtatttgtctgattattaatcagccttctcagttgtgacaaattatttgaagaagcccaaagttcctctccatgtgaatgggtttagatagctattcacaatgctaggactagcatgtagcaatttcagaaagcctatttgtttaataccagctgatctatttttggacagctctatagccacttgcctgactcaaaagaaacagtgagataagtgccctggaaagtagcatagcatcttaacaatatgacaaattcattctagtgtcccccagaccctaggacattataggtgctctgctcattggttggttgaattaaataagtatagtactttagaatttacaatatggtttcatatacagtatattattgtattttatcttcagaaccctataagtcaaaccaagtattattttcatgttaaatatgaggaaattcatacattcttgtcaagaataattgctgtatctcagatacatttgcagacagagacagccttgttgtcagtctttcagttccatctttcatatcctaagtcatatttgttatcagccaatgaaagatctacctaatatgaattcaactagtgccagtttgagacgcttttgagttgcatgtttcaaaatggcttgggagtgaagctggcctgaagttcctgtgttcagtgtgtctttccttgcctttatggagccctggttaatattcatcacaatggaggctggtttacaagttaagga

SEQ ID NO: 52551 - DNA, 1029 bp, Homo sapiens
taatacctaataaaatataaatgctatgtaaatagttgttatactatattctttagggaacaatgacaagaaaaaagtctgtacatgttcagcatagatgcaattttttttccagatacttttgatccatggttggttgaatccatggatgcagaacccacagatacagagtggtgactctacttgctttagaactgtttttcctgtggagtgaggtatttggcccaggagggaactcttgtgtttccggaatttatttctcttggaggttggaggtgttgtgtcattcatctgtgaagaaatacatctcagctgctgggtcattttaattgtttacaaagaaacatttcaccatttttgatatcatgtttgatgccatgacagtgattgaagtaagcctgtgctagatgtactcaacttctgtctccctgacaactagtctagattttagcttctccatgcagggctagtgtgaggatacatacagtttggaaatatgaaacatttttcaacctgattaggttcctcaagaatatgttttacctgtaatcccagcactgtgggaggccgtggtgggaggattatgagaggccaggagtttgagatcaacctggactacatagtgagaccctgtttctccaaaacatgtaaaacttagccaggttttggtggagcatacctgtagttctagctactctggaggctgaggcaggaggatcccttaaacccaggaattcaaggctgcagtgagctatggtcaggccactgcactccagcctgggtgacagagtgagaccctgtctcaaaaaaaaaaaaagaatatattttgattgatgcacaaattgcattgtgtcctgtgcatagtaataacttaggcatttaggaatgacaaagtaactcctttaagtaacacaaggaagaccataggaatataaattgctggataattgtttttcagattaacaatgatatagaaataggaccaaacttaggttggaactgcttaagctgctgataatgtgtagtgaa

SEQ ID NO: 52552 - DNA, 1032 bp, Homo sapiens
ccagaatctgtcctgtggaggaggtggtggtggtatggtgagggtagtggcctccctgctgttttcaaaatcacagactaaaagcctttgattgtgccaaagaaattcattcagagcaattaactgcatggctagaaatgctttcttctctgataacttaacaaaactccagctgtcagtatgaagctggttaagtgtgttcatcttttccttgctcaagtgtgggctatggaaagaggtgaattgcggtgacttctgtggtgaggaggcttcagtgttctgagaccatgcttaaaaaattcaaatactcttaattaaaggggcaactcatcttcttatgagatttcaggccccaaataatttatgtactgcagccacattgtgcagcccaccactcccactgaccccacccacaagagcattcaggatcataggcactgatttcctatgctaaggtggttggccacttaaccttattacaatcaaatggtagtttcagtgtgatttatactcctggggaaggtgagcagatggacaagaaggcctttggtattccactaatgttcattcttctgaaattctgggattaatcaccaggtggtggtagaactgattgtttttttctttccagttttccaaatactgtctcttctcaataactccaaagtgaatctctgacattgatttgaaagaagttaatgaattcgagggtaatgcattccattgccactgctgtttcatgtaccattcgtacttagtggaggaaatgtggctgattttcttaattataatggtacagacacaaggacaaatcaaagtgattgctatttggcaaatcgttttatattcaaattctgaaggtcagtctgaagtgttttatatcaccaatcataactgtctgctcttacagctttccattaagcttatgaaagtgattacagtaatgctgctttttaatatccctcatgatttgacaccttgtcagggttactttggaatactgtcgaagtcttaggcagggtaaacaccttt

SEQ ID NO: 52553 - DNA, 1017 bp, Homo sapiens
attacaggcatgagccaccgagcatggcccaatttattttatttgttaagaggttaccctgaaaaaaaaaaaaaaaaagaggttaccctggccgggtgcggtagctcacacctgtaatgccagtactttgggaggccgaggcaggcggatcacctgaggtggggagtttgagaccagcctgaccaacatggagaaaccccatctctactaaaaatacaaaattagcccggtgtggtggtgcatgcctgtaatcccagctactcaggaggctgaggcaggagaattgcttgaaaccgggaagcggaggttgcagtgagctgagatcacgccactgcattccagcctgggcgacaagagtgaaactccgtctcaaaaaaaaaaaaagaggtcattctaagggaatgagatttttgcatcagaatgtgcagctgaagagcaaagctgcagcctgcaacatttgcccagtcttcctgagaggcatgatgatgagccatgctttcttctgcagactgacgacaacagtggagacttggacccaggagtcttgctgacagctcaaactatcacatctgagaccccaagcagcaccaccacaactcaaattaccaaggtaacagaccagctagaacctctttatggaacccaggggcaggctaagcttgctgccacctctctgcaagaaggaccctagtccataagcaaatattttcagctccatccctagtaagccacattattcaaagagtcctggatggaaaggccctgctgccttccccagcaataaatctagggagataccctgagagtatccctgcctacttagtagtctcctaaaggtaggtgtggttgttctctttacacatctgtctctctggtcagtgagtcccctgtctggctgtggaagtaagtttaaaaagtcagcatggccaggcatggtggcccacacctgtaatcccagcactttgggaggccaaggcaggtggatcacctgagatcaggagtacgagactagcctga

SEQ ID NO: 52554 - DNA, 1045 bp, Homo sapiens
cattttgatttttgaaagtgaagatgatgccctaattcctggtaaggatttggggcatagttttttgtttttttgagacggagtttcgctcttgttgcccaagctggagtgcagtggcgcgatctcggctcactgcaacctccgcctcctgggttcaagcagttctcttgcctcagcctcccaagtagctgggatgacaggcgcacaccaccacgcccagcaaattttttgtatttttagtagaaacgggatttcaccttgttaggctggtctcgaactcctgacctcaggtgatccacccaccttggcctcccaaagtgctgggattacaggtgtgagccaccacgcccggccgatttggggcatttttatttaacagaacttctctaaccttccaactgcttcccacaaacacattggcctcaaggctccttagaatcccagttccagcttcctaaaatagacagtgggtatcgggcagcagtcactggggctcaagggcagtgagcaagagaaatgtctaaagctgcttctcccaacaccgtccaaagtctccactgcctgagttttgtttcggctggtttgaactcatttcgggtgtgtgcatttttcttttggtacccatgtgagacatgaacaacaggagggagggaaagagcccaggtgggacgtgggacaggcttaggggaaagagcttgtcctatctcaggaacaaaattataggctgtgggcagagggtctgaaaggtgggctttggggtagtgcccaagcctggtcgtgttgccaggagtggtgacaagaaatgcagcttacatcaaacgaacatgtagtgcatgcccactgcctgatggccagatggcctgtaggaagagctaccagggcttccagacctgtggaacgaagaggatggggaaaaggcagagggcactgagtgtccctttaaaaactaacccactgaatattccgtgtgatctagaacagtgtggcagctttcacagcacaggaccgttcatcgggggcctaaacgtttccctcagctctgtca

SEQ ID NO: 52555 - DNA, 1017 bp, Homo sapiens
gggagcctaactgcgggacccgtcagggccccgtgacccatccccgtccccacccccccctccaccgctgggcccatcagtgtgtgttggggggatgcttggcagctgggggtgaggagacaacaaacctcgggaactggagccagagctgcggcctgactgacgccttttgatgctcacgggaaatttctgcccaggatctcagccccaggctggttgtttctacaaatctctctcaaatgtattattttggtgacaaaaatgaaggagctttgtaaattttttttaaaattatgaatcatatcaagtagttgtttacatttcttgaaaaaataggaactcgggcagcagaatcagattggcagaatctttagactacacaggcaataatcaagtctgctgttttggcctttcgtagtagaagtggttgtagtgtttagatatctgtttggtcttgcttcttgtattgcatttttttcaataaacaacaacaaaaagaactctctctgtgaggattgatccacttttaaatttctcttctaccagcaacttgggaaaaattaaatatgggtgggggagacctaaactcaagtcattttctaaagtaagttacccacattgaccaaaatgcagcttcaacgttgagtaaagggatttctgagagctggccaatgccttttgccagctgcagtgagattctgcagcataggccacgataaaggaaggagagaaggggcttctcagacttatttgcagaagggcccagaactcagtatgaaggcattggcagtagtgtagctctagagggatataccccagatggctgagggaagaaagggattgaggtggtaggagttcaaggctcagtccccgtcccagatggcagtggagagtctcatcccgtggtccatcttcccagaggccccacactccatcaccagtgccgccttggagggagcctgccccagcctgtaacatcccaacctacctcccagtcttaggggcccttgcccacca

SEQ ID NO: 52556 - DNA, 1487 bp, Homo sapiens
caggagccgcagcaagagcaaggacaagaggaagggcaggaagagaagcagagaggagagccgcagtcgcagtcgcagccgcagcaagagtgagaggagcagaaagcgaggcagcaagcgagacagcaaggcgggcagcagcaagaagaagaagaaggaagacactgaccgctcccagtccagatctccatcccgctccgtgtcaaaggagcgggaacatgccaagtctgaatccagccagagggaaggtcgaggagagagtgagaatgctggcaccaatcaggagacccggtccaggtcgagatccaattccaaatcgaaaccaaaccttccatcagaatcacgctccagatcaaagtcagcttcaaaaacccgatctcggtccaagtctagatccaggtctgcttccagatcgccctcccgatctagatctaggtcccactcaaggtcctaactggctatggccacagctggaactacccgagaagtcttttgtacatgtttggtagccgtagcacaagtgattggagtagaacatgtcactgctgtacatttttaactcccctaatggtgtgtctataattgttaaatctaagtgcttcctctcagtaaagcctcctggcaccaggccttcctgctcgactgaaaaaaattttctctttgaaaatccccttttactcatggcccacagtagaatatccaaaacgccttggctttcaggcctggcctttcctacagggagctcagtaacctggacggctctaaggctggaatgaccacataggtaggtatggtgagttcaaccatttttgctcttgaattgatgcccttcgatgtatgccatttagtgaaagtgctaagtcttaagtttcctaccactttggtttcatatttttggacttaacaaagttgtgaatagcacagtcgaggaaaattgatacctgcagtaacccataggaaataaactgtagagttccatattctggtattgtgattatattgttttatattaaaaaagaaaagaaaagaattttttttaattttatttttccccgtcttgcaaagtatagtgacccctgtttccattaaatttgaataaagactatttttgcttgacaaaatttcatggtgtttgaattgaagttgtactttctgatatatcttgatatgtcttttcttagcataaaaagttcatgtgtaggccgggcacggtggctcacgcccgtaatcccaacagtttgtgaggcttaggcagacggatcacaatgtcaggagttcgagaccagcctgaccaacatggtgaaaccccgtctctactgaaaatacaaaaattagccaggcatggtggtacacgccagtaatcccagctactcaggagaatgaggcaggagaatcgcttgaaccccgaggggtggaggttacagtgagctgagatcacgccactgtactccagcctgggcgacagagcgagactccgtctcaaaaaa

SEQ ID NO: 52557 - DNA, 1549 bp, Homo sapiens
tctccattgttaaaccaaaggagcactaattttaacacttaacctgtcatgcttttgatgttagtcgaagccttggagatatgcagtatacttccctcatttcatgaataaactaagacccagagaaataaaatgatttaaatttgctcttcaaagtttgtagcagaaccaagactagaacccaggtcggttcttgctgcttcagtcttaatagttagggagtttcagccctggtgtcaaaccacaggtttgaatgccagctcggcggggtttttttatgcaagttatttaatattctgtgccttgatttcttcatttgtaaaacagaaataatagtacctagctgatgggtgctatgaatataaactacgataccattgcttaatagagagattgtttagtcagaggtaacattttatttttattatctagtcttctgtcttaatttatttctatcttattcactctatttattgaatgaaattaagtcattcttcaagtaaagcagacttggtagaaacaaccacactgatctgctctttgctttattctcagaacaagagtccgtatcagatatggtttgttgtatgcgaagatgtttgttttaatcttccaaacccactcagcatgtcaatggcagagagaagtgacaatcagatgcctgatttgatccttgaactgaactttgatatgtttcaaatagattttttcacagaatagtagccaaaatttttctgtaaaataaatttaatctcaagtcagctaatttaataaatgttttggatacccccaaaacaggcttaccaagtgacccacttgttggaactttttagaagtaaatactgggggaggtttgtagggatttttctgtaacattaccagttgtccctgtaactcaaggaagttttattggcaagatatgccttgcttcattctcagcttgcaaagaaagattcatctgtcgtaacattaatttttatttttaaattaacctgcctccactgaacagattgtcactgctttctctgaaaggtcaggataagttctgcatatgagccttggaacagggtgatctttgagtctgggagaatgtattaccatgtaggtctgacagaagcatcacttgccatcagcggccactgggctttctatttcagttgacctgcagagcttaggatgttgcattctgtgaccaccccctctgcccagtagttgtaacccttcactattttgaggaaaacagttggtattttcctgtggtttgtttaatcctcaggattcggtgatgtccttctaagatcacgttagatcagtcctggtcattcagtcattgaacagtgccgagccagagtatgactcgaagggagtggaggccattccatcacgcccaggccaaatgtccctcctccctccgcatggcgtcaggctctcacatggtgccaaaagcagtgatgctgtggacagaggagacttgggactggtcttgacaattaaattcaggagggcacttttgttgttgttattgttttgaatccatctagagataaac

SEQ ID NO: 52558 - DNA, 3171 bp, Homo sapiens
ctattcaagaggctgaggcaggagaactgcttgaacctgggaggtggaggctgcagtgagccaagattgtgcctttgcactccagcctgggcaacagagcgagactccatctcaaaaaaacaaaaacaaaaagcgtaaaattgaatagaagtgctaaagctaaagaaagtcctaaaataattggaataggcaagtttctgaggcttcatgaaagaggtaattctcaagcatatggaagaagattgatataattcaacttgtgtagtcaaggtgttccaggtttagagagtgacataaagatacttaggagtcgttatagacttctaaacaaaaaaatgatttagtagctgacttttcctgacacaatgcaaaagacaagttgactaagtaaaaatagctctagcctagaattacataaattaatccaaatggtagagacagccctgaaggcccagcaaatgagaaaactgcagaacttggcagtagacccagtgggtaaccaataagatatagtcagaagtgattacaaaggtgttgggagcaaattagatggtcaagggatccggaagagagaaatcatgaggtaggttttcttctttgaaggtggggaaagatcaagtgcagactgagctgtggccaacgtttgcagaccaggaatccacactagctctaatcagagagcccttggtgtgcgggaactgccagtttgccgacgtgaaaagagtcccagactgggtaatggtgagccctgaagtcgcaccccagctctgccactcagtgagcacgggtaagtcatccacctcctccaggtggccttgatggccctccctcctctgagactaaagagaggccacaatgcccagagcagcctccttcctgtctcaagaaaggaaaggatctcaggaacccatttcatgtggtagcagcttttagttgtgggttgtaaacaaccctctgttgccaggaaagtcaaattgcaaccataatcactgatcctgagcagtaaatgtgacattggttaattcttctgtgagggcctgaacgctggttccctggaatgttgcagacctttggaatcggggcagttacactgttctcattcacaagcttttctctgagttggcctcttctgagcactagagttggttgcagaagtgtctttctacagtttgccaagcactttatgcagacagcaagaattaccgtttttttagtactgtcctatcagtgtgtcctgactttttacctcataagaccaagttggctgaagcataggacatcactgagtgctttgaaacaaagctgtttgattcctgttcactgaatgccatttctttcagggtagatttaaggactttccccttaaagtacagtgctactgactctagattgagggttcaagccaccccgtgggttaacttcaacagatgaaaatttttccttggctacagcaacatccctaatcctgaccagccatggagaggttcggttcttacaaggaaaatgagtgaatgtgggaatggctcaccacattgtgaaaacaaaactcacatcctgctgatggttggctgaggactgtcatgtccacatacaaagaaaagcatgtggcacagttttaggacaaaggtgagcagagatccaccgtggaaaggggcatattttcttatagagagaccatccaaggcatgcccctcggtaagcagtgttggtgggtgaccacggtcacacgcatggaggcttgctttcccctgctcctcatacccactccctagcagtttctggtattgagcacccccttagtcatgccttgcccagttagccattgatcagcctgtttccagagcaagccatgggtattagattgcagacaggacttagtctccctgttcagtgaagatgtttggaatacagaagtgaccctaagctgttctgaaaagagttgaggtaaatcctattcagtagaacataacagagcaaagggcagacttggtgtttgggaccattggtataggctattaggatcagagaaaggatatttagcaaggatacaaactcagataataattcttgcctgaagaagtgtggttaacatttcaaaagttgaagtcttagagtaccttagttttaaaaatacgtcattccagttctaccttttcagaattatgactgataacctgagcagtacatcagctattgaatgacgaagatgagcgcattggcaatgggataagaatggactaaagtttagagcagcccatgtaattcagtgtggcttttgtttgtggtatccagatacctgtctatacttggtaagactcatggtgcctgcctttttttacagggaaaatgacagcaacttcccctcattcttttgactaggtttgtgaggatagaatgtgaccagaggaaaatagttttggtaaagacaacacagtgcttgggatcagacgaattttggatttcagggttttttttgggatttgggaatgtttgtattgtacttaatggttgagcattcctaaacaaaatccaaaatgttctgatgagcaaatttgagcatcttgttgctgctcagaaagtttcggattttcgagcatttcagattttggattttcggattcagaatactcaacctattgcagagaaacattaaagaaaggagtttcttctcttacttgaagggtgttgtgtattgaatagtgaggtcatgctttttattctttcatatgcataggggaggaagattgaaagtgtatcgcagggctctttgtgtttctgtcaatccctgctgtggaggggtttttacatttgtcttagattctttctcctgaattcctgcatcctatgaattattgaaaggtgttctttgtttttaatagagcagaagaggaaggatttctgctgttagaattagagaaatttatctcttgggttgttttgtgaggcttattcacaagtcacaccagagatgtatatacatatatgtacacacgtgcatacatataatagtatgtatacatgcatgtgtgtattttatattcctttttactctgacagaggattcaaaaggagattgctttctgagaaaagagatttgtttcacgttacttgctgcaaagcacaaagggagtgttaagcttggctttaaaaggctctagtgttagttaccag

SEQ ID NO: 52559 - DNA, 1028 bp, Homo sapiens
aagaatcccaggtctttgggatagtcttggcaagttactcaactcctctaagttagtttcttgatctgtcagatgacagtaaacctcagagttgtgaaaattaaatggatataatgtgtgtaaagcacttagcataatgctttatacatcgtaaaactttcaaaaataggagtagtaattattacaaagaaatgtgaagaagagtcctagtgggctgcatgttaaaaatagtttttagttaatgaaaattaaatcacatcttagatgtttatcatctgcatggtacttttctggttgctgctttaacctttgtatagttgaaagtctgtaaactttctagtattctttgatttctggcccatttccctcctaccattcacgcttatattttttggttcaagtcaccattccttgcaaaactaattaaatacattcctaaatacataatattgccaatattcattcacatccaccacgtctagatccaagtcttcatcttctttatgctggtctaatttttgctgagccttagaagcaaagacagactccgggggttgatatgggacctccagaatggggattgcacagaataatcttatttttcctctattcttctagtctgttatgttctgaacccacacatgttttcggaaggaccagatggctgacactggctaatgggaaccaaaagacgagtgaaagtaacctggttgtcacatacccccagcttagaggtgcttcaccctgccccaaggtcaatttcttttttctctagagactttaccccattatatcaaaaacctttactacagcctgactttatctgatgttagagtatcattaagtcaagcagcagcatttattgagtgaaaaaagattgtacacaggactggaagagaagcatctgcctttaaaatacagtagaaggccgggcatggtggctcatgcctgtaattctagcactttgggaggccaaggcaggtggattgcctgagctcaggagttcgagaccaccctgggcaacatgg

SEQ ID NO: 52560 - DNA, 2573 bp, Homo sapiens
aataatcaggaagtttttcttgaatgaataataaatagagataggactatgaattaagtagcattctgtcattgttttattagtaatataactattacaaatgtgatcaaatttttttttattaaaagtcactttttaaagtcaacttaccccccaaaaaagtgtattatttttttcccccaatatatggggaatttaatttttttctgtcattttgaaaaatcaatgccaagagataataccatattgagatttttgaccaaatgttaacagcgtaaattgccctggttcaagacctccactccttggttcttggtcccttcagtttgtggtatgaataaacatcatttgtaattatttgactaagtcatttaaaatccctgttcttcagtttaatatactgttttgctcctcctttctcattgaggtactgtatgaatttaagggccatacgaagtatttgtcccttcttaaaagataggcacaggatatagactcggtaataaaatgtggtttgggtttctagtatttttttatgcttccaggtacccagaaccgcaaattttactttgagctcctcagaagaaaggtgctccaggcatctgagagaataccgttggggtgatacttacaaatttgtaagctaacactgaaatcttaaaacttccgaaaatattaatgcatttgtatgacttatttttcaactgagtatgtcaaagtactttatgaacaagtgttgtccctagtttgtactgatggggaaactgaggcatggggtgataaggtgactggcccaaggttacaaaatgagttattgacaactccggaaatagaagattttttaaattcccatactagatacatgtgggcattgacattcaaagcttccctcatgctatttcctttagtcctgtcctttggggattgcctctgagggtgagagggtagttcaggtttccgggcttgttcagcctttagtctctgtagaggcttccagcaagctgacaagttactgccaaaagtgagacagatggtattttttatgatgttgtccttagttggagactgctagtgattctcctcctcaggctactctttgaaaagctgtaaggtggtatcagctttatcgtggttggctgaggaaggatttgtacaagtaaatgttctctgccttattgtcattcctagggccgtctggtcttatagtaccctgaaggtgagggattagattatgctctgaatttgtatgcccatagtttgaggaaatgttttacttgagttttctgtgtgttgagatgaaagtctcccaggctaaagatttctgaactgcacgcaatgtctgaagaagcgcttgaaaggcactttatttctcccaggtccccaaccatgggtttaggtttttatgccagaaaggggaccttcatgaacaaagacccccaagacctagagagaagaggaagtctgaaagagggaggtttgaattcagccttcaggaatgaagagggcagacagagcaggaggctcaggcaagggagtcaggaaccacagaccagaaacatggacttggaaaggttttcatgtaattgaaatgaagctattgatccatccattttaaaagaatttgaaaaattcattaaaatacttaattagtggcatccactaattaataaaagcatagggagtggcatctttaaccaaaaatgaaaatgaagaaacagactccagcccagggaccaggggcgattatgagggacatggtgcctcatacagccaagatgatccaagaggcatcatctttaatgaagctttaacacctggcagcctgctcattgtgttgtttaagaggtaagtatgaactggttttgtttgtagcttttgtgtggaatcaggtagtgctgtctgcagagtgtaaacctttatttctttaagtaggaataacagataaagtaattctatattaaatcccaagagttttattctaaattggtaatgtgactttcatctctcgagttttttcaaatcgtttttaatttgtggttgagtcttcacgaacttcttgtcatcaggcaatagttgattccccttttttgaaagctttcaatttcatttatccttagtgttgaaaagtgtcagaaaattgaaatggacacagatgattgtatctgccctccctttcaggaaagccatgttgactttaaaatatcaaaaaagaaagttcagttatgattgcagggggtaatgatagtttgatccacaaactatttgcagtgtaaaagtgaaataccttagctgacttagttcatttttgaaagttttgaatagctaaaacaaagttggcaaataggctcatagagtagttacagagtaagactaaattcatatttgatgcagattcctctctacctcccattctgggaggatttagttttactgtttggtgtttaggataatgattgttctgtttttctcaccctactatgtgaatatatattctgttagagatgggctgttatctgcaatgtggactcaataccatgggcttgagtttggttagttcatcattagagattttt

SEQ ID NO: 52561 - DNA, 1054 bp, Homo sapiens
aatctttagcctgggagactttcatctcaacacacagaaaactcaagtaaaacatttcctcaaactatgggcatacaaattcagagcataatctaatccctcaccttcagggtactataagaccagacggccctaggaatgacaataaggcagagaacatttacttgtacaaatccttcctcagccaaccacgataaagctgataccaccttacagcttttcaaagagtagcctgaggaggagaatcactagcagtctccaactaaggacaacatcataaaaaataccatctgtctcacttttggcagtaacttgtcagcttgctggaagcctctacagagactaaaggctgaacaagcccggaaacctgaactaccctctcaccctcagaggcaatccccaaaggacaggactaaaggaaatagcatgagggaagctttgaatgtcaatgcccacatgtatctagtatgggaatttaaaaaatcttctatttccggagttgtcaataactcattttgtaaccttgggccagtcaccttatcaccccatgcctcagtttccccatcagtacaaactagggacaacacttgttcataaagtactttgacatactcagttgaaaaataagtcatacaaatgcattaatattttcggaagttttaagatttcagtgttagcttacaaatttgtaagtatcaccccaacggtattctctcagatgcctggagcacctttcttctgaggagctcaaagtaaaatttgcggttctgggtacctggaagcataaaaaaatactagaaacccaaaccacattttattaccgagtctatatcctgtgcctatcttttaagaagggacaaatacttcgtatggcccttaaattcatacagtacctcaatgagaaaggaggagcaaaacagtatattaaactgaagaacagggattttaaatgacttagtcaaataattacaaatgatgtttattcataccacaaactgaagggaccaagaaccaaggagtggaggtcttgaaccagggcaatttacgctgttaa

SEQ ID NO: 52562 - DNA, 1187 bp, Homo sapiens
gagccaccacacctggcctattataatttttttatatggagaaggaccaaaataatccaaagatgtaactctttgcattttgggttttttagttttactttttttcacatacaggtatgggcatgtgcacgcacgcactctgtctctcttcttttcttttttttttttttaattaaaaaacccaccggccagttgtggtggctcacgcctataatcccaacactttgggaggccaaggctggcagatcacaaggtcaagagattgagaccatcctggccaacatggtgaaaccctgtctctactaaaaatacaaaaattagctgggcatgatggcgcacgcctgtagtcccagctactcaggaggctgaggcaggagaattgcttgaacccaggaagtggaggttgcaatgagcctagatcgggccactgcactccagcctggtgatggagcaagactccatcaaaaaaaaaaaaaaaaaaacctatctcctgcacagtctctcccttttcttatgcctctcctgactccttttttttttccaaacttggaatcatactataagttattttataatttgcttgtttcaccctaacagcctgatccttttcctttgtcattaagtattctcctacaacctggtttctaatggctacatagtactccaacatacatatgttatttaatggacataatcagaaccatgttgcaaggcatttaggttatctttatttttgtactattttatgcatgtataatactgttgaatatcctttatatgaatttttgtatacatttctttttgccttagggcagattcctgcaagtagactttgggagtcaaagcatatacacattttaatgcttttgctagctattccattactcggtaaattaatatttacgtttccacctgcggtgtttaagagctcctatttttttttttcttttttctttttttttttgagatggggtctcaatctgtctcccaggctgcagtgcagtgcagtggcatgatctcagctcactgcaacctctgcctcccgggttcaagcagttctcctgcctcagcctcccaagtagctgggattacaggcgcctgccaccacaccccgctaatttttgtatttttagtagagacacagtttcaccttgttggccaggctgttctcaaactcctgacctcag

SEQ ID NO: 52563 - DNA, 1687 bp, Homo sapiens
tgcactccagtctgggtaacagcaagacccccatctctaataaaataagtacaatgctgactttttttgctttttgatgaatagggaaaaaatatttttttaatgtcataattggtgttgaagacatggtccagtaagaagcaattatgaaaaataataaacaatctagcatggatcaagccttatgaagaatctagaaatttaacaacataaaccagaaacaacgactattagattttacactaaaaattcgaaatcaatgagtaggaattcaaaggctctggaaggaagaagtgagcaacccaaaaggaagatggagcgataagaggaaagagcctttcaggaccctaaatacctgggtggtttttttaaggaactgttcattcttacagttatgctgccaaaccatgatatgcatgaaatgtcattgaaagtcaaggttgaaatgaagtcattttagagtttcaaagacaggtatgacagtcaccaaacagcacacaatatgacctcctggcatcattgaggaatcattacagaggaaaacgacttctgggaagaagaccaatggtaaagatgtatttcaagcaaaaattgcctgtatggcaaaaacgctggagagtctgaaaggaaggagtgagtacaaaagaaaaagcataacttagctacgtatgtaagcttatagtcccctagcagaagggcagtggatctccctactgggaagcatgtttgaacatatctagattgtgattagtaattgaaactcagaggccgggcgcggtggcctgtaatcccagcactttgggaggccgaggcgggcagatgacgaggtcaggagatcgagaccatcctggttaagatggtgaaaccccgtctctactaaaaatgaaaataaaaattaaaaaaaagtagccgggcatggtggcaggcacctgtagtcccagctactcgagaggctgaggcaggagaatggcgtgaacctgggaggtggagcttgcagtgagccgagatcgtgccactgcactccagcctgggcgacagcgagactctgtctcaaaaaaaaaagtaattgaaactcagaaacagattttggatgctttagataggtctttgaagaattgctggagttcagatttgtagaagtgagatgtatcagtagatatgttaggctgaagggttgtaagttaagtttagaattaaggcataaaatgcttgtctagaccggtcacggtggctcacacctgtaatcccatcaccttgggaggccgaggtaggtggatcacttgaagtcaggggtttgagaccagcctggccaacatggtgaaaccccatctctactaaaaatacaaagattagctgggtgtggtggtgggcacctgtaatcccagctcctctagaggctaaggcaggagaattgcttgaacctgggaggtggaggttgcagtgagcagagattgcatcactgcactccaacctaggcaacagagcaagactctgtctcaaaaaaaaaaaaaaaaaaaaaaaatcttgtgtaataggaagatgaccaaataaggaaacaaatgagttcttcaaaggagatttagtgttcaggaaaggattctatggaccctgagagggtttggagaagaggtgtgtaagcaagagttcattgcctaccgttttattacaccaggcatcgctaatgtag

SEQ ID NO: 52564 - DNA, 1735 bp, Homo sapiens
gagctaccaggcccgggagcgcgatgtggagcgcttctttaagggctacgggaagatcctggaggtggatctgaagaacgggtgaggagggcgaaagagggtccggccgggcggggacagaccccataggtggtggggaggccgcggggacgggagagggacgcctggtccgcgcggagcggctaccggcctggccaggctccgccatagtggcggcgcctcgggggcgcgggtaggccccggttcccactgcgcctgcgcgggtgggggtggtggaggcataatgggagctgtgctgaggccctgagtgggacggggagaaggaaagcccgagtggggctggtgctccgggcaggggggcacagctccagggcgcccgggagacctgggttttcccttcctaggcccggaactggggccctattcgtttctgggtagacaccaacctttcccgctctgaggactactggaaataaacaggatttcctgctccctttcacctcttgcccggtctcatggatcagacggtcacagcgccgtcttccccgaggactggagccttggagggaggccctttttagccgtgtgccacgcttttttgggcgggagactccagtttgagtagtctagtgacagtttcgaaagtatcgtcttgccgtgctgaaagccttcaccgttccctctgcaagagtaaattaaagtcttaacttcttatctttaagactccgtgcagagtttccacgctgtggtttccgttttccaacttaccgaaaaattgcttggccgttgtagaatttgttaggagaatagtggccaccctggctagtatctgcgtctggttaacgcagacggagacgaaattgttaacttactgcctcccccagagtatgatctattacttgtattcttaatctacttcggcaaaaatagtgccagcatgagctacaggttttagggaaaactgttgaggaatcaggcctggagaaaatactcaacggggaaaactgggaaccagatgttaggtagggcttggaaggcatggatataaaattaaaaggactggggtgacattttagggcactaaaccttgggtgttagagaactcttggcttaaaaaagaaactctactttgcaacagttgtaatatagctaccgtttactccccagggttatactagtaactgacacctgaaacattttgaaagttacctaagtatgtttcacgtatgagaaaactggtagctaccgtattctcaaatgatgatttgggtttaaaaagccatttcaaattaattattagaatcgttttctttctgaggacgtctttagtaaagtactgatttcttttacagtaaaaggctttaaaaactactccttttctacagtaaaacgttcagttcttaaggatatattgaagtggcgggtagacgttattgtatacataccatatatgtgaaagttgaaactccagtttttttcagagcccagctaaattgacagcataactaacttttgtggacaaagtgtggattttgaagccagccaggcctaagtcaaatcctggttccaccacttactacgtatgggcaagttacttctctgaacctggttgttcattcatgtggaaaaggaagattagagataataaatgtaaagcatttggcttaggcagtaagtggcagctataatcagagggatgaggaaacatctttgcttgttggtgtttgataacata

SEQ ID NO: 52565 - DNA, 1509 bp, Homo sapiens
ctaggtgataagtaaaaagagctctgaactcagagtctgaaagacctgaatccaagtttaaatttgtatctgcagttccaaaatcctgaaagcgctggaaactgacaggttttttctataactcatttgaaggaaacgatctaacgaggtttttatgtggtctttattcatcccacttagcctgagtattcctacattttgctgcagaaacattcatgtatctgatcacagggtgctacaacagcccccattgggtatgtagataatacatggccccaagagttttggaaaagggattgtgaacctatgtcttgtcctgatcaattgacaaaaaatgtatgaaatggcttcacaaactaaacattagtaaactcatatgagatagtcttaaatagcatgatgtataattctgtacaatgggaatactgagcaagtgattttttttttttctggactaggaagagggtcaaaagatatcttaagggaagtaaactttgaactgggccttgaagggtgagttgaattcctcacttcatagagaagctgtggaagaaaacattctgggctataggaagaacgtatagaaaatgtgcagaaaaaatgtctttaaacagcttgagcacatgaattttgtcagcttacagaaaaactctgatgatctgtgaaaatacaggagagaagcactgtggataatacaaaggggcagctagtccgaaatccatttgctctgggcaggatttttcttttgaatgcagacttaatacacacattgagagtgaaacatcactatctgggctgatgcctccttgcttagtgcccacctgttagcgctccctccatctccccataaggcaacggcagccggtccagcctgtgctcatttcactgccctctgcttggtgtggggtcagccccttacctgctggcttctctagatcacactgccaggttcaaatcaggtcagccacttgctactttgtagtggccataagcaagttgtttacctcttagagcctttgttcctcagctgtaaaagcagaacaatagtatgagagctattgtaataggaaggctggcaggtaaagcacttagcagtgtgcctgactggtaagcactgaataaacagtagttattactattacaagggctccccgtcctccagctatgtgtaaatacatacattccttaattaagtagctgggactacaggcacacaccaccacacctggctaatttttgtatttttagaagagatggggtttcactaggttgaccaggctggtctcgacctcctgacctcgtgatccatccacctcagcctcccaaagtgctgggattacaggcgtgagccaccgtgcccagctattataaaacatttcttcaaaatcacacttttaccacaagatcaagcctccagtataattaaaaggtcagatttctgcaggaagtaggtggaattacatcagcttagttgggtgatactgttgcctaatgctaaaaaccttgttg

SEQ ID NO: 52566 - DNA, 1008 bp, Homo sapiens
caatgtacctagcacaccaggcatttcactgaatcacagaaggcagtttggtgaccaggggaccacagacagactggggaggaccacaggagggtcagttacattcacccggtgccctgtgatgacacaaacgttcttgattctgtactaagtcggtgccctgtgatgacacaaacattcttggttctgtactaagtagacgagaaagtctctggccagtgacaatttctccctacctcttcttcctgctcaaaatgatattgaccgtttgatgtgattgagtaaaagatgaaagataagtacaaatgattgctaattaaatgtggaacgcaggaaagatatctcagcagagctagctaatgcccaccttacacagcaagtataactgtgccagtccccagggtactggcctcttttcccccctctcaaaaggctctttcttctgcctgcttttgtctcccttgtacttcatatggcatcacaggtgtacagccttggcctcaaaggagccattgtgaccttatccaggctgggatctgttgattgaggacagtggcatcccctcgagttgcatggcgccattacattcacggaggacgtgaacggtatgggggaagcaatttgagatctagccaggctgggttgggtgcctcatttgtactccaaaacatagccactgtttcctttggtgagttttgtttgtttgtttttttaaagaacagggaagaaattgctatcattacactagaggtttaactcttggaattcagacttggtccctgttttccctcctgtctcagcagaatggtatccttgacaacatggttagcactgtctgcaggaacagcagtgtctgtggtattgatggcattccctggggcaggccaaggctggcctccctggtgagaggcagctggacccccccacccccaggcttgcagcaaatgtggggccagcccccgacaccatccacctgtgtttgcagcttcaacttaacttcccatctcc

SEQ ID NO: 52567 - DNA, 1067 bp, Homo sapiens
tgcgaacccccgcccggcagtggcgggggctgctcccagcttctggctgtcacggacctgccgcctcctcctactccgcatccgccgagcctgcccgggtccgggcgcttgtctatgggcaccacggggatccagccaaggtcgtcgagtaagagacggcgccgaagccggggaaggggactggggtttctggaaggctttaacacgagctgcggactgggaagagagggacagggtccgaggaagggggcagagaatagcaaaccgaagccgaagcccagggcgtttttggtaggtcagaaagaccgtacttgaaggtagctgaagacccgagaggcaattatcagggtattaatggctgatgtttattgatcgaatattgtgtcaggcaatcccttgtttaaatggatgctctcatttaattgtcacaacaatgttttggggtagttattgatttatccccattttgcagatgaaaactgaggcagaagaggtaaaatcactcgtccaaggtcacacagccagtaagtgacagggtcagaattccaacctatgtctgactgacctgcgtgagttcttactattattattattatttggaagaagttttcagaatacttttacatccatttggatcttcatgtgtcagtaaagagtaggtcatagatcattgtttccagagggcaagggacttgcccagagtgataccgctaataagtgattggaacaggagactggaatccatggcttctgattccaaactcatgtttctctccactgcaccgtatatgcatcttggcttggttaaaaagagctgctttggtgccatacagacccaagtatctatatttggtcaaatacaggctcaacgtcttagtagctgtttggtcttagagaagtcattcaacttctcgttacttttatgactttgtcctcctcctaaaattctgttggatcttaattcatgctttttgcacgtggttgataaaaatagtatgtcagttgccaaccattgtaaatctgcacataaatagccattcagaagggctattggggccactgaagtg

SEQ ID NO: 52568 - DNA, 1333 bp, Homo sapiens
ggcctggggtccagggcagtgggtgggagggcatcaggagggggaacacagccagggtgagctggggcagcctcagagatgatagtagcattggccaccttttattgagggcctaccacacgtcacgccctgtgcttgtttcatttattcccttcaatttccctgtgaaacgggaaatactataatccctgttttacaaataaggaaactgaggcttgggagattaagattcctgcttaaggtctcagagccagtaattgcctgagcagcatacactcttaggcctccttgactccatagcccaggctctaccccctggtgtgtcctgcctcccatggtgcccagagactactggtaagccctgagactctaggttccctggctgccctgcctgtgccctatcccctagcctccaggaatccctccctgactgcctagctctgggctccccagttcagcccctgcccacctgctctgtgtttacagatgatcggcaccgagtgaaactgcacccgatgctgggagaccccaatgccgactacattaatgccaactacatagatgtgagtgccttgccctgtcatttctgcagacctggccctgcccgctccaggcttactatccaggcagggcagaaacctgtcgggataaatgggggttcaaatggctgagttcggagtgcccctatctctgcagtcagtgccagggagctcagaggagggaggacagtgagcagcagcttctggaaggctttctgtaggtgggagttggcctgagagatgaggtgctttagagaagcaaagcaaagggaagaggcagacagctaggccaagaggtgaggaaggcgggaggcatggagaatgggattctcatcgtgcaccatgaggctgaagaggtaggcaggggctggattgtgaagacctcaaatggcaggctcaggagtgggggctttttcctaggggcaccagggagttgttaaagtgttttgaccatgatcagagtggtcctttaagaataataacgcacatttatccagcacgtactgagtgccaagcactgtgctaagcactttacacccaagatctccttttctgtaatccctccacccaccctttgaggcagttagcaccatgacctcactttacaggtgaggaaaccggggctcagagacgtggagcgacttgtcccaggttgcacagctagtgagtggtaaagaaaggacgcaaatctcagcctgtctgtgtctctaaagcctttgctgctgtgaggctgtcctgccccctgctgcagcagcagcaggacttggatggattggagggaggggccagagaca

SEQ ID NO: 52569 - DNA, 1048 bp, Homo sapiens
actgtccatctgtctgtccctcctggacactcatgccattgcccaaccatctggtcctcctccagggtcccattcaggatgagcgggctctttagccaggccctctcctgatgctacccaacctcagggccctacaggcatgcgtcagctgcaagctgggtgttgtgggcagcatgaagcccccgttggggctcaggaggcctcctggcctggggtgtggtgctggatggtgctggatgtgctgacctggggtggagaccttgtctcagggacaggcaccctctgcctgcatccccagggccgaagcctgagatggtctatgacttctggcgtatggtgtggcaggagcactgttccagcatcgtcatgatcaccaagctggtcgaggtgggcagggtaagccgggctgtggggcgagctggggcgcatggcaggccaagggggcagcaaagagcccactgagtcccgtcctgtggggcctctaggtgaaatgctcacggtactggccggaggactcagacacctacggggacatcaagattatgctggtgaagacagagaccctggctgagtatgtcgtgcgcacttttgccctggagcgggtgagtctccccaccgcctgttccctgcagagggtgcctgagcagggattagagcccactcccacttcccccagccctgggagcaggagggtgaggagcgcaccactgcccatcccagcaaggaagctacttggtcactgttggctgggagcactctagaagggcaggaaggtcactgcctttgttggtgcccataggaggaagctgagacaatgaagggggtgacagtatctgccaggtgctggctcctactctgtgctgagcctgttataaatattgtttcagtcctggaaagctccgtgtgattagcccagatacagaaagtgaggctcagagggcttatgccaggcaggagaggccacatagtcagtggctggccagcgagtcctgtccacgatcccatttgatctgctctgtaaagtcctcagaggaaagatagttttttt

SEQ ID NO: 52570 - DNA, 1094 bp, Homo sapiens
ccctcctctcttcttctccttagtcccgggcttcctccccaaagctctgacctggtctggggctgctctctctccagcgcgggcaccggccgcacaggttgctatatcgtcctggatgtgatgctggacatggcagagtgtgagggcgtcgtggacatttacaactgtgtgaagactctctgctcccggcgtgtcaacatgatccagactgaggtgcggggacctggccctgtccccaccattattacttctaggactggagtttctcgtgaaggatcctggagccggcagagcatgcccaaagggtgtcctgaggctcttgccttccctcagatcatccctgaccttgggccgccaactgcatagggtcatcctgaactgctcccctgtgttctgttgggtggggtcagacaaccggtcctgtagctgacatacctgggattgcatcctcagtggatgtgtgaccgtgagctgtcccccacctctcagagcactcacagagttgttatagggggtagggatgaaataggagataaaggggcatgtccatggaggttgtttcaggtaggcttggtccagcctgtagtaacatggttggcctccacctcaggacaccctgcttcaaccttgagcttgcttaagccccatcaccacagatctccagcttctaggcccctcctcggcctcattctcatctcctgttccaggagcagtacatcttcattcatgatgcaatcctggaggcctgcctgtgtggggagaccaccatccctgtcagtgagttcaaggccacctacaaggagatgatccgcattgatcctcagagtaattcctcccagctgcgggaagagttccaggtgggggatgagtgcgtgtgtataggtgtgtgtgtgtgtgtctgtgtgtgtgttggggcatccttaatactgcaggagtcattgagggccaagaagcagggaccagcctgaggccacagctggagggacagagctgagctaccaggaaggactttgggacagcggaagatggggtgcatcaaagcagttaagagcccaggctttgaagtcagataaacccaggttcaaatcctggct

SEQ ID NO: 52571 - DNA, 1047 bp, Homo sapiens
gaggtgataagtaaagaccagaaggaagtgagggagacagccatatagacatttgggaaatttggcctaggcagccaaaatagcagatgccgaagcgcggaggcagggagtaagctcggccagcctctgccttgagctcagcctcatgcccaagctcccctcgccatacctttggaaacttttgctgtttagttctggggggtcatgggcttggtccccagaggcctgggcccaccctgtcaacccaggcctcagtgtgccaaccaacatcagaaatggcccactggaggcagcctggtcctgtggggcacaaccgtccaactcagggtgggcagtgcgggaagacagcctggggcagaggctcagcccaggccaggggccgggaacagggccctgctgagttccggtttccctgcagagctacacacggagtgcggccttcatcgtgaccctgcacccgctgcagagcaccacgcccgacttctggcggctggtctacgattacgggtgcacctccatcgtcatgctcaaccagctgaaccagtccaactccgcctgggtgaggcctccactggccaggccaatgggccgcctgctcccaggtcctctgtgtattcagggccatggtccccaaagccaaaagttgggtcccagctctgccatctatttattgtgtgatgaatcatacaccttcccagagcctcagtttcttcatctgtaaaacaagggtgtcagatgggagatcactagttgctctttttcttttcttttttttgagacaaggtctcactcttttgcccaggctggagtgcagtggcgcgatcacagctcactaagttgtgcagcctcgacctcttgggcccaagccatccttccacctcagcctatcgagtagctgggactacaggctgcatcaccacagctgtctgatttttttttttttttttttttttcagtagagacaaggtctcactgtgttgcctggactggtctcgaacacctggcctcaagtgatcctcccaccttggtctcccaaagaactgggat

SEQ ID NO: 52572 - DNA, 1063 bp, Homo sapiens
gcaggctgggcctactggaagctggtgcggagctgagtcagtccgggtctggcccccaggggttttggttctggtgggaaagacccctgagaaggggagtgagggccgcatcagtctgccattccccaggaggcaccccacacgtggagtcacagggaaggagggagaggcacggaggggatggagctctgtgggaggctgtgggtttgacttggggtttgggtacgtttgtgcctgtgtgcccacgatgccaggtggtgaccagtcttctcagcattcctgttccaccttgctctctgggtacgcgcttgctgctcctccgcccttctttgtcactgtctttgtctctccgggtgtttctcttggagtgtgtctggcctcctttctctcagaatccgcagtctgtttcgccttgagaatatgtcttctgagatgtcttagcctctgatccttcttaacctggtcctgctcctccctctgggttccctagccccgccccttacctctgggtcctctgccccgcccttctgagttccctagttctgcccctcaccttgggctctttggccctccttagtttcctagccccgcccctcacctctggactctttggcccctcctttctgggtttcctagctctgcccctcatctctgggctctttggcctcttccttctgggttccctagctccgcccctctcctctaggctctcgggcccctcctttctgtgttctctaactccgcccctcacctctgggctctctgccccacccttctagattccctagctccgtccctctcctctaggctctctgcccctccctcgtggttccctggcccttttcttaccttcaggttccaaggccccgcccctcagcttttgcatctctcattcagaaacgggggaggacgcagcggcaccttctgcgcctgcgccacggtcctggagatgatccgctgccacaacttggtggacgttttctttgctgccaaaaccctccggaactacaaacccaacatggtggagaccatggtgaggggctgtgtcccgtgcccagccact

SEQ ID NO: 52573 - DNA, 1083 bp, Homo sapiens
tgtgcctcccagctttaatcttgcgaactgtctgctgctcaaagctctgattatggacggtcagcgcttaaagactttcatttctaacctctttgcagatgagaaacccgaggctcagtgagatcagtaacttgcctagtgtagcacagcaagtgagcggcagggctgggattgaatgcaggtccatgagattccaggggtccactacctgtctgcaaatcttcctgttcccccattaggggctgctgccctgcctcaggcccatctgcagtggttcactatgctccatctgtgggttgtggctctctgtggccctgctcttgtggctggaactgcaggtgtgggtggctgccaggcccagctctgtgcctgcacttctcacagctgctgtgtgtccactagcctgatctgggaaggcccagaggcaggttctgagccagacagggccagatggctcctctggaatctcgatccctttcccaggccatgtggaagcgggagagggtgctcatgtatgcattttcccctgaactccacctccttgctgtctctgcacctccctttgcctaggcccctgtgagcctcctgagttcccgacttgcctttgggttctgtgtttctggagtgtcagctctctgaggacagggacttttgcttgccttgttccccagagcctagaacagaacccagaatatagtaggaacttaataaatactcattaaacgaatgaatgaatgtgtgcccaaagtttcactcatcatcgctgttacctgtgcccccattaactgccagagctgtgacccttctccccaagatgaccttgaacggtgcgtaaccaagtgtgccaggaactggcttgacctgcttcccatgagaccgaggctccagacctacctctccctctaatctgctgggtgtccctgggcaggtctgttctccctccctgggcctcagtttctccgtctgtatacggaggggattatatgcagtagtttccaaggttaccctgtctccccccagcaatgtcttgccgtctctttgattctctggctctcagctgcttaacttgacaatcgcaaccca

SEQ ID NO: 52574 - DNA, 1029 bp, Homo sapiens
attgtcttcactgatggccggagccaggactacattaatgatgctgccaagaaggccaaagacctcggtaggtgttgcctgcctggaccctggacaccactgatggccaggggtacacacgggtatagcccaactgtagtttatcttggtgtcgtctgattagtgccctaaacccaggtgagtttgaatgaggaggattggttagtccaattctctcttataccaatgacaaaattgaggccccagaaaagtaagtggcttgttttgatggtccttttgtaagtgaggcttggaacttttccagctggatattcccaagaacacatcaactattggaaggcaactctactttggaacaagcccgagtctgttttgtaacctattaaatgaggaaaaaataaccaccagatggatgattattagggttaaatgaagcttgctgtacaaagcttccagtacaggaagtcactatagggtctgacacagagcagaacctcagtaaatattgattttctcattgtccttgttccaggcattgtgcttgcaattccagcagctgccagcaggaggtgtctggtgttggctgcctaagccttccccaggaggctcagccatatggttgcccatccccatgtccagccttacttctcctgttcctcctggcaggctttaagatgtttgctgtgggtgtgggcaatgccgtggaggatgagctgagggaaatagcctcagagcctgtggcagagcactacttctacacggctgacttcaagaccatcaaccagataggcaagaagttgcagaagaagatctgtgtgggtgagtgaggccagggctggcattgatgggatttgcaggtggggcactgtggaggtggagccatcctggaactgggtgtgggtggggaaaagcaggggccgaggtggcaccaagagttggcagaaccagaaggtgggctggcgcttacagctcttactaccagcaaacatgttgaatgctcgttacgtggctggcagtgttctcagtgct

SEQ ID NO: 52575 - DNA, 1040 bp, Homo sapiens
aataaacaccacctttagaagggaggcgtctcaaagaatgtgtggtaatatttgcaaatgaccacagaggcagtctcacctagggcgagttcccctgcatcagtcattggtttcaagctgcccctaggggagggaatgtaacctcccaggtattagtggattaggtggtccctgtcagccaaaatgatcttgtagagaagagcataggtgtggcccatgggcagctgacacctgccagctggggatgggccggtgcgccagcctgggaagcagatctggagatagtagccacttggcttttcttggtttgcccgtcagtgggatggggctgaaggtagcacctgcttcctaaggctgctgtggcggtcgaccaaggtgacggctgtgccacgctgtgctcgtgtgtgtgtggagggtgggatcattattcccggatgtgtgggtgctgttggaattccttatgtccagagacattgatgtggcccccaaatctgttgcagaattacctccccagccaggaggatatgcctcataaccagttcatcaagatgatgatcatcttttccatcgccttcatcactgtccttatcttcaaggtgagtggatccctgccctgcggctctgggaggggtggtgaggctgtgctgggcccaggcctgcccatgccaagctgttagaaggcagggacatgtgtcctccatgcctcctctcctgcttttagctcctttctcttgctttcccatgccagctcctctgactttacttgggatcctccgagacagcccatttagggcatgtgaatccgtaaaggccacctgcgttcagatgtctaattccagctgtctggaattagatttggactggcctgcgtttgaatccaagccccactgtcactagctgcgtggttggtcttcagcaagtcacttctctctgggcctcaggggcaggagtcttgttttgcctgtgttacagttttatgtaattcaggcatcaaaatgtacctgagattatgttaatagaggtttggtgatgagaaggca

SEQ ID NO: 52576 - DNA, 1021 bp, Homo sapiens
tcttctttggaaccaagttgaagaaaggaagagaaggatgattcatgccagtgagcgcccactgtggggtggcttgagggctgctgccagtcaaggacacagtctcccaaacctgcttttctcactctccccaactgttgtccttgaagagaccggggggctacatcatggaagggccctggcccgggagtctggagaccttggttctagtcttgggtctgccaccagctcttggtatgaacatctgtgtgttcatgtctctctgtgcacaggggacgagagtcactgatgtctgtagctgagacggtctctcaagtgagggcctactatgtgccgctcagtaactgggactttaattgctgctcctcattcctcctccttgtatttgtcctccccagagctcctccaagttccccctgatgacgctgcagctgctggacttctgcctgagcatcctgaccctctgcagctcctacatggaagtgcccacctatctcaacttcaagtccatgaaccacatggtgagtctggggcagggaaccatgcccatttgctggctgtgtggccttgaacaggttacttcacgtctctgtgtgtctgtggtttaggccaggttccctggagttggagcttgggaggaagattcttgtgctggtgatttattgagggagccctctcaggaagaaacttgtcaggagtgaggaaggcaggttcgagaaaaggaggaagccaagcaaagaagcaaagatgtggctgtaggagcagccctgcatgatcccagagagggctttggcatgtgaattgcaacacagacataatatcagtttttattgttgtctaatgaattatctctaagcatcatggcttaaagcaataaacatttattatttcacacagcttctgaggatcaggagcttgggagtggcttagctgggttcttctgactcagggactctggtggggctgcaccagagatggtacctggggctgtggacaactgagggcttgattagatctgaag

SEQ ID NO: 52577 - DNA, 1061 bp, Homo sapiens
tctgtgcctcagtttcttcatctgtaaaatggggatcataatagtacctctctcaaaggattgaggtgaggatgaaaggagtgaatccaggagcatgcctggaagaggcaggaaatgcctcctagacaatagctatttttgcagccagacagatctgggtttgaattctgccaccagtgctaactactgtgtgatttggggcaagtgccttgacctctctggacagctgtttcctcatctggaaatgggcttggtaacagtcctggcttccaaagttggtagtgttcttctagtaagcaagctgtgtgaaacggtggaaccctggccctggtgcagagaagggcatgatgaccgtgttagggtctgtcctctctggaaccccctcctgggaatggcagagggcagtggggtgctctgaggcaggctgctgccctgtccccactccccctccccagctgccccgccccagctgtgacgaccttgtccctgcctgtctaaggggcaggaaggaagtgaggagggcagccagcagcttccccttctctgccctgctccaggcaccaggctctttccccttcagtgtctcagaggaggggacggcagcaccatggacccccgcttgtccactgtccgccagacctgctgctgcttcaatgtccgcatcgcaaccaccgccctggccatctaccatgtggtgagtgtgcgggccccgggtgtgtgtgcgtgcgtgcttgtgtgagtgtgaatgtctgcggtgacccgtcatctacggagccccacaaatgaaagaactcctgctctccacctctctgggggaccctgggcaaatccctgtcctgctctgggcctcagtttccttctctgtcaaatggctgggggtaccctggggagatgccgcaagagtgaggagtaagggagctggaatccactttccaggcaaatgtaactgacgttcactccgaggctggctccgtttctgcctctgtgagatggggcacagcagcagccggaaggttatttgtgtgcaaagccaacagcagatgtgaaagtgctttggaagg

SEQ ID NO: 52578 - DNA, 1029 bp, Homo sapiens
tgaaatctgatttttaaatgttggcaacaatttaaaaagaaagaaagaaagaaagacactgtgtaggccaaacaaagcccatttgtgggttgcatttgagctcgtggctgtcactttgcaatccacaagatactcaatatctagaggcctcttcctgtccttgggcctttgataaaaatgactcacactgttaagtacttactatgcccaggggcatgagtctgatgccatttaactctctccccacctccttacccaccatgtaatattttcctaccaggtaatgttatcatctctatttgataggtgggcaaactgaggcccagagaggttaagtaatgcgtccagggtcacacagctaataaatggcattgctggggcagccttgctgagcagggctctcctgctccaaagctcacccatgtaaccactttcccatactgccacaatgaacttgacctcctgcctccagggctccccagtcctggcctcctggggactcatgcactcactggctgaccccaaggttgatctagcatagtcttggcccagaaggggggatgaccaaggcaggggacctcctgatcctcccaggactctgggttctcctctccccagatccccaggtgctgcaggctgcatgggacacctgctggcctgatgagaaacctgctgaagcggcatcaaggccatggcctcctccagcagcccagccacaggctggaggaaatgtcttctccttttggaaatcctggcggggaggggccggtccctgtgtcagccaagttgctgtcgaggttgcatatttctttctttcttttttttttttgaatcgcgttctatcgcccaggctggagtgcagtggcgtaatctcggctcactgcaagctccgcctcctgggttcatgccattctcctgcctcagcctcctgagtagctgggactacaggtgcctgccaccaagcccaactaattttttgtatttttagtagagacgggtttcaccatgttagccaggatggtctcgatc

SEQ ID NO: 52579 - DNA, 1047 bp, Homo sapiens
tgggaagcatcccacagtccggatccgctggctggacaggggcgggtgtctccgtgaggcccccaggctcgggttctgccccacccagcgcggccctgtcgcctcgccccggattatttacccccaacccgacctcactcctagcctgcagctaggacccgaggtcgggagtcagccagctctcattctggtcccgacccagcctctcaccagccgtgtgaccttggggagggcactgaaccttaggcgctccgagcctcagttcccgcctctgcaaactgggaataatcatagcgcaagcattaggattgttgtgaaactaaatgagttagttcaaggatgtagaacaggcacacagtaagtgctcaataaatgttgggggttgtttctttgcttggcatctcgaggactagtttgggagtccttcgggggaaggtgttgagcctggtgctgaaagcaatggtttgaatcccgttctgtcactatgtgtgtgacttggccaggccatttctgctcttggagcctcagtatcctcatctgtaagatgggggaatgtccatcttaaacagttatgcagatgaggaataaaacatcagctcccgtttggggagccaagcatgatgccacctgctctgtgcctccactaaactcacataatcctgggcatggtaacccctcggccattccttccacttacaaactggggcttacggggtttactcataacctgcttgaggtcccacagccagaacgtggggcagctgaggctggacgggaagtctctctgatgctgtgtggcttctcccagcaaagggaagaatgtgtgtctgttttgtcagccacagaactgggcagggcttcagagaggctggtgagccccaggcccccatgggagtgaggtaggtcaggcatggccgtgagcttggcaaagggcaggcttgacctgagttctcatctctgcttcttgcctgagtggtcttggacagctgctcattattgagcctcgagttcctcatctgtcaggtgggcacctcctgcttccttggt

SEQ ID NO: 52580 - DNA, 1036 bp, Homo sapiens
gctgggcagggcttagggtgtgtgggccaaacccccctggggttggcaaagccgcctgtcaggcctcctggtgggggcccctggacacagggagcagaccctctgcctcatggggtaggagtggctgcctcctgtgttctctggatttcttctcccaacaactacaaccctggacttgcctccccaggcctcttgcctgtaaatagaagcccgcaaactgtacagatttacagaggcatcgagactgggccctgggagttgccatctgagagccgatggccccagcatcccccaggtgcctgcctggcaccacagtgaccctggcctcagcgtggcaaatgcatgtaaatatttttcgtaggcagcgtggctccagagagccccctgaagacagtgtccctccctcctgtgagtcctttctcctgtacagaacctgcctggggtgggtgggggtctgccattccctcccccaggccttccctgccccttctctcccctgtaacctgtttattaaccatacctgtcctgagttcatggccaaaaccttaaataagaaaaacaaaagaaaaagacagtggaaaaaagagaccaaggcgcctgccccactgcgggtactctcctgttccagccttgtgaaggaactggttttgtttttgtttttttttttttttttttttttttgtttgtttgtttttttaacacttcctgtgctgtgcccatttataagaggaaataaaattaagctgaaatgatgtgccgtgtccagagtatgagataaatatggtcatttggggagggcagcccatggccgcaccctgggccccagccatcttcccccatcaaagaaattgagaaccaagcagggaaaattgaccaacagccccttgtgggaaccattatggtaaaagctgctgttggttgagagtgtccaggaaaccacggagccgctgcggtgaggctgggatgggggctgtggttgggaggggccaggcagtggtgagaggggcctgtggttcacccccaggggaactctggc

SEQ ID NO: 52581 - DNA, 1042 bp, Homo sapiens
ggtgtcctcgcattaagttcccgctgagcatcccaggtgggctcaggggtgactgggccgttcctccccctgcacaccctgccattggggatgcttgctgttcggaaagaatgtactcttggaagcaggtttggaaaattactgaggtggccccttccccagccttgcctcatcagcatgaggctaaattaggatgtgtgagttctcccctctgcctcccacccttgccttctctccttctctcgtacccccagcccaccctccccgtctctgcccctctgccccctggcctccctcagtcctcgactctctgtcaccgtctctgtctctgcctcccccttccctgtcatcctctcagttcccccgtgatctctccctctcctgtaccaccccatctctgtggggagctgcagctcctggtcgttagcatggagaagatggtcgtcatggtaacggttgtcatgtcgatggctactgagctggggatgaatagtatgtaggtgagcgctacctgagtggaggctgatgggtttccaggaggctcgatgcttgtctctgagctcagagctgcacagcaggcccagctcctcctgccccatgtgagtggctgtttttacccccaggcatgctgacacgctgagccctctgtggctgcttttaggtgagcatgtttcagtgtgtgtctgtgcatgtgctgtgtctctggggtgtgtcatttcaagggtctatgtggcatgggggtaggtctttgggtttgtacaggcttttcttggagcaggaagttaggggctaagtggcactggtcactgaggaatcttggggactcccttgttttggcacccacatttacttcagttgggggcttccagggaccacagacctcttagtatccctcctcccagctaaaggcctcccagccactgcccagcctactgggaaggatagaaagacagtgaagacagccctgggcaggggcaggagccggagcctgggtccctgctcagtccccattcttctgtgtgacttcaggctgcttgccaga

SEQ ID NO: 52582 - DNA, 1059 bp, Homo sapiens
ggtgagactgggtgctttccattttcctcccagccagggagcatctcggctgtgttctgtctgtcacatgggccctggcccagagtaggtgactattgatgtttacgcaggatctcaggggtggagagtcctagagagatggccagccctacagcctgacatcccacagctgatggcccagccacagcctggggccttgccaatggattggggctggctctccagccttagatggtcccactgagcctcccaccactcttgaggggctggtgggattccccttatttagaggaaggctcagagatgttaggccacctgccaaagcacacacagccaggagctggtggagcctggtgttcatttgccccttctcctaccctggagccccatctgatcttgtcgtcacatcccctacttagccagggttttctgggggtgcagctgggactggggataacactgacttgggccttcatcctgcttttggatgggccatgggcttccagggtgctgtctggtgctgcttcaccctggggttagccttggcccaggcgaccctagagattcctgtaccccctgcactgccagctaggacccccccatccatcctgccctcccccatccctgcctgccagcccagactttaatgagggtaatttagaatcaatcaccagcgggatctgggaaatctaattgcagcaaactgattgccaattcgattgcgggcaccagggggctgtgggcggctcattagacctgtccccctccctgggctggggcttgggggtgctccgtgggggatgcagggcctgagtaggcaaggctcctggagagctggggggaggtggactgttgttttgggagcaggggaagggcatttttacctgacagaagccatacactattccctgtccaggcccacagttggggtataggtgcctgtgtcagtctttaccctctgtcatccaccccttgcttaatgccccctcctcaaggcctggatgccattgttggggggtgtctgcagctgcatcttacctggttcctgccttcaagatg

SEQ ID NO: 52583 - DNA, 2736 bp, Homo sapiens
cctggatgccgtgcatggggccagaggggcctgtgctcatgcttgcagggaagcactgtgcagctggcgggtagtgggcagtgtattttcccagctaggatgcactttctccatgtgttgtcctgggagtggcccatggccacccagcctccagggtcctcaggccctgtggcaccactcagggtaggagctcctctcctcatctgatgggttgccaaagtgctagaagtcaggggactgggctgagccagtgaaaggtattgctgtaggggtgtgtgtgtgtgtgtgtgtgtgtgtgtgtgtgtgtgtgtgtgtgtatgtgtgtgtgatgcatgacatgcaaatgcatgtccgggaagcctgcccccaagtctcatctcaggccatgtaacacagactgtctttcctccccagatccggccccacatcgcaactcttcgtaagtacacctatggcaagcacattctggccaagctggagaagtactacatgaagaacggtgttgacttagggcccatctgtggcccccctaatggtatcatctgaggcagtgtcacccgctgttccctcattcccgctgacctcactggcccactggcaaatccaaccagcaaccagaaatgttctagtgtagagtctgagacgggcaagtggttgctccaggattactccctcctccaaaaaaggaatcaaatccacgagtggaaaagcctttgtaaatttaattttattacacataacatgtactattttttttaattgactaattgccctgctgttttactggtgtataggatacttgtacataggtaaccaatgtacatgggaggccacatattttgttcactgttgtatctatatttcacatgtggaaactttcagggtggttggtttaacaaaaaaaaaaagctttaaaaaaaaaagaaaaaaaggaaaaggtttttagctcatttgcctggccggcaagttttgcaaatagctcttccccacctcctcattttagtaaaaaacaaacaaaaacaaaaaaacctgagaagtttgaattgtagttaaatgaccccaaactggcatttaacactgtttataaaaaatatatatatatatatatatatatataatgaaaaaggtttcagagttgctaaagcttcagtttgtgacattaagtttatgaaattctaaaaaatgccttttttggagactatattatgctgaagaaggctgttcgtgaggaggagatgcgagcacccagaacgtcttttgaggctgggcgggtgtgattgtttactgcctactggatttttttctattaacattgaaaggtaaaatctgattatttagcatgagaaaaaaaaatccaactctgcttttggtcttgcttctataaatatatagtgtatacttggtgtagactttgcatatatacaaatttgtagtattttcttgttttgatgtctaatctgtatctataatgtaccctagtagtcgaacatacttttgattgtacaattgtacatttgtatacctgtaatgtaaatgtggagaagtttgaatcaacataaacacgttttttggtaagaaaagagaattagccagccctgtgcattcagtgtatattctcaccttttatggtcgtagcatatagtgttgtatattgtaaattgtaatttcaaccagaagtaaatttttttcttttgaaggaataaatgttctttatacagcctagttaatgtttaaaaagaaaaaaatagcttggttttatttgtcatctagtctcaagtatagcgagattctttctaaatgttattcaagattgagttctcactagtgtttttttaatcctaaaaaagtaatgttttgattttgtgacagtcaaaaggacgtgcaaaagtctagccttgcccgagctttccttacaatcagagcccctctcaccttgtaaagtgtgaatcgcccttcccttttgtacagaagatgaactgtattttgcattttgtctacttgtaagtgaatgtaacatactgtcaattttccttgtttgaatatagaattgtaacactacacggtgtacatttccagagccttgtgtatatttccaatgaacttttttgcaagcacacttgtaaccatatgtgtataattaacaaacctgtgtatgcttatgcctgggcaactattttttgtaactcttgtgtagattgtctctaaacaatgtgtgatctttattttgaaaaatacagaactttggaatctgggtttgtgctttattttaacctctccccccaccccacccccagtgtagttccccaggacagccctttcctgctcatgcttctttctgcttgttttgttgttttgtgagggtgggaggagaggtgccaaactaatggctctttgagcccaatttaaaccaaagatgtttggttcagcctgcccagtgcattcagaatcaagatactgcacatacaaatccagatttccaactctgcacatcagaatattctccttgggcccctgagatgagctgtctgggttacagcaccgtctgtctgggcctctcctcctccgcgtttcctctgtttgggctgctccatttgctccctgccaacctgtgcccactactgaggcctgccaagcagtccaatgtctgagcatgctcatctcttcagactggggagcctcttttagcttgtaacacaggaggctggagctcacaattgtgcccgtggccctagcctg

SEQ ID NO: 52584 - DNA, 1951 bp, Homo sapiens
ttttctattgctccaaacccagcaaaagaatcttttcttattgctgaaaaacatcacagttaaatcagaacattgcattctggttgttctggcggtgtgaaagcattcaggatttggtcccagtccttcccttttctgttgttagcgctgtcttttggagaggttgtcagttgacacacttgactcttaactaagtgtgtttttcatgactttgactagctatctgtttcttggcggcttggaaaagtccttttcagctctgaattgtgcacatctatgaattcctaaaatagataagcgatgagtttattgatacacacacaccttattatatgtagagagaacttaaatgccattaagttcatttgtgaagattagtgggataatacatatatatatatatatatatatatatatatatatatatatatataaacaatactgaagcattgaaggtggtgactgtcatttttgcttctcatttgtgtttgtctacccttaggtatttgccttatccacacatccttatggctgccgagtgattcagagaatcctggagcactgtctccctgaccagacactccctattttagaggagcttcaccagcacacagagcagcttgtacaggtagtggagttgccagtagaggaactgcgaacacctgtgggcttgtgcagggccagagtttgtgtgttttgtcagtgtaggttccagaagaggttaatgtgttttaaatacccttgaatcttgtggttgtatttgtattcagagcagcttggtttgtgttttatgaatatgggtagtgaattgagccctagccctggagtcaggagatctgacttccagaactctgtcatgtacttgtggtgtcaccttaggtagacatttaatccctctgggtctctgtttcataatcgttaaatgaaataagttgatttgttgatttcttgtttttagctttgatacattctctgcttataccactgattaaataattaggtatgcccttgttttttgttggacataaatatttccagtttttctctgttatagataggtgcagtgaaccatttgtatatgtgtttgagaaaaatgaatatttactgccataacactccctccccttttaaaaatgaatatgtatattctattgtctagtaataatatgttcctgttttgtaataatagagaagaacgttactacctgtcttaaaaattgtgtgttcattagtattcatataaaccgttatggtggtaaaagaaagacaggttttaattagatataaggacttaagtaacctgcagaactggctttcacatacattttatttctcttactgtttctcaaacaggatcaatatggaaattatgtaatccaacatgtactggagcacggtcgtcctgaggataaaagcaaaattgtagcagaaatccgaggcaatgtacttgtattgagtcagcacaaatttgcaaggtacgtgctttgagttacaaggactatttcccagaagagaggattagtagtattgaactataattatcttattttttaatgttgttgttgttgttgttgttttcaaagtatatatagcttaaaagtcaaatagttttattacaaagtataaactctgagaggtcccttagtgggcttcttactctgatagagtcagccactttgaaatctggggaatatgttactaaagaatgtgagtgttacactttgatgaactgaatattttattaacttgtttgtttggaattgtgaaatgttgtttattcagtttccctttttagcacctgaaagaaaggcagtttaccatatgcatatctatatataggccttagtattcttaggatctcttttccagtcttcatattgtgcaagctcaagaatgaaatgcagtagttattcccaggttgtgaaaggtgtcttaggtcacttataagtag

SEQ ID NO: 52585 - DNA, 1055 bp, Homo sapiens
ttatttttttttaagctctaggagttggccgggtgtggtggctcatgcctgtaattccagcacttggggaggccaaagagggcagatctcctgaggtcaggagttcgagacagcctggccaacatggcaagaccccgtctctagtaaaaatacaaaaattagccaggtgtggtggtacacacctgtaatcccagctactcgggaggctgagacaggagaattgcttgaacctgggaggcggaggttgcagtgagctgagattgtaccactgtactctagcctgggtaacagagcaagactccgtctcaaaaaaaataaaataaaaacacaaaagcactcttaagaggcttttctttgttttttgtttttacaggtgtgagatctttttggttactggttattgttacagtaaatttattgttggaaattttactgtaaattggctaatgtctgaaaagactcaggtcctcatttgtttccctgttgtcattgttccacagctgctattccactttcatcatcacagattctctgttcagtagtgctttcatgtttggtgaaaagaatattatttgtccacatgtttgcttgctgtgattctggtggtgctttctttgtctccattagaatgagatggttcgggaactagatggccatgtcttgaagtgtgtgaaagatcagaatggcaatcacgtggttcagaaatgcattgaatgtgtacagccccagtctttgcaatttatcatcgatgcgtttaagggacaggtaagtgacccaggagagaaataatggaaacaaatttatttcctttgtgagcagaaaacagagtaggatttgtggcatgttctcaatatgcttaatgtactttattttttttgagactggatcccactctgttgcccaggctggagtgcagtggcaccatcacggctcactacagccttgaactgccaggttcaagcaatcctcccccctcagcctcccaagtagctggaattacaggcacataccaccacacctggctcatttttaaattttttgtagagacagtggcc

SEQ ID NO: 52586 - DNA, 1351 bp, Homo sapiens
gctacagttgtgtttgtgctgggcagtgcctccagcctccggtgcttctcatctgagcctgcagcttttgggctctgaactcactgagcccttctcaattgaggggttggttggccattgtctggcaatgatgacccacttgccctcactgagaacaaagttcggtaatgagaatctttgttaatggactcaagttctgagccagacaagacacccaccacccctgagtcaagctaaaccaatccaaaccactgcactggtgttggcagtggcagttgaaggctgaagaagtccaaagtttttaaagtgataagtttcaaaggtatgtgccacgatgctggtgaagggagaaaggaatgttggagatagagcaggtctggagttcatttattcagtgcttagtactagagatgtagcattaataagaaagtataagtaattagaagcaagtgtgaagctattttaaattttcttttaatgttcagatcattgccaattttaatttttcttggattttcatagatagttgaattgttcttctttaattttcttgtttttctttctttctttttggagacaaggtctcactctgtcacccaggctggagtgcagtggcacaattgtccttgttgcagcctcaacctcctgagctcaagtggtcctcccatcttagcctcctgagtagctggaactacaggcatacgccacttcccctggttaatgtgtgtatttttggtagagatggggtttcaccacgttgcccaggctggtcttgaacccctgggttcaattgatttggcctcccaaagtgctgggattacaggtgtgagataccatacccagctgtcgttgtttcctgtgttatatttttgcacatattttttctggtcatgtttctctgtggtgtcttgttctgggcctgacttatgcttcctaccctttattattttactcttctctagatgcaaatttgccattttgggtaaaattaactcatctttgttggaatttttatttcttctggatcacaaaaatatccagggaagccatctctccttcattttgtttataagtattctttgactttatttttgtataagcttcattgtcataattattcccacaattcccatcattcctataattgtattttcagagtaaattattctcttctgggcccagcacagtggcttatgcctgtaatcccagcactttgggaggccaaggtgggtagattgctagggcccaggagtttgagaccagcctgggcagcatagtgaaaccccatctctataaaaagttggctgggcatggtggtgcactcctatagtctcagctgcttggggtgcta

SEQ ID NO: 52587 - DNA, 1548 bp, Homo sapiens
atgccaatctattttggaaatgtgtttcgaaaactggtgtccccatttaggacccagcacattatttcagattgttataatagtttcacaaaacgtgtcacttaaggaggaaataatccttgtaaagtagttttagcaggatcacaataaaatattgccaaaaacaaatttttctaaggttcttagagaattgtctttggacaccgactccagtatgtttcattatcagctagggtcacaagaattgttaaatgctgcttcttggctgatcgtttggccttgatttcttgttttacttctgttaatttgaataatgttcacttgttgtatcattgtctttggaaagaatgagattgttaggttgatgtcttttccctctagtgaggtaaaatttcagagaggcagggacttttttgcttaccattgtagcccttattatctggtattggcaaccctaaggtgtagatgcagaatggcacaaaacttcgagatgaggaggagtctggtatggggaggaaaatgctggaattctgcacattacctaccacaaaacaaatttgtaaatgtcttaacatctcatcctgtttgatttgtatgaagatgaaaaactgacgtactcaagttttaccttcccaagttttttcatgaagacttatgttttttcaccctgaattcttcagctttggactaagaaaccaatctaaacatgacttttgtatttttgattttagaatgactttgcactgccgttttgtcacatatataaaaatactgagctttctagttctggaggctgatgcaccttggggtgacaaaatgtacaatggattatagccatatgatttggaccaagcttgagaacttctctggatcttagtttcccttgggagaatgaggaggttggatgggctgagaattcataaagtctcctccaatctcacgattatgtgattgaaatgaaaataataagccaaggatggaaaatcattctaagtagaattttaacattgtgtagcctcacttcttgattctactgatttttcccctcccaactctgttaccttgtgtaaataggagaaaaaaaaatcaattctcttaatgatgtagaatactatttcaaaacagtgtgtccatgtgtgctttggcagtaagagtgtaggattcttttttttgacacacagtcttgctccattgggcaggctggagtgtagtggtgctatctcagctcactgtaacctctgccgcctgggttcaagcgattctcctgcctcagcctccggagtagctggagttaacaggagcgtgccaccatgcccagccaatttttgtgtttttagtagaggcaggattttgccatgttggcgaggctggtctcaaactcctgacctcaggtgatccaccctccttggcctcccaaagtgctgggtttaccggtgtgagccactgcacctggccagattcatttaatagtatgaattaatgacagctttgaggaattatgtgtttgcttagcagatattaatagtgaaactacctattgttgggtat

SEQ ID NO: 52588 - DNA, 1601 bp, Homo sapiens
atggggtctctctctgttgtccaggctggtctcgaactcttaggctcaagccatcctcctgcttcgacttcccaaagtgttgggtttacagacatcagccaccacgcctggcctgctatatgttttgatacgccttttggtcatatgtttgttttatctgtgattcacaattattcccttgtcacccatcaaaacagcattatcagtggcatgaaggttgttggaactacagtcatttcaggctgtgtcacaatagaaattgttaagagctgtccatttgtaatgaaaactcgaaaatttttcatttttaaggcatctcctgtcttgtactcattatgtctcatccatggcctggaatgtcttagcgattttcacacttctatttagtggcaaaatcattccttcaaagacagctttttcatgggatcccctgtataaaacagaccaatctggatgcctgattttttagagtgggtttcagatggaaatgggggttattcaagaatgaaaggaatctccgcagatctcagaatggaaaaccactccagtctgagtttgttttgcattttctgagtttttattgctggtgctcaggtgctaggttcacctggtcggcacatttcttcctcatttcatttactaggggccatgctaactgttgctccagccttactagcagtctaccatcaacggtaaaagcattcccttctcaatctttgtgcaaaagtttccttccaggttgttgagttgacccacgaaagtcatgacgctaatagaattgtcttgacacaaaaacaacagcattgaagaaatcagaaatggtgcaggctttcgggtgtgggaatgcttttttctctcttgaatgaagttgctgaagagtggtcttaagttatcctgttctgtaaccaacaggaggactcacgaatggcagtggaagatacatctctgctgctccaggcgctgaagccaagtaccgcagtgcaagcagcgcctccagcctcttcagcccgagcagcactcttttctcttcctctcgtttgcgatatggaatgtctgatgtcatgccttctggcaggagcaggcttttggaagattttcgaaacaaccggtaccccaatttacaactgcgggagattgctggacatataatggaattttcccaagaccagcatgggtccaggtgagtacttggctttggcactttaaggtacccgaaattgtaatgccttaactgtcttggctcagatgggtatctacttaaataaattgccatatagtaattttttaaaagcgtgcctcttagtttgcatcacattatttcatagggatttaagaaacaaacatgaacacaaagacatacatacacttcggctgctttaagcattatgaagaatcttttgctctcaaagagttgctattcaaatacaagtttgatctagggtgctgaggagtaagacagctctaccacctttctttgttgttccactctgtagaagtgacagtctatgtagagacgagagaagaaactattatagaagacagaatttggtttggtttaccccttcctgttgggctgctgcagtgggcttcacagaaagcga

SEQ ID NO: 52589 - DNA, 1943 bp, Homo sapiens
aatgtccttgtagtatgtacttgtctgacatctaaggagataagaggcaaaaatcaaaacttcacggtaaatgtattaaccgtttttgtaggcgtattaactgttgttcagtccagtcctgtgtgtggattagtcattatgtttttgcccataataacagaacatccaacaaagagtggcttaaacaataagtgcatttattggcctttataactggaagtatagtggtagggcagtgttcagggttggtttgtcttgtcattaaacattgtcaccaaggacctggctcctttataatttaccttccattttggtcagtgaccagtttcttaaaatccctttaaattgttttcaaaacattgtgtgttcgccccataccttcttctttggtatgtttgttgctattgccacactttccccatacctgccaacctaccctgttaccacctctttgtccatttctccccagcctcagacaggtaagacagaattgtttctgaaatggaataaagaacagtcttggccgggcgccgtggctcatgcctgtaatcccagcactttgggaggctgagatgggcggatcacatgaggtcaggagtttgagagtagtctggccaacatggtgaaaccccatctctactaaaagtacaaaaattagccgggcgtggtggtgcacacctgtagtcccagctacttggacggctgaggtgggagaattgcttcaacctgggaggcggagattgcagtgagctgagattgcaccattgcactccagcctaggtgacagagcaagactccgtctcaaaaaaaacaaaaaacaaaacaaaaaaaaacagtcttatgactgctgttttcttttcagttaatctcctttcttccttaaaaaaatcacttttcatttgaattcagaaatactgtggaatttgacaagaatgttctgtagaacaagaaaacttgatgaaactgagtcagaaaatgaatttcagaccccgaaagggccttgaccctggagtcaagagccctgttctgaattctggccatgacaattttgggttttgtatctttggatgaacatttcacctctctgggcttaattttctgttacataaatgggagttgcaaactccttttccaaaatgccagtgagaattccagagaaagtgtatatgaaaaacttctaacatagaattgggcttaggacaaatactaagtaaatattttacaaatttctgcattgagtcattttcttttggtttcatcactttgattgagacccagacttttgaagctgggccctggaattctgtgaagtccagcctgggtatctttttgtggctaccattaaaccccaaaccagacatttattaagacttgtgaagagttgagaagtagttaatattggatgacttttctcgtgggtttttaattgttattcatctaaactttttgtggtttatgtaatatttcttacctcctttggccttttgtttaaaaggaggtgggggaaacaaccccagaaaggcttggcatcttttttctattgcaatcaaaatttaaaatgaaataaaataagaactgttttttgttttgttttgttttggtttggttttttttttttttcagatggagtcttgctctgtcgcccaggctggagtgcagtggcacaatctcggctcactgcaagccctgcctccggggttcgccattctcctgcctcagcctcccaagtagctgggattacaggcacctgccaccacgcccagctaatttttttttttttttttgtattttttagtagagtcggggtttcaccgtgttagccaggatggtcttgatctcccgaccttgtgatcggcccgtctcagcctcccaaagtgtcaggattacaggcatgagccaccgtccctggcctgttattttgttattttaaaatactcataatt

SEQ ID NO: 52590 - DNA, 1074 bp, Homo sapiens
ttcttgagtcagttttgataatttgtgaccttctaggaatttgtccatttcatctaaaatgccaaatttgttagcataaaatgtactattttaataagtgaaatctctctctcaatcttcctctcccatcttccccatacatgcatatatacccatgaatgtgtacatataaaatatgttgtgaccctgaacaaggcagatgttgcaagtatttattttgtttgacttatgtgttacatgtctcaatttaacagtattattaatcatagttaataaatatgaattttcttaacaactagatctgtaactctcatttgtggtttatatgtgggttacatagaaaaccttaaactctcacctataactgaaacatccatgtctagtaaattctacttcccatctcaaagagaaaaaaagtaagggatgtggatatgagtgtccccaaagactgactgtaatggtttcatgccctgcctacccatggatctctttatcctactcccccgccctttctcacccctcatttcttagaatgcttctccatgcttacagttttttgcacaatcccctggctgtatcatttaaaaactcttaaacatcaagaggtagcaggtacagttttttgttgacgacacccaggcttttcatttgccctggaagaaaagtgttgtggttgttcattacttcagaaatgaaatatataatagtaaaaatgagctcaaaagttcataagctgtctagggcaaaaaaatgaaagcatttataactaaatttcaatttagttctaaacttagttctaaactaaaaagcatttagttttattattgtgatagaagtattatcttctcaaaatgtattctttctgtcctttatcttcagggttttatacgccttttagttttttaggaaaagcacagctcaaacagaaaatacctttctctgtccttgcttgaactgaaggagaagtttctaagttactggccagtaagcagtagtcatgtatgtgtttaggtatttccccattctgaattgaaatgaatattttgtgatttctcacttggttctttgaaggag

SEQ ID NO: 52591 - DNA, 4180 bp, Homo sapiens
gcagaaatccaagtcattattttaagataattttagaggaggggttgttttttgccacaggggcaggagtggaggacgtgggaaagagtagtgagaagtgacaaaataatacatttggttgggaggagtaatagttttttactttaagtgtttatatttatttattttttaattaagaacaataacaggaacatctagaagacagcagtgtgctaaaataggaatttgaaggatgtgtatgtgcattacatggttctagaagaaaccctcaacatagatatttatggaatttaagattttaggaagtagttgtatttaatggatacatttgatgtttataccccttttaatctgtatactcttaaaagcaaccagcatagtgaacttgttctagtggtattttgagttcaaattgaaagtagaaacagaaaatagaagcttcatatgaagggatcaaagacagatttgtatggtttgtgtctgttttgaaaagataggcagcattaaaagattttttgaaaaaagataaaaatgtagtttggaaatgtggccagtccctttcatagccaaacggtttgctttcttcttcatagctgttgcagcagccgcagcttcagcaaatggagcagctggtggtcttgctggaacaacaaatggaccatttcgccctttaggaacacagcagcctcagccccagccccagcagcagcccaataacaacctggcatccagttctttctacggcaacaactctctgaacagcaattcacagagcagctccctcttctcccagggctctgcccagcctgccaacacatccttgggattcggaagtagcagttctctcggcgccaccctgggatccgcccttggagggtttggaacagcaggtagaaattagactgatatgctcttaagactgaattttaattatttttacaatccttctggaatactggcaatgcatggaaccacaggcagatctggaccaagccttgtgggaatccagccatcccacataatctgtgagatgatagactattgaaatcaagttatacagatgggacctatttcaatccatgctcatgtggctacttacttaatcagtttctttcagggatttgaaatctagggaagatttttgctgtatttgggaaaaatattgagggaactgtagaaattgatatcaaaaactgagggaggaggacttactaaagatagcagagctgaaatactccacaattgagactgagccgagttcttggcctgcaggccttaaagagttacaagttttcttcagtcttttgagtagaatttaaggtagacatgtggaaaattaggaggaaggatattagaccaagatatttttaatgttttgatgaaaaaagcaggagtgtagtatggtgaataatgggataattgcagagattataaaaaacaaacaaacaaaagtgatccctaaatagaagggcatgtgtgaaagaaagtatcttaattggaattgagggcagcattaactctcgattgaacccactgagaaaacaggctttcatatagaagtcttgtgtagtggggcagtaccccatttacaaatcttttttctgtatcccatttttctacttgaaccttttcaattgatgaaaggcattcttctagtccattttcttccaccttttccatagttcatgtggccgtcagagctttttaaccctcccttatcctataatatacgacaccataggaaggtaaatttggcatatgtttgatggtcatgttaacctgagccatgtcctctttattacttatctgcccctagtactgctacattaacagttaggctgtctctgctgacaaatttgcggtggtaaggagtctggatcaaagtgttaggaacaggtcactgggcttgttcttcgaagaacaggcctgttcttatctgcattgttttaattccattttagttgcaaactccaacactggcagtggctcccgccgtgactccctgactggcagcagtgacctttataagaggacatcgagcagcttgacccccattggacacagtttttataacggccttagcttttcctcctctcctggacccgtgggcatgcctctccctagtcagggaccaggacattcacagacaccacctccttccctctcttcacatggatcctcttcaagcttaaacctgggtaagaaccattactctaacaccaccttgaactctagaactctcttgccaccgatgacattacaagaactttgcataagcaaaggacagtccctttatactagaagtgtcctgggtgttctgtgccttccgtaaatacctcatgttattcaggctgtacctatagatagtatagcagttttggctttattatagtttgggtacattccctgtatattcagttagctttagtatgaacattttattctttggctacctgtgagagtatttcaatgtaaacaatataaacacaggttcatttcagtgaagctaggaaacacagagacagaatttaatcacctagtatcaccacctgaaataccaccacaattaatattttgccttatttcctttcaaaatttcccctctgctatatgtacatataatatcttgctttttcacaaaaagcattttatttttaaaattttgccatattttaaaatatttgtaaatataaactctcaaaccatatagtatgttaatgaggagatgtatatttccctattaaatatttagattgttttatgcatgggattttaaaatattaccatctagattctagaaaatagggagagaaaaagaggatcccaagcagcaggctataagaatgaaaagaaaattatattaccttttttttggtggcaaatctctaaatctttcaggacatgggagatgttttcttatctcaagcatggtgcatactcctctcccgcagttatgtattaagtttaaagtactgatttatttgctagatggggaaaattgaatgctagatgtagagtcaccatataatgtatcatgcaaaccagaacacttttgtgagtggaagggggtgctatgaataattacttggtgatgataggcctaaatcaggactgtcctgggcaaatcagcacatgtggccactttaccaagaagattctgttcttaaccagcaagattaaaagtggcttcatggactcagaagtgagaacttgactaaaaacaaacaggatgccttcgtttggataggcagactagaaagtgatttataagattcaagagaagtctgaagtgggtagggtaatagacttattattctagacctaggagtgatagctttgagtttgaaagaggcgagtttcaagtcaaaactatgtttatatatacacattggcatgtgtgtgcgtatcctgaagttttatacagtaagaactttagttgtagaactcattttctcaggttatatatgaacatcactttataaaagttactgtgacattcctgattagtaggtccataataggtagacagggggatggggtacattgcacaacagtgtttcctagtgacacaatgcctggctttaaacactgggggttaatgcagaatctggagagagctgtcaaactcccagtttgatacgtggctagaaggaaggaagtaatgttcactgacctggcatttacctgctggtgttaatggttttgggtcctgtacatacaacactggaaggtataggtattatttcgtgtctcaggacttaaatatcttgcctagcctgtgtcatctcagatttgaacagatttagaatcaagccttttcgactccaaagcatgcagtttcagtgtatatcctgttacatgatgtactcaggatatcttgaaccagtccattaccaaatccagaaatatgtatcttttaatttcttggtttaaaaacatgtgaactatgtcatcccatactacatactaaataaactgaacctgctaagtttttttttcataaagagccagatagtaaatgttttaggttttataggccagatggtgtctgtagtgaatatttaactctgctgttgaagtgtgaaagcaaccacagacaaaatgtaaatgagtgaatacgtagctatcttctaataaaaccttatttataaaaatagatgggccaggcatgatggctcac

SEQ ID NO: 52592 - DNA, 1526 bp, Homo sapiens
aatgtgtttaaagtaagaatggtagaatgaaattccactctatgaaatgttattaattgaatttatacgctaacagctgtgacatataaaaaccattatagggaaacaatttacaattaagttttaaaagttgacccaacctgagcatagggtaggtcttctccaatgaaaagaaagtggttgagttatttctgtcttcctttcccaggttctccgtggaggagccagccaacgtcctttgaccccaaaccagaaccagcagggacagcaaacggatccccttgtggcagctgcagcagtgaattctgcccttgcatttggacaaggtctggcagcaggcatgccaggtgcggctgcattgttattcctaatactttggcagggaaaaaggctgcacgtttgaggtgattacagaggggaatgagcagtgctttcaccttgcttaggcttgtcatgatttggggactggcaaggatgatacacacttgccctcacttagactatagttcactgatgagagcattgttctgagccagtcttaagtcatattggaggtatctaaatgtccatgcagcttggaatatgtggtttttccttggtggattatctgttttctgtttcagaatcagggatagatggagtggccaagctagtttacaaggcttagtctttatgttgatgtttttgaacagcatgattagtgagaaatttctggtataccttgatagggtcatcccttacgtttttaaggtttctcttaaaccaatagtaggggtcctttttagctgtctacctctgagatacatgtttatatagatacatcttgaatatatgttgtttttggttcactgtcagctggtttggtgctttgcatgggattagatgtactttgatgttctacatgtgaaacaagtctttgagagatgtcagcgtatttttatggacctttactgatcatagagcatagccaatttaactgagccatttatgaattcaataaataactttaacctgtttcatttgttttttagttactgagcctttgtgtgttcttaggaagtcacctgcagtttttcatatggcttaaactgggatttggagattctatctcacataatattgaaagatcatgttatttaaagcctatctaggtttttcctgctattttgcaggatatttgttcttaaattattatgtagtatgaaagtactatgatttttataatcatttgtagcctctgtttattcaactatttaagtgatggagccagtatataaatctggccaattcaacctcaaagctgagtttgtgattattgacaatatgttggtgcccaggagatacttgtttgtttaacatatacatttctttgttggcttgatattcctaggttatccggtgttggctcctgctgcttactatgaccaaactggtgcccttgtagtgaatgcaggcgcgagaaatggtcttggagctcctgttcgacttgtagctcctgccccagtcatcattagttcctcagctgc

SEQ ID NO: 52593 - DNA, 1551 bp, Homo sapiens
taaaatagttcatagtgtaacagcttttcttagcaacacctttattctgtacccaggtatagtgtttcagtgtgcacccttgcttgtaaacagcttcttaatcttttctaagcccacaggtatagaaaacaccaaattagaaatgtcaaaacatatttatattgggcagtggtacaatttgacttatttgtgttttggaagcttaaaatgggggaaacaagaatatgtgtctatttattttggcttaatgaattatgtgtttctccagaattagctgtagcatcagagtagctgtaatatttgaaacagctcttcagaacttcagtcagtgtaaggaaggtttggttactgttaatgaatcaagttggaaatatttaactctctgctttaaggaagttcaacttggagatatgtttcagcagatttgaagaattgactttgagcccatttcctggttagcaaatgtgtctttggtgtttcttgctaccagcttcgtcatagaattctataattagatttctgccacacttgggttgatatctgcataattttgttatatctctgttgtgtactttatgtggccgactgcagctgtactttgttgccaaggaaaatgaacagataatttggattaaagcagaatgcttaatttttttttttttttttggagacacactctttgctctgttgcccaggctggagtgcagtggtacaatcttggctcactgtaacctctgcctcctgggttcaagcagttctcctgcctcagccttccgagtagctgggattacaggcatctgccaccacgtccggctaattttttatatatttttttagtagagatggggtttcaccatgttggccaggctggtctcgaactcctgacctcaaagtgatccacccaacttggcctcccgtaatgctggggttacagagaatgcttaattttgtttaaggttctcaacaggtctgtaacaagtcaaggtgttgtattttttgtttctatttgtgttcaacgttgacttaaatttaaaatttcacatatcagtgtctgaatgtagttgtgttgaatgcctttgtgactttaaaaatagaaataggggccaggcctggtggctcaagcctaaagtcccagcaatatgggaggccaaggcagatggatcgcttgagcccaggagtttgacaccagcctggggcaacacagacctctaccaaaaaaaaaaaaaaaaaaaaaaaaattagtcaggtatagtggcatgcatctgtaatcccaggtattagggaggctgaggtgggaggatcacttaagccggggaggtcagggttgcagtgagctgagattgcctcattgcattccagcctgggtgacagagagaccctgtctcaaaaaacaaaaaaacaaaaaaaacaaacagtaacagcaactttgaagttgcagtggaggttcagttgagtgtctaggttttgttgtcagactgatagatgttctttttctggagttaatgaaacaacagcactccgttaaatcaccttaggtgccattcttatcat

SEQ ID NO: 52594 - DNA, 1616 bp, Homo sapiens
ctttcccttgagactagatttttaaaagacaggcatctttgttatttgactgtgtgttgcacagttaccgtcaccgtgatgggaccataaatgtatgatgggttgaattcaacattaggacaaacaaaatgtcttccagtttagatattcactgggggaagatccctccaagtcaagttcatcatgactaaatattacttcgaaattttactacttattatgtaacatgtaatttgcaattatgaacttaaatgtagcctagcatttcttagattttttaaaaaattgtttacattttggcatggttatgatgggaagatagttaacatagggtcatctggctgtccgtggtcatcccccttttgggggaaaacagaaagctcttcgtaggagaatgatctctgctaaccatcattaatatttattgagcacttaacttttgtcaggcattgtcctgaatgcttttctttcatatgatttttcagatgatgattttagagattagaaatttgtggctcagacagctgccttatttgttgttttttgtttttttgagactgagtcttgctctctcgcccaggctggagttcagtggtgcgatctcggctcactgcagtctctgcctcttgggttcaagtgattgattctcctacctcaacctcctgaataactgggactacaggcacccaccaccacgcctggctaatttttgtatttttagtagagatggggttttgccatgtttgccaggctggtctcaaactcctgacttaaagtgatccaccctccttggcctcccagagtgctgggattacagttgtgagccactgcgcccaacctagagagaactgtctcatttgaagtcacacaatttaaatgttgtagagttggggtttgaaccaggtttaactccaaagctcatgcgtatgcttcactatagtatatagaatgcctgtgctgtctgtcttgaattgtcttttctgtactttctttagaagtctttactaatttatgttacttgaaacaaagaactggtcttagggttgacactgctgctgtcactgagatggtagttcggtgatcagaatcttgttttttgtatatgtcagttgagccagggtgaaaatgagttaatactttcacaaataacaggaaatgttaactgttaaaactatgaaaatgtgtattctttgagggtgtcagtcacacaggaattgaagtgggcatcctgatgtgccaagctcagttgatttgccctgggatgttttcctaaatttaaccttaggccatgtgaccagcgtatagtagtagaaatgccagttgagaaaatttagagagtaatgcagatgttaatggtaatagcagtccttgcccagtagaggctcgcttttgttggcttttgggagagcgttgggactattattgcaggttgcaaccactcattcaaggtagatacggctgtactcccaacatgtattacaggttgagcatccctaatctgaaaattcaaaatctttttgagtagtaacatgacaccataagtggaaaattccacacttgaccttgatctcatgtgatgggtcatagtcaaaaccacaggcacataacacacagtt

SEQ ID NO: 52595 - DNA, 1794 bp, Homo sapiens
ctgcctagacgtttcttccccctggaccttcttaaggtctcttagagtgcattaagtataaacaagtagaagtagaatttttttttttaatgtgtcaaaatggcatgattgagtagaaaggagatagctaatcttggatgtgataggctatagaagaatatacttacttccaacctaaataaataaaggccaggcataaagtccttgggtctgataatgtatagttgtagatggtaatctttataaatacccatacattttatttcatgaaaactgtttggaaaattgttttaaatagaaataaatacttcatcccattttaatattagtctttaaaattgttctattgtaggctgttacaattttaataatcttttagaaatgctgaatttataactatatacagttttaagttaaatatttctttagcaaaggtaaaatttgactatataaacatttcattataatctttagtatagcagttatctttttaaaatttctctttaccctcaacctgtcccgtcttctcttttttcattttttccttatctactgtctggagtgaatagcgaaactgtgtaggtatttgatagggctgcagttttagtcaagtttgtttttactgacaggtatgttttcagcaggtttagctcccgctgcgtttgtccccaatccatacatcatcagcgctgctcccccagggacggacccctacacagctggattggctgcagcagcgacactaggtgagacattctgctgcatgagggattttctcacctgctgaaaagtcatttgagatgggcgtgcattctttatactctttcccaaatccatgtctccagtggagattatccagattttcaatgccatctacctgccagcttaatatctctccgtagctgtatcataggcccctcagacttgaaaatgttcaaaggcaaattaatcacatacgccttgcatatgtgtttttgatccatggagccaccagatactcatttatattttgggaatttccccccttgcccagatctcctaccacctctagtctatcatatagttcaggtacttttactggtctctaatgtatttataatttccttgcctctctcacctcctcttcccctctaaattgttcaagaaaatgatttcaaacttagatcttacctcttcatctttctgcttaaaccttttattgatttcccttttttctaccctagtatgtcatactacagttattaccaaacatggctgatcattacaacttacttggagtcggggtgggggtggtggtgttttgttccttggaatcagtatttttaaggagcttccagataattctgtgggttagctagggttgggacccacagtatatagggctctatcaccatgcctcatacatacaggtctctacatatgtaccacccaattcccttcctagttgactgccattggctaacaccatacattgtagcagtacagatctgattttagtttgctgcagatactgcattggtttaggcccctgtctttggtcactgtggtcttctgtagtaagctctttttcccattctttgcctgtgaagtgccctagttggctaattactgcactgtttttatttgcttgtgggatgtatacatgagttttttcccctctttttttttttctctttctttctctctctctcttttttttttttggagacaggatctcactctgttgccgaggatgggatgcagtggcgtgaatacagttcactgtaaccttgaattcctgggcccactggattc

SEQ ID NO: 52596 - DNA, 2452 bp, Homo sapiens
cacaagctgatatgttaaatgttgcaaaaggttttaggccaagaaaattccagaaacccattgaagaggcaatacatgtttagtggaactatgagatgttttcacaaccttggaaataatttaaaagtaactttctactgttttacttatttcccactcctggctgcccctcttgggtggactgcctcctgttggagggaatactgtgtgagacacatctttagtaaaacagaaatgtgaaaccaacttgcagaaatcacaagcacactgttaccaaatagtcttgactggctcccttcctggaggacaaatgttttgataatgtctgtcagtagattcagttcccctatttctttttaagacttgatatttagtaatactgtttcttttttgccagcatcgcagtgaagtttttctttaacttttggggaaaaacaaaacaaaacaaaacaaaaaaaactaaagtatttttgaaatctgtgcatggttacttttgacattcatactccaaaagcagagactaagactaaagagttaacaggtgaaattggccaatatcttcaaagtattcactttttgttttcttttaatctaaaattagcctcatgtttgaggtgtagagggtagccaaatctcaggataaaatctctccaccacctaagataagagtaagtccagtcatgacaataattaagctgagttgctagaatgacattatctcctaatgtctgaaacaatcaggtctctttatgaggacatctgtaattcaagatccatggtgtctgttaaacatcatccagcaatgtcagctgagctgttgaaaaatcctgtaggaagagcaggtaggttgaaggtcctatccagggaggtcacttcagtaagtgctttcagtctgattttagcaaacattgaagtcttcagtatgactccttggaaggaggcccattaaggtgatccacaaattaggttactggcatcccctttctttataccaatactattcatactaaaatgtaatctccatcagggcaggattatgtattgttttattgactgtcatatccctagttccttgcacagtgcctagcaggtatcatttgtttcataaatatttgttgaattaatgagtgaatgactggttttgtattaacgtagaatcgtaagacattcttagtgttgttaaggcctttgaactttcttttctttagaactaagaagtgtgctaggtgtgagctcataatccaagttttgttagtagctgctgtgtttctgctgttttatttttaacatataaagaatagtatcccagaagactctggagctcccgaaagttgggcaggtgtcttaatttactcattaggataagctactagttgaggaagttattcaataccattttcccaggaagaggcagctcagaggatgaagtgaacacttttcatattcttctccaaaatgtgagtaggtgaggattaattcagttatttgtggggtcttgaaagcactgaaaggagattcagcactagggacaatgtgacaaatcagttggtagtacatttgtctaatttttaactttgccttggatcaggcaggacctgtagacctgataatctttagggcttttgaatgcatatatatgagatatatagatagatatatagatatagatatagatatctcatatgtgtgtgtgtgtgtgtgagagagtgtgtatttgtggttcaggggacatataatctgtgaagcggtcagctcatggaaccaggacacagtaaattgaagtaaagaaagagagacagggagaacagaagtatgaaacattttaatcccatgggaatgaagtagagtgtgagaacatttattgttaaggtgtcacgcctaaacaagtgcttattaaaatttttagtcagagaggtttttaaatgattttgtaagacagtttccctaaccacaccgtgtttttcctcttgcctcagctgttccaaagacctaatgcgcttgctgtccagcagttgacagctgctcagcagcagcagtatgcactggcagctgctcatcagccgcacatcggtaagtccttaagcccatagctctttcatgataggtgtggccgccattttaggataactggttgctgtgaaacccagtaatttaaactgattataaaagttcagacaaatccctcagacagagtaagtggcctcttccttttgtccagttgtctccagccacattagttttgacatagcttgtagacccgcatcataacatttcttcagtgttcagccattgccctacctcagatgtttcaggatttaaagtatttatcagagtaatgactggtgactaccattagctctttcggtaagatttggatgacattgattacataagttgtggttctatagactaatatatcagcttcttattttgtgaacaaacagtataaatc

SEQ ID NO: 52597 - DNA, 1001 bp, Homo sapiens
cttgaacaacttgtgaaatctacccaagtgaattataattaactgcgtcacatttatcattatactgacctttgagcatttcccccaactcacagtattttgtttctcagttatgggatattcgcttgctttgtgaaaaacatgaaaatgttagcagagctcagtgctttgcccagcagatggcatttgtgtgagtttttcaggatcctttggaatctgtcacttgccaattacccaatttgttttgaatactctgtatttccagttaatattgcaccatttacataaagagaatgtgccaaaattgctgtaatctgttctgtaatcaaatctgtctgctgtagatgtataatttacttttgttaagttgtttactgcaaaatggtctcaagaaaatccttttctattcaccataattactaagatattaatcagctctcaaacataggctatatggggtctcttgtaaggcttgtttgcttttagttaaaagtaatagttcctgctttcagaatgttttaatgtggtggtgaaaaccacaagctaatgttatatggaatgattacttttgtggtattcccacatgccatgtatttccgtgtatatttacagatacagtacacatacataaaatgacttacatgtaatattaaaaaaatatatagcccaggtgtggtggctcacgcctgtaattccagtcctttgggaggccaaagtggaaggatcatttgagcccaggagttccagaccagcctgagcaacgtagacttcatctctacaaaaaagttcaaaaaaaaaaaaaaaaaaatgccaggcgtggtgacatgcgcagctacttggaggctgaggcaggaggattgcttgagcccaggagtttgaggctgtagtgagccatgatcacgtcactgcatttaagcctgggtgacagacagagtaagactccgactcttcaaacaaacaaaaatatatgaagtgaggttaagtcagatggaatggcagtg

SEQ ID NO: 52598 - DNA, 4356 bp, Homo sapiens
gacatgtaggactacctctaggattaactgatctctgtgtttatttatttattttttaaagaaaggtcagctgtctgaactacaaaagaggggctgttagtttcccaatcttgttaagttctcccttgtggcggaagcagtttgattgaccatgaatttctgttactctttagtagttttgtaatagatcgttaatgcagacttctaggtttgaaaggttagcatctcattttgaagtttagaaattctatgtagggaaattagcttatggtctttggagattattatgccgtgttgtacctttagttattgtcataaatagctgatactaaatgaattttgattgatagagtaaaaagttaaacatatgaagtttccctttaagtctcctgtgtcgtttatgaacaataaatacctttaagggattgtgtgaatgtgcatattcatataaggttaaattaacaaaatatctttcagagagagtaaactgaaagtgtacactcttctccgtgcagttcttagtaggtatgcctgcctccccatatgaattgactctctgtgctttttttctctttatggccatttttggttcttagcttccattcccagtgtaatgcaatctaacactttctgtgttttttaagaagggtttgtctcagatttcttatgaacaaaaatatatggttctctcttttttttttaaactgttctttacttcataatcagagttgatattcttttttgatttattgatctttggtttcaaaataattttaccagtttttggagactggacaattattagaacttgaacagaaatgtacttctatgtacccacaagtagttagcatgattacatcatagctaccacttattcaaaaatataaaaccaagggtgccctcaccatatatctcagcagttattgaaagtaaacattattttgaaagttaatctcttgttggattcaggtttcctgtgcatgtcttggttgctgcaacatagaggcatttttacacagacataccactgtcatgatgtgagtgttgttttatctcatgggccataattcttttctgagtagtttgttttatacattcttgtaccgggggccctaatagcatacctgggaaccactggcgtaagcctcctatatctttaagaccctcaatctctcggtgttcctgtataagagctagtagttgtcaagaaggaacgattccttttctattggaaattggtgtttgtttcttacattttatcccttatccttttagttttcattacattttattccacttttcatttctaatttacgtccacctcatttgtcaaggttcagtactgtcaccttcctttcttagtctccaaaccaaaaagctgtcatgtctgcctccctagaactccatagcattttgtgtttcctttaagagaaggtgttaccatgttttgtcttgtgttgtgattactcgtctaatagtccttgccagattgtaagctccttgagggcaaagactgaaccttaccccatttcctctgcattgctttagcagaacaaggtttcaggggactttcccccatccctattataatatctcagtgcatcctctgtacgtaatatgcttcccaaaattaaaatttgaaactagcctttcaggaggtctggaggctactctttgagaactaccgtgttttctaatatgtgtgtcctttggatccagcttaccacttatatacaaataactatgctgtataatatccaggaaagttacttcttggatcagaacttaatattttaaggctcactctgttgtcatctgatcagaagccatggtctctctcatgagaaaaatgtacataattctctgacactcagttttgtagataacttcagggagaccacagatttgtgttctacagatacagccttctgttcatatcttttgttctttgtagccaaccatatctttcatgaatagagtaagattccctttcttcttcttgatttgctctcaggttagtcattgtaactcactttatcatttaaattgtgcatggaagtactcgatgacaagtgatgagaccatttatgcccatattcttggaaccctgcaactatggagagtgtactctggtctcttgggaagggaaggactttgtggaagaagtggttcttttttttttttttttttttttttttttgagacggagtctcactcttttgcccaggctggagttcagtggtacgatcttggctcactgcaacttccgcctcctgggttcaagcgattctcctgcctcagcctcccgagtagctgggactacagacacccaccactgtgcctggctaatttttgtagttttggtagagatggggtttcgccttactggccaggctggtttcgaactcctgacctcaggtgatctgcccgccttggcctcccaaagtgctgagattacaggcatgagccactgcgcccagccagaagaggtagttctttagctgtgccttgaaagacttttttatatacgaagaaaatgagaattctagtggaggaaatagtaaaacagatatgtgttcagtagataatgtagaagtagtcagtctggttggtggttaggttgaagaaaaataactagagaggttgaagagatggtgttgtgagtcttatgctgtgttgcctataggaaatgagaagacactttaaagcaggaattacttaattattatagtttgttttttttgtggttagtgtgagtttagcagcagtttgaggcattctcttactcttattattcagttaactgttgactgttgtgtccttctaggaaccttgggttctgaatgaaacagtagtggaatatttggggaactaagtgctaaattaatgggttctgaatcttatcagacaaggggagggctcaatgaggacaaaggttgcatgcaactgacttgaaggacaggtggaatacattttgttgcaggtcagagcagaggtatggagctgggaatgactgtggtgtagtcctaggctgaagagagtagaagacgagtgtacaagaggacaaggaggtacagatgcctttgaaaattgagtcccggaggccttgagaaccagctggaagtctcagacagtactgatgattgtgagggttggaccagaggtctagtgcagcacatacttttctgcacattctgctctttttatcttggctttctgaaataagcaacaaaggtgatcatttttcttggtttagagtttgctgcaaatggtaggtttgctttatttgtgattttttagaataggaatctggtttggaggttgacaaaataagtaattctctcttttgttatattttctttcaatcttggctttgatttggtgtaataagctggtttcatcaaacttattatcagcctataatgagatacatgacatggagcagcctgcaaatagggaaaaggtaattttcatttaattcattgcaaacttagttcttgttagctgtgacatgggattttgatgagtcagttggttgtctggtcactgttaatcactctgaatttaacccttgtaaggtttatttataagagcaggagtttctaattcttttttgtttgtttttgtgtgtgccgtgaacttcttaataagtgaaccatgtggactacttctcagaataatgtttaaaatgtataaagtaggattacaaaggaaaccagtggtataaaaatagctgtcatatttaaaaacaaagttaattatatatttacttatttatgatatgatgcatgaaatagaagtagatgtactagctgtcataatgagcacaagtaagatgttgagatacttgtaacaactgtaaagtaacatgaaagtatatgtgatttctgtttgtgataatgtcacaggtatattgctaaagttaatgtagtttgttgtctacaatcataattgaagaacatgctaaatttcaggtaaatgtgcatgagataaagatgcagtattacccacccaagtacaaatatcttgggttcagaacctctgacttggagtattttgtcagcttgaaatgctcgttgttatttctaaaatgttcttcctttgtctcaaattcacttcattgtcttcttaatcctggaaaacagctgtgagcagttcatgcataatgtgttcataccattttgtactgtgatgttggagcagtatttattttttacaaaatgctatacagttgcctgtttccttaaatgcagtttagaaaattattactaggttttggctaggcgcggtggctcacgcctgtaatctcagcactttgggaggccgaggcgggcagatcatgaggtcaggagttcg

SEQ ID NO: 52599 - DNA, 6776 bp, Homo sapiens
cttttcttttcgtatcctttattttatctattcttggagtagatcaagtgcccaccccacagctcactgcagctttgaacccctgagctcaagtggtcttcttgcctcagcctcctgagtagcaaggactacaggcgcatgccaccttgcccagctaatttttttaaaaactttttttttagagatggcgtctcctctgtgttgcccaggcttgtcttgaactctaggcctcaacctagatccttccgcttctgcctcaaagtgctaggattacaggcatgagccactgcgtgcagctgatactatctcttaataacagacttttgacagaatggtttcctatttgtgcttttgtttttactcagaagtcagacttctgctggccatttttatggagggccattgttgatttcttgagtttcttttttcttttaagtaaactttatattgaaatatgacctatgttcagagaagtgtacgagccataaatgttcgtcttgaatttctgcaaaatcaaaacacccatataacaccttcccagatcaagaattagaaacttcccttgggttccccactctctaaaagaaggagcccaccattttggttaggcatcaatagcttattcagagtagaaaacccggtattttgtaggaatggcctgtacgatattggtaaaatgcaacacattgcagggaaatatttgaaaatctggcccgtggcagtataactgagaatgtaaattagtggctgaaagtgtaacttagcagtcaagatttcaggccatgccgggcgtggtggtgcatgccggtaatctttgctactggggaggctgaggcaggagaatcacttgaacctgggaggtggaggtttcagtgacctgagatcgcaccactgcactccatcctgggcaacagagcaagattccgtcttaaaaaacaccaccaccaccacaaaagagatttcaggccagtcagcatgtagaagagctgagcaggttctcagtaaagcccttgtgaagagcccctgaggaaagataatgcagagcattgatatgactagtgcacatcccctgcaaccagctgtcttgcttgttgttgaaacttcctactgctgctttatcctcctttctttcctttaaaaaaaaaaaaaaaaaaaaagacgagtttcactcttgttgcctaggctggagtgcaatggtgtgatcttggctcactgcaacccctgcctcctgggttcaagcgattgtcctgcctcagcctcccgagtagctgggatttcaggtgctgcctaatttttgtatttttcttagagacagggtttcaccatgttagccaggctggtcttgaactcctgagctcaagtgatcctgccttgcccttccaaagtgctgggattataggtgtgagccactgcgcctggccctttctttccatttttgcctacagaccttttgaactccttttgagaaattggagctgaactgtttcttctgagccagtgatttgatttgtagactgcggaagatgatgacttaggcgtggcagtgggatgattcttgtaatattcttttgctgttgacattaatggtttctgattcaggcagagttgtcatctagaccatattaccacctccaggactcttatttaatgatgataaggacaacaggaagatcattcttattttaacagttcagttttgcatgatttttttgttccttttaattttcttcatcatatttattgagcttttatcaggcactgcagtcagtgctagggatataaaaatgagtacacagctttagtcagttttgcctctgcagtatggaggaagctattgcctttggatattttgaaagatctttttgcctttagaaccctatcatattcctatctctgctttgaggaatctcaatgtggtgcataattggttatcattcagtccttttaaatcaataacagccacatactttaaagattctattctgaagggcacatctcaatggccgtcaaagctgtggtttactgttttgatgccacatgaagctaagttgtatatcctttctcagttccttgtcatatttgttctttttttatattatctttttctgtatcacatttgaacagagaataactttagaagtaaaatgggctctaaagtagtagttgaaaggtttaagaatgtcagcctttctgggccagtgatctcttaagagcatctgttggttttggatctacaggcctgtccacagtcagtctatttataaccgagtgtctgctgctgtgtcctccattgttgatttctccccattgacatttggttttggtgactgggaatgctttgcagccactctcatcttctattgagtggatcttgccttgtaccaggaacttgaacttggtccatgtgcatttctcttccttaaaccaggagtcagtcgtggggaaaagcaaggctgcttccctctagttttacaagaacaaagggttaaacccttaaccctttggtgtaaggttctgcaaatctctctgtactatgtcaagtcactataccaaatcttttcctttggaaatcaaggtacatgtactttatatgtccagggcttaacttgggatgtcggtaagaggagatagacacttcagagagaaattcttttgtatcaaatgcttcaatttaacatactcccacttagagatctcatgaataatctttgttaccagtagatggtagaagatagttattagaatacttttggtgaaagaatctcagagttaacttgttttgaggcattaaaaaatttaagggtcatcagtgaattgatgcatacctgtgaggcttatagggtagagctgggaggtgatgcaaattgacagggcatatatcccaagatcaggtacagaataattgagttgatatgatgttagaccacacttggctcaatatttagaagtaagggaggaatttacatagtgcagtggagaagtatgaaattctttttacaggcttaataattttttttttctatgctattagctgtcatacctggggcttattaagagtcatgctattatacagagttaggtttgggagtagagaacttgaccaagagctgcaaagttatggctgggctttgggtaggaagaaaaaaaaggaaggaagaaaaaaaaggaaggaagaaaatgggttggtgggacattggatatagtaagactgttctgaactctgtaacataaatgtatgtctgtctccctcatttggcaagaccttctgcagtgttcctgcctctgtgttgtttgttaattagattgtaatgtgtgaaagggcacaacactatcctcttctgagtagcatctagtgtagtctggtgcccacaacggttgcccgttattattagttgatgacgattagtgaagctgaagctattttttaaacagggcccaagggatgcagacagtgatgaaaacgacaaaggtgaaaagaagaacaagggtacgtttgatggagataagctaggagatttgaaggaggagggtgatgtgatggacaagaccaatggtttaccagtgcagaatgggattgatgcagacgtcaaagattttaggtttgtatgttttacacttctgatttttgaatatgggctatgggattttgtttgttttgatttagttttactttgattttcgttttcttcccctcttcatgttttctttttaagaatccaatctagtgtaggctatgctacaaagattgtaaattaactggtgaggtggaattttctaaaaggtgtcaatgcctgaagcgttgccaaaatgatagattttgcatttgcatagaactttaaaatctgaagaaagattccagagaagactatttcagtgattctcagatattaaaatcacctaggatagatgccttggaacctttcttaagtttctcccaaattaccgtattagagagctatggttactaatggaatatgtcatatccctctggtggtttagagggaaaaacagttgagaacttgtgcattatctcatttgagtctcatgagctctttttgaggtaggtggaccaggtatcattttccttattttgaagagccagagatgcagcttaaatgatttgttcttaatcatatctcttctgcagatgcctctcattccatctctggtcatgattaatgtacaggttttaccctattatttaagttacacagtattaaaataatgtatatttatcttccacaattggcacatattcttgaaaaatctataaaaatccttgtccagttatatatacaggtagaggatttttttttaatctccagtgtgatagtacaggtagagaatttaattttgagtaattttaatatcagtgtaaagctaatgtgtgtgcatgcacacactcacacccctctgcttattctaatgtctgccaaagtcaaaatgaaaatgtattttggaccatcgttgtaggacaagtgtcagttgttttgtatccctaatctaattattgttaatcttgcatgtgtaaataattacagtcttaaactttttaaaaattatttttatttatttattttttggagacagggtctcactctgttactcaggctggactgcagtggcatgaagttagctcactgcagccaccacctcctgagttcaagcagtcttcccacttcagcctcccgagtagctgggactacagccgcgcaccaccatgcctggctaatttttatatcttttgtagagatggggttttgccatgttgctaggttggtcttgaactcctgagctcaagtggtctgcctgccttagcctcccaaagtgctgagattacaggcatgagccaccatgcccggcctgaattacaatctttggaagaaatttaaggcacagggtaataaatacttacctaaggtctttcagatgagttcaggtgtcctctccaccttgaatatccagcagcctgtagcagtattttgttgtatttaaatgggggctggtggtggtggtggtgagtgtgtgagtgagagaaagaaagagaaggaaccagaataatacctttaatatgtaccagctactggactacaggattttttggggtagggggttggaggtggagaagaagggcattgaatgttgccacaggttacactcttctgtttatataatattatatattagtctgattttggatcatataatcctgaagtccttttatataaggtgatggtagaccctgggttacccagaaccttgtgtcctacaataattatcaatagtgccctgttttttttttttttttttaaatcttaggcatgtcctggtttggatgataaattacatcttcccattacttttaattcttagaattgtctccttaacaggggcatatcctagataatgagttcatcttgtactactttggaatagtctgcttatttcggtttcttagaaaggggagttagttttaacattggtcagtaataccaacgacatgtaaaaacttttttcattctgtttctttcctcacaaatatgccaggaagataaaaactttttagaatcactgagttgtggaatttcccccagaaaccaactttttccattgtctctgtatttaaagagtagatagagtagatgttgcattttgatgcattttgggatctgctttcatggatgctatagacagtgatttttccactttatttcagttttcctcaaacccggcccccttggtgaagggatgtaaattaatagcaattaatgtgaatttaaggggtgagttatatggaattgccggcaatagaagcatcaatttagaagatgtaaccctgtaagccctgtaaagtatctctggttattttatagaaatagttttaaatactgttgataatgagctatgttgaggacattgtccttaaacttgggttgctgtagtccctccccactgaaaataaggtttaatgccctttactttctctgtttagccgtacccctggtaattgccagaactctgctaatgaagtggatcttctgggtccaaaccagaatggttctgagggcttagcccagctgaccagcaccaatggtgccaagcctgtggaggatttctccaacatggagtcccagagtgtccccttggaccccatggaacatgtgggcatggagcctcttcagtttgattattcaggcacgcaggtacctgtggactcagcagcagcaactgtgggactttttgactacaattctcaacaacaggtactgtgtgtgtctctgtcaccctctctactctccctccagccagcacgttgttcaagtaattaagaatggggggatgggggaggtggtggcattgtttcaggctatccatagctagcccttgtgaacctgttagtgatgtaggtttacagagtcccctcatgaagctggtccctatgctgaggtcactggcaagaggccaccgtcctctgtatgtacttcctttggttcttctctctcctcagcagctggggagtggatgaggtagtattgcctcttgtaacacaaccctctcgggtgctaaattaatctctgaagatttatgtggttgtgatgctgttggtttgttttgtttttaaaatagtaaactctactatccaccgctgtcaggagtgtagtgccaggtcatcttaccagttgtgtcttacagttaaacaagttactccagatagcatagacaaggatctggcatctttcaaaagtattagaatgcgatcagaggaaaccacacac

SEQ ID NO: 52600 - DNA, 6069 bp, Homo sapiens
tttcccttccagtaatgaaggaatagcttttctgtccttccaaaatcttggaataggttagtgttgtggttgggaagtattttggttaatggagtctctgtgtataaaggaagtgaattttgcctctggcattccatagctgaggttcatagctggttcatgctccagcttgagtaactttgtctggtagttagtacacgtatagagagaagtgttttaatagttgtaaatactttctttttcagtaagagtccacttagtagttagctaatagggtcactgttagttcccttccccactccttaaaaatcttggcatgggttaagcgagtaattctagatatttaagttcagcctctattggatggtttgatcagtgtccccacccctgccccccaccttgccttaggcctctctgtgacttttaccaaatatatagcagtgttctgaccacagttgtgtagttggaacactttaattaaagaccttcagggcacgtgagcatcttcagtacccttgtctaaaagaaagtgttgactgctgtactttcatcctttatgaattctttaaaagcatctattatttttaatttgcagcagctcttgccaggtaaaaagttttgggaaacagatgaatccagcaaagatggaccaaaaggaatattcctgggtgatcaatggcgagacagtgcctggggaacatcaggtaatctagatctagcatctgtactgtgatttatgcctgtcttagagctcctttcctcagcaattggcaagtcatgaattttacatcagtgacataagcatgtcaagcagtgtcctctcctgtagtataattgccattaaggagcttatatgatgtaatttattaaaacataattaacacaaaatcatatcttcaatattttttgaagtgctagccacaggggaatggtcttatttgaaacgaccataatttcagctgtaacgttttgttctgtactgctgtcagcatacttggaattagaaaatccacacctgccatttgaagttcatgtttctttttctccccttgcccttgtgtaccgtgtatggaatgatctatctttaaacgtgattgggaccaaatcaagtcactgggcatggacattcttctggcatactacccctgaagagggatggggagaacttatagaggcagacacactgacagcagaaaaagtgacagatgatagggaggaaggagacagaaaacccaaaagccaatgtcgtgtattacagtacaacgtaagcatggaacctcatgatgacagtgaattatcagaaaagaacaaattatattgtttttaaaaagggcagtaaaatcatattttgttttagtaatactaataaaatatattaaaaagaaatccttttacttataaaggggtaaaaattttatccactcagctagttaaaccagataagctagataaactgttgtattcctctgctatcctggataaatgaggagtgtgttccatttccttagcttatgttgaatatcatacagtgagggacatgataggaggttttggctcaactgaccatggcaagtttcctgattccattggttatccatgagacatcactcataatttgtttgagcctctggctgcactgtatcatgcttgtgtatcttttttgtagatcattcagtttcccagccaatcatggtgcagagaagacctggtcagagtttccatgtgaacagtgaggtcaattctgtactgtccccacgatcggagagtgggggactaggcgttagcatggtggagtatgtgttgagctcatccccgggcgattcctgtctaagaaaaggaggatttgtaagttggcttgaggaacttgttcctatctctctctctctctctctctctctctctctctttttttcccctaaagcaaaacatgcctgtttagtttccttagatgttcacagcattaattacagggtattttcaaacaacgtttgttgtaaatagaactcagcaaacatagtaggagatgtaaactcaacttttaaaaactaaagtaataatgttttggtggggggacacattgatagtattgtgagataagaactgaaatctggatcaaagttcattggtctatcagaaaacaccatttttactttaaaataaaagcaaaaggggggtggtgaaggaattaaaaaaataaagctgatgctgggatgttaacagggaattccagatttgagagcagtgatttgccaatacccgagaaaccttaatatagatcagattatagggctattcttgttttgttagctacgatttaattatagaatcctctttggccctccttgaacggctttgtttctcacacctggcctgtcaagaaattagggattctgttaattctttcttacaaatttttttgattcattatcactgacctctctgatgctaaactgaagtcaaataagtctctgtgtctatagcctttttctttttaagtcttaagcatttttctatgagcatctgtgatagcctttctcaaaacaatttctttctttatcattaactttctagatcgagaagtgttaagatgtatttccatttgagtcttcctcattttgaattctgcgactgttgtcatattccaggtcacagacaggaaggccatgagaggcacatgaatcttcttccctccctttctcctgtctaaacttgttttgtactttttcaaagacatttctccctgcagtcattttgggctgatatcacctgaaaacagtcatttaaaagattttaatgtaatttgtgggaaagaacagcagaagcaccttctttcccacaaattgagaattaatattataactgtctttctttaatagcatttgttgctcagtatttcttagtgttatacatcttttgctgggtatcagaggcttggtcctattttccctattccacattaaattttgttagagtaacagtagttcatttttggtgcagctttctcaagtgtcaagtacagttcttaagtactagctattctaaagctgacctgattgcttttcagtgttttgaccctgcagagacctaggtcaggtttagtagcttgtgaatcagataggagatggctcctgttatttgaaccttcccaaggggctgcttgggaagaacaagatctaccctttggatgtgagttacttctctttcttcaccctatccccagctcacctctttttctgtcctcactctttcctcatcttatgagcacagattcctcagcagaaattagtgttgtgcatcagtaggttgctagtgtggtgaactggaacctgtgactctagctgtgaattctctgtcatgtgtgtgatcagtttctaattcttgggcactaaccaggaggcatgtgcctgcattactgtgaagcttgtaggaggcagaaaaatagttggaattaggaggaagatacatggtgggattgaatcattttgccacttatttttctctctttaaacagtcatctcactagacggttattttgatgacaaaagctgtatcatttgtcttgggagactggtgatttacctcttttacaaaagaatcgtgacagaggaggttaagacttcaggctagatagatggggccagaagattggactttaaccatcaagataatttactgagctgctgaggtatgcataaagataaatgaaaattctgaagtatgcatgaagataaatgaaaattctccaaatctgtgttccagcttcttttagaaggaagattgtgggtaatggaatattatcccatagtttgacttagattgcatctatagagtgatacaagaggactgatctagtgacatcaagccacttgttggcatatacagtcttctggtggatggagacctgtggctcagtgaactgattattattgttattattattgaggtggagtttcactcttgtcgcccagactggagtgcaatggcatgatcttggctcatcgcaacctccacttccagggttcaaacgattctcctgccttagcctcctgagtagctgagattacagatgcctgccaccatgcccgggtaatttttgtatttttagtagagatccggtttccccatgttggccaggctggtctcaaactcctgacctcaggtgatcttcccacctcagcctcccaaagtgctgggattacaagcgtgagccaccgcgcccggccagtgaactgattatcagctttgtggttgtatcctcttgattttatacctaacctgactttgctctgcctgttggtcaggatgacacctgaccaaagctctttttgtggaagcctgaatcactttatttttgtcatagtatgcatacatcttcttgaggaaagtgagccttttcttttaaagtctagtctgtcatttaaagtgttgaattcagagaaccaggaagataggatttctgcttcttgtagataattgttctaaaggaggagtggtacttggtagtgtatggggtcagggcatccacgtatttttacttttggggtagctgtatcaacattaattccagtaagcctcactttaatcctgagagctgaaagcatcatctctgatggtatagtgattgtagacctcaaagcaagtaactaagaagttattcttaacacactgacaacagataattgagactttaacttttcaggtaaaggtgtttagaactaaaataaatctctatgtagtgttttaccattttcagtgaactttgctggttatggctagattgaagctgtttagctctttgtctagcttgaattcattttgattgtacaaatggtctcagtttagtggttttggcttctgtgataagaatacattctggctaacaagaagaatctggcaaccatattttgttctgagcattcactgtaaatttttggtagtattccacataggaatctcaaactttaggagagcagctttcagaataatagagctcaaaaatatcaatcaagtcttttatttttcttttcttttgtatcctttatttattcttggagtagaacaggtgctcaccccacagccccccatggttcagggtggttacaaaatcagatgtaattattttatttttgaggcccatgggtgagattgccatctaaggaccctgctctctggaataccagctgatctttttcaaataggtggaagcctagccagccaaaaaatggatcatgatttctaccttgctggtttatggtgcccagggaaatgagaagatcactctaaactttgattagggtaatgaccaccttaacctcacagaagaaagatttttagaaaaaatatattgggaaggtctttctgtttgttctgtagagagtatctgctttttgatctggaggatgtatacacattcgtagtatacatctatttgggccgtgaaacttgtttgtctaggtttcactgcatttactttaggtaaccagtgctacttaactttcataggttttgtttgaaaacttctgtacaatgtaatgcagatagaaatcaggggtttgagtttcaaatggaccttaattcatctgcaaaatgagaataatcaaaactcaacaaagtctaattcatacggctgtgtagcatatgtgaaaatgctttgtaaacattagaagtcttactaccaaagtcagtgggccgacagcattagcatcacctgggagcttatcagaaacgcagaatctcagatcatacctgagagcgaatgaatcaaaatctgcattttgacaagactacccagatgatttgtatgcacattaaagtttgataagcactgctatcatacgcgttatctcagaaaactcagctggacaaagagtctaatgattagagccttaaaagtttcctaggggaaaaaacatagtatgtctagcaatttttaagccttggtggggagggctggtgagggcattgtgaaaaaggcaatggggaaaaaatgtgaaaattggataaagtatttttttaaaaagacaactgtactttcatgaatttctttgtttagtccttggaacaacactt

SEQ ID NO: 52601 - DNA, 3454 bp, Homo sapiens
tgtgtgtgtattttaagagatagggtctcactctgttgcccaggcaggagtgcagtagtgtaatcgtagctcactgcagcttcaaacctctgggctcaaggagtcttcccacctcagcctcctgagtagctgggactgcaggggtgtgccaccactccggactgatttttaaaaagtcttttgtaaagctagagtctcgctatgttggttgctaagtctgatcttagactcctggcctcacccttagaaagcactgggattacaggtgtaagccaccacgccctgcctaaaacaagacagttgtttaagcctcatagttgctataggttaggaacctaggcatgactttcctgagtcatctgcttcagggtccttcacaagctgcagtcatgatttcaactttggctgcattcatctcaaagcttgcttggagaaaggtctgtctcaaacttgcttggagaaaggtctgtttccaaactcactcatgtggtatcaaccatcagaatccattctttgctggttgttggacggaggatctcagttcttaattgtgtgtaaatgacccagggcagaggcagagttcagtgggaagctgcggagcaacagctttgtatatgtagctgttgtccagagatgtctctctcttggcttcatgtggcgtctgtatagggcagctcacaacatagcagcagtcatcatcagagtaagcaatcaggacaatagatagaagaggacaagcaagatggaaatcacagcttttgtaacatcttgaaaggaacatcccatgacttgtcttatgttatttcttagaggcatgtcataggtctagcccacagtcaggggaaggggattactcagggtatgagtacttgtaagtgaagatcattaagagtcatttcagatgctgctaaccacagcagttgagtatagacgcatatgttttggaggaaagggagaaagactgagtaagattcagagacttttaagagctttgctaattttgcttctgtctttgcccaagcaccttggttcagtcttttgctttcttttttttttgccatagtggcaaaaaccacacttttgcaccaacctaatagcactttgcttcatgtttgctgtattgttgtttccttttgagagaatttaccctgaaaatagcctcgcttatgtgttcacctgcttctcctggctttgcacattatgacagcctggtatactatcatgaaaggtgacaggatcccagaactgatttttgaagccttgagctgaaaggctgctgctttctgtaagcaattttacaaattatggataagactatatttacatatggaggctggtacttttggaaactgttccttgaggtgtttttttttgtttctgtttttgttttttttttttttttttttgagacagagtcttgctctcttgcccaggctggagtacagtggcgtgatcttggctcattgcaacctctgcgtccctggttcaagcaattcttgtgcctcagcctcccgagtagctgggactatagatgtacaccaccatacgcagctaatttttgagttttttagtagagacggggatcttgccatgttggccattctagtctcgaactcctgacctcaggtgattcacctgcctcagcctcccaaggtgctgggattacaggcgtgagccaccatgctgggccctgttccttgagttttaaataaacatttacaagtttctgtgaggaatgaactcttaaaacatttaaaggacaagaatggttttgatcaccttagcgttctttgcactgttatgtggagcataaaacaagtgagaccctccttaggctgacattctttcttctggaatacaaaagagtagttgcttttgctttgcacaaaatacgggagaaaaaaaatcagaattttaattggagaaagggtataaccaatgaggaaagaaattttatttgtaatcttcggacaggattttttttttttttgaagatggagtctcgctctgttgcccaggctggagttcagtggcatgatcttagctcaccgcaccctcccactcctgggttcaagctagtctcctgccgcagcctcctgaggagctgggactacaggcacacaccaccacgcccggccaattttttttttttttttgtatttttagtaaagacagggtttcgctgtgttagccaggatggtcttgatctcctgaccttgtgatgctcctgccttggcctcccaaagtgctaggattataggtgtgagccaccgcgcccggccttgcaggggacaggacatttttgagactaaaaggagaaaaataagtttaaaaataattattgaattgtcctttgcatagtttacattaattttcagtatcccctctgtgacctggtttgaccgctgttttgcctaggtgtgatgtttttgaatacattattgagaacctgttgtgctaggcactcatcaacaatatttctaatcatcacagcaacttgaacgatattttcttcatcaataaaaagagaatgaggttcagggcagtttagtaagatttcctagggcacttcaaagttgtccagtttagtgcttcccgaccctaatgctaccctcgatcggggctctttcccattttaccctgatcctcaccctcccccaaatgcccttagggtaataagtggtacaccaggaagactgctacttataactgttcattttcaaggaaacttaggtatctgtgcaattaaataccagacaaatgttttttttttttctcaatcttgtttaattagtaaacaacaaattaggtccttaagagcaaaatgtatggcaaactgctttggtccaggcagtaacccaagtccatgagatagattatagagccacttaaaggtagatgaaaattatgccgagaaacccagaaattagatttgggaagcagagatttattttagtgagagcagagtttaattatttttccattatcattgggttatgggttaaatgggaaagttaaacctttatcgtcaaggagaggaaatgttttgtgctttctggttttttattgtgttcttctgagaaattcaactctccaggtatttttgtgctcaaaaatggtggttaaatactatctcaaacatcttagtttcctgtgtaatagcagttgaaaacataattagaggaaataagagggggcattttagtcagtaaagctgatgaccagaaccaagaatgatagagttctgtggaattttactttgtaagcctggtcactggtgctttgatcttatgcaaaactgtactgtgtcttgcttgaagggtactttgcatttttttgttgaagctagtataaacttctcatgttggcttatggccagcgatccctgtttctctgaagcatggagtgatttgtgaagtcactttaatggcattaccaagtattgttaaaaaat

SEQ ID NO: 52602 - DNA, 1045 bp, Homo sapiens
ataaacttacgattcagggtgggataaacagtgtacgtgtgtgtgtttctcccagagatttgagagcacacactattggtggggcagttaggaattccacttaatgtttcattacaagaaagagtacaaggtctatttattttattgctggggatgataggactccccaagtcatggttctcagtttgtagatcttgaaatggactgttattactaattcagatgactgggttgcgatattgaccccacactaaccagaacaacaagaggctaatgtatgaaaaccaaaatgcagtctgctgattttttttttttaaggaaaaaaaacaactcttagatggacaaggatggttgtgtttggtgattggcatggttggctataggaggaagccagttctttaagaaggtggcttggtaagcagagttggagccagggagattacttgggtgtttttagtgtccagtgtaattaagctactatctaaccagatgcattaattgctttgataagaataggcttctttgtgcatcatatgccctgcccttaaatgtgtcacctggataatactggctacatctgattccttgggtctcttttgcttttgttggaccaattcctaattcctgttatcttcttttggaattgtcacatcatttaatcctcttactgctaagttattctttaaaacaaactctacatctctcttgtgatctgttacttttcgccttgtcaaaaaaactagtctttatttccagattcttgatggggtggataggaactatcttttcataggttggatgcatttacatttttggttattgtgtgttaagtgaagatttggcaactgctggtatttatgccagtgggttggcaaactaggatattttacccaacgctgtggatgatgttacctccagagagcttactgttgaatttgaaattgtacttggataacacattatcatttggttttataattcagtagtttctaactccttttaatatgatcagatttgaacagttaggtatcttttagctgactgt

SEQ ID NO: 52603 - DNA, 1087 bp, Homo sapiens
tggctgtgacttttgatacgtatgtagtttctgaggcccttccaaaagaattacgctaaccaggaatgaatgaacttggcttttcttaaagatatgttttaataagttaaagctttaaataaagctttagtataacttaatatcagtatagttcttagtatttataaaagcacttcatatactatctcacttgatttcacaacaacagtctgtggtatggagagactacataagttgtgaaaaatacaaaatttttacaagtaagactaccacctgtgattatcagtggttaccaatcaaacttcctcatttcagttagttctgaaaggtcctttctctgagttgatgtcatcttctcttaatgtactgagagtgtggtgagatatatactaagagattaataattgttttggttgttggtctgtcttaccagctagttaaatatcaagcatttgtttcctgcattggctgcattccagtgaaactaagcttgtgttgtaagttagagatgctagataataacatgatcaaactgatcacgtctgcagggttgtaacatccatgttagtagtatttcttaagatgctcaatttctgctctgagagatgctctgtgcagcctgtattgagtgtgtaagcagttacctaatattttattccttttgagtacagagtagttgctggagagcccttttactgttgagatcatcagtaaacctcattgataaatccctattcaaatattagtggcggtatggtcaaacaagtccaggcaataattgtcttgcctctgcagttcctgaaaagccgtaatcatggttcttgtagtgttgttttgttggggtagttaatgtaatgaggtttgtactgacatggcctaggtgatgccatgatcactgtgtctgatagtttgacataggagcatttcattgacaaatcattagtattgtgatgtctattggctgctactttgctcttttaaagaaggatagtagctgattttttgtttactgtttcagcattgtattatgtcattacatgtgttatctctttcattgtacacaataggtcattttataggtgagaaa

SEQ ID NO: 52604 - DNA, 3204 bp, Homo sapiens
cttcagctaataatgtgctttgtaaacaatagctgctaaatatattgtattgaaagaatcatatcagtaaatattttttcctaagcatagtttcctctttatttttccttttacatcagaaattggtatccttgtctatcccccaagggagctcagttcaatttagtaaatattggttgtattttctgttcacatgacttttctgctctcagggatgttggagtgtacagggagagaataaagaacagacaaaactgaaagcatatattcaggctgtctgcaaatatgtacatttaaaagctattcattagctacttttgcaaaaatatagaagacaaacaataaatcagcagtgctgttacccaaattgaatccgatatataaaggcatttttaaataaaggatcttttgtttaatatagttgttacgttgttacagatcgatggtactttctctgggccatctgttggagcatggaaatatatcctcattatatatacagtaaccagacataatgatgtttagaaaaatagaattacttttgttccattgctttctcaagctggtattaaactatgttgtgtgtaattccttcttggttactgtaaccttgctaataaggaaccataacatcaaagcaaatccattgtattttgattaattggtgcatgatgtggttctcattgaggtgaagcatgtagcaaaagtttattttctgtgttgtattccctatatacatagcaggcatatctatgaaatatttgtttcctataatgaaggaaaaggggaactcagggttgagatccttgtctttttcagatcaaaaatttaaaattccctgaggctaactgggtgtgggtttattagagtatttggtcccatcttgatgtggagtattctttgttatctcagtcgggctgtttgcttcctgctttgggggtgtgagggggtcatgaagcaatctagatgttttcatcattgtatttgtgaactttacagtatcctgaggggtctggagcttatcttttgtatactgggctcacaagtactgtaatatgtaattattaaagtgaatacctattataaaatgaatgtggttatgctatagatcaaaccatgtagtcaaaataaattgttataccaaaaagacacttgcgcttgcatgtttattgcagcactattcacaatagcacagacgtggaatcaacttaggtgcccagcaacagtgaattggataaggaacatgtggtacacctacacccataaaaaaagaatgaaattatgtcctttgcagcaacatgggtgcagctggagtccattatcctaagtgaattaatcactggaacagaaatccaaataccacatgttctcacttgtaagtgggaactaaacattgggtacacatagacataaagaagggaacagtagaccctgaggactccaaaaagggaaagggaaggagggaggcaagggttgaaaaactacttattgggtaactatgttcactatttgggtgacaggttcagttgaagcccaaatctcagcatcacacaatatattatagccatgtaacaaacctgcacatttgctctctgaatctaaaaaaaaaaaaccttgtgtagtttattcatatgtaaaaacacgtgaccttatttataggtaacctgtagataacataacatcccttatatgctgttcctgtatcatgcagaaaagcccgattcactctgggaatttcatcattttatcaacatactttactgtcagtctgtcaggttttatgaagacagtagagaagagaagtttcttggctctgttccattaacaaaatgtgaaggtataaagaaacctttactttcagattcagaagggcacgtgtatgggagcctgttcaggttaattcatgacaaaataacatggagtgtaaggtgctaacagtatttctgaatgttctttaatggacttgctttatgaaagtatgaatgatatcttttgatgtgcttggtttctaggatgaagtcgttgacagacagggttgtattctttggtgtgtgcagaaaacaggaaacccctgtgcgttttgaagtttaatggtagtcatcaagtttgcaattctatctaatatctaatttgtggttgtcctaaaatttgtttatttatttatgtttttgaaacagagtcttgccctgttgcccaggctggagcgcagcggcactatgttggctcactgcaacctccatctcctgggtttaagtgattctcgtgcctcagcctcccaagtaactgggatcacaggtgcctgccaccacacctggctaattttgtacttctaatggaggcggggtttcaccatattggccaggttggtcttgaaaatctgggctcaagcgattcgctcgcctcagcctcccaaagagctaggattacaggcatgagccaccacacccgacctggttgtcctaaaatttaaaagctaccaaattcttatctcaacttgattgctctttttgctcttactgtcgcccagcagcctatagaggatcttcagggcagcctcaataccctttgaatgcataaaacttaaacttttgatactatatgcacacatttggatctgtttgtgtttttattttttatttttgaattttctttttcttcatgtaccccacaggagacttaatggattctgttttcatttagcttttgcactcagctgtctctgcagaatagattcctaattaaaagaactccaatgatagactggcttatgtatacttagtgaattcattcttgatcatcataatgggcaatgactcttctgaaatttatagcttttattttgttttactttatttaaaatttttgagatggagccttgctctgtcacccaggctggattacggtgccatgatcttggctcactgcaacctccgcctcctaggttcaagcaattctcctgtctcagcctcccaagtagcagggactacgggtgcatgccatgacacctggctaattttttgtatttttagtagagacggggtttcaccacattggttaggctgggtctcgaactcctgacctcaggtgatccatcggcctcccaaagtgctgggattagaggcgtgagccaccacgcctcgccagcctttaatttttttcatttttatttttttgagatggagtctctctctgtcatccaggctt

SEQ ID NO: 52605 - DNA, 1006 bp, Homo sapiens
acccaggaaatgtggtcataactgatttggaacgtagttcccaggtctgtcctgactttgagaccaatgtgcaaaccccacccattcttctgtctgtcttctaacctgcactgggaagaccaggaacatactactgtatgtagatgttaagctgtcttggaatgtttgaatgcagcaaatcatactcttgcagcagaagatccacatgctgcttactttgtcttcattaaatttcttccctttcatcaacctcctttggctaaaatgttactcttttatccatactagcatgctttattggagggaagactaataaatggtaacacttttcaatataatgatctatatgatatcattatcgatatgaatctcccagtaggtttttgagaggtattattcccatttttttttagatgagcagaatgagccctaagattaaatgactccagctaaattcttaagtgtcaagatggggattatcttcaaattctgttttttttttttttctaggctcggaagtaataatagctacaaaatattgagtgtatacaattttcccagaactatgctaatcacctcatgtatgttacagtttttagggtggtcctgcaatattatgatgccttttttttttagatggggtgaacaaggattagagaagttaatgtaatcattaagcctctgtttgaacccagatctcttataactcaaatcctgagtttttctggttggtttctgcatattcacagtctacttattcaagatttagcttcagatatcagctcccctattaaagcttttttgctccctcccattagaagctgtgaaggggaattcaagtagcaagtgatttgtagtattcttacaaagatgatacaaatgatgatctgtggcttatcaaagccccagatgatacccagatggtctgggctttatcttttgcatgctggactctaaagtactgtttcaacaatcatggcccagtttgttttatacataatgattt

SEQ ID NO: 52606 - DNA, 3037 bp, Homo sapiens
caccgcaacctctgcctcccgggttcaagtgattctcccacctcaacctcctgagattataggcgcctgccaccacgcccggctaatttttgtatttttagtagataacagggtttcaccatgttggccaggctggtctcgaactcctgatctcaagtgatcctcctgcctcgccctcccaaagtgctggggttacaggcttgagccactgcgcccagccttttttttttttttttttttgaaaaaggatctccctctgttacctagattggagtccagtggtgcgatcacggctcactgcagcctctagctcctgggcttacgtgatcctcccacctcaccctgctgagtatctgggtgtgtgccaccacagcccaactaatttttatattttttgtagagaggggaattttgccatgttccccaggctgggagcctacgtctttaataaacaaaggaatgtactcttgaatcccttgcccaggggtaggtggtgactctagcctcagacagcagagacatgcttgctgctcataacaaagaagaccagtaaactagttgaattataactgttttgaataatctatttcacacatcatccttgatgttattaccttgtaggaatggctttggagatagataggtaaattgaagcctaaagagattgttatgctgtaggtaggattacatttaacaattagtaaggtttggagggattcttgtgacatgttattttctccccctggttaggtttggggagcccccagggatctcccaatatggagagatattgggatacttcattatagggtttgcatccccctttcctgaggtttaccaaagagaaatagtggattgaatcaaatgcactccctaatttaacttaactgttcacaactggggaggagccatgatcttttgactcattaggtcacatagtcatcttgaaggcatcattgctcttcagaatgttggtcttattaaattaaaaagtatgagaaatagctaacataattctcatgatggaatttgctttttcattcatttggattttgtgtttttcatgttttgaaaatataagggaatgggaggggagaaagtaggggtcattgctgaaccctgatggttaaaggtaagtgaatgtttaatctcttagtcacttgatcattgctattgtctttgccaatgtctgaaagtaaacatagaataaattttcaattgtgtgtaatgtgtatgtaaaattcaagatgctgacttgaagatttttccttctctattctaaacaataggtgcgttccatggatgaactgaatcatgattttcaagcacttgctctggagggaagagcgatgggagaggtaagtgaactggtgtgtcagaaaagtgggtctgtttttaagggaaggttggagttgtctttcatcaaatgtgtccaaatctagtctccagaaatatgtgcttgcttttccttgttgccattctcatgataggaacgggatgctggagaattttgccaaaactatgtcattaaaagaagaatgttaaccataacctaatgtcttaaaagcaaaacaaagtagccaaaatgtgagcacaaattattgaatattaatgtcagctataaattgagacattttaagtttaagaagtattttaattttatatgcattaaataaaaggccaacctttacttcattttccagtggctaggttttcccccaacccaccccccccgccaatggcaaagggagtcttagattggctgctaatcagaaaatgtcagtaacctatttttagagtagtgcctttttttgaggaagttgtttagagctccattgtgaaagggaagttgttaggtttctagtggaggaattacagaaggtagagagctgagccagtcatccattacaggaaattcagaaataagaattttgctttgactgtaatgtttaaaatttgcagaaacaaaatttacttttatccattacatcaatagagagggttgctgtaagtcttaaaaaggaaggggagtatagatatctaacatgtagccaactgctggctattgtagctgtgacaataagcatgtattgatgacaaaggtagaatatacagtttgaattaactacttaaaataccacaggcccacaagtgacatttgttgtggctctcttgttctggaaagtgacgttaggttttctcttccatttcattttttgtgtatctaatatttgatagctcctacatcgattttaatatttcacaagagggagaattactttattctagggtcctcatttataccatttattagatacatttgttctttgattcagcaaatgtttgatccccaggcactgtgctaggttctgaggtcaaaattaggataattactcttctgagtttgaagcaaatattccttgattgcctttgtggttaggcagtgaacagttaaaaattgttgatgtttaaactgagatccttgctttctttgttacaagattttgtttccaactttctgaatcttcttgtggccacagagtccagtgtcctatcatcttgagttcatgcatttttggtctgttttcctcctagagctttaggagatgattgggagatgtccttgtgtttcctgtgcctgcctaatgtcactgacacaatgcaaatcaataaaccctgtatggtttagaaagtctaaaagactttgtcactaagtttttggagcagatttgaacagaaagttaacatatttgttggatattaagtatagaaagagaaactatatgtattgtctttcttactcctataattctaagctggtgtattccaccaaaaatccaattccaggtgtttttctttcttttttgaattttttataaaaatagagacagagtctcactatgttgtccagactaatcttgggctcaagtgatccttctgccttggcctcccaaagtgttgagattacaggcatgagccactgtgtccagcctgtttttatttttaaaaaattaatgatacaagataagaataatgc

SEQ ID NO: 52607 - DNA, 1005 bp, Homo sapiens
ttattatatgtatttaaaatcaccaaattgggtgttaattattaagaaatgttctctgtaatcccagcaatttgggaggctgaggcaggtggatcacctgaggtcaggagttcaagaccagcctgaccaacatggtgaaacccccatctctacaaaaatacaaaaatacaaaaaaaaaaaaattagccggacatgatgggggggtgcctataatcccaggttctcaggtggctgaggcaggagaatcacttgaaccctggaggcggatgttgtggtgagctgagatcgcaccattgcactccaacctgagcaacaagagtgaaactgtctcaaaaaaaaaggaaatgttctttaatttgttagagtttattgagtcaaattgcttcccccacccagttgtcccaaattagggagataccacttttaagggtcagaagccttgtaaaatacaaaacaatgaaattaatatgtcgttcctttggagaaacttagtttcataaagagaggagggaattataaagataattgtttctggctaggcgtggtggctcatgcctgtaatcccagcacatgaggcaagtggatcacctgaggtcaggaattcgagaccagcctagccaacatggagaaaccctgtcactactgagaaaaaaaaagaaaaatcatctggtgcatgcctgtaatggcttgactcttggaggtggagtctgcagtgagccgacgtcgtgctactgcactccagcctgggcaacagagcgagaccctgtcttttaagaaaatggtctttaagttcagtgtagcccttaaaagtgatgtacatggattaaggactggaagaaagtactgcaaagtgtttatatttgtatgcatggagagattacaggtagtatgctttgctcttgtccattttgtattttctgaatttcaaacagttaaaaaagaaaaaaagacaaaccttataccatctgttaagagcttggtctgccattttgagtgaaagcagat

SEQ ID NO: 52608 - DNA, 1148 bp, Homo sapiens
ttatttttattatgtattaaaaaagagctatcatggtttctttcattggggtggatgccttggataatccattcaaggaagatcacttcgtccaacttaatgcagcccaatttaatgaaacccattttcttcgcttactgacagaaacactggtggggcatattgaggccgtaatttggatcagatcttgctggtctgagcatacgcaacaagagagagaaccctggctgaatttttgcgagtggctccagtagagctgctggtgacccatcttgctctcaggagtgcagtgagacaaaaggaaagagctccagttaatttttataccttgtaattaacagggactactatgttaaactgggagggagcccaagtatttcccaaactggggagtcttgacattccctagaaatgtctttctgttgtacctgctgatggactctcttagacaatgaatcttgtctacctgggtagattgccttagcatttgtgctagtagcatttggttaacatgttaaagctgaataatccatctttcatattttgtttctcttacacatgtactcttagagccttttcattatgctcagaattcacaaggcttaacattatgtgcttggtcaaaggaatcatcagcaggccttcttcaactataactttttcttttttttgagacagagtctcactttgtcacccactggcactatctaggctcactgaaacctctgcctcctttgtacaagcaatctggtgcctcagcctcctgagtagctgggattacaggggtgtaccaccatgcctggctaatttttgtatttttagtagagacagggtttcacaatgttgtccaggctggttttaaactcctggtctcaagcagtcctcgcaccttggcctcccaaagtactgagattaaaagtgtgagccacgtacctggcctgactataattttaacctagcctgattataactttaagaattaccttgttccagtgtaaacaaaagaagttcggctggttgcaattggctcacgcctgtaatcccagcactttgggaggctgaggtgggcggatcacctgaggtcaggagtttgagaccagcctggccaacatggtgaaaccccgtctctactaaaaaatacaaaaatt

SEQ ID NO: 52609 - DNA, 1076 bp, Homo sapiens
ggagttcaggcactccagcctgtgtgacagtgagatcctgtctctttgaaaagaaaaaaaaaatgaaaaaaaggaaatttaaaaaacaaatactaggaaacactagacacatcttcccacccaaatgagttatgtatttgaaaatgttactcattttgggctgggcacggtggctcatgtctgtaatcccagcactttgggaggccgaggcaggcggatcacgagatcaggagatcgagaccatcctggctaacacggtgaaaccctgtctctactaaaaatatgaaaaattagccgggtgtggtggtgggcgcctgtagtcccagctactcgggagtctgaggcaggagaatggcatgaacccgggaggtggagcttgcagtgagccaagatcgcaccactgccctccagcctgggcgacagagcaagactccgtctccaaagaaaaaaaaaagttacttattttgacagtaatttttatacctttagatttttttctttcctgaataacattgaaaatttcattactaaaagcctaaggtcaagtctttgacttgagagtgttttattcttgtattgtgaaatctgttttctctgtaaactgctgtgggatagataaactggttgatgaaatagggcaaaaaaattaaagtcgattggttgaactgtagcctctgtactggattatgagggacagaggtagaagctttgccctgggggaagggaaatttggaggacagttccacagagcttacccactttgcttgcactcttttagcactaggatatatcagtatccatcatagattgacagcctataggagataattccagagaaccaggcaaaaaaaaaaaatcagtgggtgaggccaggtgcagtggctcatacctataatcccagcactttgggaggccaaggcaggcggatcacctgaggtcaggagttggagaccagcctgaccaacatggagaaaccccatctctacaaaaaatacaaaattagtggggcgtggtggcgcacgcctgtaatcccagctacttgggtggctgaggcaggagaattgcttgaacctggg

SEQ ID NO: 52610 - DNA, 1342 bp, Homo sapiens
aaatctgtaataaagatctataagatcttttgttgtgtttcctaatgatagactgatgggtggaagctgaaaggagagtcaaggtgcctggcaggttctttgctaggtgagcaaatcaaactctaggtcagtccttggcagagctctaagatctgattattgctgtgcaagttaagaagcgtttattgaaggcttactcaggcctctgtcttacactgagccctatcataaggaatcacatctgacttactgagcagttttatccaggtcagttagcaaacttgagttaataatagtaaatggcaaaacctgtttcccactcaggtggcctaaaccagtgaccttggaattggcattcatcattacaacacaattctttgggctggacgcatgaaataatgaacaacgttggggaactcagggtagttggtatattgcagttgtggaccacccacaggttacttttctgtagtcattatagtgtattgtactggttttagtgttgttctcaccttctggactgaactattctagatcagagacttgtgtttttcatgccccttttccaggaggtattatgaaactttcgtgttgattgaatgagggaagacgagaggttcttcagttttgcgctcaggtaaaggagtgggtcttacagctcagtcatcctgctgggaaacacatggcaacaggtagaggccacttgataggcagctgtgctaagggtagcataattgaagagcaaaggggcacatctctaggtggagaatctctgcccttattagccactgttacggataggaggtgtaagagggtgcctgatctgtcatgtgggtcagagtgaaaaagaggttgagaaccactgatgataacggaaatatttatatgttctaggcattgggctattgtatttcctatatataatccttacagcaatcctatgaaggagataaatacccttttttgaaaagtgagaaactgaggctttgttaccaggtaatacctggtttttgaaatcagtctttgattccagtgtccacgttctagatctgtttctgcttccctaggcaagataaaccagacaaaactgtgcaaccaagtggcacattacagggccaaagaattgttttgccataattttgcttgaaatttagagactgtaaacttaataatgagatgaatacaaatgttgaccattctcctataattgcaggagtacttgcccccaactcccaaaagcagtaatggtaaagtccatttttcttcagttctgttttttattacatatgtgttctaagtggtaatgtggatggaaaattatctctgtagagacagaatgact

SEQ ID NO: 52611 - DNA, 1200 bp, Homo sapiens
agtaagttgggtagactgatagaagtctaattctgtattgctatgtgttggttaacaacataaacttctctgaagtggtagtattgagttctgatcccaataccttgccagagtgcatgccaccaacgacatttatttattgtaaaagacatggggttcatgtttttatcttagtgtgttttatgtttcaaaagatggaaatattaaatatttgtaacctgtttgtccttaggtgttggtggaatgagcgttgcatgtgtcttgaagagaaaagcagtgctttggcaggactctttcagcccccacctgaaacatcaccctcaagaaccagctaatcccaacatgcctgttgttttgacatctggaacagggtcgcaagcgcagccacaaccagctgcaaatcaggctcttgcagctgggactcactccagccctgtcccaggatctataggagttgcaggccgttcccaggacgacgctatggtggactacttctttcagaggcagcatggtgagcagcttgggggaggaggaagtggaggaggcggctataataatagcaaacatcgatggcctactggggataacattcatgcagaacatcaggtaaaaaaaagttcactattttagctttgacattcctttataatcactgtccacttaggatatctgctttcaatgaatgtctttaaaaacttaaattgctgatttcatttggtacaaacagttacttgttataaaggttgatcattgtaatactgttactgggtcatttatcattctggtgctaaatagtaaatagccaattcattcattcattcattcatttgagacagagtcttgctctgtcacccaggctggagtgtagtcgcctgatctcggcttgatctcggctcactgcagctgctgcctcccaggttcaagcagttctcctgcctcagcctcctgagtagctgggactacaggtgtgcaccaccacgcctggctgattatgtattttcagtagaaacagggtttcaccatgttgtccaggctggcctcgaactcctgacctcaagtgatctgcccgcttcggcctcccaaagtgctgggattacagttgtgagccacccacgcccggcctatagaatgcatttttttttttttttaagacggagtctcactcttttgcccaggctggagtgcactggcgcgatctct

SEQ ID NO: 52612 - DNA, 1111 bp, Homo sapiens
accccttgctagtaggaaaatctagatacacaatactagttttagtcctcacaaacatgcttggtaaacatagatcatttgttttacttgtcagtaccattcccacgtcaagtgaggaatacactcctgtaacttttccctcctatagcccccccccccccccccgctgaaaaaacaaagccagaaacccacacacagcattaccagagaaggctttattctcccgtaacttagattgttaccttttattgttcaattaagaaaacactgttctcagccctcgataccattttgctcaattcctgttattactgggattaattaagaataagattttatgaagcttttcctgggttctgttttaaagtcagttaacttctgaaacaataggcttagcattttgtttcttgaaagcacctaaaaacttactaagacaggcccaaccccaagaaatgtggcttccgatgcagttttcgtaagcaaaataaacattttgaccctttgctaattttaactttataaaacactggggggctgttgattctttatctgggctcttgggaaacgctctccggattctgaactttgagttagtgttttgctttagcgacaattgaattcattttgttcaaggccacagctttttgaagttggaatttgtttagtttaggtttaaaatgaactgttttaagataaatttatgaccacagaatgtttgttaagtgtggtaaaaataaacaccttttaaaccactaagcattttagtaaaaggtgagccatggaaataaagtaaaccgtgttcctttgaattcaactcaattagtgatattttaaaaaactttgtaaacatttgaaagctgtgaaagagtagctggactgagcacttctagttgcttaaagtacttataaggtgtcatttgtaaaaaaatcacattttaaatgctacacgtattagtgagcttttctgatatttaggatactgagtttttaatttttgtgccgtatttgccaaaataccacaaaactacccaagataacatgttaattgcttaggtatttgctcactttgaaactgttctgccaggttttctctggtttgagaaactgcctt

SEQ ID NO: 52613 - DNA, 1050 bp, Homo sapiens
cttcattgtacaaatgtggaaatggaggcaggtcgatttaaataaggccgcagagctagaaagctgcagagaaggggtttgaaccctgcacctctggggccagggcagtgcgggtggccgtccgcgaaccctgctagctgtggtgctcgggggcaagcttccgagggcgcggcgggcgcgaggagcgcgtccgagactcggtggagcgtcaccggcgcaaccccgcgtgcccagctccaggccgtgttctcccaggtgcgggccggcgggaccccgccttcggccctggcggcgcgcgctcgcctagcgggcgggcactcgcgcgcagcgtttgtgttgcctgcgagtttcccgagttcacacaggccctgggttggcatggcaaccaggcaacctgttccagagccgccagccttctccgcacatgccgctgccaccgccggggccggggccggagcctatcccaggatgcaccgcgccaacccagtccccagtgggccgccatgttgtcggagtgaaaggtaagggggagcgagagcgccagagagagaagatcggggggctgaaatccatcttcatcctaccgctccgcccgtgagtatccgcaccccaccggccccaaacgctgctccggacccctaacgagcagattgtcccttcatattggtgtttgagagtggttgtgggggtgagaagggctttggaaaagccgccggggccctggctgaggcttctcactcgctgttcctcgtacatgttttggagtcagcagcaaggcccctattgttatcaaaggagggagggggtggggagcggggtcgaagctaggaaaatgctgggggtttaggcccgagcccagggcgtagacgtgcctctacatttttgcctggccctgttgggaaccaccgaagattgatgttgccattcgggttgctttttttgatgggtttgcgaagccccgagtcttctgtgtggccatgaagtgtaattctgtgccaccccgatttcttcgacttcttgagcttccgtggcagcgccggaggaggagga

SEQ ID NO: 52614 - DNA, 1069 bp, Homo sapiens
ccctgctggcttggggaggcctgggcgtcggggttgcgaaaaggaggggatggaggagtgggcagggcaaccgggtctctccgcccccatacttttgggatccactctccctaacctgcctttgtttcccgcaggtcggggtagcctctgccccgcgcccaccccggcgcctcgccctgggctgaccgcagctgccgcgagctcgggccaaggcgcaggcgtgtccccctggtggcccgcgcgctcactgcagcctgtgcccaaccccgcgtctgcatctggagatgcggacttggacgtggacttggacttggacttggatttgagcttggctcttcgcagcccggacttcggaggagtggggcggggcgggggaggggcaccacgggttttttgttttttgtttgtttgtttttaatctcagccttggcgtgagctggggccttcctctcttctccagcctctccctttcactcttcacccagcatcctgcccccctgtccaaaaacagcaggacatcagacccatcccatcccaccacactcactcaccagctctggggaaagctactgtgaactaggagcaggattcctgggttctaatcgcaggtccatcactgactgtgacgtctagcaaagcccttgccctctctgagcctcggtttccgcacctcaagtaattaatcccttagcaaatggactcttttagacttctcatttaactcaattccctgagctagactgggattaaaattctcattttgcagtacattaaaactgaggcccagagatgtgatttgcttgaggccacacagctagatttttggtggaagtgggccttgaacacagtgtactttctgcagtttctgactgtaaaacccagtgtctgctctctgagttccatttccaagcccccctccatcttggacctatgtggtctccaccatattcacacaccaccaccaccacttgccaatgcctctcttaaagcaatatacccattcgttctcttattgggaactggatggatgaagccccaaattcagccccacccacagagaagccttcct

SEQ ID NO: 52615 - DNA, 1026 bp, Homo sapiens
gagattacctagtccagtgacttccatgcatggaagaggagccccaaacccagcggggaaagtgggctgcccaaagtcacccaggagtcagaggcagacttcccaccacaatttacacctcttgactcccttaccagtgccaagatgggaaaaggtggtgccaagatgggacaggtggctgagaaaggcctattctgccaccaacctgctgtgtgaccttggacaagtcacttcccctctctgagcctcatgttctctttcctcaaaatgaaataatgattccagctctgcctttctgccaaggagcatccagtgagagatgagctttacaatctgcacatccctgggaggggagtcaccgacaagaggcaggctggtgccaagtgggtaaatgccaaggttgggcctggcaccaccaggcttccctcaccaccttacccaagcctgcagcttccttggtctctgcccaagccttgccatctgtgtggtagcatcagctccacctcctcctgcctccctgcctggaaaaaggcttcttatatcttctcactttatctgaatattccctccccctccccagccagaccctcttctctcctcttctgttgtagttaggactctttgttgcaaatgacaaaaatcagcaggacaaggagggagaaccagctttaggcatggctgtattcagaggcctgaaagatggctcaggacattcccttgtgtgttcagtcttcctcccacacacactctctctgtaccttagctatggctttctcctcaggcgggccatccacctgaggtggccaaggcagccaccaacagctccaagctcacaccacacccattcaggtatcctggcaggatagcagctctgttctgattgttccagcaaatatctagggtgattctcaggggcagagcatggggtgagcgcctatccctaaattcatcattgtctttgattatttggctagacttggcttacctgcccaccccagaaactagaaatgagtcagccccactcaa

SEQ ID NO: 52616 - DNA, 1553 bp, Homo sapiens
agtggagcaatctcagttcatggcaacctccgcctcccaggttcaagcaattctcctgcctcagcctcccgagcatttgggattacaagcacctgccaccatgcccagctaatttttgtattttagtagagacagggttttgccatgttggccaggctggtctcaaactcctgacctcgggtgatccacccacctcagcctcccaaagtgctgggattacaggcgtgagccgccgcgcctggccgtttatggagcatttctgatcccagagccgctgcttttccccagcaagtgtcccagcatcaaggagtagccgcctgagagcaggtgttcctccctccctgaagaaaagaggacaagacgcagggaggtgccaggcactgtgcatctcacttcagatgcatttcctcagttggtcctgcagtaaccctaagaggtagacactattatatggatactatctcccatgtacagatgaggaaactgaagctcagggagtgacagagcctgcccaacatcacacagtatttgttcaggactctaacccaggccttttggactccaaactccttgaactttgcacttcaccaggtttgagggtgcagtttgctctctcttcctttcccctctcctgagcttcagtttgggcctcagttgttctgagcttccttgttggggagccttgaaaagctgtttaatgtgctcctctgcatccgtctcctggttgaagaggatgcattgagtcctcctgttcctcttcctctcaccctgcaccagctgaagaaagaatgggagagccccaccactggtgacgggtcaccacccccagatgggtccataccctgccttggcaaaggaaagtgaaggcctggcagatgacagtctctggcctcttgaccctctgtaggactgtgccccctttatctgagtgacaggtggtcaccctggcaacaggccctttgcccagcaggggtccctgacttcccagtagccacttccctttcacgtgtgaagatacacacatgttctgcagccacagcagctctgtccagctggagggagtctccatgtcaggccagctttcagatgtgggtttttaccagcccctcaccagactgccctggacccagcctgcgcaagcaatcttaataaaatgcagttctgctgggcacagtggctcacgcctgtaatcccaacactgagaggccgaggcgggtggattccctgaggtcaggagttcaacactagcctggccaatatggcgaaaccctgtctctactaaaaatacaaaaattagccaggtgtggtggtgggcgcctgtaattccagctcctcaggaggctgaggcaggaggattgcttgaacccgggaagtggaggttgcagtgagccaagatcgcaccactgcactccagcctgggtgacagagtgagactctgtctcaaaaaaataaaataaaataaaatgcagttctgatactgcctcgcctctgtttaaaccctacccctggcccctcattgccttcaggataaagtctaaagctgtgtttctcaa

SEQ ID NO: 52617 - DNA, 1053 bp, Homo sapiens
agtctgttggagagggacatttgggggctgtggtatgtttctgtgtttgtatgtacagctagctggtccccagcttacagctcacagtggttcaacatggttttttgacttacgatgggtttattggggtgtggaatgcattttcgatttaggatggcttgattgggatgtggccccgtcgtaaatcaaggagcatctgtattcgaaactgcacactgctgcatgccccagcatttgtggggcggacactggcacgtagagatttgtggatcaataaacatcccttcccgcttcctccctgttcatttattcatgaactctgaactccttggctccagagaaactgcctggaagaaagcaattagagcataattagaaccactcctatcatcggctctcagagggagggaagggggctgctggggcatggggggatgtccccaacctctgcagctgcccattcagctcctactcaccccatggagctcagcctccccagagtcctggacactggaaaccgctttacagggagatgcctcatccctggaggcattcaagcaattgataaggctagggaggagagctgtctgtcttgcatactgagttagagtagatgatctccaagtcccttccttgctgagcttcttgggtgctccctgccagggactggaacaggcattgcaggaaaactaaaaagtataacatagctcctgctttctagaaaacattcgttcagcagattgtagtgaatgaagactacaaggacaataggaaatgcagattacctggaggaagcaatttaccaggcagggttccattcattgccaggtgattaatggtaataataacagtaccagcagtcggctgggcgtggtggctcacgcctgtaatcccagcactttgggaggccgaggcaggcgaatcacgaggtcaggagatcgggaccatcctggctaacacggtgaaaccccgtctctactaaaaatacaaaacattagctgggtgtggtggcaggggcctgtagtcccagctacttggaaggctgaggcagga

SEQ ID NO: 52618 - DNA, 1102 bp, Homo sapiens
tcctaagcctgttttttgggaggaggtgggcatgttccacagccccagcctgaaccagagatgtgggttttcaattacacaattaaatgcacaattaggcataattaccagtgctcagagcccgagactgctcataataggcgtgtaatctactgcagcctctgtttatactactcagcgcgctccctaatgatgccaggatgccttcacactgcactgttgccatggagacaagcccgccaccaccatgcaaagctgacaaatggtgttctggtcttgggcctttggattgtttctgaggcttctaacagccagcactggagtggaggggctggccagggggacaggaaggtggggcaaccctccctggactctgacacaccccactggttcaggccagcgttggagccaccagggaggacaggggagaggagcatcagccacctctcacccctagagtcctcaagccatgagcaggatggcccggggccatgaaaggtcttgtggttatccattcatacatctcacgctatcatggaatcaaaggtctggacagggggtcctgcctacaccaggttcaaagataggcctggctctgctgtgaactggctctgtgaccttggttgggcaagtccttggccctcttgggggctgtgcttccccgtatataaaatggactgcagggtctctgcacatggcatagtctaatagagaagatttactgagcacttatgacccacctcattctgctgtaactgctttacctggagtggctcattcatcctcatggcaccctgtggggtgggcacagctactacctctatttcaccgaagcagaatctgaggctgagagcagtcacatccagcagtggcagagctgcgcaaacccaggtcttgcccttaaccccaatgccacatagcttcacatgtgccacctgaggtcatcctcacaacagccctagaggtggaactttgtcacacccatttccgtttcctagatgaggactctgaggctcagagaactgaagtcacttggccaaagtcacgcaacgaggcagcggcagagcacagtctggctggtgccaacagccagggttcctac

SEQ ID NO: 52619 - DNA, 1053 bp, Homo sapiens
ataagtagttctggccctggtaagtctggggccccatggaaggagctcatggctctagagagaaatgaaggtggtagagtgtctctctgcctcccacttcccttcctccatagttctcccttgctaagctaaccccactcttccacttagaggagctcaccagcactagaggcttgagttagatgagacctgggtggcattctggtttctcccacatcccggctgggtggctttgggcagcttgtgaaggttgcacaagatcatttgcgggaggaacttgaaaattgctctcttggctctgttgcactatctgggctcattgcagagtgggccctccagttgtcactaacctccatgagcccctactgcctgatagcttccataatgtgccccgggatgttggaattcaccagcctgaggggagaagggagtcttggttttctcatccaagggactgaagggaaaaaagaggctgttaaatatctttcagctgaaaacttaggaggaactgtgtcatttttctttctcaaatggagtttaatcgttacaatgaatcaggccaattcgaaacattcttcctcagttgggatagatgtgatttgggtgagggagtgaggtgtgagggtgccatggggtttaagggaagcaggtagggactgtgcctttcagatggataagtgtaggatagtagttaaggctctgaagtttgacaggacagacctggcttttagacctggttctgtcacttcctggctatgcaattttgggcaagttgcttaccgtctctgagccacatagttttgtcatctgttaaatagagagaatataaaacagttcctaatccttagggttgttgtgaggactcagtccatataatgaatttagcactctggcaggtacagagtgagtactcattaaactgtagcttattgttattatcttaatgattcatatcatgggatgtgtctgtggcactgtagcccaaacatatccaggtgaccccctgcactgtcctttgtggactgtcctttgtgggaagtagcaggtagttgg

SEQ ID NO: 52620 - DNA, 1755 bp, Homo sapiens
ggcgcccggccccgccgcccggcgcgcccagcggggaggacgtggagcccgcgcggcgcgagcaggcggcggccgcggagcaagaagggcgccgcggcgtgcggcccgcgcagcccccggagccatgggcaagtgcagcgggcgctgcacgctggtcgccttctgctgcctgcagctggtaagcgtcgcgtgcccaggcagtcggggcagggtggggcgcggcggggcgcggtcccagggcgtgcgggtggggttgcgtgtgtctctgtgtgtgtgtctggtgcgtgtgcccgggcggggggtggtctggagtctcggagcggtcgggcggagcctgctcccgctggccgggctgtctctttgtgtgcgcttctcgctgctgtgcccggcgctcctccggtccccaagtgcgtcctgtgcgcgagtccccggcccgcccgcactgtacaagtggcctcctgttgggggatgcgctgtgggacggtggcttgctgggactgggggtgtgtctgaggctgatctgtggatccgttgaggtcctgctgtgtgtttccctctagatccctcgtttgcatgggtctctcccttcctctgggtctctgcctctgatcaccacccctgtgtgagcgtttctcacaaagtctctgctccggcgtgtgtctctcagggtttctctttggtgtgtctctaaatcgctgaccatttctggcccatgttcatctgtgttctgggatcttagactccaagaaccctccaatcctttgtgttgtttctgcctcccttcaccttcctgaccgggcagtcctgggaaaggagagccacctccctggagagggtcaccaggagctgccagatcctgggccagcctgacccagcctggaccacacttcctgctttggtctggccgctgtggccatgggggttccatcagtcatcagttccacccaccagagcagctcctctgccggggccagcaacagtggggatggggacacttgggtgccctagggaggaccagagcatctgaggacactgtgcctagccccagcatagggaactcaggttcttgtctcagggaggagtgactgtagtggactagaagaaacagcactgcccttcaaatcaggccctggcaggggaatttgggagggtggttaaggagaggcaggggtctcctacctaccctagagctgagattgaacaactagggaggttgaagctgtgcttctcctctaggcagaggtgcatggggacctccatcgccgaacccaggtctgagagtgggcagcgaggagcctgagcccccctcatgctggactccttgttctgggtttccactcttgcctgcatccatcacgccctccccaccacaggagccaatgataatgtagagtgaagttttgagcctggacatgcagacctcctcattcgtcttgcttctctcctcctggggacaccagcttcaaacatgccatccacagacctggcctgggcagtggtggaaacagccctagctctggagattgtagccctgctcccagctgtgggagactggacaagtgacttccccccactggccggcctcagtcttcttatctgtaaaatgattatccctgaggattgcagagggaattaattaagatcaggtggaatgggaactccagaagggcagagattgtctgtttttctttatctactttgaggaacatgaaatgccaagaaatgtttaaacctttcagaggattcttctgtgtt

SEQ ID NO: 52621 - DNA, 1020 bp, Homo sapiens
ttttgctggttaatttgctgctttcgtggagggacaagcttttgtcattgtttattatactattttcactgacataccctctatttttttaaatgtgggttgcagcctactaatgaattagtctctacggtttgaaaaaattgtctgatatccttgttgttctaaaaaatatatgaactaagtagttaggggaattccattctaagagtatgttgatttaactctgttcacttcaacaaagaagtctgaaaatataaccgaagttttgtttcaccagccttcaaatgtcttggcaaaattgagcacactgcttaccatgtgtgttattaggatatccaggagttagtgatataggatcccaattatagatgtgttcatgtccacaaagtcctcgtacttaagggatatttgtactgtgcaattgcttcttagaatgatgttgctgatagactgtcttgtcctttgcttcagctttgggacatccggaagaaagcagccatccagacatttcagaacacgtaccaggtgttagctgtgaccttcaatgacacaagtgatcagattatttctggtggaatagacaatgatatcaaggtatgtttgatgtttatgatatatttccatttcatctatctgcacttagaaacgaattttttcaaacttctgagattgtggtagctttgcacttaataccaactgaaaggaaaatagtaacttggaacttattttctttttctcctgtcttcattgacttcctaaattaaagtttgcattgcagatcttataaatgctgtcagggaccaggcacttaatgtgaagtgtgaagtctctgtagggggactatgtaaaaaataaagagtgcatttccttttaaagacattcaaaatctttttttaaccatcttggtttaaagagagcagtgaatcagtttgtgattctgtatcctcatctctcactgtgtttttctttttgacactatggaaagagagttttctaagtttctctaagaatgagagaagg

SEQ ID NO: 52622 - DNA, 1129 bp, Homo sapiens
aaaaatgaaagaaagaaattgtcctcagagacaaaagaaaaactttggtaaagagaaaagattggagtcactcagctgtcaggtcggtaccacagtctgtctgatctctgcagcaccagggagttattaaacatttccaagtgagagggtgtcttatgtttaaaatgttagctatcacaaaagaggaaaagatagagcaaactgctacattagatgtatgtcatggggactcaaagaaggggaattttttaaacttcacaggggtagatcttttatctgggccatctgggcctagaggacaaataggattttggtagggtgaggcattccagcatcatgggcaaactggcgtagcacagcaggtcagtgatcttgaaaaatttggcaccttttgtcaagtaggaaagatagattgttactgtttatcttcacttatttcttttttattctttctcttactttctagtatgcttttctcagcatccacagataaaaccgtggctgtgtgggatagtgaaacaggtgagagggttaaaaggctaaagggacatacttcctttgtgaattcctgttatccagccaggagaggccctcagcttgtctgcactggcagtgacgatggcacagttaaggtgggtattgtctctccgtgttccagtttctgaggtgatgtgatgtgaaccttatcttgccttgccacttgtactctagcttcctgtgcaaaacttaattttagcagtcatctcccataacacacttgaaatttttccccatttaaaataaaacatttaatacaagttttaattaccctacagaataataatagaaccatagaataaattgttacttgaaataggccgggtgctgtggcttacgcctgtaatcccagcactttgggaggccgaggcgggtggatcacgaggtcaagagatcaagaccatcctggctaacacggtgaaaccccgtctctactaaaaatacaaaaaataagccgggcgtgatggcgggcacctgtagttccagttgcttgggaggctgaggcaggagaatggtgtgcacccgggaggtggagcttgcagagattgcaccactgcactccagcctgggcgacagagcgagactctgtctc

SEQ ID NO: 52623 - DNA, 1045 bp, Homo sapiens
ccttaagcttactagtggccaaacgtctggattgcttagggatctttgcagaacatatatgaattattgataggcttaatttcatcagacaaactacatagttttttttgtttggttggtcggttggctttttagagacggagtctcactctgtcacccaggttggagtgccgtggcgcgatctcggctcactgcatcctccgtctcctgggttcaagtgattctcctgcctcagtctcccaagagctgggattgtaggcgtctgccactacacctggctgatttttttatttttattaaagatggggtttcgccgtatcagccacgctggtctcgaactcctgacctcaagtgatccacccgtctcggcctcccaaagtgctgggattacaggtgtgagccaccgtgcctgacctgagaactgttgttctgataaatttataagtaccctttgcctagtaatgctcacagaacccatctccctaacagtactgtggaatgtctatggtgactgtgataactatgccacactgaagggacacagtggagcagtgatggaattgcattacaacacagatggcaggtgagtattctgcataatggaaggacagcttctcatactaattcttggcgtcctttcacctttcatcctttctcaggagaccctgctatcaaaaactactaattttgggtagctactttagtatccgatttatcactgtcaccccaagtgaggtgtttatagtctgtgtatgcaaatataaagatgttacatcggtcatttcaacaacccagacaaatttttctttttttaagacataaaataaatgtgatttttatatgtaggctggagtgcagtgacacaaacatggctcactgcagcctcaacctcttgctcgagggatcctcccacttcagcctcccaaatagctggggccacaagcccacgcctccatgcccagctaatttttaaaaatcatttgtggagacatggtcttgctatattgctcctgagctcaagcagtccacctgcctcagcctccca

SEQ ID NO: 52624 - DNA, 1057 bp, Homo sapiens
aagcggtaagtgaagaagcaggcggcctttggccctcagctcatcttcctcccctcagagcgctgtatctggtgatccctgaccctttcccgcattgcgggggcagaacgagagtttctacgcagagttaaagcacataaacactgtaaaagctccccatagcctgcgaatgctgcgtacgtgttcccccgtttggcgcccgttttcagcctctcgactgccctgagatagcattagaattagagttgaggaccttgggctcaaaaccctgacccgggtttaagcatcctgactctaacatggatctggcatagaacaaaaattccgaagagtgtgtagaatgaatgaatgagggagggaagaaaaaagggaaatgatttgtgttggctcgttttgggactttgggcaagttgcttttccctttatttctctgcactagtattattaacaactaaatagcagctaacattcattgactcttgtactaaagtgtttcgtatatgaaatttccattgatcttggtagcagcctgttaggaacgttattaacccattttgcagatggaaaaacagacttaccaagtacgtgatagaagcagatttcgaactgagaaaccatgctcctaactacattttttgtaagatagaaatagtgatcacacttctaatgtcctgtttaggctcagacgaggaaatacgagtgtcctcacatctcctcaataaatcctgctggcaccgtcctcaaaataggtctagaattgctacttctaccatctccatcattgcctcatggcctaagccattattatctcatctggcatttttgtagtgggaccctaactggtcttccactttctacctttgtatcagcacctgttaccaagccaataaccaaaggaatccttctaaacatcagatcacattacactctgcagaaaactttctggtggctttgtacttcatccagagtaaaaaccaaaattcttgtaattatttgccctctttccctttacctctctgaccaatttcttattgctcacctggcttcagttactctc

SEQ ID NO: 52625 - DNA, 2881 bp, Homo sapiens
cacatagggcagcaaagttatcaaatatttttaaaaaatgatttaaaacactcctaaaatctttgagattaataaatattttaaaagattgctgttaatacccagtgttagaaatggatacttttactctctatcaggagcataatttcacagactttggcaatgcctattaacatcttttatgtgcttattaccctttaatccagaaattctttgaagaatttagtgtaagtagagaattacataaattatgtgcatctgttttgtagactatgcagatgattgaaagaatgactgtatttctaagacataattatgcctcatcttaccagaaagatgccatggaaggttttcatacaattccatcacactgctacctgactgataacagttgtaaaacatcattgattatgagaagcactccaatttcagagagattaaagtgagaggaaaagaaagtgcatcttagaatcaatgaaacacaataaatgtcagtttactgacatgagccaggagtggtggcatgcacctgtaattccagctacttgggaggctgaagtagtaagatcacttgaggccaagagttcggggccaggctgggcaacatagcaagaccccactgatggcgatggaggcctgtctagagtggctgctgcaaagatgccagccatagtgggggctgtgcggccagggctgcatgttctatggagctggcaggagccctgcccccttatgagttagtggggtgggagcccaccctcatgggtgcagctgccgccacccagccctggctgcagacccaggcatccctgcactcttggaggtccgggaagacccctttcccccatagtctcagaagtgcctgctcccactgcctggactctccaagctcccggctcctgctctgattttggagcaaagtcgaagctgagcctgggcactattgcaacctggctgggtttgcacaccttggggtggtgctgccatgccagcttcctaccatcttggccccctctggactttgggtgccagtgagcacaggagggaggccaaaggggtgctgagggtggctcagcatgggcctgcaggtgcccctgggcacagaacaactgggcgtcatggacaacatgattgatggtgacaagaggcagacaggctcctgggtggaaaggggcaggtctcggtgaagccgcaccttcaagccagggatggcctaaagcataggggccaggctgtcagttccaggtggagtctgtggcccagagtgagaacttaaggtgcttttcctgggcctgcccatggaccagtcagcacacacttctgaagactgtaaaaatcctggactcagccagacttgggcagacactgggaggacttgcctgtggaaatgggttacccacactgggtctcctctccgtcaagggctgcagatgttgggatgacctgcctgcagataagagctgcccattctgggtctcctctctgctaagagctgcactcaacaggttgacctgcctgtggaaaggagctacctactttgggtctcctgagagctgtaccatcactcaataaagcaactctttgccttgcttaccctccagttgtctgcttacctcattcttcctggatgcaagacaagaacttgggacccgttgaatggcgggactgaaagagctgtaacagatccaagggctccctgagccagagctgtgacacctctttggggctttatggttcctggcctctccaagcttctgggcaccaccatgttccccagagtccacagtggaagccgcttgtggtatgcctggtccatccacagcctcacatggagctggtgcctgtgccagcacctggagctgcctgcccagccacagcagccagtgtgcctggctgtgcacagtggctggaccccatgctcactcactcatgcatccctcgccactccgagcctggctcgcccttggcaggtgtgggatctgggacggcagcatgagccaagcgcagcccattagaccaagtggatggaacaggcctagtggccccaagcaaagctgaatgcagcctgccaggccaagtgggcagaacgagcccagcaggtccaagcaaaactcgggcaaaggtgctgctggccacagcagcttctggctggaaaagtgacacctgaagaatcttgtgacaccatctttacaaaaagttagctgggtgtggtggcagaaggatcacttgggcccagaagttagaggctgcagtgagctatgattgtgccaccgcaccccagcctgggtaagagtaagaccctgtcccttaaaaaaaaaaaaaaagaaaaaactaacatggaaagaagtctaagataataaaatttaaaaacatgttgcagaagactttgtatagcatctctcttccccttttaaagcaagtgtgcatatgcctttaatatcttttttctttatatagtttaaattactgcctatgtttagaagaaaggctggaggaatattcaacagattaacaatggtcacttctggggagttggttttgctaaggaagggatgtacatggaagagggactttgacttctggaaattttttttaagttttttctgttaaaaaaaaaatccaagaggtgatctttggataataaatccatgcctctaaccttgtagactactattctgcaaattgcatctttgcttaagaaatggtttaccagcagttttcaagctggcagtcagcagtctgtaattaagtttctcattttatgttgtctggaatttaatgacatcgaactcttccccaccccacaggacattcatctctttctgtctgagcacaggttttcttgttagtatagttgccatagctgccagtgcctgaaagt

SEQ ID NO: 52626 - DNA, 1033 bp, Homo sapiens
atctattaggcagtgcaaccctatacaattataaagttcttttttttttcctactgtcttctgccatccagcactaaactatgaaattttgagaacagatttttcaacattatactttcagagtttcttgcttatgatagaagctcaaatatatttagcagtggattcagtttagcaaataattattgagttctattttctgattagcttttttggtgggaacacagaggtaagagaaacataatcccttgctgccctcagattgcttacagtctagtgatgtaaacaaattagagtggcgtgtaataaaaatgagtgttgttgcacttagtccatggaattgtggaacggttaggctgtttggatgagtcagggcatagtacaatacttgaggtatagtgggtgggtgttcagtaaatctcactgaatgaatgaatgaattatagcctcagttctaccattaactggcttcttggcaagtctcctagtctttgagccttaatttccttatccctgaaatgggaatgatgtgcatattttagggtcttgagtttttttgactgggaggaccatgtttcattaacgcttggatatatttttgcctataatatagtttaagcgtttagtaaatgttttagtgaatccttaatcccaacaagaataaagggtgttaaaacactttcacgaatgtgcttatattattgtcatataccattgattgggagatgaattgacttaaactgtggagagggaattaagattacccaagggtaacagtgaccttttgttttgacatttttttggctgcagctgtcctctaatgatttgagattttcacttctttcctttattgccagtggaagttgtggaagaaattaatgttgaacctaacgcagttggggtaacggttttaaggggactataatgggctcactctgttactctcatgtggtgattgaggagctagccctttccaagttgtcaggtttcgtttttttcctgtttttaccagcagacactcagatgggactaa

SEQ ID NO: 52627 - DNA, 1107 bp, Homo sapiens
gttagtgttgggaaaaggaaaaagaaaaaattctgatgattgcattgtaataaatagcttctgctccaaaaaatccaatgctatatggactcattaaaaaatagtgaaatttcccaaagccacccttacagtgataaaatataaaacatgtaagataaaagagctaaccctgtttctcagaaaatgggtagggaagggaaagggctccctggttttgggctgtctctgtgtagaactatttttagtaataatcaagtggctgaaacagtaacttttgttgtaaattatgtctatagctgcatccaggaaggaagcatggcataatggaatgattagaggatttagagctagacttgaatcagaaagagtactggttctgctccaaactaatatatgactttgagcagattaattagtctatctgaatcttagcttctttactataaaaggagacagtaacatatatctaaggaatgcttgagtgatttaagtaaaatcttatttgtaaggagccagcttcatgtctagtctatggtagacatacatgtagctacttgtagttattgttttaaatgccgctttgttttatcctctaatatctgagattatagcaccttttcttttttcctcatactatggtgtacggaaccacacctttgcttttgaaagagtgtgtgtgtaagacccacaaaaacagagaccatgacttgtctgccattgtgcctgatgtatagcatccatagtattcatttagtttttttgagatggagtctcactctgttacccaggctggagtgtagtggtacaatcgtggctcactgcaactctgcctcctgggttcaagcaattctcattcctcagcctcccgagtagctgggattacaggcatagtccaccatgcctggctaatttttgtatttttagtagagacggggtttcaccatgttgaccaggcaggtgtcaaactcctgacctcaagtgatcccccgcctcagcctcccaaagtgctgggattacaggcatgagccactaccgctcagccctagttagtactttcatttactcatttgttcaacaaatataaggcaacttgtaataaatactaaa

SEQ ID NO: 52628 - DNA, 1041 bp, Homo sapiens
atgagaactccctcactatcacatgggggaaatccgaccccattatccaatcacctcccacaaggtccctcccccaacactgggaattacaatgtaacatgagatttttgtgtgtgggggaacacagagccaaatcacatcaacatatatattatattttggtaagaagtctaaaaatgttttaaaaggctatgagaaatgcaacaaagagattaattctgtctgaggggctcagaggaaaagacttgatagaaggagagctagtaactgaactgagccatgaaatgtctaggtatagtgaagtggtgaggtgagagtcaagtggggaaacagagcatttcagagagggggagaactgcctgagcaaaagcactgagccacatggataagagaaaatagacttctttggccagagcatattgtgtgagtaaagatgaggctggaaaagtagtttagagacaaactgtgaaagaccttgaatgccaaggtaaagaatttggagctgattttctagaaagcctttgaaggtcttttaaacctatgagtgacctggtaagggttgtagggtgtttagcatgttgagtaattatatattttcatcctctgtgcattagtgagatgaaggttagtctcattcgtaattgttaatttagggctatttcacatcattgcatttactgcctgtctcgttctgtcaaaaactttctttctttctcccctttccctgccaaaaacaaaaaaccaacatacaaccttaccttgtagtatctctggccatatctcttaagggggccggcagtcggtatctttttcattataggcaagaagagaggcggaggcgatccttccaggattacactgggcagaagatcacccttgaggctgtcttgaacactacctgcaagaagtgtggctgtaaaggtagggtgaagcctctgccctttccacgtttctctccttgtggatggacccttttctggaagaaggaggcagcccagtgtgagtttagtttaccctgttttttagccaagtgatggcctt

SEQ ID NO: 52629 - DNA, 1108 bp, Homo sapiens
tatgtctggcctactgaaactacttgactactgcttgggtaggaagtaccacagccaggctggcagatctgttcaagcttggggacttcacttggagaatctagccttgactgaattccccccagacccagggagagcagccaactgtggattctgcctaaccacagggcctcaggttttcacctaggcatcttcactgcacaccttcttgggtcagcataacctgttaactgcattcttgtactcatgtgggacaggggtccccttgaagtttggaatgaggtgcctagctttggtggggatgtgatatgcaggaccaaattctcagtggcagctgaactatggtgaggccatgggtctggctctatgatgccagaccggatagtgggaggtacagggctctggccctggcactactctaagttagggaaggattggagttagtagccaaacacagtcctttcctgagtctctggatatttttcctatttgtcaactatatgccaggcaccatcttagacactaaggatgaaggaagccaaatggtataagggaaggaaaaacactcaggatcttgaccaaattacttcctctctaaaggctcgttttttccaaatctctaaaataagaattacaatgcctatcttaaggatttgctgtgcatatcagaaaaaaaaaattatgtatgtatacacacacacacacacacacacacacacacacacacatacatacatatagccggcacatagtaggtactcaagtgacaattatcaggaggaagggagggtagaatgctcgcaatggtgttcctggctccaccccccatctcactctgtctttccttccagacactcacccacggcactgcagtttgcactcgcacttatgagaaagaggcatgacctgactgcactgttgctgactactactctgccaatcggctacccctcgactcagcaccacattgcctcatttcttcctctgcattttgtacaaatccacgaattcttctggggtcaggtgccactgaccgggatccagttccagttcccatggtgtatgtggttttttttttttttttttaactgcactcatagggtgctct

SEQ ID NO: 52630 - DNA, 1095 bp, Homo sapiens
caggaagtctaattatccaatacttcctatcactaagggtcttttagacattatgtggactaaccacaaggctggataaagattctcaggactactcctcctcctcagtcagtctttcccagggatagactagtaaatcccacctgtatctgaggggaccaggctacgggaatcacctagagtacagataagtgtctgtcttgaaggcttgtggtacttctcagagccaggctctctggctccaccatactgcctgcctctccctccttgcctaatatctgaaggcctcttccccagaaaggcagtagtggagcagaggctggaggtgaactagatgtcttgcagggatagctgggaggcggattgcctgagctcttgtcctcacaccatcactagtttgggtcaaaggctgtgtgctctgtggcccagtgtccagaccccaccctgcccctcaattcctgactaagatcacagctcaggcctctaccctctttccacagtccattgtgacactggatggagggaaacttgttcacctgcagaaatgggacgggcaagagaccacacttgtgcgggagctaattgatggaaaactcatcctggtaagatgggcaactttggagctatatctgattggttattactactgctctttcagccaagcctgttctaaaaagccaagtcctcccctgagagctgtagaagctgggacaagagagtggttgtgggtcagggtggtatcaggtgggaattttctgtgtagtggctttggactcacacaggccggaactcaaatcttaccttataggctacatgactgtgggcaaatcaccttttccaagtgcaactgtaaaacgggtattaataataccaaccttgtagggctgctgggaagcctgtaagagacagtgtatgcacagcacaaagcatcactgattgaggaacacagcaggtgctccatgtcctttgtttgctcttcctgtgtttctaccttgcctcacctcaggaagaagtagaaaacagggccaaatctgatcccaggccctctaggaggggctcccattgcctatctcagcattccctttcctctcctcc

SEQ ID NO: 52631 - DNA, 1912 bp, Homo sapiens
cctcggactcctcacttgtaaaacgaggacagatgcccgtgccagaagtcaaccagagctttccccggcgtgggcaccagcccaagggcgttttgcttttctagtctcatctctgctctgacgctaagctcaaagagggactgggggacgggaagatatccaccatggcatgcgccctagctctcgggctggtgttggctgcttccttctcagattccagagtgcctagaggccaggaaagggagaaggtcctaccagcctggggtagggactcgggggccaggcactggcgctgacgcaggctagcagggcgccactggctggtccccacccacctcggtgggttgggggatgggcgcaccagcccctcctgggtgagccctagcctggggcttcctatttcgggagccgggggcgtgggccacgtctcctcatgtgatgcgagggctatttaaagcggcagcccgggcagggagccgccgtcggagcccttgcacgcctgctctcttgtagcttctctcagcctagcccagcatcactatggtggacgctttcctgggcacctggaagctagtggacagcaagaatttcgatgactacatgaagtcactcggtgagcaagccgcggggctcaggatgttggcttggggactggctggtggcgtgcctagccccacgcagcactcctgccgcatccctcctggttaagactggggaataggggagcgcggagatggcagcctggcctagagcaggtggggcctgttcagagggggctttggtggtccaaatctggttagagaccacggtagggaggtggtggaaggaggcagctgtgtgggaggctctttccaggaagagggatatgtgatttggaggtaggaggagggtttggataaagaacactgatcacaggaaagggagtgtagccaggggagaaaaagaacaggggcatgggtagtttagaaattggaggagactgaacccagaaagggaatggggcagccagggagtgtacaatgatgtaaacaagtaggaaatacctaggaggaaaaagattagtggggaaaaaactgtggatcagtgaatcagatatgagaaggacgtaagacaggaacctgcagtaagcagcaatccccatctctgcttggttagggaagagaattcttgctggagaatgccctttctcaccagccagtctgaccttgtcctgcagtctatgtatccaggccttcatcactgtctgtgagcctcgtggtagggtggggcaagaggcccatgatcagctgggcctttcctgcaacccaaggctcacctatctgtgcgaggggtaggcagagaaagccattggacttctgatgtgcagtagagggtcccaaggcaaggtcaagacctgggagggaggatcactggtttaggaggatgtggagaactgctgtggtgttgggatggagaagaatcaggattcaaagaatctcacaggtgaggaacttggagattcccataccatctagttcaacagggaaactgaaaccaggagagtagaaatgtattataacaattccacagcagagccaatatgaaaatctaaggtttctagatctgtaacccagagctcttcccactaccctacaggccctgcgagtgggaagaaaagtagaaactgcttagctaatgattgacctcagcccttcttctactgctttgggcttagatggagaggtcaaagctctcaacggcctctaccctatcttgggcgctatgcccagtaattctaggcaggcagtcattcttagaggagcagcccccagcccccacgaacacagcccagcagctattgggaagttggaatgcccagatttagttcctccttccaaagctgggccagagctgagtcttgaattgagctgca

SEQ ID NO: 52632 - DNA, 1094 bp, Homo sapiens
ggttttagcctggcctggtaagttctgaacagaggaaggaaggaagcatcccagtgaagagacaggatgctccaagagaccttggagtgacagtgactttattaaaatagcatttaccaagtgctttttctgtgccagtcactgtgctaagtgctttacatgatcacccgttttaatccttactagaacctacaagttaagtattatccccattttagagatgataagatagggatagtgaggctaagcaacttgcccagtggctgactccagagcaggtcctcatacctctgctgtactgcctctgatgtctgccccaggcaaggtggtcctgggagctcaggcttccttttggaatgcaaacgaatcagagatgattgcggatagtccgttgtcgtctctgcaatcccctgagcctcagttgaagagacaataatggagatttggagaaagagggatgagggccttccacctaaggggagcatccagacacggtccctgttgtgtttctgacatcttagacagacccttgggatttctctaccctctttgtgcttctgtgcccatcctctcgaagttccttgaactgttgtgatccagtattcctgattgatggaggtgctcatggcaggtttttgtgtgtctggtctgtgtgcccctcttctccagctctgtcccaaatgggctacaacctgagcccccagttcacccagcttctggtctcccgctactgcccacgctctgccaatcctgccatgcagcttgaccgcttcatccaggtgtgcacccagctgcaggtgctgacagaggccttccgggagaaggacacagctgtacaaggcaacattcggctcagcttcgaggacttcgtcaccatgacagcttctcggatgctatgacccaaccatctgtggagagtggagtgcaccagggacctttcctggcttcttagagtgagagaagtatgtggacatctcttcttttcctgtccctctagaagaacattctcccttgcttgatgcaacactgttccaaaagagggtggagagtcctgcatcatagccaccaaatagtgaggaccggggctgaggcca

SEQ ID NO: 52633 - DNA, 1104 bp, Homo sapiens
gatggccttcacaccccttcctccaggtggcgcccctcccaatgtggatcctgaggcctactcctggttccagtcggtggactcagatcacagtggctatatctccatgaaggagctaaagcaggccctggtcaactgcaattggtcttcattcaatgatgagacctgcctcatgatgataagtgagtctccgccttgcccttgggcctgagctggggcagagccacctgatagtggacagtaggtgggtaggtgggtgggtggacattctgaagagaaattcattgaccagggaggactgtggggaggaagctaggttcagggtgagatcccctagactgagagctcttttcctgagatctttcttaagttctagaccctgcctagttacaggttaacttagtttcctcttctgtagaatggtactccctcccctgtaggaaacagcagggaggggtcaggtgccaagcctgcagagaaaatgcagttctggatggggtggggctaaaggtgtccagagtaggaggacggtgcaacgcttgatgtgggtgtctcaggtgcaggcatctgggcctcagggcttggttctgtgaagtcgcctactccagcctggagagaagggctgcctcaatgggtcctgagggggacccttggccttcagtcttgaagccttcctcccctcctttccctcctcaccttcagacatgtttgacaagaccaagtcaggccgcatcgatgtctacggcttctcagccctgtggaaattcatccagcagtggaagaacctcttccagcagtatgaccgggaccgctcgggctccattagctacacagagctgcagcaaggtgcgggtcatggccggggcacgatgggcaggacagagctagactcttctctttacaccctaagatacaacaaaggggtttcctcttgttaccgaatgtccacctgcactacaaaatgctgttctcagtgcaggcctgcatccctcaccccttctttgacccagctggggcactgagccaagagccagggcaaggaaacacctgggtccagaatcagggctggaccctggagtgctgggtgagacggccccagccaca

SEQ ID NO: 52634 - DNA, 1082 bp, Homo sapiens
ttgtttgttttgagatcggatcttactctgtcacccaggctggagtacagttgtgtgatcatggctcactgtagcctcgacctccccaggctcaggtgatcctcccaccttagcctcctgagtcattgggactataggtgtgcgccaccacacctggctaatttttgtattttttaaatagagatgtagtttttctatgttgcccaggtttttagtagagatgttgtttttctgtgttgcccaggctggtctctaactcctgggctcaagcagtctgcccgcctcagacttccaaagtgctgtgattacacagctgtgagccaccacgcctagctgttgaactggcctttgaaagcattgtatcgtattgccttaggaatagggtctcccctgcctgcctcacagagttgtgagtgaggatagggaaatgtttttacatcagggtaaggaagacatgctgtggatgaatccatgctatagctatgtcatttgtgactgatgagggtcaggggtgtgtgttagagactgcgtttgccccatgagttctgcagatagagatgggagtaccacaggatgggcatttggaattctgtttgattcatttgcctattcattcatacaggaaatatttaccaagtatccattctacactgggagctggggataaagtgacaaaccagacaggatcctagcccttgtggagccccttgatgtgcaggaaaggagagttaggaaaggaggatttcaaccctgactctgcaggtcattggcggggtgactttgggtaactcgttgctcctctggaagcctcagtttgcccatctgagcagtgagatcataattccaaccctacctataggatcagttgaaaggatggtggtggaagtgctttatggttgtaaagtgccatactctgcctagtttctggcctcatcattctgactgatatcttgctcttcctgcagggctgcccaggagctgcaggacaagcaccaggagcccctccgggtagctactaccctggaccccccaatagtggagggcagtatggtagtgggctaccccctggtggtggttatggg

SEQ ID NO: 52635 - DNA, 1083 bp, Homo sapiens
cctgacttggagtgctgggagatttgggttcctggagttctgggcctgctctgctgttggctcacttagtgaccttggcctgggcctcagtctctggacctcagtcttccaaactgtatgctgggttgggggcctccaggcttcctggggagccagggtcagaaggcaggtggtgaaggcaggatctagctgatggtccagagtgaggactataaacttgctccctcccaggttccccaggcgtccagccgtgcagcaaccttggcctgagcgcacctaatgcccccctgccccttctcttctaggtgcacaatgcccaccttcacagcaggaaggactcaaattggaacacagtagtagcctgccagccaacgtgactggtgagcacccaaccatctcatcgcgccgtccctgcaaccttcctctgggagtgatctgtacccctctccacctgctcagctgagctcttcacctgatgtctcccccaaaggcttcaacctcatccaccgactcagcctcatgaagacgtctgccatcaagaagatccgcaaccccaaggggcctctcatcctgcgcctgggggcggcccccgtgacccagcccacgcggtaaatgcatccatgtgaccactgagaatcaacactgacctcagccacactcctcagcaactccagatgtggggcttaagcccaggggcctgtctgtgggtcattgcatcccagcccctgccaggagtcaacctggtctccacccctgggcttgcagggtgggctgagaggtggtacctggcagacctaccttctgtctttcccctgtctctggccagcagtgggtgggaacaggtctgcatcctgtgggcactgtgagaacacaggatgtgggcgggaacctggcaagagtcatgtgcgtgtgtgcatgtgtgtgtgtgcgcacatgcgtgtgtgtgcacccatgtgtgtgaagtccaaattcccacaagccctggcctggcccctgcttgcctcttcaacctcagctctcaaaatgctcttttttatctcttgctgctctggtcatgctgaaccctttccatctttttttcag

SEQ ID NO: 52636 - DNA, 1138 bp, Homo sapiens
gaactctaccacgagctcaaccagaagttccacactttcgaccgctaccgcagccagtccacggccaaggtgagggctcctcccgtggctgcccctgccctgaagctcagggcctgacctggtgcagtggcccctggggttggagcctgaccggtggcccccgttgcagagggagaagcggtggagtgtgtcctcgggtggggcagccgagcggagcgtgtgcaccgtgagtccccccgggctgggtggggtgaggtgggcctgagggacccgtgccctccctgccctcctgcccctcccaggcaaccccagcctgtctcaccaagggcctcccccacggcatgggcaacagtctggggccgcctgggggtggggaaggtgctgcagatggcgaacaggggtggaggtcctccaggattgggagggagagtggtcagcaggagacatgtcctgggggccactgagaacaggggtcaggagccccaccctggaaccaggcaggtctgtatttgaattctgcttgacacctgattgctccataactttgggcattaccagccctctctgggactcctcagtttgatcgtctgtacaatgggtaaggatattggcccatctccacggcccctcccgctccctccacaggataagcccagccctggggagcgccccagcttgtcccaacatcggcgccatcagagctggagcaccttcaaatctatgacactgggctcgctgccccccaagccccgagaacggctgactctgcaccgggcagcagcctgggagcccacagaaccaccggatggtgacttccagacagaggtgtgagtgccacgctggactgcccactgcatataaatatatatatctctctattttcacactccactttggaactacccaggagccagcgccctctcccctctcccgagggctgggcagggaggcgccgtggactcagccaggctgggggagccggacatggcttggcctggggtcccagggcccttccttgtttctcagaggcccctcagccactggaaccccatcttcagcccagcctgtccgtccctgtcccgggctggggaggggggaggggaactttgttgggaataaacttcactctgtggatttt

SEQ ID NO: 52637 - DNA, 1887 bp, Homo sapiens
tgtcccccgcgtgctctgcctgtttaatctttctgtctgggtgtctctgtcgcatgcgttctctcactgtggttgttgttgctttgtccctcttccagtccccctccccagcctacccagttaggctctggggatgccgtcccggccccgtgcatttttaaaaagctcctcaggtgattctgtgcatctgtctgcctcctcttctctctccccgtccctttccactgtctgtggctcggtcccactgtgtctgcgtgtccttccccaccttcctggtccctgctctgaccccgtagttcgctgctttcggtctctgttctgtttctctggctctggctcctcagcccctctctgcttggggacattactgaggccctggggtttggggccctcccagtcttgggcagctgaagagctccagctgagtggaggcctaggctcaagccatcctgtcccccggagtgtcactctgatgggctctgccactgtcccctcagggcctcactctggagctcctgcgtggtgctgcccctgctggcgctcacctggatgtctgccgtcctggctatgacagaccgccgttccgtcctcttccaggccctctttgctgtcttcaactccgcgcagggctttgtcatcactgctgtgcactgcttcctgcgccgagaggtggggctgggcctctcccgcctgtgtgtgcccaccacacctgccaggcccttggcttctcctcactgtgcagaccgggaggatcgaggccccgaccagggtgccccaggccccatctgggcagcccttactgtggaagctgatagcccggggtacccgcaactgtcccttatgcttatccttggcctcctgggtctcctcctcccgttgcaccctgcccaggtgtcatcaccttccccaaggttggatgtgttgccttccttctacacttgcctgggcatctggggtgggaagcacagccatctgtggtcgggggccctgcagtggcctcaggcccagcaggcgccctctgtccccaggtccaggatgtggtgaagtgccagatgggggtgtgccgggctgatgagagcgaagactcccctgactcgtgtaagaacgggcagctgcagatcctggtgagttaggggcctgggcagggcctgggcagattctgggcaccccccaccccaatcctcctgccctagaccatttaccttccccatccatggcagggttgggacagggattgggtttgattcaggctcagccactaacacctgggtggcattgggcaagtccttcccccactcagttttcctagccatcaggtgggctggggtaggccatgcctgggctctgctgggccatgggctatgggccatgggcagccctaaggcaggcagactgggcaaagctggctggggagggcctgagcctcctcccaccctgatacattaatcctccctctgcccacctgcccctccctttctgcctatagtcagactttgaaaaggatgtggatctggcttgtcaaacaggtgagtgtgccgtggcagaactgagaatggtcctggggttggagaagaaggggaggccttgagccccatcatgggaggccctgatggagttctggctgctggagtccagcttcgaagttagacagccctgagctggacgcaaggctgcgaatgtcccttactgtatgaccctgggcaaacaacctgcctctctaagcctcagttaacacacctgtaaaggagagaatactgtcctcccagggcaggtggggggcttaggggcatgcatgaattcggggacatcgagttcttagcaggacccatggcacagagtgttacgttattatatcatttccagattcttaccagaatctttccattt

SEQ ID NO: 52638 - DNA, 1047 bp, Homo sapiens
aagcaagtagagatttgagagtagatggtgggcttcttggacatgctgaatttgatggtcaggagaactgctcaggaggcaggaggatatccaggaatggagcacaggagaggcagggcctggggatgatgatttgggagcattggttcagagggggttaattaagcctggtggggagcacgtgcagtgaaaacaggacaaagcatggactcctgatatgggaaacagcaggaaaatagacccctcaaggagatggggacagagtagctagagaggtgggaaaccaggagagtgcttcaagggaggacgagtcagcaggaccaaatgctgctgaggggtcaagtgagaccaggtctgcaaagtatccacaggatttagcaacaaggaggacactgatgactttatcaagagcacgttcagcagagagatgtgggcagaagccagactgcagtggattaacaggggaggtgatatttgagccaggaagtgagtgtcaggtgaaaaaccagagtgctggctgcagagcagtcactgacggaggagggaaacagagggtcagaggagggcctctccgagagcgaaggaggcctggatctgttcctgggctgccgcaaggggagaatgctgacagggtgccgatgagaagggataatgggtggagccctcctgagaaggctggaggagggggatgcaggcccaggccacggggctggcctttgtggggagaagggctgcagggaagttggtagttggagaggctgggcaagaagctgggggctcccgatgttgaggtcatcgctgagagagtgggcagagatgagcttgaggagagaggacaaggtgcagtatggccacagcggggaatgaggaaggaacagagccaagaagggccactgagaagtcccgggcgcccagcggatgtggagcccctgaagctgtcatggtgccagttggcacagccatagatttcttcagcagcctgggggtgggcgtggagagggtagcttgtcacaaggctccagggctgggggaggggatcgaggagct

SEQ ID NO: 52639 - DNA, 1085 bp, Homo sapiens
gtgcacaaaggcccaaggctgggaatgatcgtggcaggccctggcgctgcaagttgacaagtttgcctggaggctggagtaggcagggagcagggatgcattcctgtccacacaggtcagtgagttttggcagttgccccggggtcagggcagagagaggcaaggaagagtgtccctgggtgaagaggcctgagcttccaggctgccttggagggctgggctggctcagctcccagtgtcccgtcttccccctcaggacccatgtcttctgggaccgaggccgccagctgctagagcttcctgctgactgggcaaaagctctgcgagcccttgagtcctgcctgctcccgctcccaccccagctccctcagccacggctgccttctacagaccctgcttcctgcagcttcaaggccctgagggcctcagctggatcctgtgtgcccgctgaacagtgctgggccggggactgaccaggagacctggagggaacagggactgatgacatggggatgggaaggaggcaggtctggggtctggtctgcagctctggtaccgacagggaggcctctcctctctctgggcctcagtttccccatttgggatacaggtgctggcttatcctcatgaggatcaaggatgcagggatagaggatggaaagggcatctggatttcactgggagagtgtttacaaggagacagggtatcatgtgagggctgctaggagtgctggaggagagcggcctgtccccagccctgctctgctggctagagccctggagttggcctctacctttgactgttaccttgagttgatccctttatttttggtgggcagtggtttctttgtagaatggggaggtatccctgaattaattagagggggtagttatcttgaaagtagcctaacccagtactttcgatgggggccttcttggcttctccaatgagacatctgacatcgtgcccatccacggcaagtgcccggtggctttgctgtggcctctctcccaggctagcttggcctctaacggcggtcaatgaagccgtccgagtgacagccgggccgcgggtaggttacagg

SEQ ID NO: 52640 - DNA, 3091 bp, Homo sapiens
gacaaaatcaggatggtagtgcacagacaggatcttgacattgatctggaataacgaatcatgctattttgttatccagaattctttgacaatttttgtcttgccctttccctttcaacccttcctttaaaaaaagaaaacgaaagtagaaactattctgatctttattaaatggttaatagactataatgacagtcagcaagaaaaatttttctattccttctaggagggcttagaaagttcatgttgcaacttagctctttaagaattgttgtagtatgggaaatatgctggttttcagctgtgtggaattagaaaggctttaggatgtaaataatgcatttcagtgaatcagacagctctttttttacatgataaagtttgccattcttgtattttcagaaaaagaaggggagcgttcaattccaaacagctgctttatttggagaaataccgacctaagatgcgattacgcttcagagataccaatgggcattgctgtgttcagtagaaggaaatgtaaacgaaggctgacttgattgtgccatttagagggaactcttggtacctggaaatgtgaatctggaatattacctgtgtcatcaaagtagtgatggattcagtactcctcaaccactctcctaatgattggaacaaaagcaaacaaaaaagaaatctctctataaaatgaataaaatgtttaagaaaagagaaagagaaaaggaattaattcagtgaaggatgattttgctcctagttttggagtttgaatttctgccaggattgaattattttgaaatctcctgtctttttaaactttttcaaaataggtctctaaggaaaaccagcagaacattagcctgtgcaaaaccatctgtttggggagcacactcttccattatgcttggcacatagatctccctgtggtgggattttttttttccctttttttgtgggggagggttggtggtatatttttcccctcttttttccttcctctcctacatctcccttttcccccgatccaagttgtagatggaatagaagcccttgttgctgtagatgtgcgtgcagtctggcagccttaagcccacctgggcacttttagataaaaaaaaaaaaaaaacaaaaaacaacaccaaaaaaacagcagtgatatatatatatatatatatatatatatatatatatatatatatatatatatatatatatatatataatataatatatatatatatatatatattttccaggtggtttttagtctttactgatgaaagggtgttcatgttagtttcttcaaaaccctatctaatactaggcaaagtagccaagagccttttgttttgtttttattttgataaattagtggagaaatggcattttaagaggagtctcttctcaacttacctgagagtcgaattcttctcttccctaaccaatgaagctaagtggttatcccagaaacttgtcttctaaaagggaggactccaggccatcaataaagatgtccaggcagtgagcgtactttttacaccctgtagaattgtgggctgtagcgttactctgattttctgtctagtatcagagaatgctggtagcttaaaatttttattttaggacttgtactctgaattttcaggaaccgtcaaaggagcagcagcaaattcacatattttcgacttgagaaatgcttgtggtatgtgttttccaaactgccccctatatgtaaagttcagtttaaccactgattgccttgttattactaggttttttgagattaaaaaaaaaaaatccctggtttaaaaccaacaatgatgcctagtgagtatgtgtccacaggccataacagggtagaagagagacatcgtgcaacccaatgagtagtgaagggactgtgttgcttgtgaagcggtgtagtagcatttttgcagattcttggctgggtttagtgtactgatctagaaaagctgtttttctgctcctttgtggaaggcagttatgatcaggctgcatggacaaagcaggtagaggggcaccatcaggggctcttgcactattttcacctctaaatattacgtactcagtagtgccctgcttctagggctctgaatacgggcttaaagtcatcttgtcctgctggaatttgctgtgcagagccataagcctcccattttgttagcgtcagctaggccaataggaacagaccgggaccttgtctcacactgatgatacctcacatgttgaccggctatgtgaactgcctatttcctatgctggagttttgatttttaactaaacgcaaatctgtagattctctcctctcccatcccagaaaacaaaacaaaataatgcttttcgaaattgtttctaggactttaaaacataatggtatatccaaaattctttatttcagaatgcaacaatagattccattaatatagactcaagatcaaaacagcatacctgctaagctaagatagatggtgttgattccactgggttttgatcaatacaataacaaacctttttcctttgacatactctgaattttgttgtttggggggagggggtgtgtgtgtgtgtgtgtgtgtgtgtgtgtgtatgtgtgtgtgtgtgtgtgcacgcgcagtgtccatcagtatcagtgcctgcctgagttaggaaaattacattcctggttctgtattgaggagaaggatgtataaagcaacatgaaacattagccctccttttattttaaagactaatgttaattgttcttaaaactggattttttttccttaaagcaatttttttcttttcgatttaatgaagtattgctagctgaagccagtttgacatagagagatgtcagattgatttgaaaggtgtgcagcctgatttaaaaccaaaccctgaacccttttaaagaacaataaaacatattttacacgctctttgtgcatttttttcctccatcctcaagagtttatgtctgtgcttataaagcggagtttaagctgggtgcagtggctcatgcctataatcccagcacttcggaaggccaaggcaggcggatcacttgagccccaggagttcaagacca

SEQ ID NO: 52641 - DNA, 1024 bp, Homo sapiens
tagttcagttaggcctgccgtgtgtactgtgtgcaggtattctgtattaggatgttaatcatggagaaaatatcaatttaatgtaaaaggtcatttcttttcaggattggccatttgatgatggagctccaccccctaatcagatagtagatgattggttaaacctgttaaaaaccaaatttcgtgaagagccaggttgctgtgttgcagtgcattgtgttgcaggattgggaaggtaaactcttacctttattaccctttttgtctgaattcattaccatgcctaagttagttgaaagtttcactttggtagacatttgcatatattatactaaataacattaaattacctgaaaggaaaggaaatgagaggaaaaactagtgtaatgatttctcaaaagagcctgttcatttcatctggttgtctgattctgatgccagcctggattgtgggtgttttatttttctccctatttcaagtaatcaaaagttcaggtcactgaaattggcaacaaaattaaaataattttagagtttgatgaatctatacatggttaattttggactgagatgaatgggaagttaatagatagcagatatctgaactttaaactcttgaaagaagatgtatggacaagaattgactttgatcttaaaaccttttcccctgagcattgcttagaatggtgttgcaacgctgtcatcagcagcagattaaatgccaatttaggatgcacactttgactcaaaacattagtgtaggctgccattgcctcaaggtggtgattactcaagctgttagttctgctctgcccttttgtttgctatttccttttttgtagtgtggtactgtttgttcataaggttagaagttttagtccttatcctgaaggttgaagataatgttgtaacgtgagttggcagttttataactagtagctatcctagttttaggtagcccaaaattggtgccctgtaatgggctttataaaaacatcatttcctttgttaaatttttttaaaa

SEQ ID NO: 52642 - DNA, 1031 bp, Homo sapiens
ttttttttttttttttgaggcagagttttgctcttgttgcccaggctggagtgcaatggtgccatcttggctcatcacaacctctacctcccgggttcaagcgattctcctgcctcagcttcctgagtagctgggattacaggcatgcaccaccacacctggctaattgtgtatttttagtagcgacggggtttctccatgttgatcaggctggtctcaaactcccgacctcaggtgatctgcctgcctcagcctcccaaagtgctaggattacaggcatcagccaccacacccggctcgagtctctgatttttaaaactcttcataatacccctttatccaattcttcatagatggtaataacgtataattggtgacatttcacatcgctttgggcttataaagaatgtattttgacttcaggcatttgtgtttactgtgccatcagcctctagttcattttacttattcttttcttctccaggtttttcgttggaatatacgttgcacatttatggcgattctgagtgtgagggcagacttctgccaggctcagcacagcattttcgctgacaagtgagcttggaggttctatgtgccataattaacattgccttgaagactcctggacaccgagactggcctcagaaatagttggctttttttttttttaattgcaagcatatttcttttaatgactccagtaaaattaagcatcaagtaaacaagtggaaagtgacctacacttttaacttgtctcactagtgcctaaatgtagtaaaggctgcttaagttttgtatgtagttggattttttggagtccgaaggtatccatctgcagaaattgaggcccaaattgaatttggattcaagtggattctaaatactttgcttatcttgaagagagaagcttcataaggaataaacaagttgaatagagaaaacactgattgataataggcattttagtggtctttttaatgttttctgctgtgaaacatttcaagatttattgatttttttttttcact

SEQ ID NO: 52643 - DNA, 1027 bp, Homo sapiens
gaaagaaagaaagaaagaaagaaacaaacctgggtttttgttcttaagctgctaccagttagcagtgcgatcatacttaagccattttaacctctctgagccccaaactttgttttaaattttttttttgacagagtttctctcttgttgcccaggctggagtgcagtggcacaatcttggctccctgcaacctctgtctcccaggttcaagcaattctcctgcctcagcctcccgagtaggtgggaatacaggcatgtgccaccacgcccaactaattttgtatttttagtagagatggggtttctccatgttgatcaggctggtcttgaactcctgacctcaggtgatctgcctgccttggcctaccaaagtgctgagatacaggcgtgagccatcacgcccggccaacttttttattttttaaaaggtcagggtagttgatgtttctgttggttctaaaatttcttgactgtacaaggagtactttatgaaatgttttcctctgtaatctaaggtggctatgttttggggttacagttagaattttgaggtaggaagagcgatggaatgtatttttgtttttagttttgagggtagacattttgtgtttttactgtagcgagtaactcattctgctgtagtattattgaagttcttagaatgccattttgaatttcatttgtgtcttttatattattttagttttatgtttgtgtcagtggttatataatcacaagtatgcaatttacacaataaaatgccataagagtatcataaaaaaagcttgaggatagatgaatagtgttgaagctttgtaggcctagctacttacctatatatttcagtttcttcctgaaaatggttccgtagtcattatctttcatacctatttctgtctggttacagctattttttagagacttctaaataagcctttattggtaacttagggaaaaggcaagtgaaagaacttaagctttgtccctttttccagaggaatttatgattatgttgatgttctctga

SEQ ID NO: 52644 - DNA, 1245 bp, Homo sapiens
tcttaatttaaaaggacttctctgtcacagactatcctttctcatccttcattgaagttgtattcttttgttaaaaatggaaatgttgcctaggaaatggaaatatcccaaattcaacattttaaaagttaggttttatgataaaattaaatggagagggagtatttgggtgtatatttgaatttaccactgttatatgtcaagtaaactagcctttttcatcacttggtaagttaaaacaataatttatttaagtagatagagcagaattaatgtcagagagacaactttaggagaattttcctgtatggtgtacatgcactgaatttatgttaaaacatagggttctgcaacttttgagtactttctagctgtgataggttgtttatgattttttacacactgtttgctttgcattcctaagtgtgtcacaggaattaacattagtttatctgaattgacaggtgcaaaaatgtaactgttgatgtgtagttgaactcttgatggagggggagggaacagaagcttgtttttatcatgtatctgttaaaagtgctagaacatactgtttcttttggcagaaattcctttgctgggttctcagtattaagaattgaaaatcttaataatgaattatctttattcctggaaatggtctttccaaaatgaggttgggagagtaagatgggataaagcttgttctgtttgctgagcagacacacactggagactaggtagaaaacttaatgctggagctgtagcctttaagcctggctgtcactacaatgcaggtctttcagtgcctttactcagctgacacacatttgcagtgataacgtcattgaaccaaagggattcaaataggttagaatttccttgtgttttgctctgcattgcatgcaaactattgttctttgagtagttactttaataaactccacccagtctcccaccttattttaaggtcgcagagttggagatgaacatccaagcagatatttggaaaaaaaattatacttgtatggaagattgcaacttgaaaaatatgtggggctggacttagtggctcacgaggcctgtaatccctgtgctttaggaggccaaagctggaggatcgcttgagcccaggagttttagaccagcctgggcaacatagcaaggcccccgtctctccaaaaatactttaaaaatattagctgggcgcagtggcatgcacctgtagtcccagctactcaagaggttgag

SEQ ID NO: 52645 - DNA, 2526 bp, Homo sapiens
tggcgtacaaatgattttgtcacctcgtcaccagttagcaagcatagtacctgataagtagtttttcaagccccactctcctctcaccctccaccctcaagtggtccccagtgtctgttgttcccctctttgagtctatgtgtactcagtgtttagctcccacttataagtgagaacatgcggtatttggttttctgttcctgcgttaattcgcttaggataatggcctccagctgcatccatgttgctgcaaaggacatgatttcattattttttatggctttgagttgtcactcttgagtgaaacccttcattggcttcatttggagaggcatcattttctgaataaaagtcaaatgcttttagtggcctataaggctctcttttatttctctgactctattcattccattgtcctctctgttccagtagcattggttcccttgttcctagcatactctaagcttgtccccacctcataacctttgcagcagttaatcctctgcctaaaatgctccccaaatacctgtttggctcacactctcagctcttggataaaaagtcacttttttcagtgaggcctttcctgttagccttatttaaaattggaacccccctccctctggcactgctaattcccctacttctaatttttctccagagcagtgacatttttatttctttttttctgcccagtaaagtgtaagatccatcccaacagaaatttttgttttgcttattgctcttgcacctgtaagagtatgtgacccatagtacatgttctgtaaatatttgaattaatgaaagaatttgaggaaaatgcctagctcttcaggaggataaattctttactgttgacagattagattttttatacttattttaaggggaaataaaagtggctattgacatgaagggaatttgctttaggaaaaaaatgttgcaaggtgttagttgtatattacattattaggctttcatgttgactgattgttgaaaccaagctgactcaaatttgcattacttcctgtaaaatttctggtaagaaaagtagcagtaaatatatgcatactcgttttttttagacctttgcttttagactgtatttccttaaatctagaattcttttattgtacctttatattttaatgtgctgttttaatttggtgaatactggcgtagctcaccaaattagagggtttattgtatcatttaatttggaaatgtaaagggatgatttcttagaaatcctgatgtgagtggattgataggagagataaatatatatatatatatatatttttttttttttttaattttttgaaacggaatctagctctgtggccaggctggagtgcagtggcgcaatctcagttcactgcaacctccgcctcctgggttgaagcgattctcttgcctcagcctcccgagtagctgggattacaggcatgcgccgccacgcccagctaatttttgtatttttagtagagatgggccagtatggcttcgatctcctgacttcgtgatccactcaccgtggcctcccagagtgctgggattacaggcatgagccactgtgcccgccaattgataggaattttaaaaggatgcccggtaaaattgggttaaattaaatgaggctgcttttataaaattcccttatacttctaaattcaccttttttttttttgagatggagtcttgctctgtcgcccaggctggggtgcagtggtgcgatcttgggtcactgcaagctctgcctcccgggttcacgccattctcctgcctcagcctgccaagtagctgggaccacaggcgcccaccaccacacccgactaatttttttgtatttttagtggagacggggtttcaccgtgttagccaggatggtctcttatctcctgacctcgttcgtgatctgcccaactcggcctcccaaagtgctgggattataggcgtgagccacggcgcccggcctctaaattcactttatttgtagttagaattacagttgccaaggcaggacgtgaattttactcatttagcctctttaacaggaaagaaaacactttatggaattgtgtaggtacagacctgcctgggacagaggactagccctctggagcctctttctaatcctatgattatagaactgttaagaacgtagtttgattgtaaatcattatagggttcttatcaccttagaattttttttaaaggtaataccatatgtacatgggaaaagttaaaacagttcaaaaggtatatgttaagatgtagtaaatcgtgctgttgacctccagccttcagtcctgtgttcctggccctgccccaaccctaggaaaccactgttatctcttatctttgtaatcttccagatatcccatgtgcatgaatgcatacagtactcacacatatttctaagcacactgttgatactgtcatgtactgtgcctttttttacttattagtgtcttttagctgtcatttcatatcagttcatacagatgttttctttttaacctc

SEQ ID NO: 52646 - DNA, 1046 bp, Homo sapiens
ctggccactgtcttggcacttgaagccttttaggttgcttagtgtagagctgaagtgcatattgtgtgaaaatctttttgctctttggagtggtagaggtctaggctcaaccagaaactgtcactaccctagcacctccatgaaagaagctgcacagcaatactagctgtctgctttccacagttccccattgtggagttaccaggacttaggtgagagaatgactcgtttcctgcactgtttgttcagtcagtgtagatttacaggacacagaaatctttcccagaaaaatgactgtgaggagttgacagattatacagatattttttatgtgacttgaatgtagacggtttttgtttgcctatactgattttcttgcccacaggttatgttaacacagcatccacttcattttaagtggcctaaactaaatttcatcatttgaatataaatttaccttacacaatgttggctttttaaattcttgagaattttaagattaggcttttttgtgaccctttctttgctagttgagcctggtttgaaaaaatattttgaacatttagaacagtctttacctttagagaagtggtgcatttaattcctctcatagtattttttatttgaacttttagtcttctcaagacattaattcttttggcataaaatgtacacatgatatatttgttttagcagatcagataaattactttatatttttatttctgcagtggccagatatgttggctgttaactaatgtattgtttgacaggaattcaaattcacaatcaggtctgttttcttccagttgtcctttagtttttgtttaaatttgaccaactttttattttccccaccgttttacaggaaacattcactaggttgtatcaccacagtatttgtaaattggatttatatacaaatgttgatatttgttgtttttagtagcagaacaaattgttgtgtattgtattttccattattggtgaaaagcctttcattaggggatggagtgactggttagtgcagaaggatatgagtcacc

SEQ ID NO: 52647 - DNA, 1053 bp, Homo sapiens
agagctgttgaaactaatggagaaggctggaggcaaggggatcatttaggagatgctgactggaggctctttggggcctaagctaggcttttatgtgggaggagattatgccttgaaactctcttggggccccggggtgtgtgctttgagacagtttttatgaggcacctgggatatgtctgcgtgagggaagtctgattaaagaaatgcagcagcgtcttatgttttttattttttggaaaaagaggagagtatatttattggggccaagagtgaactagaacttaccactgtatcaaagtttctctgttgagctgtgtgggacacttaaatcagaagaagtgagaaaatacacgtgaaagcactttgttaattataaattgaactacagattcaaagtattattaccactaagatctttctactaaggcaacagattttgtagctggaaaaggctggcattttagaacacctttatagatgaaaaatagttttgaactgctgaacggggtattttctgactcagaacagcaaaagtcaggccactccctctgtgagtcagtcaagtaaaatttaatttgaacgaaccaaatttataggcagaaaccatttacaacatcattgaactttgtagcactaggaagagtaaatgtttgaatacttttgtgtatagctttaaaaaacagtatgagagccccatatatagttgacttgaaaaaagtttcaaacaaggtaaattggatttatttttctttagaattaactttttattcattttgtcctataaaggtagtatttccttatgcagtaattaaggaacactttacaattttcagacacaaagttgaaatttagtagggatttattttacaggatttgactatactttttcctttttgttgtaatgtgggggttggtaaccactgaagcctagaaaacgaatgtatttacaaataagatggagaggagcaggtgcatacatttttagctgttgctcttggtcttggaagaatgaagcttaagtttttgtgaaactaagtttggttgatttat

SEQ ID NO: 52648 - DNA, 1075 bp, Homo sapiens
ggtataagtctcctccagcggcactatgatcttctggctctgggattttaatttttttcccccagaaaggatgtgatgtgtttttttgttgttgttctatacatttttttctcccacgtttcatgacttcaaagtaaattttcaaatttgtcaatgatgccatcctatcctagtctggggcccctgagagctaacgaaaagaagtttgtctgttgcccaaaatcctacactctggcctgtagagtgttcaggagcataaacttttgtaaagtactgctagtttttcaggtgaagagtattttattgttaggtaaattgaactgtagtctggtttattatttcctggaatttgtcaagaaattagcagtgactagcaattctagtgtcactgtaggcattcagcaaatgtttgtctgtccggagtcgccaaactacattacactgctgagttggaatatggtacttgctgtcatgctctgtaagagagagtagtttcagagggaagtgagtgaagttatgccttgctgagtgtgcaaaaggagattaaggatacagaatgacacattatcagggcttcagaatcacttgccagcacaccattgtattggtgaagatggtgagaagttgtttgctggtattctgatcttggcatttttaagtttcataatgaatggactaattattatcatggacttttcccattcttgtgttgtaaaagtagggattcttgaagagtagtaccttgatagggattttacacattgatataatcttaaaaatgatgttatcttaaaaataatgtctcctagaagttggtagtctttcacttgatcttagccaaaaggccgagaagcgatagaagttggtagtctttcagtataagcaaagagtagtatggtccttttgttttttttttgtttgtttttgagatggagtctcgctctgtttgttgcccaggcttcccgggttcaaatgatcttcccgcctcagcctcccaagtagctgagaatacaagtgtgtgccaccacacccggctaattttcatatttttagtagagatggggtttcaccttgt

SEQ ID NO: 52649 - DNA, 1033 bp, Homo sapiens
caagggcggtgccggtggctggctgcgcacgcgcgccgcctcatttccggtgctctctctcgctgggtcgctcgggtcggcttcggtcgctaccgctcccgctctgccacccccgccaaccgccgctcgggcctccgtcgctgccgcgtcgctttctcgctccttggatcgcacatcctcccagatgcagcgccgggacgaccccgccgcgcgcatgagccggtcttcgggccgtagcggctccatggacccctccggtgcccacccctcggtgcgtcagacgccgtctcggcagccgccgctgcctcaccggtcccggggaggcggagggggatcccgcgggggcgcccgggcctcgcccgccacgcagccgccaccgctgctgccgccctcggccacgggtcccgacgcgacagtgggcgggccagcgccgaccccgctgctgcccccctcggccacagcctcggtcaagatggagccagagaacaagtacctgcccgaactcatggccgagaaggactcgctcgacccgtccttcactcacgccatgcagctgctgacggcaggtaagggggcctcccgtgtccctctgggtcgcccggccatcccgggcatgagtggccctggctttgttcctctcgcttcccgccccctcgggaccgaggcagtcgggagttccggtctcatcctcatttttgggagcctggattccacattcccacctcagcccggagtgcgtgggagaatttctaggctgcagtggaggcccgaaggcgactttgcgatcccctagcgctaatgtcttgatggatagtgctgagctccccgcccctttcccgactcttccctcctccctcctcttgcggctgccgggcgcgcagattcttccagaaatgaaccttcatttccccctttccctgaagggaaaccctttttgatcgcgggtggcgatgagcgcctcgaccgaggtgtaggaggtgaagacagccagagcggggagggaccgtgggaggaagggccgaggtgaggtggg

SEQ ID NO: 52650 - DNA, 1084 bp, Homo sapiens
cttaaggactagtatctagagtactaatgtcaccgtggaactttaatggaactatccattgtatatttagattatttacttttgtttttttcaaggtaagattatactttgtcttgatgcagattttgatttttttgtttgtttctttattctcctttcccccatctcacccaattaattttgttaaattgatttaagaaacatttaaatgtctctgttgtcatggcttcaggtgagggtggaagagtacacttcttttattagaagcaggctttgggctttctagtcaacttcatatagctttagtgctttcagctagtttctttctgaaattggcacatttgtgtgaactatttggtttcactatatggtattccatgttattgctttaagcagacttcaaaatttgcatttatttaccagggcaaaaataaattgtttttcctattcagaaattgagaagattcagaaaggagactcaaaaaaggatgatgaggagaattacttggatttattttctcataagaacatgaaactgaaagagcgagtgctgatacctgtcaagcagtatcccaaggtaaggcaaaaagtgctttggatctttgagttatctttatagttatgagagagtcatgggctataataaagactcctggggattgtgatgctttagaaacttaagcctgtgaagcttctctttcatgcttgtagtacctgttactgagagttgaaatatctaagttcttaactaataacatagctatagccaggaaggaaatataatcatctttttattatcaaaaagtttctttctcaaatgattgctcaggctacaagttcaaagaaaaaaaaattaaaacctgaagagttgctctttgtcaaaagactaacctgaaatctaaataaaaggaaatataatatgaatcctcaattggttgaagttaattttattttcttactaaaagtttacttttaagtaaatgctttttttcttcctttttttttttttaggaaagcatttagttacatttagtttatccagcgtgttatcaaagggtgctatatagtctcttctgttctgagg

SEQ ID NO: 52651 - DNA, 1615 bp, Homo sapiens
agattgcttgagcccaggagttcaagaccagcctgagcaacatagcgaaaccccatctctacaaaaaatacaaaaattagcctggtgttgtggtgtgcacctgtacccagctactctggaggctggggcaggaggatcacttgagtccagaaagttgaggctgtgatgagccatgattgtgtcactacactttggcctgggcaacagagtgagagcctgtctcaaaataaagtaaaaaataaaatagtaaaggtcttaatgtattatggaagagcaccagaatacatcagaaaagccaaattcaggtctaggaactgccactttctagtttcataaccttaagctaatcactttattaatatggcttcagtgtccttcagtaaaatgggaatggtaatactctacctttgcagggttgtttaaaatcaagtgaggtaatttatgtggaaatgtttttatatagtagcatgtatatttagaaatcctctattttctgtcagttcaattttgtggggaagattcttggaccacaagggaatacaatcaaaagactgcaggaagagactggtgcaaagatctctgtattgggaaagggctcaatgagagacaaagccaaggtaagctcacattagtgaggcaagaggacatcctaatgccttctacttgcccagaatgcagtatggatgtcttatagaggcggcaagaattttgtatgtgtacagaatgtggctcctttaagtttgcactggatgcaagagattatacaccaagttaatttacttggcttggcaaccctggaagagcctaggtgtgccctggtgatagttttcttttggactttttgactgtgtagtaatggaaacagcagtagcatgttgcgcattggtaggattgtctgtgaaaacttgaaaggggaactgaatatactaaaatttagtctaaagcagacaaaagacgctaaaatgcaaatagcacacccccttttttgtaacctggaaaagtgagaacaataatgtgagagcagatgagtttgaggattagttggtttgttttatagccggtttggaatgtgaggctcactaaaagaatgtattccaaaaggaaccatgagtaatcctgactacagaatctaatgcgtcttttttttccccatgccatagccgcgtacgctgtgtactctgtgacaagaaacttctcaccaaaacagaatagtcttagccttctggggtcaccttatttgatgagatattcctgctacagtccaaaaaccaattctttcaaccctccttttatgtagtctaatggacacatgtttgttttctcaggtcatttcttgctagatgcatatagttacggctgaagtgtgttctaactaatgagatttacatgagcttttcttccctctgtcctgacttctttcttcccctaccactccctagaccatataagcagataagcagagctcgtggtgattaacagctctacctgtgatttaaaaacaaatgcttggcaaacagctattatctgaatagactagaattaagtttttcttctttatgcttttagtaggagctccaatggatatctcagggatttaagacaacaattaactgta

SEQ ID NO: 52652 - DNA, 1882 bp, Homo sapiens
tttgaagattaaactgaaaaatctatataaagcttattatatagagccaagtgcatacagctccattaatggtagtggcttttattattccaggaaaaggaaactatttgcaaagaatggatatgtaagagtatgccaggctctgaactacaagttgttcagtctggcttgtgagtaggttatatatagagagagaatggaagtgatccggagagctaggcagagaccacattatgaataatgaggggtctaccatcaagacttttctcaaagaggtgacagatagggtgccatttgacttcagagaaggaatgacctgagacctcatctgggctctcaagagctcttcttagaattcaagtctcccgtggaccagatgatttctcagtagaaagtgtagataccacacaatactccttgtatctttcgttcccaggatatgatggatgatatctgtcaggagcaatttctagagctgtcctacttgaatggagtacctgaaccctctcgtggacgtggggtgccagtgagaggccggggagctgcacctcctccaccacctgttcccaggtaaaaataatggagacacccagaaataggatgtgaatttgactactagtgtcatctcttttagtggtgctcttatgtctagcttaggaagggtctcaggatttgtatgttgcataaagaacagaattctacaaccatactctcacacctgtaatcccagcactttaggaggctaaggcaggcggatcaactgacatttggagtttgagaccagcctggccaacatggtgaaaccctgtctctactaaaaatacaaaaattatccaggtgtggtggcatacaccacactactcaggaggctggggcaagagaattgcttgaacccaggagacggaagttgcagtgagccgagatcatgccactgcacttcagcctgggagatagagcaagactccatttcaaaaaaaaaaaaaaatagagttctagatcttgggcactttgaccatagccaagtgctgcagtctagctgaaacttttggtcttctaattttggacagtcttagcatttgttaatggtctgactttaaaattctaccttttgtgactgacctttatagagtattcagactctccagacctacccaaggcagtgcagtgatgaattggtcctctataggacctgggggatcttgcagtgtgggtcctttaccctgtacattcctctgtgctttaataatagcctagttaaggcttcataaaatctgcctaattccagaatttgtaaacaaatcagaacataaaagtggcctgtttataaaaagctccatttaagataaactttcattttgtaggggccgtggtgttggaccacctcggggggctttggtacgtggtacaccagtaaggggagccatcaccagaggtgccactgtgactcgaggcgtgccacccccacctactgtgaggggtgctccagcaccaagagcacggacagcgggcatccagaggatacctttgcctccacctcctgcaccagaaacatatgaagaatatgtaagaaatttgaacaatgtgccatttcccagtacctagaaggctgctaaaggaagttgaatgacagggcctcggtcctttatgtaggtgtcatggactgcctgtaagatttgcaatctgccctcttctcttgcagtgaatgttgaactattagaagatttttccattttaggcagggttttactatacgcctgtagattaaacaagaaataaaatgtactttaatgtagtattttataatgaatttcttactactagtactgataatactaaagctcgattttgtactttacttcctgcccacacttcttctgtggca

SEQ ID NO: 52653 - DNA, 1009 bp, Homo sapiens
ttttaagtgtgtagatgcttttttctttgttgtttaaatataaacagaagtgtaccttttataataaaaaaaagaagttgagtaaaaaaaaaaaacacacaaacctgttagtttcaaaaatgacattgcttgcttaaaggttctgaagtaaaggcttgttaagtttctcttagttttgatttgaggcatcccgtaaagttgtagttgcagaatcccaaactaggctacatttcaaaattcagggctgtttaagatttaaaatcacaaacattaacggcagtaggcaccaccatgtaaaagtgagctcagacgtctctaaaaaatgtttcctttataaaagcacatggcggttgaatcttaaggttaaattttaatatgaaagatcctcatgaattaaatagttgatgcaatttttaacgttaattgatataaaaaaaaaaacaacaaaattaggcttgtaaaactgactttttcattacgtgggttttgaaatctagccccagacatactgtgttgagagatacttagagggagggagtaggttttgaagaggttgatggtggtggggagggaaggcctcctgaattgagtttgatgcagagctttttagccatgaagaatctttcagtcatagtactaataattaaattttcagtatttaaaaagacaaagtattttgtccatttgagattctgcactccatgaaaagttcacttggacgctggggccaaaagctgttgattttcttaagttgacggttgtcaatatatcgaactgttcccaagttagtcaagtatgtctcaacactagcatgatataaaaagggacactgcagctgaatgaaaaaggaatcaaaatccactttgtacataagttaaagtcctaattggatttgtaccgtcctcccattttgttctcggaagattaaatgctacatgtgtaagtctgcctaaataggtagcttaaacttatgtcaaaatgtctgcagcagtttgtcaataaagtttag

SEQ ID NO: 52654 - DNA, 1052 bp, Homo sapiens
tcagcccagattaatcagctaaatagggcaccttgccagaaatttgggtactatttctgatcttaatattgcattaagatgcctgaattggctgttcccctgtcaacctctggtgcccacctcagggtatccagtctctttcttctaggcactgtgatgtgtgtgaaaacttgagatagaagagtttgggttcagatacagagctaattattcccaggggtcttctaactccagcagccttcatggttcctattcatggcctagctttaggtataagatggttgctcctcaggtctcaggctctctggggttggaatgtagcaaacaaattctgcatctgcctttgagaaagagaaatatcttatgctctgatgtgattctttctaagcttctctctagaaatcagtacaaatgtctcctttcattatttttaaaaatacattcactattatacattagaacacctactatgtgctagacactggggatccagtggccggtgaacaatataaaatggtccttggcttcatggagcttatagtctatttgtggaaacagatactaaacagataatctcataaataacataatttcaattgtgttaagttctacaaagaaaagaacagggtgcaatgagggtatacaacctaatactgtggttttccttgaggaaatgatgtttaagccaacatataaaggaggacttagctaggcagagggcttggggaaaggacatagagcagcacattataggcagaggataggactgaagcaagttgaagccgaggtacgaatctggaccttttttatttttatttttgagacagggtcttgttctgtcatccaagctggagcacttatcaatatgatggctcattacaccctcaagtgatccaggctcaagtgatcctccacctcagcctcccaagtaactgggactataggcaggtggctaattttttctattttttgtagagacaagatctcaatctgttgcccaggctggtttccaactcctaggcaaaattggtcctcctatgttaacctcccaa

SEQ ID NO: 52655 - DNA, 1152 bp, Homo sapiens
ggatgcgagcgcagacgggatcccgccccctcctgtcgttttgcggggtggggcctctgttgtgggggcgggacattggacggtgggcggggcttctaagacgaagccctgtgggggcttgggctttcgtgaggaccagctcgtcggggctagaaaggggggcgggacttaccagtgggcgtggcttcagcgctaagggtggagattctgggcagggggcgctagtgcagtcggcgtttctgggttggaggggttacactgggggcggtggagcggggagacttccgactgagggagcccattctggagtggggcttctgggctgagagggcttttattggcttgtgggcggggtttctgggctgacagttgtgtgtaggcggagcttctgggctgaggggctttatgtgggtgcagagcttctaaagagaggagagtgggtgtgggcagagcttctggactggactaagggtgtttgtgtgggattttctaagccaagtataacagcgtatgaacagagcttctggtctgggggtttatggagggcagagctcttcgccaggtactttttagagacttgtggaggtttataattttgggcatacatccaagcccaaaattggctccgaagtgtgggaaacgcttccgagctgagatgctacggcgtggggtgtatgtgaatggaggctgctgtgttactgtgaagaggtatgaacaggttataactttttaaaaatatgtatatgtatgtatatatattttttaatagagaccgggtttcgccatgttgcccaggctggtctccaactcctggtctcaagcgatcctcccgcctcggcctcacaaattgctgagattacagtcgtgagccaccacacccagtcaggttgtgacttttttaggtgcttaggagctttgtgcagaacttttgtgcgaagtggtgcgtgggagcttgggctagactgctcagcctagtaggtccaatttttcagtccacagccacaggattctcccagccatatccttgaccctttatttaggccctgggtcctgcccatgagatcccagaatgccctttgagctgaatcatggggccctggatgaaaaagctgtcccaaagttacccagagttataggcctccagaaacttat

SEQ ID NO: 52656 - DNA, 1047 bp, Homo sapiens
cactctcattctctggcatggaatggggtgttgcacaattcttttttcttttcttttctttttttttttttgagacggagtctcactctgtcgcccaggctggagtgcagtggcgtaatctcggctcactgcaagctctgcctcctaggttcacaccattctcctgcctcagcctcccgagtagctgggactacaggtgcccgccaccacacctggccaattttttttttttttttgtatttttttttagtagagacggggtttcaccatgttagccaggatggtcgcgatctcttgacattgtgatccgcccacctcagcctcccaaagtgctgggatcacaggtgtgaaccaccgcgctcggcctcacaattcttaaaaataaaaaaataaattagtaagagtgggttgctgagagttcagagcacctgcccagcacttcatgtgtcctgtactagtttagcacttgcctggtctctggcccctaggtacctggtctcactgggctgcatcaaacccctatgtgacttgctgactgtaatggattcgaagattgtgcaagtggccctcaatggactggagaacatcctgcggcttggagagcaagagggcaagcgcagtggctcaggggtcaatccttattgtggcctcatagaggaagcctatggtatgtgccctctcctcaatctaggtcagaacctgagactgtaggcctccaacgtggtatacatatgttggtggtggcggagtgtgggttgggaagcatccatagcttccatgagactgatgtctgtgtcttcagaacagttaagagctcctgccctagccaagtttcaccatccacagggtttcacacgttaccatgagtataatcaggatgtgctgagtagctggggtacagctaggatttggatttggctcatcttttgagttgagagttgtctctcaccagtttcttctccttctaaggagtgataggtcagttctctttctgataggctgtacctataagagtgctggattaactcatcactcatccctgagagg

SEQ ID NO: 52657 - DNA, 2022 bp, Homo sapiens
agcagcctggctccccaagtcgatgaaacgcaacagcagttcatcttccagcagcctgaggcccccatggagggcttccagctataatatctgcctccagggaggggaggggatgggaagcaccaccagccagcggaagagcagccctctggtgggcgggaaaccagtgtccccaccatcagccaccacacacctctgctgccctggagactgtgctcttgacctgctccgcccccttccctggagggagcaccctctggacagacagaaccatctgaggctcacctttgggttttgtgacaagaaggggacgtgttgggtttttcttccttacactatattttggctgcacacatgtctttaacccaggagcccaggggtagacaaaggaggactaaggtaatcaatttgcacctttttttatttttattttttttctttttttcttcagtggtgacttccttccctttatcttttttcattcttcccggtcctctgccctgatctgtgtaactcttatcttgggtacttgagcagacggtatattccagaggtgggaggtgggaggggaagggagaaatccaaaacaaagtgttcttgctctgacagaatattaatcttgtacgcttggattgagttatttaatttttttttcttttgcacatttttcttgtattaagattgctcttcccaagagccacaagttcctggttttagtaaacccagctgcctgcattgcctgggactagaggctggggaggctaccatgaaacaaaggtccctccctccctctgactctttgcccagacctctttagtttgggggatcctcctcactctcctgaagtgtctcaagtataccagtgggagtgcaggggaggagcacaggccttcagatggggcttcccacgtgtagctactgatcccatatttcctactcaccttccaaatggtgcgacccaacttcatttgtttacttgaaaattccccctcgaggttgagagaacctctgaggtggctgtattttctcctaagcttgagatagggggctgtggtccttcctttctcctgaggagaaagtccttgctctggtgacctgtaagttgcagaggagggtggagtgagagtgtcatgtattgggatagtcagggatccctgcctttggcctttcttcttcttcttcttcctcttccatagttggatcatgtatattttacttctaaaggagagaatgtcaaaaagttctgtatttttttatattctatatattaggtaggtcaatcttaattggtctcaagaggaagaactgtctgtcatttcggtaagtaggatactgtgaggaagaccaaaaagagatatggatgcttcctcgctcaggaggcctgagcttggtccttttcctctctgcttggattctggaccaccacctgggaccaaccttcagctctggaaccttcataaagcaggtcagcgtggcctgattgtcccaggacctgaagggagcaaggatggcctcagggcctggtgaagtctgctactctgtccttactgctgaacatcctgcttgtatcaggaaactcagaagcagtttgccttgtcaaattcaatctcaatggccattgtccacataactgatcacccatggctgcctctcctattatctattatcactgaaacttagtagcctgctttttttttttttttttttagagctattgcgtatcttccctgtttgggatccttgtacctggtttgggttttcccttccttgtgacaattataatccagatgcctcttctttctgtttgaattacggtagtgcattgccttagtggcttgcctgtgcctctgggtggattacatatgatagtaaagcccacctgtttggatgggagtagaggaagttggtgtagaccagctgtggagctgaaggcacagtctgccccacccccacctccccactgtggttagtcagaggcatcctgctccaagctctgcttttccttcctctgaaacaatgcca

SEQ ID NO: 52658 - DNA, 1485 bp, Homo sapiens
catgaaagccatcttccaggagccctgttttttggagctgaactgcacagattatagctgctattgtacttaaataagggagaggaaaagaaggttctcaggcacagactttctatttttctcaagccaaaccagtttaaaatgtctagcagaatgaactgtatttccatttcttcatgtctacctgccttccccccacaccctaaagttgtacttgtttctagcaaactagaaggaaaagataggaaagcctggcactactaacctcacctctcatacacctctttgaaggccccagctcttttgttcaggcctctcttctcccctagactcactcagcttggtatccatcatcttgagcattcttcagtagattcatctagggttcagattccagactctcagctgaagacagggagccaatttcccccaggtccctgcaggtaatccagggaccccatagggagaacaggctgactggggcattaggaatgtttgtacctctctgcttccctggcagcctggggaagggtgcagggctcagtgcgctaaaccatggtaaacatcttcaatagaactaccctagaatttagtgagtgtgagactgagatattgctcagaataaatttattccatagccatttaggattgcatgttctggaccaaccttgtccagtatgttttctgtttgagctttttcattcttttgttaagccaacaagttgagaatttggccctgctgggatccatgtagtgggcactagctgctctttggccaaggccttcataaatgattcagtctctcattatctgtcctctagccccacaccctgatttagaccgtggcaaaggaagaacttgaggtcaagaccaaccaaatctgtgaattaaagctgttatttttttctctgcaagggcgctttgcttcaggtctgggctatgtgcagaacctaagcaggctgtgagagttagaagaggcagtattacatgttaggcccagaacaccatgggaaaaggtttatgtagtgtatcttagtggcctgcctagctgcctctgggccaggctgacttctgatgtccacattagctcgtacctgaaccctgttgctgaatgccagccctgttctcctgtaactattatatacgccatggcctggggggcattgaaggaagtaagctctcagagatcctaacactggctgggaacctctgactcagagcatgtctttaaagagtccacatctggccaggcgcggtggcacatgcctgtaatcccagcactttgggaggccgaggcgggtggatcacgaggtcaggagtttgagaccagcctggcaacatagtgaaaccccatctctaataaaaatacaaaaaattagctgggcgtggtggcaggcgcctgtaatcccagctacttgggaggctgagacaggagaatcacttgaacccaggaggcggaggttgcagtgagccaagatcatgcca

SEQ ID NO: 52659 - DNA, 1066 bp, Homo sapiens
ggcgggagcaggcggctggccggcagcagttactcggggtttccggtgcgaggccagaggtggggaagccatcggacgtcggcggtgaggtacgtgcagcggcggccggtgggcgagactatttgagagtgtgcgggccgggatgttctcggcctgtggggaaatcacgccaactccccgcgtgggccgggggctgtctggggatatgcgcatgcgcgggcgtgcctcgcggcttgagggcgcgcggggcgtgggtggctgcgcgcgcggggggcgcacgtggggcctgaggggcgggggcggtgccgggagtcccgccacgtcagtctccggccctgagccaatcccgcgcccggcctgccgcgagggggccggttgtgccgggaagtggctccagggagaagaggcctcttccctcacccgctgtgggagctgcgccccgaaagcctgccccggcacgtcgggctctcctgacccgccaagaccagagagccgttggcgccctccgcccgggcctgccggtccgtttattttaagaagctttgtgcgcctgctgtggggatttctgatccaggctgcgaagaatttcgaagtctggaaaatagcaactgtgtttgtttctaaaggatcttctcctgacccagcatcgctcatcacaatgaagaaccaagacaaaaagaacggggctgccaaacaatccaatccaaaaagcagcccaggacaaccggaagcaggacccgagggagcccaggagcggcccagccaggcggctcctgcagtagaagcagaaggtcccggcagcagccaggctcctcggaagccggagggtgtgtgccagctctgcgttgccagcgggcagggggaggagctgtggggtcggcctcgcttctggacttacaggccgaggccaggttgtccgggaggaggagatgtagaatgagaggacagtgctgggggccgcggtcccccctgcgctctggcgagttggcggagctgccccctctaagcacaggaacagagttctggagagaagctccgacgggattaagtcaggtggcagccaaac

SEQ ID NO: 52660 - DNA, 1014 bp, Homo sapiens
cacctcagccaccagcagctaactgcccttcctgtttgaggcatttctagaatgatctgaatggcaagaaatggttttgtgggggggaaggagatggactagaagttgctccgtgccatccctgtgtgctgatgctttacatacttttatgatctaacaaatatgttcgggtggtagtgagaaatagttgtgtcattttacaagtaaacagacttaaagaagttaggcaacgattactataatttcttgatttaaaagatgtttcgaatctaaattctgacaggaactagatttgctgaatgatactccattcttgcttctcagtttccataaaaaaaaaagttaggcaacatttaactcaaactgatgagtttggctgggcctgaaaaatcccaaccagtggtataatcgtcttctttctcactctacccctcatcctctcctgctgtaggggctcaagccagaacggctcagtctggggcccttcgtgatgtctctgaggagctgagccgccaactggaagacatactgagcacatactgtgtggacaataaccaggggggccccggcgaggatggggcacagggtgagccggctgaacccgaagatgcagagaagtcccggacctatgtggcaaggaatggggagcctgaaccaactccagtagtcaatggagagaaggaaccctccaagggggatccaaacacagaagagatccggcagagtgacgaggtcggagaccgagaccatcgaaggccacaggagaagaaaaaagccaagggtttgggtgagcagagggcggctctttgtgaagctggtgaggagagggagtttggacttgacgttctctgggccagtctgttctgccaggattcaaaggaaaacggtacttctcagagcagcaagtcactctagtctaatcaaagccagggatgtgggggccacggcatagagagatgcaggagttaccagcacaaagccttctgggttttggagcaactggagcttggcatg

SEQ ID NO: 52661 - DNA, 1038 bp, Homo sapiens
ttttgaaggaatgcgagggagcgatgggggtctgtctgttaataggcacaaggtacggtagcaggtggtctcatcctcgggcatgagtgtccagcaagttggggaaatgcaacagcttgaagtggctctagtggcccagagtcagagctggaataggaattggcatctgctggctgtgtggcccctgcttgccctagtgagttaccatttctctgtccctacggtggagcctttggggttattgtgagttcatgggaggagcgtgtaagcaccggcacagcatcagcccatgagagtgctcctggcctgagagggtaagggtcagggcagctcaggagaccctagacctgcatagtgatccccccaccaggaaggccccacaagatgctcacctgccctccctatccctgtccccagctggaggagcaccggaattcacagaagcagatgaagctcctacagaaaaagcagagccagctggtgcaagagaaggaccacctgcgcggtgagcacagcaaggccgtcctggcccgcagcaagcttgagagcctatgccgtgagctgcagcggcacaaccgctccctcaaggtaggcctgggccccctggaacaggtgactctggtttccttgacttccacttaatgtttctttcatgggctttcctcttaaaaagtagtgcaggctagggccaggcgcagtggcacacataagtgattaaaaatcttctggccactaaaaaacagaaattaattttagtaatatacttaacccaatatccaaaacattacaatttcaacatgaaatcagtgtaaaaaagcaaggctgggtgtggtggctcacacctgtaatcccaacactttgggaggctgaggtggatggatcacttgaggccaggagtttgagaccaacctggtcaacgcagtgaaaccccattctactaaaaatacaaaaattagccgagtgtgctggcaaatgcctataatcccagctactcaggtggctcaggcatgagaattgcttgcacctgggaggctgagg

SEQ ID NO: 52662 - DNA, 1736 bp, Homo sapiens
gctgtctgtgatctgcagccagggtgggggtgtgcacttagcgcatatcaggccctttcctgtatgttctacccatcagtgacacagctagcatgaggtagaggtgagatttgcacacaatgtccaagtccaaagttaatgctgttctctccccatgggaggtggtgagcccagtggtaggtctccagtgggagtgaagggagcaaatggaagaaaggaataaaagagcagaaaaaaacgggtgccagtgatgtgcctggtttacatgtaaagcagcccaggtagtttgtgatttcacagcttgtaatgtagaagaaaggaactaacgatggagcagcaactgcaagccagaccttgctgaaagtttttgggttttttttgtcttttttgctgctgaatgtttttaggtacgttgttcattgaaccttctcttgagctctgaggatggtattagtagtcctgttttatagatgagacaggctcaaaagtcaagtcctttgccaaggtcacgtggtagataaatggaggaatacgttatctccaagccgtgccccttttctgcaccatgctgccccacctgacagcctagtcatggcttcaactaggactgtttcctagagggggccagctttggactcggtctgctctcagccttgttaaagtgtttgccgccaagtggtgatggtaagtgggaggttgatggggcacggcactgaaggtctcatttctttccctagaaaacagtccgggataaagaactggagggcctgcaggtaaaaatccaacggctggagaagctgtgccgggcactgcagacagagcgcaatgacctgaacaagagggtacaggacctgagtgctggtggccagggctccctcactgacagtggccctgagaggaggccagaggggcctggggctcaagcacccagctcccccagggtcacagaagcgccttgctacccaggagcaccgagcacagaagcatcaggccagactgggcctcaagagcccacctccgccagggcctagagagcctggtgttgggtcatgctgggaagggagcggcagcccagccaggcctggcccataaaaggctcccatgctgagcagcccattgctgaagccaggatgttctgacctggctggcatctggcacttgcaattttggattttgtgggtcagttttacgtacatagggcattttgcaaggccttgcaaatgcatttatacctgtaagtgtacagtgggcttgcattggggatgggggtgtgtacagatgaagtcagtggcttgtctgtgagctgaagagtcttgagaggggctgtcatctgtagctgccatcacagtgagttggcagaagtgacttgagcatttctctgtctgatttgaggctcagacccctccctgcccttcagagctcaagacaagtaatacacccaggtcttgactgcatttgtcttgtgagcagggcttgcttggtcagctcaggccctcctagctgctctggaggctcctttgattctctagacctggaaaaggtgtccctaggcagagccctggcagggcgctcagagctggggatttcctgcctggaacaagggacctggagaatgtttttgcgtgggatgatgtgctggtcaggagccccttgggcatcgcttcccctgccctttggtagtgccaggaccaggccaatgatgcttctcagtagccttatcattcacaggtgcctct

SEQ ID NO: 52663 - DNA, 1032 bp, Homo sapiens
gtgacctcagttttaggaccaagatctgtgttggtttcttagattgctagcttttcctccaggggaccacagcaggtgaagctcaagagcgcatggctctgctaatagtaaattgttttcagggccttgtccagctgagagcttcatgtccaccagattctgagaggtgtcagcagcactttttttttttatttgttgtttgttttccatgaggttatcggaccatgggctgagctcaggcactttctgtaggagactgttatttctgtaaagatggttatttaaccctcctccaccccatcacggtggccctgagggctgacccggaggccagtggagctgcctggtgtccacgggggagggccaaggcctgctgagctgattctccagctgctgccccagcctttccgccttgcacagcacagaggtggtcaccccagggacagccaggcacctgctcctcttgcccttcctgggggaagggagctgccttctgtccctgtaactgctttccttatggcccagcccggccactcagacttgtttgaagctgcactggcagcttttttgtctcctttgggtattcacaacagccagggacttgattttgatgtattttaaaccacattaaataaagagtctgttgccttacttgtttctctcctgacctgtgtattcctttgtttctggatctgatccattcagccccttccatcatcactgacttgttcaggtctgctgcagagcgcccatggtggttccctggtatcttacatattccacagtgtctttgagcagtcgccacagcctcaggatgctggcatattcacttgagctgcctgagtggagcccttggcaaagttggcaagacccttgcctcagagaggatcacacacacacaaaaaagttttccctgacctgggggctcacaggctagtgaagggaaaaggtacttttagctatagacaggtcaatggtgctgagagcagagaggaggcccctgcccccttcagcaaggtgagggggtgatac

SEQ ID NO: 52664 - DNA, 1046 bp, Homo sapiens
acctgaggtcaggagttcaagaccagcctggccaacacggtgaaaccccaactctactaaaagtaaaaaaaattagcagggcatagtggcaggcgcccataatgccagcaacttgggaggctgaggcaagagaatcacttgaacccaggaggcgaggttgcagtgagccgagatcacaccactgcactccagcctgggcaacagagcgagactctgtctcaaaaaacaaaaaaaaagaagaggggcagaaagatattttgggaggaggtaagacagccctggtggcaataagggagtagctgtctctatatacgctgaagactagggaggataagtgactcattcagggtcataaaacaaatgagtgaggcactcagacaggaacccagggaccccctttcaggcactgctctggctgtgttattagcagaaaagacttctttttgacctcttcacgcctcctcaccccttcccagtgcccaaggggaaccataaagttacccatttatgctagtaagtagatgggcagatgagttagtgcagatagacagataaactggtgcataggcagatggcacaaaagatcgggaggtgcctgactgccccctaccctgtgatcatggtcatgtccaccccacccagagtaggcaaagagaagtgccgcccagtcctggctggaggtggaagcggctctgcaggcacgcccctgcagcactccttcctgaccgaggtgactgatgtctatgagatggaggggggactcctgaacctgctcaatgatttccactctggccggctgcaggccttcggtgagtcctgggggctggtttcagcgggtgtgtggatagggctgtagggcccagtccatggggcatggctgggaccatggttccagggttccagggttccaggactctttcccagggttcagacaggggcttcgttccagggaaggaatgctcctttgagcagctggagcacgttcgggagatgcaggagaagctagcccggctgcacttcagcctggatgtgtgtggggaggagga

SEQ ID NO: 52665 - DNA, 1047 bp, Homo sapiens
tccctagcttccctgggcctgccttagccgccagtcgcagccgaggcgaagagagcgaaggagggaagtgggggcggctagctggggctagaaggccaggagagggcggggtgggcggccgtttggggtgggggtcagggtgactcactcgtctgcattcagggcaggtgttggctctggtgctggtggccgctctgtggggtggcacgcagccgctgctgaagcgggcctccgccggcctgcagcgggttcatgagccgacctgggcccagcagttgctacaggagatgaagaccctcttcttgaatactgaggtgcgtctctgtgaaaggcccctctctcggtggagttgccgccaagaatttggtctttggagtcaaacaggtctgggtcagccccaccacttactcactagaaattctcggaaaagtcagttgtccttgagcctcagtttcatcatctgtaaatggcgattataataataaccatctgataggtcagttgcaggaattaggtgagatacgtagagcacttagcattaggcctagaacatagtaagtgctcaatctatggctgccattattcacattttattgtgattccttcagttacataaggcaacatttgtgagcctttccagagggagggcttggggctcaaattggccctgcaggggaggagttcagaggaggaaggctggagctggaggacttggggaaggcttcctggaggggctgacattggcttcaaggccttgcaggatgggaactagcagaggtgagggagagggtagtttgagcaaaggcacagacttcagtctgtttccctctttgccctggaaggatcctccttagagggattagtgttctctgggtccttataaccctgcctccctccaaggaaagacattcgctaggagctcaaagaaggcagtgctgctcagtcaggccatcacactgactgcaggtttctcctctttccagtacctgatgccctttctcctcaaccagtgtggatcccttctctattacctcaccttggcatcga

SEQ ID NO: 52666 - DNA, 1050 bp, Homo sapiens
tggccttctagccccagctagccgcccccacttccctccttcgctctcttcgcctcggctgcgactggcggctaaggcaggcccagggaagctagggagatgaatccaggagtccggcctctggggttgtagcaggggtcggggttagagggtggatgtggagcaggaaatgaattcgaggcgagggtcgggaaatccatggaagggcggggccggctacctacccagagacgccgccatggcaacgccgctgtcttctacttccgggaacgaaggggcggagacccataatccggaagtgacctcgaaaccttttccggtcttactcacgttgcggccttcctcgcgtcacagccgggatggtgagtttcagagttaggggtattgcagtgggggtcctgggctgaggctggggcccaattccgagcactgacgttactgtcttgtccccacagaagccgatcctactgcagggccatgagcggtccattacgcagattaagtataaccgcgaaggagacctcctctttactgtggccaaggaccctgtgagtgttggctggagggggtccgggaggggcgggatccttctgccaggacgatgggtggacacgccagttttgccgttagcggggaaccaaagagcagcccattgtgagaagtagggagaggccatgccgggggtaggttggcgaaagtattctaccgggaaaggtggggaagaactctattggccgagtgcggtggctcacgcctgtaatcccagcactttgagaggccgaggtgggagggtcgcttgagcccaggagttggagaccagcctgagcaacgtagtaagacccatctctacacacaaaaaaattagcctgacatggtggcctcgcgcctgtggtctcagctacttcggagtctgaaacgagaggatcgcttgagcgcggtgagctgagatcgtgccactgcactccaagaaaagcaagagaccactgtggaaaggggataaagatgagggtcagcttgcccagagaacgggatgcgacctttagggataat

SEQ ID NO: 52667 - DNA, 1050 bp, Homo sapiens
gaactcctgacctcaggtgatccgcctgcctcggcctcccaaagtgctaggattacaggcatgagtcaccacacccggcctggccattttcaagatgagaaaactgaagttcagaggagagaagcactgtatttgagatcatatagtgagacagtggcagagcaggcaccagaacccagacttccttactaccagctgctcccacttggataagacatcagagatactgtttttctggactggagctcaacttggccttttattctttggagccgttgggagtcccaggagagctggagctaacaaatgaggatgcctttacaagccgcctgactcctctgttgcttcccttcaggaagggaggagaatccaggagttggtctttttaccagctccctgctgtttcccaagaaataaacagaagagggcagaatcagccttgctacaggctgctgagggttcctggggcaaaataggaagccattgctcttactgggatgtgtactatcctgtggtttgacttttccagatcgtcaatgtatggtactctgtgaatggtgagaggctgggcacctacatgggccataccggagctgtgtggtgtgtggacgctgactgtatccttattttgggtctgagtccgtgttgctagggtctgtcagcgatggagaggctgagttgggagttgggagttgggggtgctgttgagggcctagagaacgatacctcctactccctggtctcttcactgactgaggaaacattcaggacaaattccagttctggataaggaggtaagaggggtagaaaggctctttggggctgaacagggagatgattcacttggcatcccaagaggacaagggctcgggtgaacttcgtcatatttcttaacaactcttcaggggacaccaagcatgtcctcactggctcagctgacaacagctgtcgtctctgggactgtgaaacaggtaagctgggttcattcacctttttagcaaatattgaggacctacagtgtacctgtttgagtaaacaggtcctaggaaa

SEQ ID NO: 52668 - DNA, 1049 bp, Homo sapiens
accactgcactccagcctgggcaacagagtgaaactgtctcaaaaaagaaaaaaaaaaagaaaagttaaaatactttttaagtttgggtcactggagcaagacaaacagtgagatgtgatggtagcattctctagaatgtcctccctgcaattgcaatggatggtgtagcccagactttgcctgactccaggaaagcagctggcccttctcaagaccaattcggctgtccggacctgcggttttgactttgggggcaacatcatcatgttctccacggacaagcagatgggctaccagtgctttgtgagcttttttgacctgcgggatccgagccagattggtgagggctgggaatagggctggggttgaggtaaagggtacagttctagagcccagggcctaacatctactgccccacacagacaacaatgagccctacatgaagatcccttgcaatgactctaaaatcaccagtgctgtttggggacccctgggggagtgcatcatcgctggccatgagagtggagagctcaaccagtatagtgccaaggtaagaggccacatggggcctgagcctaccagaataatttttttttttttttttaagatagagtctctctctgttgcccaggctggagtgcagtggcgccatctcggctcactgcgacctccacctccctggttcaagcaattcccctgccttagcctcccgagtagctgggattacaggtgcatgccaccgcacctggctaattttttttgtatttttagtagagacagggtttcaccatgttggtcagtctggtcacgaactcctgacctcaggcagtccaccgctcgtggcttttttttttttttttttttttttttgagacagagtatcaccctgtcacccaggctggagtgcagtggtacgatctcggctcactgcaacctccacctcctgggttcaagccattctcctgcctcagcctcttgagtagctgggactataggcacctgccaccatgcctgggtaatttttgtatttttagtagagatggggttt

SEQ ID NO: 52669 - DNA, 1360 bp, Homo sapiens
agaacatcccacaggcaaaaggaacagcaaaggcaaaggcacagagttaagaaagtatggagtcttcagaaacccttggggtgtggtcttggggacagaggacggggaatagattttaaacgtccttcagtgtgaggaggtaaagagttttgactttcctccaggcagtagggaatctttaaagggttatcaatggccagattttccttccaacagcttttgcagtttatgtttggagagtgaacctgaactagccaataggcataggatgtacattactggacagagtcaagggatatttaggggtgactgataggatagagggggtgaggaaaacacaaagtccatgctgtctcagctttcatttgggtgcttgggtttctggggagctgagattagtagggattgggcccattcagtgtcactcttcttccttccctagtctggagaggtgttggtgaatgttaaggagcactcccggcagatcaacgacatccagttatccagggacatgaccatgtttgtgaccgcgtccaaggacaacacagccaaggtgagcctgggcagcggtctggcagggctgctccctccctccggctgcacagctcaccctgcccgacttcccccaggaaagctctttacagatttcccccctgccttctctctccagctttttgactccacaactcttgaacatcagaagactttccggacagaacgtcctgtcaactcagctgccctctcccccaactatgaccatgtaagagaaccccacctgccttcctgctgaagcctcaggaagcttccaagttctagatgcttgtccagaagttgggctacaacattgtgggggaaatgatgtcaggcagagaggagatgcccagaggagtgacaaagctggaaggattgaatagccccagggcagccagcaggaggtggcagaagtgtctgatcatcccctacctttggtatcctcccattgagccgtgtgagatgttaaaaatgtatatggcagcagaaaaacacaaaatggacttggtgtccattggtcccatctagagtttcttcttccattcaggtggtcctgggcggtggtcaggaagccatggatgtaaccacaacctccaccaggattggcaagtttgaggccaggtaaagaagaagagagctcttccaaattaaaatctcatgtggtgtaccttttttgtttgtttttgtttttgagatggagtctcgctctgtcgcctaggctggagcgcagtggcgtgatctctgctcactgcaagctctgcctcccgggttgacgccattctcctgcctcagcggcccaggcgcccaccaccatgcctggctaattttc

SEQ ID NO: 52670 - DNA, 1050 bp, Homo sapiens
gcctcaagtgatccacccgcctcggcctcccaaagtgttgggattacaggcgtgagccactgcgcctcggcttctgctttattttttgtgatacaatttgcatttgaggccaggtgtggtggctcatgcctgtaatcccagcacattgggaggctaaggaaggcggcttgaggccaggagttcgtaaccagcctggccaacatggtgaaaccccatctctactaaaaatacaaaaattagccaggcatctgtaatcccaaccactcaggaggctgaggcaggagaattgcttgaacccaggagggggaggttccagtgaaccgagattgcgccactgtactccaccctgggtgacagagtaagactccatctcaaaataaataaataataataacaatttgcatttggggagtgccacctccaaagtgttttggaagaagatagaaagtgaattaattgtgtcccttttcctccaggttcttccatttggcctttgaagaagagtttggaagagtcaagggtcactttggacctatcaacagtgttgccttccatcctgatggcaagaggtagggtaccagtgaagcagctgacctaagcctgggttgggtctctgcctttcccagagtaagcacctgactggtgcctggctatctttttccagctacagcagcggcggcgaagatggttacgtccgtatccattacttcgacccacagtacttcgaatttgagtttgaggcttaagaagctggatctcctgccgggcgtggtggctcatgcctgtaatcccaccactttttttttaaggcaggcggatcacctgaggtcaggagtttaagaccagcctgaccaacatggagaaacctcgtctctactaaaaatacaaaaattagccaggcatggtggcacacgcctatagtcccagctactcaggaggctgaggcaggagaatcacttgaacccaggaggcagaggttgcagtgagctgagatcacgtcattgcactccatcctgagccacaagagcaaaactccgtctcaaaaaaaaa

SEQ ID NO: 52671 - DNA, 1031 bp, Homo sapiens
tacaaaattagcttggcgtggtggtgcatgcctgtaatcccagctactcgagaagctgaggcaggagaattgtttgaacctgggaggtggaggttgcggtgagccgagatcgcaccattgcactccagcctgggcaacaagagtgaaattgcatctcaaaaaaaaagaaaaggaaataatctataccaggcactccaagtggtgtgactgatattcaacaagtacctctagtgtgaccttaccattgatgaagaccaagattcttttggattggtgctcacactgtgccagttaaatattccgaacattacccttgcctgtgggcttccagtgcctgaccttgatgtcctttcacccatcaacccgtagggatgaccaacccggaggtgattcagaacctggagcgaggctaccgcatggtgcgccctgacaactgtccagaggagctgtaccaactcatgaggctgtgctggaaggagcgcccagaggaccggcccacctttgactacctgcgcagtgtgctggaggacttcttcacggccacagagggccagtaccagcctcagccttgagaggccttgagaggccctggggttctccccctttctctccagcctgacttggggagatggagttcttgtgccatagtcacatggcctatgcacatatggactctgcacatgaatcccacccacatgtgacacatatgcaccttgtgtctgtacacgtgtcctgtagttgcgtggactctgcacatgtcttgtacatgtgtagcctgtgcatgtatgtcttggacactgtacaaggtacccctttctggctctcccatttcctgagaccacagagagaggggagaagcctgggattgacagaagcttctgcccacctacttttctttcctcagatcatccagaagttcctcaagggccaggactttatctaatacctctgtgtgctcctccttggtgcctggcctggcacacatcaggagttcaataaatgtctgttgatgactgttgtacatctctttg

SEQ ID NO: 52672 - DNA, 1023 bp, Homo sapiens
atagtcatgtaaataattcagatataaaacaatcctagcactttgggaggctgaggtgggcatatcacttgaggtgaggagttccagaccagccaggccaacatagtgaaaccccacctctactaaatatgaaaattagctggatttggtggcacgcacctgtaatcccagcaatttaggaggctgaggcaggagaactgcttgaacctgggaggcagaggttgcactgagccgccgagatagtaccattgcactccagcctaggcgacagagtgagactccgtctcaagaaataaaaaaaaaaagaaaagaaaactaatgaagtgctgtatacaaattgcatgtagaggaaaagaccatttattttgatcaagaaagggtttggagcttgaggtgggctttgtagtatgagcatcatcaaagaaaggaggacatttcaggtcaaaggaatagtctgcacagaggatactgtggtgtgaaggtgaatgtcatgttcaggatactgatcataatctggtgtgtctggagcacaggttggcaaactttttctatatagggccagatagtaaatattttaggctttattttgccatatgcttgggtgtctgtggcaactaaactgctcagctctgccactgtagtgtgaaaacagccatagaggaactgtaaacggatgggcatggctgtgttccaataaaattttatttaccaaaacaggcaactagttgtatttgtcccaagggccatagtttgcctactccagtctagagcaaagagagagagagagtgagtgtgtgtgtgttgtgggaaagggtggtagcaggagatgaagctggaaaggcaggttaagaaagtccttggatgaagctggaaaggcagattaagaaagtccttggccgggcgcggtggctcatgcctgtaatcccagcactttgggaggccgaggcgggcagatcacaaggtcaggagatcaagaccatcctggctaacacaatgaaaccccgtctgtactaaaaatacaaa

SEQ ID NO: 52673 - DNA, 1118 bp, Homo sapiens
tccatccgtccagataacatgtcggagtacagcaagcagatgcagagatgtaagtccattctgttccctcacactctgaagccgccagttgcatctccctttccactgtagaggcccattctgccgtcctcgcacctcccattcagtggacacctgatttcccctacctcctaaaggtgccagagtgctttttcccctcaagtcggatttttcatgtttcctgatttgtaaacgatagaggtagtactttttctggttatgttcacaacactgtcccaagagtactgtaattattgtagtggaaaaagcactgacctgggacggggagacaatagatacagtaaaatttaactctaactctcagctgagtgggcaagtcacttcccctcagattcttcttttgtaaagtgggctgggccacatgatctctgatttctgtccaactgtaactgttttgacttagtgggtattaattgagaatttagaggccactcaggacagattctagatggtgtaatctttgagatgaggtgatgctgcccctgatcccttggacttgaacttcagagcaggtcccatcttggaagccacgcttagtttgtaggaatcgtgggaattattttagctgtgagggggaaaaaaaaagtattcaaatttgggacaaaactatcatacctgacttcccccttgtgttattttagaaattatctcttagcacctaagacttcatatagtataacagcactgtccagaagaagttttgattaacttatgacagcttatatggaagtgtcagaaaatatgcggcacttgtttgttgctgctgaccacaaggtagtcttactcccaaggaagaaagttatttataactattattacaactaataataactgtacagtggtattgatggcagaaccacagagaccttccttgaagcattaagcttctttgctaccgacaactccaggagctgccagctgctgtgagtgaggtgtttgctctctgaattgcagggtcttatttccctccaagatgaggcaaattcatgcctttcctgtagatggctttagaggtttccataacccatttaggccaaggatcaggctctactctcagc

SEQ ID NO: 52674 - DNA, 1001 bp, Homo sapiens
gatgcccccttgggcatctttccttgatcacataccctttctctcccactcccccagccccccaccccattaccagcactgccaaggtataagcactatcctgaggttagtgtttaatcttcccatctctttgcaatgagcatttgactgccttctctgcctacgtctgcttccacctctcacccagtattgcttccctttagtctaaagctagtgtgagaatgagaaaagcgtttatagcagaaagagagaaaacccatggaaaagtcttccctaccctcacagattagctcacatgagtatctgctcttccatttgccccctttccatctctaatcacatagcttattgactaggaataaaagggctggtcatttgagctacatgttggtttggtgcctgaagaaaaatatttttttttttctcacgtccaaaacacccattccttcccatggaggctccatatcccaaataagagtataaacaaagctttggaaacgcaggcaggccaaactctgtgcaggaggaagtggccagagagggaaatcagttgccaatggataaacagccggggcccagggaccaaagttcttatttacacagcctcccagtgtttacccaggaagtgaggaagagacccacccgctgcacactccctcatgcagccatgcttcttcctcagagcaccggatcttggcaccctccaagtttagtgcagaaccagagctggtaactcttgtggttattgtagatcttgagcttcaactgtgtcttgagattttaccagcacaatccaaactgagctcttctgctctcaccccagggctgctccttcctctacttttggaaatcttgataacagtgggtacagtagaaggctgggcaagagaataagtatgcagccccacacctcctgcctctgacttcctgtagctcattgatgtctcagcagttactttttttttttttttctcctgagatggagtctcgccctgtcaccc

SEQ ID NO: 52675 - DNA, 2063 bp, Homo sapiens
gcctggctaatttttgtatttttagtagagacggggtttctccatgttggccaggctagtcttgaactcgtgacctcaagtgatccacctgccttggcctcccaaagtgctgggattacaggtgtgagccaccgcgcccggccagtagttaccttttctgtaagaggagatttggagctataaagttcctctaggtctgtgagtctacagcctccaggtgtgctttccttcctgttttcatttcatttgccttattgtttgcatatgtttccacattatgtactacttggtacttttaccccattaggcccgaaataactttactccacttgtcactgtgaatgtagcagtaagacactgggctacgggagtcaagacaccgggaccctgattctggttctgctactgcctggttttataaccttgggcaaatcacttaacttctcggtatctgtttgttcctccgcacagtggggttgatatctggcttgtccagctcatagagttgttgtgaggatcaaatgaggttgtatatgtgaaaggacttggaaaagggccgggatatattttcacaggcttttaagacagacaggctggctgggcacggtggcttatgcctgtaatcccagcactttgggaggccgaggcgggcggatcacagggtcaggagtttgagaccagcctggccaacatggtgaaaccccgtctctactaagaatgcggaaatcagccaggtgtggtggcaggtacctgtaatcccagctactcgggaggctgaggcaggagaatggcttgaaactggagggcagagattacagtgagccaagatcacttcactatactccagcctgggcaacaagagcaaaactccgtctcaaaaaaaaaacagacaaaccaaagcttgaggcttgcatactgcttctgccatttactaacagctcacctctctgaacctgtttccctacttatttatttatttatttttttgagacagggtctcactcttgtctcgcccaggctggagtgcagttgcgcgatctcagctcactgcaacctctgcctcccgggttcaagtggttcttgtgcctcagcctcccaagtagccgggattacaggcagctgccaccacacctggctaatttttatgtttttggtagagatggggtttctccatgttgcccaggctggtcttgaactcctggcctcaagtggtcctcctgccttagcctcccgaagtgctgggattacaggtgtgagccactgtgccaggccttgtttccctacttataagatgggaccaaatcttacctcagaagcttgtgtgaagatgaatgatctcgggtatttaacgcatgtagcgcagtgtctggcgtgttgtacgtgcgcagtgaacgatagttctctgggtctctgttcttgccccttgtttgtcagctggcgtgagggccagaggataagtttttctccctcaagaaacgaaccaacattttccaagttgctaactgcttctccatattagatttttgttaattttctgaccagtgggtgaggtgggatatcagttttgcttgttatagataatgggctaagaccaggtgtgatggcacatgcctattgggaggccaaggcaagaagactgcatgaggcctagggaacatagtgaggctctgtctctaaaaaaaaaaaaaagaaaaaaaaattagctgggtatagtggcatgcacctgtagtccaaagtacttgggagactgaggtggaaggattgcttgagcccaggaggtgagggtcaaagctgctgcacatgagccatgtttgtgccactgcactccagcatgggcaacagagcaagcccctggctctaaaaaataaaaaaataataatgggctaaagctcaaagatgttaaacaacttgatgcagtcatacagccaggaagtagagcctggactagaacccacacctcctgaatttaaattctgtgtttttttccatcagctcataaatatgtaaactaaaggaaattgtggaaactaaccttttgcttatttctttcaagtcaacgttgg

SEQ ID NO: 52676 - DNA, 1170 bp, Homo sapiens
gttagaataaatgagcattcactttttttttttttttgagacagtctctctctgtcacccagcctggagtgcagtggcgtgatctcggttcactgcagcctccgcctcccgcctccaggcgatcttgtgcctcagcctccgaatagccgggatttagctgggattataagtgcgtgcaactatgcccggctaatttttgtatttttaaaagagatggggttttgccatgttggccaggctggtctcgaactcctgacctcaagattcacccgcctcagcctcccaaagtgctggacttaaataggcgcactcactattttgaggttactgggaaggactttcttacctctctccttccctccacaacaccctagagagggagcatgggggaagaggagtgagcattagagctctctggagtggaaagggttgtcaagggtggctgtcacttctgtgactcacctgccagccagctctaacccaatcccaaggtagaaatcttgtgctatagggtaggctattcaatctctggtcccatcaagagctctcagtctgggggtaggcttaatgctatgtccagagatgatttgccagtgaagctagatttgccagtgaagagaatggtactaacaaggtacctctgttctgtcctggcccacatcatgggcctagcttgtctctcttgaacctcttcctttatccctccagcccctatccttgaccttccttcaagcttcatccttcagttttactttaatggcctttttaattaggatatcggggctggcaaaggcaagtattatgctgttaactacccgctccgagacgggattgatgacgagtcctatgaggccattttcaagccggtaagtggctttatccaccccttgggctacaaacaggggattggttggcggtggaggggagcaaagcacccccaccatacctcaggaatctctccttactaaagctggtggggagatagaagtgtttgaaccctggattgctgtgtggtcagttaggggaacaaacacccatatttattggttccttctatgggtcaggtcttctgctggatacaaaaatatctaagacatgatctttgccctcacggactatggtggggaaggcaggcacatacccagtagtctatgattagtactgtttttg

SEQ ID NO: 52677 - DNA, 1338 bp, Homo sapiens
ccaagagacaccaagggaaagggaaccagaagagggaggaactcgggctccctaacctgttcctacaggcactggaactcgaaaacagatttctctacaggtggggagcttggagggagtgtgcagccaggaatggtggtggaagtgtgagctgcctattgaatggaaggcatagggctctaggtctgggtctcactcgagatgcgcttgtcagggtcgtcttcgtcctcatcgccactctcctcagggatggcgtcctcaggaatcgcctgcatttggaccccaggtgcgtgcggcagcattctaaggttctcaaacagtcgctgtctgtggccaatgggagagagtagcagggctctggtcagggacaaaccaaagtcaggaatgttcaaccaaggggtggctggaggatatactcacttgatcttctccaggtactcattcgtgttctggttagtcatattggaaggactgatgtggagcttgaaatctggtccaaagtattcaaagtagtcattgtatggaagctctgattggggcaggagagaagaccgtcaagagacctggccaccgcaccctaaccatttgcacgtaagcaccctaaagcatttgtaggtttctctgggcctatttatccaaacagaggagaatgcctccaagacactgtgagacacgggtacctatgggatttccatctttttaacatcactctcctatgtctgtaccagtggtgtatatgtcgctaggagaaggcccatgtccctggtttaggacacttgaggccatgctcattatgagcgctcccttcactcgctactccagttactctacagagtagaaattccaaagctgtaaattaccaatgagaactttgtccagaccaaaagcaggagggagaggggagagagctaaaaaggactagggaaaaagtgatggttatggtctgctgatcacaagaggacaggcaggagactcagtgactagtatcagaagaggagcggtcatatgaccaacggggaaggggttataaacttaaggacagatgagctccagctcccacccagcccagccgaacctggccctgcagctattaccattagggatctccgtatccagggccacagctgtctcatatgtccagcaccgggcaacgttacgaatggtgtaaccaccgcctcccagcatcagcataggcaggttaaagctcttgacaaattccacacacttggcgtgtcctttggtgggagaaggggtgctgagttacaggagcaccaagcaggaccccgcccacccatccttgtgctacctggtctcacctttgatagttagattgaagca

SEQ ID NO: 52678 - DNA, 1485 bp, Homo sapiens
ccgctcctcttctgatactagtcactgagtctcctgcctgtcctcttgtgatcagcagaccataaccatcactttttccctagtcctttttagctctctcccctctccctcctgcttttggtctggacaaagttctcattggtaatttacagctttggaatttctactctgtagagtaactggagtagcgagtgaagggagcgctcataatgagcatggcctcaagtgtcctaaaccagggacatgggccttctcctagcgacatatacaccactggtacagacataggagagtgatgttaaaaagatggaaatcccataggtacccgtgtctcacagtgtcttggaggcattctcctctgtttggataaataggcccagagaaacctacaaatgctttagggtgcttacgtgcaaatggttagggtgcggtggccaggtctcttgacggtcttctctcctgccccaatcagagcttccatacaatgactactttgaatactttggaccagatttcaagctccacatcagtccttccaatatgactaaccagaacacgaatgagtacctggagaagatcaagtgagtatatcctccagccaccccttggttgaacattcctgactttggtttgtccctgaccagagccctgctactctctcccattggccacagacagcgactgtttgagaaccttagaatgctgccgcacgcacctggggtccaaatgcaggcgattcctgaggacgccatccctgaggagagtggcgatgaggacgaagacgaccctgacaagcgcatctcgagtgagacccagacctagagccctatgccttccattcaataggcagctcacacttccaccaccattcctggctgcacactccctccaagctccccacctgtagagaaatctgttttcgagttccagtgcctgtaggaacaggttagggagcccgagttcctccctcttctggttccctttcccttggtgtctcttggaggacacgcagggaagcactgggcatagatgctgagctaaatcagcacccgcctgccctctcacccatgcttcccactccctcccagtctgctcctctgacaaacgaattgcctgtgaggaagagttctccgattctgaagaggagggagaggggggccgcaagaactcttccaacttcaaaaaagccaagagagtcaaaacagaggatgaaaaagagaaagacccagaggagaagaaaggtgggtttgggttcagctgggacttgggtctcgagcctgagaggatgaatctatgtagggcagtgggaggagggagtgactcaggccctgccagctcctgtggggctcttcctcagttccttgagcctttcagtggctcccagaagtggcagagcccacaaaacaatgaacctctactgcctgagcacggctctcacataccaccccagcccttttcccagcactgcaccccagtttcccaggg

SEQ ID NO: 52679 - DNA, 1040 bp, Homo sapiens
ctccgctccgcgccagaatgccgcccgccgcccgccgagctgcctatatataagcgcccggagctcggggcggggccggacatttaaatgcgcgcccaatcgaggggcggaggcggggttggctcgcaggccccacttgcgcagcaggcgacgctggcggtcgggtaccccccaccccacccgaatcccaggggcaggtagagtccggtgtgggcaggagcgaggccagtcctcccgcgagctgggcggggcggggcggggggcctggaggaaggagacgggcagtcattccatcctctccgctccacctctccggtgggcgcccccgcagcctggagcggcccccaacgccttggtcctgcagccgctggcagtctcccgcttgaacccttcgaagggctcacacgaccaggctcgtcagatggctggtcctgaattatactctagaaatgtggtcatagaagctgcagggcccctgcgctgggctcggcacccgctccggcctggagagcggtcagaggtcccacccacgtccctgcctgcctgccatggccagccggggagcggagggctctgccttgcctcggggtcactctggtcggactagtgaggcctttccctcattcctcctttcagtcccttggtggccagtcattctgagtggggacagacagattcgccttgagcccctcctgccctcagcctggacccactgcaaagtcccacgtgggggactttgtgaccttgaagggcatctccatccccattgaaaggccaaggctcagaggcattgacaacctgtctgacttggctctggtccttcctctttacctccacacacaactctgctcccctacatcagggtgccccaggccggcagaggaaccccagctggggactcaacaaacctcaaaacaccccagtttctgaaggggagggataggatgctaccaagggtcccttcaagggacagccccttgaggacagccctcaaagctgcccagcccagcttcccaccctgcctgagagcaagggagccc

SEQ ID NO: 52680 - DNA, 1090 bp, Homo sapiens
tttgctaaatttctgactgaatccaagatttttccttagaatagattcttaaaagtgggggccaggtgcggtggctcacacctataatcccagcaccttgggaggccgaggtggccagatcattgaggtcaggagtttgaaaccagcctggccaacatggtgaaaccccgtctctactaaaaatacaaaaattagccaggtgtgtggggcgtgcgcctgtagtcccagctacttgggaggctgaggcaggagaatcgcttgaacctgggaagcagaggttgcagtgggccgggatcacaccactgcactccagcctgggtgacagcaagactccatctaagaaaacaaaaaaaaaaagtacgattggtgcgccagagtgaacacaaaatgtaaagacttgtgtatttgtgagacccttttgaagcatgctatctccccagctacaccctcttcaggtgccccttccctgcctcctcctgcttttcacactgtggctcgtggttccaggctcaagcacggacatcagtgaggactgggagaaagactttgacttggacatgactgaagaggaggtgcagatggcactttccaaagtggatgcctccggggaggtgagtgggcctggtgggtcagagggaagcgagcctaatggtcctgggtgtgagagctctccccagccagcccagctgtcccctcaggagggtccctgctcctgtctgaggtgacaggtggtgggaaaggagctggagcttcctgctcagacccacaacattggtcatcagcaggctgcacttttcctcagttccagggtggatagagggtcaagttcttgaccttagctctgtatcaaaattgcctgagaaactgcttaagaaaacagatgtcatgctgagcgcggtggctcacacctgtaatcccaacactttgggaggccaaggtgggaggattgcttgaggcgaggagttcaagaccagcctggccaatatagtgagaccccatttctgtttttgaaaaaaaaaaaaaaaggaaaaaagaaaacagacatcaaaccctgcctgaccttctgagttgtggtcctcaggtatgaggc

SEQ ID NO: 52681 - DNA, 1023 bp, Homo sapiens
caggttacatttccctcttgcccctccctttctctctctacagaggagctcatgggcatttcacccatatctccaaaagaggcaaaggttcctgtggccaaaatttctacattccctgaaggagaacctggcccccagagcccctgtgaagagaatctggtgacttcagttgagcccccagcagaggtgactccatcagagagcagtgagagcatctccctcgtgacacagatcgccaacccggccactgcacctgaggcacgagtgctacccaaggacctgtcccaaaagctgctagaggcatccttggaggaacagggcctggctgtggatgtgggtgagactggaccctcaccccctattcactccaagcccctaacgcctgctggccacaccggcggcccagagcccaggcctccagccagagtagagactctgagggaggaggcgcccacagacttacgggtgtttgagctgaactcggatagtgggaagtctacaccctccaacaatggaaagaaaggtaggtctggaggtccaagcccagagggttgtgtgcggtcagggccacctcctgaggcagatttgtctccttgtcccttgttaggatactatgagcagattttttttcgtttctgataatgatgacagctgctatatattgactatttgctaacatatttcattctaagttgcacaacatctctgaaataagaatgcatcttcaattgttggcatcttaagagtcaacaaaacaagtttgatgccagatcccatgctaaatatgttatatggcacctaatttctcagtattattgtcctcattttacaaatgaaaaaaagtgaggcccaaaaatattaggtaacttgcccaagttcacatggccaggaggcccagattcagacccagggctgtctgactccaagcccatgcccttaactagcacactgtgccaatttctatctttttggacaatttaaccttaccctggcttgggaatcccagtgacattgatgttaagg

SEQ ID NO: 52682 - DNA, 1271 bp, Homo sapiens
aagtactgatttttcaagtatgtgttttagcactagcattagcgccaccacttagtgaacatgtgagtggaattgtgaaaatgtttgataagattttgagctataacgacagtgaattatcaccagaccgcttacacatagcccatgcttcctgcaatactgaggaagaaaggtggactttgtctttgccagctaagtttgccaccctgtgatcctagtgggaacgtaacttggtagagactggctatacaattaataaattcttgagtggttttaatttgagggaaattgtgttattttaaaatttgtccctaaattttgactttattaacatattggcactaacatttttcaaattttacttactacaaagcattttatacaaataattttgtagcctgcttatgctgtattttcttagttcttggggtagaatactgggtgaaaggccatttttctgggaaccccagttttggatgcctagcctagtgccccactctctgtgccacagtgctaattaacagatgccctgggggtatcccagccaacaagggagaagctggattgtggttgactgagtatcctggcagagaaagggtgctttctatgcccagtatctcagaatttctgttttcctcttctccttttcttacaggctcgcctctatagcctgcagtcggacccagcaacctactgtaatgaaccagatggtgagagggtagcactgagcgggtgggcttgtagggcaagtagactaagggggctgggttgtagaccctgtttgtctcaggtagcagaggccgggcaccccctatgtagggagaccagagtgagactagtgtgtaccttatactttgtggggtgggtggatgttctcttttctttcctgaacttgagctgtcctgcccaccctgcagggacttggcccctctcatccctcatcctcagctcagcctccctcccagccctgctgccccccttgccttctcttcagctcctgttagctaagcccctgccatgcagcaaaccccattatgggaactggagatcagaaatgagccaaaccctccacctagtccaaccctccaggaactggcagttaagagggggaaagcagaaacagtcaataaagtagaaatactagagagcagcatgactgcttctgcagagcagcggggcagcaggagccagaggaatggcacccttcctggcctgggaaccaagcaagtgatgctggagttgggttttgtttgtttgtttgtttgtttgtt

SEQ ID NO: 52683 - DNA, 1034 bp, Homo sapiens
agttttgaccggcctgactgaccttgaaattttgatgaaacagccaatcaaagatctctgatctacacaggcctaccatggccctgttctgcagccccacttgggggatggaggacccttgcctcctccctctcctgcagccccagagacgggtgaagggtcgtgagcgcttccctggtcccccaacacacggtacacctttgccccaatgttttacccccataccccagattgcagcctgttcccggggcgcttgcttcctctgcccgttctctatacagacggaaggctcctcaggagcaacagagaagatgaagaaagggttatctgacttcctaggggtgatctcagacacctttgccccttcgccagacaaaaccatcgactgcgatgtcatcaccctgatgggcacaccgtctggcacagctgagccctatgatggcaccaaggtattcactgacagtctcccctgcagatgcctaacatctgtaacctgggctttaacttccatcctgtactcacaaaagcagcccatgttcaggccaaaaaataaatatgggtatattattaatagtaaatcagaaaataccagtaagcaaggacaggataattatttttaaactcacaattgcatcacccaaagagaacccctgatttcttattggtatataaccttacatttgtttttgtttataaacataggtaaagatagtttggttttttcttctgaacaaaaaagacattttatacatgcagttttgtaacctacttttaaaaaatcaacaaacatagcatctttcctaatcatctttttttttttttttaatgagacagggtctcactctgtcacccaagctctctctggggctcagtggcacaatcatggctcattgcagccccgactttccaggctcaagggtccttccacctcagtctcctgagtagctgggaccactggcgtgaaccaccacacccaactaatttaaaaaaattattttggtagaaacggggtctcactgtgttgcccaggctgg

SEQ ID NO: 52684 - DNA, 1230 bp, Homo sapiens
ttaaaagctggggtgggggtggaggtgggagttgtttatgcctttttggaaagaaaagacgtaatttccctttttttactttcttactcttatatgtacttgggcaagtgttttttgttttttgtttgtttgtttttgagaccaagtctggctctgttaccaggctggagtgcagtggctcagtctcagctctgcaacttccgcctcctgagttcaagtgattctcctgcctcggcctcctgagtagctgggattacaggcatgtgccaccacgcccagctaatttttctattttcaatagagacagggtttcaccatgttggccaggctggtctcaaactcctgacctcaggtgatccgcctgcctcggcctcccaaagtgctaggattacaggtgtgagccaccacgcctggcctcttgggcaagtttttaacctctctaggcctcagttcctcatctataaaatgggaatactaacaatacctacttgatgagattgtggtgatggttaaatgttaatatatgtaaaacactaagaacagtacctagcatacagtaagtgctatataagcattagctgttattaagtgctgaggctgatgggaaaacctcttagataccacccccagttcgtttttccttccattttttttcttggtcttttggtgctttcctatctgtatgtcccattctggctccatctggaccactcacttctcagcactccttagaacacattgccctgaagaccacagctatgagatggtgctatcatctgctttcctctgctccttacctcctcctgtcctgtcttcctgtgtgttgtcaagggcaatatgactgacacaaatacgtgtgcatacacgttgatagagaaaggcatatcattgctctacatacttaccagaaagaagaaattaaaaagagaaaggcaccaaatgctttttggttccatcacagattccccaacctcatctgggcccacatactcttcagtctccaatttgcttctcctccccttaacttcagaaactttcccaaaacctaactcttccctggggtcccctattcagccgctttatccctttcacttccaggagacaacctcatctactttttgaaacttcaggtgaacaaacaggatctttaactctctccccaccctcaaagccaccacctataaacttatctttactcagtcagctttacctactgcttgccaaatccag

SEQ ID NO: 52685 - DNA, 1704 bp, Homo sapiens
ccaggagttcaaggttgcagtgagctttttttgtttgtttgtttttggggtgtttgttttttgagatagagtcttgctctgtggcccaggctggagtgcagtggtgtgatcttggctcactgcaacctccacctcccaggttcaagcgatttgtctgcctcagcctcctgagtagctgggattacaggcacccgccaccacgcccagctaatttttgtatttttggtagagacagggtttcgccatgttgtccaggctggcctcgaactcctgacctcaggtgatctcccccgcattggcctcccaaagtgctgggattacaggagtgagccactgtgcccagccacagtgagctttgatcacaccactgcactgcagcctgggccacagagcaagatcctgtctcaaaacaaaataaaataattgtaatgtaggttttggtaaccacatgtgtcttttcctcttcagaatggagatctcctctcatcagtctcacctcctgcagcaactgaacgagcagcgcaggcaagatgtattttgtgactgcagtattctagttgaagggaaggtcttcaaagcacatcgaaatgtattattcgctagtagcggctactttaaaatgcttctttctcagaattcaaaggagacgagtcagccaaccacagctacatttcaggctttctcccctgacacttttacagttatcttggacttcgtatattctggcaaactgtctcttactggtcagaatgtcatagaagtgatgtcggctgctagcttccttcagatgactgatgtcataagtgtatgtaagacttttattaaatcttccttagacattagtgagaaagaaaaagatcgctatttcagtctctcagataaagatgccaattctaatggtgtagaacgttcctctttttatagtggtggctggcaagaaggaagcagttctccacgttctcacctaagcccagagcaaggaacaggtataataagtggaaaatcttggaataagtataattatcatccagcctcccagaagaatactcaacaacccttggccaagcatgaaccaaggaaagagtccattaaaaagaccaaacatttgagattgtcacagccttctgaagttactcattataagtcaagcaaacgagaagtacgaacatctgattcttccagccatgtttcccagtctgaagaacaagcacagattgatgctgaaatggactctactcctgttggctatcagtacggtcaaggatctgatgtcacatccaaaagctttccaggtacccaaaaagagcataagtcccctcatccaggttccaaactgctatattaatcagtctactgtcaaaacacccttagtttcaggtgctctaagcagttgaagcaagtgatttttttcaaaagttctatttttgtaatgaaatttatttagtaaggataggcgtggtggctcacgcctgtgattccagcagtttgggaggctgaggcgggcagatcacctgaggtcaggagttcgagaccagcctggccaacatggcaaaaccccgtctccactaaaagtacaaaaaaattagccgagcattgtgatgtgtgcctgtaatcccagctattcaggaggctgaggcaggagaatcacttgaacccgggaggcggaggttgcagggagctgagattacaccactgcactccatc

SEQ ID NO: 52686 - DNA, 1058 bp, Homo sapiens
ggtacctaaaatatcaaactgtcctgcttttgaaaaatcacttttatcactatttaaatctctacacagattcaccaggcatgtaaactcatctgcagaaaatgtaaacgtcatgtgacagatctaacagggcaagtggtacaggagggaaccaggcgctacagactgtgtaatgagtgtcttgcagaatttggcatagacagcctccccattgacttggaagctgaacaacatcttatgtccccatcagatggagataaggattccagatggcacttgagtgaagatgagaatagatcctatgtggagattgtagaagatgggtctggtgatctggtcatccaacaggttgatgatagtgaagaagaagaagaaaaagaaattaagcccaacattaggtagctgtaatgtgaaccaacagagctggcatgtctgcaatttacattgacttcctgtatctctctctttctatggtcggagtctagttaacaaatttatcacactgactttaaagaaatgatctgatataacttgcatgctttctgaacaggccattgtatccattctgaactttgttgccctaaaatgtgttgctgcactggaaagaaagaactagcttgagttggcttgatggatgaacaattatcctcttactttcattacaatcctcttactttattccagagatacctttttcttttaatattggaggatctacttagcaaacttttttcaaagaaaatactttaaataaattcaccacaaccaaactttatgtaagacaatttcaaggtgtttcaaaaacacataactaccaatgtttaatttcacagggaaccagttaagagcacatttaaggatctggcaacccaccttactaaacaaattagtctttctattaatttgagatctgaaacaacctgtcattactctgatatcctgaacgtttaaggattatggaagaagactaaagtgtttgaaatcattcatatttgaaatttttatcattagcttaaaaattactctcagtattgttaaaaaaaaaaaaaagtagaggc

SEQ ID NO: 52687 - DNA, 1017 bp, Homo sapiens
ccaatccagacgcgcggagtagctttccgcggggaccgaggcgcgcgctccgcccctccccccacgcctccccgagccgacttccagcgattgcgcgcgccggcgttgacgggactgcgcccggtcagggtcacgtgagagaggtttggtccgcacactcccgcggcaagagggcagccattttcttgaaggctattaagcttacgaccctttcagagtactgagatgaaaaatctagaatgccttcgggtctagttatcaattttgggggtgaagcgggggaaagaacctcgccagtcagacccagacgggtttcattcaaggtgcccttcaacgtttttccttagtctttggaaagaactagtaatgaaggaatcgcagaagatggggttttggctttttaaatatgcgatccaagcggcagggtagggactaaagtaggtcaacagccaactccgagaaaggagtgtggtcctttaagggtgtgcgccaaggggcggagtctagagcggaagtagtaactccgggccgaagtccggtggatgaagggcggaagtagagtgtctaatcctgcagtcatggcgcaggaagaggaagatgttagagattacaatttgactgaagaacagaaggcgatcaaggccaagtatccgccagtcaataggaagtacgagtgtgagtaggtggcttacttctctctttacatgtaagcacacaggcatcccctctccttacccgcggcttcctgctgctctttctactgtgccccatgggtacttcaggcatgatcccatttgtgccggctgttgtagtcgcgttcgtacttctcctggggatgctgaaggaaaaagccacctggtttaatagtcgcgaaacctggcctccctcatttacagtctcttgaacttcttccacatgtgcctaatcacatttatcttcgtaaattctaaagataaccatattttcaggcgtttgcagggttgttacccccatgtatttcccaacggtgagattaga

SEQ ID NO: 52688 - DNA, 1023 bp, Homo sapiens
ctgaaggcgtgaagagggaactccccgcggggcgtgctaacggctcgccagttccctgggaccgatttcggtcgcagctggcgaagccagcggtggggcccccggccagtgtttgtttctcttcctgcctccgatatcggtttctcggcctctgtcccgagcgtggggacaccgcttcctacccacaaggctcggagctcgggcctcctcgtcgggcttgtgagtttcggcgcgcacgagcgtgctccgaaggcctggctggccccttggcctggaacgggtaacggagtgtttggcggggatggcccgaggagtttcggcgccgcgaaagtggagagtgtggatgcctctgccgtggggatttagacaaatcacctccatttcatggttaggctgtaggagtcatgcaggtggctttgcagaggattactcggtttccgtttgtttgctaacttaaatttgtttttaaaaattttagcagccttcgacgacgcagtggaagaacgagtgatcaacgaggaatacaaaatatggaaaaagaacaccccttttctttatgatttggtgatgacccatgctctggagtggcccagcctaactgcccagtggcttccagatgtaaccaggtgacatgactctcccgaacgttattttgatgtattttcagtgtagatttctcatattgattttcttttttccgctcttcagtcacccggagaaggcatgtgatcaaaacctcttggtgacattttttctaggccacaaagtaaggcaaaataacaaaatgattttgtaacttacctgacaagagaaaacatattggcgtttttttctcaatactgaattaaatagctgtagctgatgataatacctgtaataatagtggctgtaccaaataatagtacaaaacttgtcaactttcaaaaagtattatggccaggagcagtggctcacacttggaatccgagcactttgggaggcccaggcaggagacttacttgaggccaggagttggagaccagc

SEQ ID NO: 52689 - DNA, 1112 bp, Homo sapiens
agtagaaaatatggctcttggccaggcacggtggctcttgcctgtaatctctgcacgttgggaggctgaggtgggtggataatttgaggccaggcgttcgagaccagcctggccaacatggtgaaatcccgtctctactaaaaatacgaaaatcagccaggcatggtggcaggttcttgtagtcccagctactcgggaggctgaggcatgagaatcgcttgaatccgagagccagaggttgcagtgagccaagatcgcaccactccattctagcctgggcgaaagagtgagactctatttataaaaaaagaaagaaagaaaagacccttaatgactttttcccctctcttaaaacctggttgtattagtgactttgacatacatgtatattgttgacttcgccgtctcctgatgttactaatttgaacagtgactatatattgccgttacagaccagaagggaaagatttcagcattcatcgacttgtcctggggacacacacatcggatgaacaaaaccatcttgttatagccagtgtgcagctccctaatgatgatgctcagtttgatgcgtcacactacgacagtgagaaaggaggtaggaatcttaaaggtgaaagaagtaaagatgtgtgggtcatatctgttatgtgcactttgataaagtaaactctgactttagaaacaatatttaaggttgagggaaagcctgagtttgcaatggtaggtatttatatttatattagagttttaggtatcagaagaaatacttaacacatccttggttctgtaccttcacaataaacttttctcagctggtgctggtggggaggatttctgcaattgaaagaagcaaaaatatatattattgctgtacattcttgattttttatttttttactcagtctcgctctattgcctaggttggagtgtagtggcacgatcttctctcactgcaacctccgcctcccgggttcaagcgattcttctgcctcatcctcctgagtagctgggattacaggcgcccgccaccacgcctagttaatttttgtatttttagtggagacagggtttcaccaagttggccaggctggtcttgaactcctgacctc

SEQ ID NO: 52690 - DNA, 1439 bp, Homo sapiens
ctggtgctgtttaagcattatctatttgatcataacggttcctatatcatttataaatgttaagagctttagacatcttgaccaaaattccattatgctcagtaggcccagagagccagtggactgggtagtcttgatgtgtctgtcactttgcagatccttctggagagtgcaacccagacttgcgtctccgtggacatcagaaggaaggctatgggctttcttggaacccaaatctcagtgggcacttacttagtgcttcagatgaccatgtgtgtatccttcccattttgaagcaaatctgggctagttaccagttggtttcttttttggggtgtgtggggaggtgagaatcttccttttatataatggttaattttacatttaagaccatctgcctgtgggacatcagtgccgttccaaaggagggaaaagtggtagatgcgaagaccatctttacagggcatacggcagtagtagaagatgtttcctggcatctactccatgagtctctgtttgggtcagttgctgatgatcagaaacttatgatgtgagtagaatccattcagagtttctaaatatcttgtctaagttttatgtttagtcaccatttcaaggtttttttcctttgtttttttttcactgaagttgggatactcgttcaaacaatacttccaaaccaagccactcagttgatgctcacactgctgaagtgaactgcctttctttcaatccttatagtgagttcattcttgccacaggatcagctgacaaggtcagtttcgtttattttaatagaaaacataatttctctaggtttttttgaattgcagagatattttacttacagtattttttttttcttaaaaaattgattactcttgcttttctttttgtacatagactgttgccttgtgggatctgagaaatctgaaacttaagttgcattcctttgagtcacataaggatgaaatattccaggtaagagaaactaatgctactattttgtttgttttaagaaaaacctgctgggcgcggtcgctcacgcctgtaatcccagcactttgggaggctgaagcgggcggatcacaaggtcaggagatcgagaccatcctggctaacacggtgaaaccctgtctctactaaaaatataaaaaattagccgggcatggtggcggatgcccgtagtcccagctactcgggaggctgaggcaggagaatggcatgaaacccgggaggcagaggttgcagtgagccgagattgtgccactgcactctagcctgggcgacagaacgagagtccgtctcaaaaaaaaagaaaaaagaaaaacctggatgtatgagtgggcacacatgtgctttatgccgttgctaaaaatagaaatctatatgcctatgctactttctgtgggaattgttttttctttgttatttctata

SEQ ID NO: 52691 - DNA, 2720 bp, Homo sapiens
attagccaggcgtagtggcatgtgcctgtaatcctagctactctggaggctgaggcaggagaattgcttgaacctgggaggcataggttgcagtgagccgagatggtgccactgcactccagcctgggagacagagcaaggctccatctcaaaaggaaagaaaaataataatgcctggttaaagaactcaagaatgttggctatcaagacaaatagtatccacactgcagttttgtgggaatgtcctaatcaggcgtctggggatcagctgcttatttttattggaacatgatcatgctaattaatatttcattacccattataggttgtctccggatactttcatccaagagttgaatagttgtaacacagattgtgtggcccaaaagctataaagtatttactctctggcttcctggcctaatctgttgttgaaaccttgagttttagaagaagtcttcatgtttaaattctttttcttgtttttgggcaggcagagaacatttataatgatgaagaccctgaaggaagcgtggatccagaaggacaagggtcctagatatgtctttacttgttgtgattttagactccccttttttcttctcaaccctgagagtgatttaacactggttttgagacagactttattcagctatccctctatataataggtaccaccgataatgctattagcccaaaccgtgggtgttttctaaatattaataggggggcttgattcaacaaagccacagacttaacgttgaaattttcttcaggaattttctagtaacccaggtctaaagtagctacagaaaggggaatattatgtgtgattatttttcttcttatgctatatccccaagtttttcagactcatttaagtaaaggctagagtgagtaaggaatagagccaaatgaggtaggtgtctgagccatgaagtataaatactgaaagatgtcacttttattcaggaaatagggggagattcaagtcatatagattcctactcgaaaatcttgacacctgactttccaggatgcacattttcatacgtagaccagtttcctcttggtttcttcagttaagtcaaaacaacacgttcctctttccccatatattcatatatttttgctcgttagtgtatttcttgagctgttttcatgttgtttatttcctgtctgtgaaatggtgtttttttttttgttgttggtttttttttttttttttttaacttgggaccaccaagttgtaaagatgtatgtttttacctgacagttataccacaggtagactgtcaagttgagaagagtgaatcaataacttgtatttgttttaaaaattaaattaatccttgataagagttgctttttttttttaggagttagtccttgaccactagtttgatgccatctccattttgggtgacctgtttcaccagcaggcctgttactctccatgactaactgtgtaagtgcttaaaatggaataaattgcttttctacataaccccatgctgatgggttttatttagtataaaacatccatcaaacaccagtctctggcttctagaagagtccttcagatgacagttgttgtccatggtctttgactatcaagagcagaattaaatgtaatagtcccagagctgtagaaaagaactttactccttcccagggaaagtgaaagacataaaacactgaatcagaggtggcacagattagtctttgataaggtaacgtttctttgaagtctatctgtagagaactacatggacttccaagagtgtcaaaggcagtgtggtagagagaatttaaggcaagatttaaatttggaaaaggtgcttgaaccttttctcagaggttttatttccccagtatgtttttcactggggcctttacttaggttagaaataataggctttgaaggcctctatcaccagatgcaataaccagataaaattcctgttttttcccaatcgcttagttttttgttgttgttgttttttaactgagtagatcattctgacccagaactactttcatgaggtaagatctttgggaaaatctgaatagcgttaaccattagattcaaatctcaaatggtttcttttcaagtctagttgttttagagtatagtgagaaataccttgacacaattttaagagtaaactatatgggtcagcatatccttgaacaaaaagtagactttgtaaaagtattcatttaaattctaacactcgtggcacaaaagaatggaaattgtaaacccatgtaatggaaattggctatctttttgaccccacatgtgcccctcaaaaatgtttttggtttgggtcaacacaaggcaagatacattctttaaaatactcccagatgtgtccatacattcatccttcactcagtgcatatgtgagggttgttgctggaagacaggaggctcatctttcctttccttggtgcattgagatcagtatcaacagcagatgaaatagaatccagcaaagagttgacatgttctgcctccggccaactctagaatctttttaagcaggtcagccagtatttgcaacttccacaggatgaattgcttgccaagtttctggcactcttgtctggttggaagagtacatccaaagggtacttagtgatcctttgctaagaagttttttgctgtttccgggttacagatttggccatatatttctaaacagcccctgtaa

SEQ ID NO: 52692 - DNA, 1049 bp, Homo sapiens
aggctggtcttgaactcctgactccaggtgatccaccctcctcagcctcccaaagtgctaggattacaggcgtgagccaccccgtccggcctgtttttaaggcattaattagtattgttaggaaagcagtaacaatgcaaacaccactcttctcttcacaaagatcaccttgagactgtgtctccattccacctgcctgagaagtgggagcatcagcctgttccaggctcttgggtagtagcatagccctttaaaaagagagagccattttccatgtgtttttggataagcacaatttgaaaatcatttcccaaatcctctttttgtttttgattctaaggtaaaattttccctaagccctcccaccatcccctcagccagtattagatgagatttgtatagcagcagaaactgacttataagtagagagctcttcagcaagactgagccttagctgttccatctctttgttcttctgttgctggagttgcaccccatttcttaactgcctctggcgttcttccatttcctccagctgttcctgcatgagatggccaagaacatttctaatgagccaaacaataaaaactcacattgtccactcttacttataaaacacttttttgttcattgtttaatcttgatagcagtattgaggctggtatttatatgataggttatgaaacaggttcaaagaagttgtgtcttggaaaaaaagtgacaatgcttttgaaaatgatgacgaaaaaggcatcttgtctgttaaccacagcttgctttaatagaatcctgggagggtgattgggactttttagtattacaaccttagtgtcattgaggaggattttggtctagttagtgggctgagtttcatatacctctccctccatgtgcaggtttgttaagataattggtagtttttaataatataaaatacttaagttgaaatacaaaagtgtggcaacaattattaaatattggctagaattctaggagagttacacaactagtggaagtccatgtttagaaaataaatggcttgtttaagg

SEQ ID NO: 52693 - DNA, 1047 bp, Homo sapiens
cagtgggaggggctctcccagtgggggcagcactgctgaggcctcagacacactcagcattcggagcagtgggcagttgtctggccggagtgtgtccctgcgtaagctgaagcggcctccaccccctccccgccggacccactccctccatcagcggggcttagcagtgcctgatgggccattagggttgccccctaagcctgagcgtaagcagcagccccagctgcctcggccacccaccactggtggctcagaaggggcgggggcagcaccctgtccacccaacccagccaacagctgggtacctggcttgtctccgggtggttcccggcgccccccacggtccccagaacggacactttcgccctccagtggatactcgagccaaagtggtactcccaccctccctcccaagggcctggcaggtccccctgcttccccaggcaaggcccagccccctaaaccagagcgtgtcacgtctcttcgctcccctggggcctccgtctcctcttccctcacgtctttatgttcctcctcctctgacccagccccctcagaccgctctgggccacagatattgacccccctgggtgacaggtttgtcatacctcctcaccccaaggtgcctgcccccttctccccacctccctccaagcccaggagccctaacccagctgcccctgctctagccgcccctgctgtggttcctgggcctgtttctaccactgacgccagtcctcagtcccctcccactccccagacaaccttgactccactgcaggagtctcctgtcatctccaaagaccagtcacccccaccttccccacccccatcttatcatccacccccaccacccactaagaagccagaggtggttgtggaggcaccatctgcctcagagactgctgaggagcccctccaagatcccaactggccccctcccccaccccctgcccctgaggagcaggacctgtccatggctgacttccccccaccagaggaggcttttttctctgtggccagccctgagcctgcaggcccttcagg

SEQ ID NO: 52694 - DNA, 1252 bp, Homo sapiens
cacttggcagtgtcaagcacctgccccttgcctccttgaccacactggggtgggtgggcccccagcacttcagaggcaggagcctttgggctgagcaagcactgaggaggtggatggaagggagcatctggagggggggagcttccttgagcagtgggcccaggcctggccctccacacttcattctctgacctttctctctcctcatttcggtgcatgtcctttctgcagctgcctttcagcacaggtggttccactgggggcagctaacgctgagtgacaaggatgggaagccacaggtgcattttactcaagtcttctctagtcaatgaggggcacccagtgcttctagggcaggctgggtggtggtcccctaggtatcagcctctcttactgtactctccgggaatgttaacctttctattttcagcctgtgccacctgtctaggcaagctggcttccccattggcccctgtgggtccacagcagcgtggctgccccccagggccaccgcttctttcttgatcctctttccttaacagtgacttgggcttgagtctggcaaggaaccttgcttttagcttcaccaccaaggagagaggttgacatgacctccccgccccctcaccaaggctgggaacagaggggatgtggtgagagccaggttcctctggccctctccagggtgttttccactagtcactactgtcttctccttgtagctaatcaatcaatattcttcccttgcctgtgggcagtggagagtgctgctgggtgtacgctgcacctgcccactgagttggggaaagaggataatcagtgagcactgttctgctcagagctcctgatctaccccaccccctaggatccaggactgggtcaaagctgcatgaaaccaggccctggcagcaacctgggaatggctggaggtgggagagaacctgacttctctttccctctccctcctccaacattactggaactctatcctgttaggatcttctgagcttgtttccctgctgggtgggacagaggacaaaggagaagggagggtctagaagaggcagcccttctttgtcctctggggtaaatgagcttgacctagagtaaatggagagaccaaaagcctctgatttttaatttccataaaatgttagaagtatatatatacatatatatatttctttaaatttttgagtctttgatatgtctaaaaatccattccctctgccctgaagcctgagtgagacac

SEQ ID NO: 52695 - DNA, 1021 bp, Homo sapiens
tcttcagtctgctccatccatcacccatttacccatctctcaggacacggaagcagcgggtttggactctttattcggtgcagaactcggcaaggggcagcttaccctccccagaacccaggatcatcctgtctggctgcagtgagagaccaacccctaacaagggctgggccacagcagggagtccagccctaccttcttcccttggcagctggagaaatctggtttcaatataactcatttaaaaatttatgccacagtccttataattggaaaaatactggtgcccaggttttcttggagttatccaagcagctgcgcccctagctgggatctggtacctggactaggctaattacagcttctccccaacaggaaactgtgggatttgaaaaggaaagggaagggaaaacagagaacctagtggtctaccaagtggttggcaactttcccaatgtctgcttactctgaggcttggcactgggggccagggcctgccccagggctcctggaatttcccttgatccagctaggctgggacactccctaaatcagctgcgtgttgttagcatcaggcagaatgaatggcagagagtgattctgtcttcatagagggtggggtacttctccataaggcatctcagtcaaatccccatcactgtcataaattcaaataaaatgtctgaacaagggtgtctggatgtgagctggaccatctcaggagagaacacaagtgtgaggcagctgctggcccctcacctagtctggggttcctttaccctgtaatggggggtggggggtagaagatggacaagacaccttaacagtccctttggcagtactaggcagaagaggcccatacttgggtccaatgtgtgcagcaggcaaaacattttcccttctaaatgtgggcccagaccactgccctgtcccccccacattaagaagcagtagccacagccaagtttcaatcatttaattaacatctttaaatgaaacacagttttcttcatgtgtctca

SEQ ID NO: 52696 - DNA, 1019 bp, Homo sapiens
agaaatgtctgaagtccctgacacagggcctcaaatgatctgtcggagatgtaatgcaaggtcctaagacccccatgctccttaggcaccttgaattcaaaaaggtctggaaagaaggagggagagaggggctcaaatgcaggaagtcccaacagagaggggcagctatggcttcagtaacaggacagtctggggacacagtccaggcagcccagccaagaaagggaacaattacagctttttacctgcaacttctcgaagactttcttcttgggcttgagctcctcatctggttggcccttttcatagcccttcacaaacacgtgctcaccaggagcagagcctgccggagggtccagaggttcaacctggcggtttatcccttctctgggaagacacaggacaagagaagagtgaggctatggatgggttccagtgactgtggaggccaaagcaatccgggcctttacacaggggccctgatgggatttagggcatcctcagtaccagagccccaggaggtcctcttatcttgctacatccctgcatatcaccagggttacattaacccaggctataccaaaattgtgtgtcaagataccaaaatctgtgtttctaggggaggaagtataaaataacgtagcgaggactttatagacatcaaaactgggatttgaatccctgctccactccttactagtagtaagacttgggtatgtactggtttgagccctccatttctattttaacaaaattaactgtaggtaaaatgcttcattaacagtacttgtacgataagtccttcatgcatcaacttttggcatcagcaaggaagaggcacgtgttctcagagcttccacctggtgtgtggaaggacatcatatgggctgattccctactcttcctggcctccccaggtcctgtgccccactccaagtcctcactcacatagaagcacacagaagcatgccttgggactcgactcctctcatcttctggggtttcaggttgcacagcac

SEQ ID NO: 52697 - DNA, 1143 bp, Homo sapiens
atcctagcactttgggaggcagaagcaggcagattgcctgaacccaggagttcaagaccagcctgggtaacatagcaagaccctgtctctacaaaaagaaaagagaaaaagcagcagccaaagcttagaggggttatgtgcctagtttggagtcgcacacagctagctgggaatctaatctgggtctgtcgaactccaaagcccttcctctttcttcttactcagctgtctccctcaggttatctttaggccttgggttacctatgtgaatgtttctctgcttgtaaataccagttggtctgtgaccctactctaagcataaatggagggactagaagaattagactaacaaatacattcagctcctaaacaccctcaagttagtatagatttcagaatcaaaagacttggattttggacacgttagtctttctgaatgtattttcccttctcctacctgcctcacaagattatcacaaggatcaaataagactgttgggaaaaactcccttgatcctacttttttggattcaggtgtcctgtgccctgttctagactttatctcactaggtcttgttcgattctgcaggttgtacatcctggagacctgaagaattctgttgaagtcgcactgaacaagttgctggatccaatccgggaaaagtttaatacccctgccctgaaaaaactggccagcgctgcctacccagatccctcaaagcagagtaaggccagctggagaggggccgacatcatcaggagagagagcttgtcaatgagccttggaaaaatgcctgtcttaaattgagggcacaacaacccagggggtctgaagtgcaggaatgtcatgtcctactggctcctagaatggaacttgagtcattttgatttgggtttggttaacatcaggaagtgatcacatccttttgtaccggcattgctgagagctgctggtgtaagatgtatactttggtccttctagtctgtttgttaaatctgcctcttcattaaagatagtgaccggggccagacacagtggctcacacctgtaatcttaacactttggaaggctgaggcaggcggatcacttgagcccaaaagttagagaccaaaacccagtctctacccaaaaaaaaaaaaaaa

SEQ ID NO: 52698 - DNA, 1029 bp, Homo sapiens
cattttcttttttttttttttttttagtatctcatgtaatttattgaatacagaaagtgaaaaacagaatggttgtatgggtacttgaagaagtatggtttctactgaatgagtactgcttttgtacatcctaaagggaccactcgtgtgtataagattacagacatttactgataagaaatgtttcctgagaagaggtgagacagagtccctgccaggtaaggaaagggccccgagggatagaaatccatctgtattaacaaaattcctaagtcagaaaagctaactgacaagaaactttaaccaaaactgcaattttgaaggaaaatggacactagtgagattaccaaaagtagagcaaaaatagcaggcagctcacttttacacagaacaagttgttctaaacaagttctaacagtcagcaaaaaataacaaaatacagatcttcatgaaaggattccttttcctttcatgttacctcagcagcaaagtccttttccaggtccacgtaagctgtgtaggttttgtttccaccccatttctcatctcgtaggatcacaaactctataaggaaaaggatccatgtcaacaaactcattgacagcattcctagctcacatgcatgactattcctagcccacatgcatgactatttgtagtttttgccatatattctgaactttattgtatggtattattcttaaattggatgagtggcactattgtatacccagctagcatctcagctgcttcaggggaaggcttgtggcttatatctattttgttgtattcctctagttcaacatgtctgcccccacccttacttctaacacctctgcccactccagtattccctcagaacctagcctggtaacgaatatatggacaattaaattacatcccaacatcattcatactttaatatataagaaatcagagcagagaatcagggcagccagtccctgaaggaagagtctgtgacaaatcacaagtatgatcacagcacgaacttttctattctagcctggc

SEQ ID NO: 52699 - DNA, 1007 bp, Homo sapiens
aaaaatctttatttatttatttttaccacatccacaggaaaatatctgcaagtacctaatgttaaaatctttgtaaaaagaatttttttagcgaggcacagtggctcacacctttaatcccagcactttttgggaggccaaggcaggagagttgcttgagcccagaagtttgagaccagcctgggccacatgatgaaaccctgtctctacaaaaaatagaattacctgggcatggtgacacattcctgtagtcccagctttccaggaggctgagatgggagaatctcttgagcccaggaggctgaggctgcagtgagccatgattgtgccactgcactccagcctgggtgacagagaagaaaaaacaaaatttaacttatattagttgagcatattctcattttcaaccacaagaggtcctcttccgttctatgacttctaggagtccaagattgatctccttgatcggaaggaggatgtgaagaaaaaactgaagaaggccttctgtgagccaggaaatgtggagaacaatggggttctgtccttcatcaagcatgtcctttttccccttaagtccggtaacactctctgttttcttcctagaggccaggctagaatagaaaagttcgtgctgtgatcatacttgtgatttgtcacagactcttccttcagggactggctgccctgattctctgctctgatttcttatatattaaagtatgaatgatgttgggatgtaatttaattgtccatatattcgttaccaggctaggttctgagggaatactggagtgggcagaggtgttagaagtaagggtgggggcagacatgttgaactagaggaatacaacaaaatagatataagccacaagccttcccctgaagcagctgagatgctagctgggtatacaatagtgccactcatccaatttaagaataataccatacaataaagttcagaatatatggcaaaaactacaaatagtcatgcatgtgggctaggaata

SEQ ID NO: 52700 - DNA, 1094 bp, Homo sapiens
agtggtgagaatgcagggtctgtctgtctttgttctgatggctgtcttgcataattgcctgtcaggaggtatggttggtgttatcttgacttcagactgatggtgatggactaatcgttccagactccctctgagcaggaggattctgcagtctgggctccatgcctagtttgtttcaagattagcttctgtgatttctttttttccaacttttattttagattcaaggggtgcatgtgcaggtttgttacatgtcacaggagtttggtgtacagacaattttgtcacccaggtaatcagcacaatacccaataggtagtttttgaatcctcaccctcctctctgaaatttcttaagcaagaacataattaaataagcatgcattgccagaagggagggaaagaagaagaaagttggtgattaaaatatatttttaaaaccgagatccctggttacactaaggttagggaagtaaattaatgtgctttagatttcctaggaaactgaggcctaggcccaggtttacagctgtcccctcttcctttcctcttcagagagtacacactagatgtgtacagactctcctccgtggtcacacagcacgattccaagaaggctggagctgaggtggtaaagcaggtggagcaccctttgctgagtggcctcttataccccggactgcaggtacttaagggggatggagtggcccgatgaccttttctgctctggtttgatgacaggcatatcttattgcactttgctttactgcactacgcagatattgtgttttttacaaattgaaggtgtgtggcaaccctgtgtacagcaagtccaccagcaccatttttccaacagcatgtgctcacttcgtgtctctgtgctacattttggtaattctcacagtatttcaagctttttcattattatcatatctgcatggtgatatgcgatctgttacctttgatgttaaatattgtaattgttttggggcaccacaaactgtgcccgtataagacaacgaacttaataagtattgtgtgtgttctgactactctaccatccagccatttcctcactctcctggcctcctcatt

SEQ ID NO: 52701 - DNA, 1026 bp, Homo sapiens
tcacatctgcactgagaacatggctggacctccttgatggctctgagcctggatctccactgacacatgctgttgttttccttgtcacatggtaaaggatgagcaaggtgaggcactgacattaaactaactcttctgcttccacaataggaggttctgggggaagagaagctgaaggagatactgaaggagcgggaacttaaaatttactggggaacggcaaccacgggcaaaccacatgtggcttactttgtgcccatgtcaaagattgcagacttcttaaaggcagggtgtgaggtaagaactaatgctataagcccttggggaatgacccaagggagacccaagagagacttaacaaggacagggtggggctggaggagacaggttggaggtaattggacaaattcacattttggtggccccttatctcttgtccaggtaacaattctgtttgcggacctccacgcatacctggataacatgaaagccccatgggaacttctagaactccgagtcagttactatgagaatgtgatcaaagcaatgctggagagcattggtgtgcccttggagaagctcaagttcatcaaaggcactgattaccagctcagcaagtaagtgcttgatcatccaccctccttgtggctctggtgcttctagctaattacaggcctgtggagtccaggcattctttacatttagattagaagctgtctggcgtgacctattaagaaccatttaaaactttgtccattaaaacctcattgtccttgtaattcatccatcagaagtgtactgactagtaaatgccttaatactgtcctatttgctggaaatataaacgtaaccaaaacaaagtccttggccttgcagaactcacagcatatgggagagtgatggtgaacaattcagcctccctttctcttccagcctcagcaaataataataaaagaaatgtgaaagaaaaatatttcacttatttctcaccgccccaacaattgttattgctttttatctttgtga

SEQ ID NO: 52702 - DNA, 1069 bp, Homo sapiens
attttcttgggattccttggatgaggatggattggatgactccttgctggagctgtcagagggagaagaagatgatggtgatgtaaattacacagaggaagagattgatgcactgttgaaggaagatgacccatcatatgagcagtcttctggggaagatgatggtgggcatgttgagaagggagaaagagggagtcaaattctacttgatactccccgagagaaaaattcatcgtacagcctgggaccagtagctgagactcctgacctcttcaaactacctcagctaagtacatcaagtggtcatggaccagctcatactaaaccattaaacagacgctctgtactagaaaagaatcttataaaagtaactgttgcaccatttaatccaacagtttgtgatgctctgcttgataaggacgagactgattcgtccaaagatactgaaaaactctcttcccttggagaagagatgagagaagatggtcttagcccaaatgaaagcaaactttgtactgaatctgaagggatcagccccaataactctgcctggaatgggccccagctctcttcttcaaacaataactttcaacagactgtctctgataaaaatatgcctgacagtgagaaccctacgtctgtattctctcggatctcagaccattcagagactcctaatatggagttatcctgcagaaatggtggttcacacaagtcaagttgtgaaatgagatctctggttgtttccacctcatcaaacaaagtaagtatattttattcaaggtgaagagaaaaatgaaattatttttattcagatgtatagcagagtttccatatacctgctatctccacacatacacaacttcccctgctgtgggcatcctacaccacagtggtacatttgttataatctggcagagctttgtattcagacaaattggggtttgaatcctgactagcactgtgaccctgggctaattatttagcctctatgtttccccacatttcttatctaaattggagtaaataatacttcatagtataataaggattaatgaaataatgtatt

SEQ ID NO: 52703 - DNA, 1030 bp, Homo sapiens
ttctaatcaatcagcagtatatcacttctctctacaaaacgctatattcctgtttctaatgggctgtttttcttttttctggtttgctttattcaaggactaatgttccgacgttttcacagtcaaatctagaacagcagaagcagctttatctcaggagtgtcattgctcatatagaagacccagaggacactaaccaaggtaacatggtacccagagaaaggcatataaaacatgtgatgtgactttctctttccggtgtaacagcttaaactgggagattgtttagaattttcttaaattcttgagaaagataacttccttacttaaaagattttcacttaaaaggattgcctaaccagataattctcgaagtggtttggttaaccagttttagagagggatctaagcacgtttacaacagtacatgaaaggtgcctccctcatggttgagggctttaacccagaccggtacatttttgctagggatttttttgtctgaaaaataacggaagtggatgaccaggtgctgcttactaatcagtggtttttaaaatttgaaatgttttatttctcctgttaccttcagcatttaaaagcaggcatttcaaacaccattctgcattttggcttctgaataaaagctcttgaaaggtttggctaccttccagatccttcaagttgtgttctccccacttcattagaagatattgcaaaccaaagtgactagattctttctccagctctcaagagagtacagtccatgttatcattcagcctgaactattggctgatgggaaagctcctaaaggggagacttacgggaagaactgaaggtgaagaggttagagaggttttatactgataaaagaatcacttattaaaaagatcactccaggctaggcatggtggctcatgcctgtaatctcagcacttttggaggcagaggcaggcaggtcatttgaggccaggagtttaagaccagcctggccagcatggcaaaaccccatctctactaaaactataaaaa

SEQ ID NO: 52704 - DNA, 1044 bp, Homo sapiens
tgtatatccaaagcctaactatttctcatcatttgacctggattgttgcaagtctcctaaatggcctccctgcttctgcccttgccagtgcactgttcacaactcagcagccaaagaaagagattcttttaaagcataaatcacatttgctcaatatttcccagtggcttcccatctcacatcttcccattctcgtaatcccctacaaaggcctatatgctttggcctatgctcaccgacctcatctcctaatactcttcctcttgcttcagggcctttacagtcatattccctctgtagttgtcaaaatcatagcatttctcagaaggaaaggcagtgtagtgtaattgttaatagataaattctggagtcagatgtgaattcaaatccagttctgcttactctactctatgaccttgggtaaattattaacctgaggctcaatcaatttccttacctatacaaggacttaatgaaaatactagtaggattgtcacagtattaagtgaggagaggtatttaaagaattcagcaagtacttgcatatagggatagataaatgtcaggtactgttacagttattttcaaccctggcgactactcataattacctgtggagatatctaaaaatacagatgtttgtatcctgattccaggtattctaagtcattaagtctgggaggagggagaggccaagaatccatatctgtatttgttttttctttttctttttttaaattttagaatgcgtatcttcagaaagcttcctagattattaggagcactttcagagtcaaaaatgggatcagattatctcagagcgtcttgctcagaactgcagcccagcacataactaaatgagacttttaagaaattttactgtgagtctgtgctgttaatttttcagtctctaaactcacatgatgacttacctttctgggaatttattctaattttaactgctgtgtcctgagcaaccttgagctgtgtcagacaatgaggtccttttggaggtacaggtgtgatgcaaacaataaaatatag

SEQ ID NO: 52705 - DNA, 1700 bp, Homo sapiens
ttgtgtacaaatagccattctagttgaaatagccttcctgtttgtactctccctctctcgatagaaactacgcccgccgacagaaacatctgcaaagatacagtctgactcagtgggttgacaggaacatgcgaagccaccatcggttccagcgtctcccagacttctcgtacagttaatttgtgtcatcccatcagcaatgaaggtccctatccagggtcctgcttggagcagcatttcatgttcttttgctgttttgtgctttgccgattttggattttatttttcacaaaatttttatttaaaaaactcgtcaccttttggaaatgcccattgccgacttgaatttttttgtatgaagtccctcctgattttgtgtgtgtgtgtctgtgtttaagcaagcgttcggttggtatagtttttttttgtttttttaatttaaattgaaggtagctgcctcctgaaagccagcattaagccagaacacccaggttcaagcaaaagacccacctctctgcagaggcaaagtctactttctggtacctcaaagaaatcattgttcaatcttccataaggaagagattctttaccaggctgtgagccagtgttagataacttgtgaatggatataagttacttttaacaacccctcttacttttttatttgaatcctctgaatacctgtcagtattttaaagttggcaatccaggacattataagtaggatggagcaggagaagaatcctattgaaaggacaaattaaaatagtaaatcctctcctctcccttctgtaggtactagctgccttgatttttttttgtgggtgggggggattttttcattccttattgaacttattttgcacaatagtgtttacaaatcttatacatcttactttgacagaagacttataataccttgtggtcttgagactggttgtctcctttgcctttcttcaaggattttcctttttctttttaccccccagtgaccactctgctctttaggattctagtggcagtattcttgtaacctgttagacgtggatatacctcttcaggatggcctccttgctgtctttattgaagagctgcccacccagagtcttgactctagggcaggctagtgctattgtggtgtcagttgatatttagtttcatttgctgaaccccaaatttgagtgttagttagggagcctccattctgtgggagagtgtggaaaggcactcttttttctccatattagttaacaagaggtgtctttaggccctggatgttaccatctcatttggtcaagcccctgatacctagtttcacatggatgctaacgtggatgtaatatagttgtgacagcctatgcacaaaagcattacctgatcttaaggtttggtattctaaccaaagttgacagactgtgcgtctgtcttaatggatgtcttaggagttggttattctctcttttttttttgagacggagtttcgctgttgttgcccaggctggagtgcaatggcgtatctccactcaccacaacctccgcctcctgggttcaagggattctcctgtcttagcctcctgagtagctgtgattacaggcatgcgccaccatgcctggctaatttcatattttttagtagagacaggatttctccatgttggtcaggctggtcttgaactcctgacctcaggtgatctgcccac

SEQ ID NO: 52706 - DNA, 1034 bp, Homo sapiens
tgttgaaatgaatgataagagcattggtccccaagccagagagccagaagccatcacccaatgaccgccccttccttccggtctacaagagctctcaaggctgggtctgccaccactctgctttgcccaagtgtgacagcactggggaggagagacaggataaagggcagatgtcagcaatactaagggcttcctcatgggagggcatgaggctccactcattgtcttgtgacttccatccctgctgaatggggctgcaaggccaaggctccttaggggagaggtccttacctctgatccacttagagcaataaccactttttaaatgtaaaataaaaagacaaatgaaaaggcacatccttgtcttctggtaaatgcccaaatgttgccctctttttctggcaattggcagcaagtcaggatgtgtggaggagggagtcagtttctctccattttggcctgcagcttcttagggacatgcctgccagccaagctggagttggaagggaaatctcaaacagatgggggtgcacgtgtaggagaagaaaatagctgctccatcatcctattactgaggctcccccaaaccaagcttgggctgcctcactagataggtatgcaggctggtacttagtttttaaaacaaagggttttcccctctggatggggctgggtgcttttcctggccaaaggaatacaattcttgtttctccccagggtaaggaaggaagtgaaggggaacagcaaaagctgctttctgcagctcagtattcacagcgtgctgttctaggctgttaaaggaacaccattatgatcccaacagtaggctgaaagagtaatgatgacattagccaaggagcaaaaaccagtaaatggggtacctcgaacattcctgtccagagccaggaagaagcttggagagaaaatgtccggtgagcagggcttagagttgactgctgtaggttttgaaagcagagggaaagaaggtttagaggctgcacagcaaagtaggaaacttgagttgcacaccgact

SEQ ID NO: 52707 - DNA, 1370 bp, Homo sapiens
actgttttagaaacatcatgtcaggctggactatgaggaggcagatggagatgtgaggcccaggctaagcagcaggtgaggggtgggggagtctggagggcaatggttggcgccggtgagatcattatcccagagtggccctgatccccctgcccctgttcctccagccaaggagtcagggctgacttgagccttccctacaggtcatcacttcaggcatcgcagccatcgtgttgtcacgctacctccctagcacccccctggtacgtggtgcctcctgggatggggctgtgagggaagggtaggggcagcagccacccgccaagggcctggcctccttggagagggtaaggctgaccctcagggaggccagagctgcccatgggggccaagcacgacgcccattgaccagtggcctcccccgtccagcgctggacagtgtttagctcgagcgtggcctgtgctctcctttctctgacctgtgccctcggcctcttggcctccatcgccatgacctttgccacccagggcaaggcactgctggctgcctgcacttttgggagctctgaactactggccctcgcacctgactgtcccttcgaccccacacgcatttatgtgagtacctaggcctggagtaggggcaccaggccctcgcacgggtgggaagggctcttggaatccaccctccacccccaactccagccagccatctctgccccatgccccgcagagctccagcctgtgcctctggggcatcgccctagtgctctgcgtggcggagaacgtgtttgctgtacgctgtgctcagctcacccaccagctgctggagctgaggccctggtgggggaaaagcagccaccacatggtaagttccctccacagccctgactccccgaatttcctgggagcccctgccagggtgcccaagctgctctgccccacccctatgtatgggcccccaccttgagaaatggggcagaagttttctccccaggagcaaagggagaggcctggaggctgggagaggtgagatctcccagcagagtcacacagctgacacctggctctcctagggcccaggatgagtcttgagggaggggcaggggtgtctgggctcgcactgagggcattgcaaaggtcaggcctggctcttgcagtggagtgggtagtgatgcccctttgcccccagagagccttccagccctcacctccttccatttcccggatgtcctggaggaggagacccaggctgagaaccagtgggtctggcagcctcctgtgtctctgcagatgcgggagaacccagagctggtggagggccgtgacctgctgagctgcaccagctctgagcctctgaccctctgaga

SEQ ID NO: 52708 - DNA, 1040 bp, Homo sapiens
gtcagatgtccaggagaggttgcattttttcgttgggtactaggtcttcagaagttcaatgcctcatgttagggctgtatgtaccatctcctgggatatatagtgtaacctgtgaattcatttgagcaagttcttggtacttgagtgtttggcatctcttgattcttcttgttagcgcttgatttttagagatttcttttctttcttccttttatgtattttttcttttttttttttttttttttgtctttcttggctattgcaacagtgtataattacatggaacttaaagagctagattgatgttcattgatgtcttcaagtctagggtttctgcttgccctttgcttgataggattcccatagcttctttctctttcattttgagaaactggtgtatctgggatggtgtgattgtggtactcccactagtaggtattctggcttcttctacttgtggcatggtagtaaaaagcttttacttttctattttgagtaagctagcatggggctctgacccttagttgaattttggaagctctttctgtatgtttaaagagattggctgagatacacgtgtgtgtgcatctgagcacacgtgtgcatgtatagttaaatcagcaaaaaggatctaattactcttctccatctcatttatttttatttttgtttttttagagacagggtcttgctctgtcaaccaggctggagtgcagtgacacaatcataactcactgcagccttgaactcctgggttcaagtgatcttcccatctcagcctcccgagtagctgggactacaggcacgtgcctccatgcccagctaattttttttattttagaaacagggtctgactttgttgccctggctggtctcaaactcctggactcaggcagtcctcacacctcgacctcccaaagcgctggggttataggcatgagccaccacgtccagcctccatctcatttgagtgttagattaaaatgttatttttgttaaaagtgagctctagttaactgttcacctatctttttgaaatt

SEQ ID NO: 52709 - DNA, 1099 bp, Homo sapiens
aatccaagtaactccaagtatgctggtagtagtagtgattataataacatctttatatctgcacagtacttgataattttcagagtattttacacaattatctcacttgctttttacaacaaacagctctctgacgagggaggatggagctgttatccccatttaaatgggaatttctttttttttttttgagacggagtctctgtcacccaggctggagtacgatgtcgcgatctcggttcactgcaacctccgcctcccaggttcaagtgattctcctgcctcagcctcctgagtagctgggactacagcaacgtgccaccacgcctggctaattttttttttttagtatagacggggtttggtgtttcaccgtgttagccaggaagatctcgatctcctcaccccatgatccgcccaccttggcctcccaaagtgctgggattacaggtgtgagccaccacatctggcctaaatgggaatttctttaagctttcatcttactatctattaagagcttcacagagctgagactagggcaagtcttctgacttttactttaatgtggtttctactcgtagtaagtaacgtagggcacaagtaacgtagaaaaccccaaaggtttttctagcttccttttttcttttctttttttttttttgagacggagtcttgctctgttgcccaggctggagtgcagtggcatggtcctggctcactgcaggctccggctcctgggttcgcgtcattctcctgcctcagcctcccgagtagctgggactacaggcacccgccaccacgcccggctaaattttttgtatttttagtagagatggggtttcaccgtgttagccaggatggtctccatctcctgacctcgtgatccgcccgcctcggcctcccaaagtgctggaagtacaggcgtgagccaccgcgcccggccggtttttctagctttctactagaagcttcctattaaaatcagcacatgacccaaacatattttttaaatcttcacgtttggttacatggaagcaacagtgtagtggaaagaatagtggccttggaatcagagttatagtttcatgtaactaccatg

SEQ ID NO: 52710 - DNA, 2205 bp, Homo sapiens
gtcattttattaggatagttcataacttgctctgaaaattaccaagtatatggtagatagcatacccagttgtttttaggttttgaatttgaaagtatcatgggaagggattgtgggctatgttaacagcaaatcacaatgatacatgttgaacctgaaaaataaatttcccaaactaaagtttttaaaaatgtaaagctaattccaggctgcaggctattctttctgtaggattcttcttttaaatctaccagcctatcgactggtagaaatttcatttttcttggaaacatctttctccctaaggaaatctccttgctagaatgtggttcaagtgctgtgtaagatgccagttgttgggataggcagctcaataagagacaggattcattttatgaaaattcctgaggtctagacatagccaaccttccagtaaagtgggttgtacaatttggagtgttcagtgaagagttcttgactgctgcctcatttcttatatatactcctaggaacaattaaatcaaactggatttaactaggggtattttttctacccattcttcccccactcatagcagatgacatcaagccatgcccacgatgcagtgcatacattatcaagatgaatgatggaagctgtaatcacatgacctgtgcagtgtgtggctgtgaattctgttggctttgtatgaaagagatctcagacttgcattacctcaggtaagatgggaaatgcatccattcctttcgtagtctcattctcttactgatttagggaaaaggatgtcaaaaagacacatccgttctctcattacaggtttaaggaagctgtgaaaacttcttctgacatgctcctctaatcatgttttcaccagctactattctgtttctacctttctttgcttgccatattacaggtagtctggacttgctttttcccttttgctgtcttgcctccatacttgttcatgttctttcctttgcctagaatgctttctgcctaccttccagtatcctccttttatctcaacttgttcagttcttatcttttaagagccacttaaatgcctttcatccatgttgcctctcctttttccgcctcattctttgactttcttttatcttttgtcataaatatcgtcagtactttacacttcacgtacctatcttatcttactaaactgtaagtatcttgaggctagagttgtgacctttttacagttttttgcatttagtgagttcccaaggaattcattaagtgaattctttttttttttttttttaagacagagtttctctctgtcgcccaggctggagtgcagtggctcgatctcgactcactgcaacctccacctcccaggttcaagtgattgtcctgcctcagcctcctaagtagctgggattacaggcacctgccaccatgcccagctaatttttgtatttttagtggaggcggggtttcaccatgttagccagcctggtctcgaactcgaacctcaggtggtccgcctgcctcggcctcccaaagttctgggattacaagcgcgagccaccgcgcccagcctcattgagtgaatattaaaatgttgtggaggagttaatatttacaaacaaaatgtttgctaatatttacaaataaacaaaatgtgttaatatttacaaacaaacattcattgtgtaaatgaaacacaacaccttcattgccaatttgtcgaacatttgagtacttactgtgtgctagtcattggggacataggggtgagtaagacatgatccctattttcaaaattgtttatcccttctagtggagaagatagcacaaagagaatgggcaaaaatggttgggcacagaagggctgactgtaaaagtagccaaactcagaataccaaactgatagaaaggttatgatgaggtctttttatatcctctcccacgaacatggtttgcagtatctattaggtatggtaggacatatgccaagaaaactacacaaatcagagtgttcattagtgcagggtgcagtgtgtctggatgggatgtcaagtgcataaggctatgcagcatcccaagtattgtcagtcatggaagctagatcagttttggtgggttagggaagacagaattcagcagagaagaatggaaaaggaatttcaagtctggaagcctgtctttacaacaacaaccaaaaaagttaaagagcccag

SEQ ID NO: 52711 - DNA, 1814 bp, Homo sapiens
gacagagcgagactccatctcaaaaaaaaaaaaaaaagaatgaaaaggtagcatggtggctcatgcctgtaattccagcactttgggaggctgaggcaggctgattgattgagcccggaagtttgcgaccagcctgggcaatggggcgaaaccccatctctatgcaaattacaaaaattagccaagtgtggtggtgcgcacctgtagtcccagctactctagaggctgaggcaagaggattgcttgagcctggtatgcggaggttgcagtgagccactgcattccaccctgggtgacagtgagaccccatctcaaaaaaaaaaaagaaggaattaaaaaataaactttagtttttgccatagctctttatttcactaatgtcctcttccttcgtataaacaaatactaatctctctaaatatagcaaactatcaaaaggaaatagttttgtaccctgttatttatgaaacttattatgacaaactactcctaaagcagcttcagctatgattgaataaatgctggaaatccaggataaataagatactccacctccactttttaaagtaaataaatgatttgtgtttttggaatctcaagaaatttatagccaggcatggtggctcacgcctgtaatcccagcactttgggaggccgaggcgggtggatcacctgaggtcaggagtttgagaccagcctggccaacatggtgaaaccccatctctactaaaaatacaaaaaaaattagccaggcgtggtggcttgcacctgtaatcccagctactagggagtctgtggcaggagaattgcttgaacctgggaggtggaggttgtagtaagccgagattacaccactgcactccacaatccagcctgggtgacagagcaagactgtctcaaaaaaaaaaagtttactttctcacatgggatatattttacagttggtcaaatgtgcttgtgtgtgtatatgtgtgtatgtgtattcttttctctgtatcatatgtgatagtggggtagtgccaaacattgttaactctgatgaataatgtctcttttggttagatcattcttaccttactggtatctcttactgtttccttacctagttatgctgttattgcctatggctgtgccagctgcccgaagctaacttgtgagagggaaggttgccagactgagttctgctaccactgcaagcagatatggcatccaaatcagacatgcgatatggcccgtcaacagagggcccagactttacgagttcggaccaaacacacttcaggtctcagttatgggcaagaatctggaccaggtataagttggcattatctcattgtctctttatttggtatttcatgatgtgagcccatagctgaaagaaattatcttattgtataacccaagtactccaaaggatcagagagcagaaaatatcatttgataatactttcaatattataataaagatagcacttccctctctgaccattataggttatccaactatataaaattgaaatgcaacaaaattgaattatgtagttcctactttcttagtaatatgtctcagattggagagcaattagttcattttgttttgctaggggctttttcaaaactttcattgtgaacagaaagacatttaattagtattaaacctgtgctgtttgccttcaagctgacttaagtgcctcactgcctttggaagtagagtacagattgaagaaaaggaaacagtattagtatagattaatgattaaccttaaaaggaggaatgtcacacattcagctccaaccttggcgagtcagaggaa

SEQ ID NO: 52712 - DNA, 1418 bp, Homo sapiens
tcacccaggctggagtgcagtggtgcaatctcggctcacagcaacctctgcctcctggattcaagtgattctcctgcctcagcctcccgagtagctgggagtagctgggactacaagtgcacgccaccatgcccagctaatttttttgtatttttagtagagaggggttttgtcaggttggccaggctggtctcgaactcctgacctcaggtgatccacccacctcagcctcccaaagtgctgggattacaggcatgagccaccatgcccggcctaatttttgtgtctttcgtagagatgggatttcaccatgttgccctggctggtcttgaactcttgggttcaagtgatcctcctgcctttgcctgacaaagttctggggttatgggcatgagccactgcacccagctgtgtctgtattcttcacagcatgtaattttctacacctttcttttagcttctgattagcaagcctgactgattggttaagctaaaagagcagagtaggagagatgcaccagcatgggacgtggaagagaaggaacaaagtggacagggcagattgggtttcaaggatgaggtattttcttttcttttttttttttttttgagacagggtttagctctgtctcccaggctggagtgcagtggcacgatcttggctcactgcagcctccacctcccgggctgtagccgtcctcccacctcagcctcctgagtagctgggactacaggcatgcactacaggcatgcaccaccacgcctagctaatttttgtattttttttttttgtagagatggggttttgccatgttgcccagactggtctcgaactcctgagctcaagcaatccacccaccttggcttcccaaagtgctgggattacaggtgtgatccaccatgcccaggcgaggttttttttttccaactattcgggaagaagattaccgtattcagaacttaggggtttaccactaaagtgggtttatatgaaattttaggattaggttatagtacctggcatataataagccaatagatacatggatacattgaaaagattgctttagagcagagtgatggcctaggagaagacctagaatgtcctagggaaggtcaaacaaccaaaacaagagagggtctctgtcattcatgcaacacaggtattttgagcatgaaccagtatactagactgagattaaaaagtggatgatatgtctccttaagtccagtgtggtttggaaggcaagcatataaacagttagttacattataatgtaagtgttataaaataattgtgcacacccacgaagtaggcaacgagctgcctagagaggttaagtatattttacagagaaaatgacacctgagttggttcttaaatgggtacttgtcagggcaagaagtaaggacaagac

SEQ ID NO: 52713 - DNA, 1021 bp, Homo sapiens
cacatttttgccaaaacatactcactcacatggccatactcagctgcaagggagcctgggaaacattctcttaactgggtacaatgtgcccagctaacaatgagtgctctgttattaataaggaatggtaagatgggccaggagctgtggctcgcacctgtaattacaacactttgggagacctaggctggtgaatctcttaagcccaggagtttgagaccagcttgagcaacatggcaaaaccccatctctacaaaaaatacaaaaattatctgggtgtgatggagtgtgcctgtagtccccgctacttgggagactgaggtgggaggaatgcttgagcctgggaggttgagactgcagtgagccgtgattatgccactgcactccagcctgggtgacacaaaaagacatcgtctcaaaaggtggaaaccagctgtgatattttaaaccaggtctccagaacttcaaacttttgacataaaacaagaaggggagccaacaaagaaaactgaaaagcgggggccagtgacataaaagaaaaactaagcaggcatgatgtcacagacaccaacatagtatgttcccagaagggagtggtcaattgtgacaaatgctgctgagaaatcaagaaagataagaacagagatgtgaccactggatttggcaacaccaaagagtcctaaaggagggggagagtttaatcctcaaataggaaggaggtttgatgctggatggctaaaacaacaattaatgtctatatttatctggcagaataggctagacttggctatggtaacaaacaagccaaatttctcaatggcataacacacaacaatggtatatcttttccactcatgcaacgctggctgtgggttaaggcactctccagagtagctctcctcaactctcctgggtaactcagagatccagactacttctctcttgggctccactatctcaatgcaaagctttcagtattgcctcaaaaagagagctggaggccaggcacggtggctcatgc

SEQ ID NO: 52714 - DNA, 2637 bp, Homo sapiens
gggtttgaaaactgaattgttgccagagaattaaaccaggtgaaaggtccttttgaattcagattgtcttctgaacatccaggctgatcatctgagagcagtcaaatctacttccccaaaaagagaccagggtaggtttatttgcttttatttttaatgtttgcctgtgtttccaagtgtgaacaaaacagtgtgtgatctattcttggattcattttgatcagtatttattcaaacccagtctctctccaggacataaaactgaaatcagatatgttctttttaagcccaaaccctctcctttctagatccaacccttcacccctaattttatgatggctatagccatggacttccccaagaaaagatcacccagaaataagaccacctgtgacagttaccagcttttattcataaccttagcttcccaactattgagcattttctaaggtccctgctgtcttttggtctctggtttgatttgtggcaaacagatgaagtaacagactgctatgaaggaccacaaaaacggcagcctctggaaaaaccattagaaagtcagtggcagatccagtaaataatatcgccagcctcagcataatctgctgctgactcgattcagtggactctaaagtgcccagcctcctgacctgagctctcctgccatctgtgagactaccagaggtcttatctgctgtccacatggcaactgggcatgagtacctggccaccttgcttccctctttgcctggtccaagtgagtgtctgctgcctctgtcctgccttgttttcctggctctaaaccaactccacccactcttaatggaaactcagtctggctttgtgtgtttctgggaagcacatgacttctgggaatgggcaaggaagaggagtgaaacaaaaactgtcagctatgtgtgcctggtctgggatccttctctgggtgacagtggcatcatgaatcttagaatcagctcccctttaactagggacaattgtaagcacttggcctcaaagttgaggttcttgaatgtttgctaattttatgtgcatgatccttgcccaaatatttgtcatccgtccacatagattcacgtgtgcatacaacatgtacaagtaatatttgggctgcccataagaactggaagattcatagggaatgcatatacccttctcagtatggttaggattctgtttttgcttcatttaattccagagttcctcagcctcagcaggttctgcttttacctgtcacagaaatgtccagtgtttaatgcatttggttgctggggcttacatgccagcctcctctgatatgtacttggtttttaaaaacccattttgttctctcttgtttcctctctatttcagcctagtatcagaaggccaggcgagactgcaacactgctcatcaccccgcggcgtgatccctgctcttaggtgctgggcagaggggaagggtggtcagggtgaggatggtgagggagggctggtgaggggctcagaggaatacttggaacaacagcagtgttattgtagtgtggcagtttcttttatacataggtgagagtttttaaagtgtaagggaaaaattaattttttaaaaaacaccatgcttggagggtgggggtagaaatagacacaatattatttctaaggaatcgggttttcatttactctggactggtgaaaatattttttaaagccagtgctctaagacctcagcttttatctcagaaccccatgggttccagaccaagagtacaggaaatcaaattgttgtcctgtctgtctatagcttggaacagggagctttgattactgactccggttccacacactgtaagatcaaaaaaccatctccacatttgaaagagatgtaaggtgtattcatagggatggtggctcaacaaatcaagcaaactggaatcaaggggagggggaagggaatgaaatggaaagggaggctgattcccttcccctgacttaccactaatttactaggctacctactttcatgagtaacctctcacagctacccagcacatgccacaatcctatgctcttgccttcttttatctgcactgtgtgaagggactcttttaaataaatgagcaagtgtcctaagctatgtcatccaaagattgtcctttccattctcaaatcctgtgactgggatcactcaacagcactgtgatgtattattttcaatgaggtgcctttcttaactgaccaaatgctgccttgtttggcccctaaatcaataaaatatgttaaaatttgtatcccctgttgtggcattttttttagataatctaagctagaaaaatgacattgaattctggacctggctggaaggaaaagaagccctttcttgtcgctggcagctgtgtggtagggaggtccaagtatgtgcatatgagataagcctgcaacctcttgaccttcagctcctatgcaggcttctcttgagcccagagacaaggcagcttggtctagtggagatagcactgtgcttggagttcaggggacctaggacaaatcccagccagttagttattcactgtgctcctgtttcctcagctgaaaaaggaagttggttatgccaccttcttggccttaatggcattaaatgaa

SEQ ID NO: 52715 - DNA, 1486 bp, Homo sapiens
tctggcactaatcaaagattgctagattaattataactgagttattctggaacttggcctctgagaatcaccttcagaagtcattttgtgcttggtcttctggtctttttttatcttagaatgttggttggggaaggagctggactttgctttaatcctcaagttaccttctgttaggctttgagattctgtagctgtatcaaatgatacctctgcctgcccatttctatctagttttcccttcatgtaattgaatctctgagtcaaaccagaaagctagatattttggactttgagttttgacagaagactctgtactaagaaaaaattgagatgtggcaatgagattgcttatctccaaccttcacttagttgcagagtgtgtactttgtccccaagttcacagttagcaccaagaaataaaagcattagctgccaagatgggcaggcttcactacaggctggagacttttctttctataacagcccaagagaaaaaccagtttctgaaaactgggagaagtccttattggggttttagagagactcagaagtatattggcttagggctggacatggtggctcactcctgtaatactaacactttgggaggctgagacaggcagatcacttgaggtcaccagttcgagaccagcctggccaacatggtgaaaccccgtctctattaaaaatacaaaaaattagctgggcatggtcgtgtgcgcctgtagtcccagctgtttgggaggctgaggcacttgaatcacctgaacctggaaggtggaggttgcagtgaggggagattgtgccactgtactccagcctgggcaacagaatgagactgtctcaaaaaaaaaaaaaaaaaaaaaaaagtgagggaagagtgttggcttggctcttcagttccttggttctgacccaatcttgccaattcagtgaacttctctgtttcctcatgtccaggatggcccagatgtgtaaccaagtacacacatcagtcacgttactgttagcctaatgacagctgtggaacagggaaagctgatgcctgtgttttggtcaaccccattctctcctggcactctctcaggtggtctgtcagccatttgtcctcacatttcctgtgccttgaggatcactgattgctgataagctgttatctgacagtttggactctggactctagtggcaggagggaccttcaggacctaagatacaaagctctcctggtgaagtaacaagtaatggaatctgtcttccctcacccagatttttgggatacaggagaatttcaagagacgagagtgtgtatttggcaaccacagagataaaattatgaaactggatcttccaaatggagccatttcacgtttgcttttatttttgcttctttgggtccaagaaaacttgctgtttagtaataaggttatatacacaaacttttggctgtggagttgggctaatgtcagtcacctaggtaatggat

SEQ ID NO: 52716 - DNA, 1031 bp, Homo sapiens
tgatccgcccacctcagcctcccaaagtgctggggttataggcgtgagccaccatgcccagcaagtcttcccatttataatggggaaactgaaacttatgtgtcactagtgtgttgagtggaaatagtgataattaatatttatgactccttcctgtgtgctagttgtactgttttaagtgctttacatatattatttcatgtaattcttaccataaccctataatcagtatatgttagaatgtaatataaggtacttttatccccattacaggtaaggaagtaggcatttgcccatgtttacatagccagtaagtggcagggccaggttcacacctaggcagtctgactccacagcctgtaatgtaattgaatcttggtttttgtcttcctctctgtaggcacccagattggctgaaaacttctgtgtctgccatttagctactggggacatgctgagggccatggtggcttctggctcagagctaggaaaaaagctgaaggcaactatggatgctgggaaactggtaggtttggtggtaccaatgagtgttgatattcctcagaatctagatctgcactgtccaatatggtagccaccagccacaggtggctatttagattaatttaattaatgtaaaaatcagttcctcagttgcactagccatatttcaagtatttaccagccaacgctgatacagaactttccatcatcaaacaaaattctgttgaacaaccatgtgctagagggtgttttaacaaactggcagattataggaaattttttttcttttttttttgacaaagtctcgctctgtcgcccaggctggagtgcagtggcgcagtcttggctcactgcaacctccacctcctgggttcaagcgattcttgtacctcagcctcccgagtagctaggattacaggcacctgccaccatgcctggctaatttttatgtttttagtagagatggggtttcaccatgttggccaggctggtctcaaactcctgacctcaggtgatccaccctcctt

SEQ ID NO: 52717 - DNA, 1440 bp, Homo sapiens
ttattgttggacatttggagtattgcctttattttatggtttttctcgggcttttgggctaagtgttgcaattaacaactttgttacacgaatctttactcatatccttgattttatccattgaattcgtggaagtggaattgctggaccaaagggtatttgaaacatattactaatttgtcttctaagagtgattttacccatttaaactcccacgcgcaatttaataggatttcaatgttgttgctggtgtcgtcaactgtcaaatgccgaagtataccttccggcctgacctcctgtcctccttcgcgttttcccgcccactccgcacacccgccacccttagtacatgctggcccgccccttccttatcccgcaccaattctgtccaatcaaaagcaaagttcctcagtatcgccgtgcagttggtaaggtgaagagtccgtcgtgctcaggggcgggcggaacgggctgacggacgcggctatgggccagtgtgagcggcgagtgggacgtgcgtggcgtgcgtgcgttgacctgggaagcactggacctgtgaggcgtgcgaactggtggcagtgagagacttcggcggacatggctcccagcgtgccagcggcagaacccgagtatcctaaaggcatccgggccgtgctgctggggcctcccggggccggtaaagggacccaggtgagcggcaggactgggcttggcggcggagcctgctgaactccaaggtcaaggcggccggagatctagaagccctggacctgcccggagcgggccggggactaaggcctgcggggaacgctggccggggtctcggttctggtggggcatttcggagagggtccaaattggaggtcggggcagtctgagttaggattggagtgcccgagggattcagtgttgaagtgttgggttagggaatgtgagggctgattaattccactaagggtctagagactggaaaggtttgaggggtagagtgagccctgggccgaggcatctagattacaggctgaatggaggcaattagctttatggcccaggttacctgcgagttggaggtgaattgtccagaatcagggttacattccaggcactggaggtcgggagattttgataatgatttatgacttagggggaggggaggagaagcatctccaacacgtggggcagagtgagaggtgacatgtgctgtgtgagccagttgaattgagatgggaggaaacctaaggctctccctgtttgaaagttgggggtgaatgtgtagaactggtttatagcctggagacccatgagtcgcaacctttgagtagtgtccacaataagggttgggagtgctcatgggacctggcttggagttaggacctgaggctactgaaggctaagcagcttgggatgacgcaaatgattttagatgaaaaggaacttgaa

SEQ ID NO: 52718 - DNA, 2253 bp, Homo sapiens
aacaacagtactgtttggtcatctctgtcccttagcataacgtttggcaccaagtgggcatgagtaaaaaagtgttgcatgaaagggaaactgagtcccagggaagcaactctggaagggtcccttccacatttaagtaatgtggtctcacccacagcctcatacatgtttggcctttagcacatctacaatgaacagttgtccatagggataggttgcagtgtcagtgggactagcttaaggcttcattgagcacctgtgtttggaaggcagtgagctgtaggtcatagcttctgcctttagggagtttacccttttctagaatggacagatgcatatgcagttctgataccttggaagcatatgcaaatgcagtgggagcatttaaaagcagagttgccttattggtttggggaaggtggcatttgagtgaaactttaaggattttgccagacacaggagtggggagggtattctgcaggacatggtgggaacaaaggtttgaaggtgggaaaatgatccagcctacagctggagttttagccgcattgaggggagggattggggctagatcagagccttgaatgccaggctgaggagtttgccttctgccctgtaggcttggggaggcccagaaaacttagcagcagggtagctctgtggccagtactgaacctgggtcaggtacttggaaggatcacggatggcatgcacagggtgcgagctggatggggtctcacattcatccacttcttgtcattcaggacgaggtagctgccttcttcgtggctgacctgggtgccatagtgaggaagcacttttgctttctgaagtgcctgccacgagtccggcccttttatgctgtcaagtgcaacagcagcccaggtgtgctgaaggttctggcccagctggggctgggctttagctgtgccaacaaggtgagccctgcccgcacggtgcactgaccctccatgcccactgaacacacacatggccaggctagtccaggtgggctctggggagcaagaggtacctgtagttggtccttgccctctgggaagaccacccactcaggaggggtctcaagggatgagggagggagaaacgagcatggaatttgtcagccttgaagttccagattggaatcttctttgtccctggtagaaagctcatctttttaatggagatttgcaaatttgtttggcacagagctatacatgatgttcttctaattaaaacaaaagcgtctccatattgttggtttcttttctttttccttttataatcataataatgtgtggcggtgcattttcttaactagtccttgtagttttgttgttgccaccaattctgtctttctaatttgatttctgctgttgtcttcattccctcctgctctctttagatttatttttttcattttttgagatggtgtcttgctctgtcacccaggctggagtgcagtgttgccatcttggctcactgcaaccttcgcctcccgggttcaagtgattctcctgccctcagcctcccgagtagatgggattacaggtgcacaccaccgtacctggctaattttttggtattttcagtagagacaggatttcagcatgttggccaggttgatctcaaactcctgaactcaggtgatccacccgcctcagcctcctaaagtgctgggtttacagccgtgagccaccgcgcatagccactttagattaactttacttatctactgtcattcagtatctactgaactcctacagcgtgtagtcactgtgctaggcagggctagcaatacagaattgatagactgctgtccttgagttgaatgcttagtttatttatttctattctgtccttgctagataaaagcatttaagctataaagtttcaactaagtagagctgaaagtatctcatttattgattcagcaaatattaattgggcatctcttctgaggccaagcattattctaggtggggatttggcagtgaacaaaataaaacaacaaaagcccttccttcatggagcttgtttacaaaaaaaaaaaaaaagatgaaataaagaaaatatttagtattttagatggaaaatgctgtagagagaaagcaggaaagggaagtaaggaatgttgggagagaggattgtacttttagatagtttggccagggaatggttcactgagatttgaatacagacccaaaagagccaagggatcaagccaggtagataaccagggaaagggcattt

SEQ ID NO: 52719 - DNA, 1768 bp, Homo sapiens
ggcagggaacaaaaacacaggtccacatccactcagattcggggtaggccacatctgcccctgggaagcaagctgtggtggcagcaagcccagctctggagcttgacctttgtgtcccattctgctactggttggctgtgtcaccacagacaggtggacctcactgaactcaattttgtcctccataaaatgtagccagtaaatatttcatagcatagtcattgggattaaatgaaataatgcttataaatatctagtgctgaaaagttgctaaattaaaattagactcttattacaaaatcaggatggctaaaaatgactcttatgcctctcaccatgtttcaaaactggctctctcttctcttgtttattcgtggagagtcagacttgagttcgaaagttcgttctgccacctattttctgcgtagcccttctgagcatcagtttccttctctgtagattggagctaatacccatctgaatgggttattggcaaggactgaataaaagggtgaatccaaagtaggggttggcaaactacggatggaaggccaaatccagtccaccacctaattttatgaagttttattgactcacagccacattcattcaattatgctttggctgtggctgttctggtgctacaaaggcagttgagaagttgtgacagagactgtgtggctcgcaaaacctaaaatatttattctggttctttatagaaaaagtatgctaacacccgatgtaaaccatctaattcagggcctgcttgtggtaggtgctgaatgaacacagttgctgtcgtcatcatcatcatcatcatttgttcatatcattaatgcagcaatcaggtgcccacaggttctagagtaaaggggatgaagaggaggccccaagaggagcagggctgagcccgcacaccctgcacacccagtgcagggccgtgcacagagtaggcctttggagtggggtgatctctgtccaaaagatccttggtctggtggactttctaatacaccagcagtgcttttgttatttattaagctgacaaataaaaattgtatatatttatggtgtacaacatgatgttttgatatatgtatacgttgtggaatggttaacaagctaattaggcattaactcacatacttacctttttttgtggtgagaacccctaaggtctattctttagcaatttccaagtgtaccatatattgttattaactatagtcaccatgatgtacattagatctcttgaacttaattctcctgactaaaactttgtatcctttgaccaacttcttcccactgccccctcgccattgacccgagcccttggcaaccaccattctatgctgcttctctgagtttgacatttttagattccacatataagtgagatcatgcatgtttgtctttctgtgcctggcttatttcacttaacatgatgtccttcaggctcatccatgttgctgcaaatgacaggatttcctgcatttttaaggttgaataatattccattgtgtatgtggaccacattttctttatctgttcatctgtgatggacacttaggtggcttgcgtatcttggcgattgtggataatgctgcactgaacatgggagtgcagatatctcttttacatattgacttcctttcctttggatgtatacccagtattggattgctggatcatatggtagttggtagttctattttttgagatggagtctggctctgtcacccaggctagagtgcagtgatgtgatctc

SEQ ID NO: 52720 - DNA, 1026 bp, Homo sapiens
ggctgtggggaggctgggctgagggaaggctgggcttcagagtgaaggggggggtggggtgagggggtggagctggggcaggtcaccctgtcctggacccagccacagttgcaggaggttggggcaggtactcctggactgaacccaggatgctagggtctagctagaacaaaggcagaaataactggttaaagccctaggcagagtgagacccatgtgttatggaggccaaagtcacaggcttgagagagtcgagggagtggtcaggaaggctccacggaggaagtggcatttgaagcaggccttgaggaatgaatagaatttggagggggcataaatagtgaactgcgtaagcaaatgcattgaggttggaaacagcatgggacattcaagcgtaagcagaaacttagtgtggctgacgcatgctatgtgtagggggtgaaggagatcctggtcgggggcggggagccgatgcaaatggactttcgaaggggtcagggctggacgttttgctctggctgtgccttttacatgattactggacacccttggacttcccaggaggggccttggggtgaagggggtggccaggtgatgggccactccagtccatccaaagcagcttccatcgtattaatgggttctccttaaggctttgtttaaaaatggttcctctcatacacgacaagtttgaaagctctaactggtgtggagactgatttggagggactggagctgccccaggagagttggtgaggtctggaccagggcgcaggggctgcaggaatgggtcagggacatttagagaatggattggacaggacttgaaggttgattggctgtgtagggagagggaggggtcagggagcctgtggggttgggtggctctgagccatgtagctcacagcccttgattgagagatgtggctggggtggggcgacagggtttgtccagcagaggggcactgcgtgtctcatcaggatggttctgtgcattgctaccgatgactcccactccctgagctg

SEQ ID NO: 52721 - DNA, 1032 bp, Homo sapiens
attttttcccagttatttgtttttgtttcttatttcaatctttttctaaagagaagaaaaaagcctgaaatgtggagaatggtaaggggcttcaggcttgtgcaggcgaatctaagcaggggtctcctggacccctggctgcatgggcactgcctcctccaagctccctgctgagcgacccactggcagtggctcctcatgcctcctggctgccttggaagtcagatgttcctgttggcctatcacagacccatccttccctggggcatcacctgaggaacatcctcttcccaatgcctccctacaacccacctgtgcctcctgaagcccctcctgcgcgcacactcactctctctcattctctccttcaaggagttaacagatctgagcttccatcttctcatactcaggactggccccttcttcccctttcccctccacagtccatcctccactcagcagccagatgccgtacctcctgggattccgtttcaccaagaatgaaatttaaagtccttggccagctggctctctgactcccacacttccctctcacgcactgggtcctggccacactggcctcccctctgttcttcaaacactccactgctgggcatgcatttactgtcccctctctagaatgatcttcctgggttatctgtgggcctcactcacttcattcaggttctgtgcaaatgttttctttaggtgaagccttctggatcaccctttagaaaatagcatgtcctagtctctctcttttctcttaactagttttctttttcttcatagtacctaccaccactcaacatactctataacataactccataatgtgttccataacacaagggcaactgtcagcccttctagaatgtgagctctaggctcttggaataaacctgatttattttttcactgctgtgtccttattacctagaacggagtaggtgttcaaaaagtatatgctggatgggcaaatgaataaacatgtctgaatctgtctgaataaacatgctcttaacctgtctg

SEQ ID NO: 52722 - DNA, 1074 bp, Homo sapiens
gcttttggaggaaggagcttctcatatttacacagcgaaaaactcctcagacaagcgcgcttcccatacgactcaccaggacaaagggacgatccatgagggtatttgctcagcctgaggaatccctgaggcaagtctcacagaactgtgcccattccacagatggagaaagcgaaacccagagagggacatgcagcgtacagggacttgccagagtagggttaccatatttagcaaataaaatgcaggatgcccagttgaagttgaatttcaggtaaacgacgagtaatgctttagtataagactatcccaaatattgcaatgagacacgtatgctaaaaaattactcattgtttttctgaattcaaatttatctggatgtcctgtattttatttggcgatcctaccccaaggtcacctaactgagtggaaaaacagaaagcgctattgggggggtcctacgtgcctccctgcctggggctcactagtgtatggagctggcttgttcccaggtgctattctgaggttattttaaaggcccccagctcatgccagtcaatggtcttcctagtgcaggatctagacctattcaggagctgacaaggagccacatcccccactcccattcaggggtaccgcaccaccaccacccaaactagtttattcaaaagacactaagtgtctactctgtggtaagcacagtcttaggttccagatcacactagaaagtaggagaaacactccctgtctttatggaatcaataggattagatacgcaggaagacaagtatttagagaggaaaactacagtacattgtgatcagtagttctttaatagggacaaatacaggatgcatgaaagcccggagatggaacccctaatgaaggaatagaaagtaagagaaaggagagagacacccaagctgaggcctgaaagattcattccttcattcagtaatttcttgaacatctacatgaaggacagtattctaggcactgtggacccagcagtgaacaaaataaacaaatctttgccctcagaacttaattctaagtgaaatgtataatatgtta

SEQ ID NO: 52723 - DNA, 1472 bp, Homo sapiens
cttgctttagtgtgtcctctgggcttggcaatttggtggcagagaaatctgcctcccatctagagaggatgtgctgctgggtgagattcaaggcaccctccaccccacctgcctctccctccatatggggaaggcaaggcttattagctatttatgcagcagaaataaggctgaacccaccctcacatccccttctctcccagcagctgatggagctggggcccttctgcagaattacagactcagagccatgcagatgatctggtgccacatccacttgacagatggggaaacaggagagggagagggaggaagggaacttgcctaaggcctcgaagccagaggaagctgggcctatactcagctggagtctcccaacaccctacctagcagttggcgtgcagcttttacatttattataaatccttgaggcatcagagcagagaaattaagagccctgctttgtacccaggtaatctcaatcctggctctaccatttactgtgtgactttgggaagattatttaccatctctgagccttgggtccttcatggacagcatggaagtaattatattaggattaaacaagatgatgtttataaaaacttagtactgcacttggcacctaacagcactcaataaatgacagctatagtaggttacatcgtactcggcattattgacatttggggctagataactgttgtgcagggccatcttgtgtgttataggaagtctggtagcattcctggcctctacccattagatgccagtagcaaactccacccaccccgcaagttgtgacaatcaaaaccatctccaagcattgacaaatgtctcctagagtcaaaatcacctctagttgagaaacctgacctagaaaagtcccactgaactttaaaacttcaggtcaaatatcacctcctctgtgaagccttccctgacctactaagcacaattgctttgtactccagattacatcacaggggtcagatcctgacatgctgtgtgtccttggtcacgtcactttgcttctctaaggctccttctctaaggttcatctataacaagaggatatgatgttcctgggaaggatgttgtaagggttagggatcctttatcagaagtgcctagtactgtgcctggcatagtaggcaccccaaaactatttttaaatgtctttattctgattataaaattaacataagaagcagagctgtataatgtaaaagttaaagtccccccataataataccccatgaaacatggcaggagttactatacagttctaaggatttttatgtaacctgtgggtgtgcatgtgcgtgtgtgtgcatgcgtacatgcatgtgtgtgtgcatgtgtgtgcatttgtgcatgcatgtgtgtgtgtgcatgtgtgtgtgtgtgcgtgtgtgtgtgcatgtgtatgtgtgttggtgtcttcctccccacctccactgctgagtacc

SEQ ID NO: 52724 - DNA, 1100 bp, Homo sapiens
ctggtggcagggcctttgcacattcccccaccaggacagcttttccctgagtgtttacatggctggcaccttcttgtttcacaggtttctacttgaatgttacctcctcagagggtctgcttggaccacttgctctaaaatagcttcctactctcactctctcacatcagctgctttttcttttctcttgtggctgtcaccagtatctgaaaccctctcattattcgcatttcttgcctgtctacaccattagaacatgctgaagcgccatgcgtgtgagtgagcaggtggttctggtgtggtgtggctggggcttttgtagaggtgaggaaatgctagggagtccaggtgtggcagcgcattgcctgggagataaagttacactgagggctgtcttctccttcctcccaccccgggagactcagggctgttgtcaggaaataatgagatgattaaatcatggaatctaagaatcccagtctcttccagtctcagagctttagcatctgagaagctttccagctcagaacctttgacacttggaatcttaccatgataggatgatccagtcttaggtttagaatcttacaaagtggactctcactgccttatttagcatcacagagggctcgctttgtgccatgccatgttctaaaagcctttataaatattaacatatttacaggtgaggaagctgaggcacagaggtatttaggtatcatggagcagttgctgggatttgaacctagcactctgggactccttagaatccctcaactgttgaggggaagcccaacctcacttgacccttgcacagagcaggaatccttttcccacacctttgtcaaaagggcctctgatctctgccaaaaaacccccctccagtgaactccctcctaaccaggccacctagcttcctgctgtcagaaagttctcattgctagtaagattttcttgacaatgtgtaaagtgctgcacctcccttgtgaataacgcctgggaagtggtgttagtgtcatggtttcccagtgcctttgaccttgtggattcctggtttcagtggcctctttcttcccactgggttgtgggaagaaaggcag

SEQ ID NO: 52725 - DNA, 1005 bp, Homo sapiens
ggagacaccgttatctctccaataaagtctgtatctgatgacatttatgtatgcaattcttggagaatcatgtgagatctaaaatcatgcactattcggagcgaggtggatgtcatctagccaaacttcattctacccgttggggaaactgaagtgggaagggagaggagcaggccttatccaaggccacgtgcatctctgtctgctacccagaggccaacaggctgctgctgcagtatctgccttggggatcaaaggcaggggaaagtgctcaatgggacagttacttcttctctagtgcagaagctacccctgtacaatgggggcaacatttttggatgcacagggtgtgcctggcacttggggggagattgaggaagccagctgcattgggagttggttggggctatggtgatggggatggctttctagaacctggggctggaactgggctttggaggctgggtggaatttgggggaggtggctgaatagtgtctttagtggataaggtgtgtagggaaggccaagggatttggctctggggcctaaggggtcctgccttgttccctgcctcatgcatgtggccacaagggtactcttggtggggtctccaccatctggggtccttttctgaactttgggcaaaggctttaggattctttttttttttttttttttttttttgagatggaatcttgctctgtcccccaggctggagtgcagtagcgcgatctcccctcactgtaagctccgcctcctgggttcacaccattctctcctgcctcagcctcccgagtagctgggactacaggtgcccaccaccacgcccagctaatttttttgtatttttagtagagatggggtttcaccgtgttagccaggatggtctcgatctcctgaccttgtgatccatccgccttggcctcccaaagtgctgggattacaggcgtgagccaccgcacctggccggctttaggattcttgaggggacagtctaggcagcc

SEQ ID NO: 52726 - DNA, 1031 bp, Homo sapiens
ccacagccctttcagttccccccacctgattattaagtaagtaattaatccaaacttttatcaggtactgtgcagggcttaaaagataaatgattcagccatgatccctccccatcagagtgcttgtctggcagcagagatggatgagcaaacagacagaacatggggtgagaggggttctgatgatggaaaggcagggtacaaagggagcagagaggagagcacacagtgtagctcaggcatggaggcagagcagtccccgattgcttccaggaagaggtggcctgtaagctggggcctgagggatgcattggaattcactagtgaaatggggagggcagagagcaccagggagaggatgcagcctgtggaaggtgagaagggaagcagaaccctgggggaactgtgagatgttcagtctggctgggcagtgcaaagtagaacagccagagagattggcaggggccgcacatgtaaggcttaagcaatccagaaattgtctggagggaagtagggagctatggagggtcctaggaagggcagggttatgatcttttattttattaaaatcacagtgactgcagtaatggagtggaggatgagggtggagtgggggaacctgtgagcaggctcttacaacagctgaggccagagctgaagggggcctggatcagggcaggggaggtggtgcagaccctcttctctccccaccctgtaggatcctaatcagcttcatggtacagattgaatgccacctcttccggatagcccttcctgacacccaccctccaagttgtgctttgaggctgaggctgtgcagggcctggcatgcaacagtcaactgcctgcccaccagcagctgaccctgacctccccctgccccatgcctctggaccctccatctgttccccgcactgggctaccaactactttctttcattttttaagaataaatttattgttttcattaagcagctgaacagcattacagagaatttggaaatcagagaaacaaagacaaagaccaagat

SEQ ID NO: 52727 - DNA, 1493 bp, Homo sapiens
cggtgagctgagatcgcaccactgcactccagcctgggtgacagagcaagaccctgtctcaaaaaacaaaaaaacaaaaaacaacaaaaaaagaagaatacaaaacccaatcattgtaagcatccctccttttgtaaaacaagggagcaaatctttggtgttgcccagcagccgtctggaaatgccaagagcaattgtatttgcatttgcaccttgacaattttatctttctgagtggggacctggatctgagaaaggcgacagcacaaagttgacagaacaggcaagctaataaacacaagagcaagtgataataatgatgaagaattctgttttttttttccaagaagtagactttgtttaaaaatattatttgagaacatgaccaaaaaaaaagcaacaaaaaattaacaggcctttgaaggagaggagaatattttgccagaatgttctttgactcagggattattctccattcctgagggcacaattttttttttccctctctctctctcttttggactaatttgagttcataatggcaggaaaccaaacaaacaacaaaagaggattctatcaacatttggaagacagtttataagtcactagacgcttgcacatataattaaactgatatgtcctaactcagtggcaaagaggcgagtgtcccacatgcccagaactcccaggattctttagacaaacaaacaaacaaagccaaagctgaagaaacaaccagattccagattccttgtcctctgctatttgacggaggccctttcctacttatttgtcccttggcagagaaccaggcatcagatcatataatcaaatccatcttcccaatgttacagccactaatgaagggcataaaagaaggtcatgtccaaaacagagccagccccggtcaagcaatagaggtagagttagcaagagggcaagcaagatccaccctgggagttgagaaggttgtgcttgggagcatggtcggagtgaggcggttgagtggcgttggagcatcttaattggcctgcagcgtgaaaggaaggcacaagcaaagtgagggacttgcaaagtgttgaacaagtccaggcttcagaaggatcagccctctacataataaacaccacatggatttatagagaaaatagaacattttctgttcttgttagtctgttcatggtagaaaaccagcattgtctcgtgcagttagtgtatgtgtaagggtcgtctgtacctgcagatatcacagtgtgggagtcagggcttgagaccaggagtctgagactggcctgggcaacatgttgagacccatctctacagaaaattaaaaagttagccgagtgtggtagcatgtgttgtagctccagctactcaggagactgaggtgggaggattccttgaacccaggaggtagaggctgcagtgagctgagatcacgccactgcactgcagcctgggtgacagagatcctatctaaacaaacaaacaac

SEQ ID NO: 52728 - DNA, 1098 bp, Homo sapiens
ggactcctagggctggtggcagccaggattctggcccagggcgcctcctcccgactgagcagagccagacagacattcctgaggggcccagaaatggggccggttggagggcaggggctctccctaggggcatagctggtgaggaggtctgggcacctcctccatggctctcaggggcctttcatttctgtgggaggggcagagaggtaggtggcacagaagatggggctttatgcttgtaaatattgatagcactggcttcctccaaagtcccaatactctagccccgctctcttcccctctttctgtcccccattttccagggggtatatggtcagggctccccaacctgagttgggttacttcaagggcagccagcaggcctggatggaggcctagaaagcccttgccttccttcctcccacttctttctccaggcctggttaactcttccgttgtcagcttctcccccttcagcctgtttctgcagcagccagggttctcccccctacaccctctgcaggtggagagagagaagctgggcccagccgggccgtgcctgctggcacagacgccttaacgctgtgtgtatgactgtgtgactgtgtgggagcctggactgacagataggccaagggctactctctggcatctccaggtgttttgtagcaaacagccacttagtgctttgtcctggactccactcagcctcaggatggggaatagccaagaatggcagcctcagcgcagaggcaaggtcagaaagagacggcgcttcagagtttcctttccagacacccctccccgcactgtgaagttcccctgaccgccctcctggttcacaaagagcattaagaaagctgcggtggtctgagcaacatagcccaaagggctgagcctcctggcctgcctgcccgcccaccctgggagtcccagtggtgaggctcagagaactgctaaggggaaagaacagctggagtttctgttgatgtgaagaaggcagctcttggcctcccactcccacacttctttgcctataaatcttcctagcagcaatttgagctacctgaggaggaggcagggcagaaagggcgaggg

SEQ ID NO: 52729 - DNA, 1052 bp, Homo sapiens
ccccagtaggtcccttcatttagacccatgggtgcttacaaggttccctgcccccttccgtggccttgcctcaacatcaccccaccttccagtttgcctccatccttggcttctggggccacggaaatggggtctcccctgggctgctcaggtaacctcctgccttacgtggagggctgggtgagaaggcagcctccaccctttgttttgccacctttttgcctccctgaacacgcgagcacagagttcttgaaggtctctaccaggaacatgggtattcagtcattaaatattttttagcaccagctgtatgccagaaactctgttaggcactaggctctaaggacacagtctcgccttaaaggaactccacagcatggtgtgatgttttataaccttatgtataattttgccttattttttttttgtcttaaacctccttaagaatggtccaaagctgtgtacgtacagaagaaatgttacatgctatttcaagtggctctgtgatcacctcctagaactcagagccctgctttaaaactcatgtttagaaaaagataattgcagtattgtgtggtagacactacaatactaagagggactaactctgcctagggtaggagacaggacagcatggaagatgctgttagatctgggaactcagatgtgtagtagtaggccaagtagaaaaaggagaaatacctcctttgttcatcactgctgctagagatggtttgttcccccatcctgaagaaaactctctgctcccagccaacaggcactgtgcccctttcggttactgctgctttgcagctaacacacagccaggaagactccagccgttgctcagataactcaagctatgaggaacccttgtcacccatctcagccagctcatctacttcccgccggcgacaaggccagcgggacctggagctccccgacatgcatatgcgggacctggtgggcatgggacaccacttcctgccaagtgagcccaccaagtggaatgtagaagacgtctacgaattcatccgctctctgccaggtaa

SEQ ID NO: 52730 - DNA, 2207 bp, Homo sapiens
cattttctcgtaagctagcacgcactgcctttcactggctcattagtcctcacagcagcactctaaggtaggcgtaggatccttatttcacagccagtgaagctgaggcttagagagggacaatgacttgcccgcagttgactcaatgatagagaccagtctctaagccaggtctaagcccgtgtctctgcctgttagacaaatctgattggccttgttctctgtgagtttaaggaacagaacgaggataactgggcagaaattaatagaaagacagattttgggctcgttatataaggaatcactaatgagccgtccaaggtgggaacaaactgcttccagagtagtgagtttctttgtcgctggaggtattcaaacaaatgccagaaaatcattgggtgggcatattatagaaaattttcaagcattggcaagagatcgaaccagactttccaatcctataattgtataatctgcagttcattagactcatcagggaatattttttaccaggctctaattgggaggaaatagccatcatctaaaaaacaaaattttagctttcatagtaatctatgttagtaattcattttaaataaaatagatgtttcttagcatatgcaaaacataaaagcagagaaaatgtaattgtgtaaaggcagagttaaatatttaaaatttaaaagcacagaaacttaatttgattgaatcatcaactcagtcctcctagttattcatagattgtgagggaaaggggttttttctacgttctcaaacatggatgtgagggccatctggctgcaacacctgtcaccccattgatcggcagagttgattccgctgatctggctggctacgcaggtgtccccttcctccttcactgctccatgtgcgtccctcctgaaccagcagctgggtcaaagaggacgaccatcccgtagaggagggccgtccctcagtcaagggcatacgagtagctgccctcccctgctagaacctccagacaagctctcaagttctcagacacctttgcaattggaaagactaattctaaaagaaaggaaatgtttccatctctacagaaaagccaaagctgtttaaaaattttttttcaagtgaatataggcacttaatggaaactttctaacttactggtataactgtgtctcaaacaaacaaaaaaaacttcattggtcctttctcttagatggcccctgctcagctcagaagtttattatgtagctgaattatggaggactgagtactaaagacatgagtcatagtcaactcttgttcattaaaggtttatcctggtttagttagcattagaaccaccagtaagaacatgagcttgaggctgggcgcggtggctcatgcctgtaatcccagcactttgcgaggctgaggcaggtggaccacctgagatcaggagttcgagaccagcctggccaacatggtgaaacccagtccctactaaaaatacaaaaattagccgggtatggtggtacgtgcctgtaatcccagctactcaggaggccaaggcaggagaatcgcttgaacctgagaggcagaggttgcagtgagcataggtcgcaccactgcgttccagcctgggtgacagagtgagactccatctaaaaaaaaaaacaacaacaacaacaacaacaaaaacatgagcttgagtggaccaagacccattatgaactagtcataaaccatcttttctttccccccctccccccccaagatagagtcttgctctgtcgcccaggctggaggggggtggcgagatctcagctcactgcagcctccaccccctgggttcaagcagttctcctgcctcagcctcctgagtagctgggattacaggcacgcaccaccatgcctggataatttttgtattcttagtagagacagggtttcaccatgttggccaggctggtcttcaactcttgacctggtgatccacccgcctcggtcttccaaagtgctgagattacaggtgtgagccgccatgcctggccctaaaccaccttttctcaaacgtgtctgttttgacttttccatactatataattaagcacaaagaattcctattctgtggtggtattatggatctttaacatgaaatatgagcatcttcatataaagttttatgcaaagattacttaacaagtgtgctgaaatcacttttaaagtatatatca

SEQ ID NO: 52731 - DNA, 1038 bp, Homo sapiens
cttccttttatctcccctgatcttagtgtctactgtagaacctctcccattggttctagacattttgcgttttgaaatcatagcatgggccggagcactatgatgtgagactatctgggagcccttgaccctggcattggataccagtggactggcctccatcaccagggttaagtagaactctttgaaaactcctccctgactccctgcagccagggccagctattattccctggtgtgttgacctggtggaagtcactctggtcctgcaggtgctgctgctgagtttgagctcaggcccctcttgcagtcctcagcctgtgggctgggaagcgttcaagcagctgtttggaaatcccccactgctcccgttgtcctgaactgcatggggtggggggagggtggctgttcgctccattgattccttcctgcatagctgggggtggcagcttggagcacattcagctgtttacaattcagcttatgtacactttagctggggattgtgggtgagtcagaagggccgttctctttgcctgtgtcctgagagacagcatgaaagtcagctgtatggtaatggctgccagcatgggaggagccccctccctgccagatgccttaacgggagctggtcaacacagatgcttaaaatccagtaagctctccaaacctttcaacccagacccagcaagagcattttgcagtgacgctgagggcaaggctggagggtcccctggcttggcctctccttcatcctgctggccagccccctgcaaggaactcaggtgtggatctcagtcatccgcagccagtgaccctcctgtgcctgaaaagctcaccagttttctcagcaaagagccccacagggtccttctgtcactgctgtgccttcccttctctgggagaggtccttcagaggaggtgcttcagagaggttcctcagggagccacagcctgctgtgtcaaggcaaggagtccttgtccctttgacagctctgcccttagcagatttgaaaaggctgcagacattggatgttc

SEQ ID NO: 52732 - DNA, 1055 bp, Homo sapiens
aaggagtaatgtttccatgagcagaaatgatcaatagaactgatttgcaaggtatgtagtatgtagtccataatatagacaggacaactgaggcttagtgttccctcctcccagtctcccctgacatttatctaacaatattagtgatgctgcagttgataaccaaaaaaatagtcatcatattggggaacatggctgcctttccctgttatcaacctgaaaataattggagagtttactaaacatttctagatttcttttgtaaaccggtagaaatccatcttccatgagtttatcttaaactgggtttatttttagccttttaaactaatttcttttcataagctaaatcatctggcattacaagttacataaatttagtattttctaagtaaagcagtgcttccttttatttgtcttaaagttaacctttcttttggtttctagggttcttctgcactgtctgcttaaaacccccctttatgaaaaaactgcatagaaagagaatctggtgcttgtcttcttgtcctttagattaatagccattgaaggtgacttgagactttgctttgccctttaggacagaagcatttctgttatgttgcagtcacagtggaggtaacatttcttcctgaagcctgacctcaacagtgcaaggacaggactaccgacgtagaccaagacgtctgaggaacacaaacctcagatacctcagtttgggccacggaaagattagccctgctctggggctgtaagaggccagactcagtgaaagagtgagattagaatgatttcctaatcttctcacaggtctcagtgacgttggcactcctgtgtccaagctcagcctagtccagtgtgttgtgcctgcattacattatttaatcctcaccacagctatatgtaagacagatataagtatcccatttcatagatgaggaaagaggcctagagtaacttgtccagcattacaggataggatttaagcctagagtctttttttttttttttttttttttgagacagagtcttgctctgttgccaggatggagtgc

SEQ ID NO: 52733 - DNA, 1065 bp, Homo sapiens
aagacaaaaaaattgaacctctcaccccagacctgtgttcttaatcactacaatgtttttttgaggttcctggataatacaggcagaaaagagagaccacagctgagaagtgtttactcccagtgactttgctattacagtttggatatactagaaaagtgacctcatcctgctttgaacttaggcccagataagggaacaagggagaacccacaacagacagtaagagggcctgaaaacccaagttaaagaagatgccatcagataccctggactcttccctctcccacttatttctacctcgtgcttagtgaatccatgtttcctgcccctacccttgtccctagccccagcacctggccctggcccatcatgcatgagaaccttagctctgatttatagccacggcattcagatatacccactcctgccactcatcacaattctaggcaaaagggggtctggggtcctgttctggcgagtggaatcacccaaggttgcatgcagaaccatcctgggctcctcctgtctcccttcattgacatcttctcatgaggaagggtcacaggatctcaactacatgggctggactgctggggaggtcactttcaggagtctaatagaaaggcctaggcaaagggaatacagacagataattctgagagagcaggagagaaaaagaatagagttaaaataaaacagggtatcggagaggggtgttcacgtcagaggagtggaatctgggggcaacatgtggaagagttgggatggggatgtctggggagacaccagagcccacggaggatctgctataacaacaggctgtttttacagaaccccaaatctgagccagaggctgttttgtcctagagctgtcagccctagaagtcacaccaacctggggaaagcctgacctgaccctgggccccgttctggcaaggcttgctcgccgggacagggcccagggtcaggagctgcctgtggccagggattcagcagaggtaagggtagaaaatagggggaagcctggtgaaggccagtgcagggcatcaactgggaagagat

SEQ ID NO: 52734 - DNA, 1050 bp, Homo sapiens
gcccagcattctgttttaacaaaccctccaggtgattttgttgtgtgctcaagtctgagaaccactgtggacctgaaaatttgcatttttaataagacctcactctttgaaaatctctgctctaagaatagaaaagaggggacaatgtgtgatgagaaagatctcattccacctagaaagccccctccccatttccgaagtcccaatcgaacctgtctttaaagatccacccaaatgaaactttagctgatgcaagtgaaagttatcccttgacagcttcctgcatttcaggggtgcataaaccaagggccaaatccaggtcacaacttgtttatgtaagtccctcaaactaagaatagtatttacatttttttaatggttggagggggtgaggaaccgaagaagaatgtgcagcagagaccatatgtggtgtacaaggcctaacctagatactctgtccctttacagagaaaaaaaaaaaaaaaatgctgactcctgttatatttatgtgcttttcttatttttcctcttaaactgttaacttcttaaaaatagagtcaatatccgagtcatgtttgtattgcattcagtaccaaacatatagtaattgttcaataaatatgggaaggggcggatggtggtggttgggcagctgacaagtgttgtgggaatccaaaagagatggacttttatacttgaccactttgtggctgtcctatccataaaataagaacagtgtttttctccaccttaagtagatgatgaacatccagaagttcgtactaatggaatttactctagtaactagatggtgaaaagcagttgggagctgccctgcatcttgaaaaacaagattagtattgaaaatgtccataaatggataagttaaaaataagcaaaaagcttaaaatttcaggtggatttctgatgtccagtaaaaagttttcacagaattatatgctaccatggttaaaagagcccctagtgatgatgctgcacgaattccacctgccccatggttgcccagcctctgcttgaacccctccaccg

SEQ ID NO: 52735 - DNA, 1126 bp, Homo sapiens
atattgagatttcttgattagtgatttaagtatattttagtgaaatataaaccagtacaaggagaatatcatatttatactagctttcagattatttatttctcccataattcacagaaaaataattttaattcttttgagaacttcctttttaaagaaatgaatatattgggtaatgaagctggctggctaaataagacatataattatcgaaatgtaattcattccatatttagaaattattttgcactagtaatcataataaatggaagtctccaggtgaagaaagacttggttcttcattgggtgataaacaaaacaaggacccccatagttagtgccttgatttatcatgcttgctatttaactgtgaccataatatgatgtttgttctctttatataaaggaaggtttttgttgtttgttactgagtatttccagtcctgtttaattataatggctactatttttgtaaagaaggtattttaaaatcaatgcttaaatgtagtaaaaatgattcattcccccaatgccagttccagtcctacaaatggaaatagcactgaggaggacatcagctgatttaatcttccattaaggttttatttgcatagcccttgatccctaaaggcttagtctgcccattgcctcaacaaaccctttgtacaaataaaattgaatcaagcagatgagtgagtaagtgtgtctggatagcagccctggaatatcgctacccttctcatttgcaaagctacatttcccagtcctttctgcatacacacaggctgtggggtcaaacccgattaggtgctctcatcaactcttttacaggattggccttttcagcttcgagaagcagcatgacctgttccattcagcggctgttcttagcccattctttagctctgtctgttacgttcccatggagtgaggctctggcttctcctgcacatgctccctgagagagtcattcacaaagacaatctgctctccaaggaaaagcagcaaagccagctgaggaaagagatgatggatcatgccaaccagaggggaagagtaaggcatattaaaaatgacatcagtgcagtaatcccacagggattaatacaaattgaactggtatgtt

SEQ ID NO: 52736 - DNA, 1048 bp, Homo sapiens
aaggctaaggcagaccagagtgtgatttactgcagatccatggttgtacagagctgtaaccagttactgaatcttggctataaaccctttaactgccctactgtctatttaaattctttgtcagtgggcttcagtgtttaaatgtttgctttgataaacatcccaatattcaaacaaggaataaaacattcagaaccattgagataaagatcaaaacaatagtgagaacatctgacaaatgctaactttttaaactgtagaagcctccactaactacagactgtctgaccccagaattaggattttgctccctgtccttgctggccacactgaaaataagtgaggctaattacaataatctatcctggggcaggttatttggggcaataaatcaacctcaactgttaacctttcttgtgtgtgtgtgtgtgtgtgtgtgtgtgtgtgtgtgtgtgtgacagagagagagaatacatatgtaaacatgatgcatgggcacttatttatttagtatcttatatatgccaggcattttaatcttcataacagccctgccaactcagtttttagatatacatttaagggatttaatgaacaagctgagatctagagatactaaatgatgagttcaagtttttccattataccatgctgtttctcacaatgccatgctgtattaccctcagtagcaccataactcagttgtcagtagaccacaaacacaacattgggtcatccatcttgcagtcatgtactctgggccacaggaggcattcgaagacagagtttgatggataattacagcttttttcattaggaaaataatttgaagttcatggtttacatacagtggatcaaaacaacaataaagcagtgaatacactttgttattatctatataggccagttttactgaaaaagactgatacatccccaataccataccacctgctgctcaaagacaagccttttagtttgaggttgtagtcactattggcaaagtctgactgtgtttgcaactgtcttttaaacttacaatcttcataaa

SEQ ID NO: 52737 - DNA, 1038 bp, Homo sapiens
ttctgttttccagaagagtttatatagtattggcattgtttcttttttttgaatatttaatggaattcaccaataaagccatctgtgcctggagttatctttgtgaatagattttaagccaagaattcagctactttaatagctatagggctattcaggttatctatatcttcttgagtgagctctgatagtttgtgtctttcaaagaatttgtccatttcacctaagttgtttaagttattggtataaagtagttcataatattgtttcattatccttttcatgtctataagatttctttcattcctatcactggtgatttgtgtcctctttctctctctctcactctctttctctctcttgctcttgctcctttttctgatcaatctggctagaggtttatcaattgtattgatcttttcaaagagccagcttttcatttcatcaattttctctctagtttttctgtgttctatttcattgttttccactctttattatttccttccttttgtttgctttgcattttatttactcttctttctctaacaaaatagaagctgaggttaatgatttgagatctttcttcttctctaacactagtgttttaatgctgtaaaatttcctttaagtactactttagctatatcctacagattttgatacgtaatgtttttgttttcactaggtttaaaatattttctaattttccttaggatttcttctttgacccatgagttattttgaagtgcattgtttggttttcaaatattagagattttcctaatggctttctgttattgctttcgagtataattctgttatgcttagagaatatgctttatatgatttcagttctcttaaatttattgagacttattttatggcccagaatgtatattctgttgtcattaggtggaatgttctatatatctaaattaggtttgtagtgttgttcaagtcttttatatatgtattaatttttacatctacttgtgtcatcaattactaagagaggagtattgaagtctccaacta

SEQ ID NO: 52738 - DNA, 1039 bp, Homo sapiens
ccaagagaacttctttaacttaaaaaaatttcaactcttactttgctcaattcccttaagcaaattaagtcacccccaaccctcagctcccataacttctcctattaccacatttgatcataattatctgtgaagtgtgtgtctcttccattagactgtgaacatctccaggacaggaacagtgtctcaatcacctctgtttccccattgcccagtctagagcagtaaacacttgatgtaaagcagtaaatacttgatgtatgtatgtgtgaatgaagaccatgcagggtaagctttgctataccagccttgaagacttctattgccagtggatttccagggcaggagctttagtcttcctctgcctggcaaggctatctgctggaagctgaagctgattcattgccaatgggagtttaagccaggggtgacaaatacatggaatgtgtgctgccagtgccccttcctgtgtccctggcagtcatggctaattggttggttctcagcacatattcacactgtactcagagccctcagcacactactctaggcagccacttccagttgattgaagtttctgctttaaatgaaacctatttgctctccctggcttaagcccttatgtgtgaggtcaggtcagactgctttaagccatagcttggactgtcagccaaatgggcctgacagcctttaagagttcccagttttttctctttggaggtcacagaccagtcttggcctttcctgtggaactggagagcatcttctcttcccttttcactgagtgggctcctcatgaccacgttcatacttactgccctaggagtcaagatgcccctcagcttccctgtgtttgtaaagacatcttgattttgatggcagtcagcacttatccctcatgacctgggaggctctgtactctttctaggtctttctggatattggaagagagctttgagatcacttagctgaatctaagtggcaaagcgacagcccatgctgaatgaagtccaccatcatgctttatttaatctcatag

SEQ ID NO: 52739 - DNA, 1028 bp, Homo sapiens
taaactttcctacctgctcctgagtggtcacaaatttcaaaacaaatggacaagtagcagaggagcttgtttttttcaggtgcaaatgtagcttgtgatcttacattgcaagatatataacttagttgcattctctgcaagtaaaatttttcaagtcttaataatgggatgaaatatagttataatattcctcaaagtgaacctgaaaaaggttggtgcctacaggactaaatggcccctaaggtaatttcctaaaagggatctttcagctctgctattttgtgattgttacttgtttcttctgtcatcaccatcttgttgaatccccctctctgtcagatgccccctctccatcaggtgcacagggatttttaaaaaacaggctttattttttagagcaattttaggctcaaactcacagcaaaattgagcagaaggtacagagagttcccatccctccccgacaagcctccctaactatcaacatccctgcaccagagcaatatgtttattaccattgatgaacctacagtgatacatcattatcatcactcaaagtagcagtttatgttagggctcttaatgttattcattctgtaatgtatgacattaagagccctattataaactgtatctaccatcatagtgacatagtaacatgtatctaccattgtagtgacatacagagtagcttcactgctgtaaaaaccctctgtgttctacctgtttattcttccttccccccaacccctggcaacaccgatctttatactgtctccatagttttgccttttaaaaaatgttacatagttggaatcatacagtatatagccctttcagattggcttcttttacttagtagtatacatttaagtttcctccacgtcttttcatggcttgttagctcatttctctttaatgcttaacaatattccgttgtgtggatgtaccacagtttatttatctactcacctactgaaggacatcttggttccatcaaagttttggcagttatgtatgaagctgct

SEQ ID NO: 52740 - DNA, 1027 bp, Homo sapiens
tgagaggaaggatcctgaggtgagggagagggagggaattccagggaaaggcactgttgtgtggaatagcatggattcagggtggggttgtatgatgggaggttgggaacagggagctgatattagaggagtgctggagcaaggtcactgaggacctcacatgtgaatggagtgtcaacaccaggcccggggcaatgttcagatgtgcatggttgaaatctgacagctgaatggaacttggacatgctgcaattaggatggccttttgggacactgttgtggtatttcagctaaaggctagggtctgaactagagcagtggtgacactgaggaggagggaatgaatgggaaaggtctcagaggcagaggggaggacatcagaggaaagctagaatgcctttggtgactgggtagagcatgtcctcattcagaattgggagcacaaggaggagaggctgatagagcaggagggcagaagatgagaagtttagtttggtatgtctagaacttgaggtgcttaagggaaatcatggtgatgctatgcatttggatgtcggctagcagctaggggagaggctaggactagagatctgtgtatgcgaagtagttaaactaatgagaaaggaagaatttcagtttcaaatattgggcctaggacagagctacttgatagtgctgaatggagaggaagatggccctcaaaggagatctagaccattccccactcccacccactaccatcatgttctggaccctgtcttctttgttactgacccctgaattcttcatgtagccctgagttttctggagccctcactgtggaagtcaagctgagctctgtgtggatgtgaggtggtagtcctctctccacttggtcaccctttcccctgggtttggtagtgtgttagtgtctcatatctttagtgaacagttttgatgtttattatctgccattcttgtctcatgaatcttaatagaggttcagtcatgaaagcaaggccagtgtgggccaggtgagaaaatggcc

SEQ ID NO: 52741 - DNA, 1313 bp, Homo sapiens
ttgtcagtctctacattctctcctgatggaagagttttttgagttgaatatgctgtgaaggctgtggaaaatagtacagccactggactcagatgtaaagatggtggtggctttggggtagaaaagggagtcttcctaaactttatgaagaaggctccaacaaaagactttttaatattgattggcatgttggaatggtggtagcaggtttgttgacagatgccccttctttggcagatataacaagagaagacgcttccaactttagatctagctttggctataccattccacaaaaacatcttgcagacacagttgccatgcatatacactctgcagtgctgttagaccttttggctgcagttttacagtagggtcttacagcgtgaacaacagggcacaattctgcaagatgtttcgtatggttattggggctgtacccttggcaaagccaggcacgctgcaaagatagaaaatagaaaagcttcaggtgaaagaaatgacctgccatgttattgttaagaagttgcaaaaatatttacatagtatatgatgaagttaagaataaaccttttaaattagaactcagcagggttggtgaattaactaaaggaagaagacatgaaattattccaaaagatataagggaagaagaagagaaacatgccaaggaatctttgaaggaagaagatgaatcagatgatgacaatatataacatttactccagcatctattctattttaaatttctgctacagtcccaggttaacatttagccccctgtggattatacacactcactaaccaattttcattaaatgtttgtattgtgaaaaaggagaaagaaaagttctggagattgcacaattacgtgaatatacttaatgtacttgatgccacttaacaatggttaagatgatcaattttatgttatatatattttaccacaatacaattttttttaatttatagtggaggccacatcagctcagaccaagaacctggggacaaagaagttgctcccctcagggctggagtttggcttggactgaggagctcaggatctgaggaccgcggtctaagggcaggtgggcttaggcagtagaaactccatagcagagaaaagccaaatcaaggagggtcatccaggcaagacagtcatgagaggagtggtgaggaagaagaggaaagaactggcaagagctagtaggagcctatcctttcttaaatgtactatgcatttgttagcagtcatcattttaggtggaaaattcatccagactaccttcagttttctgactcccactaccctt

SEQ ID NO: 52742 - DNA, 1069 bp, Homo sapiens
aacctgggactgtagcagaaatttaaaatagaatagatgctggagtaaatgttatatattgtcatcatctgattcatcttcttccttcaaagattccttggcatgtttctcttcttcttcccttatatcttttggaataatttcatgtcttcttcctttagttaattcaccaaccctgctgagttctaatttaaaaggtttattcttaacttcatcatatactatgtaaatatttttgcaacttcttaacaataacatggcaggtcatttctttcacctgaagcttttctattttctatctttgcagcgtgcctggctttgccaagggtacagccccaataaccatacgaaacatcttgcagaattgtgccctgttgttcacgctgtaagaccctactgtaaaactgcagccaaaaggtctaacagcactgcagagtgtatatgcatggcaactgtgtctgcaagatgtttttgtggaatggtatagccaaagctagatctaaagttggaagcgtcttctcttgttatatctgccaaagaaggggcatctgtcaacaaacctgctaccaccattccaacatgccaatcaatattaaaaagtcttttgttggagccttcttcataaagtttaggaagactcccttttctaccccaaagccaccaccatctttacatctgagtccagtggctgtactattttccacagccttcacagcatattcaactcaaaaaactcttccatcaggagagaatgtagagactgacaagtcatacctggtgtcaattgagctctttgttttaaaaccagtagaacgcgtagggcttccaggcctccagaaacttttcatcttataaaactgaaactttatactaattaaacagtaactccccatcctttcctccccctagtccctggcaaccaccattctactttctgtatgaatttgatgactcaaggtagcttttataaatagaatcacatagtatctggttgttttttttttttttttttttttttgtgactggcttatttcacttagcataacatcctcaaggttcatccatgttg

SEQ ID NO: 52743 - DNA, 1032 bp, Homo sapiens
atatttacagcacttgatgttttctgaaaaccatatttatacattttattacatttacaaaaaaggcttccactaccgtttacctacaataatgaaaaaaaaatttacacctttttttttttcttttttggtactgtacaaactttgtataataaaaatatatctctgtacaaaagattttttttgtctttgttttacttttttttttttcctcatgggatggtgatgggtatatggcgtagatggtgggtgaagggcctcatctgccctgttcccttccaagcctctggaggtggagagaaatgtcaggggtgcggagggtgatgcccagcagagtgctgggtgccccaccagcaggtgctcctcgagcatctcatggaactttacaaggagacgcaggggaggggtggggggcgggaataggcatccgctgggtggtctgagaggggcataagaagggggaagggagcagtcgaaggagaggagtgtaagggggaagggagcataagaaattgggaggggagcttcctgcacttgtttccagccaaggaaagagatgagagtgtgagtgtgtctggattggccctctccctccaggcccaggggggtgccgtgtcccagaggtggtgtggccaggggtaggctcctgcctctgtcagcctccattgtgtctgctggaaatggacgcctctcactttcctctggccactcttaacatcagtcagatcttctaattgttccaatctagaatttgcttaagaaccaggtgtcgctgtccctccgctcctgcacatttctatttgctatttcaatatgtgacatgaatctctgaggccagcatgtcacacgtatacaggggcttaagcttgtgggggccttcccgaggacagagaaagtggccctaaatgctatactttgattcctaaactcatgaacttcccaacaattctcatggaattcatgaacgacccaagcatgatatagctgtcaaaatcaatcaaacccactcgcaaggagctggagaggtgtgac

SEQ ID NO: 52744 - DNA, 1066 bp, Homo sapiens
gaagctgaagcatctccttctgaaaggctgcctctcctccttcctcaccctcccctgcagactgggaaggctcagaagaacacaagtagaaactgtggccccagtaggcaccctgctaactgaggggctggggctctgagaggggacaggatgtctgctgtggagccagaacaaaaactgtgattttctaaggcctttgcagcgtgcctggccatcttgcagtaggtgaagggtgctgtgtggaagacagtggtctcagtccatgcagctcatgagggcagagctgggacaactccgggggaggagcagtgtgggtgggaaagggtgggagcagaccgtggctcagtccagagaagctttcaggagcttggagccagaggacatggagtggactgccttggcaggcaagggccccggcgatgggaggtgtcagtgcctggggtacagagaggctgtcacgcacctgcggctgcctcctgtttccccctcccctgcttctgagaaaccagacccctccccccaccagagtctgaggctgggcacccagaggctctgggccaggacaaggctccaaggtgtggatgtttgacatggatgacaggaagcacgctaggtaaagaggccagggaaggaccagggagggaagtggccttaatgctcagttttcttatctgtaaaatgggcacaaaaccagtcttctagggctgggctagggcagaaacgacatcacagtcaaggcaccctgagagctctaagacactccacagtgtcgttgtttgttgaggcaggggtgacacccagggctggctggagggtgtggctgggggctgtatctaagagccaatgtccctggagttgggggctctcctctccaggtctgaacaggaaactttgtcaaaggttgagtgggttatgcacatgtgtttgcttttggagagatattccatggcttttgtcagaatctcaagaggcatccctgatcccaaagaggccaaagcacccccgcctcagactgttcaacttccccagtcctctacctgaccacggcacacacggtttctctccc

SEQ ID NO: 52745 - DNA, 1028 bp, Homo sapiens
aactaggtagcaaaatgagcttgaacaaaaacatggtcccatgctgactgctctcactttaaattaatgatccccccaccttaagtgagcgctcagtgctgcctggccattacacacttcccaattccattccacttgtatcttgctaaatgattatctccttcctcttccagatcttctcactcaaacttactctcatctgttaagcctgcttcctgcctaggagagtactatgcaagctgtattttagaaagagagagacagagagatttggggaccaactgcaagaggagagagagatttaaaaatatacattttccccagaaacttaggaatatatggaaaaatgataatttctcccattggtgctacctcaggcaacatcactgagggcctagattactttgagagttttctaaaattggatttgtatatcttttggcacattgaatatttgtttcacgtagtctcttcccttagactgtaagccccaggagatcaagatgtgtgtctccgtctgttcaggcttggacatggtgccttcttgctgtgtcttcacatggcacaagggaaagggagcattctaaggtattttcttttctctataagagcattaatcccattccatgacctaacaacttcccaagaccccacttcctaatactatcactgggtgaccaggtttcaacatatgatttttgggaggtcacaaatatccagaccatggcagtgtccgtcttggtcaccattgtgtccccagcacattccacagcacttggcacatagatgctgaatgaaactatatgggaaatgaatgaaatagtgggtcaaattcagtcttttttgatttcttcccttttgaggtgagagtgggaatatgtttgtcttttgattactaatgaaaatgcacatgaattatctgttgcagtcctatcagccaggctgagggttcaaatggggccacggtttttttctgtgagcgcaggtgcctgggaataagagcaggagcaggggcgagctctggggct

SEQ ID NO: 52746 - DNA, 1050 bp, Homo sapiens
tgatctttgaccagatacttctggattcacaaattttctaggctggaattcatccctatgggcagagactggatgatgctagaggcaggatgctatttactgaggctaagttcagtgtgggctcataacctggcttttattactaacacagagtcaagtgctatacaagtgttagctgctcctgctgccactgctgctgttatcgttactatttccaatcaccccaatccttgctatattaaaaaagtgttctttaataaatacaaatatagtacattatcattaaagaaaatttgaggtattctatggaacagtaggaagaaatcaaacttatccattgccctctcagagataacgactgttaaccaattacagtacgttcctggagtgtttattctctgcaaatataaatatttttgttttatacaacttgcattatatgttatatagcttgtgttgatccttgcacacttattattatattgcaagaatttcccatataattacatttcttagaaaatatgattgaaataacttcataggatttaatcatacagatttactagaatgtatttaacagatactctgttaaccatttaggtttccaaagttttgcaatttaaaataaagctgcaatgaaatctttttttatatatgcatcttttacgtttttttctttttcttttttaactaggaagattcaagtacatgacccttttgaaagtacagatatctcctgctgaatgtcagtaatcctttcctggaaatcaaatgttctgtgtaaagatattaactaggagcctatatcccattattttaagtgggaaaaaattatactgtgttgtacttcaacccaaaatccaaaaagtaattaagacaaaataaaatacctaaatatatgcaacaaaccattatgttagagaagttaaatacttaaaacatcacgatcacccaacaacatggtgtgacaaaacagcgcctctgtgcattgcatactgtaccatccacatccagtgcgccatgaaatcttgcagcttgagacattataaa

SEQ ID NO: 52747 - DNA, 1079 bp, Homo sapiens
ccacctaaacttcaggtctcatttccttttgccttccctgatgagtgtggcccacaccgatgtcttttctgagagcacgtacagccacaccacacggctggcactcggtctcctcttggctgctgatttcacagtgcattgatcaccacagagaaagcagagaaggcagggggcagcctggcacagcagtgagtatgtgtgtttgtgctctgtcctagggatctccttctcctcttttcaaatcaaatgtggggccccagccttacacaggtcctggttttaaggaatcccctcctatatctataaaagattctacctaggaaatccaagagattctgttggtttctaatagtactaactagtgaccgaaagtaagaaacacacacacacacacacacacacacatatatatatctgacaataaataactagaaaatgtaactaaacattaaatctcattcacaatagaaccaaaaccataaacttgtggactgccaaagaggaaatttaacaagaggtgtgcaaagaagaaaaccataacaaagatgaaaaacataaaactttgcaaagtacataaactaagttatctacaatgttcctggctggggaaaattagtaacataaagatatcaattatctccaaattaatcaatgtgtatataatcccaatcaaaatctcaatcacatttttttgggacttggtaaccataaagtttatctaaaagagtaaatttgggaaattagtaagttttagggaaaaaatcaaaatttgagaatatggaaacccaagtaaggtgagtagctacgttcctggtaccacaagtagattctagtatagggaaaggagagatcactggacttgagagaagagtccagaaacagcccgcaactaaggggatatttcaaatcagtagggagaatcaggattcttcagctatgagcgtgtcatcatccatgggtatcatgagcaccatccaaaatgtcagatacatcttaggcaaacaaggcctggttccacactcatgaaaattatgatctagttagggagaagcatagtctacaaataggtacactaaaga

SEQ ID NO: 52748 - DNA, 1047 bp, Homo sapiens
ctctctgtggtggcttcattcaaggctccagtgggaccatcttgtcgccagggttccctgacttctaccccaacaacttgaactgcacctggattatcgaaacatctcatggcaagggtgagtgtttcagcccatagcaggcattgggatgtgacgaggtcagggacccaagttcctcaggtcaagttgacctcaatggggatctccctagatagtgacctctgggcttcgtctgaacttttctcaccaacaagaaaacttccagagtcttctcatccctttgaatggtagaacttgttcaataagtattgttgagattctaaaatctccctgctggaagagctcttagaggttaccagctgtccaatctcactcagtacaggaaccttctctaaatcactccctgcaagatggcaacacgccagctcagctcaccctctgcctaaacatgcctgatgtggggaggccaccaacccgttcaacagatgggcacctactatcatttttgcacagatgctttcttctaatagtctattaggtgtctctgaaaatgtttttcttgtattgcatcctggaggagcatcagatacacctgctccctcttcttcacattcacccttcagatactgaacacagcgatccccttcttgcataactcagctcctcccctgatgccatctttcatatgggtcaccagcctgcactgctgcctcagctcccctaacgtgagtgacctttgggagtccaagttcaaagtaaaagtgctggttataaataaatgttaattaatatattaatactcttttctcaacaaatatgtattcggtgccacccatgtggctgacactggggctgggcatcagcagtaaccaggcagatttggcttctagcctcagaagcttattgccaagttcatccagagtcatggttcttgcagtttggcaaatacactaatgcttaggcccaaggctagaggttttgattttctacgttggcggtggaaaccaggcatctatgttttcagaacactttgccagtaattttgat

SEQ ID NO: 52749 - DNA, 1084 bp, Homo sapiens
aagctctaagctaagctgtctatatgaatgattttatttcattctcgtaataggacaatgaattttattttaatatacctatttggtagataaagaaactgaatcatggaaaggttaaaggttaggaaacagctgaagcacagagccagtaagtggcagaactgggatttaaaccccgtctttctagctccaaagcccatgcacttacatagctgggctgtgctgctggatggaacaagatctcagagtagatgaaaggggctgggcttcacctcagtgggatgagcctggaaggacgaggatcactctatctcctgaactaaagcaatagcaggaagatctgagtttttggaaaattactctagcagcaatggagaagtttagaggtggatactggaaggagaaagaccagttaggaggatgaagcagttacctaagtaggaaaaatggggacatccaccaaggctttggaaatgtggaggggaaaacagatgagagagatttaggagatagagtgggacttggtagctgattggatgtgggagctgagggaggaagagaggtcttattcaatattgtatcccaagtgaccaacgtggttccaggcacatagtaggtactcggcctatatttattccatgaacagatgaatgatgacttagtgctttctggcttggtccagtggtagagttaaaaaggaaatacagatggaggaacatgctttgcaggggtcaggagagaaacagtgcatttggaatgtctgtggttcattcaatgtcatttggatatactggatggaaactctgggtaaatctgagtttaagagagaggtttgggtgttatctcagcacgtgggtgagaatagaagcttaaggaatggacaacatttcttggaaagactgaagagaataagaaaattcagaatggatctgagaataccgtcgtgacaggagaaagagcaaaatccagtgaaagaacagagaaggagcaatctgagaggcgggaggagaatcgtgatgcaaacacaggaagagtttccaactagggcatgtctgatcatggcaacgatgacaaatgtcttgct

SEQ ID NO: 52750 - DNA, 1554 bp, Homo sapiens
atgcggattaaattatctggtatgtgtatagcacatagaatagtgtaataccatgtgattggtaaatgttagttgatcctaatatcctttaacatacctatagcatagggggtatcattacttgttttatagataagggaattgtccaaggttatggaattaggtagtggaagaacaaggacttgaatgcaggcctgtgtgtctccagagtctaccattcaaggctgtcttctactgggggataaaggtctgtgcattcattggctacttgatgaacttagcccctctgggcagaggggttccaatgcctggctaagcccccatccctgctgtgccatcggccatggctagtatcttctacctgcaacctggagccagcagaccctgcagcccctcctgcaagccttacacacacacacgagaaggatgctgcctttctcacctcctccagatgcttgcacctactgtgccacattgcaatcaggggctgcatgtccgtgccttggtcccagaacagaggaggaaaggagccctggagtccatgctgacagaggtctgtttaccttcatgcccagtgccctgagttacgctccaggtgtcccatttggagaagagaagctagtcaggagccctgtctgagagactgtggcagcttggggttgaagccaggagagcagacttggaaggactttaagctattagcaaatacagcacagacagaggccagaagttctgagaggaactgggattagggaacagtctgagtcatggcctggcagggaagcatgaaggcagccagctctggggagggcactgagaacaagcaggcccaggctggatgcctggctctacctactcgctctgtcacaagatttcatgcttctctgagcctcagtttcttcagctgtaaaatgggcatggcaaggatacatcccttctaggggcaatgtgaggactccttgctatgccaaggatgttacgtgttagcttcccttcccttcccctgcctacccaaggagggaggatttcctgcagaaggcaagctttcagcagcgctggagaggtacagaaagacatggattgagagagtagaggtaggagggtgttgctgcaagggcctgagccttgtatccccagaagccggagctgagtggaaagcttcaaggtgaagggattattgggcataaatatgtaaagaggaaaggaactggctgctgtcattctagtaatcctggctgctgccagctctgcggcaggcattgggctggactggggtggtgccaaggtgaatgaggtgccacctctgccctcaaggagctccctgggttggggcagtcagacttattaatggagcatctccatccagggtgctaactgatgctcaggggttggacaagggaaacagctcagagcagagagtgactgctccttccaccagaacatgagtcgctgtgccctggcagcctgcgagtggactgaggccccatgcattcctctaagggtggggcgatcaaagagattccaggcctccgctctatagactggaggcttgaa

SEQ ID NO: 52751 - DNA, 1063 bp, Homo sapiens
acctgggttgattcccctaccctctcccaacattagattttatcaggctttttcatttctgccaatctgattgtcaaataatgctatctcattgttttgatttgcattttcctgattagcaacacggtgcctcttttcatatacttatcctccatttgtgtttgtgatttttttttcaagtggattacctgttcatatctcctgcccattttttttctgttgggtatttgctttttttttattgacttggaccacttaatatattcttggtatcactgtgttgtccattatatatgttatggctgtcttttcctactctgtaatttgtattttaagtttgttttgaggcctattttattgagtcagagacagatagcttaaatgacttgcccaaggtccctctgcctagagctgttttctgactccccgtggtgtttcaccagatccagtattcctctgcagaacagcaagaccgtgtcttcctttggctccctttcagggggattttttaattgcatgcactcctggagtaagctgactttgatcctgttgcaaagctggctgaggcagggaaacctatgactatggctgttgctgggttctactccacctgttccatttctcttctcaatttcgatggaagaatttccaagattttctagcccacactttcaagttcatgtaggatgtacagcggtaaactaaaaggtttcagtgttctctggaaccctaaagattcaaggactgtgtatcaggagccacctggaatcaggttgccagatgttccaattggaagtacaggacacagccatgggaggtggctgatgcctgtaatcccagcactttgggaggctgaggcaggaggattgcttgaggccaggagttccatgccagctgggaaaacatagcaagaccctgtctctacaaaaaatgaaaaatatcaaccagacatggtggggagtgcctgtagtcctagctacttgggaggatcgcttaagcccaggagttctaggctgcagtgatctaagattatgcctctgtactccagtctgggcaacagaca

SEQ ID NO: 52752 - DNA, 1096 bp, Homo sapiens
aagacgctgctaataaactgcatcccgtatattggagggtttatagggtgctggtgatgactgcaccagttaagcacagctaagcatctcttaatttagacatttgggctcaagttatgggaaacactacaactcgttccctcaattattggaaatacacattctgtcatcagcctaaggtgcaatgtagttttagtcatttggagctagttgcagatttcactcaactggcgtcagacacctgttttggaagttgtaaaaatccacaaatttgccagatttactgtcttcttatgaatatgtatcacagcagaggcccccaaaggacctgttttttggattccttaaaaggtgtgccttgcacatcaatagggacgtccttgaagggtctgctctccagaatgcctctgggaatgtgctcttgtgggcagaaggaggctgggaggacccatggggatgagggaaaagtctttgttcaggattgaaacagagaggggacactggaaaggagaacaaaggaatgaggacactgaacggctattatgttccagccaccatgctggacacttgtgttcatgctctcatggtaatttattctacatttattgaatgcctaacaggaatgccaggtatcagagacacaacagttaacaagacagcttctgccttcaaggaacttaacgatatctttagggagacagttaaataatcagggtataagtgctatgactggggaacctgacctcgccttgggggagatctttgtggatgctcatctggaggcttgggatgaaccccctccatctgccccttgcttagttgtcccttactcattcctcaagtaactcagttgtcccttccttgcccaggacaccctttcctcacaacctggtcaaaccctcctgtgatacctgctcagattaccatgcattcaccctttgtggttttacacacgcgtgtgtgtgtgtgtgtgtgtcttcttcatttatgcccatctaccccacaaggctgtaaactccttgatgacaagaactctttctcttttacttttcattgtagctctccagggcctaacagagagtctggcttatagcag

SEQ ID NO: 52753 - DNA, 1077 bp, Homo sapiens
ctcttgggagaatttcatgaggcaaagcacttaaagcagggccttcacctagcaagtgcccaggacatatatgacagggtgtcttgcccgagttgccattgagatgggattaggaaggcatttggggatcaggctatcctccctctagtgggcctctctgtcccctggtaagatgcccttcacctctcaaagaactttcaggatgactggccccagccctgatttgcatgggtgtaggaatttcatgagaaagaacttgaatcctgagcacagatggggtatggaaataggtggacctgtgtaataggtgggaggaggctctatgaaaattaaaactctgggggagataaagtaacaccagagaggaaataggtagacctttataatgggtgggaggaggttctatgaaaattaaaacactgagggagataaattagcaccagagaggaaattcacccactttgcatgaggaagaggattagtggagtgggctggacagggagggccctgctgcttgagggtaagaaaagacagaggttctggatacagcaggaggctactcttggacgcagcccatcccattttgtcccctgcagatcccggacctcggtgcctggaggagagggtagcttggtaaagatgaaaaaggtgccccaaaggctcagctgtgggtctcccttctcctgcacggtttctcagccttgggcattttgggctggacactgttctggagcactgtcctgtgcatcatgggaagtttagcagcctcttcagaatccacccaccagctgccagtagcggccccctactctgagttgtgataattaaaaatgtctccagacgttgccagatatccccgggaacaaaatcgcccccaaatttagaaccgttgttctgctagactggaagaggatattttcctaccagctggaaagagagatgaaaagtggaagtcaggaggtagaaaaaaaaaaaaaaaccagaaaaattccttccagctgcctgagagtgttaactaaccctattgtatatccaagatcaaggcgtgcctgtgttcacctatggctctcagcagac

SEQ ID NO: 52754 - DNA, 1036 bp, Homo sapiens
cctgcctcagcctcccaaagtgctgggattacaggcgtgagccactgcgcccagcctatcatgggctcttttaaattcctccctatttacacatatccttccatgtattgtaactgatacatgtaagcacatgtgcacacacacacgcttctacacacaacatgtgttcacatacacagtttcacaagacaggtacactgctttaccactcacaaacacaacatcaggtggaagggacacccagacctttacacagattcttccagaagggcactgataccctagtggagggagggggtggcagcgggacccatggagcctccatccaggatgggagggtgggcatgcagccacgtactaaagagctgtatgcatgagaaccgtgtgtgcaaaatgtatatgtgtgtgtgtgtgggggggggtacacatgtatgtagtggacgtggacgtctgtttctgtagctgttgatgtgtgtgtgcacaggtgtgaattctgcatgccaggacttgggcagttgtgagcatcttgcttagcctgggttccagctcccagctctccagccccaagggtgggtcaggctttgaccttgaacctcccccatccctagtcactgtccttctgagctggcagagtttagggacgacgcccctcctgactacacttcaggctctgtgtggagtggctttcctgggaacaaaagccggtctactcactccccgatgacccaggatatgagtctgcacttgacaaccatgcctggtaacagccagggctcaacaaggccgacagctgcacagagcctgccaggctgtgtgggtccttcagggaggcgggggcctggtgctctgtgctcagcaagacaggtctatgcctctgcctgaacttcaggcttctttgaacacccaggtcttctcttttggtggagctgccaccacttcgacaacgtgctggcttggagccctcactgtctgtctgtgctttctcagggaggaggaaggttaggagacacaccctcagacccgagcgcagcatccc

SEQ ID NO: 52755 - DNA, 1037 bp, Homo sapiens
catcagagaaagacattgtgcctaccctagagctagcacagtggctccactcacagaaaggaaagccgaggatggagtaggggtttacctccatggccccctctgctgggcgagtctctctcctagagactctcttactttccacctgtttgtgtttgtattgttggaaaattttaaactgaatttgtctttcaagggatgtcagtcccacccttgaaaaatcattattataaggaacttttatgatgctaaaaataatgtatgtatagttaaattactgagagcaccaaattactctgagaaatttacttgagaatctcctgtgccatctagaacagaaaataagggcttatattgcaacacaaatagccttcctacctgctaatgtctaatttataccaattaagtgcaattataatccataaacctcaaaaaattatgtgtccatcttcaaggttttcaaatagaaaacagaataagttctattattaagtaggtacatctatttattgattgaaagtaagtgagtgtgacggatgtaactgtaaagggaaaaagcagagactttgaaatttgagatacaagtatattatgagagaatgtgcagacattttgtgcagaatgattgatggccctttctgagatgagcaagtgtggtagagtcgactcaggcctcgggaggtttgtcttcaggttgctgcctgaccccaaccctttccctaccccagcctcaatctgtctacctaccaaccttcattgcttcctccattgccatttcaggaatggagagagttcagtgattgggtgggacttggtgatggtgtgtggacttggcagtaagaaagagatgacagtttaatggtttattttcaattaatgctaaaatgttcctagcacgaaaacagacatctcaatgttggcatcccctcctgccagggacctatgtggccctatcctcctggccttatcatatgtgcattcctagaagggctgactcatagcagatcctcagccaggagaaaggccttgtttggcct

SEQ ID NO: 52756 - DNA, 1929 bp, Homo sapiens
gaaaggagagaaccatctcaaggctcagcccccctgaggaggagggccagggttgaaacagagggagcaggcagaatgtcccagctccaccagtcttcactctgcagaacctcaagaccagagcctcaggcccggggaggaatgagtggctccctggacctgcccttatccactggtattggtaagagctgggttctggacttaattacctatgctcaaatcccagccctgcacctaatagttgtgtaaccttgtatataatgccactaaacctcagctccctccctctacaaaatggggacagtagtagaacccagctcctctagtgatggtaaggatgaaatgtgatgacatatttctacaaagtgctcagagcaagtctgtgataaatgtaggaaatgattgttcttgtttccctgcagtagcagctgacgcgtgggtccaccatgaactggagtatctttgagggactcctgagtggggtcaacaagtactccacagcctttgggcgcatctggctgtctctggtcttcatcttccgcgtgctggtgtacctggtgacggccgagcgtgtgtggagtgatgaccacaaggacttcgactgcaatactcgccagcccggctgctccaacgtctgctttgatgagttcttccctgtgtcccatgtgcgcctctgggccctgcagcttatcctggtgacatgcccctcactgctcgtggtcatgcacgtggcctaccgggaggttcaggagaagaggcaccgagaagcccatggggagaacagtgggcgcctctacctgaaccccggcaagaagcggggtgggctctggtggacatatgtctgcagcctagtgttcaaggcgagcgtggacatcgcctttctctatgtgttccactcattctaccccaaatatatcctccctcctgtggtcaagtgccacgcagatccatgtcccaatatagtggactgcttcatctccaagccctcagagaagaacattttcaccctcttcatggtggccacagctgccatctgcatcctgctcaacctcgtggagctcatctacctggtgagcaagagatgccacgagtgcctggcagcaaggaaagctcaagccatgtgcacaggtcatcacccccacggtaccacctcttcctgcaaacaagacgacctcctttcgggtgacctcatctttctgggctcagacagtcatcctcctctcttaccagaccgcccccgagaccatgtgaagaaaaccatcttgtgaggggctgcctggactggtctggcaggttgggcctggatggggaggctctagcatctctcataggtgcaacctgagagtgggggagctaagccatgaggtaggggcaggcaagagagaggattcagacgctctgggagccagttcctagtcctcaactccagccacctgccccagctcgacggcactgggccagttccccctctgctctgcagctcggtttccttttctagaatggaaatagtgagggccaatgcccagggttggagggaggagggcgttcatagaagaacacacatgcgggcaccttcatcgtgtgtggcccactgtcagaacttaataaaagtcaactcatttgctggttccaggtgccctctggttgtgcggccttcgtgaccctcacacgttcatggtgtcaatctctctgcccccgtgaagagctgcacttgatccagcctgtgaggggcatcctctcttccagaaagggggcccccagtactccaggggacgtgctacttgctcatgctcccatctagcctttatcccccatggcaagtttagtcctgtgggttgtctgcagagagaatggagcttagtccatgttgcagtgggaagttcatgaacttagaatgcctgtgtcgaatccaagttccaccgggactct

SEQ ID NO: 52757 - DNA, 1045 bp, Homo sapiens
tgggaaggggacagggtcaatcccactggtgctgtcctaggcctaggcataatgatatcaggctcctgaaccccacacagcagtctcacccacatacctgcctgcctgggagccaggctcagccatacccagccaggctagagaggaggcgtgggccaggagagaagagccgcaggtgtttgctctgagtatgtgcccggggaagtccgccctcctgcctgcccacccaatcactctcgcttggctcattggcccagaaagccccacccagcaagggagagaggaacaaaagctgcctccgggaggtcctgaggcaaacagacaagcccaaggacaaggaagcagctactggacccaagaagggtgaggaccgaatagggcaggaggctggccaggaagcaagcaaccagctgagctgaggatatccaagggacctcaggctgtgggctgggcttcagggagggagccagagggtcagtgtccctagaggatccccagggaagtgccaaggaggagaaggaatgtcctggctgacctaagggacgacagaagattggggaagagggggtatcaggaagaaatgggtttcagttcagtttaacaaacatctattgtgtgttcactgggccaggccagtgctaggtgctagggagacagaggtgaagagcctgccctctagcagctgacagcctggcaaaaaaataagacaggtaaatagaccatttgggtacaggcgatgcctcttgctctgaaagtgtcccaggcacacgatgtctgaagaggctgagagcagagtcagggattggggatggggaaggaggagggtaggaggaggggagggttggacatggggcctgatggggactccagacaagggggtgtggaggtcagagtccacaggagaggggcctgagaggaaataatggaaatgcggctagcaaacagccactaaatggacagaggagggggtgcccccagagaaagtaaatggggggtccagaccatgccagaatccatcctcagtccttcctaaagctggaatggt

SEQ ID NO: 52758 - DNA, 1017 bp, Homo sapiens
cacgtgaccaggatgagctgtagggcccagaggcgcacgtgggacacggggaagaactcgtcatagcagacgttggggcagccgggctgcttggtgttgcagacaaagtccttctgctcatcgtcccacacctcctccgctgccaccacgtacaccagcacacgaaagatgaacaccacagacagccagatgcggctcagcactgtggagtacttgttcacgccactcagcaggccctgcagaaatgcccagttcatgctggctgtgtcctgggtgctgcacgtggaaggtctatacctgggtgctacctgcccactcaggccttgggagccttgaggcctgggggaacctggagatgggcacccttaatgctggtgcgattgacaaaatcttttcacaatcaccgtgtcatcatgtcttcactcccaatgacttggtagggtagggattgcccctgtcctcatttcacaaagagtaagtgaaggcccagagatacctgcccaatggtccacagatggaagtagcagagctaatcttgcactttggtcttcaggttccaaaatcagggtctaccttattctacaaggtaatagatacatgtgaagacaatcatcctgcatggatatgccagccaacctctattaccccaagtttcagcccatgtcttctaaagagaccgtaggaaggcttgaattggacgatctgctctcccatcagctgccagggctgggccagggcaggaggggtgggaacgtatccttatcagttgtcagatccatcccacttttactgaacaccaacaagagcctggccccgtgttggggacgttcacatcagccccttggtaaatcccagaacaatctgcatccttactccttgcctctggctccaggaaggttctcagccctggcattccctcccaaactaaacagaggtgctttggaatcacggggacttgatatcatccctgccaacccgtgtactggtgctggggcctgagggctgactgtcttgacc

SEQ ID NO: 52759 - DNA, 1050 bp, Homo sapiens
accctcttgtttcctattcttctcacagccacgttcaccagccagttgttcacacctgtttccatgtgcccagccctcactgtcccttcactgccctgggacctggtttctacatcccatactcctgcacaggtacacatgaccatcttgtgaatcgaacgaacacttttcagtccttatttgatttggcccatgtcagcgtttggctctgatgatcactttctccttctagaaacacttctcttggcttctgcgacaccatcttcctcctctacgatgtcatacccccatggcttgtatgatctctacttaccctgcccggagctgtctttcccccatgttatttgacctttaagtctccagcctagggtatcttctcatctctcccccagtctctgtatggtcttacccactcccaaggctcaagcccccaactaccatagaggcccagattatgtctccagataaaaggtaaccccccatattcccattgaggagagcctcaaaaatgtgtgggggctgacctggatatataaacttttagtgtggttgaaataaaatgtactgtattaacttagtttgttatacattttaaaaatcacattgtatacaacaatgtagtaagaagtattagtttttctctcctcatgctttatgaagtaattttatttaaatttttaacatttttctctaacatctgagtctacatcattagagctttggttgttatcaacattttacaaaacacaaaaactttatttctgcccaagttatttgtgacatagtgctttttgaatctgtttatgatgctggagattttattctttgccataaaagtctggctgcttaacattaggttgcataaataaaaaaaatcttccagtaggtatttgtcatctccataacataaccacttcctttattgttttaaagtgattttttaaaatgggcttgcttacaaagacaatccttgcaattgtaaagtcctgcccttgggaataatgattcaatatacgtgaaatgcctttgccttcactttttttttttttt

SEQ ID NO: 52760 - DNA, 1048 bp, Homo sapiens
acttctttcctggcacaggactcactgtgccccttcccgctgtgggtacaaggtctgccccccaccccagctctccaaagcccaccggcctccctggaggccgaggtcgacggcccgtcgcaccgggagggggggctcccaggggtgccccacgcacggtcaaggtcccgcgccaagcggggaccgggctgggccggaagcgggcacggtactcgcggcaaactagcgtgggcgagtcctgattgcagtcggacctgccgccgcggcacttaacagtttgcagagtgcttcccgcccctgatctcattggagccttcggacagcccagcccatggccaccgatgcccccatttcacgcctgaggaagcggaggctcagacgggccaccagcccctccggaggctggcccgggagcgcctggcagcgtcgggtctaggagccggctccctcctgctccctcctccgcgccgcccggggtgtgcccgccgtctgtgtgcaccactgctgagcccagctccggcgccctcgcctctgctgtgggccccggggacgcggggtcaggccaccgcgttggccaggccgctgcaggtaagtgctggacggggcggggcgaggctgggcgggaccctcaggggcgccaagcgctcctggcgaccccctgcggcagggctggggcttgagcctgccagtgcgctgggatggggcgcgaagcgggggtgcggggagcccgccaccccgtacctctcaatcctccctctcgcctctcaattctgggcccattaggggtcccggctgcgggaaggttccgagacaccccctccccaagtccgcaagctcccaagctgcctaggatggagggaaactgggaaggaaagggagctttatccttcagggacattgtggggcgggaggtagggctgggcacagtacagtctgggggtcagggaaaaaacggttgcgctgggagctggctttggagggcagctgggggaaccagaaccggctccaccagtccccagcctagacttgggaaggaaattctttgcca

SEQ ID NO: 52761 - DNA, 2533 bp, Homo sapiens
cttgttttaagtgagtgacttgacctctctaaatttcacagtaatgagtagccagcatttatggggcacttactatgtactacttgctttgcaatcgttcaatgatcagtttcatctgtaagtgaggagcactgtaataactaccttatggggtcattctaagagattaaatgaggttctgctcataaagtgtttaacttcatgcctgactctgagtaaacactcaataaatggtgattgttattatcagccaaagcatatttgcttccttccagcatactagctctgttgcctttggttaagttatataaccttgctgtgcctcagtttcctatctgcagcttgggaggaataacagttctgaactcagagggtcgttgtgagtattgaacaagtcagaactcagaacactgcctggtacatagtaaatgctcaataaagtcacctattcattcatacgatggtttttcctctaattctctcaggtaggcacggcccccaccaggcgccatggactggaagacactccaggccctactgagcggtgtgaacaagtactccacagcgttcgggcgcatctggctgtccgtggtgttcgtcttccgggtgctggtatacgtggtggctgcagagcgcgtgtggggggatgagcagaaggactttgactgcaacaccaagcagcccggctgcaccaacgtctgctacgacaactacttccccatctccaacatccgcctctgggccctgcagctcatcttcgtcacatgcccctcgctgctggtcatcctgcacgtggcctaccgtgaggagcgggagcgccggcaccgccagaaacacggggaccagtgcgccaagctgtacgacaacgcaggcaagaagcacggaggcctgtggtggacctacctgttcagcctcatcttcaagctcatcattgagttcctcttcctctacctgctgcacactctctggcatggcttcaatatgccgcgcctggtgcagtgtgccaacgtggccccctgccccaacatcgtggactgctacattgcccgacctaccgagaagaaaatcttcacctacttcatggtgggcgcctccgccgtctgcatcgtactcaccatctgtgagctctgctacctcatctgccacagggtcctgcgaggcctgcacaaggacaagcctcgagggggttgcagcccctcgtcctccgccagccgagcttccacctgccgctgccaccacaagctggtggaggctggggaggtggatccagacccaggcaataacaagctgcaggcttcagcacccaacctgacccccatctgaccacagggcaggggtggggcaacatgcgggctgccaatgggacatgcagggcggtgtggcaggtggagaggtcctacaggggctgagtgaccccactctgagttcactaagttatgcaactttcgttttggcagatattttttgacactgggaactgggctgtctagccgggtataggtaacccacaggcccagtgccagccctcaaaggacatagactttgaaacaagcgaattaactatctacgctgcctgcaaggggccacttagggcactgctagcagggcttcaaccaggaagggatcaacccaggaagggatgatcaggagaggcttccctgaggacataatgtgtaagagaggtgagaagtgctcccaagcagacacaacagcagcacagaggtctggaggccacacaaaaagtgatgctcgccctgggctagcctcagcagacctaaggcatctctactccctccagaggagccgcccagattcctgcagtggagaggaggtcttccagcagcagcaggtctggagggctgagaatgaacctgactagaggttctggagatacccagaggtcccccaggtcatcacttggctcagtggaagccctctttccccaaatcctactccctcagcctcaggcagtggtgctcccatcttcctccccacaactgtgctcaggctggtgccagcctttcagaccctgctcccagggacttgggtggatgcgctgatagaacatcctcaagacagtttccttgaaatcaataaatactgtgttttatacaggttggctctgtctctggttctcccacactcccacccactgacagaaccctgaaggtagggaaaggtaagccctcagaaagggaaagagttccatggctcggggtggagctagggtgggggctgtggctgtggctgcagctggggcttgagctggagctcggttaggctggggctgatgttgacagccgggagctgggtttgtaccagaggaggaggctggggtggaacctactgatacatatgttgggattctagctgtggccacaagagtgcgctgtgctccctctgcaacggtgcttccagccttcgtaattagacttcaccctgagtacacacacaatcactgccactctcactatagacaaaccacactccctcctctgtcacccagtcactgccatctcaacacacatcccca

SEQ ID NO: 52762 - DNA, 1038 bp, Homo sapiens
ttatacaaaattctaagcatgctatcatacccgtggggttaatttgacccagtggctgccaatttgtgacctctcaaactgcctcctccttctgatgacacctataattatggttttttttttttttttttttttggcgatctaacaacttgttacaaatattagatcccagaattggtttccctcaaaacacttttgggcatcctgtacaaaggcagcttaataacctaagaaaaatgtgaggatggaaagcctacagaaataatagcaaacacatttcccatggacatttttggattttcagatcttttaaaatatccctgtcaccacccgttggcctccacttggtgtctggtcgagagagccctatctttgggaatccaggtggctcccttcttccagtctcactttgattgtgcccccttttaaattcttttctttcctttccaagggcactttgtcactgaattcttcctctagcaagtctattagtgttctcagctagatctttctttcccacaggctggctgaaatcagccgttgcggtggctgtaagatagtatatgtgctcttgcctctgctcgggtgacattagatagcaaggtttatgtggacgtgggtatagacaggtcagggttgctgggatgaaccaaggtgcagaccggttttcttccatgcttgctgattcaccttggaggcatgtgaccctctttttgactggccttccagtcacagttcactgaaacacatgagtgagtggatgtgcttggggctttttgctccccgcttacccccgtctcttcccagcccaatgatggtggtggctttagtatagggtcctctccgagcacggcaggaatcacttctctccctgcagcggttcagtgtctggtgcttttccactctttctagactctttcctgtgcctgttgctgtgttagcacaagtcggctgggcagctgccagaacaagcctgccagggagccttttgactctggtcagctccccagggctccaggctggtgggactgccgctga

SEQ ID NO: 52763 - DNA, 1020 bp, Homo sapiens
ttccttcttccctaacaatggaatcttttgaaatttcctagattatttcagggatccacctctcgcattgctctgcacgggggtgggtgctcagtaaattgtgccaggctggccaggtgtggtggctcacgcctgtaattccagcactttgggaggctgaggtgggtgaatcacgaggtcaggagttcaagaccagcctgaccaacatggtgaaaccctgtctctactaaaaaaatacagaaattagctgtaatcccagctacttgggaggctgaggcagataattgcttgaacctgggaggtggagggtgcggtgagctgagatcgtgccactgcactccagcctgggcgacagagcaagactccgtctcaaaaaaaaaaaaaaattgtgccaggctgcctggtaagtggagagctctagtgggttgctcttatttggtgggagatgatgctgggttctctaatgctgccttgtgcttttccgcagatgtcatgtggcctgtgttttggaccgtggttcgtacctatgctccttatgtcacattccctgttgccttcgtggtcggggctgtgggttaccacctggaatggttcatcaggggaaaggacccccagcccgtggaggaggaaaagagcatctcagagcgccgggaggatcgcaagctggatgagcttctaggcaaggaccacacgcaggtggtgagccttaaggacaagctagaatttgccccgaaagctgtgctgaacagaaaccgcccagagaagaattaatggaggacacagggccctatggtcctactgtgggtggtgacttgtcctgctaccatgttgacagagccccagaacccacatctaattggctttgttgcttattctggcccttcccacaccacacagccacacaaatactggctgctccttgatggccaggcagacccagcagcagccgaggggccagtgaagaggaaggccgcatctgttgtgtggtggccacaagcactcaggcatctgagtttactg

SEQ ID NO: 52764 - DNA, 1093 bp, Homo sapiens
gttaaaaaaaaaaaaaaaagcggccaggcgcagtggctcacgcctgtaatcccagcactttgggaggccgatgcgggcagatcacctgaggtcgggagttcgagaccagcttccccaacatggagaaaccccttctctattaaaaatacaaaattagccgggcgtggtggtgcatgcctgtgatcccagctactcaggaggctgaggcaggggaatcacttgaacctgggaggcggaggttgcggtgagccgagatcacgccattgcactccagcccaggcaacaagagtgaaattgaacaacaacaacaaaaaaggtgggaaggtagatgaaaaagcatcaataaggcactgaggtgtgaaacagtgtggtctgccgggtttagtatgtgcgagcaaaataaatatgcaggctgagattagtgggatgagggtgggaagggccttgtgggagcattaacaagcttgagctttgggacttttctgtatatgataaaattgatgtctgtatagggtacagtggggacacagaggaggaagtgaatacttgtacccaagaggtcatgtaagacttaggttttactatatttgaattatttttacactaacaatagccacatttatttccctgctggctgtgtgcctgccacagtactttacaaatattatctcttccaaccctcacaccatccttgcgaaatgggtgttattacctctacacagaaggggaagggaggctcagacaggttaataatgttcccaaggtcactagaaagctagcccggatcccaagaggtcttaaagcactaaaatatactcttctaagaagagcttcttgaggtcagggatcatgtcttttgtttttgcgtgcccagacctaggtcttagaagacgcctaataaacatcagttgaaaaaaatgactggatgatctttcactttttccacgcagaaaacacgtggcgacatcactgagaaacctcccggccaacagagggcgcgacgtccatttcagcgcagtggggcccagttgcggacgcctagcttccttccgtcctttggctgaagttcagccaatccctgcgctccgagaga

SEQ ID NO: 52765 - DNA, 1035 bp, Homo sapiens
ggataatccaggagagtctcctcttcttagtatccttaacttaatcgcatctgcaaattcctttttgccgtggaaggtaacatattcctgggttctggggatgaggatgtggattcctttggtggctattattctgcctacaccacaggttctttcctcttgggatacagcaagcaagaagcacccaaaacaaaatatccctctttaacagtacattctcttctgtcttcctcccttctcagccaggctttctgagggttgccttgactagttttctccacctcctgacaacctgctgcagtctgcatctgcccccacattccaccaaacccactcttgcttggatcacccgtggcttccagattgcaaaatccgtgggcacctttcattcttaaccggctgcgttttccatgttagctgcccattccttcatgagacctttctgtcccctctctgcttttatgtcactttctggtggttttctcccccttcctttctggcttagtctcctctatgagctgcaccgtctccacccacccctgaaatgtccgtgttctcccggggtttggatcttggatccgttgttcttttcttgggtgagcttgtcccacactgctggttttaaatgccacttgcacagggataagcgcctcctgcttgtgctgtacacatctctggctgctggccaggagcgttggtgaggactgtgcttctggtcatcccatcagctcctcgacttccttggtctcctttgaggcagacatgtgagagagctcactgaggcagtggcttgagaagcatgcagcctggggcacttggtccttctgttcccggcagtatggctgtttccatcgcgatggaatgggatcctctcaagacatctcagaggacaggcggaaggcagcgaacatggcagtgccgaaggacacagctgtgtttagcaggggcgacaggaaagcacgcaggtgtggcagatcatcaggcacgtatttattggagcaaccccctcctttacctttgtggtttgcaacagct

SEQ ID NO: 52766 - DNA, 1035 bp, Homo sapiens
aaacacaatcatcggaatgtagcactgagaacccggctagggcattgtagttattaattattatgattgctgttgatcatttccatctgttctcccacagcgctttgaacaaaactcttttatactccatatcacattgtatcatggctggttatttgcataagtgtctcctcactaaatagggcagttcatcacactggttggttggttggttggttggttggttggttggttggaaggaaggatggtagagaccactaactgtcttccaagatccactctccatttcccccttagtaacagaaccccaccattttatgctggacacatggctactttgaataaagattctttcccaatctccctaccaactaaatgtagccatgtgcctaagttctagcccatgagataaaagtagaagtggcatgtgcaacttccagaaagtgtccttaaaaggagggggtatgcccttccttgtctcttcctccttcccgatcaccagaatgcagacatgatggctggacctcaagcagccattctggaacatgagaccaaagggaagtgctaagtggggtgggggatgaggaaaagatagaaggctccaggtcctgacactgtggggcatctaccagacctcaactaactctccctggatttcctctaagtaagagagaaataaacttctatcatatttaaatcactgttgtttggggggttttctataactcacagtcaaacccactcctaactataacagatgaatttttagaatagtgaagttaagggcttatgtcgctatttagttttggatttggcagtatttgctgtggtctccaccaacagctgtcagcacaggataaaaactggcttcagctgtgaattgtcattaatgcgtaacaatgcattcacaatattttctcccaagcctttaaatgtggctgcagaagcctcctccctttgagtgctccaaggtgacaatgattacattcctgatgataatgcaagttgttatcatggttacttcagggagagttt

SEQ ID NO: 52767 - DNA, 1080 bp, Homo sapiens
gtagtgggattttattgcatattatgtaggaatatgaaagaaaaaggaggagataagagagaagaagggaccttatttagattaacaggtgacatttaagctgagacttgaggattgactaagaactctcaggtgatgattggaggaaaagcattcaggggagagggaatagcatatgtggaggtgttggggcaggaaagagtttgacatgcatcgggaactgaaagaaggtccatgtggctggtgtggagtggggcaggggagtgggaagggagttaattggagaacaggcaggggcaggttatgcagagcatggacatgataaggaattggaatctaattatgagtaatgagtagccatgtaaaggttaaagaaggagtgcaacatgatctaacttatgttcatgaaagatcacaagctgctgagtggagaatgaatttgaagaaagcaatagtggaaacgagaaggctagttaggaggatttttcatgatccagaagaaaggtgattgtgttttgcaatgtggtggctattgtgattgggatgtttttcttctattgcattttacaactaggcactgctagtgtgtggtagcactgttaggtttatttatttttattttaattttattttttttgagatggcattttgctcttgtcgtccaggctggagtgcagtggcatgatctcggctcactgcaacctctgcctcccgggttcacgccattctcctgcttcagcctctcaagtacctgggattacaggcacccgccaccacgcctggctagttttttgtgttttcagtagagatggggtgttgccatgttagccaggctggtctcaagctcctgacctcaggtgatcagcccgcctcggcctcccaaagtgctgggattacaggcgtgagctaccacacccggcctctactgttaggttttgtatgttttgtatgttgattttgtattcagtaacgttgctgctgaattaggtctctcttattagtctcataggttatctgaaaatcatgatgggcttcctatatagtcagttatttttctgtgaatgaagatatttcttttaa

SEQ ID NO: 52768 - DNA, 1002 bp, Homo sapiens
gtgcagggataataggagcattcacagtacaatgttacagttttataactgtaggatagtaaagatcaacatgggtgtaatatttctctgagagtctctgagtccgtgtttcccttgtgtcctggtctcctgttggaaccccagaagctcctcttggccagctgagctggcgggtgtatgaccccagggagttgttcaccttcttttgtctgccttggatagaattggttgtgagtattgcctgtgggtgggatttcaagagctgcagaaccccagggaaagaggcacttctcattctgagtggtattgtcactgcgatttaagagcctcttgttgctaataatagtagctatagtttattgagcatctactgtgtgccagatattatgcctagtgctttatacacagaagagggctagagatacagaaatatacaacagagtgagattcctttcatccctggtgtctggactcgagaccagtgtgctttctgctagggttagattagctcccctgtgctccaagagggacactctgggctgcatttgttctaattggggagtgtcttgagcctagcccagaaatagcaggagttagttcagttcctgtgttttaggaaatacgctggcaactgttgtctttggtgccccagaaatacagagacagaaagactgagaggtagatgacagagcatcatggtgaaagccacaactgtcacacaagtgtggcttgtgtcagtcaaatatgagagaacttaacttctgcggggtcttggattgattttccatggcctgggatttccatacacttgtaatgaagctcctttagaaaaagcttcaaaaagttcagacaatccttcttttcaattagtaggcccacattggaaccaacgaatctaaatctccagcaaatttggctctgagcttctaagcagccaaagcaagagaggtgttttgttaaccttgggttcagatccttggggtggggcctgagttaatgtag

SEQ ID NO: 52769 - DNA, 1003 bp, Homo sapiens
caaggctgcagcatctcaaggcttcactgggtgaagatctgcttccatgctcactcacatggctgttggcaggctacagatccttgctggctactaaccagggacatcaatttcttctatgtgagactcactacagggctactcacagcatagcagcttgcctcccccagagcaaaggctttgagagaaagagaataagaaaaggtgtctaagatggaagccacagtctgtttgtaacctaatctcagaagtgatatcccattgtatctgccatattctattcattagaagtgggccaataagtctggtccacactcatgagaaagggattacacaagggtgtgagttccaggagatggagatcattaggagctatttcagaggctgtctcccacataatacactcaccttcaatggaaatttatctgtgagaagcatgagcagcttgggttaggagtgagttccccaggaaatattttgcagttgcttctgttggaatatgcctggtttggaactattttatgctaatttttaattttaggggtgtggcccatgaaggttcatgcagatacactgtaccgtggctgtgtgaggaccagcttgtaggtacagattcttaggggatttgcctcttttcccttcccgccatccctgtacttcagaccagcttccttgtcatcagcctgtggtgatgactaatttttttattctagtctacattttcatcaaaggtttcacttttcctaactttatgcaggttctcctttccaattccacgcttcatgtgggcccaaagccttcctcctatgcccaagtgggtgttaaaacctaagcctttaccaaaacgctgagaccaacagcccctgcccccacctcccgcctccactgggctgtttgcagcattggctcacacagttaatattctgattttccagtctcctctttgcttttgtcccctggggacttatctcgctttcttgtgagctcagctatgcatataaag

SEQ ID NO: 52770 - DNA, 1049 bp, Homo sapiens
cctggatctcctgggttcttccaaggagcctcagggacctcactttccattccaggggctatcttcaccttggcagctctgaaagagtcactaagcacctgtatcccagccattgtctgcctggggttcctgctgctgctgaatgtcggccagctcttagcccagactaagaaggtggtcagacccactaggaagaagactctaagtacattcaaggaatcctggaagtagagcatctctgtctctttatgccatgcagctgtcacagcaggaacatggtagaacacagagtctatcatcttgttaccagtataatatccagggtcagccagtgttgaaagagacattttgtctacctggcactgctttctctttttagctttactactcttttgtgaggagtacatgttatgcatattaacattcctcatgtcatatgaaaatacaaaataagcagaaaagaaatttaaatcaaccaaaattctgatgccccaaataaccacttttaatgccttggtgtaagtatacctctgaacttttttctgtgcctttaaacagatatatattttttttaaatgaaaataaaaccatatatcctattttatttcctccttttaaaaccttataaactataacactgtttcatgtctcttttgcctcattgctgttaatggctgcatagtattccattgcaaggatgtactataatgtatttaatcccccatgaggaacatttgggttattctcaattttttgctctcgtaagcctcacagtaaatcacttttgcatacttattttcttcccctagaagtgagggtgctggttcaaaacacatgcatgtttttaaggtttttaatacatatttaaaacgtacaggttctgtatgcagagcttaagtacttgcttctgcctatgccctttgagacatattagagattccctcccactcctttttttctctgacatattagatgtgcagagctaacaggtaggcattgagtcatttgacaggacctgaaatcaagctctggtggtgatctgtggcacc

SEQ ID NO: 52771 - DNA, 1022 bp, Homo sapiens
cgcacacaagagaatgattatgacatgttcccttcattttctgaattctcaaattcatcaggcttaaatatgacagacatcacaaggattatttttgagcacctggaaggactttctcaagtgttcagtgactgttttccaccagaacaagacttgcgttcaggaaatttgtggataattcacccttttatgaatcaccaaaataataatctcaccgacttcgaagaagaaaagctaacagagctatcttcagatttaggattacaagcactatttaaatcagtgtctgtaactcagttttggataaatgcaaagacaagttacccagaactccatgaaagggcaatgaaatttttattacccttttcaactgtttatttatgtgatgctgccttttcagctttgactgagtcaaaacaaaaaaatctgttgggttctggccctgccctaagacttgcagtcacatctttaattccaaggatagaaaaattagtgaaggagaaagagtagcaatatgcacattgcttaacagtgaagtcaataatcctgtgttaagttttgtataagtatcctaaaagataatttcctaatgtggatttgtgttttcagtgattaaatgttttaataatttttccctttttgttgaggaatttaataattatgattgttataaataattatgtataattataatctagggtagaaaatttagttatttcattaaatttggactagtgacaaagactgcaggtaatgagaagcccagtttataatgtaacagcacaacctggatgttgaaacagcttggcctttagaagcaagtggaacatttcagtcttctagccaaccagctacttacccctgcaaggttgtgagtaggtggaaaagatagatcttttttttgagatggagttttgctcttgttgcccaggctggagtgcaatggcgtgatcttggctcactggaacctctgcctcctaggttcaaacaattctcctgcctcagccttccaagtagctggg

SEQ ID NO: 52772 - DNA, 1047 bp, Homo sapiens
aacctattgggtgcttgggattacttgtacatgtaccacatcctacagttttattatacctagtgatcaagctttgggcaaaggagaaattcagttttcagtagcatcattggaagtattatgacttgtgcttaaacttttaccagtgcattcttttgataaatagaaatagtaacaaaatatgaattttaaatatgtggggagatacataaagaacattgcttatttgttcttgaaaataacagtgattcaaatatttcattcagatttacctatgcctaatgaaaaaaatgatgcagaacttgattctccaccttcaaagaaaaaaagattaggttttttccagacttatgatacagaatatttaaaagttggttttattatctgtcctggatcaaaagaaagttcaccaaggccacagtgtgtcatttgtggagagatcttatccagtgaaaacatgaagccagcaaatctttctcatcatttgaagacaaaacattcagaattagaaaacaaaccagtagatttttttgaacaaaaatctttagaaatggaatgtcaaaatagttctttaaaaaagtgtttactagttgaaaagtcacttgtgaaagcttcttatttaattgctttccaaactgctgcaagcaagaagccattctccattgctgaagaattaattaaaccatatttagtagaaatgtgttcagaagttttgggttcaagtgctggagacaaaatgaaaactattccactttctaatgttacaattcaacacaggattgatgaactatctgcagacattgaagaccagctgattcaaaaggtcagagagtcaaagtggtttgcccttcagatagatgagtcatcagaaatctcaaatatcacacttcttttgtgctatattcgtttcattgattatgattgtcgtgatgtaaaagaagaattattattttgcattgaaatgcctactcaaataactggctttgaaatatttgaactaataaataaatatattgatagtaaatctctgaattggaaacattgtgt

SEQ ID NO: 52773 - DNA, 1024 bp, Homo sapiens
tgcagtgacgcgatctcggctcactgcaacctctgcctcctggattcaagcgattatcttacctcagccttctaagtagctgggattacaggcgtgcgccaccacacctggctaatttttgtactttagtagatacggggtttcaccatgttggtcaggctggtcttgaactcctgacctcatgatccgcccacctcggcctcctaaaatgctgggattacaggcgtgatcccacaattaccgtgcctggccacagtttttatattatcttgatttagggcatctatataaaacaaataattaaataaaatcagtattttaaggtaagaaccttacattttgtagtctcaactgactcatatatcctgttttcgtagtccctctttttatgattaatgttatcttttcattattttatagttttaagcctatcttgtctaacatttctttttcagatggccaagtgtgatggttgtaaacgacagggtaaactaagcgagtccataaagtggcgaggcaacattaaacatttctgtaacctattttgtgtcttggagttttgtcatcagcaaattatgaatgactgtcttccacaaaataaaggtaaaattaaacttagctaatgggatttttatgtcagtgctaggacactatcagcatatacagttataaataatataataaaaacaaaatttcattggattcaaatagcctgaatttccttaaatttttctttaagaagtctttaagatttccccttgagggaaaagtaattctaatactttttgctctgatagtcaagcacaccaaaaggccaataatgtatatgcactaatttttataggaaacttagatttgattgctttttgattgaatgtatctgtacataaataacttaaactagggatatatactatttagttaataaaccagaaataaaaacagaaaatcagggcaaacaaagggagagtatagttaatatagttgctgtgactagtgtaaaatttgtttcagagcttgctta

SEQ ID NO: 52774 - DNA, 1039 bp, Homo sapiens
ccaaggtgtccaggtttcatgtcatagttgtaaaacctcagcaatccctcagtatcacctagccatgtcaaatggaactatatacagcttctgcagctccagttgtgtggttgctttccaggtatgatctaaggtagcacattatgcatgtggttctgttaggcatcgatctgtggcacagtgttaactgctgaaggcctgttcttatgaaagtttaaatttgaattaaaaagaaaaaaatttgtttcatccaggggcccaaccaggtcatttctacaaaatatctgaacccagatattgggtctcagcagtttcttctttatttaggatcctagcctaaactgtcattccctcccactttctcccttgggtctctccccttcaaaaagatggaagctaggattgtggtttgggtaggtggtatggtgaagaacagtagcctgatgggattcacataccccttcctctcatcctgtgtcagaaacacagtgactcctggcatggaattgtaagcatccacttgtcccattttctcctccctctctgcaatacatacacaaagagtagagtttagtaatctccagggtaggaacatgcctgatgtagtatccctggcattagggagaaagagactgctggtagctattgtgtcgtagtagccatcagaagctggttgatgatgggagtgcaggtagggggaagttttagggggaaggagaggcctgctctaatttattagaggcatatactggaggtctttgtcaggaaagcctgaattccagtccttgaccttttaatgttgtatttctcagtccttttattctggaaatataccatttaaactctttctgtgagatagaaaattttaaaaaatgtttgtgggagacttgatttattaaaatgaggaaatgaaaagtacaaagttatcttatttctcagttgataaaatctttaccttatttgttttcattcagaatgtatttagcaagccaaaaggaacaaactcttcggcggtgcccctgtctcagggccaagtggt

SEQ ID NO: 52775 - DNA, 1049 bp, Homo sapiens
cctcccgggttcaagtgattctcctgcctcagcctcccgagtagctgggattacaggcgcccaccaccacgcccatctagtttttgtatttttagtagagacgaggtttcaccatgttggccaggctggtctcgaactcctgacctcatgatccgcccacctcggcctcccaaagtgatgggattacatgcatgaaccaccgcacctggccctggctggctatattttaaatataattcactcttgacaaatttatgaattagatattataagccccattttatacatgaagaaattgagatagtaattacatcattcattgtcactcacctgataaatagcagaactcatcaaacccaggtttgcagattccttatcctttttctaccatacagtacctgcccttagtaagtgttatttcacctcacaaagaggaggaagttacagttgtgaagaatacatttcatttttacctttgttatttatttttagagacattttaaatcctaaggatgtgatcacaactcgctttgagaattcctatcctagcaaagatttctgcagccaatcatgcttgtcatcttatgagctaaagaaaaaacctgttgttaccatatataccaaaagcatttcaactaagtgcagtatgtgtcagaagaatgctgatgtaagttacattttacttttattgggattctgctgaaagagatttttttttaactggctctgcttattttgtgtgtgtatgtgtgtgtttatttcctagactcgatttgaagttaaatatcaaaatgtggtacatggtctttgtagtgatgcctgtttttcaaaatttcactctacaaacaacctcaccatgaactgttgtgagaactgtgggagctattgctatagtagctctggtccttgccaatcccagaaggtttttagttcaacaagtgtcacggcatacaagcaggtatgaatatctatttgttgcatgtacttaggcccactccttctgatttggctgcacagggatgaactacaaaatgagagtgagctcctcc

SEQ ID NO: 52776 - DNA, 1052 bp, Homo sapiens
aaagattctctaattctgaaagattgtctttgtaaagattagtgtaataacttgtaaattttgacttttgaggtgcttgtgaaggtatttatgattagactgtttaagagatgaatagggccgggtgtggtggctcacgcctgtaatcccagcactttgggaggctgaggtgggtagatcacaaggtcaggagttcgagaccagcctggccaatgtggtgaaaccctgtctctactaaaaatacaaaaaatagttgggtgtggtagcacatacctgtagtcccagctactcgggtggctgaggcagaagaatcgcttgaacctgggaggcagaggttgcaacgagctgagatcgcgccactgcacttcagcctgggcacccaagtgagactccatctcaaaaaaaaaaaaaaaaaaaaaaggagatgaataggatagaataatttttttttgcttgaatttctagtttacttacatacattgtattcattgctcttttctcttttctttttttttttaaaggagtatggatgtgtccaacagccaaaaactcaagaaagtaaattgaaaattggtggtgtgtcttcagttaatgagagacctattggtaagaaatggaactgtataagttagttacaattaatttgcttattctgacttttaaaattgagggaaagcatcttttcatgtatgtctttctctttctttagagctgtgttttttcaaactgtgagtagctggttttcagcagcgttttaaaaaatagagtaagattatatcagaatatgatatgtgtagtaaggaaacatattgtttcataaaacttctgtttcagtgattaaattgtacatacatccccacgtttacaaacatatgtatgtgagaactgggttataatattaaatgtatttcttgcgttgagtaatggttaaaaaaaaattgaaacctctgttttagagctcttattgcctcattaactggatttcaagattgggaatttgtcctgaaaaagagagactgggctgggtttagtggctaacacctgtaatctca

SEQ ID NO: 52777 - DNA, 1994 bp, Homo sapiens
ctcggtctctttaagaagtgaaccataattgaggaaagaggaatgctgggaagttctactcagctcaggtccggagcctgacgggaaaagagggcggagaccaaggctgcgcaggcgtggttggccggtcgttgcgttgggatggatcaggcggaattccagaagagaaaataatccctgtctagatgcagaggacttggttcctattccagtgctcctccggtagcagggaggcgacagaaggtgggtgcggccgcagtggtagtgggcgggacggcggggcggaggccacaccacgtgacgaggcgttgcggcgggggcggtgccaggtgggctacgcggctggggcggctgcggatatcgccttagggacgcgttgacattcactggctagtccaccgctctcagtcggagaccacattgcctcgttagtcctcaatgatgggagtgggaattcttggtgggaaggagaatttcggaaagcgtgcggttctcagaggagggatgagcgcccgtagatattttgtggcgagtgcgcaaaagttctcatttcttctttggaacaggcttttcaaccagttgtccgtttccatcccggactattcggataaagacaactttgaagagctttttgttttaggtttaattcgtcccgtttagttctttgacttttaggggaagggaatttactgaatggccaattgagtttcttttctacaggaaggcgattgtgaagcggggctctgaggggcttgatgccccccacccctcacacggagaccttgaaagaggcaggtgactcactttcagtaagggcgttcctgttgttcgcctgcgatggatggcatcttgagctcacatctagcgttaggccgagaaatggggcccttagggaggcttccagtgaaggttgagttataggtcagggccgggaggttgttgtgcccctctttgagaaataaaagccgacgtgggcctctaagtactgattcttatggggtcagaaactatttcttgagtccgttcttctcagagtttattacttcctcccacgtcttggtctgctggtctaattcccttcaataaccttcaacataggaaaaaaccagagtgtgttgtgtgtctttaaagatattagagaagtgggagctgttgccccaaaactgttttcttatgtagctactgaaggaacagaaagcaggaagaaagaaaaaagttagttgtggccccagaagagttgtttttcaaatgccgagccgtgaagcctcatgcactcaacacaaagtttttctttcatatagataagcctgaagaaaaaagaataagcctgagtatgtattttaggtgtccaactatccattaccaagaagaaatctattcgtttgagcctgagacactctttgaggtaaaaaattagaatgaaagaacctttggatggtgaatgtggcaaagcagtggtaccacagcaggagcttctggacaaaattaaagaagaaccagacaatgctcaagtaagcatttcatcttcatttaaaaatttaaaaaaattccttcttttccatctggtcaactgaaaaattttagttaaacggcttctggtttgtaagtttaaaataacccaaactgagacaggctctcgctgtcgctgagggtgtagtgcagtggtgcgatctccttagctcactgcagcctccacctcccaggctcaagtgatcttcccacctcagcctcctgtgtagctgggaccacagggcacacaccaacatgctcaactatttttttgtatttttggtagagacggggtttggccatgtttcccaggctggtctcaaactcctgagctcaagcaatccacccaccttggcctcccaaagttctgggattacaggcatgagccaccattcctggctggttttttgctctttgaatgaaagctataactacatgatttttttgtgtgtggaaggaaagtaatatatttaccatttttccat

SEQ ID NO: 52778 - DNA, 1069 bp, Homo sapiens
caatctcagctcactgcaacctctgccacccaggttcaagtgattctcctgcctcagcctcctgagtaactgtgattacaggcgctcgccactacacctagctaattttttgtatttttagtagagacgggatttcactatgttggccaggctggtctcgaactcctgacctcaggtgatctgcctgctttggcctcccaaagtgctgggattacatgcatgagccactgcacctggccttactgctttcataggtattattattattgctgttaaatatatctgataaataataaaaatcattttcagatttgccaatattcttttagttattgcaatctgtagtgtctttttaagaaaatgtaaaaactgtcttaattgttattctttttaatattccaactaaaagcagtggtaataggttcttcttcattaacaacatatcatataccaggaatatgaatattattttaatctctaaacagaaacctgccaaaccacttatatctgttccttgcaaaccattgaagccctcagatgaaatgattgagactacgagtgatttggggaagacagagcttttctgctctattaattgtttctctgcatacagtaaagctaagatggaatcttcttcaggtaatgtttgtttagcaattgtaggggtttagtaattattaataaataatattatttgactttaatttataaccttgattcattttcaaattaaaccgacttttaaaagtcaaaacaatctaaacttgttgcaaagaactgtttttcagtatttttgtataaaaggaaggctactttaccaccagagatttaatatttgtaggccaagcacggtggctcatgcctgtattcccagcactttgggaggccaaagtgggcagatcgcctgaggtcaggagtttgagaccagcctgggcaacatgttgaaaccccgtctctactaaaaatacaaaaaaaattagctgggcgtgttggtgggtccctgtagtcccagctacttaggaggctgagacaggagaatcatttgaacctgggtggtggaggttgcagt

SEQ ID NO: 52779 - DNA, 1052 bp, Homo sapiens
gcaatagtggcttgggcaccaacctagcgctccattgatgttaaggtttatgaatcctggaagagtttgaaatagatgcccattaggagattcaatcagaatctcttttcttcatgagtaatttcacagaaaaatttgctcataattttaaacaaattctttaaaaggactgggaaattgtgtacaaaggtaaaagacataaaatgttggagaagtgtaaattttcagtgtaatgttgtaattataaatacgatactaaagaacctggctattcctaagccctaataaaaattacttcagtacctaccaattccttaagctattagatgcttgcattatttctttaaacagtattactaaacagtactttctgatgattgattttgccttgtttataagaaatctttttattgttgtcagtaagtgttgtttctgtggtgcatgatacttcaacagagcttctttctccaaagaaagatacgactccagttataagcaatatagtgtcattggcagacaccgatgttgccttgcccatcatgaacactgatgtcttacaaggtaaaagttgatgttaagatatttgacataaatattgttttgtcatacttgataaatctgtctatatgctaaattttctttttgtttcttatatgaaataagcaaatatagtttatgatgctattttataggttatagtatataagatcttgaatttatgctctattttaacagatacagtttcttcagtaacagcaacagcagatgtcattgtggatgtaagttttaactttttttaccactgtctttttttaataagcagatttttgttgttgttgttgttgagacagagtctcgctctgccacccaagctggagtgcagtggcgtgatctcagctcactgcaacctttgcctcctgggttcaagcgattctcctgcctcagcctcctgagtagctgggattaccagcgcctgctaccatgcccagttaatttttgtatttttagtagagaaggggtttcaccatgttggccaacctggtctcgaactg

SEQ ID NO: 52780 - DNA, 3278 bp, Homo sapiens
ccaccacacctggcccagattttttatatatatatataatatatactataatatataaaaatataaatatataatataaatatattataatatattgtatataatataaatatattataatgtatatttattatatattatatttatatatttaatatatattttatgtattatgtattcatatatggggtgtgtgtgtatgtttgtagattgtttaaacagaagtatttttttcctctgggttcttcttttaaaaaaatactacacaatttgagtcatctgagcaataaaaattatttttatgacaattacataccaaaaggtccttcaaacatttaatgctgaatctagattgcaaataaataagttatacgtaattgttaacgtttccccctagtggagctcatactgtaactcagccatttattttactatgttattagagtagatatatttgatattttaattaatttttgaaaactgttaaatgttcttttctcattttctcccaaagctttctaagagttcacctagtgaacccagtaatgctgttgctagtagtagtacggaacagccaagcgtttcaccatcttcatcagtattcagtcagcatgcaattggttccagtacagaagtacaaaaagacaatatgaaatctatgaaaataagtgatgaactatgtcacccaaaatgtacatccaaagtacaaaaagttaaaggtaaatcacgaagtattaaaaaatcttgttgtgcagattttgagtgtttggaaaacagtaaaaaagatgtggcattctgttattcatgccagttgttctgccaaaaatattttagctgtggaagagagtcatttgcaacccacggaacttctaattggaaaaaaaccctggaaaaattcagaaagcatgaaaaaagtgaaatgcatttgaagtcattggaattttggagagaataccaattttgtgatggagctgtcagtgacgatttatctattcattcgaaacagattgagggaaataaaaagtacctaaagcttataattgaaaatattttatttcttggaaagcagtgtttacccttaagaggaaacgaccagtcagtttcatctgtgaataaaggcaattttttagaattgttagaaatgagagcaaaagataaaggagaagaaacatttcgacttatgaattcacaagttgacttctataacagtacacaaattcaaagtgatattatcgaaataataaagactgaaatgttgcaggatattgtgaatgagatcaatgactcctcagcattttcaatcatatgtgatgagacaatcaatagtgccatgaaagaacagctttcaatttgtgtaagatacccacaaaaatcatcaaaggctatcttaattaaggaaagattcttgggttttgttgatactgaggagatgactgggacccacttacataggactatcaaaacttatctgcagcaaattggagttgatatggataaaatacatggccaggcctatgatagcaccactaatttgaagataaaatttaataaaatagcagcagaattcaagaaagaagaaccaagagctttatacatacattgttatgcacactttttggatttatcaataattaggttttgtaaagaagtaaaagaactccgaagtgctctaaaaactctcagttctttgttcaacactatttgtatgtctggggaaatgttggcaaattttcgaaacatttataggctaagtcaaaacaaaacatgcaagaaacatatatcacaatcatgttggacagtccatgatcgtacattactatctgtgattgacagtcttccagagattattgaaacattggaagttatagcaagccattcttcaaatacaagtttcgccgatgaattgagtcatttgctgacattggtttccaaatttgaatttgtcttttgtttgaaattcctgtatcgagtgctgagtgttacaggaattctttccaaagagcttcaaaataaaaccatagacattttttctttgtcttcaaaaatagaagcaattttggaatgtttatcatctgaaagaaatgacgtatactttaaaacaatctgggatggaacagaggaaatatgtcaaaaaataacctgtaaaggttttaaagttgaaaaaccttctcttcagaaaagaagaaaaattcagaaatcagtagatcttggcaattcagataatatgttttttcctacttcaacagaagaacaatataaaattaatatctattaccaaggattagatactatattacaaaatttaaagttatgtttttcggagtttgattattgcaaaataaagcaaatttcagaactgttatttaaatggaatgaaccattaaatgaaacaacagcaaaacatgttcaggaattttataaacttgatgaggacattatcccagaacttagattttatcgacattatgcaaagcttaactttgtcatagatgatagttgcataaacttcgtcagtctcggctgtttgtttattcagcatggtcttcacagtaatattccttgtctctcaaagctattatatattgctttgtcttggccaattacttcagcaagtactgagaactcattttctaccctgcctcgtcttaagacatatttatgtaataccatgggacaagagaagcttactggcccagccctaatggctgttgagcaggagttggtaaataaactaatggagcctgaaagactcaatgaaattgtggaaaagtttatcagtcagatgaaagaaatataatacatgctcatttgaacttacctaaaagacttgtatttccattgggatgttttcatttcaaaattgttcaaaattcaaaagacacagaacgataaacagtgaagtctccttccctcctttagaactcattttctcttcccaaaaagtgttatcttttccttaaatatccctctagaggtatttttcctaagtggtattgtacggtgtatactgttcttcagcttgtcttctctgtgtaacatatttttgagattgtcccatgtcgttacatgaagagtttcttgattcttggtctataattgcagatgttattgtatgaatgtaccataatatatttgagcagtccctgctgacatttttttcctaaccttttgctattataaataatgattcattttataaccttttatataggtcacattgcacatgagtgagtttactgtaagctggaaatctaaagttagaattactaggttaagat

SEQ ID NO: 52781 - DNA, 1017 bp, Homo sapiens
ggctgagacgggagaatagcttgaaccccaaaggctgtggttgcagtgagctgagatcgtgcaattgcactctagtctgggcaacaagagagaaactccgtttcaaaaaagagagaaaataggctggggacggtagctcacgcctataatcccaacactttgggaggctaaggcaggcggatcacaaggtcaagaattcaagaccagcctggccaacatggtgaaaccccatctctactaaaaatacaaaaaaaatgagccaggtgtggtggtgggtgcctgtaattccagctactcaggaggctaaggcaggagaatcacttgaacccaggaggcagaggttgcagtgagccaagatcgtgccattgcactccagcctgggcgacaagagtgaaactccgtctcaaaaaaaaaaaaaaaaaagaaaatagaagttaactctagtattgaatgtgtgttgcatatattttcattcttttaatggaagtgcttaaggctatgaactttcctctaaagtcagcttggtcaaccatgtgttttttcattttcatcattttctagctgtttttagttgtagtttctatcttgtcataaaatcaagaagttgggccaggcatggtggctcacgcctgtaatcccagcactttgggaggccgaggtgggcggatcacgaggtcaggagatcgagaccatggtgaaaccccgtctctactaaaaaaaattagccaggcgcagtggtgggtgcctgtagtcccagctactggggaggctgaggcaggagaatggcgtgaacccgggaggcggagcttgcagtgagccgggatcgcaccacagcactccagcctgggccacagagcaagactccatctcaaaaaaaaaatcgaggttggtgttcttgttttcattttcaagtgtttgttttctattcttgtagtctattatacagccaataatgtaaaaaataaacttacattaagtataacagctatcttggttgaatgcctattagcctattaa

SEQ ID NO: 52782 - DNA, 1073 bp, Homo sapiens
caaagtgctgggattacaggcttgagccactccgccctgcctgttaattacaattaatgccatgttctttcattcattaaaagatttttttttttttttttgagacggagtcttgctctgtcgcccaggctggagcagtggtgcacagtcttggctcaccgcaagctccgcctcctgggttcacgccattctcctgcctcagcctcccgagtagctgggactgcaggcgcccgccacacacgcctggctaatttttttttgtattttttagtagagacagagtttcaccatgttagccagggtggtcttgatctcctgaccctgtgatccgccctccttggcctcccaaagtgctgggattgcaggcgtgagccactgcgccaggccgattaataagatttctttggtattagttcacttgacagttatataatgttatgtttgagaatttggtaactctgattcttgtatcctttggagtaatcataccctttaattagcaggatcaggtgagctgtgtccagaaaaccaacgagaaggagtggaaggaggaatgaacgtttcattctcgttaataaaggcattatcctaattatcctttggttttgtttttgtttttttagtactcgtttattttctagaatttacctgacttcaacgtattcaaagtgacattaaaaaaaaaaaaagatggtctgtattacagacacagaaccagattaagtataattcaggatcctattgtgacttggcagtgctgctttcagtctcagttactgatcaatttttatggtccattttagatatttgccttcactgtaatttttatttctaaaattagcatgttatttagcaattactacctacatcttgattggatttcagacatagcattttgtatttccaacttctgtatgtacgaattataagatgatgtttatgagatagtcacacatcgcttcacaagtaagtatagtcaaataacaatatagtaatatccccttatctgcaaccatggttaaccacaatctcagagttattaatttttaaattgtgtgcttttctgagaggca

SEQ ID NO: 52783 - DNA, 11107 bp, Homo sapiens
cagtctcaaactcctcagctctagcagtcctcctgagtagctgggactagaggcacaggccaccacccccagctaattttttaattttttttgtatttgtggagatggagtcttcctatattgcctaggctggtgtcaaactcctggcctcctaaagtactgagattacaggcatgaactaccaaccctggccttaatccttgacttatgcactaacatttatattctgacatttagggaaaagatgtacttagtttttcaggtcagtcaggcaaaatacaaaggttaaatatgtcagtgttggtttaacacttaaaatcgaatacagtgtaagattatccttaataaagcctacattatttgccagaatgtctttagtactatgcccctaggctcactctaagcctttgtgttttttagtgctaacctagttcttaggtcaactgctaggtttcttcacattgaattctaaaagatgtggataacacttcagttatgtacctgatgggtatttctaggcaagaggaggaacgacgtagaagagaggaagagatgatgattcgtcaacgtgagatggaagaacaaatgaggcgccaaagagaggaaagttacagccgaatgggctacatggatccagtaagtcagcctttactgccttccaattggagttgtctatagaacttgcaggtacctagaaggaattacaggaaattttaatatcaaattacagttattttctgctttttttctaacaaagtatattatgtttgatttccttgtatgggtcagaggatttaattgaataggaagtttttttgtgttttgtttcttggtttttttgttttgttttgtttttttgtttgtttggttttttttttggagagagttttgctcttgtcacccaggctggagtgcagtggcttgatcttggctcactgcagcatctgccttctgggttcaagtgattctcctgcctcagcctcttgagtaggtgggattacaagtgcctgccatcaggctcggctaatttttgtatttttagtagaaatggcgtttcgccttgttggccaggctggtcttgaactcctgacctcaggtgatctgcctgcctcggccttccaaagtgctgtgattacaggcgtgagccactgctcccggccttgaataggaagttttgtaggtctttggataattgagtctaacttagttttcagaatattgatttcaaaaataattcacatgatgaacttttgaactttaccatgttttttatttaactcttgaaaatttctcagttcttaagaatgcttgctgtgggtatagtgcaggtatattgaaaggaatttttttcttgcagcgggaaagagacatgcgaatgggtggcggaggagcaatgaacatgggaggtaagtgtgaaatttaaattaatgatataagtagagagtagtatcctggtggagttgtaaccactatttttgttttctagatccctatggttcaggaggccagaaatttccacctctaggaggtggtggtggcataggttatgaagctaatcctggcgttccaccagcaaccatgagtggttccatgatgggaagtgacatggtaatgtatcctgtgggacgtagtaccaaggaaattctcattttcacaacttaggtgtgtttgttttgttttgttttgtttttttaagtaggtgactggacctcttttagtttcccctaccaatttcatacataaatatgtaatattgaggaatactttggcaacatagaagaactcggtgtgtggtaacctaaacagataacggttgccaacaaggagtcaatgctgttagtattatgtggaattacctttggcaataagtagatttaggtgcttttgaactctagtgcatggcaaatccaaattctagatgctagataatgtatctgattattctacatccaagtgagaataatcaaatggcaaactcattctttaagctggtatttgccataagtaggaatcagacttgtagtttgaagctttaggcacgttttagtgatgtgtaggactttgacctatatttggtgtggcttctatcctatgaaaagggaattgagtgttttgactcgtcgtttcccacctgttgggcctgtctgtaggtataccttctaaaatcaactgacatctccattttgctacagagtagcaaaaatcaacaatttttaagcatactaatggtgtgcatttgatctgaaccttcttgatgctatcatgtttcagctgtgaatatagcctgtcagatgcttagaacaatcagttgaactggtatgagtggctgcattagggctttacaaatcgttaggactgaattttggtgggtttagagagtgcatttttatagctgagttgaatgtgatgagttcactacaggcttttggcaaaggaggggagctgcagtgagtagctcataagattcattttataaatagaaacataaggattttgtataaggcctcacctgtttataatctacctaagactttttgggaattaaagttagaattataaatggctggttgggtaaaatgtaatactatgggctttctttagatttttcagagtatgtgggtaacattttggtttatattcttcctaaagacagattgttaggtaatgtgtaaaatctaatttgaccttatgttctcacaattaaaggtttatattctagataacaggtagctgatagctcctgggttctcagctggtgtaattaacataattatgaaagccccaactttttcttttttttaagttcttagaggtagaacacagaacaatgagccaaaaaccctgtaatttataagattttgaaaaacaaaggataaaagtttagtcatgttgagtagctcaatagtattttgtttaaaagaatgttgaaattgtgtataggaacagttaaaccctgatgcccttttagttttttatttggagtaatactcttagtaactggtctattataaatggaatgagaaaaagtgtaggctgctgtgtttgcatacctgaggggtctgctatttaggcacatatgtttctattgaaaacttctatctccagaattacctaaaactagatgggaatagtgaagtcactcactgctttattgcagttactttagcttcgtgtttcactgttcgggaagtgtctaaaacatggaattacagcaaagtgtctgcacttttcaaagacctaagggaaaagatggactgatgaaggtgggtggggtttgttcatttagtttgcaacaatatagaatagtactgagaacgtaattgtctctggttatatagtgatggctcggaaggtagtgtgcctgtgagaatttggcaacataagtttttttgatcaagttactgtgccggttaagtgactaaatctatagtcttatgctttttctttttgtagtctggtagcattttattaaaactttcaaccttttaagatttctgcaacttagcagatgtgtcttaagatcttgaaaagcacaaggtttcttaagcagcacatgccactaactggtgagtaggtctttgtcacttcattgagtgaattgaatctctggttgggcttgttaggcttacttggaaattaaatttccgttcagacgttgaaagtgagagtttgcaagtttttcagtgggttaatctgatgtgaaatttcttagaactcattttggaatggattttcacatctgcactaattcttaaattttttagcactacagggaagatctgttctttgaaacaggtgtatgagaatggctcaagtgggaacataccacaaggcatgtattaccgtaaactaattttcaaattacccttttttcctttctatgttcccggtacctgtggatcgactcattggtgattgtatcgacgaacgttgactacggaaccttctaaaatatttacttaacacacatggacatcaactacttataatgaactgttaattactgttccaatagcgtactgagcgctttgggcagggaggtgcggggcctgtgggtggacagggtcctagaggaatggggcctggaactccagcaggatatggtagagggagagaagagtacgaaggcccaaacaaaaaaccccgattttagatgtgatatttaggctttcattccagtttgttttgtttttttgtttagataccaatcttttaaattcttgcattttagtaagaaagctatctttttatggatgttagcagtttattgacctaatatttgtaaatggtctgtttgggcaggtaaaattatgtaatgcagtgtttggaacaggagaatttttttttcctttttatttctttattttttcttttttactgtataatgtccctcaagtttatggcagtgtaccttgtgccactgaatttccaaagtgtaccaatttttttttttttactgtgcttcaaataaatagaaaaatagttataatattgatcttcaactttgccattcatgcttctatgcatattaggctacgtattccacattgaaagcatgagagtgtctaggcctttgaatggcatatgccatttctgggaaatgcatctggaggctaagtattgctttctacaaataattgccccctttgttttaaaaagaagaaatgcatattgaagtagtttgatgatttgtttggcatataggaagcacgctggtgctaagtattttttaaatggttatgtaagcaaagctgaactgtaaatcttcaggaatatgtattaagattgtggaatgggtgtaagacaattggtagggggtgaaagtgggtttgattaaatggatcttttatggccctatgatctatcctttacttgaaagcttttgaaaagtggaaaggtcattttgttgcatttccccatttcttgtttttaaaagaccaacaaatctcaagccctataaatggcttgtattgaacttttacatttgaattaaagatgttaaacatgaagtcttttcatgtattcaagtgatttataaagatggggtgtagtctaaaaaacaaaacttgaaagtaagaaggtttagtaactgggccgggcgcggtggctcacgcctgtaatcccagcactttgggaggctgaggtgggcaaatcatgagatcaggagttcaagaccagcctggccaacatggtgaaaccccgtctctactaaaaatacaaaaaattagctgggcgtggtggcaggcgcctgtaatcccagctactcgggaggctgagccaggagaattgcttgaacctggagatggaggttgcagtgagctgagactgccactgcactccagcctggacaacagagcgagactctgtctcaaaaaaaaaaaaaggtttagtactgaagtaggtttagttatatatacatttgtactctgtaacttttacatctccttgtgctacttctgttgggcaaaatctataggactataaaaatctattggttctcttctaagagctagtggtgattgttaacaaatagggttgcagataatcattcttattgtaaatttaacttgttttcacatagtttcgttttcatgtagcactaaatctggagaaagttgctcatgctacacagtacaaatatcccttcctcccaccataaaggcttggaatgtttccatggtgttgtcagttaattgtcaacttcattgaacccccttccattagaacaagagactttgactattaaagtagattgtttattgttgcctgttagtataatgggagcctgatttcccagtgtaaatatgttagaggaacagcttcctaacagtaggtaaagtaattgaatggtttggctttgttctgagttacgttccattcaaatctgtacattgtagaattcttactatggaatgtgtcttcctccttttcacctcttttcttggtgctaattggcaaaagaaaaattctaagtcaaacctttattaacatgctgaagtttagtattgtgcctgtgtacaaaaggagacctattgttggaacaatctgagcactttctgcataggaaacaggataatgctgaaagtaaacactagtgtataaaagcatctcaccaaatactggttgtatgactgacaggtacatggtgtgctaagggagagaatctcattagaaagtaatgctcattatatcattcaccagcacactcggaaatatgagtagttttaccatgattatatcagtgaggaagttttgtccccaaacaggttattaattggtgatacataagagattttctgtacggaaacaagggtcttgattagaaaggaatccattacagtttggttgaattatatagtagggactctactaaagacaagaaaataaggggtgttccatgggacacccacagagggtgaactttgaatgtgtgtgggtgggggctggtcgggaaatgggaaaatctgcctataaaattaatgtttcagtttatttttcagattacatgcctttctttataagggatgctggcacagaccccctaaaataagcttttggtagtactgtacctttgaagagtggtgaaggatgctaatggataatctcctgaaagttgtggcttttgatacccttactgtggactgtagagttgctaaacgttgtttagcaaataatgttgcttagtttcaaatgacatttgactttcatcactaaaacagcaatgtactcagggttgtaagcttactcaaatagactttcaataagtcttcaatgtatatatgatagtttttagcctaatgtgaatttaaataatcttaatagtttcctaaaagtcgatctgaaacttggggtgggaaaggggaggtagcaatttttgaagtattttagccatttttttcatttaaagaaaccacttgtccccatttcctcttctccactttctcataattttgttttaagaggaacactggttgttttttatacttctcctaatctttaaaaactgcatattgttaagaccccagtgtatttaataggtattttataagcatagcccattggctcatgttagtgaaaccataatcctctttgcttagaacattaaactcataagaagtactacaaaccccaccactctttatagatgtattgtaccactaatataaacagctaaaaaatggggaaattgtaatgttacgcctgtgcaatttttaagtggcatattatggcagattaaaatttagatacttggcttttcttgggcaagccactaagttgtggcggaatgttttctggtgttcttggactgcaattatgcactattaaagtagtggcctgctacataactgcatttagccagcatttctgcagtgcgtaactgtgaggaacgtagtaccgcaaatggcaatggacattaggacccggatgtagtattcctgcttgctccaagattctcattgccgactgcatacaggtaggtaacaagcaatataatctaacttggtgacttgtatgtacttttattccgtgggcattctggcatcacatttctgacaatgaaattacagtgcagcacctaacacttgtatggtaaagctagcttacatcaaaactgtgtgggtgtggggttagagctgtaatttgtcaggcagaattcagtgctgttgcagttctcagataaaaagtgcaaacttgattctttggtatatctgactcagttgtgtggtttcctttagttgcattgtaactgaagataacatggaacacatcagtggtgtgggggagagggaactaaactatacttgggaactagggtgcttttagcaccttgacatggaccgtatagcatgtgataattagtctctattgtagcaaactgacctgcccatagatcggcaatatcagtaatttcattatgcaatcttggtaattctacaagttgagttgaactaaaagtacaggtttttttgtaatgcgatttaaaatttttaaaaacatgggcttcatgaaaacaccattgttactaacttgggcttagatgggaatctaatgtgaatagttcaagttatgggacttgtctaaatgtgtctatactctaaacctgggggaaggtggtgtggaacattgacttgactacagtcgaatacatgttgggaatcattcccaatcataagacatcgtcgtttctgtaggatgactgcatatgttcagagtagctttttgaatttggttcccttagctttagggatgtgatgttatagtccaaaatgtttacaagaaaacctaagtcttcaaaagcacaacttttgttgcttaggactttgcatcaactgttgttccagacctcacttcaacttcttggtctctgaactggttttagctagcatgcatgagagacagttttcatgtataatgtttctgctctgtaactggaaagtggtttactttgcataaatgctgatgaaaacttcatgactatgagacttttcttctgtgtatcaagaaaaagcttgctcgttggcaagcaattcacaaggtggggacagacttgtactttaacatgtagtccattcaagcaaacaactttggactctactgatagatgaaagagcaaatgatgactagtttagcctctgcatatcaacaatataatgcagatcaagtataatgctcaatattagtgacatgagtatcactaaattacatagaaccctgatggggtttcctgtgtcgtaatccattaaatcggtggccagtgcttgctgccgtggtttagtgattgggtgttagaaataaaaactcaggtctatttcttaccagtcagtaacaatttttagagaatgtacttggtatataatatatggacttcaggaactttattggggtggggggttaattttgccttaccctgttcactttcagatgattaggcttttgcactttagaatgagaaacttgtgacgttagtgtgttcttactagctttaatttgtatgtagcaatgaattgtgaatcttagtgcagtgggtttttttaaaaaactcaaaaagctgggaattaagtggtttcagtaataatgctataccgaggtgcttgcattgtatttcataattttgttacaaaccaaaattatttttaatgagaacagtcttgggttcagaggtgtgatgccagaatgtattttcgtactgttaggcccttggaacagataccggtgctttctgaaagatgaaagaaatgcaatgggtgctcttcatgcaaggttgcaaacctaccaagaatgcataatagtctcacttttccccaataaagagatgcgtgtgactagttttggacttttaaccttaatgggggttgcatgtctcctattgttaatcattgtcagctgcagtgacatgatccacagtcctgcatttactgcctttcacttaatgattttggacaggttttagagagccaggatgttggtctgggcctttatttggttttggctttagctgataatgttttagtgatgtcagctagtgcagttctcaaatggctgcctattagggaaagaattcagaggatttgactgctcctaatcatctgtcattgctgctagataatgattggcaatttttaagactcaactggaaatctcaacagttgctggtaaaccattaaccataaaaacgttgcttttgaacaccagtgctgaaaaaaatatttttttttttttttttgagagtgaaaagggcttggacttaagataggacaatgtggagaatggggggaagaatgcaaaacgatatagtatcccttatggatggtacatgtgcaacagggaactcttacttcatataccctttgcagtaatcattcagggaggaagaaaaacctggaacttgaatgaaggctgatctttgttttgtgcactgtggccctgccaggcatatagtgaaggtgaatgtcttctccctcagaaaaaaattggttccttgctgtcccagtaaggcatagcttttccagccctaactttaaaactcagtgaggacttagatgggaaagaatgaggtaaatacaaaggattgcaggacaacaactacagcgttgtgtactgtgggaaggggagttgggcactcttggaggactcctgctgaaggtggtcagcctgcctgacaatggaagacatacttgaatggggagcagggtatgtgctttcatatgaaaaaagagctgatgttaaaactcatttggtgaggtcaacgttgtcacataccttcacataagggatagtatattttgggttgcagtcaaacttgtgctcagactggtgaaactgagagtcaggcttttacattttaaagaaaatacagttttcattctaattcaggtgtctacttattttatgtaagaataattttagatttcccccccaccatgaagtttcttcctatttttttatgctgtaacttacccccaatctttatctctggatttttactctttaaattttgaagttgactagcattttcaaacctttattttatacccttgtcttttatattaactttttcttattattctttaggtaagaatgattgatgttggctgatattggagtgctcattcacatgaagtaagtttcctttagaaatcttaacccctacaggcttttgagtttgatttaaataatttcatttagatatgtggagtgaaacttcgatatttgagatgtttaccgtttctaagataatatccctttatttttgtttggaaattagggatgtatgtgagaaagcaagtgagaggcattataaaaatgtcaaacaatagaatttttaaaaagtggatggttatataacggtcatagaagaacagaaaagaaaacttgacttaaggggaataggccatattgtcaatattcaattcaattttagactccatctaaaactccatgattctttttttacttaagaaaatgtaggagaaggtcaggcatggtggctttacacctatattcctagcactttgggaggcagaagtgggaggattgcttgagcccagcctgggcaaaatagtgagaccatgtctctacagaaaaaaatatagccaggtgtggtggt

SEQ ID NO: 52784 - DNA, 1036 bp, Homo sapiens
ccatgcccagctaattttttgtatatttagtggagacggggtttcatcatgttggccagatgggtcttaaactcatgacctcaggtgatccacctgccttggcctctcaaagtgcagggattacaggggtgagccaccgcgtgtggcctacagtacatttttatgggtggaaaaaataagcctcggtaaggaatttggctagaggaaaacaattagaaaacgaggaaggtaggatttatctccagtgcctgcattcttttactgagtgttctgagtatttttgctgtgaagatatttatagatgaatcaggaaaatttttgccttttgtactctttacaagaaatagaacaggaaaaagatcagtactagggcaagtattttctggtatgcattcacaaatcggttcatgttaaaattttgtgtattgttagggagagagaaacccctcctcgttttgcccagcatggcacgtttgagtacgaatattctcagcgatggaagtctttggatgaaatggaaaaacagcaaagggaacaagttgaaaaaaacatgaaagatgcaaaagacaaattggaaagtgaaatggaagatgcctatcatgaacatcaggcaaatcttttgcgccaaggtaaaaagacctgtgcgtgaacatcattgctaaggtcaattgtttttcaccttattagaaccttgttaatgtgaatccaaatattttccaatgttcagatctgatgagacgacaggaagaattaagacgcatggaagaacttcacaatcaagaaatgcagaaacgtaaagaaatgcaattgaggtaaaattgtgtttaaggtttaagccttcatttatttttttctttgaaacgtatcattctgttgcccgggctggagtgcagtggtgcagtctcagctcaccacaacctccgcttcctgggttcaagcgattctcttgcctcagcctcccgatcagctgggattacaggcatgcgccacgacacctggctaattcttcctgtatttgtagtagataacggggttt

SEQ ID NO: 52785 - DNA, 2247 bp, Homo sapiens
agcagcatcaccaggggcccccgcccggcgggcccggcggccgcagcgaggagaagatctcggactcggaggtgagtgtctatgggagcgacgcgtcggctcccctaagatggcggcggccccctcctcgcccccgcccccgcgctgggcttccattttgtcggctgccggaaggggcgcttgcgcgcgccgctgcgggggcggggcggcctgcggggccgtcggtcggcgggggattggccgccgccgggccttgctctcccggcgggcggaaggctaggggaggtttcctttcggaaggaagcgcggggccgcggtggtcggccctgcagaaggtatcctgtccctgggactggcgtaatgcagagcatgcggcgtaggtttggagagaaccgggaagttccataaaagcgcaggcgcagatcgtgtaggttacagtggcatttggatttgtgttattttcctattttaattttcatactatttagatttttttagggacactcaacatatgtgggtgacagttgctgatggacgtctactctttggggaagtgtgtctattctcgaacattctggatgatggggctcctttttcaatgttaagatagtgctcatgttagaaatctcacatagtaaaaccttgattttgaccaaacggaacagaaaggcaactgataggtttcagataagcaaatactatcttggggattttcacttgcagaggtctctggtgtttgaaaacttctttcctttttcattaggggtttaaagccaatttgtctctcttgaggaggcctggagagaaaacttacacacagcgatgtcggttgtttgttgggaatctacctgctgatatcacggaggatgaattcaaaagactatttgctaaatatggagaaccaggagaagtttttatcaacaaaggcaaaggattcggatttattaagcttgtgagtgtaattgtttgattttacgtagaattaaaaagggtgggggatttttttgtcactacaaacgctgaaggcttggtttttaaactggggaggataaattgatcttttagatttttcaccattcttacaggaaaaatgcttgcggtataatgcataattgttgctacctaagagaaaagaggggtggggtgggtaaactaagtggtgttagtgggtgctgcctaaaggtaatggtcgaactgagctgaaggaagaaagggagtaggaagtaggcctatgacaatttaagagtagacatcatccaattttgaggtcattaacatgagtgtctctgatacacaggaatctagagctttggctgaaattgccaaagccgaactggatgatacacccatgagaggtagacagcttcgagttcgctttgccacacatgctgctgccctttctgttcgtaatctttcaccttatgtttccaatgaactgttggaagaagcctttagccaatttggtcctattgaaagggctgttgtaatagtggatgatcgtggaagatctacagggaaaggcattgttgaatttgcttctaagccagcagcaagaaaggcatttgaacgatgcagtgaaggtgttttcttactgacgacgtaagttgtcttgtttattctaataatttctatcaacttatatgagaatggtggcaataaaactggaacaaagctaagatggaaccatttttgttattagaactcctcgtccagtcattgtggaaccacttgaacaactagatgatgaagatggtcttcctgaaaaacttgcccagaagaatccaatgtatcaaaagtaagattgattaaacttttttggcagtttttaaatcaagtgtaaaggttaaatttattttagtgattttccaattttgcttaaaatatgcaaaattatttgatgtggatatgcttattagtaaaaaatctcaggctgagaaagatttgaagctgttattcagatagctgtttgcttctaaggtggatacattcacatgcagtcctgttttgtccctgcaataatggcataaagtcacgtgtgtgactgagtctctgttgcccaggccagagtgcagtggcatgacctcagctctctgcaacctctgcctcccaggttcaagcgattctcctgcctcagcctcccaggtagctgggattacaggcatgtgccaccatgcctggctcgttttctatttttagtagagatgggctttcaccatgttgactaggctgatctcgaactcctgacct

SEQ ID NO: 52786 - DNA, 1051 bp, Homo sapiens
ttctgattttgaatcggaaaacatctgtttttctgggcaaggatatcagtagattgctcctagggacaatcaagaaagaaaagagacctccaacgcttctctgcaggagcggatagagccctggttatttgctcgcaagtgaaaattgccctggcatacccattcaaatttctcctagcaaatcatagtggcctacagccaacgccttcttcgctcactggccaactggaaacttcagtccccccatgcctcccgcctctcacccaggggccaataggaatgatcagaggttcgcaacttagtgtcatcaagcatagtaattgcaattggctattggagctgtcgatcgtggagtaggcggggccgtgccagctggcctatataagacgaggacaaaggcggcgcgccgcctgtgtcatccgccattttgtgagaagcaaggtggcctccacgtttcctgagcgtcttcttcgcttttgcctcgaccgccccttgaccacagacatgtctcgggatcggttccggagtcgtggcggtggcggtggtggcttccacaggcgtggaggaggcggcggccgcggcggcctccacgacttccgttctccgccgcccggcatgggcctcaatcagaatcgcggccccatgggtcctggcccgggccagagcggccctaagcctccgatcccgccaccgcctccacaccaacagcagcaacagccaccaccgcagcagccaccgccgcagcagccgccaccgcatcagccgccgccgcatccacagccgcatcagcagcagcagccgccgccaccgccgcaggactcttccaagcccgtcgttgctcagggacccggccccgctcccggagtaggcagcgcaccaccagcctccagctcggccccgcccgccactccaccaacctcgggggccccgccagggtccgggccaggcccgactccgaccccgccgcctgcagtcacctcggcccctcccggggcgccgccacccaccccgccaagcagcggggtccctaccacacctcctcaggccggag

SEQ ID NO: 52787 - DNA, 1274 bp, Homo sapiens
ggagcagtcatacacccaaccgcctagatcctactgttaacattgcattccggacatgcacagcggctcacgcctgtaatcccagcactttgggaggccgaggcggcaggatcacttgaggccaggagttcgagaccagcctggccaacatggtgaaaccccgtctctactaaaaatacaaaaaattaacccggcgtggtggcgggtgcctgtaatcccagctattcgggaggctgaggcaggggaatcgcttgaacctgggaggcggtggtagcagggaggcggtggtagcagtgagccgagatcgtgctactgcactctagcctaggtgacagagggaggcactgtctcaaaaccccctccaaaaaaaaaattgcattccacttgttttatcatatatttacccctctatccctctttctgttcatcagtcgtgttattttaatgcatttcatcgtagtgttttgaacaataaatttttaccattgataagtttacgaaatgttggattcacctaatgcaataattagtcatagagcaagttaagctgtatgatggtatgtccaaatagttttgtaagtataaatgttgtgtatggaatgcatgtgttttgaaattttaaaattttcaagttgtgttcagttttgaactagatccttactgtgcttggatgaaggcatatggcatatagtccaccaatgaaaatatacagggtaaattacttaagatatgtaatgttaattcagggagatttctgcatccagttgctgtgaatgttgtcattcaccttctgtactaggatgttctaggatattctagaaaacattgatgtgtgttgacaacaaattcaactagattttaaatatattctgcctcttgtcgtacacttaaaagatgttactggtcttgtgaatcttctgctaaaggaatgctggaaaaaaaaaaaaagataccatactggtagcagtaaaaactttattattattattatttttgagacagagtcttgctctgttgcccaggctagagtgcggtggcgcaatctcggctcgttgcaacctccgcctcccgggttcaattaattctcctgcttcagcctcccaagtagctgggattacaggcaagcaccaccatgcctggctaatttttgtatttttagtaaagatgggattttgccatgttggccaggctgatctcgaactcctgacctctggtgatcagcacacctcggcttcccaaagtgctgggattacaggtgtgagctaccgggcctg

SEQ ID NO: 52788 - DNA, 1068 bp, Homo sapiens
agtgcctatacatgaaggcgttacagcaagcatcacacccacacaaatacatacacacacacacactttaaagttggcatattatttaatttttttagatgataaaatttttgttttctcaaatagcttttaagactcattaggtaggcttattataaatgattgaattatttatgcatggctattataataaccagtatgttatgaagtatgaggtctaactaaatcgggcggccatattttgttgtaaaatccttgtcttttcaaagtttacatacaaaataataacttttgtaaatgtaaatattacccggtctagtaaattgtattcattttcatacttaaaattctgtgtgtattaaatttgagatgtatatacctggtatgcttaaaaaagagagaaagcatatgtataagtagtatgcttccattttttgtgaaaaacaaaacaaaacgacctttcttgcctccccacatttgtgtctgtatatgcttgtacatgtatgaacttagagaaaattgtggaggacacagtttgggatattaccactgattaccttcagtgggtagggaggagaaacgaaagagagtataagggtgcaaatttcacaaagtggaaaaagtattcatggtataatgctaagtgaaaatgtagactataaaatgttatctattaatatataaatctgtgaaaattgaacacacatatagacagtagaaaatacgaacaaatgaaagcattgacttcatgatgtgatgggatatggagaagttttattttgaatttctgttattttaatattttataataaaataattgcaaaagattgatccctcttaattccttaattaactttttctcttttctgtctttttgctaaatgtattacttaaaaacatggcggtacatatcattacaatatttgcggtttatatgtatgcaatgtgaataatttgcttttagaaagtattgactctttgtttagagaccatttgaagaggccattcaaatacagtgattctgcattgttttcacactgcttcccatcttgtaacacacagagggat

SEQ ID NO: 52789 - DNA, 1114 bp, Homo sapiens
ctttttctttctttctttttttttgagatggagtctcgttctgtctgccctcactttcacacaataaacttggcgagactgaattcaactaattttgtaattcagtttgcacaattaaattttgcatttgattttcagcaatatcaacctgtggttatataagaattaagattattaatacaaaaatgagccaggcattttggcttacacctgagggtgagatgggaggatggtttgagcctgggaggcagaggttgctgtgagctgaggttgcagtgagccgaggtcacgccactgcactccagcctgggtgcttgtcacaaaaaaaaaaaaaatgtatatatatttttaaggttatcttgaaaggtctctctttctctgactgtgacttgagctgacttaacggacctgaacttgttattttcatcagaaatgcagaagagcacttagagaattcatctcacataacagactttgtagccatcattactgctttactagttaagtgcaacagccatttgggttcccaaggtacttgctttagttggcatttcatcatcaccaaccacaggtgatagcctgattaactgtgatgcccctgcatatgtgggattattaccaaactagttcctgcttgagccctatactcaagcctaaggacacaacgaaaagcaattctgaatcccatttttgtgtgcctgtctcctatgaccactgccactaccagtcctgtatcagaggacagaaaccacacagtaatttgaatatggaaagtttaacataaagaattatttaccattaatggggaattaactctaaggcttaaagagaatgctaaagatacagaataacagtagagggagcggccactgcctctaggtctgaggcaaagttaacaaggatggaataaatctggatgatggccagcccaccagcttcaaggctgagattcagatcttgttggagaaggtgtggtccactggatgctggaaacatctgaggtggggcaggcttttgctggcaattaaaaaatgcccccctggggtgccaataaaagtcagtaggatggtgagtccctcatctctacgaaaaataaaaatattagctggacata

SEQ ID NO: 52790 - DNA, 1008 bp, Homo sapiens
attacaggtgtgagccactgggcccagccaagaagttgcttttttataagttacttgtttccttctggagtggtggttctgtttgtttaccttgaactttctctttcacataggtttcttttggaaacctgggatcttttattttctcttcatatttatgaatatcagatactactgattactatagctagctgttgtgtttcctctacagttatgtaggtagctaggtagttcttttttccttaaaagtctctcccttgaatggggtggctgattctggcttcttacagtaggcaaggtttatcaagaagcagcatttcttgtgttcttgcctcactgatgagtaacaggcagggaagcaggaacctccaaagtaaggaggccttcagagactcagagtgaagtgtgccattttctttagttctttggtggagttaccggtgctttgctttcttttccctctgtgtttaaagatctgaaattacctctgacatggctctacttctgtcttaggcactaacgtactcagtaggaaccatccctataacaggcctcactttcaatttaagagcagcatgtttttggctttagcttaagagcaaaagctgttaatttttctgttcagttttgatgggaagttttacatagttctcggtgttagtaagttcttatgaagcgttagctgtgtttactgttattaaaatatatatgatcatctcttttgtgacatgaatgattaaaaaaataagtagttgtttatagtgagaggatgtgatttatctcttagtttttggtttggggctttggtctgagaactactttggttcatcctaaattttattttactctatttggcaatgtttttgtttatattgtgcacttgtcatttgggttgaaaattacagctccttggggaatagggagggataccaaaagaatgtatgatagaagatatgatggtaatgttactttttccttttttgcttttccagtttgaacaaaaaagtg

SEQ ID NO: 52791 - DNA, 1578 bp, Homo sapiens
ctgcaggatgaatttgtaaaagttgaattgttgggctgggcgtggtgtcaaacgcctgtaatcccagcactttgggaggccaaggcgggtggatcacctgaggtcaggagttttgagaccagcctggccaacatggtgaaaccttgtctctactaaaaatacaaaaattagccgggtgtggtggcaggtgcctgtaatcccagctactcaggaggctgaggcaggagaatcgcttgaacctgggaggcagaggttgcagtgagccaggatggcaccactgcattcgagcctgggcgacagagtgaaactttgtctttaaaaaaaaaaaaaaaaaaaaaaaaaaaaagttgaattgttgggtcaagagttctgtgtattcaaagtatcaaaaacattgcctaattgctctttattagttttgtaccagtttgcattcctaccagcagtatttgactgcaggggttggcaaatgtttttctgttaagggccagatggtaaatattttggactttgcagcctacatatggtctctttcaaaaacttttctttgtatatattttagtcttgggccatagtttcctaattttggcctataatatagctgcaagactttattttttatttttatttattttttatttttgagacagagtctaactgtcgcccaggctggagtgcagtggcgcaatctcggctcactgcaagcttcgccttccaggttcacgccattctcctgcgtcagcctcccgagtagctgggactacaggtgcccgtcaccacgcctggcttctttttttttttttttttttttttttttaagtagagacagggtttcactgtgttagccaggatggtctcaatctcctgacctcatgatccgcccaccttggcctcccaaagtgctgggattacaggcgtgagccaccgcacccagccatctgcaagacttttatcaaaactttttgtcattaccaacctgctgtgtgaacgtgatatctcgttttattagtttgcatttctcttgttgaaccttagtattttgctctctctgaaatatttgtttgagccctttgcttttatatgtgtatttggttatttgtctgtatctttactgaactataggtcctatctttatcttttaaggaaattaccctttgtgatatgaaataaaaccttttaaatcagtttatctttttatctttttgatttggtttgtgttttctcatctctagccatttttaaagtcacatttgatcttttatatttttatttataacttgatcttttattctggatttttttggtcattattagaaaggcttgtctctgcgactcaaaaataattcttccatagtttctttaatattactaaaataattcttccgtagtttatttaatattactgttttatttctttatgcctaaaacttagatacatctgtaaaattttttgatgtgagttagggatctcatttttccatatgactacccttttcttcaaatactatatcctgaatttaaatgtaatgataaggggctgggtgcagtggctcatgtctgtaatcccagcagtttggc

SEQ ID NO: 52792 - DNA, 3912 bp, Homo sapiens
ttattttttgaactctggggatcttgcaggaattccagtcgttggtagtgacaatgaggatgaacaggattttagttcaaaggacaatcttgtttcttcaattcatactgatgatagcttggaagtagagagaagagtcacacagcatgaatcagacaatgaaaatgaaatacaaattcaaaataagttaaaaaaagactttcctaaacaatttgatcaggtttctgtctttaaatcaatacggaaagattttagtctagtaagagaaaacagcaaagagacattttctggaaaggagaaaaatagagacctaacttatgaacgtgaaaaacggttggataaaccccataaagatttggattcaaggttgaaaagcagtttttttgataaagcaggtaataattgttggacttagaaccataaaacacaattaaaaattaccgatcataatatatagcttttattacttttgatgttaagtgaagtatgaacggttaaattcattgtaagcttgtcatttttcttttgtccttgttctttgcagagtgactgaatttctcccagtaacttttggtaatggtataaatggttgaaaatagctctaaacctcatttctccctcccctggttgcaatgttttgatgagaaaggcaagatacttgaatcacctgttcattttctttggttgaacattggaacctgaagttggatttaacttctttgtgctgtaagcactaattcaaactgctgtctcaccacttagtccaaattagggagttattttatttttttaattttaatttaattttttgtttattaactctcacctctatctgaaagggagtttttttttaataaaaaaaacccaaacatttctaatttatgttttagaagtttcttgaggttcctcctgagcctctttgcccagtgtaccctatactttagctttagttaacattcttgaatatatcacatatttccttctatgccttcctttcctcctgctattccatttgcctgcatgtcattttctctctgtatatttgcttgtgaaagtacttcttatccaacaatgcctaactcataaacctcttctactctgtcatcattctaactgctctacatcaagaatggtttccttatctatatttccacagcattttcatgcctcattatttatagtacttatcacacagtattatagttctatatttgttttaccttacctactagtgtaggagttgagggccagattgtatcttactcatctttgtattcttggggcctaacctggtgtagtaaaatagtaattcttcaataaatgttcaatagctgtgaaggaaagcaagtattctataccagtccttgtatttcttctaacaatgctaggaaatgtatggtagaaagaacaaaccagtattgttaaaaagacagcttttgagtatgtacaagtctgtgcaaggatatactatatttttctctataattcagtatatatttccaatatcccttcttggggtatgagagtcatgtttctcaaggaacataatgtctagtagtagaatggacaagacaagtcaggccgtagaagtgccaatgtccagctgaatagcgtaagatttaatttacagttaaagacagtggtagaagagtttgtcataaggcagttcaaaaagatgtctttcaaataactgaaactgtgttttagggattcttagaagagagatgatttttaacttagtgaacagggaaggttttatagaggagaggtgaatttttaactgagctgagtctggaaaactgtataaagattaggatagacagaggggacttggaatagaataagtagaaatgggggagaacaaatgcaagcaattttcagagcaaaaataatttttttttttttttttttaggtttgagcaaggaaaaaatgtagggtaaggctaaaagctaggtggggccagattgtgcagaactttgagtgaaaataccttttgggtgtttttgggacccagttcactctaacgagcatctttgttggaaaagagaggtgattatcaaatgatagctttttaggtcactctttgtaagatttgttattcatatacatgtgtttgtttgttttttttttcctttcaatagctaatcaagttgaagaaacattacatacccatttaccacaaaccccagaaacaaactttagggtaagttttcagtgtgtatgtagattgctgtaactgtgacaagtgtcaaagttttctttatgtcagtttctaaattctaacaatgtattaggtagagcactgattttttttttttaatttgcttaatatttgtttaaggtcatcatcggagacattctaaaaagcctcaaatcttagggtctttatttgtatttggtatttggacatataacacaattacttttaggcgtaggcataagatccaaaagctaatgaatgtccatagagttcttcatttccaatgagcttttctttgggtgttaaacctgaagaggaatcattttaaaatctgaatatttattaatcctttatattgtgttttaggattccagctacccatttgccaataaagaatccattggttcggaactggggaattcctttgcatcaaatattagaattaaagaagaacctttggatgatgagtatgacaaagcaatggcaccacagcagggactactagacaaaataaaagatgaacctgacaatgctcaagtaaacatttcaccttttttccccccttctttttgttccacacattgaattattcatttgagagaggaagtgcttaagaagtgaaatagtttgttgacagggtgaaaggaaactcttaaagaaggttgaggcgatttgaattaccatataaggcattaacgagctatatgaaacttttcctgagtagtaattaaggcttttaatcatctttgtttcttaataccactgtgatttttgcaatgcattttagcgcaaggctttgagaactatacagcagatatggttgaagatttatggtagtttataagtttgtggtgcaatcaagtttatgtaggatagtaagccttttgcagttaatgctaatgaagtacaggctatatatggatttaaatatttttcaggaggggttaatggacagatcatctttggaagggttaattgattgaagaaccagttcattggattagtggatagaaggtaaaggaggctttgatgaatgatacatgattccaagtttgagatctgtgagtaataagagtgaaggtagagctctgctatttcaaggttgctctggagataaaatcatagagatcttaaaactgtgaggtcctgaagtcagctaagctatccatgcagttaatgatgttgctgttgttggaatagaagaaaaaagttatatcagatgctgcaatcattttgaagtgcaagaaggggtccaagggacgaatatgcaatagcagcaattatttgagggtatctgtgttttgtaaagatggtatgaattggctctttttctgaaatgacatttaatctgggggaagcttatattttcctatctttctgtttatattagaaggtttgagactgtcagacttctgtggaagtgctttctttttcttttctttctttttgttttttctcttttttttttgagacaaggtcttgctctcttgcccaggctggaatgcagtggtgcaatcactgctcactgcagcctcaacctcccaggctcaagtgaacctcccagctcagcctcttgagtagctgggaccacaggcgtgtaccaccacactggcgaattaaaaaaagatttgtagaggggccagacgtgatggctcacgcctgtcatcccagcacttggcaggctgaagccagcagatcacttgaggtcagg

SEQ ID NO: 52793 - DNA, 3295 bp, Homo sapiens
tcactgagtcaaattgatgctcagttagcatgaattccatgacgttcagtggaagttggatgtgttagggtagtgataaagctataggagttggatggatatgagtatacttgctacaaagaagaaagtagaaggaatataaatagatttttctgttctatttaaatagaaggtaaataaaagcatgtttatagaagcaggtaatggagatcttagatatctgaattagggataaatagatgtcccaacacctggggaaagttcatgtggcagtatatgcttcagaagactacagccatgtctatatgaagggcagatcttgtatctcttctcctgccccaatgtgggcatgctggcagggtaccaaaatcatctctttcttttgtacttgaaccatgtgacacttccttgggacaaaaaggcacttagagcataaaccaaatacaataggggtagagaacactgagaaggttattagtattgttgttttcagaacaatcagaggttccagtggctggagaatataaataggatggaacagatagaaacacttaaatttttatatacttattcagaattataaaatgtgttatcaaatactgaatatgaatatgaagtttcatcatgattatgggaagaacttccccaaaggcttactccctgattgattggacttgagaattaagcagtaatgtgagtaggtcctgggcataagatccaaaagcattctttaccctgaccccacaataagggacttgtagtatgtgagtggatagagctaggttttccctgaggagtcctttttgttgtcagcaataccagtcctataggatcagacctttgataattcttctagaaatcccccagagcagctctcatgttataaactagatatgtgattctttccttcttttctttttcttgtcttttccacacccgtctccaccttccctccttcttttagaagagtattgcctttcaaaattgcataatttattacttttattcatttcccatggactggaaaagagaactctagtgtattatattattagtctcaaaaaagtactattagcctctcataaaatactgatagattttacagttgtggtcagtgtttacttttgaccatcagttaccagtaacttctttcatggttcaataaaatcatagctttagtttatggcaccttttcaaaacttcctttggcttttctttgtgcttaatttaggtagttttgcttttagctcacttcctaattctcttttttacacaattcattttggtcctaatttctttactttactatataaacaaggtgctgaaatgtgtgtgtatgtatttaacttcctctacccatttgctcttggttatttcttcagttatgatattctggatttgccagtcattgtccgtcctcctgcctctattactggcataatgtcattgggtctcacagtttcatttcttcattctaattctattgcatgtttctataatgttttctgtagtatttttacagttacagatgcttttacacgtactgtgttgcttaattcgcctaacaaccctgtataagatggccagagtagaggatgttaacatttataggtgagagagctgagagatatagagatttagttactcaagccctcatggccaggaaggagccaatctggggtcataatcaaagtcttttttttttttttttttttttttagtctaccaatctttctgtaaataaaagttgtttaattttaaaaataccaagggaaggtttcaaaatagatactttaaagagagccagagacctcattttcctcttttgccttttccatagggtctaaaaactgtacattcagtaaatactacattaaagtcatgatttctttttcttcttgttcataataatagaggacgagctaatgtgtagtctctcattgaaagaactcaattaaaatgggaaagcaaatgaactaattgtcataatagtcattcacacagttttggaaagaaaatgtagtaattcaaatgttggggctcttttagccatattgagttaatttggcaatagaaactgtgttattcatttctaaaatactttcatgggatattaatattgatcttcatttgtagtaaactaagaaggtaaaggtattggtaaaggaatttttttgtgttttggcatgtgtttttctgcttctgaaagcttttgggttaccaattagatatttacttctcagaaaatatttattagtatttggctactcattgatttgtttatcaaatacttgtaaaattagtgatcatgggaggatccaaacataaaccaaacatgattgtgccttgaaggcattgtggaccatacaaacagtacttaagatgtatactattttactatattacataaataatacgtactcaaggctaaaggaatccagcagaagtttgcaatagccatcacagagactaagagagctgactgcagaccgttaatgtatgccaatgagtattggttgtttctggagttttctgagattaaaataaaaatatttaaggaaattttctttaatacactatataatgaaggaatgtcatgattagtcgatgttagaaaatcttttaatacatatatttcatcagcaggtcaaataagggtatctgtaatagtcactttattagatgccaaaagacatctcatgtaattcagacatttcttagaatagattttttcttgatcatagtaaggaactactacttcagatcagtaacagttattgaagttgaagtaaaatgatggaaatcttctgttaatattactaaaagaatacaagttgcggatgtcatcgttattatttaactcttgttggatttttacttcaatccatgttaaagaaattagaagaaaaaataatggaaaaagggaaataaaattatcacttgctattaagaatatttatgaaagaattaatagaattcatgaaaatttagtggagtacctagttgaattataccaatacttctataaataaacttcccagttagatgatataatgaaaaagatacactattcccagcagcaactaaaaagtacttatatcaaatacaacttgaaataatgaagagaccatctttttaaatgtaagaaatatgtagatgtcagttatttttaaattaagatttaaggccaggtgcggtggctcacgcctgtaatcctaacactttgggaggccaagcggggggcgaatcacttgaggtcaggagttcaagaccagcctggccaacatggtgaaac

SEQ ID NO: 52794 - DNA, 1523 bp, Homo sapiens
gagtggtttggtgggattagggttggagtggtaaggagccttaatcattagggttttaatcttcaatgcctttgttactagtgcttagaaattaaattatttagatatggtaatgttatattttatataactgtgctagaatatgcactgtgtagtgtaaaatgtatgtttacttttaaaagatactaatttttgacaatgttaaatgtaatacagtattttttaaagaatattttgaaaatacagataattctagaaaagaaaaatctcgtataatccctcctgtagagataatgaatgctaatcatttgatgttttccttttagtctttgaaacatactaattctcataacagttctatgaagtaggtgctgttaattccacttcatagaaaataatttaaggatcaaagcaatttttaagtgtctcccagaaaattaaagtttttaaacttaaattccagtgttatttccctacagtataattgcctctgttttatttagttattttagctcacagaaaggaaaaagaaatgaattataccatggcttatgttatttttttcttatttttagagacattttaaatccaaaggatgtgatcagtgcccagtttgaaaacaccaccactagtaaagatttttgcagtcagtcatgtttgtcaacatatgaactgaaaaaaaaacctattgttaccataaatacaaatagtatttcaaccaaatgcagcatgtgtcagaagaatgctgttgtaagttaccattttcctttattggggcaggagtctaatacgtttgtgcttaaagaacagcttttgatgctctctgctccttgtttttgtgttgctgttatttaatttctagattcgacatgaagttaattaccagaatgtggtccataaactttgcagtgatgcctgcttctctaagtttcgttctgctaacaacctcaccatgaactgttgtgagaactgtgggggttactgttacagtgggtcgggacaatgccacatgcttcagatagagggacagtctaagaagttttgtagttcatcgtgtatcacggcatacaagcaggtacatgaccatatttaatcttgatgtctttgttcagttcaggtaatctgtatttttagtcagaattatttatgaaaatgttgttttgcaatattgggtttactggccaagtgccatggctcacacctgtaatcccagcactttgggaggctgaggcgggcagatcacctgaggttgggaattcgagaccagcctgaccaacatggagaaaccccatctctactaaaaatacaaaaattagccaggtgtggtggcacatccctgtaatcccagctactcgggaggctgaggcaggagaattgcttgaactcgggaggtggaggttgcagtgagccaagatcgtaccattgcactccagcctgggcaacaagagtgaaactccgtctcaaaaaaaaaaaaacaaaaatgtatatatacacacatacacacacacacacacacacacaca

SEQ ID NO: 52795 - DNA, 1023 bp, Homo sapiens
atgtaaatatgtatgtgtatatatatgtatatatacatatagagagagtttactatttgttttaactggtattctttatacataagtagtatttgttgaataaatgtgcattaaatattcatacagagttctataagtagcagttttattcatgcatttgtttatacacgtttatgcatttgaaatacaagtttttagagtgtggctttttttttttttgagatggagccttgcactgtctcccaggctggagtgtgatcccggctcactgcaacctccacctccctggttcaagcgattctcctgcctcagcctcccaagtagctaggattacaggcgcccaccaccaggcctggctaatttttttgtatttttattagagatgggatttcactatactggccaggctggtatcaaactcctgacctcaagtgatccacctgcctcggcctcccaatccctgtgctgggattacaggtgcgagccaccacgcccggccagtatggcttttttatttcaaaagtgatttgtattctttaacaatattttgaaagttaaaaaaaaacatgaagaaatgcagtgtatctctcacagataacaaatcctgtcattttggtgtatagccttctaatctttccagcatgtgagatttgcatatatacttcttatttgacaaggaaaggttcaagttgcatatgtagtgttgaaatctgattcacagaattaaaattgcaaaccagataatcaaaattatatcattaattgttacagtaagggatttttcttatctttatgaaataggaagaaatagatgtggattatatatttgtgaattgatgaggtgtgcacgggatgaactggatgaactctataacaaatgtcttttatgtagttttgtgtgtattagatttgtattttattagtgaattttgatcaaatattagttttaaaattgataaacctaaaggaatagtaaatgctatatatatttctaatttttaatttttgtgggtccatagtagg

SEQ ID NO: 52796 - DNA, 1281 bp, Homo sapiens
taattgttcttaaaaccttgtagtaattttggaatttaagcgtgtttcaatttatttcctgttaatgtgaaaacacactataatggctaagttttactattcattccttatttttgttctcaaagaaaaaaaaaatccccacatcttcattgttttgtcattttccaaaagactgttcttttcctgatactgtatcaggtactaaaagttacctggattcagtccattgaaagatgagtgatagtccacaagagagggagaaataggatgaaacatcttaattttaaatttattctttacttttaatttagtcaaaacctattaaatttttcatgtattatatctgctgtggtagagaaagaactggaatttagaagtaaggcagatctacatttaattctagaccttatgttcaaatacagttttaccttggggaaagcagttaagctccctgagtcccagtttttctgtctgtaaataactatgataccacctatgtcactgggatgtttttaggattatagaaagtaagaatgaaagaatgcctagtatgtaactgaggcattgtagatggtcatttctgctaccttcctttcttccttatatataattcattcaacaaacattagatataatttctgttttgaggggctgcctgtctcctgagaaagataagacgtataaatgagtaaatagagatgctatgatggaagtattatgggtacagtgggccacagaggtagcatagtgagctctacttgatagggaaagatgagactatcagcagaagcttcacagaggtaactcttgatctgggtcttacaaatgaggtttgcttttacagtcctcattagggaggagagggaaatggggttagagatttagaagacattccagaattcaggcatatattcactttactgtgtatttattttaatatcaagttttacaaattgattctttaagaaggaagattgctcttaaaatctcctaattggtgctggacgtactttaaaaattatcctgaatgtgtgacatgttaataatacttagcattatttgctgctgaatccctaattgggtgaagacttaagataacggactctggttgtttgtatttggacacctgtgatgatatcccaggtttgctcttactttacgcttatggagtattttttttattattagtggtagaatatttgccaataagttgcctaataaggttactaatttccttaaattcatatttacaagcacctttggagggggttatttcaattt

SEQ ID NO: 52797 - DNA, 1050 bp, Homo sapiens
ccactatgcctggctaattttttttgtatttttgtagaggcagggtttcaccatgttgaccttgctggtcttgaactcctgacctcaggtgatccacccacctcggcctcccgatgtgctgggattataggggtgagccactacgcctggccgcattactttttcaatgaaatagaatagattggaaaatatcaaagtgcattacatgttatcatgatatttattcctctataaaactttttagttttattacatacatgcatcatacacaaatgcaaaatctcagaagtacatgtgtaccatgaaacttcctattgaggattacaatcataaaagtttgaaaatcactgatttcaaatatttcaaaagtgttgagtataaacatttcgaagaattatgcttttactaggaatttgttaaaaatgaatgttgttttattctcttaatagaaatcagccaaaattacaccgtgtgcgctttgcaaatcattgagatcctcagcagaaatgattgaaaataccaatagcttggggaagacagagcttttctgttctgttaattgcttatctgcttacagagttaaaatggttacttctgcaggtaatattggtttcacaaactatgaaatgcaatggttgaaaaataatggttattgctttgtttttaacggttttttttggttgatttttaaggcacatttaacatatttcagatatttgttgtaaaatatcacctgttaccttgattgcttatttatttacttgcatacctatttatgcatttcccccttaccaaaagaatttcatatggcttctttaatatattttctttttccctacctaatttctttgaagtttcatttatctggtagtttcagggtagactttgaccaatttaaattggaaagaaacattttcagtattatgttagtttttgtctatatgtgacatgatttagtttcagttcctacaacttaccctggctcttaaattttcttatattgtatagtattatttaatttctcatacttttgtgtacatttgtacatat

SEQ ID NO: 52798 - DNA, 1049 bp, Homo sapiens
gttttgtttttccagaatttattcaacaaaccaactggaatgaattcttcagtagtgcccttgtctcagggccaagtaattgtaagcatccccacaggttccacagtgtcagccggaggaggtagcacatctgctgtttctcccacctccatcagtagctctgctgcagctggtctccagcgtctcgctgcccagtcccagcatgttgggtttgcacgaagtgttgtgaaactcaaatgtcaacactgtaaccgtctttttgccacaaaaccagaacttcttgactataaggtaaagtatagcatgttcatgataagattttgagtatacgtgggtctatttgtaaaattatttttaactttgcatctctcaaaatcataccatttgttttgaaagtaagggagataaggagttccataagacaaaccaaatgtttaattagtacttaatgattatttctttgcagggcaaaatgtttcagttctgtggcaagaattgttctgatgaatataagaaaataaataatgtaatggcaatgtgtgaatattgtaaaattgagaaaattgtaaaggagactgttcggttctcaggtgctgacaagtcattctgtagtgaaggtaaagacagaagattatcttacctactgagcatgttggttgttttaaagcagttgatgatgatttaagctttcactgtctaagttaatctgttttattgtttatgtataacgtaaatgccttttcgattcatttacacttagttcattcttttttgatctagttttcttatattatgtagctgttaaaatgaagtgaaagatttgcaaagtataatgcagaagaagatgatgtgaaaaacatttaacatccttaggttccccattattaggttgatcgggacctcaaagagcttctagttcgtgtacttatttctaaatgggatgccttaaattatggtaacattctaagtttatacttttattgtcttaaacagccattatatttctgaatataaatggcttgaatatgcaaattaatatgtggaagatt

SEQ ID NO: 52799 - DNA, 1013 bp, Homo sapiens
agctgggcgcggtggctcacgcctgtaatcccagcactttgggaggccgaggcgggtggatcatgaggttaggagatcgagaccatcctggctaacatggtgaaaccccgtctctactaaaaatacaaaaaaattagctgggtgtggtggcgggcgcctgtagtcccagctacctgggaggctgaggcaggagaattgcatgaacccaggaggtggagcttgcagtgagctgagatcacgccactgcactccagcctgggcgatagagcaaggctctgtctcaaaaaaaaaaaaaaatatatatatatatgtgtgtgtgtgtgtgtgtgtgtgtgtataatcattgataaagacaaactaattttttgatctaaattctaagttaatttcgtcacttgttatgtgtgtcttatttttattttgtcagaccacagataatttgtttcttactccttgactaccttcttctttttagatggccaaatgtgatgcttgtaagcgacagggtaaactcagtgagtccttgaaatggcgaggggaaatgaaacatttctgtaacctgctttgtatcttgatgttctgtaatcagcaaagtgtatgtgacccgccttcacaaaataatgcaggtaaaattaaccttaggtactgaatggagtctttggtcaatactaggaactactgttcttttacagatcaggaactgtgtaaacagttgtcattaatttcatgaaacctcagtttccttgtattctgtatcaataacatttagctttttttgttgaacaccttatttcactgtcgtccgtgtgaagagaccaccaaacaggctttgtgtgagcaacaaggctgtttatttcacctgggtgcaggcggtctgagtctgaaaagagtcagtgaagggagatggggtggggccgttttataagatttgggtaggtaaaggaaaaaggggggttgttctctggcgagcaggagtgggggtcacaaagtgctcagtgggggagctttttgag

SEQ ID NO: 52800 - DNA, 1003 bp, Homo sapiens
tttgaggatttgcattgttggtttttaagttggtttttaagttagactatttgttgccttttttatgtaaagataaagttaatagaaaactttcaagttttactaattaaaaagtagaaaaccagggtatggtggctcatgcctgtaatctcagcactttgggaggctgaggcaggcggatcacgaggtcaggagtttgagaccatcctggccaacatggtgaaaccccgtctctactaaaatacaaaaaattagctgggtgtggtgctgcgcacctgtagtcccagctacttgggaggctgaggcaggggaatcgcttgaacccgggaggtggaggtcgctgtgagctgatatcgtgccactgcactccagcctgggcagcagagtgagactctgtctcaaaaagaaaaaaaaaaagaagaaaaccaaaacccagttaatcctaaagtgactttttgctccaacagaaattactcaaacctgaaaacattgtttaacttccttgaaatggtttctgtgtaagtacatataaatcacgtgaggtttccttatttttgtttattttaatcagcaaatatttccatggttcaagctgcttcagcaggacccccatctctgagaaaagattcgactccagttatagccaatgtagtatcattggcaagtgcccctgctgctcagcctacagtgaattctaacagtgtcttacaaggtatggcttgattggaaagcatttatctagcctatttaggttgaatgcagtggtcccctaacttcctttcatcagggattattttcatacatttgacacattcaatattaggaatagtggcttgctgcacaagtttcatatctcatactttagaattgctagtttcttccgttgaattaaaaaaacacatgttcttagtatgagggtttgtgtttatgtactgataatcagcttttaatgctaatgttaaaataattgtaaagatcctaaatttatgttttaatttatatc

SEQ ID NO: 52801 - DNA, 1096 bp, Homo sapiens
tctatccttggtctttcagatgcctgtccctatgcttattccatcttcaatggatagtgaagataaagtcacagagagtattgaagacattaaagaaaagcttcccacacatccatttgaagctgatctccttgagatggcagaaatgattgcagaagatgaagagaagaagactctatctcagggaggttggtatactctttaaaagtaaagaaagaaaaaacacgttttacacattttcaggtgactcaagtaattttaagtataagacagggtgtttctaaaacctttattgtctgtgaataccaagcctgtggggttgattacactttttagtgcttctgaaagctcttattgtttttatgaaggaaaaccaagtattggtattcaatagtttttagttatgattccagaaaaataacttagaaatcaagatttcatgatcattttccaattccatctctgtaatcaaagccatggtccccacataagaattcctgttatataataaccagcatgctggtagagggtaaatagaaccttaggatggaaaaccatttggctcaaaataactgatagatagatctcatactactagtgtggaatcatgataaaaacaatagttaacgttttgtgtgcttgccatactctaggcattgtgctcagtgcattgtgtgccttgcctgattcaatcttcatgacagccttatggggtggggagggggtactatgtatctcaaatttctgatctggaaagtaggatgttagacttgccttggttatgcagtccagaagtggcggaaccagaacttgaatccagatacatctgactccaaagcacatgatactaaccagaatccccattaacagtggtaatctgtttaactgcatttatccctaatgtctaattttgttaatgaattattctttctgcatatgaaatctatttacttagaactttgtagtatgattgatgtatatagtgcagtcatttcatttgagatataatttgttgtctaaacataaattatttatgtgcttttctttttctttagagtcccaaacttctgaacacgaactctttctagacaccaag

SEQ ID NO: 52802 - DNA, 1593 bp, Homo sapiens
ggtgagtctatatctggaacatagtaaatacccaaatgttagtgattattacagtgtgctcttctgcatttaaactttttctttcttccttcctcatatggattggattaaataatctctaaagccctttcttgctctaagaactctgaatctttaggatataaaactaaattctttattctacaaatgtataccctttccagctttgagaaccctgactcttaaaaatccaaaactaaattttatgttctgtaaatttttggaattcttacagggacggaagaagtctatagtggctgtggagcccaggagtcttattcaaggagcctttcaaggctgctcagtgtccgggatgacactgaaatacatgtatggggtaaatgcttggaagaactgggttcagtggaaaaatgccaaggaagagcagggggatctaaaatgtggaggtaagtgcacagcatgaattgtatcttgatttaggtagggggaaatatacagataatctactgaaaagggatacattttaggtcaaaaaccccataaaactttggtttgggctttacttaattttttccgcacttttattttatttaaacttttcttttatgtttctctccttgtcaggggttgaacaggcctcatctagcccacgttctgaccccttaggaagtactcaagaccatgcactctctcaagaatcctcagagccaggctgtagaggtaaaatttgtttctctccatttggtatgaattatttatattattattgcggatttaaatttgtaaattgaatatttaaaattatttaaaatttagagtattaaggttagaaagagaaattaatcttatcccgttttaaggaggttgttataagggtaaggttatgtcttctgctcttgagtttattatgcaaatatacagaattttgttttatttttgacactgtgcaagtgcctcaaaatatgtcttcttgagccctgcgtctgtatagtaatccatgtggagcccagttttttttttgtttttttttttaagaaaaatacctggaaaagccttgcttctaatgtaggaatttttccttacagtgagatctatgtaactgacaatgtttgtgggtttcacttcagctgccaggaaatttggtattacatgagcatttcaaataaagcaacagtgtataattttaaggcccacattagttttcatttttcactacttttgacaccctattctaaatttttgtttcactttatcttttgcttttaatttgtgttttatgtaaaatacttatacaatctttatggaatgagatggggcagaatggaggagtatatccatgtaacttgattttattccactttccaactatatcttctttctgtcttaaacctaggtgattgtatgcactcttggcttcactccagtctaccctgttggttttggggcacatgtaactgtccttattggagcacttagttgctgctgtgggcagtgactaactcattgagttcctatagatgaaatgtaatctgtctgctccaaagctatgtaaatacactcctgttgtggagatttactaggccattaactgcc

SEQ ID NO: 52803 - DNA, 1050 bp, Homo sapiens
tttatgtgttctctacagctccttagtttctacagcaacagcgttgttcagagcctatatggcctacacatcccaaaatatttactttctggccctttataaagacagcttaacccctaatctaaaatatcaatagattaaaacggtttcaggagactccacgaacggtgtctacttgagtggaatcatctgcctttttctttgtggtgcgttttctggttttctgcataaggaagaggggaaagaggaatagtcagtttttctctttatatctccctgtcttagaatttgagagattacttagtctactttagcaggagctcagtactgtttcttgtaccccttcttctgtctaggttacatgttctctcgcattgaggaagagcatttgtgggagtgcaaacagctgggcgcttactcaccaatcgtccttttaaacaccctccttttcttcaataccaaatacttccaactaaagaatgttactgagcacttgaagctttcctttgcccatgtgatgagacggaccaggactctgaagtacagtaccaagatgacatatctgaggttcttcccacctttacagaagcaggagtcagaaccaggtacgggatactgtttgtcagatttctctttgaagtcttagtagtagtactaaaatagagagttactgcagaaaggtaattataaatgctagacgtgaaagagtgtacctttaacatttgaatatttttctctattgtcagagagtggtcaaaggctggcctcaaagtgagaggaatcacgtgcttcaatatactttcattggcttttaaattagaaattttgatttaattgggcagagctcaaatagcctgcattttaaaacttctcaggaaattaaaaaatacaaacagggttgagaatcactaatttactagccccagatgagtcaatcactagttaaacgaaacctgcagaacttttagtccattgtttctaaatctttttttgaccagagcccctctttttagttaacattgtgaaattctgaaggaacttaaaagctga

SEQ ID NO: 52804 - DNA, 1648 bp, Homo sapiens
ggagaaaggttgagagccatattaggttggtgcaaaaataattgcagtttttgcccttacttttaattacttttaatggcaaaaacctcagtttacttaagaatagtacatatttcctatactctctgatttctaattttcttttttctctttttttttttcccctgtggatagttctgaaagtgtgaagcaaaggaatgatgtgttttaccttcaacctgagcgctcctgtgtcccgaatagccccatgtggtactccacattcccgatagaccctggaaccctggacaccatgttaacacgtattctcatggtgagggaggtacatgaagaacttgccaaagccaaatctgaagactctgatgttgaattatcagattaaaacggaagtgaggttcttattttcatacatattggtatgcaccaaactgtgaatgcatccagctgttggaaaatgatgtataagtctaagtcctcttgacttgaccataagatcatggaaaacagatgacttgtgaaccccacagtgtggatgtgcaaatgaaaattgaaggaaagaatatgaactgagaaatgttctttggcagtgatatagttcttagacatcttcagaatgactaatttctccgagtggtgcataatcttattttgtttgggagtaacaaatcgtggaatatttttaaggaaaactgttgtataaaactttaccatagtaaccttagaccttagagaggtagctttggagtgaaactttggctgcaataggctactttggcaagccctccgtaaaagtcagaggagagatcagtacagagctaagagtgacatcaaatgaggactgtgggacccagatttgaagacccaataaaaatactcaactttttaaaaaagatagtgaagtggtcttgattgattttgattttcactgccaagccaatcatgtgaaggacagaagcttttgccatgggcccctcacatcagggaaaatgaccttcactgctgttaacagtaatgtgtccctttcattttctggatcaagccttctcagcggtgggtctggatgtgggtaaactaaggtaaaggggatgatattccacaaactaattatgcacacagaaaatctgtggagcctatcagaccccaagtgtcttgaaatgtttgtagaaacccactaaaatgccccttctctgggtgtgggcccttattgcagctgtctcacagcctgagctgtggtacagagaaatgggggttctccttttattttcattttttttccccaatggcagcttttctcccgttgttttaccttcctatttcccaaacagttcctcttattttgtcttttgcaccagtttctggaggcccttgtcatttcaaaaaggatagtctcttttcttactctggcaaacctgtgagtgattccacaaagatacagtattacttagctatctgaattatgatagaaaaggtcctagttaggttcctatataaagcatttggaagatgaccttgttgcccttgaaacttgaaaatagggattctggggtgaggatacaaagacattgtcttgcatatccataagcaggtcttagagcattattccaaactctagctgtttcagtagttctatgaggattgcaagtcatag

SEQ ID NO: 52805 - DNA, 1081 bp, Homo sapiens
gggaggccgaggcgggcggatcatgaggtcaggagatcaagaccaccctggctaacacggtgaaaccccatctctactaaaaataaaaaaaaaaattagccgggtttggtggcgtatgcctgtaatcccagctactcgggaggctgaggcaggagaattgcttaaacctgggaggtggaggctgcagtgagccaagatcgtgccactgcactccagcctgagtgacagagcaagactccgtcaaaaaaaaaaaaaaaaaaaaagaaatgatatctggcccccccttaacactggagccccactcccttctcccatccggcccgagattagggaggattgactgtgtcagggatggcgggtggcctctctcgctgccagggcccttgtcagagcagccaggctggacagacggcctccctcctctccatctgaccggcacctgctgcttcggggcttaggccaccgctccctgtccccagaggagatagccccagatggactggaatgttgtggcatgagagcgcatgtgtgcgatggccccgctgtggtcccctctctgtccctccatctgtatgtgttctgtgtcccttgcatgtgtgcgtgttagagtgagcgcgtatgcatcaactcattgggctcttggctgctcacaaggcaaatttgacttggaaagactttcatctccttggaaccaagacttcctgagtccccctcaccctggccctgttccaccatggttatctgggtattggggaatggaaactttgggggagtgactttttaaagagacacttataatttctactactgcactactgtccattgtgggatgattaaacatggtatttaactgtgcactctgtctgctgggtgtgctgcttcacgctacgtctcggacccgtgcacagctcccaccccctgggcagccctgtgaggtcgtgtcctctggcaaggaagttttgggcctggcatcagcacatgcaagcagtggtgctgggccctgcctgccactggtgggtgggagtgcaccaccccagtacccctgctggctttaagggaggagggttgatgtcccttcttc

SEQ ID NO: 52806 - DNA, 1029 bp, Homo sapiens
gggacatcaaccctcctcccttaaagccagcaggggtactggggtggtgcactcccacccaccagtggcaggcagggcccagcaccactgcttgcatgtgctgatgccaggcccaaaacttccttgccagaggacacgacctcacagggctgcccagggggtgggagctgtgcacgggtccgagacgtagcgtgaagcagcacacccagcagacagagtgcacagttaaataccatgtttaatcatcccacaatggacagtagtgcagtagtagaaattataagtgtctctttaaaaagtcactcccccaaagtttccattccccaatacccagataaccatggtggaacagggccagggtgagggggactcaggaagtcttggttccaaggagatgaaagtctttccaagtcaaatttgccttgtgagcagccaagagcccaatgagttgatgcatacgcgctcactctaacacgcacacatgcaagggacacagaacacatacagatggagggacagagaggggaccacagcggggccatcgcacacatgcgctctcatgccacaacattccagtccatctggggctatctcctctggggacagggagcggtggcctaagccccgaagcagcaggtgccggtcagatggagaggagggaggccgtctgtccagcctggctgctctgacaagggccctggcagcgagagaggccacccgccatccctgacacagtcaatcctccctaatctcgggccggatgggagaagggagtggggctccagtgttaagggggggccagatatcatttctttttttttttttttttttttgacggagtcttgctctgtcactcaggctggagtgcagtggcacgatcttggctcactgcagcctccacctcccaggtttaagcaattctcctgcctcagcctcccgagtagctgggattacaggcatacgccaccaaacccggctaatttttttttttatttttagtagagatggggtttcaccgtgttagccagg

SEQ ID NO: 52807 - DNA, 1010 bp, Homo sapiens
agtttgcagatattttctcccattctgtgggttgtctcttcactttgttgattgtttcctttgctgtgcagtagctttttaatttgatgttatcccgtttgtccattttcgctttggttgcctgtccttgtggggtattactcaagaattttttttttgctcagaccagtgtcctggagaagcatctttatttttaaagccattcataagaagtagatttatacatagtgtataaataaatctgtgcttcacaggtgctgttctaaggtattaggaagaattggttaatcaagaaactaagttggtctttatcccctgaaaaagtcaagagggtaaaagcaaagtcagtgataatgaatttttgccaatttttaatttttcagggtgtcctttggtagtaatagaacatgaaattttaggggttcaatcatgaggcaccaaagtaatttttgtatccagtcaagatgcctgtaatttttggtgtaattgtgaagggtttgggttgaactgttttgaatagccattttttggttcattatactttctctgagtatcatgtttctttcttttctttttttgaaagtcacttcagagagttcttattccatctcctggggcatccaaatgctgaagcttccattaaggatggtttcatttctcctcaagtgcaatgttcccatgcagaggcggataaatctcaagtttcatatttgtctaggaagcccttctcgcctcccaggcttgaaatatgagtggactagcctattgtttgctttaagctctcctagttttgaagtctcatagcaaatgaacatttattgtcagagaaataagatttatataatcggtggctttcagtggtctgcaaacatttttagttgggggaggggagtgatgctactgacgtctggtgagtatgggtcagtgatactgttaaacaccttacagtgctcaggacatttccctccatgacaaagaattacctggtccaaaatatcaggagtgctgag

SEQ ID NO: 52808 - DNA, 1155 bp, Homo sapiens
aattgctgctggtgagtaggatttcaagacctttgtggtctaatgtggagagtggatagacatgaggggaggaatattgaatttgaactatgaaccccaggactgggagtgggcttttgctgcatgcagtgttgcacggaggcattacaaagcttggcattacatattgagaactgcaagtattgctaaaaaaaaaaaaatggggcaaagtgaaatcttcagatccagataagttatatttgaccttatatatcatgcttaggagctagcttcttaccctgaaggccatgtatagctctggaaaggtggtaagattgccttgtgcattgagaattgccttggcatttcttttgggagagaacttgggagttcaaacttctgcttaatgcactagggaagggaagagaaaagtatgcactgcagatctcattctaattagggatgactggcgagcagcaccagtttctagtttgtgctgttttcactaaggtaggtcaagcaactctgcatccaaagtggagagaaattgtatcataaattgcttttgtcttgcctgcctgcagagctgcaaaggcatttggattgtcagtctgcatttttcactcttttggaaatatacatatattgaatccaaaggcagatattgtggaccttttgcaattccaaaagtagaaaggaatgtcatcaatatattcccgtttctcaacttaaagagggtgaagcctgtcctgcttagtttaagtattgcaccctttctgtaccatgaacctctgaattgttggcaggaggagcacagaggcttgttgattgggtcctggaacgtgtacagtataagcagttcagccaattaattgtgtacattataagaatgtgtacagcttaagcagttctgacaattaattgctgccaatcctgctatgtgccagagaaaaaagtgctttatttgagcgcaggaaatgaaagtccacttaggtatccctgcatgtaaggtttgactgtaggaagactgaagtgttgttctctctaacagcatcgtctccctgtttccagtcaataatcacacacggcattttgacccttagcaagccagtggctttctgtggaacaaataaatgacttagaggataaatgagccaagcacccagatagccatct

SEQ ID NO: 52809 - DNA, 1131 bp, Homo sapiens
tttttttgtttttgtttttgtttttgttttcctgtttatgaagtgacattctgtgtaaaaggtctccatggcaggaactcattgagaaggagaacaattaatgaatgtggagcagtatttctagaacctaaaatatccgaagacaaaaaacactctctttcacttcctttgttccactcactagatggctttctcaccctcttaaaaactcgtcttcaaaataacctcaaatgttggttctcagggctctttatggagcagtagtctctgtttttatttcatctgaaaatgttttcattctttgtttttagatgccagtgagagcaggtgccagcaggggaagacacaatttggagttggcctgagatctgggggagaaaatcacctctggcttcttgaaggaaccccctctctccagtcatgttgggctgcctgctgccaggactctgcctgccatgtcttttggtggctagaagggatgtgcattcaggcagactgcagcaggccccagagctgccgggcttttaggacacactcctccaattccatgctggtgtttttaaaaaaattccaaactgcagatgatttgggctttctacctgaagatgatgtaccacatcttctggggctaggttggaactgggcatcttggaggcagagcccacccagagctgcactcagacctgctgtatcttccagtgaccagcagagcttaatcaggaagcttcagaagagaggtagtcccagtgacgtagttacacctatagtgacacagcattctaaagtgaatgactccaacgaattaggtggtctgactaccagtggctctgcagaggtaagcatgctatgaataaggagcagagaaatggttaaatctgctcttacatttggtatatatgagcaatgaagctgatgcttgcgggcagtgctcataggctgaggagtgtatatataaagctgcttggtgtcagcttctttggtgctgcccagatgtacaaagggtaatttgaccctagagatgttcatgctatgtaggtctgaccattgttttggtaaatgcagaaagctgctcattatctagtctaagctggttcttggctacaggtaagtacagttgtatggctgttagta

SEQ ID NO: 52810 - DNA, 1015 bp, Homo sapiens
atgctcctaatattaaatgataaaatcaagttatgcaactacatattcaatatgctgtcaattttgtgaaaagaagaaaaaattatgtaatagaaaacagtctgaaacaagatgtacaactaaatatttatgtatttttttgactagaggaattattatctcttcatatttttctgtgttttccaggcctttctttggtatacttgtattcctttttatataagggggaaaacaacctacttgaaaaagcaacaacaaaataataacagcaaaaacctattggtgggagcctgagtcagtatttctctactcatgagtttactcagtgtttacctgagtgtttacatttttttccgataaaatacattcttgattcctgctgttatttagctcatggattatttctgaaaaactaaccaaattaaggcagctctgcagttatcctccactcccgcttaccacttaggagtttgctccatctttggtagagccccaggcagctgttgacttagacatggtgagcttttttatttccacttttgggttcagtactgaagccctactgttagaaagcattgattacaatttgataaaagatggtctgtctgtgttttccttgtgtgccatggaatggctatttttctgtttaattttattgttaagtggcttgaaaaatagtgttttggacctggggattctcatctggagacaaataggaagtgatcccaggagttttggaaattcctacaatagattgtcagcttcttgagagcagacatgttgcctcttttagttatgctagatattcttagcgggtaccaaggcacatagtagatgcataaaatatttgttgactgaataaattaataaattaccaataagggaattgttctttgagaattaagctttaaaaacaacaaaatcagagcagagatatggaaaggcactttaaggagaccaatgcttttgagaccaacaagattgactaaaatcttaacaaatatattaacacata

SEQ ID NO: 52811 - DNA, 1120 bp, Homo sapiens
ttacaggcctgagccacagctcctggcctctgcttcgttctgaggacaatcactctttgttagcttattatcttgagacattttaagagagacgtctgtgtttaccagactgatgggtaacagactatggggaacagaacactggattgtctcattctttcgtcagctgactgaccagagacaggctcttagttgcacctcccagttcagcctccctgcctcccagtcatcctccagctgctgtttgggtaccctctaccactagagtactagtgccctactgccaactgcctccagtagaatatcagttccacaaaagcagggatttttgtttgcttgtatccccagtgtctagaacagagcctggcacatagaacttagtaatcatttgttgactgatttcctccatgtctctctgcagctccagaaacgcttcatcctgaatctgccaaccttcagtgttcgaatcattgacaaaaatggcatccatgacctggataacatttccttccccaaacagggctcctaacatcatgtcctccctcccacttgccagggaacttttttttgatgggctcctttatttttttctactcttttcaggcgcactcttgataaatggttaattcagaataaaggtgactatggatataattgagccctctggtccaggtctcagtttacctaatattacctcagaaaggatatggagggaagatgatctttttgccaggtctgacttttcttcctgctccgccctccattaacgctcagtaccctttagcagctgacggccccacgttctactccatgcttggcttcctttccaactagctctttcatatattttacttgctagtatctccattctctctaaagtagtggttctttttgcccttaaacttaaatttttaaattaattaacctgaattaataatacatgcacttaatgtaacatgcaaacagtacaaaaacatgtagtgaaaaatatttcttccagagctgggtgtggtggctcatacctgtaatcccagcactttgggaggccgaggcgggcggatcacgaggtcaagagagcgagaccatcctgaccaacatggtaaaaccccgtctctactaa

SEQ ID NO: 52812 - DNA, 1052 bp, Homo sapiens
tttttgccttttacgtttgtgtggcactgagacctgaagaagccagatttggaacttaatcaaaagcttctgagagttggatataatgacagcaccggaagtatttggtctctgtgttctctttcagctatctcacgtgagagggcagtggaactccttaggaaatgtctggaggaggtgagtagttcccataggatcctgaaaggaatgtttgtctctctgtttgccagtgttgttcctgttcctcagttatattttttcagatttttgccagaaggtgtaatacatacccactaaccagatgtgaagttgctaccagggatagagtttggtgtggatagcaagctcacttttctctcacagattacctcctcaatgtcagttttataatttaattctttctggtttatccaaaccagtggttctcaaattttagtgtgtgtaagtatcacctgggaaacctgttaaacagattgccatctctgccccaaccctcaattctgagtccactgttctgaggtacaaactgggaagctctgctttaactggcagtcccaggtgattttcctacaggtggtaactgaggctgtacttgaagaacttctgctctagactttatttttttatttgagacggagtttcgcttttgttgcccaggctggagtgcagtggcacgatttcagctcactgcaacctccgcctctgggttcaagcaattctcttgccttagcctcccgagtagctgggattacagttgcccaccaccatgcccggctagttttttgtatttttagtagagacagggtttcaccatgttggccaggctggtcttgaactcctgacctcaggtgatccgcctgcctcggcctcccaaagtgctgggattacaggcatgagccaccacgcccatccctgccctagactttatacctgctctgttcttgtgccacctgtaattgccatactgcctgctcccttaatagtgctcgagtctttgtaatctgtgagaaaaagcctcccctaagaattcaggaggaccatagaaagcaact

SEQ ID NO: 52813 - DNA, 1097 bp, Homo sapiens
actacacaccgagtaagtattaatactctagggagggagcagtggcagagccctgccctcagctgcttcccaggtttgtccactcttggagttgggtggccagggcttgaataggatggatcctaagaagcataaccaggttcccctctggaagctgcactcttctgtcagtcagtagggtcttccaaaagctgatgtaagttctattttttgccattcaaaatgagatagtacatatctctagagctgggttttgttttgaaggaggattggaatagatgtcacagtgaataaaacatttttattgggttctaaaatccttcatttctaagagttcaagttttttcacttattttgctttgcctagatttttggcatctcagtaaagaatgagtgggtaaagcaagtagctgtatatttgtttggaacttgcaaggatgaacaggtccccagcatgacaactgaaggtttctttgcttaaacatcaaagctttctaaggctacaaatctgagccttcccttggttgtcacctaatggctgcctcctcttgaaagaaaaagccgtcgctctacttgtccgtaaagcgtcagtttggcaaaacttcagatacagggatgcttttttaaaattttattttttaattgacaaataataattgtacatatattcatagagtacatcatgatgtttcaatacatgtaatgtaaacagatcatggtagttagtatattgatcatctcaaacatttatcattttgtgttgggaacatttagtatcctccttctagctatttgaaactatatattgttagccatagtaattttacagtggtatagaacaatagaacttattcctctgtctatccataattttctatcttttttttttttttgaggcagagtctccctctgtcgcccaggctggagtgcagtggagtgatctcggctcacagcaacctccgcctcccaggttcaagcaattctcgtgcctcagcctcccaagtagatgggattacaggcgtgtgccaccacgcctggctagtttttgtattttttgtagagatggggtttcaccatgttggccaggctggtccaga

SEQ ID NO: 52814 - DNA, 1167 bp, Homo sapiens
aggtggcaaaggctggcctggctccaaaggaagactgtcaattcctctctttttctgtgtccacgcttggcaggatgcttcctcacgcccacctctctcccccttgctgtgactttagcttccgccagatgtcacaccgctgcttgtcaccgctcagactcttgtcgctgattttgttgtttcagtgtatttatcacaaccattctctttagctgtaaaatttatggaatttcacgctcttagttactacagtgtttctttttcataagagagggaatatacaaggagtcatatgcacaagagttggagggaagggaacacttaatctaacttaagtaaagtttgcctgtgtgcagtgcacactcgccacccccaaatgtagaagagtccaaagtggcactgagctcagttctgtgggactcagatgctcagaagtttttaagaagtctatttcagtctcggaaagaagtacataagagatgtgcttatcagccaattcccctgtcttcttaaatttgatcttttagtaaccaacaaaagttggacaattttattggctctctgtagcccacttcttgatcttactatctagtcaaatctgttgataatgcagtcaaatcctaaaagtggtggtggtagtgttgtggtaatagtcaatctgcattattacaatatatcaggcattgcactgagcactttacatgtatttatctaaaccttaccacaaccttataatgatgggtacttttattatccttattatacagatgaagaaatctcaaaatgacctaaatgcacttcactgtgaaaataaactcatgtactcattaaaggaggaaaagatacatttgtctagtttcgtcctcaccccaccctcactgccttctattaagaggcaaaattttggtggtacctcatgctagaagctgaagttcattctgaattcccaggctggttcatttaaaattttttctttgtatatcaattagacacaactttaaacatgttggtgtttgcattgcagaccattgatggtgattgccaagacctttgggtagagagtatcttagctaaatgtttgggttcacttggatgaatgtttggatatttaggttaattcaatactatatataatgttcagtcttagcttatggtgtggaagaagcc

SEQ ID NO: 52815 - DNA, 1087 bp, Homo sapiens
aggtggatcacctgaggccaggagttcgagaccagcctggccaacatggtgaaacccccgtctctgctaaaaatacaaaaattagctgggcatggtgacaggtgtctgtagtcctaggtactcgggaggccaaggcaggagaatcgcttgaacccaggaggcagaggggtttttttgttttttttttgagacagtcttgccttgtcgcccaggctggagtgcagtggcgcagtcttggctcactgcaagctctgcctcccgggttcacgccattctcctgcctcagcctcctgagtagctgggactacaggcacccgaggaggcagaggttttaatgagccaagattgtgccactgcactccagcctgggtgacagagcgagactctgtctctaaataaataaataaatacaagcagtgggcctctctggaagcctgttggctaagagggtgttagcatgatcagatgagattggtaagatcattagctcgttggctgttctttgatggagcatttggggaaagaatgaaggaagcggggagaccaatgaggggcctgcatgtcagttaaagccgtagcaataacttttgttggatctggggtgctaatggggaacatggttctaatagaagggctcctaaatagtcttttcctcagaatttccttaatactctatggatatctgaaaacatataccatcatatatagtcctaactactcttttctagaagaccatcttatttattagctcagagagatgaatcagctttgatgttcagaattcatagattagatattcatgggcatgcttagcatgcacaacttaatatatgccttgtagtgtgcaagcgtgtagcaaagcatggtttctgcatttgagatttttaaaaactgacttaacggtatatggaatcttaaattttcctagaatctgccagctcatgaaaaaaaaagaattcaagtgtccttgttgcaaacatggtgttggttttatcattgcacaatcagcaattttattttgacgttatttggggggaagcagtatttttgattagcaagtaaaattaatgtagaaaacaaatactgt

SEQ ID NO: 52816 - DNA, 2168 bp, Homo sapiens
gccttaattcaaggctgtttggtctggttagtagtaggcatgtatagcatgctcctgtcctagaagaaacctgttgctttgagccttctattctgaccatgagaattattcttctcatgccttaggtggctggcacaaaggcatcatctgtttattggtatcagtgaggtcctgtgaacagatggcccaggtgaaaccctgactttgcaagtcttgtcccttatacactaccaaccatttgttacatgtgattgaaatatcactaacaagggtaatttcacatgatttttggcaaacgtggttagcaggatgtgacatgacgcagcactgccttcttcctccatgtgccatctcccttgaggcctcatcttctctacttgcccccgtctcacccatgccgaggcttgccttcagctcacctgctccagatgggcagcacagtgggaggacactggcaaaggcagatgtgtttattttccggagacaaaatgttgtgctgctgcagatggcagtgccttggagcaagaggcagcctttgacactgctgccacacagcctgggcatcttgacagacagagccagcttacttttggtgatgcggaaattcaaaaataaaaaacgaaaaccaagatgttcattatgcagctcttggactgtcagtgcaagcagcagcccttttagacctggggagcagttttcttccctaccaaaccttagtcagctagtgagctaactgtggattgtcactgtaggccaagagttacgtgtctgttcattacttttgtctcccagccttaacaggacataaagtaaaaactggaaacaaatggctacatttagatggatactcagtttggttctgcaaaacatatgtgtatcccaggtcccatctcacaggagtctcttaggattgggggtggctcatgttggccccattggagataccgctgttctgtttttagtggtcattttgattatccaaagacccagagacagatgtgccttgaagttgaggtgtctcaattaatatgacaacactttgtgcttatagtgtttttctactaggaggagtaagcattctgacagctgcccttttaagcagtatgcgtatgcattagttaaagcttgactaagtccattaggaagacaaagactggctgttgaatcattacacttactaggatcctaaaaaaaataacttgggaagattatttgaaagttactggctttatcaggaaatttttttttctttttctttctttttttttttttttaaatgtgctgtttttcctagccctagctagttaggagtttgcaggtgtaaagtcctccccctccccttccctgtctctctccagggggttgtatgtgagaaggtgttgctttctcactcagagagcatatatgtgctaccctgttggatgcctgctgcgagcccagagaacccccgtgctcattgaatggaataagcctattggatggctggaattttgcagccccataatgccaacttttcacttaaagcatctttcctatccacaatgggagtgaagcagtatatgtacttggtctagatttatattgttttaaaactcgtgtcttaaaaattttgtgatttcctattaaggtttggtttaagcctaaggcaggatagtgctgtgtctgcttagtaggaatgtgcttttacttttaaaatgtttactattagaagtgcagatttacccccaacttttaagattgctttaaatcacttgccccagtctgggtaggcataggtgtgggcatgccctcccacatactcacagatacaaacacacacaatatcctggcatcttggtgcctctttttacctgccctggcccaagatcatgtaggaatatgaatttaggggctgatctcaacaacctcatgaggttttctttactctctcccaaaaaacagttacctaaaatgaagggcagtgggaaggcttttcacaaggggaaaggtggatttttctatttcttgacctgagaggttgttacgtgtatatttactatgttcattcgctataccatgtatattttatgcttttttttttcttctttttgagacatagtctcgctctgtcgcccaggctggagtgcagtggtgctgtctaggctcactgcatcctctgcctcctgggt

SEQ ID NO: 52817 - DNA, 1027 bp, Homo sapiens
gagtgcagtggtatgaccacagctctctgcagccccttgacctttcaggcccagatgatccttccacctcagcctccctggcagctgggactgtaggtgcataccactatgcctggctaattttttgtagagatggggtttctccatgttgccaggctggtcccgaactcctgggctcaagcaatcctcccgcttctgcttcccaaagtgctaggattacaggcatgagccaccatgcccagcccacttgtgtttttatgctgcgattgctgtttggtcaaagaagcaatttaatggctataagttagtttttcgtgagggatcatttgttgtgcttttttttttttttttttttttttgagatagggtctcgctctgtcacctaagaggtggcacagtcacagctcactgcagcctcaacctcccgggctcaaacaatactcccacttcagcctcccaaatagctggaactacaggcgccaagccaccatgctggtattgatagggaaaatagaagtaaaataacattgaacatatattatgtgctaggatttttctagatctacacagtccagtatggtagccaactagccacatggggctatttaaatttaagttaattaaaattaaataaaacttaaaattcagtttctggtggaaaatctcctggtagactttgcctgaatgctaaatcaacttttgttcttaaaaaaaaaaattctgttcctcagtcacagccacatttcaggtacccaatagccacaactattgtattagacatcacagatctggaacatatccatcatcatagaagttctcttggacagtgctattctaaatacttacatatgtatctgttattaagtatccttattatgacaccataagatgtgtgttatccccattttacttacaaggatgttaagtatttctcttagatatgtttccaaagcacatatatactatgttaaaggttaagattccagcttcaaatatcaaactctttcatggtgtcttctttattaat

SEQ ID NO: 52818 - DNA, 2327 bp, Homo sapiens
ggcagcagctaacttcacacgccgaaacctggctgactgtcttcggagtcgggtaagtaatatatcagacattgttagatagagcagaaaaatcctttgtgcttcttttatattctcattatacatgagtagtatttttgcccttttttggccttccagaacccctcctgttgctacttgttcattcttaagtccaatgtctttgtgcacagttgttattaataggtacagcccaaagggcaaatattcattcccagagaattggttgggacacaccaatatgaaggcctgtgacaacttaccctttttttttccccctaaaaactattttttagagcagtgttaggttcacagcaaaattgagaagaagtataaagatttcccacattcctcctcacccacatgtatagcattccccattatcagcatcttccaccagggtgatacattgtcacaaatgatgagcctatattgacagtaatcacccaggtccatagtttacattagggtttacttttgctgttgtggatgttatgggtttggacaaatgtataatgacatgtatctaccattacaggatacagagtattttcactgccctaaaaatcctttgtactctacttattcatccttctccatccccacaactcctgacaaccactcatctttttactttctccatggttttgcctttcccatcatgtcatatagttggaatcatggattatgcagccttttcagattggcttcttttatttggtaatacacgtttaaggttaccctatgtcttttcatggcttgatagctcatttctttttaacattgaaaaatactccattgtctagatatactacaggttatttatccattcacctactgaaggacatcttggttgcttccaagttttggcaatatgaataaagctaatgtatacatccatgtgcaggtttttgtttgaacataagtttttttttgcgtaaataccaaggagtgtgattgctggatcatatagtaagagtacgtttagttttttcaaagtgtttttgtaacaaaccatattacttaatacctgtgactgaaagtctctatgtgttagtgaaagtagaactttgaaaataataattcagattatttttatttttatttttttgagatggagtttcactcttgttgcccaaactagagtgcaatggtgcaatcttggcttactggaacctctgcctcctgggttcaagtgattctcctgcctccatttcccaagtagctgggattacaggcatgcaccaccacgcccagctaattttgtatttttagcagacacggggtttctccatgttggtcaggtgtcaggctggtctcgaactcctgatctcaggtgatctgcccgccttggcctcccaaagtgctgggattacaggcgcgagccaccgcacctggccggtaatgtggatttttatctcgagattgcttatctgtgtttctctttttttctttttcttttttctttttttttttgagacggggtctcactccagttgcccaggctggagtgtagtggtgtgatctcagcttactgaagcctcaacttcccgggttcaggtgattctcccacctcagcctcccaagtagctgggactacaggtgtgcaccaccacatctggctaattttttgtatttttagtggaggcaggatttcaccatgtggcccaggctggtcttgaactcctggactcaagcaatctgctggccttggcctttcagggtgctgggattataggaatgagccactcactgtacctggcgtacttacctgtgtttttctatgactttttcccaaagcatacagcattgttcctccttacttattctagccttgttgctattctagagctgtctccatttcatcgacagcatgttaaaagatgcaacactaagttaaggattgaatgcattaaagattgtgtaggatgtgctaggaaagttcatatggttgctaaaggtgtgtgttattcccttcccacagggactaaataaatagagccttaccacgtgatctcaccccctgtgcctgtttacttatctatgaaatggagataacttcctaaccccacaggggtgccaggaaaatgaatgcttgtaaatcataatatttaacattcatgtgacttttgcccaaagcattttgcttaataatttaatctactcactattccactgagaaagatagtctctatcactgagatgaagtgaaaggcataaagtgtcaaagggactagctccaggtcacacagcaggtcagacaaagctaaaataatggtgccataatt

SEQ ID NO: 52819 - DNA, 2114 bp, Homo sapiens
tctaatcattcatttcacgatggagcttgtttagagtaggcaagaatgctgaaaaaatagtaaccttctgggactcctttctccaagtataaaatgataatacaacttccaatcaattgtccagtatgtcactttgtaaaaacattttgatactatagagtagacatttgctgaggattgccaccttattaagtggtataacttttggtttgcttatatgccgcatttcatgtctcttttctcttggcctatgtagaattgcttttaagttactcggagtactccagcccacacagaattctctcttttctgaattcctatagcatgtataatccgaactacattatctaacactgagtatcataatattggacatgtatagaattcattagtttttctcacttgtgagttagacaggggtaagtcatattattaacatttcacacatttggaaataacatttcacacatctggaaactggggcttagagaggacaagtaatttgccgaagttcagagtgccaagtccacatcataaccaaggtctcttggattctagttcagttggttttccacagtatgacatgctaatgttgttcattttgttggccatttgtttcatgtatgtggatctcgtaagttcctcgtcaagaatcagaaattccccagagctacacaggcagtttcctgtacaactcaggggtctctaagtatctatctcttgtgtttttattaaatatgttgccctctgctactcattggacatattcagtgtttaaaaaacatttttggccttgtattaagctaattttaaagttgaacaggttactgcctaggattttagcctttcttctaagtgtgacataagttctttgtaaacaagctcccccttcaaataaaaatatcttttttcttattataaaaataatgcgaacttattgaataatgctttcttataaaagtgaggcatgttaagtatagaagttttaggaaaaaccaacaagcaaaagaaggaaacgaaaactgcccatactcttaccactggcaagcacttagaatatacccttctgctcctttttctttgcatagataatataagtgaatgtttttcgtttattaacaagtttgcaaactaacaatctttaaatctagcctgcataacaaataaaagtgtgtttgtttaggagttttgaggcaatttgatattatctacaggtgcattttgtgtgttttttccctccaagtctaagaagccatattactggtatctacaactctgaaacacttgtaaagtatttgacagtagcattttgttctttaaatcctattaaaggattttggcatttcagaagctttcaaacaggaaacgtgtctcccagggaggattattcagcactatttgaaaaatgaaaagtgaaagtgaaagtgagataggaagatttaggccttttctgaagctgcagactgaatgtggagttttcttccttaggcaataactgtaacctgaatatttatttatctgtctaatctgaatgactctggttcagctagataagattagagtattaggatttttgtgaggtattttaaatagcttactgtcaaaatattcactagaatttttgctttggcaatcattttaattttctctttttctttggaagtggaatttgtttactttttaaagtgattaatattctcagttgattttctattctttcttgaaatggttccttaattttaattatagcaccagtccttttcatatatgcttttgtatgtgtataaatataataactaacatttgtagttgtggaaacattttagggctttgttatcatgagcctaaagataatcgccattggctggattccttcagtttcttctgtcgttctgttccttgcatttcaaatgcctttaaatgctttaaattgtattttcaattggtagctttcatgtatattctccaaccgaaattggcattacacaatatgctgatggtttaacatgaagagtgaaagagaaaaattgataccattacctattaaaatcttctaaaagcaataattagttaaattattcaatatacagtcgtcccttggtatctgtagggat

SEQ ID NO: 52820 - DNA, 2467 bp, Homo sapiens
ccactgatttcaattctgcagtatttacaacatcaacaactcatggaatacttgggtgaggtttcctttttttttttttttttaagatgggagtctcactctgttgcccagcttggagtgcagtggcgtgatctcggctcaccacaatctctgcctcccaggttcaagcgattctcctccttcagcctcccgagtagctgggattacaggcatgtgccaatacgcccagctaatttttgtatttttagtagagacggggtttcaccatgttggccaggctggtcttgaactcctgacctcaaatgatccatccacctcggccccacaaagtgctggtcacatgcatgagtcactgcacctggccttgggttaggtttcacttcctccattagacatttgacattttattgtagcagctttctgggttaatatctctttgtgattgatagaagtggttggaagaggaagagtagggaaaagtgtgacattacagattaaacagtgaaaatcagtaccataatgactcctttacacccatgagatacgtaccatgatgaccagggctcggtgaaagaaagatttctttttttttttttgagatagtctcactttgttgcccagtctggagtgcagtggcgcaatctcggctcacggcaacctctgcctcccgggttcaagtgattctcctgtctcagcctcccaagtagctgggactacaggtgcatgccaccacacctggctaatttttgtatttttagtggagacagggagtcaccatgttggccaggctggtctcgatctcctgacctcaagtgatccagctgcctcagcctcccaaagtgctgagattacaggcgtgagccactgtgcccagccaaaagaacgatttcttagatggaggacctaggaaccaacagatgggctgctgtattactcttacccctttcattttcctgtatgcttcttcccaaggcagcatcaaattttgaattaatttttgctgcttaataaggacttaaactggtacccaagtcagaaagactctgcctctaattttctggggcttggggatgaagataaagtgttacacccagtgtttgtccaccacagtctgtggggcagagagacccttcctgggactgaattctcaatttgaagcactgttgttcaaagatctcccttctgggtctgacaagaagaaacataacccttatttattgcattcttctggcttacatacattgccctcactaatcaatggacatttcagcatttcattactaattttgagagaaggccaccatggaatttaataaaaatattattgaagagaattgccatcattctccattttccctgaactaccacaagcttctcagaattttagacaaatgtttttcccctcagaactgagcatcagtgctgctttggaaaaacattccatgtgaatactgtggtttcagtgtcaggacctgtacttgggcagttggaagagagtgtgccagttttttactgggagatgggaacaccaatttaattgatgcaattaggttgtaggttttttacagtttttcttttcttttctttttctttttcttttcttttcttttctttttttttttttgagacataggctggctctgtcacctaggctggaatacaatggcatgatctcggcttactgcaacctccgcctcctaggttcaagcaattctgcctcggcctcccaaatagcagggattacaggcacctgccaccactcccagctaattttttgtatttttattagagatgaggtttcgccatgttggccaggctggtcttgaactcctgacctgaggtgatccacccgtctcggcctcccaaagtgctgggattataggcatgagccaccgcacccggccggttttctacagttttctaatactcaagatgttgactttgacaatacttatgtttgtatacttgtaatcttataatggggaaaatgtgtataaagatgttttaatatgtatgtagtttttcaataaatcttaatgccttgaagggaagatttgctgtccagcttgaatgctcattcttgggtcagtgcctgtctaaccttgaggagcatttcattttcaggttatctccatcccagggaaaccctctgggtctaaactgagaagctgctgcaattgtcccctcactggcttctcagtcctagtgaattgatcaagttaacttaccaagtggtttgggttcagctcaggtgaagaggataattgagtttacataaatggtaccttctattatagctctttgtttaaaaaacttattttttagagacagtctcattctgttgcccaggttagagtgcagtggcacaatcatagctcactgtacccttgaactcctgggcttcagcatcctccttcctcaacctttggaatagctgggccacattacaggcatatgccaccatgcc

SEQ ID NO: 52821 - DNA, 4703 bp, Homo sapiens
gccactgtattccaggtggtgtaagagaccaagactgtctcagagaaaaaaaaaaaattaacacacacaaaattttttttaattcataacttggctgactacttgtagtttgctttcaacaacttatttattgattcattgatttacattttagggaagaggaagacgaggaggaggaatttggagactttcggcttgtttcaaatgataatgagtttgatagtgatgaggtgagtatgaagggaacaaagtaatcataactgagctccatgtattgctgccctcaagtgtttttttcccctcagttcttgagaattctaagtttggcatcttatcagaaacaatttcctagaatgaggtatttgggcagatgtttataaatccttttttcattgaggacgcattttattctgcttaatttggatatgatgctgattttgtaggatgaacacagtgactctggtaatgatctggcactggaagaccatgaagatgatgatgaagaagaactcctgaagcgatctgagaagttgaaaaggcaaatgtacgtgttattaatatgtccattccttcaggtgtatttaaaatttggtcactaggccaggcatggtggcttgcgcctgtaatcccatcattttgggaggctgaagcaggcggatcacctgaggtcaggagttcaagaccagcctggtcttggtgacacaggtcaagagatcgagaccatcctgacaaacatggtgaaaccctgtctctactaaaaaatataaaaattagccagatgtgatgacaggtgcctgtagtcccagctactcaggaagctgaggcagggagaatcgcttgcacccaggaggtggaggttgcagtgagccgagatcgcaccactgcatttcagcctgggtgacagagcgagactctgtctcaaaaaaaaaaaaaaaaaaaaagttgatcacttaatatgtcctgtgtgctaataactgtgctttacaggcattaacatattatcttatgccaggcacagtggctcacgcctgtaatcccagcactttgggaggccaaggcaggcatattacttgaggtcaggagtttgagaccagcgtgaccaacatggtgaaaccctctctactaaaaatacaaaatacaaaataaaatacaaaaattagccaggcatggttctgggcgcctgtagtgccagctacttgggaggctgaggcaggagaattgcttgaatatgggaggcggaggttgcagtgagccaagattgccccactgcactccagcctgggtgatagagcaagactccatctcaaaaaaattatcttatgagtgggtactattattctcctcattttacagttgaaggaactgagcctcagaaagattaaatttacccaagatcacatagctagaaggcagcagaggctggattcaacttagattaggtgaaatctcccctaacagtcagttaatagtttgccactttttaacttaaatcctcctgcctcagcttcccaagtagctgggacaacaggcatgtgccaccacacctggctaattctttctattttttgtagagatggggccttgctttgttcccaggctggtcttaaactgttggcctcaagtgatcctcctgcctctgcttcccaaagtctgggattacaggcatgagccaccaggcccagcttttttttttttttttttttttttttttgagacggagtctcgctctgtcgcccaggctggagggcagtggcatgatctcggctcactgcaacctccgcctcccgggttcaaagcgattctcctgcttcagcctcctgagtagctgggaatataggcacgtgccaccacacccagctaatttttgtatatttagtagagacggggtttcaccatgttggtcaggatggtctcgatctcttgacctcacgatccacccgccttggccttccaacatgctgggattacaggcgtgagccaccccacctggccggcccaactcatttttttgatatgctgttctggtcatgaaagtaaaatatttattttaggatatttaaaagaatacaaactgggtgcagtggcccacgcctataatctcagcactttgggaagctgaggcgggtggatcacctgaggtcaggagttcgagaccagcctggccaacatggcgagaccccgtctctactaaaaatacaaaattagccaagcgtgatggccagtgcctgtaatcccagctactcaggaggcaaagctggagaatcgcttgaaccgggaggtggagggtgcagtgagctgagattgtgccattgcattccagcctgggcgacgagagaaactccattctccccgacccccgcaaaaaaagaatacagaaagatataaataaaaacttatccatgtccaccatccaggatataaatgaaagttagtttgttccccttaatcttttttatgcatatatttttatatagttgagatttgtacaatctttctatatgtataattttgcatctttttttttctacttagcatatccagaaacattttcctatgatgttaaaaaaagttttataaagataattctaataggtatttaatattatattgtatgtgaatgatttggaattcacatataggacatcatattgatccctattagatttatatggttgcttttatcccatcatttcattctattaagattcactttgggttctaatttatcacctatcaaattaactctcatacagctttaggttatccatagatttttctaaggtagtggttcttctctgcagagctctttgttcaaataaaatcttttaaagaatgacagataaaagttgaactgttcaaagatggtaagtgggaagtttgggaaacttagtgactagtggcctctgaaggaattttccaggaactctaggatttagaacaacttagctttaagaaaatacagtataggctgggcgtggtggctcatgcctgtaatcccagcactttgggaggctgagatggacagatcccctgaggtcaggagttcaagaccaccctggccaacatggtgaaaccctatctctactaaaaaaacaaaaattagccaggcatggtggcacgcacctgtaatcccagctactcgggaggttgaggcatgagaatcacttgaacccaggaggtggaggttgcagtgagccgagatggcatctctgcactccagcctaggcgacagagcgacacttcatctcaaaaaaaaaaaaaaagagaaaatacagtataggtcttcgataaaaatcagttttcagaaagccaccaaacttctgccattttggaccacatgggaccaaggtgactttgaatccagggtgacaccagatttattctccgggggagctgaagtcataagaagtaactagtcgttttgattaccaggagctctgagccttagtcttccttctgatgtgggggtcaagatttgttaggctgtaagaagatcccagtttattacctttctacaccacaccatctctagtttgtctcttaaagctggtgtgctcaaatgcaaaatgaaatagtttgaaccttccagcaggtattctaatacatgtaaaagagattaagagttttctggctttcaaatcacccaatctaagttgaatccaggctctgctaccttctagctatgtgaccttgggtaaatgtaatctttctgaggctcaattccctcaactgtaaaatgaagagaataatagtacccattcctatgataatatgttaatgcctgtaaagcacagttattagcacacaagacatattaagtgatcaacttttaaatacagatgctccacatcttacaatgggactatatcctgatcaatccatcataagttgaaaatgcactttcatattatccagatataactccatcgtaaatcgagaagcatactaagtgcgtatcacattcatgtcatcgtaaagttgaaaaatcattaagtcaaaccatcataagtggagactattacaaaaaaatttaaatattatcaaatgtattatgtttattattattagaagtgactctgttctgcttttctttgcttccatattctgtgagtatattcattgttgcattttctaatcctcaaaattgctttctaggaggttgaggaaatacctggaggatgaggcagaggtgtcaggaagtgatgtgggaagcgaagatgagtatgatggggaagaaattgatgaatatgaagaggacgtaattgatgaagtacttccttctgatgaggaactgcagagtcaaatcaagaaaatacacatgtcagtatcccaataagcccttctgagtaatagggtacatcttaagacaagccctgtaaccagccagaatggtccttgttttgaacaccttatttctcctgttgcaggaaaactatgttggatgatgataagcgacagctacgtttataccaagagaggtaccttgctgatggggatctgcacagcgatggtcctgggcgaatgaggaagtttcgatggaaaaacataggtatcttggttgttgtctttaaaagcaatcagttacgggctgagcatggtggctcacgcctgtaatcccaacactttgggaggcagaggcaggtggatcacaaggtcaggagttcaggaccagcctgaacaacatggtgaaaccccgtccctac

SEQ ID NO: 52822 - DNA, 1044 bp, Homo sapiens
tcctgagctcaggagttcgccaccagcctgggcagcacggtgaaaccccgtctctactaaaatacaaaaaattatctgggcatggtggcccgtgcctgtaatcgcagctacttgggaggctgagacaggagaactgcttgaaccccggaggtggaggttgcagtgagccgagattgtgccactgcactccagcctgggcaacagagagagactgtctcaaaaaaaaagtcttgaaaaaaaaaaagactgctttagctttgcccatatatcatttatgattaatgtatgtacaaagtttagaacagtgtctgatgtataataaatttcatataaatgttaacttacttcctgttccctgcccccaatacacacaactgctagatcgaacataagctctatgagacctgggatagtggtttgttcattactgtatccctggtggcctggcacatatggcacatagtaagcactaaataaggatttgttgaatgaatagatggtaggctcttcttggcaagcttaccttagaactgtatcgagctggcatgactttagatggctgggaaaagagtataaagctatcattccttggtgacacatcttttccttgttgtgatgtagatgcctccactccagcctcatcagagttaaataaacaggagaaggagagcagcatgggtgatccaatggaagaagcacttgctctttgctcaggctcttttcccacagacaagtaagtctcagattgctgggaatttgggaaggcctggccttttgataaaatcaaaataactgatcatcttaagggctttgcaccttttctgagaatcttgcagtggatttgagtctcatatatgcctagtaagcaaattataatgctttggtggagaacagggtaaaaaaggcaagaatatgaaagctatttaatatcattaatagagaaatgccaatcaaaaccatagtgagacacccattaagatgacttttatcagaaaaaccccaagagtgttagtgagaatgtggagaaattggaaaccttgtgta

SEQ ID NO: 52823 - DNA, 1055 bp, Homo sapiens
tctccttcccctgggctatttcgagccagtttggtcagctcagcttctaaggtaagatggtaatggtttttctaatctcctcctctctttgcttcccacattgctaaataaagtttgtcccagccaaccaactcccaccacgttggtactgagcttatgtgtgttcagtttaaaaaatccaccccctttgtgtattaaaaacaagcttcatccagtattcttactttcttggaggtatttttctttatgcttctcatggctgtgtattgtccccctcaactacaatttcctgagagtagcttaaatattgcaaatagcaacttttgtggttgtcatgacaatgactgacatttgtaaaatgttttgttattgtttgtttttgtttgtgtgccagagttcagggaaactgtctgagccttcacttcccatagaggattcccaggatctgtataacgcctccccagagcctaagacacttttcctaggagcaggagacttccagttctgtttagaagatgacactcagagccaactgttggatgcagatgggtaggtagttttgtgtttctgtgggcgggaatggtgctgggtactgcttaattttgtttaaaaataagtgagcttctgtcactccatctgtgctttctcttctgagaaagagaaggtgtacagaccattagtattacattctataagtttgaacaaagtctgtccagaaaataaacataaatagctcttgctaacattctggtccttcaatttctgtcttatttgaaatgcatagatcttgtattgtaaggtcatcaaatttccctgtatccatcctgctatgttattattgttgggtaaggttgagaattcacagactggtggcacattacaggacataatgccaagccctgctctagcatcatctgaagctaaaagttatcctttacactttaccttctgagtaacattttattctttcacaaaacttttccctccctctttagattaacacaagcctaaagtttgaatcttttgctttctggtttgagattcagcttttaact

SEQ ID NO: 52824 - DNA, 1020 bp, Homo sapiens
agtgaaattggcaaggcagttggcttcctctctgttcccaagtctctctcatcagattctactttacttctgtttaaggacagctcttccaagatggggtaagtgattctctctaagaaaacttaaaattgccttggatttgcccctcctgtaaaaactaggaacagatactgaaccaatttactttcttattttgcagttactttcctactgaagaaaaatcagaaacagatgaaaactcaggcaagcagcctagcaaactgggtaagtagtgattcttgtgcagaacttaacatttcttttgtccctcagctttgatatttaaggactgcagtacggtaagtttccatgtttttaaatctggtcacttcccagtttcatatgtagctatgaaaagggtttatgaattagaatatttttcttggtctattttttgcagtttatttatagtagaccatggtacataatgtccttagtgaatgtgtgttgattgagtgagcaatgaaatgtttctgtatgtagatcaaaggaagacgtataattgattggacaatgaagagtgtgatcataggcattaggaaggataagagaaagaagagaactttcggccaggcgcagtgactcacgcctgtaatcccagcactttgggaggctgaggcaggcggatcatgaggtcaggagatcgagaccagcctggctaacatggtgaaaccctgtctctactaaaaatataaaaaattagccaggtgtggtggcacgcgcctgtagtcccagctacttgggagggtgaggcaggagaatcgcttgaacctgggaggcggaggttgcagtgagccgaattcacgccactacactccagctggggtgacagagcgagactgtctcaaaaaaaaaaaaaaaaaaaaaaaaagaactttcaagtgtcacttagctcagagtaataagccctgattatataatgctatcttagtactgtaatttacctttaacttaatgttttggaacatataacttgagggg

SEQ ID NO: 52825 - DNA, 1050 bp, Homo sapiens
ttcgtgaactgccagttcatatcattagctcattttactcgagtcgtttctctttttctttaatataggtaaatttatcaatgtttttcttcatggcttttgagccacagacttgaagctctactccctacccaccttttctctcttttgaacaattattttataatccctgagtagtatactatctagggtgcagaagttctctttgatacttcaattcataataatactcttgtgttcaaataacaaaaaagcccagaatactagagtctcagattttccttttgggatgtgactagaatatttctggagttgcctaaaatgcatacctaattattgtattatgtctaaagcatttctacatatttctgttcaggtgaaaagcttcaggtgttaaaagctaaactgcaagaagcaatgaaactccgaaggtttgaggagcgccagaagcgccaagcactgtttaaattagataatgaagatgggtttgaggaagaggaggaggaagaggaagaaatgacagatgagtctgaggaagatggagaagagaaggtagagaaagaagagaaagaggaagaactagaggaagaggaggagaaagaagaggaggaggaagaagaaggaaatcaggaggtttctggcaattacgttgttttgttaccttgtcatggtgaatatgagagaaaaagtcagacttgaaaaagagtataataagcatgttcaattgtataagaggttttaggggcatgatgagggtaactacctcatatatccctaaatcttaggaacttcagttctgtcagtaccactgaatatctgtagatcatcattatatatctgaatacagatattcagtggtactgacagaataccattgcctgggcttccacctgtttatatattttaatataataatgctaatattaaaaatggctttgtattcgtaggaaattttatctttgttgtttatttaggtttctctagcagattaaaaagcagtcctaaccttggctagattgaggcctggagtaaattcttagggaggtagag

SEQ ID NO: 52826 - DNA, 1049 bp, Homo sapiens
taacaaatagggaattttaaaaggagaccaaaacccatgaaaaattaagcccttgaatagatgagattataatcttttttcctaccagtttaatacttttaaagaatttttaaagaatgttcaaaagaattgcacatatttagaaatttcaggtataaatttctgtctgattttttaaagtctgatttttgaaacgttgaggaagaacagttgtggcagtcaattagtttgggttaagttgtatgaatttgactcaggagttagtagcaaggggtttttggtttctctgtgtatgtgtggtttccctcataattgttgagctaaaaaaaacttagcttataagtcttaaaggaaagagttttgagcatggcaaactgacacactggttggcgtttgggtttagaactggaagccttgaagcagcgtttctggaagcatgctaatccagcagccaaacccagggctggtcagacagtgaatgtgaacgtcatagtgaaagacatgggcactgatggaaaggaagagctaaaagcagatgtggtacctgtgactttagcacctaagaagttggatggagcaagccacacaaaaccaggtatttgagcccacaggttttgttttttgctttttgctttgtattctaacagatcttcaaggctattgaaaaccttataatgaaaagttatagaatctttttccttggaggctttgcagagcagtatctctggcatgattcacgtgtagcacacctagaggtgtggggtggacaagctggctttattttttttttagatatcatttgtcttattataaaaaaccccattatagacaaatatatagaataaatgaaaaacttaatcttctatcagagacaggttctataaccatatcgtgtatccttttaaactctcttctttgcacatatgtatatgtaatttaaacaaaaacaggctgggtgcagtggcacatgcctgtaatcctagcactttggaaggacaaggcaggaggatctgttgagctcaggagttggagaccagcctgggcaacat

SEQ ID NO: 52827 - DNA, 1003 bp, Homo sapiens
ttgttatatgggactaaaagttacctaaacagtcctagactgataggaaagggagaaacattttttgagtaccaactatattagacactggtacattctttgttagttgtctttcttaattctcacagtgccaggtattattttgcaaaatgaagagactgaggctcagagaggttaggtaatttttccagcattatacttggcttataaagggacctacacagtggctggcatataatgagcacttattttttaacttggaacatgttttcctttagaaataattgacacgaaatttgggtttccagaccagccataatatacatgaagttagaatcaacattcattcattcattcatgcaataaacttttatttagcactgtgttgggtgctgtgtatacacgtaaaacactccctgctctcaaagaaattgaagtgtaataggagtgatagacaggcaaacagaccattacaatactggatggtaagtgctgcgatcaaggtatataattgagggtgcattgggaacctagaggaagggtaccttacttggagcctagaagtcagggaagtttctgaaatgagctcagtagagataccaaggcagagaggtgagggagggcttttttggtggaggggttggacctgcagatgtcagagacaatggaaagcacagggtgatctccctggctgaagtgaagatagcaaggacattggtgatcagagcccagatcattcagggtttttatgccatgctaggagcttggactttagctctttgtaagtagaggaccactgaaaggttttcagcaaaggaaatgttcaatcagatactcactttaggaagttaaatctggtagctgttgtggtggatgcattggaaggggttaagagtaaaaacagtgggaacagctcagtttctttacctcatatagaataaggtttccatgagaaaatgcatgtaaatttaaattttgtgatgtcagaaatacattatttctg

SEQ ID NO: 52828 - DNA, 1005 bp, Homo sapiens
atagcctttgagaaatgaaccctatagggtttcaggaagggtatcaaagagaggcatcagtcaaaacattgttgtcccgagtgtttggaagcataatttttcttcctaagatttttttttagcttcctgcgagttattatccctctttagggaaagatgtaagcagaggtaaaagaaataagggtccagactccatctgaggtatctgttttctaagcataataggatgctgtgtgtttaataatttctagttgatgattattgatttattaatgtagcatgatgtggtgttggactacaaaagtagtcttcagctaaagcatcctcttatttgaatttcgtttttgtcctaatcaacctgccatttcttttagaaaaaagaaccatctttggagagtggggtccattcatttgaggaaggaagtgagttatcaaaaggaaccacgaggaaggtgaggtagagccctgtatattagtcacactgatctctttacacaggagattatagatttcttagggataaatattttattttgtctatcatatttttctgttacccatcatattgctttgtacatagtaggaacaaaatatggattggattgaacaaattctctgagacttgggaataaatgaattccttgagtttatactgcatttgggcttactcatgcttactatttcctttcctcttttcttggagagagcaaactcttgagtgatgaatatctatctttctggatattcatataattaatgtagtctcacttcttgttttctttaaggaaagaaaggcagccagattaagtaaagaagcattaaaacaactgcatagtgagactcagcgccttattcgaggtaatgcaacccagtaaactttgaggcaaaatcacaacatttctttgtaagctcaacttggatgttggggacttttatttttttaacacttctaatgtgaactcaggttataatattaagtttagaattgatcttggtgaaaggcca

SEQ ID NO: 52829 - DNA, 1062 bp, Homo sapiens
ccctcctgagtagctgggattataggcgcccaccaccatgcccagctaatttttgtatatttagttgagacggggtttcaccatgttagccaatccagtcttgaactcctgacctcaggtgatccacctgcttcggcctcccaaagtgctgggattacaggtgtgagccgccgtgcttggcctgaactgtttctttttgttttctgaatcaaggttgttttctcattgggccccagatccaatcagcttagattaaaaggactgtcttaaattaaaagggctgttttaaattaaaagggctgtctttaaattgctgaaaccatgagttaatagtacttcttaccaactgggctttacctctctgtaacatacacatataagaaatctgtacctgtgcccccaaaatatataaaaatttaaataaaaaatagaccagcacatgtcaaataaaataaataaataaaagatatgctgtgaaaaaaaaaatagtacttcttagactttgctaatacaaattcgttgaactcttgcctgacctctgggcacaaaacctcctgccaccttctccttaactgttgtcatctctccacctgtctgtcaacttgttatccatgtagatttaagatcttcttcttcaggcttgtcttcctaaactatctattaagctattattaagctatctcatagttttattctttaaatctttcaaaattgacagttccagttcttggtctactttgtaccctgacatttactaatatcttcaattctctaagcatgcctcttgccaatccacttgcccatttattttgcctctactcttaggctgatagaaattgctgggggaaaagtggtggattttatttttttggaacagggtctcatctcactctgtcacccagggtggagtgcagtggcatgattatggctcatggcagcctagatgcccccaggctcaggtgatcctcctacctgagcctcccaagtagctgggactacaggcactcaccatcactcttggctactttttttgtattttttgtagagatggggtttcaccat

SEQ ID NO: 52830 - DNA, 1045 bp, Homo sapiens
gagagcacagagaatacccttcagcatggccactctggacccaagaggaggaaaaaacggaagcttttttaggagaaggaggacttgctggaatccaagatgtgaagaactcttggtgactggctggctggccagcgggcaccacacctgcacttgagtgcctcgggcttgcttattaataacgcacagaagaagcatcacttctcaccatctcctggcatgtatggagcagggagcaaggctatgttcccgaaagccctgattagcttgtcttgctctacgctcgacctcgaacaatacagcttgtaagacctcagtcagtcctggtacactggggtaaatcagtgtggtggtggaagaaaagccgggaggcctatttttataggaaaatagtaccattaaaggtgcaatgctgtcattttggacaaaaggaaagaaatttggaagagctgggattattggcaaaaacttgctgaggggtgaatctttagagctaatcactgcagaatcagagttgcagcaatatgattgcaagcaagtctgaatgcatagttttactttaattcggcttgacaatttgaataggtaaccccctcgggactgactgaatcgttatgcatgtgtcaatcaatgggaggtgtgcattctctagaagtagttttaggctgtttggtttggttttggttttgttttttaaatgcagcctgttgaggcactgtcatgtggtgtgaaagatttaaatgtagcaacgctaaagagtaataatttggggataagaagtggggacattggccgggcgcggtggctcacgcctgtaattccagcactttgggaggcctaggtgggcggatcagctgaggtcgagagttcgaggccagtctgaccaacatggtgaaaccccatctctactaaaaatacagaaaattagctgggtctggtggtggatgcctgtaatcccagctactcgggaggctgaggcaggagaattgcttgaacccaggaggtggacggtgcagtgagctattactccagcctgggcaacaag

SEQ ID NO: 52831 - DNA, 1007 bp, Homo sapiens
gagaacctctagaagcaaggcatggtataagtgtcagaaattaatctcctcatgagtaaggaccggttatggtccatcccttaagttcccagcctctgcatggcatctagtgtaaagcaggcatcaaaaatttgtgagtttatgggaaagtgatgtttgagctgggtctcttaccccgcctatcactgcaccagaccgaataggagggagaatgggagttcccagaaactttgagactagcaaggaagtggttgtgatacgtctagcaagatatgataagggtctgcaccagcataagaaaccatcagaatggcagtgaatcatgtgagagcagttcagaaggtaaacatgtcaagacgtggtgaacagctgaatagatggaaagaacaagggatagaggaactgtcatttctgacatgaaggtgctgttcgctgagataggaagcacagggcaagtatgtttgtgagtgaaagataaagtgtttggtttggacttcttaaatttgaagtgctggtaggatatccaggtggagctgtccagcaaacacttggaaatgtgagtatgagacatggttggaaacagagatttggaaggatagttgggccgtaagagtggatgagacctttaaggggagagtggaatgagaagagagctgggtttggaaccacagtgaacagttaatgaggcaaaagcaaaaggggccctttagaaagactgaaaaggacttaggcaataggagactgcagaagatgccgcagccaagtagaaggctcagaagggaagtagaggcacagtgacagatgctgcagagaaataattgaaaagtatcctttggatgtcaaccccaaaagtcatttaagtgacgtgatgagggcagaagctgattgacagttcaggcatgaactgtagatgagaaagtggaggcaggtgcttcccaggtccggcggatagagctctgtagctgcacttaagttcaaactgtgacatcttccagggtaggccgcgt

SEQ ID NO: 52832 - DNA, 2754 bp, Homo sapiens
tgggtccccggtgcccccgcccctctccattggcctttgttgccgtcggagcgccccgcttgactcgttccggtccgccccctgggcccggcggtcgcgcctgcgcactggcagctggccgggcgctcgcagtgggagctgctgcaggctccgcggcggcggcaacggaggctgcgggggcggcggcgcgagcggccgggcttggtaggggagccgagcccggcccgggatcccgagcagcgagagtgtggggtacctaggcccctcacgctggacttcacagtctccgggccgcctgacctccgcacgggtatatgggatggaagcgggaccctcgggagcaggtaagggtccccaggagggggaacggtgcatgctccaaggactgggggatcccgcatgaaaagcgtggtttccaagtgatggaagcgctcctgagtgaggagaagggctctcccacgatgggggcccagtttgaaggaggctgtgtgcagttccgggggagaaccatgtgaagagagccctgagatgggggctgtttgtccaaggaggctgtatacagtcctgcgggttggaagtaatctgggagaagggcctgcacgcacggaaggactcccagacatccgtggaggcctacggagaggcccggcaggtggcaggggacgggctccaggtgtccaggagaggagggggcgacacagatgggcctggagctaccgcatgccgggggcgggggctccgctgggctggaataggctaatgtctcttgggagaaggcgccagagctggactgtgagctccgccccactgggcctgacgcgagggcgagggtcagggggcggtgggtggggacccagtcccgggattaccccccgtgggtctggggagtcggagcggaggctccagagcatgcgcggaggtggcagctggaaggggctgcccgacgtggtgggggcgtggctgtccgaatacccccacctctccacacccccccgccccgccccgtttggcttggaaaaaggagcgcgctgatggggtgcattctctcttaggttatgctggcagtgtgcaaatggttatggtcccctcccccattttaggggctcttacacttggccctcagtcacagtttgctaagaatgggttgagggaagctgccaaagtgcatttttctgccacaggaaagactgggaccgaagcgatgggttctgggggtgggtcctcctgaagataggccttaggaaaggtattggttacggaggaatcaaggacagggcaggggctacctggaaggagttgtctgcttggtttgcaagtttctgctccaatactgagtagtgatgggggcttttaatccaaagattttccattgaattgtctgttaaggttacactctacatttataacatttattctaatatttcttaatattttcatggctcctatcttccactggatatctttccgttttcctctccccactccccagaaactgtcagggctgtctttagagccaagatctaaaccctacaaacacgttggaggatgggggagtttatagccttcatcctggtgaggcctaggtgatagccttaacttcttatttgcaggcaatgaggaggaaaagacataggaacagaggataaactgaggcaggattgcctcaagaaaactggagtccttaggatgggctgtggggtggtgatacctcttgtgtcttaagtgtcttaccctgtgatgggacgaggagcctggacctgggaatccttcaggtcatctctcaccacttccttacatttggtctggggatgggaatcaaatttccatttaggccatgaacttcattactttcctagtggaattattttgttttttttgtagcagacctaactccctcccaccctcccaaggaaatagctcctacgacctcactcaagttatccatttagtgatctctaagtacttagtgactgttttccctcttaacaaccagccttgtatagactgtgtagtcgtaaggataagcacagggagcaactgacttgagtacttcctctctgtcaggaccctctctccatcccaggaacttctgtttttcaaggctggggactatttccaacaacccatgaactagagtagtggggtaggtcattgaggtccacatggattgctggttgctggtacccattctagactaatgatttttatcctgatgaattcctaataggctctggagtgatgaaaaattgactttttaaaaatttgttacaaaaaataagcttataggaaaggagctagaacctgctgtttggagtcagccaaagccttgggaaaagccgaataggacaggctttgcctcagtaaagggtataattgagattcagtctggaagctgcaaattgagggaccccataactgcctccttcctaggcccggactgttctcttataagaagttagagtggtgtcccaaggtggcctgaggacataatacacaaaactaaagcgttgtgtaaaaaacaacaacaaaaaaccccccaaaaactaaagcattgttgctagcctcactgggcttatgcccaggtctgccttctgtgctcaggtgtgttccaagcacatacagtggactgggtgctccctgagggtagaagcagtgtctggtttatttgtagaactagcaagtgcctagtgtataggccctggcacagaatacatgtttattaattaaatcaaatcacattcaagtgtgaacata

SEQ ID NO: 52833 - DNA, 1261 bp, Homo sapiens
aaatgattattcagtctgggaggggaagaaggtgaatgaaatataagaacttggggagggaaaggatgtctcttactggctacacccacaaacgtgcatatttgtcttgtgtagtgtttataattgtttctgggcaattgcaggtgttcgtgtgtctgtgtgctgtgtgtgcttgtgtgtttttgtggtgtgtctatggatatgtttgttcattcatttcatatcagtatgttgaatacttcctgtgtgtgtgtcagacactggaaattaaacagtgaccaaggcagatatagtccctgcctttgaagaactcagtctagggcagtgaaggatatgtgtgtaagtgtaaattgccaaggtctaagtgtgtgtttggatgtgtgtgatggggatgtgtgtctgtctgtccgtgagcttgtgtgcaatttctgtccagcactttctgaggtaggcagccaggtgctagtagataggttttcccttccccatgtagctgagttctgaagaccttttccatccaggctgggccttcatttccctgtctgcagagtgggactgggcttggacaggtggttagagggaaacagagcagcttagctctgggaagctgcccctcccatgaatggttctgacctcttcctgacccccagctgagggtatgccccatccccccagcttgtctgactgtgaaagcagaagtctgataatgggaggttctgggctggtttatccctctcttctcccacctgggctagttctctactgccaagaacaatagcagcatattattccctttttttctctcttccccccaagctagaaaataagactggagacagcagccagactggcaaaagagggtaaagtagctggatctggccttaccctatccctttcccaagggcctcctctgtcttgaaattgatctcttctgctgctgtctggaccttctgtgtggaaggatctgtggggcatggagagaatcttgtgttcttcccagagccagtgtctcttctccagcattctaattgccacctcttcttcccaaacccgttagttctttctttattcaagcttttttttttatcattgtctccccagttgctgctttgtttcttcctgcctgagcttccaaccctaacctcttttgccccaccccttgactccagccttctctttctcctggcctttttcttttgtgacctccagctctgtcctcttctccaaccccctttctcttttccttagtctccaaactctg

SEQ ID NO: 52834 - DNA, 1002 bp, Homo sapiens
tcttactctactagaagaaagaaagggttttgttactaggagccagatttagtctctctgcttaacatgcaataggaacttattatatattaacttaatgaattaaaaatagacaataaggataattttcctaactggagagagattaaaaaagaaaaaagagaaaaaacacagatgagcttgagatgtcccctggaagcccttggctgggttgggtagcaggaaagaggcattctctatactctcgtgttcctgttctgggaggccttgttcctcctctgataagagtagttaggagattgccagactttaccctcaccagcctctttgtcttgtagctgcgggcgcttacctgccccccctgcagcaggtgttccaggcacctcgccggcctggcattggcactgtggggaaaccaatcaagctcctggccaattactttgaggtggacatccctaagatcgacgtgtaccactacgaggtggacatcaagccggataagtgtccccgtagagtcaaccggtaagtgatgcacacctaagccaccaaatctgaaagacaccaaccttgaaagaggggccagaaaggtaaaagaaaaaccagtagagggtagtatcaccaaatctaaggaagtttttgaacgggagatgccacgtcgggtaaatgctgaaaaatagtccaattggacttcgctattggaagattattagtggcttttgccagagcaatttcagcagaaagtagttgagctagttaatctaactacattgagttaagaaataagtacagtacctactacatttcaatattagttgaatgaataaagagttttaaagaatgagatatgggtatgtttacagattaaggagaaggagctagtaaagagggagaggttaaaggtatgggacagaggggagaaatgaatgggatgtccttgatgaggcagaaggacagaggggagaaatgaatgggatgtccttgatgaggcagaaggacagaggg

SEQ ID NO: 52835 - DNA, 1027 bp, Homo sapiens
tgcagggcagagagaaggtagaaacttgtacaaggtcagtcatacaactagtaaagcatcagagctggcattaaagccccggtgtcctgcctttcaggccagggctcctccgtgcccaggatgcctcacagggtgggggcctgtgcccgagggaccagttctctgcctgtccctgccaggtacacccctgtgggccgctccttcttctcaccgcctgagggctactaccacccgctggggggtgggcgcgaggtctggttcggctttcaccagtctgtgcgccctgccatgtggaagatgatgctcaacattgatggtgagtggggagagctatggagccaggggcaccccaagtccagtgaccacactcccagcctcatccctcccagctctgcaaccacactcctagtctaattcctacagccctggcacccccttcccccatcccaatgccctttaaggaagagggtataaattgctgtgcctccatgtattgtggaagacagaacctgagctgagctatctttaccctgtccccacagtctcagccactgccttttataaggcacagccagtgattgagttcatgtgtgaggtgctggacatcaggaacatagatgagcagcccaagcccctcacggactctcagcgcgttcgcttcaccaaggagatcaagggtgaggacccaacaggaggggaagggaaacagcgccactttagccctaagaggaaatccccttggggtatgctcaggggagagaccaagcctgggcacatgagcaacctattttagccctgacaagcagtgtgtgtatctcaggcctgaaggtggaagtcacccactgtggacagatgaagaggaagtaccgcgtgtgtaatgttacccgtcgccctgctagccatcagacgtaagttggcaggggtgctgagtcatactttgttggtggagaagggctgagatttaaaactatctttccctccctccctcccccactggccttgagaatgagccttggggactggccct

SEQ ID NO: 52836 - DNA, 1021 bp, Homo sapiens
agagatttgttagcaaattaacattatttctatttaaacagcagtttccaaggggtataatttatgttatgacttagaccttgatttctgttgttgcttatttaacatatatttatcgagctcctactatgtgtcatatactctcaggtgctaggaacatggagattaacaagacagacaaggtcccagctgttatggagcttacattctagaagggggagatagacaataagttgataaacacgtaaagtagtttcagatggtgataagtgctataagaataataaaataggttaaggggatagaagtaagggaggaagagggtagagagctattttagttgttagggaggtcctcttttaggagacatttgagctaagtcccaaattatgacatagaatcaaccttgtaacaacctgagagaagagccttccaggcaggaggaagtacaaaggttctaaagcagaagagaatttggatctttttgagggatagacagaaggctatggtggctagaatgtattgtgtgaggggaaaagcagtaggatatgattctgcagagggtcaaataatatagcctgttgaaaccacgtggcattttattactgttttttggaaaagctttatccaggttggctgtgtggctcatacctgtaatcccagcactttgggaggtcaaggcaggaggattgcttgactgcaggtgtggtgtggtcccagctacttgggaggctgaggtggaagcattgcttgaacccagtgagctgtgattgtgccgctggattctagcctgggcaacagagggagaccctgtctcaaaaaaaaataaaaaaacagctttatcgagatataattcacataccataaaattcaccattttaaaatgattaggtagttttagtatattcacagaattgtacaacagccatcaccactatctgattccagaacatatcactcctgaaagaaagcctgtattcattagcagttatgcaccattcgttctctccccaacagcctg

SEQ ID NO: 52837 - DNA, 1058 bp, Homo sapiens
tgtcctgcagatgaagaatgccagctacaacttagatccctacatccaggaatttgggatcaaagtgaaggatgacatgacggaggtgacagggcgagtgctgccggcgcccatcttgcagtacggcggccgggtgagcagggtcagggccagacaacatctcggggcatatgggggtggttgggttgtatagccaggggcttttgctcccctacccacctgactctactgaggctcacctaggcgccccctctacctatccccagaaccgggccattgccacacccaatcagggtgtctgggacatgcgggggaaacagttctacaatgggattgagatcaaagtctgggccatcgcctgcttcgcaccccaaaaacagtgtcgagaagaggtgctcaagtaaggagggttcgctgtaggggtggaagggtgggaaggaccctggagctgcctgccttcctgtagtccacaggggctgatattgatcagtaatgtgttctgtcttgactctgcctgcattgtgctttctggctcaaacttctaccaattctttttctatccatctgtgatcaggggaagttaataaggagccatatctatgtcaaagatgatgattttagggcatgaatctcctgagagaggcctgaattattgttataattattatcattggtaataaatagtagtagtgatgactgtaatgtttacgccaaaattatacttaagtacctaatttatattctcttatttcatctttacagtgagtaggtggtgatatgtccattttcaggagactgaggctcaaaagaggttaagtaacttgtccaaagtttgcacatcatcaggaaagtgtcagagttggaagcaaatcagatctgagcttcaagacttgtgttcctaattggaaacaaaatagagcagcttgtttagctggttgtcagggcctctgtgccaccgtagctgggagtagatggcaccaatgaggaaagtgttatagccaaatggtttaaagaaaccaggcagtaatggcttaagaagtcaacaacccctcacctgg

SEQ ID NO: 52838 - DNA, 1004 bp, Homo sapiens
caggaacttgagaccagcttgggcaacatagtgagatcccatctctaccaaaaagaaaaaaaattagccaggcatggtggcattcctctagtcctacctactcaggaggctgagatgggatgattgttttagcctagcagctcgaggcttgagtgagcccagattgtgccattgtactccatcctggttgacagagcaccctgtctcaaggaaaaaaaaaaaaaaaaaccaatctctcagtgcctcttatagtgctaagcacctaagatggatggatttttgtcagaagaattcaagtgagactcactgcctcctttgtgaccatgcgtgtgtacaggaacttcacagaccagctgcggaagatttccaaggatgcggggatgcctatccagggtcaaccttgtttctgcaaatatgcacagggggcagacagcgtggagcctatgttccggcatctcaagaacacctactcagggctgcagctcattattgtcatcctgccagggaagacgccggtgtatggtacagttctcttgggacagtgataatggtgataggactcttctcagcgtagttccctggggtctcctgggaaggactcagtctggattcttggctttgaccagagctgttacttaatgtcagtgctcctcttataggagaaatagcatgcctgagccattgagttatcccagatcctaattacctgcacacactccttcccagcaacatttactggggtcctttgtgtgctggtcctcatgccaggctatgctgggccaggtacagagacgggttggtctagattcctgtccttaggagtgcgttcctgtcctcaggagtgcattgtttatctgaacatcgtgcagcacaaccaagcagaataggtggtcctgttagtatcgtgttgcctggtaattacttggactttttgagaggcttgctatctctcctcttttcctctcattttttagaataagaatgattatataaatttctgtcac

SEQ ID NO: 52839 - DNA, 1050 bp, Homo sapiens
agaaattcgaggctagtctgggcaacaaagcaagacctcatctctacaaaaaaataaagttacccagtcatcttgtgcacctgtggtcccagctacttgggagtctgaggctaaaggatttcttgagcccaagaggttgaggctgcagttacccagcttgggtaacatagtgagaccttgtctcaaaacaaaacaaaaaaaactttttgaatgagttctctatattctctatgccctatacctcaccagccacttattctttagcctctttcagccaccttgccttctgtctacctttctcctaaatctcctctgcacaggattgccaatgacttttctcagttgtcctcttgacttctggatattttcttctatctctccttattatttttgtcattaccaggaatccttggtattctacaggttcctattgtctgccttctcattctgcctttacattttattaaaattcccattcatttcagttgcttcaatcatcacctattgctattatatgtgattaaaatcttgattcaatccttgaaccctctgcagctttggtctgtccctttggcctctctccctctcttcaagagtttattgatcacctattatgtatggaacactgtccaacatctggatatattgatgaataaaacagatatagtctctgctcttagaaagtgttttgttggaccatctcttcagtagtttgtcctctctacaaacctttgtctttactacttctgtatttgacatcacagttgcttctaagtaccttcattcaaacttcggagacagtcttgtcttttcgcttcaccttcattgttcttcttcaaatttttctcaagataatatgccctgctcttgatccacacttctcaactgagttctaaccttccttttttttttttttttttttgagacggagtcttgctctgttgcccaggctggagtgcagtggcgtgatctcagctcaccgcaacctccacctcccaggttcaagtgattctcgtgcctcagccttgaaagtagctgggattacggtgc

SEQ ID NO: 52840 - DNA, 1098 bp, Homo sapiens
ctccccttgctcttctttttagctgctatggcctttctgtttctcaaacacatcttgctgtcttctagcagggtgcatttttgcatgttgttccctctgcctggaatgctctctctcaaactccccctctcctctaagtcctttgctgtcatcagatttcatttcaatcattacctactcaagaatcctttcctgactaggtttttatttcccattttatgctgttattgttccatgaagttttctgttgtgtcatttatcagcgttgtaattttcacgatttttaaaattagtccctatttagtaagcactttgagagtaaggaccttatgtgtttcctgtcattattgtgttccctagcacctcatacactgcctggcatctagtaggcattcagtaaatatttgttgaatgcactaatcatttctctccctgcccttagctgaggtgaaacgtgtcggagatacactcttgggaatggctacgcagtgtgtgcaggtgaagaacgtggtcaagacctcacctcagactctgtccaacctctgcctcaagatcaatgtcaaacttggtggcattaacaacatcctagtcccacaccagcggtatgaactctgttgtccacttgcccttgtcaaggtaccatgctgggaattgatgaagagataggaccctggccaggcagactgaatcagacataagggggagaagagcagagtgggtactggatggtgccagctagagaagacccagcgcctcaccattttgttttctcttccttgctcagctctgccgtttttcaacagccagtgatattcctgggagcagatgttacacaccccccagcaggggatgggaaaaaaccttctatcacagcagtgagtgatattctgtagctgcctcataaggttctcctcttcgctctgagtcctcaaaactgcccatgatttccttccctcagctctggctcttgagccttcataagatgtccatttagctcgctattcccaattcccattcccttgatatctcataaaggtagctctgtatggtgtcttttttcagggagagtaatgagagtgtagccagagacttgactca

SEQ ID NO: 52841 - DNA, 1030 bp, Homo sapiens
agccaaaagttatattacaagtggcaactccttagttcagaagggtatgtgaactcaagaggaactgtgtatttctttgtttccctccccatttttttgtgcctagatactccactatgagctactggccattcgtgatgcctgcatcaaactggaaaaggactaccagcctgggatcacttatattgtggtgcagaaacgccatcacacccgccttttctgtgctgacaagaatgagcgagtgagtgagggactgaggcctcccatcccctccttctgtctcccttatcttaatagagaagaagcccttgagataaaggctggggatttagtccttgtcctatctatcctccctggccccttccctcctcctagctcttgtggtccttcctctgccaccgccttcactagtgtccacctcctcccgtccttcccttatacttcctttccctcctcctagctccctggcctagaccccatatatagaccagctcctagagaaggggaagggaactaccatttattgaactcctcctatgtgccagatactgtacaaggcgtcttcctcacagcaaccctgtgaggtacgtattattattatctccaatttaacctcagaaaggttaaacgacttgctaagatcacacagctaataggacttgaacacaggtctgtgtgactttagaagcatattattttaagattcagtaccctcagggaatagcaactttggctttgttcttgggattttggtgaaatcagagtagaattgagccagggtcctggttagggccaggcaggtcttgggatcttggttgtgtttgtctctatacagattgggaagagtggtaacatcccagctgggaccacagtggacaccaacatcacccacccatttgagtttgacttctatctgtgcagccacgcaggcatccaggtagctgggctttatcttgtggttccaatgggtcaaagatgagttgttcattcatattgcctctagaatgtatcagtcatcactgaatgacat

SEQ ID NO: 52842 - DNA, 1057 bp, Homo sapiens
tagtagagacagggtttcaccattttggccctgctgttcttgaactcctgacctcaagtgatccacccaccttggcctcccaaagtgctgggattacaggcatgagccactgtgcccggccaggactgctgtcgtaataagccctgagtacacttgcaggttgcttataagaagagtgctttatgacattggtagttttgcatctgcctgttcatgggtgaattatctacccagccatattcttaacagtgatcctgttcccctattatcagccatcttctctgcccagcctgggacccctcaccttcctatcttcccagggcaccagccgaccatcccattactatgttctttgggatgacaaccgtttcacagcagatgagctccagatcctgacgtaccagctgtgccacacttacgtacgatgcacacgctctgtctctatcccagcacctgcctactatgcccgcctggtggctttccgggcacgataccacctggtggacaaggagcatgacaggtgaggcctgggatcaggttggcctcctttttgcttcagcctattgtgccagatcttcttaactttccttgggtagaaggaaatgagtgctgtccaatttggtgtcattgggctcgtctgcccaatcctgggttgggtttctctcttaagttggtatgggaattggcatcccagggctgggcgagggaattagcagcagctctcagttcaccaggaaggacttctttcattttttccttttcagtggagaggggagccacatatcggggcagagcaatgggcgggacccccaggccctggccaaagccgtgcaggttcaccaggatactctgcgcaccatgtacttcgcttgaaggcagaacgctgttacctcactggatagaagaaagctttccaagccccaggagctgtgccacccaaatccagaggaagcaaggaggagggaggtggggtagggaggagtgtaggatgccttgtttccttctatagaggtggtgtaagagtggggaacagggccagcaagacagaccaccagcc

SEQ ID NO: 52843 - DNA, 2092 bp, Homo sapiens
caaaaggggcagcactggtgcccaccatacacacaggtgtctcatgtgactcacagtgctaaagactcatgcttgacagcttggtaaggtcaactctgtagccctgcagacaaaagctggttaggtttgggtttgatactttagatgggaaagtgaggggcttgagaaagtgggtgggaggagggaaggattttttaggagccttaatcagaaaaggactagatttgtttaagaagaaaaatgaaaccagacccagatcaatattttaggatactagatgttttaatgggttcagaatccagtttgtaggaagattttttaatggttttggttgctcctcccccagctgccaccccccaccttacccttattcctctctgtccacattttctgccccaccttacttctcctccctgacagacatccagcccctagtaatacttaaggcactatggcacttagctttgaagtgacacgaccctgtcttccttccgcccgctggtgggtaaccagtgccttccctgtaacggtaatgctgcagaactgcaaccttttgtacctttctttggggaatggggtgggggtgggagaggaggtagatggggaagaaataccccagacccaacaaacctccagccagaaagccagctattttgcatttgaaggaattgacttcctcattcattgagctttttaaaagatcacaacctcaagatggttaaaatccattgacatttgcactttcaaacatgacaagtctcggagctgctgagatgacaggcccctggcctttccacttatgcctccttttctccttattcctcctacctcccgccccgcccaggtctggagttactttcatagcatttttcactcttggcttcttttctcccttgatggtcaagtctcttatgtttcaatatttcttaactggggtgtcttataacaaaaaactcttaggtctaaaatgagaaaaaagagagaaaacaaaatgttatttttataccataacttgagtgtattgccaaaatttggaaatccttcccatgcctgatgagtttatatcccagaaacattgagccatcagaatgaactgtgtacctgatttgttctctgacctggctaggtagggagggggtggttatcgccccaagatggggtccaggctccatccttcctctgtgcagataatacctttttcttgctatagcctccctcctctgcactgtcctgcactctttcttgcaagtgcatctttttccttcccctggactgtcctctgaccctttggctcatcctagattgcagtgtgtcctgtggacaggctggggaattttgctgctccctattgcttctgtttacaaaaatgaatttttcctggtttcccactagggcatgtgggtgggtggcatggacttttttttttttttttttttgtcttgagacatggggtttggctgtcttgcaggactggagaaggtggtggttctagcttggtctctgttggccttgaagcaagcatcccccctgccctttttccttgactgttcatttttttcctgccccactgcttgggatggggagttgcaacttcagtgtggaatttcctctttgaggagcctgggcttggatctatcctgatctggtgatgaagccatgattactttagacctagcccaggcttggaggccagctggaggaagaagggtctaaatcctggcctgtagagttagaactaccatttcctccccttagctgcccttgtatgacccggatttgctatgcaaaacaatctatcccaggttctgttctggttggctacattgttcagcaactcacaaaacgtagcacaaacattcattatggagaaagcatcaggactgttgagtaactcctcctttacttttttcctgctggctacagcatggggtgccctataggcacaagcccagctgaagaacagaatggagggctctgggaggaggcagctcactggagagcctacattccttacacaagtgcctaaagagagtgatgctaacactccatctgccctgtccattgccttcatatacagtctacttcgtgttct

SEQ ID NO: 52844 - DNA, 1443 bp, Homo sapiens
gctacactggcctccagggataagcctggggctactgttgctgggaacttaggcttaacataaagccgaagaaggtacctagaaatttgaaacttccctaaaaagctcctaatgcccacctgctagatagcttctctgtggcctcctatttagctaagcagcagtgtttttggatactttttttttctgtttgtgaataaggccagcactcaagatgggcagccaagggtgcactgactattagctggcccataggatatctgtaaggctggtgggacagttttggacctggaatcatgtgtaactaacaaggttggacgtttcttccccatcagggtagaaaaatcatctcaaactagccaaaaggcagttttggaaactacattgggggacgttatttttatttatatatggggcctaggccaatccaggatggtagctggaataccttccttcttaaaatctgatcatggcagggatatgcagggcactttttactatttggccttctaagcagattgggaaggaggtattttctggttttcgctttcctccgacttaataggacttgccttctccctgggcagggagagaggctgggttggtgctctcccttactctactcatactgacttagagcctctggctgctgtttgggcatccaagaaagggaggggaaggaatgagctaaaaacaaaacagaatgaggtgggaaagggagattttcttctttacagaggaaaataggaaaccctccaagaattgtgcaagtaaagacatttgttgaatgcactgagtcccttggtgtagtagcaataaggaaaaatgaaattactttcctgtgcacacagtccagcctaattggtatgtgatgttgcacttagcagccatgtggtgggcatgtgtgactactctggttttcactttagtttctaaactttttatccctctcaagtccagcatggatggggaaatgtctctggatccccacagctgtgtacttgtttgcatttgtttccctttgagatttgtgtttgtgtcctgctttgagctgtaccttgtccagtccattgtgaaattatcccagcagctgtaatgtacagttccttctgaagcaagcaacatcagcagcagcagcagcagcagcacaattctgtgttttataaagacaacagtggcttctatttctaaagtgcggtctttctctttttttttcctaccagcaaaacaaacttttgggactgattacatctctaatagattttaggtgagaataatactgtagattgttatgcaggaatacttcacagagccttcatttattcttcattcaacaaacatgcaaagcactgtgccagcagtattgtggggaggggaggcacaattcaaaatgaggaaaatagtgtccgtctcattaagggaattaagtttggtgggggatat

SEQ ID NO: 52845 - DNA, 1402 bp, Homo sapiens
cataggcatgaatgagatagcttagaaaaagagaagagaaactagtatacagccccctaagaaactcaatttaaaggttcgggggaggaagcagatcttaaggtgacagatcactggtagacagtttgtgggttttttgtttctttgtttagccagtttggtgaggtaggagaagaaatcagagtagaagaaggttcatgaagggagtgattaacaacatgaactgctgcagagagggagttctttttttttctgtgtgttttacctttctactccccatcttttggggatcttgtaactctatgacttacttacgttattctccagtatttcttgaaaatgagcattggaaaaaccaattctaaaatggctaaaactaggactttcaagttcaccacaactaccaccaattaggagataattgtaaaagaataaacaaaacctaattttgttcctagccaatattataaaccatgttccagcatactagataatagtagcatactatatttatttccataatttgtcttctttagagcctatgaactcctaggagcagaagctatattctcttcatttttgtcatctcagggtcatggcatataccaacagatcagtatgtgcaaatataattgaaataggctagtagtctgtggtttatgagtatgggctgggtgggcagtggatcaagaagtgataggagtacacaggatgaactcagaattcctgaatcttcaggtaagcagatacttaactacattatcattgtcttttcccactcaccccaagttggaggttctatggttttgtactttaagctggtggtataattgtcaagcatgtaaattctggcattcttcctggtactgctagagcattgttatttctatgcatgggggtaagaaggctcagagaaggatcctggcggataccccagtgagaaatcgtcagtggcagccagtgtgtacatacgtggacctagcattcctctggaggccaagtgttgtaaattggcctgtggctatcatctggcagactcccttgggaaagagccagccagccccatgcttcttttcagcagcaagggttagggaggttggttgaacttgaagagcagattggacatggagcagattttgaccagttgaaataagacataaatttatgactccgagtgaggcagaaataaagaacttagcagggggaataggaggaggatgattatggcaaattttgctataaactttagttttagaaaagattgatattgaaaagccttcaggatttgcctgtggttgctactcaagttaaaaagactgggagcctgcattgtttggtcctggagctcaaggttttcagtgaaggcttgtcctggcacctctgggcattccttttcattact

SEQ ID NO: 52846 - DNA, 1039 bp, Homo sapiens
gatcatgcttggcttattaaatttgaaagtatgcttcagacgatcacaagttcgtaaattaattttcaaaatatttgcggggctgtcttgttactaatggtgttacaagttcctgaattccatatctctttttgccaatttgatataagaaaaacttacgtaaaagaaaccagtgacataacgatagctaagaactttgttgaatagattacgtgtcaaatggttgcaaaaaagcactcaaactggggagatgagatggggagagagttacaaattttttttttttttttttacaaattttgttacatggaagtttctctaatcaatttagaccatatctctttttcctgctccattgtttcgctttcccccatatcgtcttaaaaggtctgtctggattgtgaaaagatttcgactcttattcagttttgatttgtgtatttctgaaactgtcctgcccttttaaaaaaattaccatactactgttttactgtacaggagatgtgattatttgggaccataggtgatctttgtacataactgtcctgttgtcaagtctggaaaacaagtcatgaaggtcagaccctttattaatcatcccaaaacttttaaagatatttcaaaaaagtttttaaagttttttctttttctccttagggtttttcatatgatattgtgcccatatatatgggaaatgtcttagaaaacatttgttacatcaaaccacctagtcaactggtacaactaagccaagtacagctcagaaaatacattttacctcttcttttttgggtgtcccattgctgaaatggatacccatttagctgtcttcacatttggggaagtgtgtagttagattatcaactatatgcctgggtctcttgaaaagtaaagttttttcttcagtacagtttatacatgattgaatgtagcctaataatgaagataagctatactttggctcaagattgtcatcagaaacaaaattttcattattcctgagacttgtatataattggtatgcttagctttaagttga

SEQ ID NO: 52847 - DNA, 1029 bp, Homo sapiens
gcactttgggaggctgaggcgagtggatcacgaggtcaggagatcgagaccatcctggccaacatggtgaaaccccgtctctactaaaagtacaaaaattagctgcatgtgatggcgggcgcctgtaatcccagctactcgggagactgaggcaggagaattgcttgaacccagaaggcagaggttgcagtgagccgacgtcgtgccactgcactctagcctggcaacagagtaagactccgtctcaaaaaaaaaaaaaaattatattgttgccttctataaagtcatagtgattctcctctaagtgacttaaatgttttaatacttaaattatcgtgcatgaaatttttcttgtccatatgccacatgaacaaatatttggcactaaggcattaatcataatagtagaaagatgtattatagccaaacaattgccactttagttggagtcttcttagacacaatatccaggaaatgctagtgaatcattttgtgggtcaacctttctacaaatttattctttagattttctgtccattgctttttttgtcctttcctcaccccgttttgtgttggggggccaagttggggaaggagattctttccttccttcttttccccctattaaatgattttgattgaatgttagcttttgttaaaagagtatgtatgttaagtatatttcaaatgttactagtttctaataggtgaatggtctcaatgactaaaaaacaaatattttttagaaacattatgacctagagtatacattctgtaacttgagattttatgctagtttgtccaacctctaaatacaccttgaatagatagtatatgtatttattcaaaaccattaaataatggaatagatacatgttaaaaattatgtatacaacatgattataactgcaatatctattttaaaacatgaataaaaatttgaaggaatcttaaaatagtagtagattgtggttgcatttttattttatttatttattttttagacagagtcttactctgttgcccagg

SEQ ID NO: 52848 - DNA, 1050 bp, Homo sapiens
cttctctgctagtaaccacagagtaataaagataagttagagattggaaggatacaaagagagactgccagctgttttagttgtgttttataaacctctggatgattttgacattttgttatactttagcaatcttctttctgtctatactgtagtgacacattcatttattgtagccatggataatgtcagtagacttttggggaaaatattctttcatgttgtcttctgtagactagaataatatttttcattctgtcttttgggagcagagaattaagaggtacctaataaagtgagatggaggtggatctctataagcttatagtaattacaactcacaggaaaataatttgctctcctcttttttacattaaagtttctctcttcccatttttctgctgtataagtcaggtggtaaaatgggacttaatgaaattattattaaattttactttataatctgtgcaccagagcatgatggagtcaaaagagttggtatcagaatgtaggaagtagtgattgaagtaagggtggtaggataggctgtacccctttagaagatctaatgtattcaggtagatttcatttttgaagttattaccaattattcttaaggattcttaaattctcacgtgacgttctaaaaaatgcatcacagtataattctgcaagaattcttttcttctcagactaaggttattagtgaaaggaagccactaaagattggttagacattcttatctgtgtttactcagattttatttcccaaattactttcccaagcactgttttagaagttaaaatattttatgtatttttattagtctagttttactacttacggtaagctaagaacttgtttaacaatatacacttaaatattttgctaaaagtactgtatttgaacaaaagattccactcctaaccctattgttgtaataaaagactagtgtcataaaatatagaggaaactcagttatcagtttatgttaattaccagaattattcattatttgtgttaatttactatatttgatgctaaaacat

SEQ ID NO: 52849 - DNA, 1817 bp, Homo sapiens
taattttgaatttttagtagagacagggtttctccatgttggtcagggtggtctcaaactcccgacctcaggtgatccacctgccttggcctcccaaagtgctgggattacaggcgtaagccactgtgcctggccttgaatcttttaaattagttttagattatatcaatactatgtgagtacattctcattgtaatatatttagattttataaacaaaataaaagtgaccctgtaatcctgtcacttccctctctagaggtaaccaccatttggaatatatcctttcagtttctctgcttttacaaatgtgtgtacaaaaaatacgtattgatttgtgaaaatttggtatttcctatatagtctgtaagttttgaatatataagtattgaatatctttctgtgtcagttacattggctcagatgtttgctgggtaaaaatggaggttttataatatccttactagctaggtactgtaaggatgggaggagaaaggaacacaggtatgtttgctgctctcaggaggctcacagttagaagaattgaaaatatataatcattataatagacaaagtgtcctaatagagatatgtactaggtgtcttcttggtacagaggaaagattactcttggagaaagaagttaatatgttagggagtgcttagagatggtaaaagagattttgaatcactttctaagaatattttgcaggtcagatgtatcctggaatgattaagtaatatgctcgcttcattcttctctgtctagtgaaatgtatgtcatcttttggcaataatcaatctttttggtgtcttaagccaagattctaaaagcaaaatctttatcatatatgaatattttttagaattttgacagctttatacagtggcagaaattacttctgttaatatttttatatttcatcttacagaggattatgtgaatatattgtttcccttctttagggaggtggttgactcaatggttcagcattttaaagtaactatatttggagaccgtagaccagtttatgatggaaaaagaagtctttacaccgccaatccacttcctgtggcaactacaggggtaagatatgcattcctgtattggaaaggtatatttttgaagtgtctccttttacacgcatttattaccatttttattacagtccatatatatgtgaatatttatcactgattgtttttaactttttgttttgaaataatttcaaacttaaagaaaagttgcaggaatcatgcagagaactctcatacaccctttatgtagcttcactgaggttctgaacatttccacctttgttttattttttttctttctctcttgtacatacatacttattttttcctgaaccattcacaagtaggttgcacataccatgccccattaatatttattttattttattttattttattttattttgagacagggtctcgctttgtcacctaggttggagtgcagtagtgtgatctcggctcactgcaacctctgcctcccagattcaagtgattcttgtacctcagcgtcctgagtagctgggattacaggcacgtgctaccactcttggctaatttttttgtgtttgtagtagagatggggtttcgccatgttggccagactggtctcaaacttctgacctcaagtaatccacccagctcaacctcccaaagttctgggattttgggagtaccactgcactctgccagtatttaatactttaatgtatattcctaagaacaatgataaaaacccttgtacagttatcaagttcattaaatttaacattgatatgatac

SEQ ID NO: 52850 - DNA, 1047 bp, Homo sapiens
gagtaagccaccatacccagcctaaatatatatatatatattttttattataaatatataaattataaataatatataaatttatattataaattataaataatatataaatttatattataaattataaatttataaatatataatatatatttattttatttatttattttttttttgagcctcactctgttgcccacgctggagcacagtggtgtgatcttggctcactgcaccctctgcctcctgagttcaaatgattctcgtgcctcagcctcccgagtagctgggattacaggcatgcaccaccacacccagctaattttgtatttttagtagagacagggtttcaccatgttggccaagctggtcttgaactcctgacctcaagtgatcagcctgcctcagccccccaaagtgctgggattacatgcatgagccactgcgcctggccttttttttttcttttttttaatatgtagaactttaatatgcttccaaatttcaaaagtataccaaaacatatactcagaattgttctgtccttattttttccagtccattccctcccatcctttgaaagtaactagtttctttgtttctggttcatgcttcctgtgtttctttttgcagaagtaagcagatatgtgaatattttcctcctttcttacacaaaagatgtcataatatttgtaatcttttgtactttgcttttgtcacttaatagtatagcttggaaatttattccatggcagtttcaagagattttcctcattcttttttcatagccgcatagatgttggagcatttagggtagtttccagtattttgcaatgacacataatgctggcacgagtaactatgttatttaaattttatctacaaaaaaaaatggtatattttagtctattgactttatttttgccatgttttctcttagatatttttataagttaaatctaaaataattgtatttatctttttcaacatttaccagttgactcttttcccatcaacaggtagatttagacgttactttacctgggg

SEQ ID NO: 52851 - DNA, 1025 bp, Homo sapiens
ttattaagtgacatcagtaaaattactagatgttttcttagttgaccattttgggtcagttttatatccatcattttatttacttttaaaaaatttctatcctacatgcttcttactgtgcctttggtgttgtatatttttaccatgtgctcattgcattttagtcttcatctttttaattcttaaaattctttttctcccatttcttttctgagttctgccatgcttgtttcactacaactcctgttgactggttagttgctccttgagtttctaaatttctcctctgaactttttcttcataactgcattaggaatttttcagtgtgagtaaaaagtagggttttaattttcctctgctttgtgatgatattgtctgttgagttttctttgtcagaaatgtcgcggtgcctttttacatttttttctatggtattattgtatgtatacttaccacttttttgttgcttatattggcatgagatgagtttcccaaaccatctgttagaagggacttaagggtgttaggaacattaggaacaccttcggagcaagatagttttccaggtttctgtgctcaaggcctctctcctccattgttctggtggactctttcttcaaaatgcagccacatctcctatgcctctcagtaacttaaggggtttaagtaatatgaactaccagccatgagttccccaggtcctgactagttctgctaccaagggatgcacctcctaccctttaaattgcctgcctcaaatgttaacaattaaagaatttgtgacaggtatacaggagttttttgtactattcttataacttttctgtaagttcgaaactacttcaaaagaagaaattacaaaagagcatgcctcacttgtaaaagggtggtcctttctgagatctgtcacttccaaaccaccctccacttattgttctgccactttctacacctcctttccttacctccttctgagaatcccccatttaatctcagttctaaacattgtagttcccgcttggta

SEQ ID NO: 52852 - DNA, 1544 bp, Homo sapiens
ggatccttgaacccctagagtccacagatggacggcagggatccaagaactcctaaaatcatgtgctaaattatgtatatgtgcattttgctgagagtttattgcttacatcagattctcaaagggatcttgactccataagagggtagggatcacctactttaggaattattttggttacatttgatttttaatagtattggaaaagagctgtgtcactatattatacctctataaaagtgtcactttgcttctgttaaaaatgcctggaatttttttctcctgctttataaatctttaaaggacttctttcttgagctttacaaaattctgatcttcaagcagtatgtgatgactgggctaggtaaatatcacataatttgaaattatggaataccttgagaattattggatctcctctttcattcctccttccctctcccagcataaatacctgaatttattataaacaggattttttattaatggaagattttggcccttgatctatgggctttgcaaattttatgattttattttttaatgtgtagagcttgatggggtaaggaaaaattttgccattaggtctgtcatgactgtgaccattattagcaatgttatatgtaaaatctggtgtttatatcatcttgcctgtatcacagaattttttgtctgttcagaattgagtttttatggtaatgaacaggctttataagtataaatattttacatgtgacagttctgtaacctccatttttcttgttgggaacaggtttgaaggttgaagtgactcattgtggaacaatgagacggaaataccgtgtttgtaatgtaacaaggaggcctgccagtcatcaaacgtaagaaaagtttgtcagagcagcgatggtgtgaggcagcttgctctagttagtggggttgggagtttttctggctcataatgggcaagaattgttcatgtgtacttttttttcctcagctttcctttacagttagaaaacggccaaactgtggagagaacagtagcgcagtatttcagagaaaagtatactcttcagctgaagtacccgcaccttccctgtctgcaagtcgggcaggaacagaaacacacctacctgccactagaagtaatgccttcacactgctaattaataccctgttgttcatgattcttttggggtcttttatggccgataacttacctcatacagaacatttattttggaatatgaactgtttttaagttttaatttattctaaattttctgtaatgaaataacacgaaacaagttcatccataatcctaccactctaatgtaaccactgttaacattttggtatactatacttctttcagtcttcatctggtgtacattttacttaattatacttaattactgtagagctgtcttgtttactacttttttacttaacatattgaaaataagtggtttaatgaagttgattttaaatttttatttacatgtaattggcactaagtaagagctaaaaaaaaaagatatatacatgtagtacaaaacttt

SEQ ID NO: 52853 - DNA, 1050 bp, Homo sapiens
ctcctgagctcaagcagttctcccacctcagcctcccaaagtgctggaattacagatgtgagccaccacgcccagcctaattttttaatttttttgtagagacagggtctcactatgttgcccaggctagtttcaagcttctgggcttgagcaatcctccagcttggcctcccaaaatgctgagatcacaggcatgaactaccatgccaggccaaaatgtattattcaacctaatgcatacatacaaattttgtataaattaccaggaggtcacagaatttctgcagtccattcatgacccatggtccccaggttaagattcgctgttctgtagttagagcaccattgattagacctgttggaaaatatattatggacacagtgaagaaaaaaaagagggttctaatgcattaaagtaggggatttgggggaattttgagagtaactacaaactttttctatttttaggtaagaagtgcaaattatgaaacagatccatttgttcaggagtttcaatttaaagttcgggatgaaatggctcatgtaactggacgcgtacttccagcacctatgctccagtatggaggacgggtaaagtctcttgttaatgttttaatcatacacatattgtctgtaagtatgaagagaaaggcatatcagaaatatttcaattcagcgatttgaaatgtttactttctgtttattgaaaatttttgttctttttcaccatgttatttttttctcctcgtgtagaatcggacagtagcaacaccgagccatggagtatgggacatgcgagggaaacaattccacacaggagttgaaatcaaaatgtgggctatcgcttgttttgccacacagaggcagtgcagagaagaaatattgaagtaagacatgtcattaccttggctttgggacttttttgtgtttagactttaaattactcatctaatgttctaacagatgttgccttaatatgaagtatatgtaatcactgaaccatttttttttttttgagacagagtctcactctgtcacccaggctgaagt

SEQ ID NO: 52854 - DNA, 1016 bp, Homo sapiens
acgcctgtaattccagcactttgggaggctgaggcaggcagatcgtttaaggtcaggagtttgagaccagcctgaccaacatggcaaaaccctgtccctactaaaaatacaaaaaattagctgggcatgatcacacatgcctgtaatcccagctactggggaggcagaggcactagaatcttttgagccccagaggtggaggttgcagtgatctgagatcacgccattgcacttcagcctgggtgacagagcaagactttgtctcaaaaaacaaaacaaaacaaaaagagttcaaaattcaacagtgtatgtcattgccttctctatagggtaccagtcgtccttcacactatcatgttttatgggatgataactgctttactgcagatgaacttcagctgctaacttaccagctctgccacacttacgtacgctgtacacgatctgtttctatacctgcaccagcgtattatgctcacctggtagcatttagagccagatatcatcttgtggacaaagaacatgacaggtaatataaaagcataacaggttctcacccaaatcccaatattgtctgcatggtaggattttcaagttccacaagctattagcggagtcagtgatccatgtgaaaaatgatgacagaactgactgcccaaggtttcctattgaaatatattgtctaggctcattagtaatagaatcatgtagtaacttagttgttttactacattaattcaaaggagagattattggtaataaagtgatacattcagacagatagacaaaatgatacgatatctaggtttgcttctaattaattctggggaggtgagagaagtaaaacaaaattggccttgagttaatagtgattgaagctgagtgatggacacatagattgttacaccagtctcttatttgttaataattttgaaattttctacaacaaatagtatttttcggaattattacatcagaatagaaagtttgtttttgtgttcattgccacttctctt

SEQ ID NO: 52855 - DNA, 1039 bp, Homo sapiens
gaattgacatacaacgtatgtttccagtgaagtcaattgagtaaggacacctccagccatacagaaaccaacactgtgtgggggccaaggtctgatccttatgttaatacaaggaagattgtttacttcatcaaggaacacagcatcattatgcaatatgaaaccagccaactgctttttgtgcggtctcctataggaagtatcgcaattgttttgttttcatttcttgtagtctaacccttttaatgcctttacctcaagttgcttggcagcacaactatctttgcaaaaaaaagtaaagaaaaagtaaatgatggtttaaaaaatacacaccttcatgaataatcaaagtgatttttcagaattatgtgtgcaaaaaattaatgtgcattcatatattcttgtaaaaggtgtctgtgtatttttaaaatatatacatccatacttcatatgcatatatatctagatctggattgataatagatatatatgtgtctgttatatattttagagttcattccattggggaattttctttcccttttattctacccccactaccgcctttatttctctatttcccttgccttcatcacctacatttttttcccagtcctaccagtgacattcaaatgttgatgtatctggttcgtttgaatataaaatatggcaaactagaattctacttttattttgcataccctactcctgactcctatctcatacacaattctgagttctcaactcttgatattgctgtcttaagaaacaaaattttatatatatatgtatacatacatacacagacacagacacacacatatatatacataaaataactttctgtgagagtgcgtctctcccctcccactcagaacatacatttaccatttgcgcaatttgtatataagcagtagcaacctgaactattctttttcttttttctttttcttttctttcttttttttttttaatgagacagagcctcgctctgtcaccaggctggagtgcagtggcgagatctcggctcactgcaact

SEQ ID NO: 52856 - DNA, 1078 bp, Homo sapiens
ctttctctatgtactctctcacctaattttcagtcactcatatatgctagagtggagcccttaatttaaatctatttggaaggacttttttaagaggaaaaatattttttctaaattataaagctttaccttttgagtgatttcttttttagagtgctcttacactagtcagcattgctagtttaaagttgattaacttgaaagagtatgtatactatatttctattttgctaacaaattggtatattaattaccattggttcttaattacaagaaaacttgtgcttagaattttaagataaaaggctaagtgacaaatgcttcttgaaatttgtcctatttattgttgcatttctggtgtagaatttctaatcttttttattttaaaaaagtttttttttttaagttaaacatgaaattcacagtgacccttctgctcctgcccttgctcactaactatatcatgaatgctagattttggtcttcttttttctgtgatgtatcttacgagactgactgtaaaatatcagtctggcaactagataattgattttcatatgaagaagagttgggagtttaatgtatattcttgatggttaatgtgtctacataaagtgctgatacatgtattatatcacagtatcaggttactggcatggaggaccatacacttacaatattgtagctgctatatttatttaagtagattctgacagttactgcactaaacagtaaggagataagcaggattcaaggctagtgttagacccttttttttcctaagagtaaggacacggaatatcaaagtaacaaagggtgctgccattttagtttcaatttaatatcaggatattctttgttttagaaatgtagattttgacttttacagtttgaaaaagggtacctcagcctcttcagtactggttttttggcacatttcaacagaaatattagattccctttctttttcttaatagtgatcttctaacaagtttcttggaaaaactatcattctaagggaaatccctgtttataacctattaatatatttctattcctagaagagagtctagcaggg

SEQ ID NO: 52857 - DNA, 1053 bp, Homo sapiens
atgtttacatcattgattaaatctcaagaatcttttgttcttaaaatatggaagttaaagattttaatttgaattaaagatagaaggatggtaaattcaatatagagggttgagatttaccagtgagaaaccctgttgaagtatcaggtaaatggtgtgacaaaattagaatcctgtcaaatcacctatccagccatcggggtcccttccttttttagactaatttctaaggtaaccagaatctaatgtatctatgttagggtctcagtaaagcaaagacgtttgtcagggcgtagactcttgagttaaattttttaatcattttttaaagcaaggcggttcttagaaagtgccttttcagaagatggtgctgtagatttttatttttcaagtagcacgaagctaagaattttaaagataaattattttagaactccaagagtgtgacagtttcataaaaataatgttagttgttgtcttgaatctcgtccaagggaaccaaggaaagcttttatgcagtaaagtatctaggtaaatgctcaccaaatttattttgtaaatttgaaaacaaaatatttagtagaattacctcttttaattcccaactgtgttggaggaaatccataatgcacataaaacagcaaacctacttaactttttaacaagattatgggtatagtaccaatgtccaaagggaaatgtaacttgcctggaatcataggcaacattttctaattaatctttttttttttttttttttttgagacaaagtcttgctctgtcacctaggctggagtgcagtggctcaatctcagcttactgcaaactccgcctcccgggttcaagtgattctcgtgcctcagcctcccaagtagctgggattacaggcatgcaccaccacacccggccctaattagtcattattaaggaggactgctcataaaggcagtaccaaatcatcattcagatcagcttaagtgagaaagcaaaatgataatctctattgttagagaaattttcttttctagacaccaaggaatattttaaatgatt

SEQ ID NO: 52858 - DNA, 1049 bp, Homo sapiens
aaactctagagtttggatttttaccaataaaccattaacactattttgtaacttagaatatttaatgttgtttatatagtgggcattaaagacagtctttagacagatttctacatgtggaggggaggtggggctttcctgtaagtttgatcctttttttcccctttagtagcaaactaacataacagattggatttattttacctgactacagttttggggaaacctgtcaaataaataattgttacatgccttttttttttaaatttaagcacattgaaactgcttaaatggtcacatttttcagcattaggattaagataccatttttgtaggcctggaaaacaaatagcaaatgattcaaaattcattgaattgactttgaaatgaaacttttcccccataatttgttatatggaagatttgctaccctgatcttttccctagcatacttctaaagttgattgaatccctgagtatcaatgaagaaatcagagtttaagtggctagggagagccaggtataaagactgattaatagagtacttcagctaattaaaaatttaaatagtaataatttatgaatgtgaataaattggaaggcagcaaaaagcatgattatagaatattaagttcaattatatatagacagtccagtttcctagtgaataggtcaagattatttgttttgttttgtggcactatcatagttcactataacttcaaactcctgggctcaggctatcctcccacctcagcctctgaagtagctgggactactcacatgcgccaccatgcccagctaatggtttttttctttagagatgggggtcactatactgcccaggctggtcttgaactcctaagctcaagtgcttctcccacatcagcctcccaaagtgctgggattacagccatgagccactgcatctggccaagatcaagattatggatattggtatgttaacttttaaaataaaagtacatgggctgggcgcagtggctaacgcctgtaatcccagcaatttgggaggccgaggcaggcagacc

SEQ ID NO: 52859 - DNA, 1022 bp, Homo sapiens
tattgtacaactagatggttattccctgtttcttggccgatttttggtacctttctttgaagaagagggttagattttaagaaagaaagtgtgcttatttcactcatgtctttgcagaatttaactttgctttactttaaaaattccaatcatcatgtacctataaaggttaaaatatagtgaaagtttctgcttcatgtgaattcaattctgagcacctgcaggtcatatcaggtgtctgatgcagttacctttatagatcgtggcaggtccttacatttcaacaggcttatgcatttccatggggggaagagattctgtttctaggaaattacaaagggcacaccactgcagggagtgtaaacaattctttgttgcaacagacaagattttttttaaaaaaagaaaaaaggatgcattttaggtacacagggtatggacgcattcaacatttacttttatctccacagatgccaacctccccttgttgcaggcagttgggcttttccaactcattgctaacaaagctggcatctgcattaatttcaatgagaatttcaagtactgaagatgaaaagttggggagattcatgtttgaaaaatgaaaaatgaacaaaaaatccaccttgtgcagtgagatagctaacgctgatatatcaggaataattttaaactatttttgctgtaatgtgtagctttaatgtctcttttcagttatggacccataaaagtattcctatatcttgtgaataaagatcattcttgtggactagtacgtggatgcattcataggctttgggaagcagtggtgtgcgtatgtgtgtctatatcaatattttatgtttataactctgcgtattaagtttatatagaaaaaaataatgtctttctttagtgtttgggggactcaatggtaatatgaccattgcagtgtaatctgactgctcactctagagaacacttctgttatacacaatgcacatacaaacatacacccctaaagcgtagctaactgctcccac

SEQ ID NO: 52860 - DNA, 1028 bp, Homo sapiens
taaatacaggacatgtggggagggtggggccgcctgcaaaatgtcctgaagatggacaaatagccttttaaattctactttttaaccatctttaccgtgtgtgcctatttgtattgcagatgtgaactactatttttggaggttgatatcagtatgttttgaaactgaattattacataaaatcagagtaacctctttctccatcctccttttccacactattcttgccaaatatttctactgaaacccagtttcagcaaggcaaaatgatgggactctcaaacctccctcctcatcttcccttcccctctgtcttatgcctggcctggccttttttgttgttgttggcttttcataagtaagaaaaatttattgtagtatttcaagactgcagaatttcaagtgtatatctataaatctttttttaaaatcttcggctacacagtaacatcaattaaaacagaagagtgagtctaagtctgtaatatgctgtaggaccagataagattttgaatgagactaaacttgactgccatattttaagaggaaattgaaactttatggtggagaatggatgagagcaagtctatgatatatatgtagtcattgtataattagaaacaccaaatgctgaatcctatcactgtgttcttgggggccaggccttggatttggttgtcatttaaactccttgaagattatatgtaattataatgagcagaaggcaaataaagtttttgaacaaaagtccttgttttcagtatttaaaatttggtaatatattttctttttcagttaaactatcttccccacaaaaaatattatacttcagttaaactatcttccccacagaaattattatactacgaacaagttatgagtgagactgagaagcttgaagaagctggtttttaagcagctcatataatattttgtgttaaagaaagtgtcattgtttcctgttgggaggcaaataacaacaacaacaaaagaaattgtcatgattctttctgagccaaactgtcacg

SEQ ID NO: 52861 - DNA, 1002 bp, Homo sapiens
gcctctacctggctgtgtcccagttggcccctggtccgccctcctgatgcttaagggaggcccacagggggcaagggcccggtgggagggcttgggggtggtcccggcctcggtggggagggccggctgggggtgcggagttagggttgctcgcctgcggaaggcagtgtgggctgcagtgatccaatggtctggctcagtgcccatcccccggagaccccatagtggccttcccacccagttagcccagtggtgaggagcggaaaaccgagactcaaagcacaggctggcgggaagtgcgcggcgccgcgactccgggccgctgggcggcgctgtgggcctggcggcggagtggaaactctaggccccagggagcgctgcggacggaagtagggaaactgtgagggcggcaccggaagtggcgagcagtctgcgcgcggatggccgcagcggcgatggcggcagcggcaggtggaggggctggcgcggcccgctccctctcgcgcttccgaggctgcctggctggcgcgctgctcggggactgcgtgggctccttctacgaggcccacgacaccgtcgacctgacgtcagtcctgcgtcatgtccagagtctggagccggaccccggcacgcccgggagtgagcggacaggtgggcggggccgggcgcaagtcagaggccgtgcgggagggaggccgaaggggcgcggagcctccgggggcgacgggtcgggggtgcgcggggatgaggctgccgagggcaccggggccagagccggatgacccgcagacagcttgagctcagcgagtgccagtgcgatctccggccttatagacgtctcgccccgaacatcccgtgctcggggcgtggcagcaccggggcctcaaccgtgcagggtgtggataaacccatcgtaagttgaaaatacctgaagtggaaagtgcgctttcagcttagacgaccgttttatctggacgcagccccatcggacgtcgaggagcc

SEQ ID NO: 52862 - DNA, 1048 bp, Homo sapiens
acaacaacaaaaaaaacaaaggtgagcaggaggctctcatcctccctcctctccccacagaagccttgtactacacagatgacacagccatggccagggccctggtgcagtccctgctagccaaggaggcctttgacgaggtggacatggctcacaggtgagggggatggtcctgggctgaggcaaaccaggtgggaaagttattgcaccccttgaccagaggaatgacatttgtgcatgtccacgcccccaaccctccacagaagcctgtgtcaggctggcacagcttcccaagctaaaacagcagcactgctggtgcaggctccttaggcccccgaggctttctctttttccaaactagcctcgatttcttctctcccaacccttagaggcatcttgtaaatctgaattctgtctccccttctgttccctagatttgctcaggagtacaagaaagaccctgacaggggctatggtgctggagtagtcactgtcttcaagaagctcctgaaccccaaatgtcgcgatgtctttgagcctgcccgggcccagtttaacgggaaaggctcctatggcaatggaggtgccatgcgggtggctggcatctccctggcctatagcagtgtccaggatgtgcagaaggtattcagggcgggctggcttctgggctgtccccttcctcttctgcagcagggcttctgtgacagcaggtctcctcctccctagtttgcccggctctcggcccagctgacacacgcctcctccctgggttacaatggcgccatcctgcaggccctggctgtgcacctggccttgcagggcgagtcttccagcgagcactttctcaagcaactcctgggccacatggaggatctggagggtgatgcccagtccgtcttggatgccagggagtgagtatggggctggaggtgtgtggtgtgggtatgtgggtgatccagggggcctctggcattgccgcaaactgtaaaccttcctcaattgcagaccctagggaggcatgggcagaagcccctttatcttgtctatg

SEQ ID NO: 52863 - DNA, 1027 bp, Homo sapiens
tgtggccaggcagctaccccttcgttttcccactgtcccccaggtccagatggctgtggaggccaagtttgtccaggacaccctgaaaggagacggtgtgacagaaatccggatgagattcatcaggcggattgaggacaatcttccagctggagaggaataaccatccctacaactcgaggatagccatcaggagcactgttggaatcagcaggcctctgtgctccctctgccctccagaactcagtgactcttgaacatggatgttatatattcttataacctgtttccattctccattcaaataaagagcagactgcgatatagtccatttaccccatgtgtgcacattcaggagcgacagtctctgcccccattcccttgagaggggctggatgtaatcacctttggttggactagaaagagctcaaaccattttacattcctgtttgaatttttccaaagcaaaactcactttgaccccattaagaggcaagcctggcacatctatccctgggcctttagaaagccatttgcctcaaatggctatagggttgtggggtggagggaggaagggctgggagggagtggggaggaattgctagctgtagtgtgacacattgtagtgtttgccaggaaaggagccagtcatgccggaaacactgacttctgggaagccacccaggtctcattcctccctgctgttggaggcaacatctcctctttttacagagggtacatccttttttcttacaaattcttcaataaagacacattcttgagtgaaatcccaatcatgtcctgttttctttctgcttatccccaggtgttttgttacaatggtgtgaggagaccaggtaggttcatgggccctgtctttctttgacttggtttagcagtggcttctctccacagacgagagtgtctgggaaacctgggagccagtataagcaactgaagccccttcagagtcgcttttggctctagtgtgtgcagcaaaatctagaagcagaccattattccagac

SEQ ID NO: 52864 - DNA, 1020 bp, Homo sapiens
tgacagttgcatcaaggctggtccagactctcaccacgctttctcttttgtgctgcttggtcctgactgccttttgaatctcttttagagctctgagctcttcaccctgacctatggtgccctggtcacccagctatgtaaggactatgaaaatgatgaagatgtgaataaacagctggacaaaatgtgagtgagctccttcataggagagacagaaatggggcctcccagcacactgagtctacattgtcctttagagcttaaaacagggttctctctctttcttagccaacattttgggtacatttctcactaaactcatttactgggatgtttttgagattatccccattttccctttaccaccaacaaccttatgttcaaacataagacatttagactccatcatagtctcttctctaacttccttcccaggggctttaacattggagtccggctgattgaagatttcttggctcggtcaaatgttgggaggtgccatgactttcgggaaactgcggatgtcattgccaaggtcattattctgggccacctgtccatgctgaagaattgctgctgagaggcactgcttaccactctttctatctcccttagagaggcctttaatctcccaaaagactggctaggcagctctttgggtcaaaaaaacattccaggtcgttagggaatagcatagattatttaatccctgtggattaaagccccactgaaatcaaagcctgagcttttccactgtgaaggtgtagcagagtagcatgggggtaaagaatacagactcggtcgggcgtggtggctcacatctgtaatcctagcactttgggaggcccaggcgggtggaacacaagatcaggagttcaagaccagcctggccaagatggtgaaaccccatctctactaaaaatacaaaagtttgctgggcgtggtggcgggcacctgtaatcccaggtactcaggaggctgaggcagagaattgcttgaacccaggaggcggaggttgca

SEQ ID NO: 52865 - DNA, 1086 bp, Homo sapiens
ttaggcattccccagagtttgccctttctactgacctcctattctcccagcccagatctctccaggagagggaacccaggaggctgtccccactgggatgcaggcagggtaaagaccgtcatgctgattgggtccaaaccccagctttgctactcactagctgtggagcttaagtaagtgtcttaatctctgaacctgtttcctcgtttgtaaaatggggtaataatatctacctcataggattatggcaaaggttaaatgaactaatgagtttaatgtgtttagctgtgcctgacaaaagcattagctgttgctcctgttaatcggactttctctgggcctagggaaataatttgctcagaaggagcagaagtgacctggatgacgctgtataaatattccggggacattgtgtctctgtgtgctgtgtgtgtctctgaggctttgtctgtttcttagaggaggtacctggccccgtactctgtgggtacatctgtgtgtctcagatatgtgtagagttttgaatcccagtaagtctgtttcctctgcatgtgtgtgtgtgtatgtgtgtgtgtgtgtgtgtgtgtgtgtgtgtgtgagagagagaggagaatatgtcttgtctctcgccattgtgcaggccctgtttacattgtctggtgtctgtctctgttgtgtgcacgtctgtctcccatgtgtctctgccctctgcctgcctctgtcttcgcctgctctagtgttgtcacctaggaatctgcagtgagggccaggagggctcttgctagaggtgctgatctctgttctgtcttctctcggcctcgtgcctctgcctctcccatgcttcctgcctgaggtgctgtctgtgcaccccccacgccacaaccagccctcacccaggcactccctctcgctgcccctggaggtgggctgttctcccctacctcacttcccgcctcttgggagccagcctgggcaggagcctgccttccctacattcctgtgctctgagctcagtgcctgcttgccccacctgcacccttcacttttgtgggggaagtctccctgggggaaccacggaatcacttc

SEQ ID NO: 52866 - DNA, 1037 bp, Homo sapiens
gcccagggccaggccacactctgcctccaaagccaccgtccccccgaggcaccactgcatcccccaaggggcgggttcggaggaaggaggaggcaaaggagagccccagcgccgcagggcccgaggacaagagccagagcaagcgcagggccagtaacgagaaggagtcagcagccccagcctcaccggcaccttcgccggcgccctcgcccaccccagccccgccccagaaggagcagccccccgcggagacccctacaggtaggaatgaagagaggggaggggtgggccgagcgagagaagccagcttctcctgtgtgggggtgtgggccgccagagatgcctgaggactgggagtgggacatggaaagaggagactcctgccctcagcagtcccaggcccagaacacaggccgctgggagatgacggcggtgtctgcgtgggtgtgctgacgcctgatcccggatccccctccagacgctgctgtcttgacctcacccccagcccctgctcccccggtgacccctagcaaaccaatggccggcaccacagaccgagaagaagccactcggctcttggctgagaagcggcgccaggcccgggagcagcgggagcgcgaggagcaggagcggaggctgcaggcagaaagggacaagtgagtgcgcctcggggactgagggggccctcgtgggcgctggagaagaagcagaggccgagcctgagccgtttgctccgtcccccaggcgaatgcgagaggagcagctggcacgggaggccgaggcccgggcggagcgggaggcggaggcccggaggcgggaggagcaggaggcacgagagaaggcgcaggccgagcaggaggagcaggagcggctgcagaagcaggtgcccccggcgggcgggaagcggctgggcgcgggcgccgcgggccgggagggaaggctggagtcaagtgccccacgctcatgggggtctttggcagaaagaggaggccgaagctcggtcgcgggaagaggcggagcggcagcgtctggagcgg

SEQ ID NO: 52867 - DNA, 1025 bp, Homo sapiens
aagtttagagaggagggatgaatttgctcaaggtcacaaagcggaagggagcgcagcagagaccaaaaacagggagactcgacttccaactcggaagcttttcaacaaggcaagctggcccggagtgggtggggctcagactctccctccaggctggttccaaaatggtgggggcagtggcgtcagcaacgcccccgccccttccgtccaccgccctcctccatctccaggccacccaggcggggggaggggacggccccgagcaacccacgtgaccgccgacaaccgagcgcgtgacgcaaagcggcgggcccaacgctcgccttgtcttttgggaaacgtagttctgatggcagccaagtcggccaggagaggagggcgtaggactacatttcccaggaggcagcgggtctacgccgtcgccgtcgtcggagagcggagacgctgggcgcgctgtggggcgggggcgaggttcgggctggttgttccgttgcgagctgcagctgcgatctctgtggtaggcccaggtgagtgagcgcctctgatggaagttagggcagcttaaccggctctagtggtttcgtctcttatcttttttccccagctgctggtcaggggctcggggaaggcctggcgtggagtcgctccccccagcttacaccctggcctcttctgagcgggctccgttccctccggctcctccccttccccgccctttaggtcttcccctggccccggcctagctcccaaggctcttggtcgccttctctgcagagcagctcctacgccgctttatcttgcagtcggcctgggggcggccactccctactcctcccgttttggtcgtatgaaccccgttatttggatttcttttcccggaactcccgagtgcccttccccccacccagtccccattggcctggttcggtcttctcctagggcgcatgtggctgccactcagtaaatgttagtaccgcttccgttctttccagcctggtggccaaaaacgggatagtccaaatttg

SEQ ID NO: 52868 - DNA, 1111 bp, Homo sapiens
tttcgtttgtggaagtactgttgtagtctgttctgtaattctagacagtctgacgtgtgtattatgatttagaagcttgttaaatagccaaaaccggctcctgccatgaacaacttgtggagcaaatcgggctcagtttgttctttgccgggagatgtattttgtgagccaatgttcatacgttaatgataagttttactgcagccatttgggcttaattgcattttgtaagagagttgtgttgaggtttctgtaagaagtgatttgattaaaaacctctatatccagtgtaattccatctctttgttttttaaacgttttaacaccagagaaagatctccaattttggagactgatgtttttagttttgtagactaggtacagttcaattttagcagtggtgatggtagtagtagtaccaccttagtgtatttatttaataccaaatatataggtacttttaaatttggtttagcctgcaaaatatggattacaaaaagagtgatctattttgttccgaggaattggagggaggaagcttggaatatttctgagattagcacagagatgggaaatgttgatgactgggagggtacacagacatacgatttattattattattattttttgagacaaagtctcgcgctgtcacccaggctggagtgcaggggcacaatctcggctcactgcaacctccgcctcctgggttcaagcgattctcctgcttctgcctcctgagtagctgggattacaggtgtgtgtcaccacgcctggctcatttttgtatttgtagtagagacggggtttcaccatgttggccaggctagtcttgaactcctgacttcaggggatcacctgcctcggcctcccaaagtgctgggattacaggcgtaagccaccgcgcccggccacgatttattatttttagaatggatagtcctaaccactaagcattttagggcgctaccctgtttctgtagggcatattgacatcctgaatgcaaggaagtctggttaatgctattctctcaaatacagggttttggtggattttttcacacatattctataaacatctaagatctgttcactgtttgactctggttgatt

SEQ ID NO: 52869 - DNA, 1052 bp, Homo sapiens
gtttccccaatgattaattgcatagatgatcctgagcttaatagacacgcattgactgaattctcagaggagtatctcaagttgcttacactggggatgttttgatgaaaaagttctaagtgaacttttagcttgctgttgattttccctgctaacatccagcatcgaagagatttgtcttccaaaggtgaatgtgaccttttgacttaggtctttcttgataatacgacctttccttctagcacacctcttcagtgtgacacatgctaatttagccaggaaagatataaaatgctttattgctgtgtaggaagatacctgatcacttattacttgtaggcagatttggtttttgtttgtttgtttttttgagacggagtctcgctctgtcgcccaggctggagtgcagtggcgcagtctcagctcattgcaagctctgcctcccaggttcacgccattctccttcttgtaggcaggttttaataaatagcaagaaaatagaatcagttatgaaatctgtttactcccagggaagttcctaaatctctccctccaaccactctggttctgtggctaaacatagtttaaggtgtttactcacttgtgtgtcaggcactgtgtatgtgcttccttaattctcctggcagtcctgtaaggtgtaggtcacatttggaagatggagagagttaagtattttgtccaggaatgggtggcagagccaagattgaacccagttcgtttttgctaccaaagcctctacttactgccgaacctggcccagtattacaaagtgacttgtccatttaggactgagcattttagaatgataatttgctttagtgtatttcctcacctaacacccaccttagtgcccctcttgaagtaacactgtattatggacatatggacagcccagaatggaacgtggattctagtctcagttgcttattgtgtgttgagattatgcgcagatttgctagttatctatctcttttggtcttaactgtgaaatattggtaacattacctttatctttttttttaatatctatt

SEQ ID NO: 52870 - DNA, 1392 bp, Homo sapiens
aaggggtttctccatgttggtcaggctggtcttgaactcccaacctcaggtgatcagcccgcctcggcctcccaaagtgctgggattacaggcgtgagccaccgcacccggcctaatttttgtatttttaatagagatggggttttcccatgttggccaggctggtctggaactcctgacctcaagtaattcaccccctttggctttccaaagtgctggggttacaggcctgagccactgtgcctggccctggataatttttttattttttattttttttgtagagacagggtcttgccatgttgtccaggctggccttgaacttctggactgaaaagcaagcctccttccttagcctcccaaagtgctgggattacaggtttgagtcaccacgcccagcctgtatctttaaatgttttaaacagttaaattaaatgaccattctccccagagggacatcacccccactttttaggagagtacccaatgcacatttggatattcttttctataaattgaagaccttagaattgaaattagtatttactgatttaccttacttaataacttgagagccacttaatagcagagtacatgtcatgaaggggtctctgatttgatttattcagggatggggtggagtatgaggccttggcagagtgttactctagagatatcacagctgccctctattctgtttctgtgtcttttactcaggagatgatgacctccagagaaaagagtaaaatagtaaacatgtttcatatttcacctgagctcagctttcctcccataactgtccagaggcattcagaacgcaagtcaggcccaccccactgctttgtctaaaacgctttatgggtggtggtatttctttcttggtatttttgtctgtcttatctctatcagttgatggcttgttcaccaagaatttcctacttcttccctttagtgactgttgaaagcatggctctcctgactggatgttggtggcagtgaagttttgttcaaacgtggcactagtaaatgaagtgtgtctccctaacgagatcagtttggtcttatgtgcctttgaataaggtgtagaagggatgagaatgatctcaatttctaggttagcagaactgtgatacatacataattttattccttgactgtattgttaatatttgataaactgatttttaaaattattgttccttcttgtgaagagaatggagattgaagaggaagcgtgaaagtgtgtttattcatttaacaagtacaaagtgtccactctgtggctaaacgcaaagcactgaagatgaaatggagaacaaatcagatgtggtctctggttcattttgtagcctcctgggtttggtatcctgaattgttaaacttatttagtta

SEQ ID NO: 52871 - DNA, 6899 bp, Homo sapiens
tctctcttttttttttttttggagatagggtattgctctttcctccagagctgcagtgcagaggtgtgatcacagctcactgtaactttgcactccctcctgtcttagcctctcaaatagctaggactacaggaacgcaccactgtgactggctaattaaaaaaaaattttttttttttttttgtagatatggggtcttctcaagttgcccagattaaaagaaatgtgtttctaaaatgtccaaagaggttcacatttgcaaaggaactcactcatttgttctaatgcattttcttacattaggtgtaattgaaaagtgatcctctcttcagagatgtcaaaaacaaacaaatccaagtctggatctcgctcttctcgctcaagatctgcatcaagatctcgttctcgttcattttcgaagtctcggtcccgaagccgatctctctctcgttcaaggaagcgcaggctgaggtaagggggtgtgactttgtatattgagataatcattgcatcagtcgatgtggatgtttgaagatcttttgttagacttttcctgtgagtgtcaaatggactggggggttggcttgaggtgcagggttgggctataagatattccaggtctctttaaactacaaatccagatcagctttgactgccatgctgattgcctgattcctttcctctgccagcacatagtatttcccacccactttggaagaaagaacattttatttttatttgagctgcttgcttcaaatctctatagctgattatttttcaccaaattatttttgaaggcttgaaccaaagtttatgtgcatcactgcaaagaaaggatagctaagaggattaataatatgaacaacatggcaaggaaaagaagcttcaactcactaaaataaacttacagaaacttatcaggagtaatttgtatacaatgtgccaattactaacaagctgcatctgtttagtaaatgtatcttaaaactttttaaaaatcgctattgaaaacatcactttatcttactgaatatgagcacagttcttttgaatttattgccagtatttcctaattcagtcagttttcacaccttcaggtggatttccctattttaattatgtcttggaataggatgccaaacctccagcgtctttcctctcttggtgtgttgtgagttggatttttcattctttaaaagtgtttaaactttcttttgtggatagataagaagctttcagtaaataacaagtttctatatgtgagtttgggaaatattggtgtatttaaattggtgtgctgaagaggaatctttgtacattttcattctttttcccacaagtacattagcaaggagatgatttgtcatgtttgacacttggaacccctgctgtttatttcagatgagtatctagaatccttgtcttagatgaattgattagctgtttatttcagatgagtatctagaatccttgtcttagatgaattgattacgacatttaaaataaacctcagaagtcagtgattaaacttttactcttgatgatttccagagccctatagtacttctaaggggtctattaaacaaaggattagtagttttgtttttttaccatttaacaaaaacaaggtagatattaaatggagtctatgagaagccagcctgaaaaagcaggtatgcataaatattgaaaagggaaaccctaaatttatttacctcaggaaattgcttttaaagccatgggaccagcaagactcttagtaactcctaccctgtacccagaatcttgatttagggagtttaaacctcagttttagctcatttggttatgaaagatacctttttaaaatttaatctagtaactagaagaaactaaataattggttcaacaccaagaggctatgcaaccaaaactgagagacaaaattgaattgaaaaatgttaaccaactctgaagtatttatgacagctggaattccgggcagttcttttctccttgttctgcaaatcatttggcacttgctcactgacttggcaaatgaggaaaaaatattttaggaaggcagtatgtgctggggtaggtctagagacactttacatgctatcatatacctagaagagacttttctggaggaatttctccactagaaagtatgcttttataattgattgtaatctgacttctctgtttttagaaacagataaatttgccactggatgttcagtttttatttctggcttatctgtttcatggttttttcttttgttttccctctcctgcaaggaaagtatctatccagagagtttgagaaaccatgcctttaaattaactaactgctgagttctacagaattggagaaaattgattatttccttgtatttcacagactgtatccttttaagtgacatctcttaaataacttcatttgcaatctgcagagactcattttcctgcatctgtgcaatgactgtgagttttggatgcagtatgcccagggccctcactagtaattggtaacagaagcagcagtagcctgtgaggatgggaacatgaattaaaccctccttagtgctggtggtggatcacctccctcaagcatagccctttaatcgggttgtattcactttcataatctgcatctgcctctcccttcttttcttatattgttactgttttcaaatgaaaagtgtggaaggtaagtttttttttaattgtacttaattacaataacaaccagcagtaagatatatctttgccagttgctcttattcatggtgtagataaaaaaatctgagtacagtgggcaataaatagtggaaaaccaatcccactttatctttagattaaattgaatgtactttcttcttaaaaatactgttttgtttagttgttaaatcctgaaaagaaactagtatatttgctaactggagttatttggaaaaaacaaaaatgcatctgttcccagtcagatatgagaaagcctgctgattaactgaagagtttttattctatatgtaaagaaaatattatttgaaagagttttctagtaaattttacttatttgtagccagctgcttaggagtagtggttaatgtcaatgatctatatcatagtagataggaaaagtggatccaagaaccccaatgggtttttacaccaacatacgtaatttttggctttttgatggaaacaaagtttctcatcattgacaagcctgacactcaggaatgtacagttaggttactatcaagtctctgtggttctggaaattcatcttgctctaccagagttatatattgttaaatggagaagaacacaacactagccttctgtgcacaccggggtgggggtgttttttagttactctttgctaacttcatgcgtccttgggtactttatggtccgatagtgccctcttgtggcacctagttaagatcatgtagctcagccacagaaatatgacctaagtagtcagaccatttccattttaaaaaacaatattttatgttttgcttatgtgattttagtaagttcttttaagctttgagcagatgcattctcccaagttttctttggtgtgtacctgttgtaactatacttttaacgatcccaagccttagtggtatcttaagaagttcatcccgcacaagggggagagagctgactaggatagggtgtggagtgttaccacattgtagataggggtcagagtacctgtctaggtaccacagctcacagtttttctctcgtttccaatgacctggagccctgttaaaatccccgtgcctgtgaaactgtaagctattattatggtatattaaaatggtctttgtgtggtttactaccttaagaaaatgttgatagtttttcagtcactgtagaagtacacctccattttaaatgtgctgcaatatgaatgaagtgacctgtgtttcatcacttgttcaaatgattcttatccatgtttttgtacttagtaagggccatacgtagtgggattaaatatttgtgcccttgctttgaaaacaaaactgaaagtgaatgacacataagggcagggatttcagaacagatttttcttgaataaaaatgcttgtgtcaaaaattcaaacatttgtctctttcctttccattccagttctaggtctcgttccagatcatattctccagctcataacagagaaagaaaccacccaagagtatatcagaatcgggatttccgaggtcacaacagaggctatagaaggccctattatttccgtgggcgtaacagaggcttttatccatggggccaatataaccgaggaggctatggaaactaccgctcaaattggcagaattaccggcaagcatacagtcctcgtcgaggccgttcaagatcccggtccccaaagagaaggtccccttcaccaaggtccaggagccattctagaaactctgataagtcgtcttctgaccggtcaaggcgctcctcatcctcccgttcttcctccaaccatagccgagttgaatcttctaagcgcaagtctgcaaaggagaaaaagtcctcttctaaggatagccggccatctcaggctgccggggataaccagggagatgaggccaaggagcagacattctctggaggcacctctcaagatacaaaagcatctgagagctcgaagccatggccagatgccacctacggcactggttctgcatcacgggcctcagcagtttctgagctgagtcctcgggagcgaagcccagctctcaaaagccccctccagtctgtggtggtgaggcggcggtcaccccgtcctagccccgtgccaaaacctagtcctccactttccagcacatcccagatgggctcaactctgccgagtggtgccgggtatcagtctgggacacaccaaggtcagttcgaccatggttctgggtccctgagtccatccaaaaagagccctgtgggtaagagtccaccatccactggctccacatatggctcatctcagaaggaggagagtgctgcttcaggaggagcagcctatacaaagaggcaagtatctcatttcccctgcctggttgtgtttttatctcactagctggcagtttaattgtaatgtgatctaagttagagctctgattaatggtaaaaggtaatccctatttcctagacttttcgttagtaaacattaaaagcatcacccaaggaaacctttaggttaactctagctttcctaccttcctgaatttgtattgcagcataaactttctttagactactctgcaatgatgttttcacatttaaaatttgccttggattctaccaatgtaagccaaagaacagtagagatttgtgggtcagctatcaaaaaaaagtatggtctttgccaaaatgaatggccattggagctcttagaccctctagcacccaccatctactatgttcgatctgcatcagcctatcatggtgaagagctgcaccctcaataccctccagttgaggagactgggcagaatgggaaaggccaaggcatagtccaggaaggccttgttttaaaaccacaaggtgggtgtatgtcccagtagaagccaacacggctgcgtgttaggagaggacatgacagtgcttccgtctttctcccctgggggacacggtgagttggaacatgaatctttgtttgtatggttggatggattgggatggcagagaggttacagggaagttgcactgggaccaggttgtggtcaagagggactaacccagcaagtggctccccctttttttttcttttatcgtatttagcatgttttttgatcccttgattcttcttggctgtattaacacgactttgacttgattaagctttctgcattaatggtacagatgagatgttttgaatctgtacttgccttcagtaagtctgttttattttatttatttatttatttatttcaataggtttttgggcgaataggtggtgtttggttacatggataagtttgttaatggtgatttctgaggttttggtgcacccatcacctgagcagtgtacactgtacccagtgtgtagttttttatccttgccccctcccatccttctccttgagttcccaaagttcattatgtcattcttatgcctttgggtcctcatagtgtagctcccaagtaagtctattttaaaacataagttttgttccatgccaggactgtgaatctctttagaagacttgagcatgagctctgcttttccataagaaagagaatgatgatttttgctgctgtcaccctctcccccattaacatgtattttgtttttatttgtgttcacagtatatttcgtatttagatcttctaggtgacttgaagcaaatttgaagtctctttttagacttgtatttccaaatgtgagttgtataaaagcaaaacagtccaaggttgaacattctatgttaactttgctgaaagcagattttaagtgactgagtgaaggttgggtaagaccttaagttattttttgccctagatcacattacaggtaagtaggtttttgtttttgtttttgagtatcctaaaaataacttttgttgttctctttggttgcttttgtaagacacaactccatggatcatatatttttctcttaattggcaagttcatagaactgtgaatggcagttttcagaaattattacgaagtaaccgcctagaaagtcctttggtaatacaggaatccataagacatgtttttttcagagaatcaaaaaccaaaaacggtaaggcactattttagagcatgctgttaagaagcctcttgtgtctctctcttgtgtttttataaataggtatctagaagagcagaagacagagaatggaaaagataaggaacagaaacaaacaaataccgataaaga

SEQ ID NO: 52872 - DNA, 1044 bp, Homo sapiens
ggccaaggctgactggttttttacttggtgtaaactactcaggcagctggaagtctatgtgaacagcattccagccacaccccactcccgcttcatgacatcacctccctgaatggccttggctggtcatgctagctgatctttttattgattgattgattgaaatggagtcttgaactcctgggctcaagtgatgctcctgtctctgcctcccaaagtgttgagattacaagtgtgagccactgcacccagctgtagtttatcttttaaaatactttctcatttgttgggtgtgttaaaaccagcagtgactaaggtttaacacttcactccacttgaagattccagtaagaaagagaagagagagattttgtatatacttttccatagttacagtgcactgagggttactttcaacttcggtaggaagaaaagaagtttatagatagatttaaaactcttcaaaaaagtatttttatggttttaatgttcttcctgtgtattgtgttctaattgggcctccccatatttctttttcagacccagtggcttattggctcaggaacgcaagctttgccgagatctagtccatagcaacaaaaaggaacaggagtttcgttccattttccagcacatacaatcagctcagtctcagcgtagcccctcagaactgtttgcccaacatatagtgaccattgttcaccatgttaaaggtgagtccagaccctggcctgcttcaggctcgtgttccacacttagaagaaggatgaatgatgggtggataaggagttttgggggaccttgtatctcatctaaagggcctttgaagctaggggctggcttgaaggaaattccattcaagaagcagtttccatattttaattgcagagcttagcattttgaaatgctagtaacctgtgaccaagagaacaggtgaaatccttaacacaaagatttaaaatggttgaaaactgagaagccaatagcaaaatgacttttctagcatctctgtcttctcccctctaagtgatctcttatggacct

SEQ ID NO: 52873 - DNA, 2774 bp, Homo sapiens
tctcagtatgtttgttgtgtggatttaactactttaggtgcatctctgtggttacgggttcctgcaaaagagttaaaacattgtgtctgcctttggtaacataatgtgtttctttgtttctttttttttttttttttttttttttgagacggagtcttgctctgttgcccaggctggagtgcagtggcgggatctcagctcactgcaaattcggcctcctgggttcacgacattcttctgcctcagcctccggagtagctgggactacaggcgcccgccaccatgcccactagttttttgtatttttagtagagacggggtttcaccgtgttagccaggatggtctcgatctcttgacctcgtgatctgcccacctcggcctccgaaagtggtgggattataggcttgagccaccatgcctggcccataatgtgtttcttttaatcccaacagagcatcactttgggtcctcaggaatgacattacatgaacgctttactaaatacctaaagagaggaactgagcaggaggcagccaaaaacaagaaaagcccagagatacacaggtaaggaccatggccttatactggaggttgtaataaaagactttgtatcagacattaaactcaccttgttaaattctgctgctaatgcacctttaatacaaaatttacagtaacatccttcagactctaagagagctataggcatttatatttgagagtgtacaggacatgctttgggacaacagtctctcacattgggcctgaggaaaacagctctcttgacatagattaactcctatattcttggaagctggcaaatgttgcctgaaattactgtgagtttctgtaggtagagtaaatgctagtttcttttcttgtcttttttttttttttttttgagatggagtgttgctctgccacccaggctggagtgcagtgatgcaatctcggctcactgcaacctctgcctcccaggttcaagcaattctcatgccttagcctcccaagtacctgggattacaaacgtgtgccaccatgcccagctgatttttgtatttttagtagagacagggtttcaccatgttggccagtctggtcttgaactctcaacctcaggtgacctgcccgcctcagcctcccaaagtgctgggattacaggcgtgagccactgcgcccagcctaatgctagtttctttaggtaagcctgtatattaatatttcatggtagtttaatcatgggtagttggattcttctggaagaatttgcctgggggctagaggcgggagcttgtaggattatctcacagaattttaaagcccagcaggtttaaagactattacatttggttgtgggagtcagttcagtggatagggactagaaacaaagttggccttatctttgaggctatgggtgagtccatctttctgtgtgtagcaaaaccaggagagaacaaaaacctctaacttctgttacactgtgggaacctgggactgtgtgtgtgtgtgtgtgtgtgtgtgtgtgtgtgtgtgtctgcctatgggagagtataagtatataagagtaaaagtaatagatacataagtcatgaaacgtaaggaaaaataatgcctgtgaatctattagccaacttaagagctagaatattaccagtatcatattcacacaatggaatactatatcgttttgtattttcaattttaggagaatagacatttcccccagtacattcagaaaacatggtttggctcatgatgaaatgaaaagtccccgggaacctggctacaaggtgaactgttgatttgatcagtaattccaacaaaatgagtgcgttgggcatgaacttgacagaaatgtgtttgtttaaattactctctacttaagtttgtgtttttcttttaaggatgggcataattctaaaaatgaactacaaagggttaatttttattaaatgtatcaacaacctttgtgaagtggttagaatatggtaaatgaccccaaagtctattgaggtgagcttgagaaaaaaaagagaggagttttggaacaagtgcccatgatgagagaagaaactttttgtgatatttttctgcttgtaagtattatcaaatcaactgtatacatgcactatttccaaccatgatttcagaaagacatgcatgtcagagaagagtgaaatattcatgtcttaacttaagtagactgtttttaaacagctggtccagttttttttcctaacattgtaccatatctatcatctgtcaattactgttactttaaagctaaagattactttgatggcccagctacatttgcaatgatgtgcacgtaaacactgttaagaggttaaagcttgtatacaatctgttactgtgaaataactaaattgggctttaaaaaaatcttagtatttattgatcttcattcacatatacagttgaaatttaaaataacagatggttattccaatgctgctgaaaccttttctaaaaaatacttgttttgttggttgaatgtgatgagaggcgcttctgggcagtctctcttctctcccacccgtctttcctcctccgagtaccccttctccagctttgtactagccatgtaaaacccaaggttttctttaaaacatcagaagagatctcgtcctccatgccccaaaaaagccaactcattggaggtgttacccctgggagcagtgttgcatttgtctttttgtctttttttgctctttggaggatgcagaggcccagttccctctgttaggaaaca

SEQ ID NO: 52874 - DNA, 1642 bp, Homo sapiens
cttgttctattggccaggatggagtgcagtggtgcgatctcagctcactgcaacctccacctcctgggtttaagcgattcttctgctttagcctccctagtagctgggattacaggcacacgccaccttgctcggctgatttttgtatttttagtagagaacagggttttggttgttgcccatgctggtcttgaactcctgagctcaagtgatccgcctgcctcggcctcccaaagttctgggattacaggcgtgagccactgcacctggccagccttctcaacttctaaactagccagagtcattactgggccagaaaggaaacaaagtgagatcaatgcatagcattttcagaaggccagcatcattgttttggaggactggcgtgggttctgtgagggatccttatggagtaacttctgtgggacatcctgcatcccttccaagcttgggtgagatgcctcacatttcccagtgcttcctctgcacccctccattggagtaaaaaccacagtttgtgggatggttgagttgacagctctgaatcccagaaaccttaattttggcttatcttttgataggctgagggaaaatacaaagatgatcctgttgatctccgccttgatattgaacgtcgtaaaaaacataaggagagagatcttaaacgaggtaaatcgagagaatcagtggattcccgagactccagtcactcaagggaaaggtcagctgaaaaaacagagaaaactcataaaggatcaaagaaacagaagtacgtaagcccctgttaccccttccagactcttaagtttcttgtctgtcccctttgggctatacaccagaactttcaaatcagaggagtttagggttagtaattatagcaacctgtttcttcttttaatccatgtaaatgtcaggtagggtccctagtttgaaaacaatttctacatcaaaatagtgtgatctttgtccaaagaaggcttcatgagagaagttaatctgttaaattgaccacagggatggtgtggagaatcattagaatcatttgggaattccttttgcagttttagatgtacctttttcatcacacattttcatggggaagttgtattttagaaatggcccaaagtcattgtcaagtaataacactgtttagtcaaagaaacagggtggaactagatagtacatgattgttgatcttaagtgccttttaaactagttttacagacagttccaagagaggtgttccaggtactccttaaacaaaggtggcattgttgaactttgtgtggcaacattcatgcctatgtcctgatgtttctgtttacgtttttgaatgttccatgactttttaatcatgtgtcacgaaaagtagcacagttgaagccccataccttctggtaagaagcaacacttctgctgattttgaactttagctggcaagcattttttttttttttttttttttgagatggagtcttgctctgttgcctaggctagagtgcagtggcgcaatctcagctcactgcaacctccgcctcgcgggttcaagcaattctcctgcctcagcctcctgagtagctgggattacaggtgcccactaccacgcccagctaattttttgtatttagagatggagtttcac

SEQ ID NO: 52875 - DNA, 3964 bp, Homo sapiens
atctggcccagtaccagatactttggagctctcaatatagtgttaatttccttctcccttattaattcatgcctgtatcttagactgagctcctggaggccatggactgtgttttgttcctgcttctatgtatgtcatatgtttatcacagactcagacatagatgtgtcactgaacatgactgacagaattgagaggaagtatcttgggtgggtaggttgggggtgagctggctttataaggttactcatcatcagtttcttccatcacaggcatacttttgattgccctgtgcttatccatgaggccccagccaagcagtgtcccttagaaagatgattgatcaccctggctcttctcttttcacaggaagcatcggagagcaagagacaggtccagatcctcctcctcttcctcccagtcatctcactcctacaaagcagaagagtacactgaagagacagaggaaagagaggagagcaccacgggctttgacaaatcaagactggggaccaaagactttgtgggtccaagtgaaagaggaggtggcagagctcgaggaacctttgtaagaccttcccctctccccctttctctgagacccttgctcctaccagctttgatcacgtttcatcagaataccagttttgttgcctttgacataagtaatccaatccaaagaccctggaatctttggttctccttcccacatttcctggcctttccattttttgttacttttctgttcataatcacttagctagaaagcctcttatggcttctggtctcagaacttcccccacttaaccttgactactgctgtttatagggaggcccttggggcaggtttgtcctctgtgtaggctgcagacttgagatgagcagaaagggaatggctggaaaccagctgaccagcatatgactggaagacagctgtctattccacaccagaaaaatgtttgaacaaaaagcaggggggtttgttccccattcctggcatgatcctttgttctttttccctcatttattgcaatagcagtttcgagccagaggaagaggctggggcagaggcaactactctgggaacaataacaacaacagcaacaacgattttcaaaaaagaaaccgggaagaggagtgggacccagagtacacacccaaaagcaagaagtattacttggtatgtgtctggggataaccaggaagggttagagggcctttgacacacagagtagctgataccaagccttaattagtttgtccaaaactgcgattaaatgtacgtgcaggattattgcactggggcatgtgtacttgcatagtgctaactagatgggtgtcctctagagaggcagtcctggtcttcaaagggtttatcactgaagatgtttgtggattccaagataagcaagaagcattggtcttgtctttttagtctatgaacttgttttactgctcacccaccaccaacctcagcctccctcatttctgtggatacagccataacccttccctgatgccgctgtccctctctgccactccttcatgcaagaatgacaagaaagaccgctcaggatctctttgaggaaagggatgtctctccaaaatgaaatgccagtggggcttctctcatctaggctgttgatcattcctgtgcactctgggcctccctcagattaatacttttataggctgaagtacctggccttgagtgagctctcttggccttgatctgtaacagcagactaagatccaagctggtgtgagtgttataactaaggtaaaggagcagctgaatctccatcacttgccaaaatggctggaatggatctgtattgtcagttggacagctaggaaacaggttgtgtgtggatggctatgcgtggccaccatcccttttctagggttgctgctgctggaagctgctttgaggctactagaggacctttgaacttatctctagggaattgtagttggctgggcccgggttaggtgctggagtgggactgctgtagggaaaagattaaaggccctctcccttgctcctatctgccacctgagagagtattgccagcctgattcgtttagtgtgaacaagcagccatggtcagaagaagctgacacctgctgagctgagctccaacagcctaagaccctagcttttgtgggggggtggtttagactctgaagtcatggggctgataaggtaatgactgctggttttcaaaatgctttctccttcattgtttgattggatccctccttctgtctcatgagattgtcagagcaaggattgtttgaaatgtaggttaatcctttccttgaactaagtgaaaaagaaaaaatgaaatgtaggttaagtgtttttcctaccccgtcacactgcctccttgcataaaacaggggagatacaaaatgagagtgtggaggtggaggatcaggaaagccccagccccaacattggattctgagcatttggagtgcagtggtatgatcttggctcactgcagcctctgcctcctggattcaagcagttctcctgcgtcagcttcctgagtagctgggactacaggcgcacacccccatgcctggctaatttttttttttttttttttttttgtattttagtagagacggggttttcaccgtatagcccaggctggtctcgaaattctgagctcagacaatctgcctgcctcggcctcccaaagtgctaggattacaggcatgagccactgcacccagccgcattgcctcctttcttagctgcctaacaacccagttcacatggagttgcacgttttggtgtgattggctttctcaaacccaccctttgagagaggatatactaaatcatatggagttgcttaaagttcctaagctttaagcacgtttgcagagtgggaggtgataatgatagggtagataggagaattaaatgagatagtacataaatgtcttacttcagtgctcagtgacgtttttattttctttaaactattaagggttcttgctcagtgaatcatcatcattgtcaatcatcgttacaatgcccaagctgttaccttaaaattcctaaatcacccaactgatattctcatggatctgaaccactggcatttttggagtgggggacagggagaagtgcagaaaaggatcaaaaggctgggttagggcacaggttcttttgggaaaggcacatttgggtgcgtgcagagaagagagctctggccacatcttgttcactctggcactgatggcaattttctttcccctcagcatgatgaccgtgaaggcgaaggcagtgacaagtgggtgagccggggccggggccgaggagcctttcctcggggtcggggccggttcatgttccggaaatcaagtaccagccccaagtgggcccatgacaagttcagtggggaggaaggggagattgaagacgacgagagtgggacagagaaccgagaagagaaggacaatatacagcccacaaccgagtaggggccacccttgacgggattcctgcccaggggagagaggcgctgggaagatggctggtgaggagcttaacagaggaacctcaagaagattctgaaaatcctacccccaccccccaccagccgcacagattgtactaccgcgagaggcatccctggcgctgtctcccactggacagaggaggctggccatggggcccaggggtcaggcccagcttttgagcagaatacaacgcattgggctttagctgtttttctcatttgttggtgtgtggggtgggggcaggggtagggcgggagagcgatgcttggatttttgtttcctattagaaaccaacagttttgttctaatttcatttcatttggagctaagatgactaatttgatgattttcgatctcttttcccctgtcctgattttaaaagccccctcctttttttttttttttttctttttttaggcatatg

SEQ ID NO: 52876 - DNA, 1829 bp, Homo sapiens
gcgccccggaaaccatgggtaagtgcggaggctttgaggtggcctctctctgcaaccgtggacatagcaagagcccacaccaccccccgacccccgctgccctctacggtgcttggggacacgcccgccctagccaggctgcccggctgggcctttctgagccgcacgccggccccgtcttccgcccgcagaagtcctcgtcctggccggataccgcgcgcagaaggaggacgagctgagtctggcgcccggggacgtggtccggcaggtgcgctgggtgcccgcgcggggctggcttcgcggagagtttgggggccgctatggcctcttccccgagcgcctggtgcaggtgaggccgagccaggggcgggctgtggggtctcagcgcgcgccccccgggagctgagagcgccttccccgtgccctgattcccaggagatcccagagaccctgcggggctccggagaggcgcggaggccgcgctgtgcgcgccgccgaggtgagcgcaagggcggggacgggcgccggtgggcgggtgcacggagccagtgcgaccccggcgtctccggctcttagtgacgggcgcggctctgggcgggacctcggggccgccctgcggtctgtgattggttctcgagtgcaatgctccgccctggggcggggctggagggaccaaaggctacgtgcgcgccttgcgcttcccccagctcctctgactggggcgtccgactggagctcagccgcgcttgtccggtgctaggtcatcctgccaaacacccgaggccccaaagatggtgcaaagtgaacttcagctacagcccagagcaggcggacgagctgaagctgcaagctggggagatcgtggaaatgataaaggaggtgaggggtgaggtgatgggaccgtttgggggaggatgatggaacgcgcctccctagtgagcggggtgggaagtgagggtgtggacggtgggaatggcgacggtgcagatacggggaagcgcgggagggaaggagggaggaaggggcgcttgggcagaaccaagggtggcagattatcctagggactcttggggcagaaccagacgcctctgcgtcctcccctctccccagattgaggacggctggtggctggggaagaagaacgggcagctgggagccttcccatccaactttgtggaattgctggacagtgggcccccaagtgagacctcgactctgtgaccctgtgactcgcaatctccaatgaccctcccagtggcatgagcctgtgattcacatatcctgaccctgtgacccctctgaccctctcccatgacctaacctgtgaattagcaccctccctaacctcactgtcccccactaggccttggtaacccagacatgccttcagtcagccctggtccccagcggcctcccaaggtaagttggctcagagtaggcacagaggtggtgagttcctcttggggtggttggaggctcatctagttcctccctgccccttcccccactagctgagcagcctggcctatgacagccctccagactacctgcagacaggtgagcacccatccaaagggtcccccactccctcagccactcccaaggttgtgacttggtgggccagctaggctgatggaggtgggggctgctgatggatgggggaggcttggcttcagaggacagtggactgacctcttcccagtctcccaccctgaggtctacagggtcctgtttgactaccagcctgaggccccagacgagttggcgctgcggaggggggacgtggtaaaagtactcagcaaggtgtgagacgaacagggtgggggggc

SEQ ID NO: 52877 - DNA, 1044 bp, Homo sapiens
acctcggcctcccaaagtgctgggattacaggcgtgaaccactgcacccggcctgttggatcatttttgtccagcttcatagttgccttgtgaagagaggatttgtccaccacctcattcagccagagccaaatcctgcttctgtcattcctccctcctaacattgctgtcacgctgttcattccttgtctcactgcacctctagtttacaaattctctagccttttggctctgtttactctgctctgtaaccctgtaccagtaacataagcaatatacatgtaaataagtggatttatgttgcatttctttttcaagaatgctatttttcatctctagtaattccattttctgtgtgataattttccaaacctgcatggttattcctgattgtcctttgttgcatgcacatcctgaacttcttcaaatgttttatacgtatctatgcagtgttctctacctgacagttccactatctgttgtgtgttgtgtctgctgactccattcttggtgacctgccctctagcgtgttttatgacctttatttatgagctgatagctggattttaatctgtgggactcttgcaggccttagtagaagaagacttcttccagcgagaatttgcttttattttttgttttgttttgttttgttttgagatgaagtctcgctctgtcgcctaggctggagtgcaatgatgcgatctcagctcactgcaacctcctccttccgggttcaagcaattctcgtgcttcagcctccccagtagctgggattacaggcacgcgccaccacgcctggctaatttttgtagttttagtagagatgaggtttcaccatgttggccaggctggtctcgaactcctgacctcaggtgatccacttgcctcggtctcccaaagtgttgggattacaggcgtgagccaccgcgcctggccgagaatttgcttttacttctcccagtagccagagaacaccacccaccagaagctgcttcggtcctcctgaagaaaggtagcactgctgtgtggtactgagcttgg

SEQ ID NO: 52878 - DNA, 1365 bp, Homo sapiens
cgggcgggggcggccggacccagtgtatgcggccgcgggacgcgctggggccgggcagccgggaagcggggcgctgacggtgagtgggcctggccccgggccggtgggtccccgcggggcggccgggcgaggagagaggcagcttcccttcccggagcccgcctggggcgtggaggctcagcgtccctatcctccatcccgccccgggacggcggaaccgggcctcagctggggacctcaccagggggcggggcctcccgcggtccccggcgctgctcccaggactggaggggcgtccgcgcccgggagaggggttccccccgacagggccccgggccgccacgaagttagggaagcgctctctccagggtggaacctgggcccgcggctcccgggagaggagctgcccgcggaaggggtcggggtgggctccaggctgggagaaggatctgactttgctgacctcgcaggctggtaggggagctgccccccagagcagcatggatgccccgcgaagggacatggagttgctcagcaacagcctggctgcctacgcgcacatccgcggtgagggcgggcgccggaagactgggggcctgaacccttccctgaccaccatccccttccctccccagcgccttgtccgtcccctccgccccgctccccgccctcttgcccgctggcggttccctaatgcccttcgagtaggggttacaggcctcgcccccacacctagaacctggggtctttcggaagtgggacaacccccacccgtccgggcctctccgtgacccccgccctgtgccccgcagccaaccccgagagcttcggcctctacttcgtgctgggcgtctgcttcggcctgctgctcaccctctgcctgctcgtcatcagcatctcgtgggcgccccgcccgcggccccggggcccggctcagcgccgggacccccgcagcagcaccctggagcccgaggacgacgacgaggacgaggaggacacggtgactcggctgggccccgacgacacgctgccgggccccgagctgtccgcagagccggacgggcccctcaacgtcaacgtcttcacgtcggcggaggagctggagcgggcgcagcggctggaggagcgcgaacggatcctgcgggagatctggcgcaccgggcagccggacctgctgggcacaggcacgctggggcccagccccacggccacgggcaccctgggccgcatgcactattactgatgggccccggctcccgctgcaaggcgctcggggtaccggacctgcacatgagctcagagctaccccacaccttcggactgcctcggcccccacagctcccaggtgctactgggcgtggaccg

SEQ ID NO: 52879 - DNA, 1042 bp, Homo sapiens
aatctgcttttaatcacgatgttttaatctacctctgtctctttaaccatgctgtctctggactgagcaagagggaggagggagcctgctcaccccactccagggccttccccagcggccaccaactgacctggggcgctgctccccacagtccaaataagctgaaagtgcagctcgctgcaggccccagagcgagcttcccctcctccctgctctcccaggcccctgccacagcctctttccgtccctctctttctgatccaggcccctcagtccaagctttggaaaaccttcacctcatcttaaaccgaactcaaatatatttatttttttaccataccaacttctctcccatctctaggtggctcagtccatggccactccctgcccccagcctggctggacagcaaggaatccacagcccacacgtgagctccctcctcacccccaggcagggaagcccctcctgccagtccctgtcccctttcagcccaccagtccctctctgctgccggtgatgggaggcctttctagacctggctctttctctcccgtctcagtggcttctctgaggtgctgtacacgcgcgttaacctgttcccttctctatccttccccgtggtactgagctcacgtggactcccagtgcgaaggggcccatgggttgggctgcaggcctggccgtgagcgggggctgcctgcacgctcccctagcctactcttgtgtttaggggatggtgggaacatatcccagtgcccttgcctcataatagatgtggtgactctcccggtagaccctagcaagggtcctccatggtggtgagggactcaggagaattgtagggattgggggaccctgcctgcctggcttgagaacagccctgctgcccttttgagccgagattttgaagtggatgcccgtcttgccagaaatgctgttctcaccagaatgccccctccccttgcccttactggacttggccctgcctgatgccaagcaaagacccttccccagaggcctaccccccatatgtcctcagag

SEQ ID NO: 52880 - DNA, 1048 bp, Homo sapiens
tctgccccctgactcagagttctctctcacccttcctgcttttcatttttcagatgattcatttctccctatttctttcctccccattccctgcactggagaaagtgttgggcctagggtgggggcagagacttgggcaccaggcagcagagggcaggtgatcttagggtgccccctggagggcagggcttggccgagcaacagcattgctgggccctggatattggaaggaccttccctccctggcccaccttggagctccacagtgagcagtgtgcaggtaggaccaggaggggccgtgcctgggagagcctcccagagcctcctggcccccgaggaaagagagttccaatccctacccacctccagcttccaccctttagctgtttggctaaaatcatcatcactagcccgcagtgagtgcctaccccgagggcacctcattcagccctcactgcgggcctgcgtggcctgtgttcttagccccatgttacagaagaggaaacagggttagagaggactttcccaaagccacacagcttagaagtagtggagctaagccttgaacccaagtctcatccggaagccctgctgtctcctgtggtgactggcacggggacaccacttcagcttctgttaccatctgcctagaccatcccagggagctcagcatggggccctgcgtatgtggctcctccaggtgctgcgcccccagcccagggcttgctcgtacctcttgacgtgcattagccgcctcagggctcagagaacctttgcgaggggccagacagctaaggcttctgaggtaaagtgacctctcacgcagccagtgagttaggaagcatgagtctgcgtcagtcccgggtccgcagggcggcctgcaaggggagttgaggttggctggagggggtcagggacccaccctcagcgccactcccacccccggccttgaggcctgagggtgtggtgcctggaagggtgactgcaggagccaggctgccagcactcttgcctgccctcctgtctgctgcgctgccttcatctgggt

SEQ ID NO: 52881 - DNA, 1030 bp, Homo sapiens
agaagagttaacagattcaaagctccggagactgctaagcaaggactgttgagttcctggggcaccgagtagtggaccatgcaccccagcctgaggaccaggtgtctggggggacctgggctcccagtcttcctgagaccagagtagctggggcatcatcacagatctcactgtgaagccgggatccctctgagcaggccctctagaggagtgtttgtggaccacttgcaggcgtgtctctggagggacgcacagccagatgattggaggatggggcagggaaaggggggtctgtccctgggagctgtgtctttgctcaccctactagtaagcctgcagcagcttccggttttctgggcctgcctcttcatgacgcttcctttgcttcagtcaactctgggtagcatgaaggggtggcaggaagggaggcagccttgctccctcttcccccacaagcatctttttcatctccctgcgcgtctgttgccatccttctgtcggcctgtgtcttggagcagttcccacgccatttgcttgagtcgaatcctgagatgggggaggggcgggtcaggctgagcccactgattgtctgtgctgcagctgctccctgcaaactgttgtctagaccatgcctgtgcgtaggcgcgtaggcagcgtctacacagatgttacgcgcctccatggtggtctccagggacctgggaaagaaagaggtggcttactgctcccgggaagacagagaacaggatcagaagggtggtgataccaacttactattggaggcagtgggcagcgcaggacaggcccagggccgccgaccctggcaatgactgtcaccagctggagggaaggtatccgttcactcatggagtatctgctgggcctggcagtgggctgcagtggttttatatatatgtttatacatttgtttttccttgtgaaatttttagttgtggtggaatttttctggtggaggggggcagacattaagcatataaacacaaataaatacatagttacaaaatctgga

SEQ ID NO: 52882 - DNA, 1027 bp, Homo sapiens
ctttattattattattgttaaagaatttctaggtctccttttaataaattggggcagccttatttttcccccagcaagtgaatctgttcttttgggttgaggtcgtacgtcctgaggggaacacaggtgttcccactccctaaagaggctacaacccaggccgggcgcggtggctcacacctgtaatcccagcactttaggaggccgaggcaggcagatcacgaggtcaggagatcaagaccatcctggctaacacggtaaaaccctgtatctactaaaaatacaaaaaattagccggacgtggtggtgggcacctgtagtcccagctactcgggaggctgaggcagggaatggcgtgaacccaggaggcggagcttgcagtgactgccctccagcctgggtgagagagcgagactccgtttcaaaaaaaaaaaaaaaagaggctacaacccaacggtgttcattctctcctggccatgacagtcagtcttgggtgtgagttcaggctccccagaacttagcagtctacaggcctgacggtttcaaaggaactctagttgttggaaagcaccagaggtagaaaaactgagaaggggtcttggcatgcagaataaagctgtcccctctaaatatgtttacacactgccacctacttggcaaaagagatagaagatcttcagcctttaggaagtctggatgcaagggtccagaaggaagagagagtggactggtcattgtagtgggaattggcaagagcaggactgatgtgcttgtcatttctctctggggcagagctgatgtgaggtgtgttgaggggacagcagtgcttctagggagaagctcggttcagcgccttggggaccttgggcctggtgtagcccagcattccgtggggcttttggaatcctgttgctggcatctgccaaccctggggagcaagagtcctgctactttttgcaataagtatggcgcttccagcattactgagtttggggtaagtttcatagtgtgtgttcttttctgactc

SEQ ID NO: 52883 - DNA, 1079 bp, Homo sapiens
atgcctgtaatcccaacactttgggaagccgaggcgggcggatcacctgaggtcaggagttcgagaccagcctggctaacatggtgaaaccccatctctactgaaaatagaaaaattagctgggcatggtggcacaggcctgtaatcccagctactcgggaggctgaggcaggagaattgcttgaacctatgaggcagaggttgcagtgagccgagatcaagccagtgcactccagcctgagtaacagagtgagactctgtctcaaaaaaaaaaaaaaaagaagaagaagaagctaatagcagcagcaagagagtactgtgggagcccagtggagaaagggagaaagctgtgagctcagccttgggggtggggtggggacgggagtgtgccatgaaaaggcttggcagaagtgatgctggagctgagtctaaaaggagaggaggggaggcttagccaggtgagaatgaatactttgagagcgagatagacaaataaactcatagtttattccagaaatctcagattgttcaatctagtggtatggaagttgatatggtgcaagtgaagcagtataggttcatgaaagaatgccatattagcaatttgagatatcatgcccagggcagccgggagcaagtgaaaaggtctgaagcagaggaatgacatgattggttacatattttagaaagatttcactggagtcccagtagaggagggaaggaggaggacaggagcgactgaagggctggagaactcttcggagacaaacctaggcttctgagagaggagagttggtgctggggcgatggatctttgctgaggaagcaccatgtgcaaccagtgccagatggcaagctcctgcattggcctgggcttctctgcctggcgcagaagtgcctggcacatgtgcccctctcttcctgggattgtaggttgcttgagcagctggagagataagactgccctctcagaaggccagttgtaaagggtgctgtgtttgctaacttgtgcttttaatctgacctttggggaaggcagtagattgtaatagttaagaggttatttgaggccgggtatg

SEQ ID NO: 52884 - DNA, 1050 bp, Homo sapiens
ttattgctctcagcacctctgcaacattgggaaattagagagtatttttttacagatgagaaaactcaggcccaaagaggttaagaaacttggccaaggttatacaataagttaggaggaaaggagtacttaaatttgcattttctttctccagatccagtgctcactttgggactccgctgctgccaatattatttcagacgtatcccattaacaatacacatcaggtgaccagaaatcctggtttgcccaggaatgtgctggcttactcctgttttcctggcttaattattaaaagcacccgccttgactctcagaagtgtcttggtttgggtgataagtgatatggtcccccgagctgtatggcaagcccagagttggttttcagtaaatgcttgactgaatcactgtttggagattctcacacctgattttgatatgatcccatttcttttgcttgtgtgtgggttggcagctctatgacctgatgaccatggctttcaaatatcaagtattgctgtgtccccgacccaaggatgtgctgctggtcactttcaatcacttggataccatcaagggattcatccgagactccccaaccatcctgcagcaagtggacgagactttgcggcagctgacagaagtaagagtgccatcagtgtctcgcctctcagccccagtactttttctcatccctctgttaagaacaggtagatctatgacagagagaacaggatgaggaatggcaaagcctgccactctcccagaacattctgaaaagcaatccgtgtccattttggtaatgtaacaggcatcatcatcttatgtcctcttactgatgccttcacaattggaaaagcaatatacagagcatagccattttctcctcacttttcggaaagggacttggtggtggatgttctgctaaatcttggggaacaggctctccaggtctgtggagaatgggagacaggaagtgtacccctgctcaggtgtggggtaacaggctttgtcaccgtggagaggcagcactgctggtctccccgctgc

SEQ ID NO: 52885 - DNA, 1123 bp, Homo sapiens
ggcatttgtactcactgctctgcccacaaggacagaccccgccgtcctcttcccagcaggtgaactgtctggatgctggcgccaggagccatggtgctccagagcttcttcacttcccacggggaaagacttcattttgcttttcactttgcccgagtagctaacaatcaccttggggtattctttcgtccagaactgatttatctgggtgtaagctatttccctagctcctaataagggctcaaagaccccagagaaatgactcagcacctaggtgaatagcagccctttgtaagcattaacctaaccagagttgatgtgatgcttcaacttgaattcttctttggcactcctcctccctggcttacgtaagtctgtggaaaattcttcatattctctcttttgaggacttatgtgtggcttttcaattgtgcctgtttccttgcaaatgctacattttatgtaggctatggtaagaaaaaggttagaaaacccagtttattgcaggttctttcttgtttcagtgcaatggaggtggtcaggcatgaggcaaacctgacagagttctatgtctctccaagctgtccacggtggggaaatgttagggcacatcaagggcaagctgggatggtttgaaattgtcagatgtcagggacatcctgtgttggtaatggatttggttctccctcactgagtaataggatcaagtctagtgtaaaatctaaaggtcaagtgtgagtttagcatttctgtatggagccacagtcagttcatttgtgtcaccgggggtgtgtgtgttggggatgtatcccctctcccctctctctgtagctcttccatttaagatttaagtacaaccagccctcagctcccccttcccccataaaatgtgttgaaatgctttaaaatgcgggcctgagccctccgggtacttctgtcaattacttacaggttgagagtgcctaaaataatcacttcactgctctaccttgcctctgctctaaagagacatggccacaggcagtcatctggagtgtcctttgtgttcagcaaaagaagaaggaatttctatatttcaataataaccactcatgtttaataagtgattttgtataattatttt

SEQ ID NO: 52886 - DNA, 1106 bp, Homo sapiens
gtaatgagaatctcttgcaggacaaagcccacaaacgctatctgctaatgagcattgaccagaggaaaaagatgctcaaaaacctccgtaacaccaactatgatgtctttgagaagatatgctgggggctgggaattgagtacaccttcccccctctgtattaccgaagagcccaccgccgattcgtgaccaagaaggctctgtgcattcgggtacgagtcagaattgcggctttgcttggccccactcagggactgggatggaggaagcagaagggagggatcatctgtttctgttagaggcatggaactggccccaggccctggaatggatccagggaggtcacaggccaccaaccccatggagaaaggctggggttaccatctgggggaaatagttcccatcccacttgttccaagtctgaggttttgcacaggattacaaggtctttttctgccccttttcatccccaggttttccaggagactcaaaagctgaagaagcgaagaagagccttaaaggctgcagcagcagcccaaaaacaagcaaagcggaggaacccagacagccctgccaaagccataccaaagacactcaaagacagccaataaattctgttcaatcatttctttctgtcttgaagaatgataggagagatgatggggctctttttggcctgaagaggagaaggaatttattctttcattcagctctgagatcccagagttttctgaggcagagtccctgcctcacccaccagaggatacacacttatgacatgcctcccacacactcatacaaacaagtacctgtcatccaggtgatgtgtgtcagtggaggcaagacagagcatgtgacagcacagtggaagtgtggccggctgggtaggaagaactgctgtaggagctgccttctggactgggtcctaaaggatgagtaggaattcactatatagagacaggaagggaaggcctcctgggcagaagggattgcaagtacaaaggcaaggaagtctagagaggcatgctgtattcagagaacggggagaatgagaaataaagcttgaaaggtaagctgaagctgaagtgtgagaagctttatatgct

SEQ ID NO: 52887 - DNA, 1200 bp, Homo sapiens
acaatgttgaattgttaaccatgatagcactgtatcctggtctaattcctgaattgaatggctagtcttaccattaagaatgctatttgcggccaggcacggtggctcacacctgtaaccccaccactttgggaggccaaggcaggtggatcacttgaggtcaggagtttgagaccagcctggccaacatggtgaaaccccgtctctactaaaaatagaaaaattagccgtgtgtggtggcgggcgcctgtaatcccagctgctctggagtctgaggcaagagaatcacctgaacctgggaggcagaggctgcggtgagccgagatcgcaccactgcactccagcctgggcaacagagcgagactccgtctcaaaaaaaagaatgctatttgctatgatttttggatgatatctttataatattaagggatgtcccttccttggattttgctttttaagggaaggtaatgtctaagataagcctttgaaatcttgaaattcagagtgatttgggatttatagagagctgtacagagcattggtgattgttattccttgagttcttaaaacgtaaaccaggcctgggcccttccttcctctgtgcccaactctcatcctctgtggtttgtggtttcagttattgccttgtctgtcaagatccgcagttatgaagaacacttggagaaacatcgaaaggtaaactctggacgtcattcacagttaaacagcagcagcctgggggaaaggggtccggaggggaagggctctgggtccagagaaggaggcttagaagccactgaaaatgcttccctcctgcctccagaggacttggagccttacaaggccatgctgagtgtcaccaggggttaagaacacaaacttgagagcatgatcactgtgtctggcacatgctgagtgctcagtaaatatttgttgaatgcatgaatggagtcagattgccctgggttcaaatccgagctctgccacttccacttaagtagctgtgtgatattagggaagtacaggtctcagcctcagttttcttttcaataagatggagatcatacaaatacttgctcacaggattgcaaggattatgtgaaataataataacagccaatgtgatgcatataaagtctttaggccctgtgctaagtacttcacatgcatcttcttatttgactctcatgactttttttt

SEQ ID NO: 52888 - DNA, 1050 bp, Homo sapiens
aggtgagcagcctctgccaagcctcagcctcccgcagtcttctcctctgggactcccttctaccctgattagcaccccgcatctcatgcttctccagtcacagcacttagcccactgtcattctgcctccatttgtcaatatccctagacagagcatcttcagggcagggacacttttgttcccccaccatacccctagcacctgacaaacaggtgctcagtgaatgaatgaatgagcataaatgaatgagcaagctttggggacattcatgcaacaagtcatttcctctgtcagtggctttggctttgggctcacctggatgtggatagccatgtggttggtcaaggccacagtgagcagagtgaagtcaggccctgagccttatggccctagttgctataactgtagccagggcccttggggggaggagggctagttcttagagggtggcagactccacagattttctctgtctctgtcttcaacagaaggagatgctaaaaatcaagcaagaacagtttatgaagaagattgttgcaaacccagaggacaccagatccctggaggctcgaagttggtcggggacccttggggagtgggggtgtagggaagcctgctagctgggacctgatctagggctcttgtctacaagcacatgcacatgggctggggaaagggagagacatgaaggacctagggcaatgaaaattggaccctgtatcccaagctctgatgctggagtcaacacccagttggaccttgtaccactgtgtgagcttgggtaagtcaccaaccctctcttggagcccctgcttcctcatctggaaatgggggaataagggagagcagagcagaggtaatgttacccacctcatggcagcattgtgagaggcagctaggggatgtaaacacaccttggaaactaaagctcacgatgtgtgataataatagtaagactaggccaggcgcggtggctcacgcctgtaatcccagcactttgggaggccaagcaggtggatcacaaggtcaggagatcaagaccatcctgg

SEQ ID NO: 52889 - DNA, 1047 bp, Homo sapiens
aggggtgcacacaccaagactgaggttttcctgtgatctctacttggtgcttacatttcaggcatcgtacagctagctgcctttcctcaacccccttaattcatacatgcagtcagccagcaagtgtttgttgagtgcctagtctaggctgagccatgggccagactatggtggattccaagggagtcaaactctgtcctatccacaggaggacccatcctagtgggggatctgagaactgtagagccagataggtgtgtgaaaggtgcaggcacagtgtagggtcttgggaaaagccacctactcgcaacatgaaatatcaaagcaggtgcccacggagtttgcaaaggagaaactgagccgagagatatccagtgctttgcttgagaccctgaatgtcccttctggagttggagagtgggtgaaaagagccaggtctgggagggtgggcagcgagagttgactctgggtgttttctatccccatatttacttgacagcccagtctaggctggatgatgacccacctccctctacgctgctcaaagactaccagaatgtccctggaattgagaagtaagcaggaagaaacctagtagaggaggcagggggccctgggaggattgtcggggagtggggaaagacagtggctttgagacttggcttgctgtagctgaagcttgatctagaaggaggcaggggcccaggtgtccaggtgtggtgagggtgggtggtcagcaaggcagatggcactcatggagctcggctacttgggggtttttttgtactctagatgaacaccctgtaccactagattccaaggagctaacatacttcacaggtctttgtagaaatctctcatctcttgttcctcacaaaagctgtatgtccccattttatagattttcaagctgtccagtgtcatacagttctaaagggcagagctagagtttgaatccagggctgactgacaccaaagccagaggccctctgctcagctcctatgcagtgtggtgggagctggtcagtccctcccactgtgcaattt

SEQ ID NO: 52890 - DNA, 1036 bp, Homo sapiens
ctaggccaggccagttactgccctattagtgggcttccttgggtgagggagctggacccatctttctggggtctgaggccccctttcccatcgggcagctggtttatgtccccacagcactggggtgggcaggtggaagggagaagacagggccatttttcctaaaattcttgccaggaagagtggccaagagaagtcaaatgacctgtgtaaggacagagagaggcaaaggcaggttcagagattctgggatcagagcctaaggccagcattctcccctgcttcctggggagtctgacctggatcctgagaaggaagaggagtttccagaggtagccagtctgctcctttggtcccatgtcctctgccattgcagcctggaaccaggggacacagatgggggctcctgcccatagataagcctctaggttggggggcacaagggagtagagggatggtggcttttgcagcctccttgtggttatactgttcttatgagtggtctagactgctgaggtgaggctggatgtgttatctctatcacatctctgacctcccaggctattctatgtttcctggaatgtccagtttattcaattcatgcacttatttatttacccactcccgtgccccatgagctcttctttctattcaccctctcactcacccatttattcacccatctacttacccattcattcatctatgcacctacccatccatccatccgtccgtctgtctgtccatctgtctgtccatccatctgtccgtccgtccgtccatccatccttccatccaaccatctaactatcaactcagtcatccatccatcatctacgcatccatctgtccatccgtatatctatccaccctaccatccatccattcacccactaattcatccatttattatccatgcatccatctgtccataagtctatccgtccacccaccacttatccatccatccatttacccatcatactcatccattcattcatccagccaccacccatgcactcacctatccacccat

SEQ ID NO: 52891 - DNA, 1109 bp, Homo sapiens
ttgggcgctccagggcaagacacaggggagaagaaaaagagctgggtgtcagagtggatctgagcagtgtgagccactgcactgcagaaagacagtgagggggagcgtggggcagggtgtgtaacatgaggaggacttcacctgcccagagaattgtgggggcagggataacataggagctcagagtcctctgttaccctgctgtctggaattttccataataaaaagttttttgaaaagaagagcgcacattttgctacaatcactgtcattatttctaggccactgagatgttccatcagcctccagaatgtcccgggggagccccctgcagcatcttggtagcctgtctgccctagacagggtccaggtggcctcccctggaactggagtgatgcttcttgaaaaatgttttcttgggatggagaaggcctttctaagcaaggcacaaactcagaagccataaaggaaagtactttcaggtttgacctcataaaaataaaaatcttcaataagacaaataacaccataaacaaagttaaaagacaagcaacagactaggagttgaagggtaaaaaagaaaatagcctcaatattccccacaaacatctctccgtatgaggagagaagtcaagaggaataattcctctgagggaggtcttggtgcagtggtgtctccactggaacaactatgaattaatacaacaaaacttcctctatcagccagaaatgaaatcaccctttttaggtggaccacctgcattagtcagttttcacactgctgataaagacatacccaagactgggtaatttataaagaaaaagagatttaatggactcacagttccacctggctggggaggcttcacaatcatggtggaaggcaaaaggcacgtcttacatggcagcaggcagagacagaatgagagccaagcgaaaggggtttccccttataaaatcatcagatctcgtgagacttttttttttttttaagacggagtcttgctctgtcgcccaggctggagtgcagtggcacgatcttggctcactgcaagctccacctcccgggttcatgccattctcctccctcagcctcctgagtagctggg

SEQ ID NO: 52892 - DNA, 1939 bp, Homo sapiens
gctttcctgcccagaaagggagttttccttcagagaaggatggcgaagtccttgatgctcctctctgagctgctcccctcagctctgcctctggcccctcctctctgccccaagggacctgtggaggtgggggtgggggatggtggctgcttctgccccaggaacgtcttctgctgagcacatcactcttgccgggaaggtagggagggttaacgacagggaacccctgattgaacacctactacgcgctgggccctggggtgagacagagatgaatgagatgcagcctccaatgacaacacaaagggtatcacctgacagaacatgattaattgcagaaggaactgcacagacaacggctagggctggagtttgcaggcagagagccccgttctgaacagggagccggagcctcagcgcggtgacgaagcacttattcattcattcggcagatatttgttgagtgcccactatgtgccaggtttttttctaggtgcttggagctatcactaagaacaagcctttgcttgtcttaaaaaaagtctttgctcacctggagtttaaaatcccatggggatgacaatgaagctaatttcagatggtaaatgctctgaagacaatggaaaaggctggtgaggcagatggactggggaggcgttgttagatgttgaagtcagaggaggcttcccagaggaggtagcgtttgatcagtgacttgcagctggaggagccggccatctaggcaggggagacagcgtgggggcgtggctggagggtgtcgtgggaggggaggggagaaggagatgaggtgggagtagggaccctacctcttctctgagcagccttgctcctccccaggttggcctctttgcgtgtctttgtctccgttgtcaatgtccttttctgcttgaaggtcttgtggatgcaccctgagggtcacagccagctcctggaaccagggtttcctcgtccccatctccgccctctggcctcacctgccgctgctttctcggctctgcactccagacttcaggctcttcacaccactgtgcctttgcccaagctatgccttccatttggaattcctctctgtttcagcttggcaaacttctgctcctccttctagacacagctaaaacgacaccttcccagagagggttgacaccccctcctctgaatccttccatcccaaggctccctctcttagagcacaggacacattgcagtaaaaccactgtttcccggaggtgggccctattcatcagtgtctgttgatgagtccaagaaggaggtcccttttttgtctatggctctttaacttctgaggggactcctggctggggttgcagctgtcacctttgggatctctctctgactctctctgaggctgaagggggaagaaagagaatttgctctctttgtttcctcctctcccccatggggaggtacccgacatactggcctaggctgggggtggagcagccccctggcttgggagtttgcacttctctgcaccaggaaatgacttggagatgctctgtcaagcacaagatataaattgcaggcagtttttaaacgtttggagagattgctttttgagtggcaacctgcatctgtgcatatcggagggggcggggcagggcttcatttacttttctctattctctctcctccctggggctcagtcccttcttggccaggcaggaccctggctcaggcctggggtaagacgtagggggctctggacaccatggggcctggttgcaggggttccccaggcccagcctctgacctccttctgaggggagctgagcgaggggttggcaggccctggccaaggagtcagtggacaggccggcagacaggtaacaggcttacctgctggtgggcggtgtccccatccccactccccgctctcaaacaagataggctaagggga

SEQ ID NO: 52893 - DNA, 1012 bp, Homo sapiens
cctccccagccccatttgacccagagaccagctgtcagggagcgacctcagagccagaggggtgaaagatgagaggcaagaaggtagctcctatcctagcacagcccaggctccatctgtctgcctttctctcccctgcggcatcctggcagggcagttggcagagtgccccctccccaggaggctgcagatctctgtccctggctcacccagatcggtctgttctctgcagttccattcctttagcctctttcgcaggtctgagcatctctggagcatgcaggggaggagatatctgaggtgggcttccgtgcagtcagcagcctgccccagcttcagcctcaggcgtcaggctggtctgcactgaactctgggtctgcctctggggccctgaccaagcacgcctgactccagccccatgaggagcatcctgtcttggttccgtagggatcatgggtcctcttaccactgtgcgccaagcccccagcccacctctgcctgggccgacttcctggttgggcctcccatggtaggggcctcagttcccaggctctgggctgagcccccagggagcaccatgggcctctgagaccctagacctgtcccaccacccagaccagagtgcctggacgccccccactcccactcaacatggttcccacacactggtctctgggccattcaggggatgccctttgtggacatgcagaatttctatgaatatagttttttgtaaacattttgtaacaatttgggtttcatagtaactgtgttacttgccaatcattctaggctgatgtaaataaatttccaaacaaatctgattattttcctttttaagacactgtgatatatcaaagtgcacagtttgctgtatgaagtaatatggttttaaattttaaataaaatgtttctagaaaacagggctcccttgaggcgtgttttctgtttctcttctctccttagaatgagaaggtgctgggcgacgaacttttgtcatcttcccccaggg

SEQ ID NO: 52894 - DNA, 1962 bp, Homo sapiens
agtttaggtctgtcctgccagtgggcatggagctgagctggggcaggtgcatgcgtgtgtgtgtatgtgtgtgtatgcatgtgtagtgtgtgtgcacacacgcaggcactgagaggtgatgggaagcatgaaagcttgcttggatggagcagaagaaggaacctgcctgagcagatgctggactgtccctgcgtggtgccacatgccagccctgaacagaagaatgtccccactgcatccccaaatgcaagtgcctcctctccacctgctcaagctggccaagttgaggggcagtggtaagaagacaccaaccccaccgcccctgccgaggccctgggactaaggacagtgagccctcccaatcactctccccttgtcctgctgctggtttctctgctctggacagaagaaaatcctgaaagcgttgtcaatgttcaagtggccccatgctgcaagagtctctcgcgaggggtgacgcccccttggccagtgtgctggactttgagtgtctgaggggtaagagggccaccccctcctcacagccgagactctatctaacctggaagcacactctggctccacccccaacccctgccatgccctaggccctggaagatgggaatcctggcccaggccagggtaaagggccaaacaggttagaagttgctcccctccaccaggcgtgcactcaccaagaacgatcaaaagctccctttctgcctacttttccaggggtactgggtgtggggggtgggtcacagctcctgcttcatcactcagcatgaagttggtccctccctgagccactcccagctacatgcacaaacatctgaaagtaggctggcctctctggctcacatctggagtggtcctgtgtggatacccatctgcaaaggggctagaggtttggacaaacagctgcatggacttatcatctgggatgggcccagcctcatggacagatacaagaaatgagcccaactctgtgggcaggtctctggattagacacatctgaaagttgcaggtcaagtggacacatctggaagtggcccggctgctggctgccatggaagggccgtgccctctgtccccatggcagtttaaatcaggccttcccttcagtcctggatttgccctggagtaaaaatttcagagctgaggtcatacgtgagtcacaaaacttttaggtagaaggttaatgttctgtacaatatatatatgaatgtaaaatatatatatatactgtatatatatatatatatgcacagtgtatatatgacctgtagcccatgtgtatacaaccctttcctgcacgtctgcacacggagtgtacagaacccagccagcacgggtgaggaccagatgagagatgggggctgcagcagcaaagtctgggacggaggtctcagagagccccttggggtggcgaaggccctccacacatcagagctccagaccctgaagaagagggcagagctacatggtgctgccaggtgagtcctgcaccgccagggcctcctgtgggaggggcaggaatggccaacggacctcatctccatccgagcctgtctgaggcaggacagctgggtgtgtctgagaagcaatgtcatgctagtactcagcccctgtgccaatattacattctagttctggggcaattcatcaggagcagaagggctgggaaagagcaggccactccccaggcctgttctcacacctgcctgcagaatcacaggtaggtttcaggctccatctaggataccctagaaggcggggctattctaggtagcaaaagcctctgcctctgattctcacccacatgcagaagcagtcacaacttgcacacaacacagctcacaactagggaaagcacttgttaaagagaatgcccccagggcatggccagcatgccgatacagtgttcccatgcccctgttactgatcctgtcctcctgccttct

SEQ ID NO: 52895 - DNA, 1917 bp, Homo sapiens
tagcagcaggttgggtaccagccagggggtggacctatgagttccagcttgctgtgatgaatgctctagaggtctgtgactttaagagtcttggaaaagaatgagacatgaaggattaggaacaaagtgtccttaaagagaacatgatgggccagcagggttaccatggccaaggatggaggggcaggttttgaacaggggagggaggttctggggattctggatgagaactggggcataccagccactcccctcccacctctgtcccatgctgcttgggaagcccggttagggaagagcttcatttggatctcaagggctttctcatctgggtgaagggcaatctctagcaaagcaggagaccacagtgggctcatgtgataaacactgtccctcctccagactgtgagctgcaggaccaaaccagcaggttcccagaatcctagcagctctgactggctatgtacattggacgagggagaggagggctagacatacaccaaagccccatgcatgtaatgttaggaaaagccatgctgtcataagcttcagggtacagagggcgtgtgcatgtgtgtctgtgtctttgtgtttgtatgtgtgagcttcgggggctggggcacaggacagatctggacatataacatagtccagggcatgcaataataggtgaatccttggggatctgatgtgtgcatatgcgtgcgtatgtgtatctgagtgaattggggacgagggagacaaatatgtgaagcagcaaggccccatatatgtaaaaacaggagaagccatgtcataatggggccctggtgggtatgcatatgtaagcatgcatgcatgcataggtgtgtgcatgctggtgtgtgtgtgtgcacatgtacactgaatggcataggatggagatcaggatcttacctgcagctagccaaatatgcgtaaaaggagaagccatgtcaccaaggggtccatgtctgagtgcatgtgaacacatgtgtacaggcatgtgtgcacagtggggagcggggggaaggccaggaccagagagtcgtgtgacatgggtcaatgcatgctgtagacaagaagccacgtggagttgaagtttccgagtgtgtgggacacacacatatgttccaggtcacagtggaagcaaagacagacaatcaggaaggccgggcaccagggtctgtttgcacttctgtcatgggagagatcatttgtcacagagaggttccaaggttgcatgggcacacttgccaggagacgggggcacaacccttcaggggctcatgctgctgatgcctttgctgtggacatcatgtcctgtttgaagggaaaactcttttttgtaattcccaggtaacaggattctaatgaaggtatttgccaatttgctgtcagcaaacacaatcattaagcgccgtcttactttgtccagtatagtttcagagcacgtgcctcattcttgctcttgtctcacacatgtgttgtgtgtgtgatgctacatgagcatgttcttcagaggctatgcatatatgtggattgtgacaggaggaagaagaagtggtgagaatttttataaaacgaacaaagaatagtggataaatagaggcagaattcaattcgagaaaccccccaaaatgtaccgactggtctttagactcctgtgtggaagcaggagggcatgctgcctcatctcctctcccaggcaaaccttgcgtcctgatgttcaggtgttgtcggtgtggctgatatttggcttctggccaatatcctgcatttgtcctagagaccagcctagtgttcaaagtgcagtggggaccacagctgcccaagcatgagctctgtctctcccggggcactgaaaatgatgctacatctgtgaggtgggacggagtggggaggtgttttcagtgaggc

SEQ ID NO: 52896 - DNA, 1034 bp, Homo sapiens
ggctggtcctctctgtgctggtggccgtgggcgagtttgtgtacaagctccgcaaaacagcagagagagagcaggtaagccttagagcttggagcctgcacaggatgggaaatggagattcgcgctgatttcactcctgtatgtgccaggcacacagtggtgtctcatctcagcctcacaacagctcaccctgcatccagtcggccagcaagccctgccactctacctctgtcctgacctggcacttttttccatcgccgttgccccaccccaggccaagccccatcacctcctgcctggattatgccgcagccttcaaactggccctccagcctccatgcttccccaacaccatccacaattcacacagcaactggtaccttgtttaaaacttaattcaaaccatatcattttcctgcataaaaccctccagggtaattgttgaaggtgggtgatggttgcatagggtttcattatactgttctctctacctttgcatatatttggaaatttccataatcaaaagtttaaaaaggaaaagttaacagggttggcccaagcatatagacagtagaactaggctcaggccttctgattaattcaagcatggttgggcagtagttctgggtcccagtagcaaattagaatcacagggagaaagttttcaagtgctaatgccctggactcactcccagagactctctgttttaattggtctgtggtggagccagcattatgcttttacaaaaccctacagggtgatttaaatgtgtgcccgagatgagggccgctgggctgggggaagcacaactcacagagaagttcaaggatattgcagttaaattatatatagaagggcccattataaacaagcaacttacatatccgtaaaaaacgaaatggaatcctctataaccagcaagccttagtcaacaaagaggagggggaaagataatactcgatgttggaatttgcaagggtgtaaccgaagggacgctgtccagcattgctgagggaagtctatgcaggtactt

SEQ ID NO: 52897 - DNA, 1045 bp, Homo sapiens
ggatggatgggtgggtggatggatggatggatggatggatgggttgatgggtaattggaaggatagattagatgggcagatgcattaggaggtctgattgcttcatctacctttggttctcacctctagtagtagagggagaactgggaaagcagaagagacaaggatggaaaggaactgaagagctgcaatcactggagggagaaaagtatttaggttccaataaccaggatggtagagtatcaggaacacgtgtatctggcaaagcagagatgactggactaggatactttgattagaagaatagttggaattgatgattatctgaaaaagcaaccatactgggagcagaagtcgcttatgtgactatgtggttgagagggtgtataagttatctattgctgcataccaaattacccgaaacttcatgttttaaaacaatatttgctatctcacagcttgtgggtcaggaatctaggcagtttcgctgagtcctctggctcagggtccctcatggggctgcagtcaaggtgttggctaatgctacagtcatttcaaggcatgttctccaaactcactgcatgcttgttggcaggactcagctccccccaggtgactgaactaagggcttcagtttttcactgatagctggccagaggctgccctctgtttcttgccctgggaacctctccatagggcaactcacaacatgacagccagcttccatcagagtgagacgagccagagagagtaccagtcacagtctcttgtaacctaattttggacatgacatcccatcacttttgtggagagttaaaagcaagtcactagtttcagctcacattcaagaagaggggattacacaaaggtgtgaataccagaaatggggatctgtaggagccatctagaagctttctacaacaggagaatctggggagacagcgtagcagagtaagaaaggaacagagggagtaaaagaggttggaggtgggagaatctgcttatcagaaattttctagaaaataagaaacattgggggaggcag

SEQ ID NO: 52898 - DNA, 1061 bp, Homo sapiens
ggccttagctttcattagagtatcagaggaatccatgacccaggggacttgagcagcgctagtctggatgttgtaagggactgactatctcctctcttcgcccagggtctgagctgatgcccaaagccctgtccacacgcatcattggtggcatctggtggttcttcacgctcatcatcatctcttcctacacggccaacctggctgcctttctgaccgtggagcgcatggaatcacccattgactctgctgatgacctggccaagcaaaccaaaatcgagtatggggctgtcaaggatggggccaccatgaccttcttcaaggtgaggccctctccctcctattgcagcaccgtgagctgatcctctccggaccctttactgagcagaagaggaaagggggtctctgtccttccctaaccacgcatggccaatgggtcagaagccctctcagccccaccgtgtttggactagttgactttggggagctgtggtgatgtgggccaactgggttggcctcgacacaaatcctagaagtttctgtgcctgagatgagcaatgtgaatgtgttatgattccttaagtcatcagagggagacagatgaagagaggggcctggagaagtgggaaggaggggaagagccacccagacacacaggccctaggggcttcccgcccttggcttcagacctcaatgccgtccatctcaaagaagctaacctgaggttggggagacagcagcagggccaaatcttgagaggaagggaggaggcttagaacttgaacaagtgtttacagacattactgagcatgttacactctaggaatgctggtgtcagcagataaaatccctgtcacctgctcaagtgactgctctaatgggtatctggccatgatttcattgctcctcctgctctgtgaagtgttgctgagtgccctaatgttttccactttctactggagtagctgagggcttaggagactctggctggccctgagaaccagaagctgcaaaggttctcccagaaattaaagtagtaatagcagtagctactgccactg

SEQ ID NO: 52899 - DNA, 1037 bp, Homo sapiens
tcagtgagcagagaccagcctggggaaaggcttggaaagagcctggcaggggtccaggtccggacaaacaggtgtaagagagcaagagggcttgagggatgaagggagtattgggggaaaccgaggtcagaaggagcagctgaaacatgcaagctcccctgctgaggatcattccttccttcatcaattgcacgaaagtttattgagcaatgtctcagcctgggagcctgcagagcagaacctgaggcaggggattatgccattactcaattaggggttgtgatgccagggaaagaatgagtgccaagggcaagggatgtggagaaggaaggaggaaggcaacacaaggatgtgttattgagctggttgccatagagggtgactaatgtctcagtctgtgagtctgcaccctggaaaaactttataaagtgtgtctcaggaccatctcttggggtaaacagaggaagggaaaacaggtttatccaccagctcctgactcccatgcattctgggtttggcttggtggccatgggaaccaattgggatcttgcagcagcgtctatgagaaaccacagggctggaggccagaggtggccagttgggcaggcattgagatgctgtcagattggacctgcatgaggttggccagagccagaggatctgaaaggctgcctgagaggggtctgagcccagacccaactgatactgtgccagacccagagcagtgactagggagtgagggtgacccaggcagacatggtccttaccctccgggggcaaacaatgaatcagacaagtgatatttcattaagattttgatcagtgctgcaacgggaaagatagagggctttgggagtataccccgaggaaaaggcctcaaacttccctgaggaagtgactattaggctgctacctgaagaatgaggaagagatgtcccagacaggtctaagacacatgtctgggtggatggcagaggctgctgaagtctccacctggtcagggcctggctggggctgcagctgagtgcgtggagtcc

SEQ ID NO: 52900 - DNA, 1045 bp, Homo sapiens
tgtgccgtgtgcacatcgtgacccacataggctcaattgcctgccaggcaagcccaacactcagcacccagcagcaggagaggggaaaaacctggggctagagtgttggctgggagaactatcccaggctgggaacgattctaggcccctcctgctgggagaataggactcctgatactgtgtgctggttctaactggttgaagccaaggcctcaggtccaaggtccttggcctctgtgtctgagaagggctaggcagacaggacatctgaaaatgtggtgcatttgtgccaaggacattgtatatacttgtgcgtgcatgtgtggctatgggctgacgttacctgtcagaaaggagcttcagaacccagatatcaggtagctaatccctggatccttcccaaattggggataacccccaagactccctcttccaactccatggaccctgtcacactgggagaggcttagcgctaggcctggcttgcacgctggggtaagtgatcggagagaaaccggaccaagagccctgacaacggaaagtcagaaacggttatttttctggacccctgttttccgtgacttgttgaagagaaatattacccctgttcctatggctgttctcccagagcaatagaagagcgtgaagttatgaaattgagggcaccttcactgagcaatcgattagcagccgagagagcttgtgaattggctgtctggacatttccagtaataaattgtgaaatagtccatgaataagtagttggcggagttcagaattaccccctaggaaatgttgcaggtctagagacacattactaaggcgagcaccattttaatgctctgggctttggctgttaaatatgtatgccatccgcaaagcacttcccgaaattaatggcattttacagctgctctgaaggcagcgtatttatatggagatgtatagattctggggctgtggtggcttcacaaatgaagtgctaattttagaggatcaggccagggaggggcgtgaagacagggtcaggaagtgagctatctca

SEQ ID NO: 52901 - DNA, 1001 bp, Homo sapiens
gctctgactcataataaagcaaatatatttataaggaccatatgctggggtcattcctctacacaaaagggagttcaacccgttttggatatagtgaggctgccttggagcagaacccaggacagactggtcaccctatacctggccccttccacggtgctcagatggggcttgttctcacccatgtgccctcagaggcagctgaaccaggccctactgggtggccctacctgggatgattcaccatatatgtgcttggtggctgggtggcagatgtcatggaacaggaagggaagtaatggggaaaaaaccattcttccaggtagcccagtgagtggcagataccaggcatcctgtcggcatccagagataaatgttagcctgtgagtctcaccatcggccctcggggttaggatgattgagaggatctgagctaaagatgatggagatctcacggtggctccagacaagctgcccacagagcctgaagaggtggtcttaggggacacctgtccccctctttggggcaagacccctactatcttcttccctaaaacctcacatcctgctggcctttattgatcaactttttgttaactaaacaaatataaaaatcagtctgctaaaaccaataagcaaaaatatctcaagaggaacagggttaaaaaaaaaaaaaacctgtgatgtaaaaatgtaaaggatgaaaataaacaaataacaagagcaaagggattagggtgaagactaatgggcaattaaagggatattgatgtggataaaaatagaaaagataaaggagggttaaaaagagaacaaaataaaaaggttaaaaggaaaataacaaagagaaaatgaagataaggaatgagataaaaaggaaagatagtaagaaagatgaaaaattaaataatttatagctctgactagacaaggtaaaaaatgtaacacccaaatgtcaaaaagcaaaaggataaaagtgtgacaaagctaaaatataaaag

SEQ ID NO: 52902 - DNA, 1047 bp, Homo sapiens
atccctgggcagaggttagcctgccagaggcactcaccaaggcaccgggtcacagccacccggactgtgagcacagagcctccacaggctgggtcctcctcagtcctaactggcctcacatctccatagcacctggtatctaacagagcatgcagttggagctcaagtgagggtctgtgctcttcatgtggcctctgaacagatgtttgccaagcacctcctgcacccaggtgctctgctaggcacgctcaaagtgagcttggctctgagctcagcccacttaagagaagagcctcttcgatgccgtctaccactttcctctcctcaaggccctgggtggtctatgtaggcagggatcccgccctgagaggatgctgagctcccaaacacagctactctgcctctcatattatcacttgtttgctaagccgggtcatagctgatccagccagctccaaccggtggctttgggaggattaaggcagaattacccaagcataattacatgtctctctgctgtctgctctgcgcagctctcttaatgggatgtttgcattcagcctctctgtttaattgattaagtgtcctgagtagcccccctaactgggccaaggacagagtgggcatgcagaagccttccttgagtgagaggagctgagaccaggcagagctggccagagttgggtcaaaaaggatcttcaagaggcccagggctttaggatgatttctaaacttgacctttccttctctacctctagcctcaggcccgatatccacaaggacgctgtagagagagagattattctaccttagtctgtgtgtctgccagttttaaatgtaaaaccacaaagcaaactgcctttaaacccagcagcatttcccagtgaggtccatcccctccttgtgctgccaccccaaaacagccacaaagactgtgtcccagggcaagacctggcactgaccatagacccctgattccctccagcccctgattggcatctgctcagccctgagacccctggggctgccttcgcatttgctgtctct

SEQ ID NO: 52903 - DNA, 1973 bp, Homo sapiens
tgtgtaacagaagaatggtgacaatcacagctttggtttactcggcagttgccctctgccgggtccatgtagctcctcatttatcaccacactgggaaacagggagaattcttgtgcccaatttataggtaaggaaactgaggctcaaggggaaagtaatggacccaaggtcatccaggcaggaagccagaatggactcccaggtctgtctgattttaaaacttctggaattagaaatgaagattctgagctgagccaaagccagatttaaatgaagttaagccaattagcttcttgcaggacttctctgagactttaacgtgctgaggtgggctgtgactcttcaaaggcgggagggaatgggcagcatttgcaaagtgtacttgaaccggtgacattttccccagagccctctgtgggcccagcattctgaggaactctgtagaaaatgcattatagtcattagtataatagattataggcttctaataaaatacataaactatagatagtgcagacttcatgatggcagacggtaagaattccacagtggccatgtggcctgctttgtggtcagccaggactaagggagcagggatgcctcagcccttcttggggaggctgaagacagacctcccagctcaggcctggctaggccagggggttagcagggttggggggaaacgtactgcctctggatccaggacagggagctcagctgagtggagtccagggcacttgagaagacagcctcagactgacgccatcagcatttctctaagtgtggcaggccgggagacgcttactcaaaagaggcagctagaccccacgggccctgcagaatttggaatctttgaagaatgtgacccaaaaatctgcattttaatctgtcccaggtgactttacagcacactccagtgtgaaatccactgctgtctgccaggcagtcattgtcactgttcagaggtggtctcagaggacaccttactccaagcagccagccttccccaacccactgccagtcccattctcagccctgggtggggatgtggggagggctgcccaggggttccctgctgatcactaacactctgcttttctgcaggccatggccatgggcatgatgactgagtactaccacttcatcttcaccactctggtaatgtacctctgggtcctggcacgggaaaggggtgggactctcatggatcaagttcattgtggcttagcctgggccagcccactgaagacaattgctgcagcttcctcaggctgtaggggtggccccaggtaagggcacaaatatgtctttgtgacctgcccacttgtgagaggcagcatcatgttataattaaggatgtgaactctggagccaatgtgaacaccagctcctctgctcaccactgtggttccttggctaaggcacttaacctccctgcctcagtttcttcctctgcaaaatgggcttctgcctcctaggattactgtgagcaccaaatgagttaataaggtaacacgcagtgcctggtacatgaggagctctggaagtattcactattatgattatcatggccctcggttcctagcccacacttccccacgcatatctcgggcctcacgggaattgtcgctttggattctgtccacattcatactgaagtctgcccactcactgtcagctagcccagcccacctacaggctccagatgggtcctgtccaaactctgagaacatttagggccatttaaacccattaggataattagctgtggcctgagttcagcagaataaagagattcctgtgccaaaagggcacccatcctgagcctcactgccttgcagatagacaccttcagaccctgctggggccctgggcagactattccacccatcccaggtctgaggtgagtgacagcctcactgaccatcctgtcgcttttcaaaaagcctcctgcagtatgtgtctgcccagc

SEQ ID NO: 52904 - DNA, 1048 bp, Homo sapiens
aggtatattcagctctccacctgtctctcatcctccagcaggatagccgaggcacattgtcatgacaattgcagaggggcgagagagcaaacccaatgtacaattccatttcaactgtttgcctgcatggtacctgccaacatcccactggccaaaacaattcacatgggtgagcccaattggagggccctgcaaagttacatggcaaagggtgtggttataaggagaggtgaagaattggggtcatggctgcaatctcccccaaggagaatggctattgagaaggcagccagtgtttgccccacgagctttgtgccttatctattctatgcataaagacaaactcatcttgagggtgaaaggatggtattaaacaaacaaacaaacaaaaacctgggatgaaggaaagggctacagcctaggagtcaaaatgttattgggtctctaattatgattccataatcacttaacctctgtggtgttacttaacctctgtggtccttgggatttttctctgtaacattggaatgaaaatccttgttctatatgccttctaggattgggagatggttaaatagggtaatgaatgcagaagcgctttgtgagtgaaaagcatgattccaacaaccatgattcactgcagatattttaagagagattgattaggggagcagccagaaaggaaagctcatctcaggcaaacaaagagagcctagtcctctgctggagtgggctgagaggagcctctggtctcctttgggaatacactgatgggaaggagggctgacatttgctgctggagaatgtgggtcaccatgcattacatggggcgatgtgcttggctgacaagaaggccctggtggcctctgctccagcatccagcctgtcccagtcctcatagcctgggtccccaaagcccacatgcctgctgatgctgcacataagtctcaaaaccaaacagggaggagcaaactgtgcaccctggacctcacggggtaacagatatgaaagggaagcatcattcaacctaatcaagaatttctgggat

SEQ ID NO: 52905 - DNA, 1097 bp, Homo sapiens
tgccctttgcctggccaactcatccttctcttctcaaacttccagtcctcagggagaccctcccctaacccctagacaaggtcaggtctccttgctttcatcttataacactcaacttttctttcacaagcctgacctgtgtgtgtgagagagaggtcatgtgattattgtacatttcttccacttgtctgcaagcccccgtgtctttttactgctccactatagaacctggcatgggcctggcacgcaggaggcacaaaatcagtcctggtagtttgatcggatgcacaaatgaaagtgtgtcaaacccacttaacgaacattgttccttacgatccctgcaggaaaaaaggccctgccctttataggtcatgcccaaggaagctaggtcataggaccaataactataacaaccagaaaatgagagagagctacagaagtgttgtggtacaagcaggaaggcttcctggaggaggagaggtttgagttgagttttgaaggatggtgggaaagagtgaggagtgggataaggcagaaggtggagtggaaaatgcaagttgtttgaaggagccagtttatgcacttgagaagtctgttgagcgcccactgtgtgccaggtgctggggatcccaaagtgtttaagacagaggtggctggttcctgtgaccatggagcttataatctagtggatgaagcaacaggtgccatactgggagttgcaggagagagtgcaggaaagggaggatggaacattagcttggtcaaggagcatgagtttataagaaacagacacctactcaagctagatcaagaaaaaaggaactgccacccaaatcaagatatagaccatgtgagccctccagaagcccccatggccctcccagtcattcctctcccaaggtcaccaccgttctgactgctggtgccccacactgggttttgctgtttttgaactttacataaatgaaatcattcagtgtctactcttttaagccttgctctttgctttgtctcgtatccgtgagattgtctacgtggttgaatatactggtcttcattgatgtacagtgttctgttacatgaatatgccccatttt

SEQ ID NO: 52906 - DNA, 1027 bp, Homo sapiens
tttttttcttatttgaactattgatgtgatggaatgatattcatagatttctttatattgaaccagtcttagattcctagaataaaactctgcgtggtcatggtatgttatcctggtagattctgcttgctataattctattgagaattttcacagcaatattaataagttggtaatcttattttggccctgtcgggctctgttatcaggaatttgctggttgagtgaaatgaatgaggaggattttcctatttcttgtgctcctgcacactttctaggtatggcagttacctaggatattattgaacatttcagggagcaggcaacttgtctataaaatcttttgagccaagcatccttgctagagccccatccctcctcccaaccacacacaattttactcatctttcacaggaggaatcttcgagtatgcggacggccccaacgcccaggtcatgaatgccgaggagcatgcctttcgattttctgccaacatcatcaacaggaacaggactctgctgcccaacacaaccttgacctatgacatacagaggattcacttccatgacagcttcgaggcgaccaaaaagggtgagtgtgcagctcctgcctctgttctcttcccagcctggggaggggaagcgctgcatttgctgtccaagatcctgggaatgggccagagctccaagtaggttcagagccttttctacctggtttgggcttggagccagactgcctggacttgcatcctagcaactctgatattagttgtgtgaccttggacaaaataccctgtgcctcaattttctcatctgcacaatggatgcatttctgtaaagtgcttagaatagtaagcgctggcacgtaggaagtaccatataggactttactcttattgcacttggcttctttgccctccacatactgagccaccaggtcagagacccaatttctgtgtcccacccacctgcttctccttgccttgtattctggcagtcagagtccctgatatcgagagcagttactg

SEQ ID NO: 52907 - DNA, 1025 bp, Homo sapiens
tttaatagaagtggtgaaagtgaacatcctagccttgtcactgatcttagaggaaaagctttcagtctcttaccattgagtatgacatttgctgtgggctattcataaatggcttttattatgttgagatagttcccttctgttcctagttgttgagtgtcttttatcatgaatagttgttgaattttgtcaaatgctgcttctgcattgattcagatgatcgcatttttttcctttattctgttactatgatgtattatattgatcagttgttttgaaccatccttgcattccaggaataaatttttcatttgttcatttacttttattttatgtgcacctgtatagttaaaataggtttattgtagacaacatatagttggatcttgttttttgatccactttgacaatctcttttagttgatgcatttagacctttgatgtttaaaatgagaattgatataactggattaatatctaccttatttgtcactgttttctatttgttgcccttgttctttgtttctatttttgccttccagcccttttctgcctttcatgattttaattgagcatattttatcatttcatttcctctcctcacttatcatgtcaattgtactatttttttagtagttgccctagagtttgcaatatacatatgcaactaatccaagttcattctcaaataatgttatactgcttcacaagtagtgtgagtattttacagtaacaaaataatcctaattcctccctcccatccttatatcattgctgtcattcattttgctcatatataagcatacataagtggatatttatgaatacattgttgctattattattttgaacaaactattgtctgttaaatcaattaagagtaagaaaaatacattttttaaattttaccttcgcttattctttcttcagtgttcttcttgtatgtagattgaagtttttgacctatattattttccttctctctaaagaacatcttttaatatttcttgtaaggcagatctact

SEQ ID NO: 52908 - DNA, 1025 bp, Homo sapiens
tccattcattgtaacaaatgtacctctctggtggcagatgttgataatggaggaggctatgcatgtgtgtgggcagggggtatatgggaaatctccgtgccttccactcagtttttgctgtgaacttaaaactgctccaaaaaataaaatctattaaaaagaaaaaagggtaatattttaacacgtgaacacacaactgtgtcccttccagagtactccagcatgcttacagtttgtaacacttaagtgtgtacgcgtgtgcatccacacaggtgtgcatcgacatgccgagcacgtgcataaaacaagacaagaagaattcgtaccaaaagttaagggtggttttctctgagtggtaggctcatgggtaaatttaatttccttctttgtgtttttctgtatttttaaaaagttctgcagtgaacatgtgttacatttctcatcagaaaagccatcgtgattgtgtgtatgtgtttaaagggaaataaatgatcaaaataccatatgacccagtaattccatttctaggaatataaatttagagaaagttggagatatataaacacatttatggataaggttttttacataatattgaaaaaaatagaaacagcttaatgtccaaaagcaagagattactcaatatattaaaacccacccatatggcagaacaacttgtaggcattatcaatcaaagcataggatgatacggtacagtgaatgaaattggattcaaaatgtgggaagaattttactcacatgatgcaaagtgggtacagatggggcagaagaggccatgggttttgctggggccagatgaagggcacatgaggattcattacgctactctctctgtgtgtgtatggcagacattctccataataaaatattccttaaaatcatgatatgaataagacaaaaataacaaatcatgttgttgcaatcagaaaagagacacaattaatactacttgcagatgcttattatggttctcttaaaaacacaagggaatcaggtgaaaacct

SEQ ID NO: 52909 - DNA, 1091 bp, Homo sapiens
agtgtctctgctccattttattaaagcagaaagcagtgacaattattttcataatgaactggctcttcaaattaatgccaattacactatgcaatcatgattaagattatgcgttaatcaatggtgccaacctacttattagcctctttaaataacgatcatgaggaatgtatgggaaggcagagaatggagaggagccagtggaaaggggggcagcctccagcggggcagggaactctctccagaagctgagacccaaagcagcccttcttgcatgggtggagcttggatcagaacccaggacaatcagatgcctgagctcccaaagctacaggctctctagaagggagagggagcaggaggacccaggagggagagggtagtggagaaccttggccatttagcagttaatgaggtccagcgtccccttccccatctccagcaacactaaagtagtgcagttgacactgccccccagtaatgtcacccctgtcttaggtcaggtcccctggaagcagagcctgaggcagggattcggatgcatggggtttatagaggggaagagtgctcttcaggaaaaccctgtaggggaatgaataaggcagggttgggaagaggacggagttgggcagagatgtgcctctgccaagatctagcctttgcctgatgcaaggtggggagtgtggggaggggctccaaagaatatgtcatactgcagattgtccccaccctgaagcaagggaccgcccagtcttttgagccccattattagttggttattgatggcaggctgcttccaggggcccaggtgagtgacccctcctcctgggcaagggggcctctctcactgggaacaattccctagagaaaggggtagcctgtgagtggaaccaaaattcaaatcgaggtctgcctgtgcctagaacccactctctgaacctctgtggtgcccctcaatatttgctgcttggatgtcccatgatattcagcctttgcagccacctagcccttacacactcattagaacacctcccacccttgtactgagtttgggggtggaggggcagcctctcacccaccatgtctctgag

SEQ ID NO: 52910 - DNA, 1085 bp, Homo sapiens
gcccattttcatgttgccaataaagacatacccaagactgggcaatttacagaagaaagacgtttaatgcacttacagttccatgtggctgggagccctcacaatcatgatggaaggtgaaaggcatgtcttacatggtggcaaacaagagaagagagcttgttcagggaaactcccctttattaaaaccatcagatctcgtgagacttattcacaaccatgaaaacagcacgggaaagacctgcccccatgattcaattacctcccaccaggtccctcccacatcacatggggattcaagatgagatttgggtggggacacatccaaaccatatccctcccctaggcagcagctttggttaaaaaccactttccacttgttcccaccccggagttttgctgtttagccatttcatgcttgtttatacttgtatgtttgtgcatatttatttatatttgagaaatgtttattgaatgccaattatgtgccaggtcttgttctaggcactggagagaaagagatgaacaagctgataagatctgcaggcccaaggaacttctaagtgctgagggtggggagaagaggtggactgtacactagacagcaaatagatatttaagacagcaaatagatattaagctgcatgaagaactttgagaaagcaagcaaggtgtcacagtggcagaggtctcccctactgtttatctgctgtatgcccagtacttgacacatggtgggtgctccctgagtgtttgttgagtgaaggaagggctgaatggaggaacatctttttctggggtgttgataaaggacaaggtcgctcagaattcctttgcacgaacttatgaagatccaagcagcctcatgtgctaatgataataattaagtcagaatcccttatttgaaacaactacctcagggagaggcacaaagcaccaggctgatgaattggttccccagccttccctcctgttgtgccctgcccaggtgagatgtgtgctcacacctgcccaggtgcatacacatgcataaatgagagtctagtggagtaatcacacctccaaggctgtgttaaaacaaccgg

SEQ ID NO: 52911 - DNA, 1044 bp, Homo sapiens
tatctctgagggctgtgtgtgcagcatctcacccgatcctcatggaaccctgtgaatcgagatatcgttcagaggttaagcagtgttaaaggtcacgcagaccatcataatcatccttcagtagtatttgagaatgatcatgtgctaacaagatcatcccccagatctgtagtaaggacatggagtaaggcacatggagcttgtgtgtctgaggtcaaatgcagctggtaggtggcagaggagctgggatctgaacctctgcggagcctacttggttggcctctccaccatcctgtcatcagctagcagggccagagctgtgcttcaaaccctgtttcatctaactccaagccatgctcctaaccactaggctttattgcctcttttcaaaagcaaaggatggcagaggaggagatttcggcatccgtgtccacccacaggacttgccctctctctggccctcccagccctctggaggctgccccgccatgcccactctccacctccagatgggcacttgctttccatgctggcttcccagcagagggtgattcccacctcttcggcctcctccagaatcctaacagccagtatgcatggagggggcgggaggcagcaggcatgcagggatgaggcagaaactgagagtgagagctgctgctgaaaactcacaaattggtcccagagagaaatggagcctctttttgcccatcagctcactcccccaaccattatcaggaaagcagtgtgagggccttggctggagtgaaactcaggtgtgggtgtggggaatggcactggggcctccacagctcccttctggaggggcacggaggccttggaggccagcctgggctcatcctcctcagagaacagggctggagcacaggagctggtgcatgggggaggtggccaacagtaactgtaggggtcttcaggtggacacaagaggccagagccaatgagatatggggcatgggaagcaggtgctgaacagacagacccagggcttggtgggaggtgcaaaatccaaccccaaacagc

SEQ ID NO: 52912 - DNA, 1126 bp, Homo sapiens
ccctctatgactcagtttcctcatctgtaaatcgaaactaagaataactgtacctatcccataggaaagattttatgattccacaaggtcaagggattcaagtaacataataaatgttcaataaacatgagtcattctcattatgtatattacccattctttagggttcagcacaggtgctatctcctccaggacatgttccttgacacctgtaccccaaggctgactaagatgcccctagttctccttccttgagaacatcctgatcttacctccatctgagcattttcctactgcataattggggacaaagaggggcctaatatgaccaaagcagagaatacaaaagaatgaggctgaagaagtttggggggatttttttttcttttgccacgctgaagtctaggctggattcttggattgtgggaaaccagggagggttgcaaggcaaggtgtggccatttggccctttattgccaggcctggctcagcctactgttggaatgacataccattaagctgaacctacatgcatgcaagcagaatgctgttctaaacactgcgttgtcagacagtggttttgcatggcagggaataactccaaagctaaggacatcataatttccacccccaccccaaacacttgccattgccactttgattcagacaatctggtataccaggtcacaccatcctttgttcacctgggcagccacgatgaaaggtgaaagtggtaatatggcatcctcaggcctggaaatctggggtggaggtagctgtgggctaaagcacagctataggagttccttttcttgctacagctacctcgcacactcagagagattttgcagaatagagctggtaaatttaattcagtgtctacctctccagtccctgcctccactcacctcttcccttcctcaccccatttccaagttagtggctacctcaaaggagcctcagagatgacccaagggccttcccagctctccagaggcagttcacagccaacaggcctggctcagaggcttcctaacctccctcccagcccactctctttgagcaggacaagtggtcacgtgacggcagctccagggagggccagtcaaggcctggtaccccccac

SEQ ID NO: 52913 - DNA, 1518 bp, Homo sapiens
agaggggactgtggcacatccaagtcccacggggccagagtggactgtggctgtcgcatgcttgggagtggcattcaccaggtttctacgattgggcactaaccaaaaccaagggccagctttctacacctggaagctctacagcatgataagaattaaaacaagcatcgaatgaagtcatatgatgactaagatcagtcaaattggagttacggtcaatcagcaggaaattgtcaacatcggaattcacagccttgccctagagaaggaaggagaaacaagcggagaggccagcagatctgtgggatgttgcccctcaaggaagccacaacaatagaacaagtttatccaggaaggggagagggtaatgaatccaggccgtcacagtgagcttcaggtcagatagggggcaggacaggatgaggaggacggaatggcttggctaaagagttgatgcagagctgggtcctctggaagatccagccaggatcagcaaggagaaaaatgtgatggacaatttcctctggagaaacagaggctgacaagagaggggtcacaaagtcagccccaaccaggcagctggggagcagacagaactcctcgccagatgccagagacacagcattgagacccagacagaaggggctgcacacgccgctctgtgggagtgggttggagaagctctcatctagtcctgatgccaaattaggaagatggactctcctccagatgtctccactctcaggcatatggcaaagaaaaacactcttctactgaggcgagaacaatcatttattgaatgccagcattgtgctgggcgctcaatacagactggggaaataaaacagtcattgtccatatcctcatgaaacttgcagtcttttaggggatatagacaacaaacaagtaaataaatacatgtataattacaaaatgtgttaaggatgaggagggaaacaaacaggattcacaatgaagaataaataacagagtgatgaaacctcagaaaaagtgatcagagaaggctctttgaggaggcagggtttaggctgagacctggagtgatgaggacccatttgtgcctctctccaggggaggctgggccgagagggagctgatgtcagtaggaagggcaggcagatgtttctacttctattcagtcatgttccttattgaatttccctgtttatcctgcttttattaagagtcatctcaggtctcccatagtagtttgacaaatttactttacagagaaagaacttgctggtatgaagacttgtgataaatactttctagttccaaccgactgagtgaaggggagactctgctgagcttgactccatcagctgctgcaatggtgaccagaaaggcaggccccgcacctagaagaacatggtccctgagactatgctgtgcacctccaagctatgccagagatatagggtcagcaggtatctcaggagcatacactcagctttcctacctaaaagcgtagctagttccactgcctgtttcgtt

SEQ ID NO: 52914 - DNA, 1250 bp, Homo sapiens
aagggaacagcctccctagctccttctagcttgagctctcctggaattcacgggaggtttggagagagagtattcacacttcactgaaaacgtgtttcaagcaattagcaggtctttaccagaggagcctttgaagtccaagcccagacccatctctgtgaagggtttccgcagaactgacaagctggcagacgctgctatcagctcggccctttcctaagtgccaggggctcctggctctggactggcaccacaggactcatgtgagtcaccccgcggtggcagcgccagcatcatcaccagcacagagacctgctcgacggagaattcaatgtgtgctgctgcaactgcaggtagtgccgtggagttcggcttccagtggggtcctgtgtcaagtccatgggattttcctgccctccaggtctcccaaccccaggctggcaagtggaagcctggactgaacttggagctcctgcatcctcaaagagtgcttggccctgtagattattattcattgaataaacagatgaatttctctaacgatagtgccatggcctgcagttagcctctattcctgcatctgcaaggtggaaacaggcagggtgagggggggataggctacctagtctccaggattctgagcttgaactcgctttccttggaagggcttatattgcagtggaatgaagattaggtcataattctgctcccctttaaaagctgcatgatcttgagcaaatcaatggatgcatctcagtttctccatctgtgaaatgggtaaaataagcttgattttgcagggcagttgtgaagacaaaaggagataatgcctagaaagcgcccagcacagcaggtgcttgtggtctattgaatacaagccacacctcttactgtgtcttttctgactgcctctcacagtgtcaaagtagaccatagccacggtgggaggggcgcctttatacagcactccccccctccaccccactgaagatggagagaaagagagagccagccagcatgggagccaaaggcagctgtccccactctcctgtcccgtgaagccacccccagcccgggcctctgggcttctgtttgattccctttccctgacattccatcaatcatcgtaattgcttctcccgaaaaatgaatttgtagttgatttcttcaaaagagggaatcagccaacagataaaaaggttgttttatttaatttgcatgaagaggctgcctgctgctgcccagctgtg

SEQ ID NO: 52915 - DNA, 1076 bp, Homo sapiens
taagagtagaccataaattaatgaatgagtgatagctggctatcattaattctgctactattcgttcattttcttttatttatttgctcatttattgtctacttttgtcaggagttttctggttcggatcttaacatataattatctccaggtccaggactagggagagactaatgagatgcctcaggcacaatatttaaggagacattgctctcagggtcatgctagtgcctgattagctcagctcctgaaaataaccttgctggtcggtattgtaatttccattgtgtagaggtggaaatggagtcagaggaaggctactttacatcttctagtcacctggctggtaatatttgttcccagatctatgtggcttcaatgccttccttctctccttggtctcagtttctctgccttgcttgacccctcagccagggacctgggatgggggagggaggaggagttgcagccacatgcttcttttcatgttttatgtgctgccccagcccccccaacccccaacaaccaccctcatctcctgcaccctgtgcagaggctaccaggtgtctaggtctagtccagtctcctctgtttagatgaatgtgaccatgggcaagttacttaaactcctcatgcctcagtgtccttagctctaaaaagggacaccatagtcatccttatgtcatggggtgcaggagggatgctggtgagtgggaatgtgtagtgggtacaacacttagaacagcacctgccacatagcttcatgtagttgttattgttttgcatagccttgtaatctgaaggtggggggagtctgcaatgagccccaaaccctcagtccactgagctgccctatcaggagagtggtcccccacttccccagggttagcagttccctgggctgccagcttcacctcagttctcctgggatggttagtgcccaggagccactgggaggtggaaccatgggggcggggtttggcccctgacttcctagttcccctccagctacaggcaaggcatgggggtgggttttggcccctgacttcccagttctcctccagctgtaggcaagg

SEQ ID NO: 52916 - DNA, 2010 bp, Homo sapiens
gcacataggttccccctccatcttagaagctcatccaaacaagatctatacacagtagggcttcagccaactcagatcagcacacaggaggtgctttctcagcatggagcctggcacgtagtaggcctctcccagtacaggatctggcacacagtagaaattcctccagcattggcacatagtagggcgtcagccttcctagagtgtgcttcagagcaggcaagtttcagaaaaatgtcccctgggtcaagttttccttctctcttcactgtgctcaagaaatatgtactgagtacctagtactgccccagtttgataccaggtgttgcatgggggagcagagtaagggagacacaaaccttttattcttatttaaagaaccgacagccaagtgatgaaataccacccctttacaaataacttatgactgaggcaggggtaaggagtgaggctgcttggaggaggtggtcctggagatgagtcaagtttctcaagtcagcaaaagtgcaaaggcaagtgtagagagtgagggtgacccacggagatggccatgaaccatcgctgatcactgcagcaaagtatcatactgtggagggggtggggtgtcattctctcattcaacaagtatcaggagctgtgaggggctggcatggctctaagctgtgatgctacagctctggataaaactatcctgcttcatgggggggcaggaggatagaaaatagcagcatattagatgtcagctgctgatagtgctttgaagaaaaataaaggaggggaagggtgaggagctcactggagggggtgagctctttccacatcttctctgataagatgacatgtaagctgaaatctgactccaggaagggagagggcatggtcacggggagaggagaacctgacaggcagagggaagggagggcaggaaggtgggggccaattgccaagagccttgaattctagggtaaagaatttggattggattttgtagcagtggccaggctctgaaggcttttgagcagaggacggatgggatgagagctgcaggaaggagaagatggcagaattgtgggcagctgagaccagcgtggaggggtggcagtggtccaggtgggagatgccaggcctgggtgcaggtagtgatgggggcagggcaagaggaggggcagatgccagggctgtgtgaaggtggcattttctggtgtgaggttgaaggaggatgaaacaaaggcatgtgagggtgagttgggtaccatgatcggaaatgcacacaccaggcccaggagtgggccaggagcagatggtccatcccttctgaagctgttgttttcctcctgcttgtccctctcctccccttgagcctcctctctcccttcccccatgtcctcttttcccttctcctcctctagcacctcctgctacaatcttagaaactccacggtccaaatcccaagtatctgggcttctcctctgctttcatctcacatgtgtttctttctccttctctgtcctttcttaccccttctgagccagtgatccgtagagggtataatacaaatcaaattgtccaggtcttcctggggtacctgacagcctgttggggtggagacagtgtcggggtagttggatgccctggtttttgtgtctcacagaatagggtttgcatctcaaccctgccgtgtatgagcagcaccatgatgggtgagttattggatgcacctctgcctccgatccctcatctgtgaaatgagaaggtgcatgggctagcacggggcctggcacaacataagggttgtgtgggtggcggctgacgctatgattattactgtttgtggtattgttacttattcgccaaatgtgaggctatccacccagatagatccttcccatgcgagagccaccttcagaggggagtgtgtgttccaggatcaggctagactacccaagtccttcctgataatgggcatgcccgagtgtccatagccccactccagaagggctgtccagcag

SEQ ID NO: 52917 - DNA, 2287 bp, Homo sapiens
acttcagaggcttctatcatcccaggggagtgagtgtagaattggtagggtgacagcatgtgatcactcacgagatcagctcccgcgcaaatcatgaacctccaaagccacagttctgctcagctgcacagaaaacatcaagttctcaacaagacagtttctaagaataaacaaacagataaatcgcatgtagcctcttgcctttaccaaagcaagttgtgcagcaggatgtgggtaccaattgggccacagtctctgtgcctctgctgtgtcaccccaccgtctgcacagccaaagactggcttagccaagcccagagcatgttgtccaaaggccattccagcttcatcttcctgaaatctgatttgtctgggagtgtggaaagatgggcttaaacattggccacaacctaactgccaatctgttaggatttgtcaaataaattatggagcatccacattttattggaaaaatattattttataaatggagaaaagcctggaaagacctctaccaaaatactaaaggtgctttttctggatggtgcatttataaatgttgttaacttctttatgttattcaatggacatgcattttgtgagcaggaatgattatatttaaaaatctgagtttgaatgccaatttgatcgtgtctcagctgtgctatctttggcaagccacttcttttccagagttccaatttctacacttctaggactggggtaataaagtcattttcatagcattgttctgagaaagaaaatgagatcatgtgtatgtgtattgtgtgtgtgttgtgtatgtgtgtaccctgaagctagatctggcacacttttagagcaactccagtatgatggccacacacagacactctagagccaggtggcctggattcaaatcctggctctgatatttaccagctgtgagattttgggaaggttgcttgaccactctgtgcctctgtttcttctctgtaaagtggggttgtgatatgaattaaaagaattagggccaggcgtggtggcttatgcctgtagtcccagcactttgggaggccgaggtgggcagatcacctgaggtcagaagttcgaaaccatcctggccaacatggtgacccccctgtctctaataaatatacaaaaagtattagccggacatggtggcacacacctgtaatcccagctactcagaaggctgagacaggagaatcacctgaacctgggaggcagaggttgcagtgagccaaggttgcactattgcactccagcctggggcaacagagcgagactcaaaaaaaaaaaaaaaaaaaaaaagaaagagagagagagaaagaaaaaaaagaaagaaaagaaagacatgcaaagtacacaataagagcacaataaagatgttattattgctcttattactttattattgagtacatgttcttttgctttctttccaggctgttgggattgaaagccctctgtgagctgtgggtctgccttcttggggagagccctgtccacatttggctgttccagagttgaaagagacagagtgagggccctctagtagcttcagtagggggactggaggccaccatgaaaactagggttcagtgtagagctaggatcagagatcagaatagagtttaaggtcaaggttcagtctggatcaagatcaagatgaagttgagaaaggaaccaggtctgtgtctggggccagggcccaagtttgtctcttgctttcttgtggagccaggcaggtcctggggcctgttccacagtgcagggctgggttgtgctcctggatggcctttccctgggtcccaccttcaccctggggcctgtttcagcctccccatagactgcgtgctgcccttcttcccaggcagtctgagccacccagcagtgcccttgacccctgctcagggagtccccaggagctgcgcttggtgccctggtccctgagcgtcttctagcttgaggagcagccagctcagacctggcaggagggggcagcctccacagcacctgtgccaaaccttagctatatttttagaatagctcctgcctgtccacctggcgggcagtgggctggagggctggagggctggagacaaggaggccaggcgctccttcccccaggcattgacaagctgttggaaggcccaactgagctgacctgggttcctacactgggccttgctggtgaggagccggcatggagctgtgtgcacagatggccctacatgcgctcataatttgccagaataagtagttattattaatctcccctgtgc

SEQ ID NO: 52918 - DNA, 1052 bp, Homo sapiens
tgtctggtcctgaacgccttggtgtgctggttgtgtctttgtctacacagcatgtgccagggtgtttctgagccttctgttgttgtgttcacatgtgtgagtgcttgaggtagcctgttcagtatgcttggctgcagctgtccagatatgcttgtgtgtgaatgtatgtgcatgtgccctgtgtttgtatggagcagggcagcctgtgtgtgcatgcgtgttctccgggggcgggggtatgtctgtgtgtgctgtgtctgtggttctgggtttgagtgatgtgcggggcctcccagagagggcctgtgactcagtgcctgtgttccactgtgtgttgggtgctgtgagtgtgcctgtcagcctctgtgtatccatccacgtgtttgtgtgcacgtgtgcgctgctcggtgtgtggacggggaagcacagtttgggtggtgttgggtcaggcccagcccctgtaccccaccgccccacacctgccccttcctgtcctgctggcagggttgatgacagccatgccaggccctacccttagccaggtgggctgtcacttatttagggctgctatttcaggaggggaagcagctggctggcgggctgctcatctgagcctcagcaaatcagtgagctcaggacccactctggggtggcccctcactgctgaagtctgcttggggttggaggcccatgtggctgaggcctctgtctaccaccctgacaccacttatagcaccaccatccaatgtagagctggcttgggcttcctgcctgttctcaaaggaataggcccttacccagggctcctatggacctgtgtgtgtgtgttcgtgtgtgtgaacgtgcatgtgcacaggtgggtacacacaggcatgtgtccctgggtccacacctgcaggcacttgcccactatgcacttatacttgtgtgaggaagggcacctttctgtggcctgaactcatgtgtctgtagctggtttttttctgtgatttgtctatgcatgtgtgtgtccttgtgcgtgcacaggtgtgtacacatgtgcttctctgcgt

SEQ ID NO: 52919 - DNA, 1049 bp, Homo sapiens
aggtcacaccaacctggaaagcattcaggaggctgctgggggttgagggggatatctcactggggattgtttcctaaaggaagctgggccttcagaggtggggaactctcacagagaggccagcacactctcactcctctttatagatcacaaggaatagaagttaaaagcaggggttcaaatcccagttccaccacttcccagctgtgcaactttgggtgagatcttggacctctctgagcctcagatgttcaaagggagcgagtaatggcatgcggctcagagtggttgtgaggactcagtgagataatgcatggaaggagctcagcaagtgcgtgccacacagaaggcgttcctctccatcgtagttattaatgcaactcccaagcctcctcccaggcatgcaggaaatcactgggaagcattggtgtgactctcacgttctgcctggcgtctcgagtgtcctggtctcaggaggctgagcggggggtttgtttattcccagagctgttttctctattgcctgctaccgccgcttgcctcccccagacgtacttatggagccaagtgggcaggaggcaaaggagagagtcctgccagcctgatggagtggaagaccaaggattagctcctgtggagaggcagatggggagacgacactgggcatgcagccgacccctcccctgggctccctgcctcggtccctgacctcggggttggctaatgtctgtccttccttctcctcccccttccaagttcctctctcctcctggaatggaagctgtctgactctgtcttccttcaccctttctgtcctttgcattgcccttggccacctctacccaccccaggtcatctctctcctcatcatgtccctctagatttttctctttccttccttcctcctttttttttttttttttttgagagggagtctcgctctgttgcccaggctggagtgcagtggcacgatctcggctcactgcaacctccgcctcccgggttcaagctatcctcctgcctcaacctccctccttccttcatttttt

SEQ ID NO: 52920 - DNA, 1479 bp, Homo sapiens
aaattaccctccttgcaaatgtttcttagggaattgaggttccacagagaacgtttaacctccctgggaacaaaattcccgttgggactcaatctaaactatctcagaatctttcagagccacatctcagcaagtctggaggcctgtgggtcaaatggagaagaaatgactgcagttgtcataaattcttcttttaggttggcttaaatcacattcccctgggacctctctccccccatttctagttaacccccagagtctcatctatcccctggctatggcaagccctctccaagtctctgggaaaacaagtccatgtgagctccagagaatccaatttcattccttttttcccccacgcaaaggcagtgactcactgttcgctggcgagtgtggcctctgtgttaagatgttatttgcttgcttattctcatcttttcccatttcaatgaaattacatttataatcttttttacctgccttggtcaacttggaagagtcattaaattttctgataggcagcctggtaaactttaattgaatcacgaatcaccatcttctggaaagttcagcccgcgaggactttgggtaccgtataattcaactcgttcatttgacaggcgaggaaatagaagtctaggatggttaagtgacttgcccaaagtcatactctgagtgaggacagctctgggatcagatttgagcctgctttttcaggtaccacacgccttccactccacggcactgggccccttggatttagctgttactcaggcagcactgctatgtgataaaccttaagaggatcaacaaacatttgtcttataattgggggaattaacagcgtttcaaaacctttcctaggaaactgactcagctaatgggcttgggctgtgattggtggcagctggcaactatgggggtcttcctatgtgctctctcccccacaggacatttgtcagatgccttggggattcctcttttcaatgtggcacttgaggtttgagtttgatgctattagtgatggctgtgctggtcatatcacgtggggtgtcttggcaggggtgtgggtagtggaaaggacatgaatggtcttgaaatcaggcactgttactcactgtgggcatggtcttgggcaagtcacttcactgagcctccattttcttatctatccaatgggcatcaggagctgaccctttcagcgtaactgaaaactataaaagatgaacatgagaaagtatccaagtcagagccccacatacagggagccctggtccatgctgattttatcagaagggcagagatgtgggggttcggtttccagtggccggacttgtctatggatgctgcatgtgtgaggaggggagaggggtcactgtgtggaggccacccctgagtcatggagcctcatggtctgatttcctccccttggggagtttgccagctgcagtagatgaagctgccaggctggggctcagg

SEQ ID NO: 52921 - DNA, 1027 bp, Homo sapiens
ctgtcttgactggctcctgccattggtggggccctgctcagcccctgttgacactcttggcatggtaaccttcaggttttgacttgggggatgagctggaggatgcgggtttggttttctggaagggttgctttgtcttgggagccagtgtaatttgggggaagagagggtggcatatggtatcaatttcattaatctggcttcttcatgggagtagagagagtagggatttggcactttgacaaggcccccaaattagtttgcctcccttgggagagggttggaaaggctgcctgccttggctttgtctctggatgagtcattctgtttgctcaaattgtcaattgtcaaacaacagtagagagtgcttcccaggtgggggtgtcagtgctgtcccgacaggcacatctgctcctgagacacccactgctggggaaatgggagccacgttgctacccagttgccagcctgaatgtcatggcaaagaccccagcaagtcctggccttgccccacgtggagctgtggcaggtggggccagcagctgtggaggctccagattgtaaagaggggcagcaactgtgaccatgttcctgtgctgtgaccagtgggctgactaggtgcatgtgagagaggtggaggagctaccagcaaggggcccttgaaagggcaggtggaggtattttcagagctgcccaaagcttgtttggaaagaggttaaaacattccctaatcttgggggagtatcaacacctgtgggtaggatactcagtcaacctccttaacaatgtgcttctgacctgccttatgggaatgagtgtcactcccaatggccaccagttatcctgccctgcggggtagtggtagtgatggtgggggagaggaaaagacaggaagggcggagacaaaaataaatctatggagggagcatgaacagagggaaacaaagaagacacacacacacacacacacacacacacacacacacacacacacacggagagagagagtgaaagagagagagaagag

SEQ ID NO: 52922 - DNA, 1040 bp, Homo sapiens
gtggtgtctcacagctttgcatggctccccaacaagggcttgttgtgagcacatcatcacctagtcagttcctactggactggcccaatggtccaggactgtcttggaataaaatatagggtcattcttcttgtggtagtgaaaggctattgggggaacaaagtcatgaaaaaccaattacaaaaccaagaggaatataagagacattgcagggcaatctgtggaatcaaagcataattgatttcccagtgagcatggcagacccatgaccagcaatgaagaggaacaagtaatctatgtacagtggagtgggctggggaagaggaaccctagagaagtgttgggagccagttctccaagacaagctggatctggggagacttattccaatcagagaaaatggcatagtggtaggattcactgacctgtccaaccattcatccacccatccatccttttattcattcataaaatatttactgagtacaatttttgtgccaggaattgagcttccaatggtgggcaaaagagtaaaggatgtgaggtgaatggtgcatagaatgacccagctagattagaggattggaatgagagaaaggctagaaatgtcatttgagtcagtatatgcggacctccgatatcagactccggtgtttaaggaatttcctgagggcaatgaggcctgatatggtacggtggccccactcatcacctgtggaagacatacggatgacctcctagttcacattaagggagtttcaggagcagagagacccattccagctcgtagcagagagtggtcttttcacaaattgcagaaactgtgtagttggttgataaaattttcccagtcaattctgcctctgtatgtgtttattaaacctttggtggctgctaacacaggtctccagaaagcagaagcagctgacgtgatgaatgactgctcagtttttggatatcacacctggcatcaagcatccttaccctacctgtcaaccttgcccttcacactgccattggagataacactgatgttatat

SEQ ID NO: 52923 - DNA, 3046 bp, Homo sapiens
agtggagggtgcctcaggagcacgcagcagtggggatatcatctccttcagggcagggcttcccaaaaccgatagtttaaattcctccttcacaatttttgcccagcagcataccgatctccatgatcatttacttctcattgttttgctttttaaaagctttaggctgggcgcagtggctcatgcctataatcccggcactttgggaggccaaggcgggagatcacgaggtccggagatcgagaccatactggctaatacagtgaaaccctgtctctactaaaaatacaaaaaatcagctgggcatggtggcatgcacccatagtctcagctactcaagaagctgaggcaggagaatcacttaagcccaggaggtggaggttgcagtgagctgagatcgtgccactgcactaactcgagcctgggcgacagagcaagactccctctcaaaaaaaaaaaaaaaaaaaaccaactttagataagctcattgattttttagccttgtcctgggtgatgttatctgtgaaaacctgagtcccaatgtgctatttatgtatatttaaagttttaaaaaatgttttattgtgatacctatatagaacataaaaattaccattttaacagtttttaagtatctgattccgtaacattaagtagattcacaatcttgtacatctatcaccactgtccatttccagaactgttttatcatctcaaacagaaactctgtacccatgaaacaatagttccccattacccctcctcccagcccctggtaacttctgtcctacttgctgtctctataaaggtgcctattctaggtacctcatataggtggaataaatacaatatttgtcttttcgtgttttgcctatttcacttagcatgacttagaggttaatccatattgtagcatgtatcagaatggcattcctttttttttgtttttttttttttgagacagagtctcgctctgtcacccaggctggagagcagtggcgcaatgtcagctcactgcaagctccgcctcctgggtccacaccattctcctgcctcagcctcccgattggctcggactacaggcgcccaccaccacgcccggctaattttttttgtatttttagtagagatggggtttcactgtgttagccaggatggtctcgatctcctgacctcgtgatccacccgcctcagcctcccaaaatgctgggattacaggtgtgagccaccactcccggctggcattcctttttaaggctgaataatatttcatttgtgtttataccacattgtttacccattcatcaaggatggacatttgggttgtttccacctttgggctattatctgtgctgtttatattttaatatatgcatgtgttaaacatatatatgttaacatattttaacccataggtacataactaataaaggattaagttggtgcaaaagtaactgcggtttctgtcattgaaagtaatggccaaaaatgcaatgacttttgcaccaacctaataaaaagagttttctgtgatcacctgccctgaaagcacagcctaaaataaggacgtgagggcaggtagtttacttgggaggaagcaggagtgcaggtgtggagaaactgaggcagggaagggataaaagccaatgaaatgctgagctggctgctgcccagtatttcatgggtttgctggggcctcaatcccatgaaggcctgaagaaccgagcaaaacacaccacagagtcatctcactggaggacagagaagctgggcacatgtctgcaatttccaacacccattatgttacttccccctcacacttcctgctttctcatgaggggctgagtgaccttcccaaaattcaggtgagacaagggcagggtactgtccatgacagctcttctgaaatcaggtgagctgggaggatgtggcacgcagcatcataaacgtctcctacgtcatctgaaatcatttttcatgcctcatttcatgctttgagagagtttttccctaaagaagtgatgtctaggcccagcgcggtggctcatgcctgtaatcccagcactttgggaggccaaggtaggtggatcacctgaggtcacgagttcaagaccagtctgaccaatatggtgaaaccccatctctattaaaaatacaaaaaaaaaaaaaattagccgggcgtggtggcgcatgcctgtagtcccagatactagggaggctgagacaggagaattgcttgaacccgggaggtggaggttgtggtgagccaagattgtgccactgcactccagcctgggtgacaaagcgagattctgtctcaaaaaaaaaaaaaaaaaaaaaggaaaaagaagtgatgtctaagctgacactcaaagaaggagtaggtagccaggcaaagagtgtgggaagggtgtttttggtggaagaaacagctcaaggaaaggcctggtgtgcagatatagcaagcactttcctaggccagagaagtccagcgccgccaacgcagggaggaggggtggagtgttgcttctaaggaggcaggcagggaacaggctttgcagggccctggtggcctctgtatgctatcctaagggctgggggtagctttggaagtatctgaacaagggagggttaggtgcatgaagggactgcctggagatttgcttttcctctgttgtcctggggcagataccagactggcatgggtcactgatacctgactttcttcccaagggactacagtgggaacctctcaggtctttgtactttcaaggccagtgggcacctagtacaagctcagaactgatggtgatgatgatggagaccctgggcccccatgtgctttccctgagtgtcaacgaatcctcctctggacacagatgttctgccccatcctttggcccctagtctagtagagagaaaagggtcacatggaactgggccgacttctgctcccagcttgctgagggacattgggtgagtcacttttcctctctgagcctcagttttctagtctgttaaatgagaataatgcctgtcttgcatg

SEQ ID NO: 52924 - DNA, 1819 bp, Homo sapiens
tccatagactcctgagcaatagcaaatgcttattgctttaagccactgaattttgtgaagatttgttatgcagcagtagctaactgatacacctccctgctgggagaactttaaggatgtgttgatgtttgctttctagccgagtccataaacctgtggaggtctgctcctggaaggcaagactcaaaatatggttggactcaagttgcagtgatggctcagtatattgatagatgctccgtaatctgggtgcagtgcgtgccaggcagctgcacttcctgccacttacagagaatttgctgtaatgcattgtgatgcattagcataataattgctaagcattcacaaatgaatagctcactgactgatggattttgtacagaatctgtgaaggttacatcgagggtgaaaacatttcactgtgtcaatgaacatacttaatttttctggaagtgctatttaaattgcgtcgtgctatgacattagcataacaaagacataatgcattcgtttatgctgtagtagggaacactgccataatcagcggacacagtgtagggggagtgatgtgcagagagcagccccattgggtccctgtggctgtgcaggggaggtcttgccctgcagggcctgcccccagagttggctccacatggagttctggggcctctggcagtgggtggactctgtttattggcttgtttccttttcactgattttctcttctcaatgctctggcaaccgagtcctgctaatgggtgggtgggtcttggctgacagaagagaaaccctcaggagaattaggaagcattcaaatctgtcaggattcacccaccctcttcagcaaggcagggcagcctccccagaatcaaccagctggtcccagaaaactgttgccttgggtcctcagtctctccagccccctcccctaagaccaccttcagagctgtcacaggaagcatcgcaggggaatggctttattctcttaattttctacattttttgcatatccagctctgcaaaggggaagacagagcctgttaattgagcatctactgcctgccaagctcaagctgctgtttttacatacatcagctctgcttctcagctggctgtgcacacaatggtaagagtgctctcatattagaatttcatggtccagctctgggtttcttttatccagaacttctcagaacctttagtataatagtgcatcttatacatctccaagagggagatatgagtctcaaatctttaagacaatgggacctggtttgggagaggcaggcatgatttcatttgttaccctataaggattcaatgaagtaaggattactaacccatttcagagctaaagaaatggaggattctcaaggaagtaatttgcactgagctggcaaatggtccatgcgggatttgaatccacatctacctgactccaacaccagagggatgatgtggactggcttcctgtggggaggggaggggactgacagccagcctctggagggagtgaccaagcaggactgcccatgattgctgctggtcacacccgcttggactcttagattgtgattggctgttctgtgccagatgctgggtcaggacagagaaatgagggactctcatctgtcctgtgtctagaagcctttttggcagagggatgtgtttcagaagtgtgggtgactggggaggggatcgatcagcccaccctaacccctgaagtgaggctcataagggaggtcaactgagagctctggtgctttgggactgtgctggtatagaattgaagggactgtaactcagatgatgactcaga

SEQ ID NO: 52925 - DNA, 1029 bp, Homo sapiens
tgcaatctgtggcttctgtgccccacagcccatcatgccctctctggcctgactccacctcatggcctttcaactgcagctcctgccaccactgaccagcaaggcttttctgtgtttcttagttgagattcccaagagaagaactctggatcaactcttctttatgagccaggtcataggttgtttttctttgagtcaagttcctctcccttcacccaatcatctgtgtctaaggagcatgtgatacaaaacctgatctccagggaagcaaaggctatgaatagggcagttcccttggaaagggtgcagatagggcaggcacagtatgagctcattccaaatcgagagcattcctgcacctgagcttcaagccccgagccttctagatctgactgctcaattggttgtgtcaagagaccaaaaccagcctttgagttatggatggaccagaactggacaccaatccccaaccacaggtaagacctggcctgttggttcattggcacatgccattggtccaaacaaggagtgtgaatggttccttgcaggccaatcctgcaggtagagcatgtgttgtagcgagggctggtggatctgaagccctcttctattgcaatgactggtctattaaattggaggtggataccatacctagaggggcaattcagtttatagaagtcaccataatcagtagcaaccctgatctgcttagcaagctgtactgctccaacattgtaaggtagcaactgagcatggtcaaggccagcctaccttggtcttccaatatgtataattcagacagttctccaatagcagattgatggtaaatgtctgcagttcttcattcctccatgtatcaatgatctatacaacatgactaccatctgctatcaagaggcggagtttgtttccctacccctcaaatctagctggccgtgtgacttactttggccaatagaatgtgacaggagggacatcgtgccagttctaagcctagacctctgcaaaggctccttgcatgcttttact

SEQ ID NO: 52926 - DNA, 1099 bp, Homo sapiens
ggagatgatcgggttctggggagctgtcagcggccctctgagagctgcagtcggctccttgccctacttgttggccaacagccttcacccagcctggcaggcgctccccctccttcccccaccacccccacttcctgctcacttccctccctctcccggcctcagctctgttcctgacccctccactttcctgcctgcttaaagaccccggtcgctgggctgccccttccacccttccttcctgaccagtgagttgactggaaaggccagtgacttgaccatcccttagaaggcttggcctggctgagggcggggactttccccttccctgcagacccatgggatttttcccttaagtaagtcacctaaggtgcttcttctccagcttgaatccacgaattgttcatatgcacatctattcttttggccctggactgtgtgttcctaaccagcctcctagtggtgcagatgctgcagtccatatgccacacattaagtagcaaggacgcgaggctttcagctgctggcagagtggccttctccaaggactcgtgtcctcccagctcctctggatggtgcgccaagcagggccgcctcctccagaagctgtgggagcagtagcctcatgtgagaccctgcccctgaggaccacagccacagcacctttggctgccagcccggggccctgaccatcagagtcctgtcccaggtactcacctttcaccagcaccacgcactcactcctccctcccacccagtttagctgtaacaaactggcacattcctgagagtttattggagacatgccgcgtgggatgtcctaacctgtcctggctgagtgggctgagctgtggcagcaagagtgggattcaggagccggagggagtagggaggaactgggagcagcgctgggtgcctggggaggactctgttccacctgcagcacctcctccacactcccgctccccgtttgcttattagctcatgttcctttgcacacgtgctctgagacgcacacatgactcctctgcagctcagctggggcgctgctcctcggcattgccttctgcctttattgggttatagtgactcctttgac

SEQ ID NO: 52927 - DNA, 1917 bp, Homo sapiens
cagggcaccttggggatggaccagtgcccacatcttttgcccagcaggacaaggacctgaggcaggtatgcaggtgggcataaactttccactgcctgctcttgcagcccccactccagagatcaaggaaagctccatgaagatcatgctgtgaggcccatgtccccgaatgatggcagctctgggaggtaatttgacacaagagggcttggggctggtagggagggtgctccaggtacagggaaagaccaggcttttagcactttggacagctttgttagggacacccaggaccaccctgctctgctttggagccagaggagggggcaaggcagggtcaaagtagcaaccccagccccatctcagtctcttcctggagagtgctaacgagaaagggcctgccaccaccacctaagaacctgtgttttttcctctcccaccccctcttctttggcccctctggcctgccccagaactgagagcccttgcccgcatgcctggacccccaccgtagggatgatcccgttttagggtgctctgaatgccagtgcccagaatcatctttctgttcctgcccgggcttcacggagcccttgaccactgtgctggtccctgcccaggcttcaagccacatcccagcctgagctgggacctttctccctgctgtccagcctggccccgccaccccctccgctgcccactgtgcatgtgtcaggctctgcctgagacacccctgaggcctggaatgtcctggctaactttcaactttgctgtcattcactgcagcccttctggcctgggctctgcacctcacagcccacgtggtcagatgatcccagcgtgggggcaccccttcagccatgcagacgaagggccatgaaaaaggggattgggacagtttccgacaggaatttaccaccttctttcttctctcccaagggtttgtagccaccgtgcactcttccatccatgccccactcctccctgctagacccagaggcatttaatgccccaaagacacctcgctgtccacactaactctgtcttcatggtgcccagagctcataagttctggagtttgggtaagcaggaaggagccatttgtggatttggaggaggatctctggctgcctaagatggtcactttctggggccaggtgccctgagtgacagctttcgtctttacactagccctgtctcccactggagctcctgactcaggcccctgtcctcacaagtgtgggatgagggatgtgaatgtggtaggagatagtgtgcatgtgtgaggatgggtagctttgagtatggtgtgagcattagattagagcaagtgtgcacgtgtgtgggtgtgagtgtgcctgggtatgatgtcatgagagagagtgaatgtgtgtgcaaacgtgtgagtgtgttagagcataagcatgtgtgtggcccatgagtggtggtatgtggttgccgaggctgagtgggacattgcaggcatgcaaggtttggatcccaaggctcttcgcctgtgtgtgcgagtgtggaagaacatgctgttgcagtctagtctgttttatgaatgccctcactaattcactctttggattcttattgggtgctgctctgtgtcaaagtcaccctgctgggtactatgggcggcatccccacccccatgggtgggcagcagtggggcagacagagactagagcaggcctcagtgcccagaacactgccaggcacctcgtggatgcccaataagcatttgtagaaagaatgagtggaaatctaaaatttcataaatatattattaactgtgataattcacatcaaagaaaatcctagaggcactccaagaccgtataacaggggaacttaatttaaactgggggggtcaaggagggcctgttttgaaggtttccccccatgagc

SEQ ID NO: 52928 - DNA, 1881 bp, Homo sapiens
accgttccagtcatgccagcaggattttgctgcaagcacccaagagtccatggagacattctccaggccagggaagctggggtgctgaagcctcaggagcagccttggtgaataatggatggggattggaggatgaataccccagcttctttgctcctctggcaggatcatcctgggaggtagtctatatgtctcccagcacctccccatgggattgagcccaagttgcccttgatgattatctgctcagcaacactccccttcttggctccattcccttccctgcctcacctcccctctcttcaccagtgtttcctaggagcaagtcccaaataaagcgcttgaactcagatccttgcctcagggtctgctgcctggggagctctgctgagcagacatggaatcgaacctcagtgctgccaggggagctctgctgagcagacatggaatcgaacctcagtgctgccaggggagctctgctgagcagacatggaatcgaacctcagtgctgcccacctgatggacttggagctgtgaccttaactctgcctccccaacccactggcttgactttggacatggtgtgttcattgctttgggatctgcttctgatacttcaaccttgatcagaatttctgtgagtgggcagaggagtgctcagccagccagggctgcagcatagtcccctaaatggatgtgctaggatttctaagggagggttgtatccttgggttgggtgggtgactatttttttctgtgaggctgcaattcctagaccgagatctgaaatgactgcattagttttgagctcagtggctggggagaatttagtttgaccccaaagttattaattgtggagctaaaactgtcacaagacacctctaaggtaagtcggaatgtgttctcccccacaactctggctggaagactgccactcattctttaagactcagcttaaatgtcacctcctctgccaggccttcctcagctcctccaggctttggcagatgtgcttcagcagctccctgctcagggcttggtaactgcacttatcacactgccttgtcacttctcttccttcatatctctctgatcaggctgggagctccttgagggtagagattgttcctattcatctctttgaccctagaacccggggcttggtacagacagagctcagggaacatgaccttaattaatggatggatggatggatggatggatggatggatggatggatgggctgatggatggatggatggatggatggatggatggatggatggatggacagagagatggggacaggatggatggatggatggatggatgggcggactgacggatggatggatggatggatggatgggcggacagatggatgaacagactgatgtatgggtggactggtggggtgagtgggtggatggatgcattggttggatgttgaggaatcatggcattctgtgttgaagccaggccttagaactaagactgatcagctttctacagtggctgtcttcttgggcatccagctccttaggattccctctggaagctcagagaggaggagatagagagtctgggtcccgggggcagggagagggctcctctaggctgaagggtggggtcccttcttcttgggctgggtgaggaatagctgggggaagctgtgctccagggagatttcgtctctaccttctcctggagcgggcatgtctctccaccatccctgcccctacactccttacaaggacaccacagtgaggaggagggggagggaactcagccggaaggggccacactcacccttcattgctgggtcctactctgtgggagatcggacagagaagggccccaagtgtgatgtgcacagcaggg

SEQ ID NO: 52929 - DNA, 1033 bp, Homo sapiens
ggtgaagaaatcaaggcttagacagacttgcctgcggcaacacaggccatctcttcccacttgttgtcaggagcctttttccgtaagatcctggaagcagggccttggacactttggatctggtccatgaaggtgctctctctgaccttggcctgacgtggaagaagtggatggtgctgaccacaggctaacacagaggcaggtggtggaggatctcgggccaccagacatcagctacgagtatactcagcccagcacagagcctctgatcaattcttgactcacctgatcacagcccagctcccagcacaaagagaatgtgaccaaaagagctacttaggatctaattctggccaagaaggcggctggtgaaggggcatgatgagaacttgggaggaagtgccttgccagctctgtttgtgaggtctgggaaggatgcagcctgaacttttgaagctcagaggacacgggagcagggttccatggcctgagacggggatctcagagaactgggaaaactgcaggcccctgtttctggcagtgtggctgcacaccaacccaggggaagataaggcaacaggctggttcctgaggaaactgtgtggtttcttaggaagctcttgggtgagactgaatttatggcagacacattccaaggatggaaaaggagtgatggttgatgatgaaggcttgtgagaagtgatgtgattcctggaagacatcattccccaggagtttcaaatgctgagacattgagccaatgtacagaacaggcttagagaaatagccagaagtaaccataatggctgttacctagtacttttcacatggaggccatgtttgtggaccctggccatcccgtggatgagcccccaggcttagtcaatcatttgaagctgagagcaggggtcttaaaatgcaaaacaaaggtgcccaagggctgctccttcgacagatgtggtggactgaccatgatcaatctgtggtgactgaacatgatcaccatgaacaataatgatgatgattattattg

SEQ ID NO: 52930 - DNA, 1057 bp, Homo sapiens
agggcttaaattctagttgagggagagatagagatggccaggaaaatgggcctggtcacctctagctctccctaggcctggtatggccacttctggctcctcctagactggattggtcagctccaaaccctcccaggctgtatctggtcacccttggtcctttccaggatgtgggctaggcttgaccaccctgggcaccactcagctttaagcctggtcattcctggtccctcttaggactcagactgggcctgaccaccacggcactcctcagactgagtgtggtcacccccggcccctcccaaggtgggcctggccaccctcactttccccagaagctggcaacagctttggactgagtccctctgcctgggggcacctccaccgctccagatgtggttgcaacctgacccacctgggtccatctctctagagctcgcgtgcccccctgcccagtgccatggagtataggggggccagctccctctctctgtgtttgtcattgagctctggaattatatttcttgatttaacaactgcgagtgtttgctgcagctttactgccttaaaaatgttttctaataatccccaggtgtttctcttgcatacaatagcctggcttgttacagcccaattaaatcctgatttgagacacgtaattaaaactctgaacagaacgcgccataaaccttgctccttgccagcctcacgcccaaagtgcctgcccctaccctctgtctcctgcttccagggcctgccgctgacatttgtctacttttggttgtgacttggttgggtggaggcccaatctgtaagtccttggaggtggagctcctagagatagagggatgggctccctgaacccttggggtcccaattccctacatggaattggcttcttctggctgtccctagaaccagccttctcagcctcagcactcttggcatttggggccaggtataattctttgttgtgggggctatcttgtgcattgtagaatgcttcgcagcatccctggccagtagcaccctcccccacaactgtgataaccaaaaa

SEQ ID NO: 52931 - DNA, 1085 bp, Homo sapiens
caaacgatgccatgatctgcagtttccccactgtcacgtctttgctctgacagccacttgcagccaggccagccctcccgtctttattgtgcaccatcgttctgtgctttaaggcttggcccacttccccctggctggcccagcccctggcgatccctcctgctaactccagcactgttgttagggacccagtgcctttgttgttctctgactttctggggattgtgtctgcttttggacttggctacacaccccttgagatctaggacataagcatgccttaacctccttggcctcccagcagcgcccagcattcctctgtggctttcagtggatgtgatgggaaacatgggactggagctgcccaggaggccagagtcagccctagtgggctgcaaggtggggacagagatgcagccacaggtaaggtatggggcctggtcctttcagacagattatgatgtccaaagaggctggcatctggcatcaggtggggacccaggcaagcagggccatcagggaggcaaagcatggggcatacaatggccagaaagtaacagagcccagagtgggagtcgcaggagtaggttaagttcagcaggtgaaaatagaattgagggttctctcattagagaaactgtctttagagggaagaggctgttagataggtgtctgagacaggcacttaagcccaggaaacaaggcaggaaccctgcatcacacccaggggcctagttagggctccagctggccaactggggccgttgatggtgctgacttcctgcagtgctgggccgggctggtcaagtcccttttttcttggctgggcctgcaggtgggaacacagcggtctcaagagtgggaagagggatgaggaagtcaagttacacataacaggtgtattttcagtgtgggctgcaggcactgcagttaatcgctgtccccattgttgtcaccctgcctaagtcacacatgtgccatctcttccattggacagcttttgaggacacacatacgcaaacacagagttcagctatgaccatagcatgccaggcatgaagcttggggagggacctgatgtccct

SEQ ID NO: 52932 - DNA, 1051 bp, Homo sapiens
tcccaacacccatcaagatcggatcccacctcctctagcaggttttctaagacactcccagaaggaatggactcttccctcttcttccactctccagcacctgaactcagtgttagaagcaaagagtcaggtgccagcctgactcccagctctgtttgactcccagctctgttacttactggctacctgaccttgggtaagttacttttcttctctgtgcctcagtttcctcacctgcaaaatgggcgtaataacagcacccacctcattgggagacctaaatgagttaggatgtggggagcatctgctcagtgcctgcatgtagtggtgccctatgccgtgttccctttcttttgtctaggctacagcctctgctagctgtgccccctaggagtggcctcaggaaggcagggatgtgggcctgtcctctgactccctgcctccattcccatctaagagccttgcacagcagagggaagacggctgctggactcgggccatggagcagcatctgggtcataggaagcgagtctggtgataggcagacctgagttccagtcctggttgcaccactagcttgctccctggcctttggaaagttccttaacgcctcccaggcctcaattttctcacctgtgaagtgaagacaataattgtacccccctcctaaggtgctgagcacagccaagctccagcccctccaggatccatcgcatagctgccaacagttcattgcaggctggtcttgattgccccacctccctcactctgcggcgcccgcaggtaactcagaacagagctcctgctctgatgtctagcccacgtgcctggtttgcatggagactgccctttgtccagagggatttacatttttaaagagtaagttcacctgagtcctgtggggcattgactcaaacctcccattagctgcctcctcctctcatgctgaggcttttgcagaaaatcatttaatgttttctctgtgtttaaagaaagctccaagggcccatcaggctcagcctggctggcatgattttgaaacaaagtgcag

SEQ ID NO: 52933 - DNA, 1654 bp, Homo sapiens
tcccccctcagctgtcccaagtagctgggactacaggtgtgtgccatcatacccagctaatttttgtacttttattagagacagagtttcaccatgttggctaggttggtcttaaactcctgacctcaggtgatccacctgccttggtctcccaaagtgctgggattacaggtttgagccaccgcgcctggccctcaacatcttttgatgtctcactcttctgaagactaacctctttgcttggaattcaagaaattctctttctaaactctatttctgggttatgaccccttccacaccctcatcattttaattttaattggttttttaagttgaatcagccaacattcaaaaattgggacgtttcatatgaaattttgggtttccagcttctcttcccacattcacatatgcctcagtccccacccctccttatagtcatttcctgttccagggccagtcactgtcctgctgctgctgtttttctttcagtaaagttaagaaggaaaagtaaaatgtttttattttcaggagtaaacaaaagacagactaggagggccaattttttcaaatttgtttctctcaccagccctgtttcactctaggtttctgctggccctgcaggcattgagccactgacctaccacatgggcaaagagcaactcagagggagggatcttgtcccattcctgtttattgtgatgataacagcaattgtttattgagcccttttctgagctcatttaaccctaaggtgagtctaatcattcccactttccagataaggaatctgagccttaatgaggtgaaggtacccagtggagtgagtaagtgatgggtgtcactaagacttgaactcctgtctgcctgactccattgtaatcccctgtgtattcctagcagctgcccctagcaatgcccacaattggcaattaataagtgccagacaagtcaacttgaattccagagtcacagatgggatggggccaggtgggaaacttctaaccttaaagtgaacagtggcacatttaggatactcctgattcttccttccttcctttggtgcctgcctgggcacaagtggctgctgtgtgtctcttgggtggcattacccagagttcagttaacatgtgctgggcaggaaatctgctgtggctccgttttgcattaccatgtctttgaggtgtgtggacatggtgcaggcaccagatcttggcaggagcattttaacaacctctgtccttgttcgctccctgtagtcctcgcagtggccgcaggcccatctctccaacacagacccagcaactaattgggcctggataacaaaccacacagacacaagccccttcgcattcccctcctggactgcaacgtgggaggctttccaaagctgccaccttctgctggagccggagttgggggaaatggggagaggctgacctgcccaccctagacaggaacagggtgcttggcaccctctccctggctaggctatggacctgggggcccctgtggcaagagtgtgggctctttggtgtcaagagtcccctgtggacattgtcaggaggtggctgcagaagggagatttagtaatgaacaaagcactggctccccagcccagaacagtgtctgtaaatcccaccttgctcaaatc

SEQ ID NO: 52934 - DNA, 1011 bp, Homo sapiens
agacaccccaacctctgtgttcagcaccacggagagcagccagggccgggggtagccggtggcgccatctgcatgctggcttttctagtatgggtggtggggttattgtaaggtcttgctaaacaggcattcttttttttcaaatgctattcctttagaactctggtaggctagtaagaactgttatttgttgttgttcaaatagaataacgcatggtaaaagaaaatcaaggtaatagatggaattttctccttttttttttcctttccacataaattgttcattaacctttggtgccttgtacggcttgtctgctagggagcagcagcagatgacaaaacgagtgagcattccattgtcaaatgtcacacctgataccaagcatcttggttcggcttgtcagcctcatctttcacatcgcattttgtaagtaggattgtgttctgtatttttatcctgccaaatgtgatttcttaaaagtattttgtgtgttattatttcctgagttgtggagacctgcatacctataatagagccatattttctgctagtaaataaaattattcctcattcaggtgatgggaattaaatgtgtcacagcttggtggcattccctaaacaaccccagcggttccaggtgctctaccacctggatgtgtctgggaaggcttgtggtgggggtgggcattgacaaagcctctcccagacagaaaagtcgtgccaggagtgacctcagtgtttctcagaaaaatggtgcacttttatccatcactggggtatggagagttggctgggaacacctggactagagctcaaaggaccagagaaggtgaagagtgttagaatgatagagtcagaggaattgtttcacttgcctctgaggaatttgcctctgaacaagaaatgaggtttaggcaaatggaccccaaggatttaagaggtaagatggcatcttggacgtcacacagcaaatagaaaaatccagatggtcagggaggaagtgagctatg

SEQ ID NO: 52935 - DNA, 2055 bp, Homo sapiens
tctctggactcatagactgtccctccttgcttcaccctctctgatccactgcattgaacatctaagtccccagaaggcactgtgctttcccccacactctgggactctgcactggatttccttttttctttcctttttctttctttcttttttttttttttgagatagagtctcactctgttgcttaggctggagtgcagtggcgtgatctcagctcaccacaacctctgcctcctgggttcaagtgattctcctgcctcagcctcccaagtagctgggactacaggtgcatgccaccatgcctggctcatttgtgtatttttagtagagatggggtttcaccatgttggccaggctggtctcgaactcctgacctcgtgatctgcccaccatggcctcccaaagtgctcagattacagacgtgagccactgcacccggccggcactctatttctttctggccaacttctactcatactaaggtttcaatgaacatgtcttttcctccaggaagcatttctcaacctccatccccttctgagtcccacagcaccctctacttttcctgttgtagcacttgctgtattataattcttagttactttagagataagtgctgtaccagtatgggccatagccaggttgttcaccaccttatccagtgcttctagcacagtgcaggactcctagtagataattaataaatatttgttgaataaatgaatgcaatggtgaatatggtcatttgaatgtaagtccacctaactgccccggcatgcagctcaacactttttccattttgtcaatgaggattttatgaaggatgttgttagattcttccacgaagtcaagatgctcatgctgtctatggtggtcttctgacacaccagttctgcaactttttctgtgccaggaccttttagatttagtcttttgggcagagctggaatatttgtgggagtgagcccttctttctcaagcctaggattggactttacattcattgtcttgttcctatcatgatgaatttcttgagagagacaaactgtcttcttaaagaagagactggaggagagatcacagtcctcctgccttttctgacctcacccctctctccttcccacttgtccgtcagcatctcggctgctctttctgggagctgaaccaaggaagagaacctctgctgtgctgtcgttaataggctgagcactcaggacagctgtgaggcagaaatgtggctgggccattgctctgctgcccatcataggtcaggtctctgtctttaccacatcactggctcctgcaagggtatgtagacaactggtcaacatgacagcttggtgtaaagcagaggtgttgacagttaacctggagattcaggctgtatagacagtcaacggaggccatttagccctgggaatatatgcatcctccacaccaggttctgaggaaagtgagtgtgtgcacatgtttttgtgtccttgcaggagatgaccatatggaagtttgcttctctagcacagacttctcaaactggggctcaacagtctttctttatcccaagcctgatgagtgagtagtgactttcctttgtatcagtggggaaactgaggacttaaaggctggtcccagttcctgactgactgggctgatctgtctactgtaccaatgtgactgagagtgaggatggggcaggtttgcaatggagccctgagcttcccctcctgaacacaacagaactgagctctcccctgaggccaggcccctccttttcttgcttccctccctggggaaacatgacacatcatgagcagaaagagcctgttgcctacatgaccatttttcctgcccagtttaatagaggtgacagccgtctattttacttgtctcgtaacattgaatcagtaaataaaatatgggtgaactctcaggtttagctgaattatggctggtctatggggactgtgggctgggggagagttgagcaaagaaattgaatccctgtcttcttgcaagagaagcagagccttgcgtcttccttctggatccaggaaa

SEQ ID NO: 52936 - DNA, 1028 bp, Homo sapiens
ccttgtgatctgcccgcttcagcctcccaagagcaaagtatttaatatctcaaaataataataataataataataataataataatagttgtacctgcctcacagggtttttgtgaggattgaatgagttaatgcatatgaagtgcttagaacacagccgtggtaagcactcaatacatgttgtctattattcctactattatgatcaccatgcccactgactctggcttgagtttgttccctgtcctacactagagctctgcagaaacacaaaggcatttatttcttcagactaaagaggcttaattcctccagcatggcatcaaaagatgaccacagtgctacttatttattgaaaccagtaagatcatcacctcctcagatctcagctttggtgtctagttatacaaccccagattgtttcaggctttttagcagccattcagtctgttgatttatcctaagctgttgttctcatgagatacatgagatcttttccacaagtattgctgctgatctataacttttcttatcctccctttagtagttgatattttgagcctaaaggcagaacctatcatttatctcccagtaagttctatcattgaaccttcaggcagttattcttactcattgtttctggaccaccagagcctattaccatgtctccatgcttggaaagcaggtatggattacaccctcttctaaccactgcctccctcctggggtctgtgttagagaggttaagtggttattagcctatagtatggttggggttgggaatcactgttctgaatagtgaagcttttggggattcccattctgatgtctcgcatgcttcctgccatctgagcctgggataaacatatcctccctcccttcagccaggtctgccataaacacattaaaaagaaaatgagcaatgtcagagtctgatggctttattcaaatggtcttggatccactatcctacactttaacgagcttcagaattccactggcttccttatgccctcaggccctttatg

SEQ ID NO: 52937 - DNA, 2439 bp, Homo sapiens
tgagcgtttctttttgcccttggaggagtctgtgcacagggctgggtgtagggtgatgctagggagacctccagggagctgactctaaggaggccctcaaatgaggaccctttgcttgcatgactgaccatgagagggggtgcctccttaaatcctggccctgacccagcatctgaatttgcttctggagtatgcttttcctcccacttatctttgtgctccagagacaaatcctaattgagcatgatttggagagatcagaccaaattgagggccaggggactgggtttgaggacaacaggttgttcagattttcttttgtttctcatagccacatttcatagcagccatgcccctagagccgtctgcccttccttcctttgttttatttcctttggaaatcgcctccagggtccacactgcctctccctagtcacagctcagctgcccaggtccttctccttgcttcctttgacctttatgccttgtttactaacagtattgaccttggccatggttttctgggggtgagtcggtatctaggctttctctaatgcatgtgcattgtgcctcccccactagacaaggagctacccaagggtgtctcaggccatctctcccccatcacttccaagaaacagaatgattttttttggagtcaataatatatttcattgattctaagatgggatttttttttcacattttcatatctctgacatcagctcgtgtctcacatgtcatgtctaagtttacttgcagaattttttctttcttggcactccaagaaagaatggcatgtcttgggtctgatgaaatgtggtggatctatttttgaacgtgagtccaatgtgtacttgctgtgtgaccttggggaagtcaccgcacctctgagcttccatttcctcatctataaaatagaagtattaacgttaggttgaaccacgtgcagctattgttgacctacaaaaatcttgtggttgacccttacagtattgtctgcatagcgttattgtgaggattaaaggagataaagtacgtaaagctctttgcatagtgcccgatgcttaataaattttaggagaaaaaagagagttccccaagggtggggccacatctccaccgactctgagctctgaggctgtctgcatctcatgtgcccttggctttgtgctaacccctagtgccccatactccatgcagccttgtatgtggcatatgcccatcgctcacatacccatgggccctgcactggagttggtgggcctagcagtctgtaccaattattcactgtgatagggagcaacagaggtaccctttcttggatgctcataatgtcagctcccagacaccgcctggcccattatttatggggtgcttgttcttccctgattttgcagcattttgattaaaatgcattttgcatatgttcagagctgggaagaccctggttatgggatgttcttaaggggctggtccagagagtcttgatcagcccttctcagatggggagtacaatctcacctcctgggcaggccactggagactggagagggtctgaggctagaggccctaggggatagacactttagctctcctagaagacagcaggtaatgaggacagaggcaaaaggcagggaggagagagtccccatggtgatcatacagatcggagatgatgaaatggagtgagatcctgggggagtggtggtttcaactccaaattctttggtgccatgctgaatggtagttaaggatagcagagcagggaaaagcagcaagaaggaactaagattctggtttgtattaaaagggttccaattcataggagacaattaagtcttgtgctattaaagggactgatgcagacaggctgccgatggaagggggtttatagagttctcagaacaactgcagggatgagctctttaaatatgggaatgagggagacttctgcaaagcctttctgcatctgctttgcagaactgaaatatgctattccaaaaagctgcccaattgggcggaaaagcaggagcggggagccaaggactttccagggctccaggcatcacatttcctgtctatggtgaagaatcaaataatctaggctgaaaagaccccgggggtcattctaggcctctggttctcaaatattagcatgtgccagaatcacccaaagcactcattaagatgcagattgctgggccccatccgcagagcttctgattccgtgggtgtggggtgaggcctgagtgcttgcctttttaacagtttcccagatcatgatgatgccgctcatctgggagccacactttaagaactgctgttctaggtcaatggaggaccccactacatacaggtggatagccagtctctgattgaatgccacctgtaatgggaagctcaccaattgtaggccccatccatgctttactgcag

SEQ ID NO: 52938 - DNA, 1720 bp, Homo sapiens
gagagagagagaatctcatgctaaaatccaaacacaccaccttggctgggcccagtgccctctcccttttcccatcccccccatccctgggatctcagggttctggctggggctttaagaatttaggccctctggagtgtgctaggtgcttctgattctcaagactggcacctgagccggctgagcttggagctgaatgcttctccagcagccaggcatcgccgagcaccagcccggagagggctttcttgcaggtgccagaggggctctctgggctgaggagcatcgtacccaccccctctctttgtgcctcttttgggggctgaaatttcctcttagacaaggagatggatagctcagcagtgtgacagagtgttcaaacaatccgtcttgaatagatgaattgcattgctctgtctttttgtaattgtgtctatcagaaggagaggtcaaggcattgattgcttggatggtttgcaagtaacaaaagagagtgagggagagagcaagggagagagaatgattggattgtagtctgcgagaaaaaatgatcattgattattttatgtgaatatgtggaagatgtattctatgtatgattatcaaatgttgtgcattgaaggttttcaagccatattgtttggcattttattattattatcgtcgttattattgtttgggtgaatcccagtcttaacttacggaaggcagtttaatgcatagattctctcagccaaacgggcttcagtgacctcccgtggggacctgaatttccaggttacctgaccccaaatctgtagtggaggggctgctggacttggagccaggaggtctgggttttctgctgcatctgccaccagtttgttgggccatttccatcaaatcacacctctccctggcaccccaggcctcagtttctccatctgtaaactatttggttggccttaatggttggtatgttctgtggtttcaaagttccctttagtgcaggctggcgggcactgttatgccattgtaggtttcatggttagttctctcctcatgttatgggcatatgtaggattgagggccagcctggaatttgaaaagggaactagacagtggtggcagcagctggggaagcctggccagctcttctgtgtgttgaggagctcaagtggatggtggcgatctccagccagccagtggggaggtttgaagccaaatgactgcagagacataaagcaggtgttggggggggggagggggtggggggtggggaaaaggaagggttggcccagctctggactctgagcatctacagatagagcagaactgagctgcaaggtcctgagtttcctgaatatacaggggcccagcaggcaacagcagccgatccctggggagagacaccccctccctcagagttcccaaaccggcctcatctgtaactcctatgactggttcacccaaattatcctaaacattcatctcttgagtttgggagccgctgtgtataaaacaatgagaaatttctcacagtgactggtgatgcgctgaaacatcgctgccttgtaggagcagacagcagctgaatgaagatcaatagggttttcccccctggaagtaaatagcttcagacaagacctgggagtggcccgcggggccttagagagcattaacttgaggaatttctacctccacttttcagcccagctgctgctgttagccccagctttcc

SEQ ID NO: 52939 - DNA, 1934 bp, Homo sapiens
ggctgtctcacaggactgcagtcaaggtgtcactggggctgtagtcttatctgaaggctccactggagaaggatctgcttccaaactcatgcacgtgttattggcaggattcagttcctcaagggctgttggactaagtgtctcagtctcctgcctggaggctgacctcagttcttaccaagtgggcctctccagcttgtttcttcagaataagtacatgaagagccagagggacagacagatagacagactggaagacacacaatacacacctacagaaagagagagagagagagagagggagagagagataagagcaaacaaaactgaagttacagtcttttataacctactcttggaagcggcatcccatcaattttgtcatattcttttctttagaagcaagtcactaggtccgggatcatcaggagccaggtcagaatgcaataatatttattttgtgggtaagtcatggggattaaatgagatactaggtgtgagtacctagcatggtgcctaagctaagttgggctatatgctgaacaaatggactattattattgctgatgttgttgttattctcaaagcgaggctggcctggggctgagataggacagaatccaacaactagcctcagtttccattggcctgacatcatgagagtgtcacggactattaacaaccccacccaactccatctccatctagtcaaatcctgcctatttccctgggttcacttggttgccttctactctaggaagcttttctccaactggatgatgtgagctgtgtttctctgaatgaccccctttgttcacagggaagggagccaccaccccaggctgggctaactcgcatgaggacaccactaacattgtctgcgttccatttacgttagacaggcaggtctacaatgtttgaagtttacagatttcttggatatagcagtgaaaggtttgtattttttatctgtaaggaaaaattgtgaagtttacatcattgcaaaataaacagaactgtgacttctgtttcacaattggcgtggttcttttgtgtgcttttgacagttctagcatgttactgacagttacaagatttttttctccctctggaaaattgggggaggggtcacgtgacaccttcccactctgaatgctctgcttatgttaaagatgcagaaactgtgactcagggcagttaggtgactggcccaagatcacaaaacagttgaagcaggaactgaggtcagttacctgatcccaagactcatggtctttgtattatattcattcattcattcattcattcaataaatattctgtagtccttgctatgtgctagcctttgtgccaggcactagggattgagtgacgcatgagcaggtccttgtcccagccctaaagagcttttacattccccttctcccctgactcccactggattacaactttgtccaaatagaaatccactttctcagtacccctccttcattgtgtctgtctactatggggctttgaatttgaactggggactgtatttcaggagggggttctatcagccattggtgtgggtggaaacgtagcaggaaatggccttaaagtcccaagagagaaggatctgataagataaagaagttggatggaaggtggtcaaacggaagcccccatggaaaatggagaatgaggtttacagattaaagcaactgattggcttttaacagctgattcttctccacctccgttgctagccccaggtcactttcctgtcccatgcatggcacttcaggagttaaacccaagtcactgccttcctgcccagtgagccaggtgatgggattgcagttaatggtaatttgaacaagtttggtcaactagaaatacataaggagattgaaacatgaaaatgccctcggaatttatacaattgatatattg

SEQ ID NO: 52940 - DNA, 1610 bp, Homo sapiens
aaagaatgagaatatgtattaggccctagatacaacccagtggctctgttgctcagggctcccctgggccatcttggtcctcacttgggttcaggctggagaggtctggcagtaggcacccccagagagggaggtggtatgtgtcagctctgtcagattggaatctggcattggctccagcaggctccacagccactgtagctgggctggggtttgttctggtgggtgggtggaagccagagctctaacttccccatatccttggctctgagctgcgggcccagctttggaaagattgcggggagcaaacaccctgggctctgggaagttcaggcttggtgagaggttccagcatgaaatgggagaactttctttgttttccttccagccacaaaaccagagactgaaaaaggagacagagggtgagcaagagagagagagagagagagaaagaaagaaatagagagagagagagagagatggaattggtccctctaattgggtcagatgacccatttccattgcatctgtggttcctgatgtccagggaaggccctgggggcagtgctgggaggaatccttggcaatgttgggtcccatcactcagtgtatctgggcacagtgttattcactcagttcatttatccatttgcttagcaaatattcattgagcatctactatgcagtaagccctggatataacttgaacaagtcatgggtctgcactttctgcacattgcctacattgcaaagcccccaacggtggtattactcacatcccccagcccttccaagatagcgagctactccctgaaacctaacttgatggcgatattcccaacctgcagtggaccataccatggacatttttccacattactgtatcataacagttccttgtgggagcctaattctggcagtgtgtgtgttactcggtgaatcccaatgcagccattccttatcttacttggtgcagcctcccagaggcatcactcacacttctcgctccaccctagtggtgtgcatctcccaggactgcctgtaccatgcacactctttacaccatcgagtcctccaggggaaagttactctgctcacctccacctggatctcccaaacctacagagaagtattgcctgtggctgctggtggcagtggaaggggacaacataaaggaaaggagaccgagcagaaaagacagaagccaaagcccagatgctcctggagcaggaagagactttgcaaaatggctgcagctccttgcaaatgatgtatgaaatgaggagcatatgccgggagcgatttgtgtgcaggagcttggcttggctccctggtccctcctggcagtgctgtctgctaaggccctgcgctcccagccccaagcattctgggagtcctctgaaggtgggctccaggctcctcctccctccctcttcccaagacaaggtactgtacacagtaggtgcccaagctgtgtggcggacggatcatttctgcctgtcctggttctctgaagacagaacaggagggaggagggctgagtgagtctgagatcaacaagccaaatcttggcatttcccagatggggaagcggagtgcagagaggagga

SEQ ID NO: 52941 - DNA, 1076 bp, Homo sapiens
caggacctcgactctgctggcaggacacctcacccacagagtgttagttgagtgagagatgaaccatgcctggctttgttcatccacgtagcccagctcctagcacagacctggtggaggggctcagtaggcacactaggcatgaggtcagtgaagagacaggagagtggtggtggccatgagctgtggtgctgaccacatccaacatccccagtttccttggtggctggcaacttctagccaataactggtgctcccaaaatctcgtcaccttgaatgacccccagcttgtgttgaggaggggaagattattgtatgctggggagaaggcagtccaaacagctagaagcacaggccctgagccatgtggtgtggctcaagtccaggttctgctacttcctgtttgtgaggctttggcaagacctgtaatcccactgaacctcagttttctcctctgtaaaatgcagatgatgagaagaggctctgtctctccaaggtgagacgaggattaaatgagatgatgtgcagctggtttgacacacgccgtttttacctattttaacaggagtgctgagaaatttgccccagcctcctctctctcactctgggccccagggtgttcttgcccttttccttctctggccagcacagcggtctacctgtccacgtgttctctccttccttccagcttggctaggtggggatgctggtgaagaagcagatggcagccggggctgagtgtgacggtgatgacactgtgaaagggtgataatttattctgttcagccttgactcggagttggaaggagaaatcaattacttctgaaaggcaagactgagggtgacctccctttctgacctctaacaggcagccggcccttggtctcctggctcctggagaacaggcctggaagaccccctggggcccatccctgagcagggacttacggcaaggattgggaagtgaggagcaggctgcaggttcagccccagagagagggggctgggaggcagcagggctctggccccatgcggcagggatgccaggtgcaggagagtgctctcagtgtctttaa

SEQ ID NO: 52942 - DNA, 1020 bp, Homo sapiens
taagtatatgcctctaagtgtgcagctctatgtgtgtataagagtaagtgtgcactctcacttactctgtgtagaggagtatgtgtgtacttcgctgtgtgtgtcagagtcagtgtacacctgcacgccggcccgtgtgcatgtatgtgtatcctaggtggggtgacagggaagatgtgaaggaagattcggtgcagagtacgtgtttgtgtatttgagggtttttgtgatgcacaaacgtgcatgaagtgtctgtgaatgtgtctgggatgcttggggtgtgtgtgtttgtgtgtgtgtgggcccctgctgcatggtccaagggctgtgtgagttgtgcttctttggtgtgaacagggaaacctgggtagggaaggagtatgtgggtgtgtgtgtgcgtgtgtgtgtgtgtgtgtgagagagagacagtgcacgcgagtgtgccgagtggcaggaatgacaaatgattaatctatagaaatctatattctattcttccatgcgtccactccacccttctcacgcgcccatgcatcacctccggaaatctatcacccgactcccagccaaggacaggctgcgaggagcgagtgcctgccttattgatggacttgcctggtgctttttacacatttggatacgtggagaaggaaagctcactctggctgtgtcgttcatgctcttattcacttattcattcattcagtcagtcattcatccagcaaatagttctggagtgcctactgtgtgccaggaatggtcctgggtgctcagggtgtgatgatgaatgaggcatttctggcattaagggccagtgggggtcccagacagcacataggccactttggtagaatgtgcagggggctctggaataatacagggggtttggaaattaacctcggggcagggggcggttcacagaggctcctgaaggaggtgacatctacgggagctctgaagggtgatacaaccaaagggtagggagaggagagggtgcaccaggcaaagagattagcatct

SEQ ID NO: 52943 - DNA, 1050 bp, Homo sapiens
ctgaccatccttttggacacagctcagagccaataataagagtttgagtgaataagtgaatgagtaatgactgacattttgattgtgctatgacaggtgcagttcaggagaagctcccttctgggagtaggtagggatctgggtgcctaggtttctgggctttgtggagggtgagacatttaaagggtttagtttctaataaccagaatccaggatggaggcttggaggaaggtcaagggctaggtttttggcagcgcaaggtaaaaactccatgtttacgcagatgactgggatagggagtataggggaacttgtgggaaaggtgggcttaggagagtgaacagggcagaagctgagagtcttcaagtgctattgaggcagaagggggcagctcaggataactccaaaggcttcagtgaacacagggcactcacatagcctgtgggtctggaggctggaggactgtgtgtgtgtgtgtgtgtgtgtgtgtgataacagctctgaacttcggagaaatgcatgaaggttctgggcctgggaccccaagaggtatttgtgggggtctttgggagatgctgtgagaacttggagtagagggcatggtcccacaaggtgaggaggtgcctcggggtgcctggagttccaggtagggcagacagggcctctgggagggcagatgcaggggcctctgggatgttgggggaaggggcattccttcaagctctatcttcccagcactaattggagtggctggccagggaaaggctgggcttagggcttttcccccttcagttgggatgtaagagaatttcctcctcagcctctgcatactatagaaagcaactcacagagcacatgtgaaaccatgtatacccaactggtaaggccagcagaggtaactgggggaacccaccctcagctcgccttggccttcccctcagccattcacctgcaatgtgggggacccaacacaagaaatagatgaacaggcatctgccttatggggcatggggttgaactcactggggtgggagaggggcccctgggga

SEQ ID NO: 52944 - DNA, 1091 bp, Homo sapiens
cacacacacttacacacctctactcttacacgcttgtagaagctccaggatcctgaacacgtatctgaaccccaccaccccgcacttatctcctcacacactgtagatattaacatccccctcctgccctggctcacagacacacacgtgcactcacacatatgagcacacgtggacacctctacaccctcccagacgcccccacaccctcctgaagcacaggcacatgaaggtacacccccacacgcctgtgtgaacccacacactcctcccgaacccacacaccatgggcacacccctcctcccagcggcagctctggacctgcctgtgcccacccccgccgtcgttccccgtaaatgtgcagccatcccgcgtccccgcgctgccgcagcccctcactcggggccctcaaagagcacgcttataaaaacattcttcccgtgatggagtgcttcctttgggcttcttcggcttgtaacagattaaaggcgaacaggcatttgtcatggggaagtgtacccagttgtgctggaaaatggacttttcgatgagcgtgagagcttgaacctgtcacagaggggagagcctgtgttattgcagcctgccgggccgcggtggccgctgcggcttatcggctgtggcaggcatcacctacgactgcaaggatcccattacggtaagtaatggcttaatcacagccagtttgtaatggagatgacctctccgcgtcccgctggccttttcggatggattgcacctctccacaccgtgactaacagcactccgttctgctctcctgagaaagggccacggggctcagccggacacgacgcagacggctccggggaggctgcagagaggggggagcgagggcaagggcaacgggaggaggaagggcccgggccctgggcaccaccgcgcccaatgtctcacacaggcgggaagctgagacggggagagggcacgatgccacacgcggcccccgtcttttcaagagtgatagtgacagtgagagctgccattgggtaggtgccaagagagtgtttgtgtttcccaggctttatcttgctccagtcacgggaagtagaat

SEQ ID NO: 52945 - DNA, 1063 bp, Homo sapiens
tttctttatttcttaataaatattacatgtaatattacatattatttatataattatattataaatgttatttataataagacatattttcctatttttttttattagtgaggcctctcctaaccaccttatgtaaaccacctctcccatctctctccccttcccctggtttaccctgacagtgtacttaccactgcctgtcatcccactgtgtatttatttattgtcttgctctagacgctgagtctgtgagcacagaaaccatgcctggttttgctcaccatgctatcctccatgccccagccaatttctggcccagagtagatgctcattaaatcattgttgaacgaatgctcagctgtgggactgggggttgggtggctgaggaatggcacctgggaggggttgctgaggaggctgtgggccctggtgatttctcattgacgcttttctcactcaatccttgggtcttggagagatgggaagtggcagttgactctggggcagctgtttaagtctgacatagcaggagccagaaaaaaaggtggccgtgcatgggcggccgtcctatctgccagtcagagacgctctgctgcaaggacggggagttggggagggtccctggggccaccctaccttccctcgtcctccgttttactataataacatctcaccttcaccaaacactgactgggtccaggcgaagttttttttttgtttttttttttttgagatggagtctcactctgtcacccaggctggagtgcattggggtgatctccgttcactgcagcctctgcctcccaggttcaagcaattctcctgcctcagctacccgagtagctgggaccacaggcgcccaccaccatgccaggcaaatttttgtatttttagttgcgacgggggtttcaccatattggcgaggctggtctcgaactcctgacctcaaatgatccgcccgcctcggcctcccagagtgctgggattacaggcgcaagccacctcgcctggcccaggcacagttctaattgccttatgtggattaactcacttaaccctcgca

SEQ ID NO: 52946 - DNA, 1516 bp, Homo sapiens
cctcttatttctcgagcctcgccgactgtgtgccaggcactgtgctcagtgctttacattggtgatctggttcggtcttcttgatagtcctgaaacacttgcattatgatgatcagcactcccacttcacaggggaggaaagagaggtgcagggaagttaagtaactaggccaaggtgatgctgctaccagcaagtgggccaggacctgcgctgacaatgtcaccttgctgtatgggagcccggtgctctgtagattcacacagaggctttaaccaattcaaaccctccatggtgggttctcatcagtgccttaaaggaatatgtttgcagatggtaccaagccaagctggccattggtgcagtgtttctgcatgagtctccccttacagggaccagggacaagggattggcttccttccctggtgttttgtccagagacagatgagcgaaaggggttggtctgagacaacagccctgatggtcactctacccttcagccagaggcaggatgggattgtgatccagaggtttagctgagccttagacatcagaaggaagctggggtcccagaggagtgagctgcaggcaggagagcagggtctggggtgagtcctggaatcacagtcaggggtctgtccagggcagtgggcactgatgagggcttacagatcctgggttggaggagcagctcagagcaccttgtggggcatttatcttcgtcttcatgtttctgatttagctttttttttttttctccttctgtcctcctctttgctctcttcttcctcctcctcttctttcaatatggaaatatgattgtttttctgaagataaaagttcatgctctttgtaaaaaaaatccagacagtataaaagtttaaagacaaatgtaaaaataatccatactccccaccatccagaaataggccccatgacatttgggtgtgcagtcattcagacttttcctgtttgccagaatggtgtcagatcatacaaactggattccatcctagcttctcactttgcaacagaccatgattgccccagcagtatctgtagaggtaccttgtcattccatgctgtatgggcttccatttttggatgcatcattgttcatttagatcttattggttgtacttcttttctaaaatacagatgtgtgtgtttcaagggacttggtatggaaaatactcatgtcctccggccacacatgtttcttcctcctcctctctgaactgcccctggatagaggtccccagggttcgagatggacaaagagaggaggaagaggctcagtgtcctcagagagcaggggagtgagataatgagagagagagagagtattccgggcacccagctggcaggatgactggatgtaggcgagggggacatcgggacgcgttacttgagtgggcagcagagctggggcgatgcctaggctttcttgggcaacttgacattctagatgaaaaaaaatccctgggccatgagagaatgagatgccaaacttcactt

SEQ ID NO: 52947 - DNA, 1076 bp, Homo sapiens
atataactcacaagtctattggaatactttttacatttctaagatattcttggaatgtgacttgtgggtgcataaagaaaaccttggtccgagaaacacagacatgggttctagtccctggtctttcaacttgctgtgtgatcttgggcaagtcccttcctctctctgagcttccattttcccatctggataatgaagggattggaggagataatatgtaagaacctcactagctctcaagtgagcatcatcacaaaatcattcgtgtttattgaatgtttctatgtgctatgtatgtgcttacctgccttatctcactgaatcctataattatttgcccatcttttttcagaggagacaatgacagctcagagatgttaggtaacacacctaggatcacacagccgggacatggtggggcctgtctgattccagaacctcggtggacccttctagaggaaagggactgaagaccaggttctcactctcgaaggcatcaacagcttttggggctgctcattgggccccagtgctgtccttgctacttaacagtaggatggagtcagtgcgtttattaaaactctgtggggtttgaatcatcttgccctgtcgtcagataacagatagtccataggcctgacagtcagacatcatgccgtccctgaacctcatttatgtcctctaaatgccagagctggatgaggtcctttttctttcatgggaaggcccagcatcctaaggaactgcagtcaggtgagtctttttcaggcagcactttcttcataaccttccaacgtgtgaaatggccctttcacgacatgctggcgccggggattttttcttaaattaagaatttgatacattccttcagttcccctctaggggttacagagagcagagaaagtgatgccttgagttaatgtgcaggtgtggttatgcattttgaaggagctcttgacaatctccaagaaaaaaaatgtccctaaatgaccctcggtttttggtgagaattgctaacttgtataagtgctgaagggaagtccaaagcctttctctttgagggtcaaacgacaaag

SEQ ID NO: 52948 - DNA, 2721 bp, Homo sapiens
aaaaaaaatttacctaaactaatatgtccaaaatatggtcatttccatatgtaagcaatgtaaaatttatgaatgagatgttttatatattttgcctatcctaagtctttggaaaccaggttttatacttaaagcacatttcagttcagactagccatattttaagtgctgaatagccacatgtggttagtgcctactgtgttggacaacacagaatcagaaccttttcttcaccctaggaaattctgatttctgcctgcctgtgagtcaatccccttgttaccagatgcaactgcttttctgatttctatcaccatagattagttttgcctgttcttgaacttgtaaagagctcaaactcgtgtgtttggtttcttttactctacataatattttcgagatccatgttgtgtttatcagtaatttgttcccttttcattgcagagtggagttccactgtctgcctatgccatgtttgtgtatccacctttaataaatatttgtttttgaatgaatgtcagtgcaacatggtaagctacataaggagccccgtgcgaaggacaaagtgttctatggattcagggtggcaggatgacaagaattcagggggttggatggcctagggtggtgttctagaaaagcggggcatttggattggacttaaggagatacttagagtctcgataggtgaaagtggaggaggggaggcattctacatggaggaagtgtctggagcaaaggcctggacctgggtggtcaggactggatttggagaatgaaagtctagaagaattaaggtaggctggggccagatctggaggtcttgaatgatgccataaaggagtctgatccttccaggagtacgatcaattgctgctctggagcagggacgcagccctaggtgagaaagatcttcctggaagaggagacgcttggcacaggtcttgacagatgagacaaggtttcactatgttgctcaagctggtcttgaactcctggactcaaacaatcttctggcctcggcctcccaaagcactgggattacagatgtgagccactgcccccggcctggatgagcttttctgtgattttcccagcatcccttttgctgctcatcttcttgctttggtccgggttattgcctctatccagaccatccttcaagcatcttccaggaggaaagcttcctgtcacttccctggccctcatccccatgatgtggtttcctccaagtcaatctcatgctaatgtttttccattacagcatcgtattaaccagaagctgcatttacctggaccatacatcagcccgagcctgtctccagtgaagagttgtgtcgtgctggagggaccattcatcacacctgcccagcttctggaggctctcctgggctttggtgtcttaggtcagagctgtcacaaacatcccacattcaccttgtccctgtgaggggagggagctccaagtactctctggccttgagaaatggcccctgatattccattgcttcagctatgacatctctgtagcatcacaatctatgcaacttggatagagagaggctatgggtcacaccatcaaatctgattgaaattcatcttcaatcaatcatgttgatgttgtatctggagctgacctggaagcctgaatattcctggtcttatttacttctcacaccaacccagctatccccatttcagggattacaaaatggagcactgacttgctcagggttacttatgctgcagaaaaggggcagatccagggtcggaacttgggtctcttgactccaacaccagtgctcgtgccacaaagccagctgcctcagtgagtggcttcctggctggatggctggtttctcagggtactgacttgctttgaatgtcctttctccctttgcctccccagagggcggcttatttctttaagctcaagaagagggaaaagaaaaaaggagacggtgaaataaatttattgccatgttagaaacattggattgaagaattgatccctacagctaagtaatttccctctttcgtgcaaaatataaataaatctgtatggcttacgctgaacgatgcgcccgggccgccggctggatttcacgacatgaaatgcccttcagagtcttgggcttcctctccttgaccccaccaacgaggtgttctaaatggcccttgtgttgtccctgaaggagggatgttggcagctccctcgtcttgcctgctacagttgggcagacttagggatgtcttgcagagtccttccacagctcagctcgaccctggcaggtgtggcccagaacggctgatttccagaaccgtaaatataccagcttaattattactgttattcttttctctaggcaaaaggggaggaggtggagggtggggggttggtatctcaagtgtgtgattatgtaacacagagcactccttttccctaaaggtttcatctaatttctgttaagagatggccagtgtggtgtgtccaaattaatcacggggggaagctttagtcatcctgctctcgttgtggtttaattttagcatgtttccctggggtagccctccttcccagcctctacctagtcttaggtaattacaagcctggaaagaaagagggagtgttggctggcagatgccacccactccttggctggctcagagacagaacttggcctctgtactctccttctgccaagtgggctcctctgggct

SEQ ID NO: 52949 - DNA, 1039 bp, Homo sapiens
aatttgagctttattctaagtacaatgggatgtcattgaaagtgtttaactagaagtgtaacatgatctggtttatgattgcaaatgatctctctggctgctgtgaggagggtaaggtgtatggaggaggcaagagaccaccctaagccatgtgtccagactcagagcccagcacagtgcctggcatagtagaggtgctcaggagctgttgttcagccctccgtagctggaatgaacccacccttccctgtatcccccaatactctctttgggccctcttacctgtgacttggtggtaacggtgctcattatactcctgctggatttgggattcttgagggtagagacctaggtccttctatatgtctcctgggcccctgtaggctcagctcagagcagaagtcaataacctccctgaaatgaattaatataaagggtttttctacagctgctacaagttggattttcacttcagtggtctctaatggatccagacacttaagtgacttctaccaggtcatggggtggcttcctttaaaacctcatcagcaaagagggactgcttgagtggttcccctttagtcctaagatgcgtggaagtggatattgcagagagagagagctctgaggcaaggagcaactcctctacgaaggcttgaagaactgggcaggaaagccagctggagcctatttacaaacctttcctaaaaaactaacaaacatgagtaaacccactgtggcaggaacacctgttctgtggggatgtttcctaacactttacttcaaaatatctggaaagcaaaagcagcctgtacatacactctcaaacttaaataagcaaatctactttttttggacgaattttgactaccctggttctcacactatttacccatgaggctcagagtatttaaccaaaaaattttatgacttacactaggattatatccccaaagagcaggccaaaaatggggatagactagatccttctatccctggaaattttatagaaagacaaaagcttttttgtctcatatta

SEQ ID NO: 52950 - DNA, 1066 bp, Homo sapiens
aaaacataaggaactcagccacagagcaagggtttaccgtcattaatgaaaaatgaatattctttatctaattacacagcataattaattggagtctccaaccatggaggtggaggcgggcagaggaagccacaggaaggcagaggctcctgttcccacagaccccaggaagggttggagccaggttctgggatcctcttgaggtctcctcacagcttagggcccaggccaaccctggcccaggatgcagaagggccgggtggggagcagactcggccccatctttgatgctccacagccgtgggagcaggttcctgcctcgccccagaggtctcttcggtggcagtttgagcctgtgtcagccaatctgcatcctagcatttgattctgtattcagtaaatttatctggcacctcgtgtgtgccagactgtgaatgaaacagatctaagccctgcgcttcggaagggcacgggtttgaatcctggctctgctgctttttcactgcagtgatcttgggcaagttccttcattttctgtgtctcagtttgctcatctgtaaaatgggatgaaccatagcacataactcagagggttgttatgaggattaagggaattaatattcataaagcacttagaacagtgcccggcacatataagtgctctataataaatggtttttttctaaataagaaaacaaatcgggatgggtgctatgaggaaaaagaacaggatgtattaaatagcaagacagaagaacacgaaaggactggctttagaagtggcattcagagggagagtgggaaggggatgtggctgcctgactgtgccccctccccacctgccagccccactgttgccaccaggtctggatatgcaccttctggtgtctctaccttcctctccatcttccttctggggacttcctaggtcagcagcacgttttgactcgccctctgagtgcccccaaaacattttgcccaggcagggagttctgtcaaggcccagctgtctacaggtgaggccagcacagagcacatgtgagaaggcatcttggagatggtgtca

SEQ ID NO: 52951 - DNA, 2532 bp, Homo sapiens
gtaattgccctaaaggaaatacattaatacactgagataaattattttttatttttatttttgagatagggtcttgctctgttgcccaggctggagtgcagtggtgtgatcatggctcactgcagtcttgaatttctgggatcaagcaatcctcccacctcagcctctccagtagctgggactacaggcacctgtcactacgccaggctatttttttttttttcatggagacgaggtcttgctatgttgcccaggctggtctcaaactcctgggctcaagaagtcttccctcctcagcctcccaaagtgttgggattacaggcgtgagccaccgtgcccagacgagagagatcgttttagataatttggtcagaacattcagtcctctccagaaccttatggtgggttcatttgctgtcccattttccagatgattatggtgaggcttcgagggattaaatagggagccagaaaggagccaagcagtaactcagattcagggcactggcctctaatacctgtagtcctgctcactgctgtgaggctccctgtgctgtgctttggccaggcaaaagagctttctatagggcttggggtgggtgaggtctgtgggtctctcccagaggatccaccctgttctttgttgcaaagcatcaggaggaaatctcccatgtctctgactcccttgctgtcagccttcagggcccggtgtgtgcacgtgtgtggcctgtgtacccgtgtggggtgtgcgtgtgcatgtgcatccctgcactcgctcatgtgtgattgtgtatctgtctctctccttccctgcaggcttctgcttcacagaccatcctgaccttttattaggtcactttataattgattgaaatgtcccaggtaccttctcttaactccagggtgattatgacaattatgatgattatcaagtaaaaaaataaaaaagagagcaagagaggaagggggctggggactgggggttgggaattgctggagagctaggcagtgctgtcattaagcgacattgtgtgagattgttcgccttcaaaaggcctctgtgaaaaggagagagtgtctttaaaaacaaggcccattatgcaggcggcacggggtgcacagtgctggtgggaggaccatggggtgtaattagggcagtgacagctggaattacacagcgtctccgcagcggtgccgcctcttggtggttggggggtggggttgggggggtggttggaggaggggacaggtaatacctggcaagttctggatctttgccaggagctagagtcctttggcgagccagggtgacctgggattgggcagaaggggcagggagcgtggggctgccagagccatttatctctaccaggaaggcagcctcttatttttggaagccttttatgatggctcaccaccccttccaggctttttgagcattcccacccctacagggagttggcaaaggaaagccaactgtgtggaacagaggatgcagataaataatctcccagccccctctgcacaggagtgcaacagcctccactcagctcttctttgaggaagggaagctgcacctcctgctggcctgcctggtccctgtggggcaggctgatgcttatctgcagggcttgctccagtctcaccattccaaaccacagggtgggattaagcagcattcccatggcaggtggaaatgtcggatgcctcaaacccttccaatctgcaacagaatgggggttaatgagtgacctagtctctcctctttttccttccaacacagggcccctctagagcatcctccagacctgtggtcccatagcttccgcttatacaacccccagcccagggaacttactccgtatccaacaggctctggagcctgactgtttgggcttaaatcccgccatttattatcaatgtgaccttgggtgagtggtgagttctgtcacctctttgtgcctcagtttcatgaagataataatactcatctttatgccataaggctgttgtgaggactatccaagacacttgatattaaggacttaacccagtgcctgccacacaatgaggcctcgataaatgttcttccaaggtagcttaagcaaattttactggaagataattcttttcttgcagtgagctaaaatctggaagtttttctattgatcctggctctgcatcctagggccatgcagttggtcattcattaattcattcaataaatgcatattgagtgtctatgatgtcaggccttgtgctggtgagggccttgtctgcagaaagttgagatggaattcctggtctgcgcttctccagcccctcgtcccctgctctgcaaagacactgtggtctgtacaagcccagtgggaggagccaggccacaactctggttatgacttgacctaagagtgcatggagaggcaggggtgtttgggggtgggaggggcagtgacagcccaaggcctggggcttttccctctctcagagccactaggagaggggtccttagcactcctcaaccccaggaac

SEQ ID NO: 52952 - DNA, 2053 bp, Homo sapiens
ctaatgtgcatgtgtgtgcctgtgtgtgcaagtgtgcacatgcattggagatgagagggttgttttttttttttttttttgagactgagtctcgcgctgtcacccaggttggagtgcagtggtgcaatcttggctcgctgcaacctccacctcccgggttcaaacaattctcctgccttagcctcctgagtagctgggattacaggcatctgccaccatgcctggctaatttttgtatttttagtggagatggggttttaccatgttgaccaggctggtctcgaactcctgacctcaagtgatccacctacctcggcctcccaaagtgctggaattacaggtgtgagccactgcgcccagcagatggcagggttttgggtggagtttagatagcactggcaggaaggagccaggcaggaggctgtggcccagtcatgggtggtctaggcagaggctatgagaatggattcagagacgacctggaggaaccctctggactggtggccagttggctgcagagaaagagaaccagactgatgttaggaccggatcttgtataaatggcagtaggggtggcgtcactgggccattggaagtcaggactgggtagcgtcttggggatgtggcgtggagaggggagctgggggttttggatctgtttgccccaggtggaggtgaagggaagccagggtcagctgcccctggggcacagaatcacacttccatgactgaaaggggcagggtcaagatgggctgacttgagaggctctcagcctgcccactctctccctctgcccccagttttgagagggatttttcttctcactctccttcccctcctgtactctctaaggacttactctggccttgccagcctagttttcaggactctgagccagaatgggaaaccaagcagagaccagactggagggtgacacaggggtggaggttctagctgcagggtccatttcagggctgtcttttgctgtggacaatggaagtacgagggaaattagagaacaaaagagccccaaacctcaaacgtttacatcaagaattgctgagaaagaggaggagaggggaagaaaccaagtgctgggtgagaggggcaagaattttaaggtttggaggatgtgaggttctggggaaaggaagagaaaagaggaaagggtctttatcgaagagtctaatggggttttaactggatcctttttagactttgagagattcaagcgaagattggaatttcctaattgcttttggccatcagactgtttctttgcctgtagtaccaaggcaagactgggccacgtggggcagaggaattcatttggattaaataagaagtatttcccgcccctttcacattttgtttctgaagacgggatgcatgtcaaacagatgtacgcattgttagtaaatgaatgatggaatttaggattagtagtgtcagagatagcaagaaacataccagttagcatctcggttgaaggaataggaaaccacttaaagtagctcagttgtaaggggaacttggctgtaaggacattgagtctttcctggagggatgtggcaggtcattgggaaagggctggagctggctgctggagatgcgctgtctcctctgtctctgcttctcactgcctgtcttcacatctgtgtcttgtttctctccttccctgcagtccagcttcctttgctactctggtccatgtggcagggaatcagccccttcagctctgggagctacatggaataacaccagtgtctcaggaggagcggaatgtttccctctgttccaatcccaggttcctgaaggatggtgctgattggctctggcagggtgagatgccccaatccccacccctgtggctggtgaggtggagggggcaggattactgggagcccaagtggctgcgggagcctctagctgcagccccaggacaggcagcgaagagctgtccttagagactgctagggctatgcaggcaactagtggctgcttcctgagacagtgctcctttcttgagtgattaattaccatcccagtcaa

SEQ ID NO: 52953 - DNA, 1014 bp, Homo sapiens
catggctggccaattttttttttgatttttagtagagatgaggtcttgctatgttgcccaggcttgtcttgaactcctgagctcaagcaatcctcctgccttggcctcccaaagtgctgacattataggtgtgagccaccacacctggcagtgttcattactgttattagctgcttctgctgccagaatgctgactttctcgccattggcacccttttccatttcaatctctcctatcccaccagcactaggtacccagaggcccataataggtgctctcaacctcttcatctttcagagactcttgtccttaaaacgttgcctctggcccttttgggcaactgaccaaggaggagcagagagttgttattgtcctctttcaatgagatgtcacttcagttttaactgtgccttcatgccttgacccacaggtgtgactaatggtgggaatgaagctatttcaggggcagaggggtctttttggtgctggtcagacaaacatatccagaagttatgttatctactatgccttcgtgtgtggacactgatgatgagtataaaactcagactaagagaagatctggaacttctcacttgggattaagagtggggtgctttatgctcctttggttgagaggtcttttgaggagatctgcagttctcacaataggactagggtacccaggcattgttccatctgtccctctctcctgcccccaggttctgagaatgcagggagacaatggacaactgcctgatgcatagcacgtgtttagtaaatgtggaagagagtaaggagaaagccattacctgaggatcaggaagcccacattcaagtcctgcccctgcctttaccaggcgtctgctcttagacaagtgacttctcttctctgggcctcagttatctataacacagggatgataatacttgactccttcagcggaccaaacgtagacccatatgttcacttggttaatgcagaaatagaagcccagactgcagaaggggcttgc

SEQ ID NO: 52954 - DNA, 1120 bp, Homo sapiens
gagaatgatttccaatttcatcttaactatttcttgtctccattcttacaacccttctaatccatgcactatacttcctcaaacatacaatgcacatattacacccctttttgaaatccttcagtcctttaaaagaggaaatccatatatagatgaaaaccatggcatagatagccatttgcagtctggccctgacttcttttccagtttcactccttaccattcccctgtgctctaacaagatcttgcaatgcaccatttcctgatattccagactttcccaggcaatcttgtcctggtgcatgctatttcttctgtctagaatgcctcatctacttccctctcccagcctttttctctgcctagtggactcttctttcaatacctttctcaaacgttgtctgctctgtgaagttctatctgttccatgttgggtttggaatttccactgccccttccctcactccaccagcttcctgtgcatgtctgtatcctgaaatctttaactctgttttgctctgtctagtaattacctgtttacttgtgcaacagtgttccatgcatccctgcatcttagcacccaacctaagacaaatcacaaagcagggaacttgctgacatgcactgtgtgtaacttgcagtgggtgaagacctccagccccctctccctaccctaaggcagcatttgctctatcatcatatcttgccaagtgaaagcagccttcaccttttaaacgatggcttttctcctccccacagaaagggttcctcattgaaattcaccaggaatgggcagtttctgacagagtctcttggctggcccgtgatatagctgccaacacccagcactcctggaagcagaagggcttttgttcataagccgcaagcatacattttaccacttcccgagatcccaggggaaaaataatccttcccctttttccattggcctctccaaggcccctctggcttcccttttcttggctgggaaaatgaagggtctgggggggcccccagtgatggtggaaatgggggtttgtgagaggcctgttcaaagttggggttggggaaagagctggtggactgggaggggttggggacttcaatttagaccagggga

SEQ ID NO: 52955 - DNA, 1011 bp, Homo sapiens
gccagggaccagtcatgcaagggccagcactgattctcagagatggagatgcctactggtgctcctatagactagctgcaggtccacataacatggctgtcagcttcatgtcttccagcatagctgctcatctcctgtgtgcatctgctgctctctgttaactgggctgattgagagacacccaagactaatctcactaattctcagcaggcagtctgagtatgcagtacagggaaagcaagcatgagatacatgtactacccctcctgacccagcacccacgacactctgctaatcaatcacagcgttcatccccactgggcccagatatggtcttataatccttctcaaatggtaatttaggtagacaccaccaatccatcagagttggcatgtaggatgaaatatatttgccatcctagctgcaggtgatatgggttgggctctagactcatcccttgccggtctcagatcccacatcctagctggcctagaatgccaggcctctctgttggtcttggagaatcctcagacaccatccatctggttagccaagatgtacccctgagggtgatcctaggtctccttctttattcccccatactaatttgcccattcttcagctaaaatgtctgcagcatctttgttctcatcccaggctcactttagggatcccagatcagaccctcattacctctagtctggaactgccaagagtctctcttttttttttctatttatttatttattattatactttaagttttagggtacatgtgcacaatgtgcaagttagttacatatgtatacatgtgccatgctggtgcgctgcacccagtaactcgtcatctagcattaggtatatctcccaatgctatccctcccccgtccccccaccccacaacagtccccagagtgtgatgttccccttcctgtgtccatgtgttctcattgttcaattcccactatgagtgagaatatgcggtgtttggttttttgttcttgcgatag

SEQ ID NO: 52956 - DNA, 2148 bp, Homo sapiens
tcacttaagcccctatatttctgtagttgttcaagagcctttgcacacctccttcttagcgtggtctttaagaagtcactctaacagctctccagctctgtttccagaggaatgcccatgactttgacctatttggggtttccctgaggggttcacatctttcaagagtccagtttgttggtgggtgatcctgtcattctctggggtgcacatattttagggccagggcctagcctgggacccaatcttgattgtaagtaggccagcgaagtctgacctgggttgggggagggattccctgcttcccctcagcccagtcatggtccccacctccatcatgtccccagtgccctgtacacatgaatctctcccagctcctctttttcctctccttttgcttgtgactgcttgagtgaatcagggctgaagatcagaagtccccagtcaaggagctttccccactaatgagctctccgagggcctctgacagcccctccctttgccccgccccaccctgttcatttatttataacacagggcaccatcccccacatcgccagagaagaaagggccaatcagcttgcagtgctgccaatcaacgtgagaacgggggagggcagaagaggatgactcagagaactcgcgtgggggcaaagtgagaagtactataggctctataatttatctcagcatattttcatctagcccaagcctctcacattgcagatgaggtgtctgaggcccagagcagtaaagtgacttcttaaatccacacagccagtgatgaccaagccaagaactggaacctgggtgtgttgattcccagtccagcacgatttccactacagaacgtctttagaatgcatttgtcttgaagactgaagtgaggtctgtgtttcaattgacagcttggtatttttctgtctgtcaacactttgataaatttagaagaaatggacttatgttggcacatctgcgaactagcgaaaagatcaagattgtcactgtgatggtatcttcactctaccacgttggaacaaaatagcaggtgacatgaacattttcaaggtgacatggtgtctttaagttgtaacagattctaacataatttgacttgtgggtagaagttacgatgggtatgcctgtattgagttgacctgtagatcagagtcactattccttacataaggtgcatagcttttcccactattgacaagacacctggaggaggtggagaagtcagtctgtgctttgaggggttatcattgtcatttataatgatggatagagaggcatttggtggttagtgttctagttggacataggccaggagaagcagaatatggcacagtctatataagcctgacatcctaggccttcaaaatctccttttccatccatggatgcatttctctttcaccatcaaacactggaggactggagatacccaactgtcctaggcatgaagagtctactggggctatttgaagatgatattgatccaatttcctgtactaattttttccccctacacaatcccaaaggccaaagggtaggagccttgggggcttcctctgggggtttatctgatggattagtgcccatgatcctggcaggaattgaggagggtgcagaaggggcctgagttcagcagcctgagtgctggagtacagaccacttgagtggagaggacttagagggtggttttttcttacactgtttccttacatctgagagcagaactgactttccccagcaagattaagcccattgaaatcttcctcctgaactcaggctttcctactggacacccccatgcagacgtccacatcatgtctcaaaatcagctcattttcctctaaccttgctcttacccccgtgaaccaaaacaaacaaacaaacaaacaaacaataacaccagtcaaccaaacaaacaaaaaacaatcactcttgtccaggcctggttcagtaccccggatggatttgtctaaggtgccatgggtgagccactgtcaccttagaagatgacattgaagcccccatttctcacttttagctttcagcccccttgctaccctctgtatccctttgccttttatctagattctccatgtatttttttaagtttctttgacttattgcctagtg

SEQ ID NO: 52957 - DNA, 1596 bp, Homo sapiens
gccttcttttgaggtggggttgcttctctgggtttttggaaacaagatctggccctgatggggtgggctgcagtaagtgggcaagagggaggttggttagtgtaatggtcaaaatgcacagttttgggagctacacagcatttggttcaggtccgggctaggtagcatcttagcagtgtggccttaggcaggccacttaacctcatctgtggaatggtgacagtgacatccacctcactggattaaataagacaacatgcggagaagccccaggcacattgaaatacttacatgttcttctgtttccccagccagcctcctgcatcccccttggcaaggatcagagtaacatggagacctgggtaggatttagatagtaatgataactgccccttgcaccacattctagaacttaccaagtactttcctgtcctttatctcatgatagtatggggcaacactgatgggaaaactgaggttgagagaaattcagtgagttgctcaaagtcactcactgggacataggaaaggggaggggtatacttctgccctgagacccactgtgccaactgattgctgctggtgacaaagccttctgtgttagcccattttgcattactataaaggaatactggagactgggtaatttataaagaaaacaggtttgtttggctcacagttctgcaagctgtacaagaagtgtagtgccagcatctgcttttggtgaggcctcaagaatcttccaatcatggcagaaggcagagggggagctggcatgtcacatggcgaaagagggagcaagtgaggggggagatgctatctcttttaaacagccagctctctcatgaatgaatagactgagaacttactcattactatggggacagcaccaagctatttattagggaactgcccccatgacccaaacacctcccactaggcccacctccaacactggaggtcatatttcaacatgagatttggaggggacaaaacatccaaaccgtgtctcctcccaaaccccttaaagacagaatttgtgagcccacgtgtggtggggtggagcaataaggagactcccagggaatttctgcttggtctgggctcctatttagctagctgatgtgtaggcaaggatttctggactgggaagctgttctctaccattctgtttagggtgcactggtcagggtgggtgtggaggggtggctctgtttctcctgcatctgaccttttggcctggcctcttgggtgcccagccaaggcccagtgcccctccctgtggctgattcaccacctccagctgtgtttttgggaaatgaatggagaatcaggctgccaggctgggaaggactggggcaaatagaccacacatgtaggtagcagttagcataactggccgcatggttctgggcaggcagctggcagaggtgttaggccagggcaatcatgaattggggcaggctggggggagtcctggtcaggtaggaagtgaagctgggcaggcagctggctctgcagttggctgaggtcggagaggacatagtgtgggctgacagctggtgtggaggatggaggcggtcaggaaccagcctc

SEQ ID NO: 52958 - DNA, 1056 bp, Homo sapiens
tgggcagtgactagagtcttagagcagataaagaatatctccatcatggcagaaagttctattgcacagtgctgctgtagacctttggtgtggaatgggttgaactccaaggaggtcccacacttctctagatttgggtatggatgcacctgtgctttccccaaattcttattcagtgtgttgcacaaactcctctcctgttggcagaaagagcccagctctgtgccacctcttgtcacgtttcctgcacctgatgcccaggtctggagccccagttgctgttgtaccagatggcccaggagttattaatgagagactgtgtgtgtgttcctgtgctggatctgtgtgctgtgatcatcattttggggctttccttggggaagtaacaaatggcatccctgcccaggagtcctctggcagggaccatctcataaatcagtgtgaaaggctcctagtccctgtggagtcatcccacagccccacagctaagtgacccaaagactctgtggctgccatggcttcacttcctaccactgcctccccagatgtctgggcctcttgggtactggactgccttgactgtcagcagccccaggccccagtcctggttctaccattaaccagtggcctgaccttggaggagtctccttttctctctaggccccaactttctcatctgtaaagtggaagaagggaaggaccactacatgatctctgtaatgcagaacggtgacagtgagagctgcctcacatgagggtgatacctgcccctgagaagtgtagtatctgggatccataatcagtgcaaacttccagcccagagaaaagaccacaggcctgagagtccagggcagcatggaccacctgttttggaatcactttcttaaaaatccagatttgtgggccccactgtggatctgctgactcgggatctctgtggatgatgactgcattttcattgcattgccccagtaattcttgtgcattgtaatgtttgagaacctttggcctaagggcaagtactgcatctccagtgcccttgcttctggggaggga

SEQ ID NO: 52959 - DNA, 1011 bp, Homo sapiens
acctatgaatgaaattctgtgactgatggatgaagggtttctggggccaggggtagtttgtccataaggacttggctactgaagacaccagttgtatcattttgcttgtgcttgtgtttcttttctttcttttttcttttttctttctgagacagagtctagctctgtcccccaggctggagtgcagtggcgcgatctcggctcactgcaacctccacctccagggtcaagtgattctcctgcctcagcttctcaagtagctgggattataggtgcataccaccacacccgggtaatttttgtatttttactagagacagggtttcaccatgttgtccaggctggtctcaaactgccgacctcaagtgatccacctaccttggcctcccaaagtcctgggattacaggcgtgagccactgcgcccggcctgtgcttgtgtttcaagctatcctgacacagggccatagaaataggagtggatctcttgggaatatctctgctgattgccgtcatttcattagaaacacaattatttcgtaaggctgggctaacggtgttggaaatagccaagtgcagcgctggagtgacagggaccacatcccatttgatactaattggtttgatgatggtaattgttgtattgcagacagttgtgactatctcctaatttaatataatcaataaggtaacaacagctcaatgcaaatgagatgtggggacccatggggccatttgtaagttatgttcttaatgcattttcctaattagctgtagcagattcccccctcccccaccttctctggagtgtgagagaagtgatcatctgagatgccatgcttcgctttctccaaactttcactttcagagaggctcagggagagctcatcctggagctcccaggaaccccaaaggctttcttaggaccagctgaaatggagtcagggagtcaacagttcaataggatacttcccttcagattcatgacaccccccagcttgaacctatgtagt

SEQ ID NO: 52960 - DNA, 1149 bp, Homo sapiens
ctgggattacaggcatgtgccaccatgcctggctaattttgtatttttaatagagatggggtttcaccatgttggccaggctggtctcgaactcctgacctcaagtgatctgccctctttggcctcccaaagtgctgggattacaggtgtgagccaccgcaccccacccattgtgctagacttttacacgactgtggcagcgcagtaggtttgcttacaccagtcctaccataaaggcatgagtaacctgttgtgctatgacatttccactgcttgatgttatgacagctaccgtgtcactagtgataggacattttcaggtccattataggcttatgggatcactgtttgtgtatgtggtccgtggatgaccgaagcgctgttatgtgacacagggctgtatttacatggcttgcttcgccttctggcaggtcactccttaaatgtcaccttatcagggggaactttctgacctccttgtctaaaacagcaacccacgctctgttctctctgctttatttttattcatagctcttacatatttatatgtagtggtttacaactttctggtcggtctctgcctgtagactgtatcacaagaacagggactatgttttgcttatggtggaatctcgagcacccaaaacagcacccagggtatgggaggcacccaggaaatattgagtcaaggaagggatatctccatgacaggcatagggtaagtgctcaataaatggcaactggggtaaagccatgtgagcaaatgaacagacaccatcgcaaaggagaagctatgaggaagctcctctgcaaaggctgcctctgcacaggaaagcccaaggcatctggttttctgcccttctctcctcgcttgcctcctttgcaatcgttgagagaactgtaaagctgccagtgatcttggacaaggcttcctcctacaccacggggtaggtatgccagtcttgggggttgtagagtggtagtgcggaggtttctgaagaatgaggttcctggccctgagcagcgaggagaagcggtcttagggtcctcctgccaggcttctggattctgtctaaagtgtctccaaaactggtgtgtgcttgtgtgtgactgtgggggagtgtgatgagtcaccatgcggatgctggg

SEQ ID NO: 52961 - DNA, 1194 bp, Homo sapiens
aaccaggcgtggtggtacacgcctgtagtcccagctactggggagactgaggcaggaggatcacttgaaccctggaggtggaggctacagtgagctgagattgcatcactgtaatccagcctgggtgacagagtgagacaccgtctcaaaagaaaaaaaaagcaccttgtgtgtagtgtgaagggtgggtgtgagggtgtgctggtgaatgtctaacaatggtcacttcagaaaaaaagccttttggccaattgctgtggtgtaaaatactcccactgtgactgttctcgaggtatcaatgtgatgttgctgaacacagagttgggatgagatgctaatggtctgatctcctgagctggcacaagctggcttcagcacaccgctggttggagtggagcagggaggccttatctatttccctagagtgagagagtgagggagctcttctctcattccctgtctcctctcccagcagcgaccataagccctgcacagagttagcactgaggccagaaatattctggaaggacaaacagtggagaagagccctcaggaacgtcctatgccatttcctgatgggatccctgagaactggctctcgggaggaagtcagaggcaggaaagggtgtccatgtgatcagatttcagggctgaggacgggaggagggcatgctgggatgggaagctgatgagctgatgataataattatgacaattatgcaaaatacacaaataataattacagaaaatcatgattattatttgtgggtgtgagatgtctccagctttttggaactgcacagaaatgttggatgcctcttttcttgtgggtgtgtgagtgtcacattcaagcttgggctgtctggcaggagctggggtttccatccctctccagacagctgtctcctgccctgggtcttggtgggatccaaccttcttcacacagtgccaggcctgagtgagctagatcaagttcaggaaaggcagggcctcctacttctagttcccacctcagaacctcactgaggacacagccatgggagggctgaacagggataaggcaatgattaacctagaagaataattcagaggctcgggagccatgtgtctccctgatgagctggtctcatgattcatggctgattagatatctgacccaaatagtgtcaattagactctcttttctggaaatat

SEQ ID NO: 52962 - DNA, 1525 bp, Homo sapiens
ctgagccaccacgcctggcctgaaatacaatctttttttttttttttttttttgaaacagagtttcactcttgtcacccaggctggagtgcaatggcgcgatcttggctcactgcaacctccgccttccaggttcaagcgattctcccacctcagcctcctgagtagctggaattacaggtgcccaccaccatgtctggccaatgttttgtatttttagtagagacggggtttcactatgctggccaggctggtctcgaactcctgacctcgtgatctccctgcctcggcttcccaaagtgctgggattacaggtgtgagccactgtgcctggcctgaaatataatctttagctatagagcagtcccctagtagagttgtttatgagattttttttttcctttagggtcaaacaactgttctgccgagagtaagttgggacttttgtttttctttctttaggactattagaagacacattagtgcagaagcttccaggctgtagagccctgcttcccttctctgacctcacaaagataaacatccttcacctgagttcgtggccatccacctctgctctcccagacccagtgcctgtgactttgagtagtttgttctaaatgtggtgacaaacaagtcatttctgtaagacattgggtcttactttatgtcatttttagtaacagaactgcaggaagatgaagacaatgttgtaatcccagcaagttgctaactgtgcgtttctcccttcttagaatgaatgtctcccccaaaactggctggcaccagcttcatctgtgatacccttcaagaaatgttctctggttttgttttatgctgaaagtagaacacaagtcacatttcagatggaggctgtaaatatctggcattttcttatattgttttatgttttcttgtttttctcttgttgtttttatcttattttctttggggtttttttgtaatgcctttgtacagctcatactttcctgctgacatatctgatcatctctttcatgcagttgccaatattcataactgaaaataatctggtttatcataagtaaaatgggaaacttgcctctgttttttgcaaggggaggtaaagagtgtttagtaattacctatcttaaatctttctgagttggtagtagattcatgttcaaggaacaggaaaaatggaaaaacataagtttaaatcagttctttttaaataactttttattcttttgtataaataaaatttcacaggcttcaaattctcatgctttacttttaaacccgagattgttttttcacttatttattcatatcatgccttatggaaatttctttttctgtattttctctctttgctggtattcacctgattaaatattgctctaaaaatcaccatggcatatggaaagtctcaaaattataccaaaagtgataacttatgtcgttcttaagtggagtgaaaggatagcatcagtgagagccagtgttgcccaccaggtctccctttcttggagggcttgttgggg

SEQ ID NO: 52963 - DNA, 1005 bp, Homo sapiens
cattggtgcaccatgtttttttgcagtacataatgagataggaatgacgtcagtggacagagaggccaggtgtcacccagagagggtttcagcattcactctgcctggggtttgtatgatcatgctggggattgttaactcagataattggaaattatgcagcttgacctaaagagtataatgtccggtttctagagtaaggagttttgctggcctcaagccttccaggagaaatggagaccctatacatacctgtttccatgcctcctagaagttccgaagccagggtaagagttctcattctagaaactgtacattcgttctactcctcctggaagactgcgtgctgagcaggtgaaagggggcaatgcaagggatgggtggcattccctgttctccagtttgcttctggatttggtttacaaatctgtagggtattccttcatgcacccaaggtattaaacttgttagcttcatggatatgacagtgcctgggggtaatgtaggattaactctacctgatttgaacctccttgattggcgtcagctggttcttcaattattttaagagtttttcttgttgatggtaatggtgttttctagactgcagaaatagtatttccttcaaataatgactgaggactgctgcttaacatttttctgcaaaccagaagtcaccatcctaatcgcataactgtagtaagaattagcaaaaattgtatatctacctcttcatatatttttgaaaggctataggttatttgaccaactgtagtaagactggtgctagcttatcacgaataacagagaaatatattcttaaaaatttttttaattgtcaagataattaaatgtcatgctctgtattgcttttattaaatttactccagtgtcatttttttttaattttttatttttttcagacagtcttgctctgtcacccaggctggagtgcagtggcacgatctcagcccctgcagcctctgcttcctgggttcaaacgat

SEQ ID NO: 52964 - DNA, 1032 bp, Homo sapiens
gatgtgggtagatcacctgaggtcaggagttcaagaccagcctgaccaacatggcaaaaccccgtctctactaaaaatacaaaaatttgccaggtatggtggtgggcacctgtaatcctggctacttgggaggctgaggcaggagaatcgcttcaacccaaggggcagaggttgcaatgagctgagattctgccattgcactccagcgtaggcgacagagcaagactccgtctcaataaataaataaataagtaaataaataaataaatttaaaaaatgaacatgtgaagcaactaaatctcatgtctcacagtgggacatgtaccatatattggaaaacgttgctttctgtgttcagcataaaggtcgtttgggccagtctgagtgacatggaagcttcctgcatggaacatgagtcctggggcatccccagcttgagccatagacatagcttggtgctcataatgagtttcttctgtgttttagaaactccaatagcaaaaatgatcgaaggaaccggaagtttaaggaagctgagcggctcttcagtaaatcctcggttacctcagcagctgtaagtagtggtggtgggggaatctttctttggcctgttgttggggaatgtgttttttctttaccttcctctgggagtgctcttctgaggtctgtggtcacttttctagtaactggtggcttttcttttaggcagtaagtgcattggcaggagttcaggaccagctcattgaaaagagtaagttgatgtttttatgtttctcatcagtttatttttaagctaccatcacccttacacttaattcatccaattgtgtatctgaggactgcatttcttatgctcttcccttttccctcttcttcctggaagttttgaaacttttagggtatccttaatcatgtttttctccactccccgacccagacaaggtctcactatagcccaagctggagtacagtggcatgatcatagttcgctgcagcctcaaactcctaggctcaagcagtcctcctgcctcg

SEQ ID NO: 52965 - DNA, 1050 bp, Homo sapiens
tttatttctaggtattgaattttttttttaactatggaagtaggatttaaaaacttactattatattttcacttttggcatgagagaaagctagtttctttctttacatatcttgtacctgactacttaactcttagttctattttctgtatattcttccctgtaagtttgcccatagttacctttgttctgaaaaggagggaattatttttccttctcctttctggactaaatagtctcttgtttttagggctgtggacctggacttgtgctattagggctatagttgaatagcagcatgggatatcatctttgtggccttgcgagggaacataaccaccagacataatcttatttctgtgggaaatgttgttctaaatgccaaagtccaaattacaagactttttgcatgcacttcgttcaaaaagaacaagatttgggctgcctttagattgtgcactgcgtttaaattacagaatctgtttgaattttaggagcgtgaggatcatccccggagaggacgggaggatcggcagcacagggaaccatcagaacaggaacacaggagagctaggaacagtgaccgggacagacaccggggccattcccaccaaaggagaacgtctaacgagaggcctgggagtgggcagggtcagggacgggatcgagacactcagaacctgcaggctcaggaagaagagcgggagttttataatgccaggcgacgggagcatcgccagaggaatgacgttggtggtggcggcagtgagtctcaggagttggttcctcggcctggtggcaacaacaaagaaaaagaggtgcccgctaaagaaaaaccaagctttgaactttctggggcacttcttgaggacaccaacactttccggggtgtagtcattaaatatagtgagcccccagaagcacgtatccccaaaaaacggtggcgtctctacccatttaaaaatgatgaggtgcttccagtcatgtacatacatcgacagagtgcgtacctactgggtcgacaccgccgcattgcagacattccaattg

SEQ ID NO: 52966 - DNA, 3171 bp, Homo sapiens
gttttaatggtttaaatagtcttagttggttcatcctgtggaactacacatgtattcctttgatcctagtactgatctctgggcttaatgtacattggtttaaaaatacattaatgaaatgactcaaatttgggtgttttcaataccttcccttagtcctgagaagaggactgtttaagagcaagatatgagttcagaaattccatttttcattttctgattctatttatttcccccatttccaccccttaatagcttctaccctcctcatctttggaagttgtcccagaagcagcccagaacaatccaggggaggaagtcacagaaactgcaggtgaagggtcagaatccatcattaaggaagaaacagaagagaacagtcactgtgatgctaacacagagatgcagcagattctcacacgagttcggcagaactttggtaaaatcaacgtggtgcctcagttttctggggatgacctggttcctgtggaggtgtcagatcttgaggaagagcttgagagcttttctgatgaagaggaggaggaacaggagcaacaaagagatgatgcggaagagtcttcctcggagcctgaggaggaaaatgtgggaaacgacaccaaagccgttattaaagcactggatgagaagattgccaaatatcagaagtttctagacaaagccaaagccaaaaagttttcagcagtcaggtaatattttcatcttctcacaaattgcagattttcattcctttcccaaaaatttgccatgagtaccagagccatatttttacatggggttattgccatttgtttgttcggttgggttttttgtttgtttgttttttgagacggcgtctcgctatgttgcctagactggcctcactctcctgggttcaagcaatgctgtcatctcagcctcctaagtagctgtgactacaggtgtgcaccaccacacttggctgttattgccatttttaaaaagtgaactgtaaattttgtaaaattcagctgcctgcagtatgagaagctttagaaacacccagggaggtacaaacatgttggatgttgacttcttccactggtgataactacttggataggagtggggtttctttagtctgtgagtttgtcgcaggtctccaggtcagtatgtgattcgggcgagtgagaggaggaatgttactttgcttttctgtttcagaatatccaagggactgagtgaaaagatatttgcaaaacctgaagaacaaagaaaaacactggaagaagatgtagatgacagaggtgaagttaaattatttcaatcatttagatgtaatttgcatatttagagttttgagaaacctaagttcagtctccaaattatctcagtcatccacataaatgtttgtcatatctggcagattactttaaatttacatagtgttatgcaaattgaattatctgcttttcattctgcacattttttaggattaaattggcaattcaggaaacttcctagaaagggttcattattaacctagaatccaagggtgggtccacagacaaagaggggggtgtgtttcctgcatttatccattcctccatttgaccatcagctttcacactgagagcatggcttagggcatccttttacctggcagcctccccttggcctgctttactcaccactgtgctcacctgctctgtccacattgggtgtcctcctcctgatacatcaagcttgttcccaccgttgggtttatagacaaattttcaatagaaaattcctgtttgtgtattgtttgtatccagcaccttccaaaaagggaaagaagcggaaggcacaaagggaagaggaacaggaacattcaaataaagctcccagggcgcttacatcaaaagaagtaagtgtcataggttttaagtatggcccaagtagagtaactagaactccagttgtcaagacccactgaaacaaatggtccagagctgaatcccaagaaccccagtcctcgttgacctagttgaggtcagataaatagggtcgggtctggcccactagatgcaggtccttgagtccatgtcatacgttttaggagtttctaatcaacgtctccacacgagtggactatcctctagaggagtcagtttctagtcccaagggaaacgacccaatgagcagatctgctttgggcagatcactgacttctgtgaaggacagctttggagctgagctgttcagagctagagtgggccctctggggaggggagtggttagcagcactcagccttgctgcaggggacttgtcaggagtgatgcagaacagattcttgcactggctaagggttggatcacatgtggatttgtaacttggagttgcataagtcacaatggaagagtaaccttaggtctacgggggagccctccctcattagcactgcttccagtagctgtggaagcagcacgggaaatagaacacagagatgagaagcagagactcctgttttgtgaatgactttcagggttttgttgttttttttcttcatcttttcttgccattttttacagcggaggcgagcagtacgacagcaacggccgaaaaaagttggtgtgcgctactatgaaacacacaacgtgaaaaataggaacaggaacaaaaagaagaccaatgactcagagggacagaaacacaaacgcaaaaaattcagacaaaagcagtaatgtttaaaaggtttttattaaattatacaaaaacaggcagttagaaattgtgttttcttcctgccccattgacatttctaaggccctaatgcatttgttctgaggtttgacagttgaagcccttcaccagtgctagggaaataaagcctcctcaaccttaaggatttcagtgataagagtctgaaagtctagcacttcaggtagactttggatgaactaagaggttccacagtcaccctgtcatataactgtctgacagaaataggggatgaggtctataaaatggaaagggtggtatttcgtttttattggtaatgaatgatttggaatagaagcatacagaactgcaaatttcaaggacgttagtgtacatggcctggcctttgaaatacaaggagaaagttgggtgcagaagaaataggagaaaactacaataatttctgcctcattgagtctgtgaagtagacc

SEQ ID NO: 52967 - DNA, 1048 bp, Homo sapiens
aaacaaaaaccttatgattctaatgtcagagatcttgcctataggaacaatgggggtgcatatcaattcttacatagtcttatgacccaaatgtcagaaatcctatctatagggacagtggggatgcaaatggtcagtacctagtgttcaggaacttttagcaacaaggatatgggccaaagtgccccctaattagtgcttaattataattgtatttctgtccagaacttggcagatacttcttgtcaaccctttggaggcagtttcactctcatatgccttactctgtgattctgtttttcttttttggttaagagcagaaaccccttcagaaactgaaagccaaaaattgcccttcctagaaaaatgtatgtataaattttgtgtgtggtttcctgaattttatagttctgtacttatttagtgatttgcccggccactcttgactttagaacatcacttttaagttctctgagtttttgttgcaaggataaaatgatattatacatgtgaaacaccagtagaaagcttggcacatacttatctttgcggttacctaaaacaggccagtcatttcagggtccccagacttagttctctaatgaactctcttcaatcacagaattccccctccttaccttatactcttgcttcaggatgcctcctatcttagtctgttttgtgatgatgcaacagaatactacagattgggtaattataatgaacagaaattgttttggctcatgtttctggaggctgggaagtccagtatcaaggcaccagcatctgacaagggtcatcccatcgtggaaagtgggaggacaagagcaagcaagagagggtcaaacttgcttttataacaaactcactctttttttttttttttttgagacggagtcttgctctgttgcccaggctggagtgcagtggcacgatctcggctcattgcaacctctgcttcctgggttcaagtgattctcctgcctcagcctcctgagtagctgggactacaggcatatgccaccaggcccagctaatttttgtattt

SEQ ID NO: 52968 - DNA, 1071 bp, Homo sapiens
gtgattcatatttagatctgttttaaattatcactccagccttttattttgataaacaaaactaacccaagaatatttgatgcctgggttaagaagcctcaaacttaaggtaggttctgaaagttgggggtcatatcctagaacacatagtggggaacagcatggttttgcttaaaggcaatgaggtcaagcagtactaagctctcaagagtacttctaaaactcaggaaaggttcaccgggtataattgcacaatacgagatggaaatcctgtctctgtgttgtttttagactcttagctgatggaaactatagtttacacttagtggaagtatcttgtgcacggcacagatgagagagttagtagcttaattacttagcgcgttgcttttctttgactcaccccttcctcctttccagcttcatacatgagcatcaggggtttgtgaaattagactcttagtgtttgatacaggacatctctgacttttttctgacttcaggtctggcagtatattactttgatgcgtcggatattcctgattgactgtccaggtgtggtttacccctctgaggactccgagacagacattgtgctaaaaggagttgtgagtatttggccctgataggctgtttgtgtttgcgggggagtgttctatagggaaccctggatacctttcctttttacttattaagaaggcagtttggggtcagcctgtctgaccaaactttaggaacatgatgctgaacagcagcctctcagcataagctgtttgaggaattagtggaaccatgggcatatctggtcaatatcatcccacaaaagagtttgtagtttacacacaggatccaaagggaagcagggcctgtttatgcttagcgataattcgtcttcgtgggtttatgggttgagtcattttggaacccagtcatttcctcacttgtttctgaatacgactgaaaaactgtaaatggttccacttaaccttgaccatgcttctggctatacatcctgtacacattcctcctctcctttcttaaactattccattatttttgtgtcctgggatg

SEQ ID NO: 52969 - DNA, 1991 bp, Homo sapiens
gcctcaacctcctgggctcaaggagttctcccaccccagtctccccagtagctgggattacaggcatgcaccactatgcccagctaatttttgtattttttgtggagatggggttttgccatgttgcccaggctggtctcgaactcctgggctcaagcagtctgccctccttggcctcccaaagtgctggaattacaggtgtgagccactgagccagctggaatttccttcttttttaaagttgaatgctatcttgtgtatatatgtgccacattgtgtttatccatttatttgttgacagacatttgggcacactttttaaattcagtttgtttctggtccatctccaactgggtttgatactgttttttttggtacattgactttaccctaaagcatccttttagtcttgatggtgcttcagttgctcatttggggtgctttcttatttagaaatgaagctcaagaagagatctataaaaagggacagtccaaaagaatatggggtgagctctacaaggtaagactcctaaattctctcccattgagtggttccttgggctttcatgattttgtagaagaaaactaattttgatatattgaagctctgttgcgcagagtacaggcaccactgcctgttccatcctcttcctcctacaaagaaactcggaaggcgtactaccattgatctaggtaactgcattttttaaagtacttgtataagagtaacagctatcttttattatacaatcacatatttattacctgtcagtattttttaagatttcctgccaaatttatcatgcctagttaaagtcacatgcaacattttaagttatttagtccacccctctccttttatcgatgaggactcctgtctagaaaggtttaatgctgtacctagctcgactagcttgttagtgaaggaggctttgtatatcttgatttctgatccagtgatctttaaccggcagaggtttatgtccatgcactaataataaccttcagaagaaaaattttcaagtataatcacgtaattaaatagtaacatgataggaaactagtaccgtgaaggcaagctaaactttgtagttttttgtgaaatacacaaaacctataatattacaaacttaaagataatattacaaacttaaagaagtctaagaagtaaatgatttagttcaataatccatagtagttaggaaataagttgagtttcatctaagctagtttttctgttttaaattcagcaggtttcaaaagccacaggatgaaaaaccttttgaattctgatcactgggccttgagattagccacaacgaactctgcccagagactgttttgaagttgtctctaaatattattattttatttttcccagactcccttaaatgtcatccctcttttatttgtactgtagcaaaccatttttgcctttctgaattttcaggtgatagattcatcagatgttgtagttcaagttcttgatgctagagatccaatgggtactcgttcccctcacattgaaacttacctgaagaaggaaaaaccttggaaacacctcatttttgtacttaacaaatgtgaccttgttccaacctgggcaacagtaagtacaactactaaaccagaatagactattaagacatctgttagtaagtcagttgtagggcttttaggctaaagtgttgtccggctgagattgtagtaatgggagtgctctcattggaaacacgaaagtgtgctcattgatagtgggcagaggcaccaggagacggcttctgaggccactgcctgcttcacattatgctccattaattgcatttagtaacaatgaagacattttttggaatattgttttgtatttataagacagaagaacaaagcattaactgttatacttggaaaaaacatttcaaagaattatagctaacattttccttagacaacagtatatttgaaacagttctgtaattcaagctctgattctt

SEQ ID NO: 52970 - DNA, 1473 bp, Homo sapiens
ggaggagcttgtactagggggaaaagggtgatttttttttttttaattgtctgcaggctgttaacattccgttatgtgatagatcccaactcttttatcttgcttcagaaattcctatgcctgtaactcctttacaggcacatcaagttctagttagtatcaggttccttttatcacatctaaactattattttggacttttgctagatgtttttcatccgaagacttgccatgtgcatttaataaaaacgttacctaaattagggaaaatgttatctgaaactaaaatgcatcttacaaaacaagcaattccttttagccatgaaagaaattaacttccaagaaaaagttggcatttacagttggtttaaaaaaaactcacaaatttgagtatgattgtccttgacaaaatctatgaatttggcgaattttatgctcttgtttgaaagctataaaaaatggtggaaaagattaattttcaccactgtagccttaattacatttgactgaaatttatgataaatgaaataaagcagagtttttggcaagtttttgtacaactattcatatttactttgattatttgtattacttttgtatttctccaaggaagcttacagaacttcagaataagggaaccagtgtttgtgccatttcaacaagtaattctgatttgaaaccagactgaaaccatgtcttacagatttgggtatgggttgaaccttggaaaaataaaatcagaaagtctttcctaggtgggtgttgagctttttgctttttctcagtgcttttcttagttttacctgttattctcctttctcttcagaacttgaaggtgcacattcttgatactgaaagttttgaaactacatttggccctaagtcacagaggaaacgaccaaacttatttgcaagtgatatgcagtctcttatcgaaaatgctgaaatgtccactgagagctatgaccagggcaaggatcgtgatttggtaactgaagacactggtgtgaggtacatttttttttttgcttctttgtttttgtttttttttttttgagatggagtcttgctttgtcgcccaggctggaatgcagtggtgcgatcttggcccactgcaacctccgcttcccaggttcaagcaattctcctgcctcagccttttgagtagctgggactacaggtggatgcctccatgcctggctaattttttgtattttagtagagacaaggtttcaccgtgttgcccaggctagtcttgaactcgtgagctcaggcaatccacactccttggcctcccaaaatgctaggattacaggtgtgagccactgcacccggtcgaggtacagttttgaagttcatgcaaatctcatcatttgctcttctgcaacaaaacattttctttcaacttattttgcctgtgtgaagctcagtgctttaactcatatatggagttatcttcttccctcagactgg

SEQ ID NO: 52971 - DNA, 5103 bp, Homo sapiens
atggtgccttgcatggagcaggcactcaatatttgttaaactgagacacagaggtaggtatcttcgtggttaagaccatagatggtgatcaaatgctcatgtacaaattctggctctgccatttagtaacggtttgaccttgggcaaggtgtctgaccactgtgcctcagtttctcactccgcagcatggggataatatatctataggattattgtatagattaaatcagatgatgcctataatttggataacacagtgccatcataagtgctcaaaaatattagctattcttctcaaatacaatcctatcgaagatcaaagattgggtcagctttgtcataccatgtagcttcaagtactaattattggagcaacatatggagaaagtagagatttttgtggttggtggcttcttacctaatttgggtgaactacttgttgcattttaagcaatgacttgttggttatactggttggttatcaaatagtgcactgtgtacttctgccttttgtagatcgagtgcagggagcaggaggccaaaacatgagggaccgggccaccatccggcgcctgaatatgtataggcaaaaggagcgcaggtgagcactgggtgctgtcatcctttctcttttccttcatgcccttgactgctagctgagactgatgaagcctttgctgttctcacccccacttcctccaaataggagttatatattctcaaatataattgtacgtgagtgtcgttaggataaagtgttaacttttggttaaggacatgggtagctggcggtgaaatagtgatggtttcacaatactcaaaagtagaggtcttgtttctcacagccctgacctccacaaatggcgcattaaatctcagagttaaatatggccagatataacaaaacctacaggactgtagttaggaaagccaccagaaaatgtgttttttaatgccaaaatgtagatcatgacattgtggcacttggacagtcatcaaaactccgagttctgctgaggtagcctctaccacagggatttgctgagtgtggcattccgctaactggtcttaatttgtttggtaattagattctccatctccgtctgtcctaaaagatgtgactaaaatacaaatgtcaaagaacttaatatgtgtagtcatctactttgcagtttgttttagaatttggaattccggcgtaaatcaccctctacgtgaaaaattcatttaaaccagcctttgaataattacccaaaaaactcaagtatgtatgtgttttttttttaaagtaaacagtaaccagattttttagaacgtcaccattagttgttattcatctagcagaaatcattacgtgctctgttgcaagaggttaaatggcttttgggcaatctgtttcaaatgtagaagtactttgtgtttactggaattggtatttcatgatcatttaaaaccaaagtaagaagtccttttgatggaaaatatattctgtaaatcaaacttcgctgttgccatttttctgttgtcaaccaatatctgttctttcctcaatttaggaacagtcgtggtaaaataattaaacccctgcaatatcaatcaacggtggcttctggcacagtggcaagagtagagccaaatattaaatggtttggtgagtattatcccctgttactttgctctacaaaatatatgctgagtggaaacggctaggatgtttaaatgtctaaacagcaggagtttttggtgagtgaaaccggcaaggattatctgagaaagggataagaagaattactgggaaaagtagtggtggtcaatttaataaataacttctttttgaagagcgctcaccattagtaattgtaattgaaccctcttaagcagataagaccatccttaatgactagcattcacagaccttagaatgctcatcttaatcttttctgctttcctaaagagatactgttggagaggtggccttgtaggttttgtgcatatatccttcagggtaagtgcattagcccgaagttcctctgaaatacttcttaatggggtttttatttgaacttgggtgacaattaaagggtctcactgttgaactgtccaacagtgaatagagtatcttcagtctcagggtgatcacagcttcttccttggaaaactccctgtctcatttcagtctgggctcttaactttgcccttagccactggtaaatgtatgggcactttagatgatcagaccccagtgtttgcttggtgtttgacctctgtccttgggggcaggtggcagctatctttgagtctcttatactttcagtgggatacttcctaagaactgcaacacagaaaggtgtcaaaactctgcagagaagcatttagcatggctgctgggtactgtgactcgattagactgcctgggtttgaattctagttctgtcatttatgtgccagtgggcaagttattaagtctgtctgttcatcagttttctcatccctaacatgagaataagatgaaacctatctcataagactgtcatggtaatcaaatgagtaaatacaggcagggcgcagtggctcacgcctgtaatcccagcactttgggaggccaaggctggtgaatcacttgaggtcaggcattcgagaccagcctggccaacacagtgaaacccccatctctactaaatatacaaaaattagccaggtgttgtggtgggcacctgtaatcccagctacttgggaggctggggcaggagaatcccttgagcccaggaggcagaggttgcagtgagctgagattgtgccactgcactccagcctgggtgacagagtgagactccatctcaaaaaaaaaaaaaaaaaaagagtaaatatatataaagtgcttagaatagcgcctagcaaatagtgagtataatataagcattacttgctaccgtcattaccaccttgctgttttgcatttatgccgcagcatgctgtttaattgaatgcttttcagggtctccctcacaagatgttttccaggtggtggtgcagggctctatcttgttcccttgcatggactcattggttaatagtccctttgaatcctcataaccctaaaagtggctaactatgactcaaatttcagtgtttcaagattctctgtctatactgactgatcagctgtgattggctccaggtttctctgctagatctagcaggtagtaggacatttgacagatctcagttccattccacgctatttatttctcagtttcatttagttaggaaactggacttggaaaactattgaaaccctttgtgggtctggatttgtggaatagttcatagtgtgcaagtgcgggagaggcagttttttggttttttcctcttttaagtttgaaaacagctccaagggatggatggatcaggtgcttgggtaagtgagggtaatttaaaatcttgcctttcaccgtgtcagtggaagatggatgcgcaaatattaactaagtggcaacattctttatttgtaaaacaggaaacacacgtgtgattaagcagtcatcattacaaaaatttcaagaggaaatggatacagttatgaaggatccatacaaagttgtcatgaagcaaagcaagttaccaatgtctcttctccatgatcgaatccggcctcatgtaagatgtaggatatccctggtgatggaatttcctgggcaaactccatgcagatccctctctaacatatttgtcttttgtttttccttagaaaatagtgactttaatgtagcaatgatgaactttctaagacctctcttttcaccttttcatgtttagtatgaggtgcagtagtgtagtggatcaaagcacaggttttggagttgagacctgaattttaatccttgctctatcccttcctgtgcccttagttgggtttctccatgaactttaacttctttgccttgaaagtatagataggtcggacacagtggctcacgcctgtaatcccagcacttgggaggctcaggcaggcggatcacctgaggtcaggagtttgagaccaacctgaccaacaagaagaaaccctgtctctactaaaaatacaaaattagccaggcgtggtggtgcatacctgtaatctcagctactcaggagaggctgaggcaggagaatcgcttgaacctgggaggcagagattgcagtgagccaagatcgtgccattgcactccagcctgggcaacaggagcgaaactccgtctaaaaaaaacagaaagtatagataaccgacctccttgggttattggctacagatgaagcatctgtaaagcacttggcccatagtgagcacatagcacaccacctaataagagctaaattgataacagctattagtaatattatttattttggtaggcaaacttgttttaagtggtaattccatcaaactttgggacagcgtagaattaggattgagttggtagaactttggtgttgcgtacgttcagcttttgtgagatccttgagattttttctcagctgaaggaaggggtgctggtcacattggttgtcaattgctaaaatttgaagtgcagtaaggattcaatctgggttgagtggaatgagtttcacacagaacaaagaaagaatctgttgtttgtctgcttatttttacttgcattgaataataaattcccagaaatgtagccagtacgtaagcttcagttccagtatgaggaggggagaaaaacattgacatgcatacgtgggttaaatagttcaggctgggcgcggtggctcacgcctgaatcccagcactttgggaagccaaggcgggtggatcacaaggtcaggagattgagaccatcctggctaacacgtgaaatcccgtctctactaaaaatacaaaaaaaaattagccgggcgtggtggcgggcacctgtagtcccagctactcaggaggctgaggcaggagaatgatatgaacccgggaggcagagcttgcagtgagccgagattgcgccactgcgtgccagcccaggcgacagagcaagactccgtctcaaataaataaataaaaataaaatagttcaaagaaaactgtttacttgcagaacaaaataaaaa

SEQ ID NO: 52972 - DNA, 1061 bp, Homo sapiens
tattgaatgtttccttcttcctggaagagtaaggaagctatgcgtatctggagaccacgggtaccacagttgaagactgacattctgaaccctgatgtttctaaagaaacgtcagtatttcagtctgacatatttgaaacatcagtgccttgaaccttaggactgggtcttggggaggattagcgcctagatgtctgattttggagctgcagcatgccaggccgtggctgagagtatgtgagccatgccttgcccttttctgaggctcagggaagtggatggagctagagagacaacaggaaagacggtgctgaagaacatagtgtctttcctctattgtggacctaaagaggtggggaagcaaggacaagaggcaaagagccacactgcccttggcatcatccaaagcattgtctggttgacaccaggtcctggttttgtgtcttttgtcaatacctgaatccttgacaaaagaaaaagtggttttgatgatttaaagaaataagggtgattttgacagaaaatatattttaaaaattttgaccaattgcaatagttatcctcaagccaatttccagaacctgccaccagggggaggtggtgcagcatgaatcattctgaatgctttgtctttgaagtgttcccctattgctgttaccatctcagaggaagtaactgggcatggtgagactcctaaaatgacaggagtttttttggccaaagctggcatctgacttgccacattcctctgagtctggagtagccgcaggggtgggagaatgccagcccagagtcagtccatcggggttacatttccaaggtctgctgccttcatctatgtaatggccgtgttactttcagatctttcagcttcccagagtgttgtgggaatcttggtcattgaatgtaaagggacttagtaaagggtatagatatttttcaaaaatgaaaataactttttttcttataagtgataagcttttataaagatcataggaaaactagaaaaaatgtaaaatgtagaaaattgtaaaacaaacttcattagagatattttgata

SEQ ID NO: 52973 - DNA, 1032 bp, Homo sapiens
ccaaagctgggattacaggcaacagcctctgcacccagcccctttcttgattcttgagccacccgtacctccaagacactgtcactaatctccttagaccagtggtctcaattggagatggtttttctatgaggggacatttggcatcatctagaggcattattggttgttatggcttatggagggtataggtatagtttacacctgtcatttagtgggtaggggccaggcatgctcctacacgtcctacaatgtacagggcagcccttcacaacagagaatcatgtagtccaaaatatcagtagtgccaaaattgagaaaccttcctttatacatgtctcatgatattgcctaatgtcagactctttcttgcagagccatcctcctcaaggtgcgagacatggtcagcagccatgtggagcgagtgtttcagatctatgagcaacacgcagacacagttggcattgatgctgtcctgcagccttcagcagtgagcccctctgtggctgacatgttggaatggttgcaggatattgagagacattatcgaaagtcgtatcctttgcacacatttcaggtcacagccagagctgttctaagtctttcaaatttcagttttcacaagattggaaaactaagtagtttgagtcagttctctttggttcctgaacttggattcttcctgcattcctttgtataatccttcctctaataatttatcgagtagctactacctgtcaggcactgttcttggtgcaaagagacaggcattgaaaaaggcaagtagaatgctgaatggcgataagtgttatggagaaaaataaagcagggaaagtgaggagtgagggtggagttgtgatttaaaatagggtggtcagagcaggcttcatgagaaagtgatatttgagcagagatctgaagagggtaagggaaagagctatgtggctatttggggagagaaagttactaggcagaggaaacatcaaatgcaaaggccttgtggtaagaacattcctggtctattcaggaaat

SEQ ID NO: 52974 - DNA, 1290 bp, Homo sapiens
tacagccgacctgacctagtaggcccccagccctccagagcttggggtattgcagagccgccacaaggcctgccgggagtagtagtttgtatagttcgcagccggccagggcggagccgggtgggttggtggggagggcggggaaacaagcctggaccacaactcccaggagtacccgcgacggcggcggcctcgctgtcgcactcaggctatagggggcgcattgggcggaagaccctgggccggcaggaacttgcttgtgattggatgttgtgggacggcggcttctcattcgtcagcctgtgactgtggagtttgaattgggtggcggttgactgtagagccgctctctctcactggcacagcgaggttttgctcagcccttgtctcgggaccgcaggtacgtgcctggcgacttcttcgggtggtccccgtccgccctcctcgtccctacccagtttcttgcttccctgccccatctccgccgctccccgcagcctccgccgagcgccatggctcctaggaagggcagtagtcgggtggccaagaccaactccttacggaggcggaagctcgcctcctttctgaaagacttcgaccgtgaaggtaaggggccaggccgtcgcggcctcctggggcggtcgcgggatgctggcgggtggggacacgagctgcacagattcgcccgcccgtgacccgtgtcctgtcggctctgccctcccgcagtggaaatacgaatcaagcaaattgagtcagacaggcagaacctcctcaaggaggtggataacctctacaacatcgagatcctgcggctccccaaggctctgcgcgagatgaactggcttgactacttcggtaagagctggagagcttccctgggcggaggccaggagccccttggggttaggtgacacccttcagaaagggctcgctcagatgtcaccttttaatgagatctgacatgaccacttatggaaaattgcagaccctttcactctctgtctcacttccctacttcatttttctctatgaaaaatgggggggtggttggggggcggcgggcggggcggtctctgtcggacaactcagctctgctgtttacaggtccaaaacagctgtagtgaatgggcatggatgggctgtattccaataaaattttagttatggatacactgaaatgtgaatttcacataattttcacacatcaggaaatttatttaattttttttaaacagagtctcactctgtcacccaggctggagtgcagtgcagtgcagtggtgcgatccct

SEQ ID NO: 52975 - DNA, 1022 bp, Homo sapiens
tgatcagaatcatttggaatatcagggtttgaaggagtctgaccaccaagggcacatagcagatctccgccagcttcattcagaaggtaaaggtaatgaggagccaattatcaatttggaaaaaattggagcatttgggagagaggtggggattattcacccccctacatacactgagctccaatgttttaaaagagttacctctgagatgaattatgcttactagctaatgcagttctctctttttaaattagaaatacagaactgcaaatgagaacttctaatgtaatatgagagagccattgttaccacaccaagttgagagaattctagccttgactaatatgatttaaaactccagaaaggaacgatagaaaatctataaaagctcttagttgggaagtgtgttggggctcccaagaccacctccaggtttggtgattcactaggaggattcatggggctcagcatacagtcacacccatggcgatgatttattacagtgaaagtatacaaagcattaatcaacaaaggagaaaattgcataggacaaagtccagaggaaaccaggcttctaggagtccactccctgtagagtcaaacagaacatgcttaattcaacacatatgaaatgctgtctaccagaaaatctgattagagagtcaatgcccagagttttaactgggggctgctcacataggcatcctctgcctagcacatgtcaaaatcctagactttcaggagggaagtaggtgttcagcatgagccatattgtttgcataaagtttaggcacagtgaggcatcttgttaaggaaaggtgggaatctttctgaaatcaagttcccagatgccaaccgaggccaggcttgcaaacaggcctttctatgtgtatcagtctcaggcctgctctgttaactgtcctgcacagtagatgcccagtggcctgccaccactgatgactccataaaatgccagttgtttctagagatggcagaaggttggcaggaatgcccctactttc
